United States Patent Application Publication US 2007/0150978 A1 - sequence listing, part 7

SEQ ID NO: 40313 - DNA, 504 bp, Oryza sativa
  unsure (1)..(504): unsure at all n locations
gaactatgaaactcagcttagcataaatggacattataccgggaaaggattcatccctcggnggatatccactcgntccgtgcataccacctatatagttataaaaaatataaaaaaattggtaacacagattaatatgaaatatatcactccacaaacatgcaagtttaaattcaacttcacaagctataacaaaaataacaaatataattgcgaatgtgagataactattttcaatttaatttgttattcttgttgcaacttatagaagttgaatttggtcttgcatgttgtggagtgatatatttcgtattaatctatgttgtcaatttttcaatttttttgataaaattagatgacatgcaaacaacaaggggatgtcctctcgagggatgaaaatccacatccctataaccgtattgttgcattgataaacttctcaatcgtaagttgatgtaattctgactctggcgtaaacaaatgtaattctgactgcatgtagta

SEQ ID NO: 40314 - DNA, 438 bp, Oryza sativa
  unsure (1)..(438): unsure at all n locations
agcttctgataaactgatatttctgctatttcatcactaactcttcgatatatttcttgctgaaagtatccctgatcccactgataacgagtaggcccaaacaattcaattggggtagttgctgacccataccacatagttccggcaactacgaaagctgcaaaaaaaacagcagcgatactactggaaagtacagtttcaatattgcccatacgtaatcctttgtatagacgttgaggtggacggacactaagatggaataggcccgctaatatgcccaatgtacccgcagcaatatgatgagaagctattccccctggaacaaaaggatcanaaccttctgcaccccacgcaggaattacagcttgtacttttccagttagtccataaggatcagacacccatatcccaggaccatacanacccgttacatgaaat

SEQ ID NO: 40315 - DNA, 459 bp, Oryza sativa
  unsure (1)..(459): unsure at all n locations
ntggttggtgaaagtgaaatcaaccaaggatttgtaatatatgtaaaaagaccagggtgatggtgatgccggtggtatggtcacggatgattgtgtcgcgtttacaaatgttgataccaagctcatttctgtgttcagaccatttagagatgtgagtttgattttgtgccgaagcaattacattgctgtcgccaaccttccggctgtctcttctgaatgtgaggtctgctacgatgattttgtcttaagggcagatttcacagctagactgctagtagtaccttcctggagaccggcaggtccactggattatcgattcttgccatagctggatataattaatcaaggcagcgaaggcgtggtggtgaagctcttacaaccctggccaccacctactcaagcagaagttaaagctaataagagagcactgaatttatatggtcaacaaccggacgttca

SEQ ID NO: 40316 - DNA, 351 bp, Oryza sativa
  unsure (1)..(351): unsure at all n locations
agcttattcatcgaaaattaacccataaactttcaactcanaatcttatggaataataaaatgtgaatgaaatgctaaggttttctttttctcgaaaacgcaagagaatgaaatgctaagttgggatttgggaaggaagtagcagaaacaatcaagatagcatcataattatcgggaacttgacaaagatcttgagtcctgagtatttctcctgactacttcaaatgaaatatgctctgacagcccacgattttatactgatctgttactggatggtgccactaacctactacctccgtttcacaatgtaaatcagtctagcacttttctcaaccgctttggaccgaggca

SEQ ID NO: 40317 - DNA, 498 bp, Oryza sativa
  unsure (1)..(498): unsure at all n locations
tgcggtggaagaatacacataatttccagtttattgagattctntcatgtgtaaattaattgtgtagaaaaaattgcggtttatcattggaggagtaactatctctgttgtccagaatgttatgttatttcaaatctccgtgcaactgcatatctttttaaaaaacaaatccaaactaagagcatacccatatacccaatatagctcccaatgcnaaatatttgagcctccaagtaaaaattaggctccaacaatttctctaaacaggtgcctaaaattggatcccccaactccgggtaaatcacttcacaaggtagcgctcccaatctgccgtcccacatattgtttgaattcaattggaagttgttgattgatgaacaattgtattttcctgaaatattgaactcccagatatcagaattgagcagaataacaatggctatctgtgacatgtttgcaccctccttccaccaaacatgaagaattgaaaagtctgtt

SEQ ID NO: 40318 - DNA, 488 bp, Oryza sativa
  unsure (1)..(488): unsure at all n locations
ctaagctactcaagaactacctgaaagtctgaacttcacccttcatctgaagntcttgctggccctgtttcaatgagtgaatacgaatcacatgattccataagtgttttgtgccatttactgtctctgctccaaacactctaccacattttttgcattttgctctacgttgttgctcttccacaccagtaactntgttcttggccctgtcagtgtacttaatgaaatagtcccaaaccttcgaggtacacttcttctgcctctntgctactggttcaacttctcctgtgaattctccatcttcttcatcgggaataacaacaggttctgaacttccacctccaccttcagtggctgtggttgcatcatttagtaccaatgcatttggtgccaatgccgagtgaccagtaccaacagctactgtaccagccggagatgcacctgtgcttgcacacatactagtgtttgcatcaccactagccattcta

SEQ ID NO: 40319 - DNA, 371 bp, Oryza sativa
gcttggcatgttccttaccccctctgaagactgttaccatgaacttctccctgttctcatctttggacttggagtcgtggctcctaagcactcgtggcacctcagaactggtagtggtcttctcagggaccgtggtctcttgcacctcggggtctttcgcaggagaagggtcttcaaatatttctggctctgtaccgtcccattctaatcctgatacttcttctatttctgacccgactgatgccacaaattgcacctctggttctgccactgtaatcttcatgggcacatccggcactggaatcttcatggcttgctcctgcggtgcaatctcctttgctttcctcggcaatgcaatcttcggtagcact

SEQ ID NO: 40320 - DNA, 379 bp, Oryza sativa
  unsure (1)..(379): unsure at all n locations
tggatgtatttgaagtgcatctgcaaggtatcactgcacgaataagattagatgttttgtctaaatccaccacatgtgattattcttatacttgttccataatttatttaaagagctgcagcacggttcttcttatggagaaagatcggctagagcttttgaagaaaatgagaaatcccaaagcagatccgctacagaaaagtgctatcatgaataaagtgagggacaaatgcaaactatcccgttgcccctggtgtggattcataaatggcaagctactttctgatactcctttttatcctcggctcctcgccactntaaatttccttangatggcttactaatggtcacctgactgctgtcaacattttacagaaca

SEQ ID NO: 40321 - DNA, 418 bp, Oryza sativa
agcttcttcgctgcacctcgttgcccgcgtgctctcttctgtccaacggagggttgactaccactatcctcctcctcctgtgtcccctccacatccctttccacgtgcccctgctggttcccctccgcatacctcttcacgttcccttcctcgttcaagtactggcatggatcctcgttcacctcttcttcattccagtactggctgtcttcctccgcgattatatcggacaatatctgttcctcatcgcggacagccatctgttgatacaacaaacatctgctaagacacgagacatttatgttctaagactacaataatgaatcgctacttgtcgcaccaattccgttgtcaatatatacatactaagtctaattacaaataaagcaatctcatattaaaaaacaaatagaattac

SEQ ID NO: 40322 - DNA, 441 bp, Oryza sativa
gctatcacttaccacgtgattttatattacatattattcacagaagaagttataggaactgtacacaaataatatatggaattggcacaccaatactatgattgtattggtaatttctatgaagaggctaattaattctctgaatgtaattttaaattacatgtggggggttatatatattaacatatcaccgaatcttatttcttaaaaatggctaatgtttggatcatcatactacgtacttgtatccccgtatctcgggaacataggcttctcctaagtggaaagcaactcatgcattatgaaaacaactacacaccaaagaaggcagttgatgacaatataaactcttgtgatggaaaataaaataaacacatttgcagcctaaagctaactggttctaggtacttaagaccatataaataacacaccccccccccc

SEQ ID NO: 40323 - DNA, 461 bp, Oryza sativa
gtcacctgcggcatgcaagcttggagaccgagagggcaaccaaaaactgtcgaagtagtctactccaaggaagaaaacatccagtcgtcctgtgccaaagatcaggaagtcttccaggtataactcctataacgatctcccttgcggtgatgcgcgctcggtgcaataataatactgataatcaaacttgcaggaaaccatctgatatagatccttctggaaaagactctgacctggccggcagggaagcggatccctcaaaagaaaccaggccgactgcaaaagatcacctgagtgataatccgcaggcaagcgacaatgtagaacccagcgacgaacccccgactgtgagccagtcggccggagctggagtcggagttcaccaggagcccccgactgaaaccagtcggatacaggccaagccaaaaactcccgaggtgagctatacaacagtctcccga

SEQ ID NO: 40324 - DNA, 494 bp, Oryza sativa
  unsure (1)..(494): unsure at all n locations
ctcagctaccagggtacgctntcggagaacctgcttcaggggctggtgtcgtcctttccgtctagatttactgacatcgataatgctctattaaccaatagctgcctaccgcctaccgagtattggtgactgggttacactgtagttgctagctacaggctccgtggggttaccatagaggtttgtagttaaatggcaagtgaacgatccctgtgaaaatcgttgggatgagacatcatgtgacaaaagaggggtacactgtcgcagtggtaaaagtgcaaggtaacaaggagttgaacaacacgaacacctccagccacaataacaccggtcggtccaaatagtagcactgcaaagtgacagacaaggacgacaacgccaccttgccggtgtggtctagccactacctgctgttgtggcaataatcggcaccatggngatngtagtcataggtgttctgatntaccgccggtggcacaagcctacgacaaggg

SEQ ID NO: 40325 - DNA, 405 bp, Oryza sativa
  unsure (1)..(405): unsure at all n locations
agctcgacgntgcgaaccacttggtctagtattagtgggtacttcttccgggtggaccactcggtctggatgatccaagcgatcgaacttgatcgttgtctccgaccaccgaagatattggggcgtatcgggctgaacagcattaatctctcgttcggtcaatttattgtctcttttggattcataagccagaggtccgccaaagatgcggatgagctccttgcgatggtcttggaagcctgtcggggcatcatcgacatcatccttcttttttgacgtgctttgatctccgtcggaggccttccgtgtattcttggcgtattgctctgcatactgtatgcacacgaagcaatctttggctgcatgattggagttgggatgatgcggacattgagagttcatgat

SEQ ID NO: 40326 - DNA, 436 bp, Oryza sativa
gacgcattaatcaggcttaatatattgtgttcgtggcttgctgacggattctgtcactaatcatttttgctaatgcccaaacaccccatgcgacactctatataatacgcaatgtgatatccaaaatgtgcacccctggatctaaacactccctatatattatttgagcaactacctgtgttccataactatcaaatatgtcatttcaaatggtcaagtaggcgtacagttatttacagctagttgggatagtacgatattggatgaggtagttcttattatgcatgaactacaatccattgataatgtctggaacttactgacaatgatattggacatacctgtatttgaatagatgcccaagcgtttatttgctatttctgttacacacataatcataatagtggaaatactgctagccatgcgttatggaaca

SEQ ID NO: 40327 - DNA, 448 bp, Oryza sativa
  unsure (1)..(448): unsure at all n locations
tcatgtcnttggtatatcctagagtcttaatgtactccaaagttaatgcttccagcgtatattcatagaccatcaatgctcatatagctgattcaccttttgaatgcgctatgcacatagaaaattaacagagttaccgggaacgtgtagatagccataaccacacnaaatgataatctcatggtaacatatcttacagcaaatacacgaaagatcatttagcttgcttgcattatttcagcacatttaaaaaaaattcacgaaataatcggagtttgctttctctaactatgggcattggatttgctatgcattggtagcttggactatctacttagatagtgcttatctaatctagctatgcaagtatgcaaaaacaacatatgatgatgtcacctgtgtttgttgattatctcataatttctttatggcagatccaatgacatgt

SEQ ID NO: 40328 - DNA, 320 bp, Oryza sativa
  unsure (1)..(320): unsure at all n locations
agcttactcggttcttggtctctgcccgagtgtattgaggccatttccgagaagatatgagctatagagcggatgcgccctcncaccaagcttagggatgtgcagtagcgtcaccggctgcatgggcgccctaagacggatcatatcgaggctgggagagaaggcgctaaccctatttaagcttctcaaacgctccgggccgcttacctggacggaggaagctgaacgggccttcactcagttgaaagcgtacctcagttctcctccattactggtcgacccggagccagatgagccggtgttactctacctatctgcaa

SEQ ID NO: 40329 - DNA, 433 bp, Oryza sativa
  unsure (1)..(433): unsure at all n locations
aagcttgnccgcctcggctgctcgcggggcgccggtggtgggtcgctcgttctgccaggtcgnctatcacgctggtacccaccgncatgctgatctacatacgcatctgtacttttctacacctccacccactacatcaacaagcacagcattgttgccgacacggcgacatgttaaaacaactattgaaattaaggggccctccttgaatcacagagttgaataaatggagaaataggaaaacacatgattctaataggaatggaagtgtataacagacgattgcaaaacacaagaaaaacacatgaatggttcgttgattggagcgcagaanacacgcaggaattcgatgagagagatagactcaaagggaaatntccaagatgttagagctcctgctatatttccgtcaaaataacatacaatgtgccat

SEQ ID NO: 40330 - DNA, 421 bp, Oryza sativa
ttgcttgctaaattatgagtgaatgagtgtgctatcagcgaacagaggtaggtcattgaagctccatcatgtgacaaccaatctctttccttttcctttgtcaggtgtgatgaaaactgcataagttcacactacctgtagagctgtctaattctattttggtacatacacggagaaagacatgtgggcacacacctgaggattcagtctggtatattgaatcatcacaatttaagggacatgtatggatctcaaaagtataagaaactgagcatttgatgatgactgatgagcaaactggcatttggggatatactgtacatggaatgtttatctaagcaccgctcatacactttacctcaagagatacatggatttggtatacaagaagtatcacttgtacattaatatacccaataaa

SEQ ID NO: 40331 - DNA, 445 bp, Oryza sativa
tactatattggtcccgaggcgttcagacctagaaagaaatccatacccatcgccttctctcgtccttccgcccgcatcttgctcgccttcgtcctccggccggccactggggagctacgcctacgcccttgcccttccaaccgagtgccccaagtccgctggttctacttctacatctggtttatctttatcctctcggatggaaagccaatattatttcattttctcggtggtttatctttgatatttgcagaacttgtgataccatcttatcctgcagcagagcaggccggacgctccctggattgactgcaaagcaaatcgaatcggtttgttgctccgtgcctctactctttcattcccgcaatctaatcttgctagctagtaccgtacccacatcaccgagattgctgttctttcttctttatttccgtctcgctctacc

SEQ ID NO: 40332 - DNA, 428 bp, Oryza sativa
  unsure (1)..(428): unsure at all n locations
agcttatggatcagttcaacaaagcaactaatataagcagaggaagaactggcaagaaaaactgaggaagaaagagcatacgacaaagctaagtgccttaagtctgatatcaaaaaaagaaaaaagtgccttaagtcacaactgacacggtgacactgggatggcattcacttctttnttttctttaggcattcagtaatgcagcagagaaagtgcaaactttgtacagatgattgattgctctgattgtgctacttttgcttagccaaggataatatatgtgatttgcagactatgtaaacaaggtagtctggcacatggcattacgaaatttatatatgtgtttggtgaaggatgattgcttcttgtagatcgattagaattgtgctcctaaagagcaagtactatacgggctcatgtgttatctc

SEQ ID NO: 40333 - DNA, 496 bp, Oryza sativa
  unsure (1)..(496): unsure at all n locations
tcagcttaaatgtcccaacaatgtgaaaattatgagctgtgcataatgaaccaagtagtgactagtgaaagcaccgttgagcanggcttacaaatccgtttctggaggtgggtgcgaacccccatcgaattcacgaaattcgttgagtgctaataatgctcgatcaaaccgataagaaaaatgtacacgaaatttgaatcaagaatgaagttcacttgttttccagcaaaaaaaaagatgtgttttttaagctgaagtatttttgctcattttttatccaaattaaaaggtttccaggaaaattgtatataatacatgcaaacaatttcaggtacctattaatccaagataaactcacggaattgaaggtgggacataactatctaaaggtaactactatatatatatatatatatatatatatatacatatgtatctatgtatacatgctatcattttatatacaaaatgctctagtgctctacttgtaccataa

SEQ ID NO: 40334 - DNA, 410 bp, Oryza sativa
  unsure (1)..(410): unsure at all n locations
agctntgcaaacaggaatgcttcgttgtggattggtagaaaatgatgatgctggtatggctagattcatgggtgggctgaaccgagaaattcaagacattctagcctacaaagaatataattcaattaatcgtttgtttcatcttgcttgtaaagctgaaagggaagtacagtgacgaagagctagcttcaggactaacatttctgcaggtcgtgctagctcttggacaccttccaacactgctgcaccgtcaactcgagcagcagcaccatcgtcctcaagcaacaagctgcgtccctctacaacaaactctacaccatgcccgagtgaaccaacaagaggggttgctgctacaccttccaagagctcatcatcagtagcatcattaggaaggacaagagatattcagt

SEQ ID NO: 40335 - DNA, 469 bp, Oryza sativa
  unsure (1)..(469): unsure at all n locations
taccgcgcaagccaaggggcctccacggncatgttgtatccagcgaggtgtgtaacatcgattacttgtggtctctttggcacaatttgtgccgctagcctcagggagagatagaaaagagagtagaaaggaataaaggagagtcactactgtaggatcgaatcacaacaactaagccaaccagaggggggtgaatggttggtatcatagtagaaaaacccggaccggtcatcgaaccgcttggacccttggttcatcggttcaccggttggaccgctgggtcaaccggtctaatgctgaaccggaaccatcatatattatgcataactcccttcaaacagggagctcatgttagcctagtggtgaggatcacattcttgctcctcgccagccagagttcanacccccaaagtagcagcttttcttcattttaggcaataaaacgaacatgggccgtcggaagtgaagt

SEQ ID NO: 40336 - DNA, 454 bp, Oryza sativa
  unsure (1)..(454): unsure at all n locations
agcttagcaagtgtgagttctggttgncctatatcaaattcatagggcacgtgatatctgctaaaggaggtgctgcggaccccgaaacagtgaccgtcgtcactggatggaagcaatccatgacagtcactcaaattcccagcttcttgggtttggcaggatactatcggaggttcatcgagaactctttcaaaatcgctcgacccatgacacagttgctgaagaaagaagatacacttgtgtggagcccgcaatgcgagaaggcgttccacactctcaaggaaaagctggtttcctcgccagtattaatcttaccggatactcgcaaggactttatggtgtactgagacgctatacgccaaggatcgaggcgcgtgctcatgcatgaaggacaagaggtgacatatgtcctacgcctggtacaggcctatgaaggaacgaaccgtaccatgac

SEQ ID NO: 40337 - DNA, 476 bp, Oryza sativa
  unsure (1)..(476): unsure at all n locations
cggaacaaaatctcagctttggttgtgctacgaaggcaagggttcgttctctatnacatcggcncccatgaacttggtgaccttgacatggtacgtccaagatggaggaccaacgttcgtgacagagcggtgcaccgtcagcgccttggatggctggcctgcgaagacgactgagatggccggatagttgatgtcgctgcctgaactgaaggtgtgcctgcatgtcatgttggagctcttggtgaacgtcctgagctgcatcggcgtcatgtgctgcgtgcagaggaactccatgtagtcggcctggccaatgtcctataccatgccatgggtgagagctcgcaccgggtgtatgtgccccgcttcgtgctcgaacggcgtctacgccttgcctgtcgccgcgtacctcatcggtcagtacgtgttgcgtgcacgtacatcgggtgtattacngcggacttgatctgtgctgggct

SEQ ID NO: 40338 - DNA, 367 bp, Oryza sativa
agcttaaagagaagtcaatggctttcagactatataaatcaagacatactcatgctcagggctagaccaattaaactgttaagttaatcttccattcctttcagacatccagagaaggtatatctgctcgactgctcccaagactaatgtcagacctggaggaggtggataataaaagtgattgtgaccccagaaaaaacaaatattgccaattaattatagactcgcggtgatttaattccacttgcgtgatgttttatttgcttagctttaggaagttatcaaatactactcctaaatatgatgatttttacaaggagtagttttgttttaagaagtcttctgtgttagactttaaccatcgatt

SEQ ID NO: 40339 - DNA, 406 bp, Oryza sativa
  unsure (1)..(406): unsure at all n locations
tgctngcctctgacatacttaacaagtggaccttattattttntaacataacgtgatggtaatgtgtcagccatgttatttgacacagaggcaaaattacctccttacacagtcaagggataaaatacctgattatgcacttgagaccttgttataagggccaggtttttagctcaaaatcccagccatggatcgccagggattgagacccatccagacgaggtctaagaaggctaagtggacgaataagcatacttcacagggattaggcagattttttttattntgctagttaattaatgacataagagacatgaggctctgaacttggtaagtcactgcccatagtcaacttcgcacagtttactgtgattacaccaccctactactcacaaagacacgaata

SEQ ID NO: 40340 - DNA, 447 bp, Oryza sativa
  unsure (1)..(447): unsure at all n locations
ataatataatcttactaaaggatattctaatgactgattagagttacgacttctatcaaattggtatgttttctggagctatataacattagataattgcttatggaacaagttttctgtagtagtagatgttggtcaaatgatctgcagtgctctacgagtaaatggctatgttctttatttctgctaataaggggttgaaagcatggctgcaccagtactttctttgacatttaaaggacatgaacgcatttgtggtactcaacaagttgattctctaattagactcggtctcattatgcaattggtgtaaattggcatgacccaagctgtataaaaagagaaggcaactcggcatcatgtactctttgttattatcctcccgtganaatatatacttcattcgcgaacatttgagtcatctactatcttggaatatcactcttc

SEQ ID NO: 40341 - DNA, 374 bp, Oryza sativa
  unsure (1)..(374): unsure at all n locations
cgccgatcaaggagctccattgtttcttggagttttaacaaggactggcaaggctctcctcagacacatcagcgagggtccttatgttacacctgagcaagttcttgacgaaatagcatatgtcttctntggtattctcttctggaatgtccaccacaaatgactcaataacaactgttcctggttggccgtctatgacctcagagtgcatagtcaaggtggatgaatagttatggcataataacaaataagaacgatggttagtaccactacaaataaagatctttggaaatacatgcaactttgagagaattgtaaaatcattgattctgctgccanagtngacatgttttcttattagctttcattccctc

SEQ ID NO: 40342 - DNA, 380 bp, Oryza sativa
agcttctccttctgtctcttaatcttttgtattctcttctctatatctctcagggctttctctcatgttatcctcaagggctcctgtgcttggaaactctcatgtatctcttctatataagatggttcgaagtaatatattcaggtggggaagctctcccccccggtgaatattcaaaaaacttctttcagacgcaggagattgttgatgccaaaatagaaaccatgggattttgccattaatacgtgaaatggaatctcaagcttctccagctttggcatagcccctttcccaaatgttaggtacgctccaccatcgtgatcgccgcatacaaggagaaactccttgagacatgggaatcctgtgctttggactgtaag

SEQ ID NO: 40343 - DNA, 412 bp, Oryza sativa
  unsure (1)..(412): unsure at all n locations
atccatagaagtttgcattcagacaccattgaccgagagtcangctgacaagattggtgaatattgcgtacaattgcaaattgttttcaattgtcagctgcacaatattgaaatgattatgtggcaacagacaaaatcatgccatgttatagacaaaatttcacactaaacatgacaacacaatccaaagcactaacattatgccaaccaaaaaccagaataaatgatactatactagtttgctttcaccaagactttcgttgaaagttaggtagttacactagtctaatcacaatgcanaaaactattgtgcggngcagcaggagtaagactttcaacatttgctgaggcatgttcattttgtatgtngacttgagtatgtnttaattttcaaaatcatgtgcattaatgt

SEQ ID NO: 40344 - DNA, 435 bp, Oryza sativa
gctgcagctatgatgtgtttgagataggtttttttgaatcagcaaactctctatttgaagattgcagcatttggcattgttgtttttggtgctgtacttttaagtatgattgctgtagtggtggcaaagggctttctgtgagctctgctgtaatctggaagttagttgtgatctctgatgtatgtgacaagttagtacttttgtatgtttatgcacttgaagtaatggagattatgtgatgataattattctaatcttaatgaaatgatgataattatgtgacaagatagtacttttttatgtctatgcacttgcatagtgtgacaggaataaaacatgaatacttaacgatcagattttgagcgcatttgttctaccaaacatgtccacacataatatgatagattaacaggtgcatacatacataaagttaca

SEQ ID NO: 40345 - DNA, 413 bp, Oryza sativa
  unsure (1)..(413): unsure at all n locations
agctngtaatcgagagcatcgcattcatgtgtctatggctcgaaatgaattccacacacaaaaataaatgctcttgcttatccactggttctgtggcaaacaatattttctgaattcctaaaatagaaaccagactcggacctcaaagagaacttgttgaataatctgctatcatttacatttctacctatgctttgcacgtgggagaaactgcataccatgcatattggtcatgtacattgtgaaatgtgcaccgatagctggactaattaaatatgctcctaatgtgttgatcctgacaaaaaaagagtaaataaatgatattacctatgtgtggaaagctatgagaatggacatcagagtgtggtcaataccaatcacgctaagggctgaatacatggctctctgcagta

SEQ ID NO: 40346 - DNA, 379 bp, Oryza sativa
ttccctgaagaagctagataagttgttccgctactaacattttcttttcttgcaggtgctatgcacgccttccccccaggtctacaaactgccgcaagaagaagtgtggtcacagcaacaaggtgagccttgttatcaagctatcgaagtgttctatgtgtgggctttcgctgattgtcttattggccatggccgtcttaactgtatccatattcttggctcgagtcatcagtaatccttgcagcatccatgcatgttcttaattagcagcatatcaaccaatgtcttaatctatgcatgtttaaaactgtcattgcttggtatcataaataatctattaagcctttatgcataatacttgtctttacaatagtgtgtt

SEQ ID NO: 40347 - DNA, 410 bp, Oryza sativa
ctgcactaacagttcatccgacaagattttttatgttctactccagcctagttgagctactccatatggaaaaatgaaaacagctaatctgtacgcaaacaataatcatcttccaaccatggagcatgagacctaaaagggcattttgcggcgaactgagaagtccaatacgtgagtacattctttaatcagaagagtacaccaattacaaaaatcctaggtcatagcatacttaaggctaaaccactcagattgagcctaagttacacacattattcataaaagtacaaatgttacagaaaactgcagtaaaaaaggttggcatgaggttataagcctacgtgcttaagctgaaataataataccatcgcagaagggaaactcaatcacgattctgacctaaataacca

SEQ ID NO: 40348 - DNA, 416 bp, Oryza sativa
  unsure (1)..(416): unsure at all n locations
agcttcatcaccttccttgctcacacgttcttactgctgccagtgattgtggcatatctcccaatgtgtacgtctcaaattatttcaggaaagaagcaatctttcatacatggagtgaggagatatatgggttcgggatctcaggatcttacacaatgctgagtgcccaagttttttatattccagatccatctaagttaagggtgaaaaagggtcgacgccaaactagacgcatcagaaatgatatggatgagtcagaagcaggtgggaggactntacgctgcagcaagtgtgatctgcgcggccatacttacaagaaatgcccgaagaatgcagaagttccaagcggcgcagatgctagtccatctggacaggcaagtgatggtaggcgaccacctggtgaaggaacaacaagc

SEQ ID NO: 40349 - DNA, 377 bp, Oryza sativa
  unsure (1)..(377): unsure at all n locations
accgattcagccgggcctgggagtttcgctgtggaatcaaggaccgcagttcgacttcgtcaacgctgtccaagcaccaaccgttcggcagcaagctccaactccaggcttcggaacaaaccaagcaccaatccaagctgccatgacgtggtcacagccaattnttgacccatccatggcggctcagcaagtacctccagttggagccgggcagccgaatgccatggcccaacctcgcgtacaagctgcgatttcgcccttcgccacaccgtacccgcagcagggtgcggtaaacagggcgggaggcgaaaaggggctaccgctgagtggtggaatcaagactcgtccaatcccagcccagttcaagttcccacccg

SEQ ID NO: 40350 - DNA, 410 bp, Oryza sativa
  unsure (1)..(410): unsure at all n locations
agcttaancgatggatgtcactagagatgtgtgttccttccgctgacatgctacaacctcgatgatgaaccggtcgtgttagatgctgtaggataactgtatgttgctctaggaggctttgagccctatcccaggatggtgacatcagcgtgacgccctaacgtcggtctttctaccactggtactggaggagatgatgccggacctgcaagtcactggcgactagttctcctgcgatgcggatgctatcagacaggggctgcacatatggcacgaaacttcgtcgagggctatacttaagctgagctatcacgcgatcatgctcaaccatcctctctgagacaccatctcccagtgtcgacgttaaccggccatgcgaatatagagttcattattggtcgccttcttat

SEQ ID NO: 40351 - DNA, 290 bp, Oryza sativa
tatacctgtgcatttgtttatcacgcacagttttttttctcttgtgaactgatatagtgttattgctattcatatatcttatgtgcctctaacctttattcttgatgtatggtggaccttttgctgaatacctcatgtatggtggacttttatgtaaaaatctctgctggagactaaagaaactatctagagacatagaacatcactaaataaaagacaatcctgttaagtctcttcttatttaaaagtgttgtcatctcccggcttaattgctttacaatgtaccactt

SEQ ID NO: 40352 - DNA, 347 bp, Oryza sativa
ataccaactattgagcggatgccccccctcacctaacttaaggaggtgcactgcgctaccggttgcatggccgccctaagtctgtttatatttacgctgggagacaacgcactacccttatttaagctcctcaagcgctcggtgccgtttacttggacggaggaaactgaacgtgcccctacacagttgaagctatctcactctccttggtttagacgcccgcagccaaatgagcccctgctactctacttagcagcgaccccccaagtagtaacgcaccgctggtgtggagccgatgatgaaaatctcattcccgccacccaccctgtgctgcctagcccggaaca

SEQ ID NO: 40353 - DNA, 431 bp, Oryza sativa
  unsure (1)..(431): unsure at all n locations
atcacacaaatatgacgatgattgatttatacttaccagtacttatctctacggttgtaaaaacagagtcctccttacatacccttgctcctccccccaacacacacctgagcgctgccccaccgtgaaaaaccaaaaaaaaaaagccattcatacctcagtttagntctaactcaaagaattataatttctttccatcaaggctcagatatgcagaacacaagatgcaccagtgtcaattttcaataacatgcatcatgtggtccctttccgcagtacatcgtagaataggatctgaactagcaattcaggagacagggaaacatattaccctgtgaattcgcctcttaatccatcatctgctccttggacaattcacctggctctcagggaaaaaaaagaaacggctaagcttaccatatcatacacta

SEQ ID NO: 40354 - DNA, 350 bp, Oryza sativa
tatgcatgaggaaccaattatctttgcatgatactactgtttatgtagtcatcaactgctttacgtcatatatgactgtcacgtatatcaaggtaaatatttttctgactaaatgaatcaacgaatctttataaacttttatagaagaacaatcactatctccacacattgttcactatatgacatctgaaactgaaggattcgttctaagttgagcagcatcgcttcttttactattggcatcaccggcagcgacattgatcgtctatccttctttgacacctccagccgcatcttgctccgccttatctgatgccaacggcttctttgctgatggcctgtaaatgtca

SEQ ID NO: 40355 - DNA, 422 bp, Oryza sativa
cagcttcttcgacatagcctactctactactattgatgggcaaacttcggcatcatagtcgatcatgtctgttgctgctaatcgtcattaccgtcggttgcatctgccgtcgccgactattttcttcatcttcatgattgatggatttcgccattgccattgatgagcgtctacgttttcaccaccggcttgcctacggcgccgcccatggtgtcttcgctttcacggctggcttattatgcctttactgatgggcgtctttgtcttcttcaccggctggctcgtctgtctccgactaattatttcgtcaccatggctacaaaactacttcgctattggtgggtgccctcatcttaatatggtagctgatctgggtgccgcctactggaatcattgcctacacggctagcgactttattacc

SEQ ID NO: 40356 - DNA, 379 bp, Oryza sativa
  unsure (1)..(379): unsure at all n locations
agcttcggcgacctccgtctnccggagcctattctccgcgcgctccgcggcaagggaatcgagaagccgaccccaatccaggtgcagggtctccccgtcgcgctctccgggcgggacatgatcgggatcgcgttcacggggtccgggaagacgctggtgttcgtgctgccgctcatcatggcggcgctgcaggaggagatcctgatgccgatcgtgcccggcgagggcccgttcgggctcatcgtctgcccgtcgcgggagctcgcgaggcagacgcacgaggtgatcgagatgttcctcgcgccgctcatggaggccgggtacccggagataccgccgctgctctgcattggaggcgtggacatgangacgcagatgg

SEQ ID NO: 40357 - DNA, 195 bp, Oryza sativa
gcaactgaagctaataatttttgcttttcacaccggaaatcaatgagaaaacaatgttttgcgtggaacttattagggcatctaactcgtcctattgaaagctatatttaataaaaggatagtcactttgggccctcatttttgccatccgatattggcaccaggatgaccatccccaattataaaactgggtaa

SEQ ID NO: 40358 - DNA, 322 bp, Oryza sativa
  unsure (1)..(322): unsure at all n locations
tgcgcgtttactccttagttgcatgtgaattgtgaaacatgagatgctgaaaaaacacaaggatggcagcatctactgcttctaagtcctaaatatctgatactctgagctacaaatctgagctcgagtaaagagatcagcaacttggatccatacgttcacaggaccaatctgagctcggntcaaggggtaattagcaagcaaatgcaggaagatagctggtggtattccattgtccaatgtggngtctcatatgcctgtataccgttacatgtttatagggtgtcttgatctgactacagaaaatggaccaacgatctgc

SEQ ID NO: 40359 - DNA, 433 bp, Oryza sativa
  unsure (1)..(433): unsure at all n locations
agcttggggctgctgggcaaaatttgaagaataacaagcagtataagccccgccttcagcttggagctccccgtgctcctaggacgctaccctcttctcaccctggagctagctcaagctcagcacctcctcctcctcatgggtatgatccaaatgctttcttccatccacagtatgcttactttggaatgcaacccaatgaatacttcaacccggtacttgtggctattaataccctaagtgaaagcattcaacgcttgtctaccgggcatgaagcattgcatgaggatgttcgtggcttgcgcaccaatgttggagacttgaatgcttccgtgggaagattgcacactagggtgggtgtattggattcttgagtccaaatgttggagagcacccaagcttttgtatatcatcgccgncatgatgcttctca

SEQ ID NO: 40360 - DNA, 127 bp, Oryza sativa
cccacaacggtcagaaatggcatgtgggacccactaaccgttaccctgccaaaagtggcaagtaacacgtgcctggctgggtcggtcgaacacaatgggttccggtttataatattaacgcatcctc

SEQ ID NO: 40361 - DNA, 444 bp, Oryza sativa
gcttggtaacgacaccctatattgagtttcgtcagtgggttcagttggtagtggttttgtttctatgttatgtagatgtttagttagttggtggtttttttccttttttaacctgtctaggttttttttttactcctgcttattgaaaatataattaacagtactcttgctggtttaattagtttaaaaaaaaagcacccagaaggtcacacatcaggttacatttgcaactcgcatctccccttcatatccataccgcacatcacatatccatgcatatgtgcggtatgctcagctgcgctcaagtgctcgagcatatcaccgcaatctctgggaggatccgatcccaaaaaagccgtccattcaccccggtcggcaggcagtcacccctgggcacgcactgctcgtacggtggtggccacagtgtgacatgatcgaccatga

SEQ ID NO: 40362 - DNA, 147 bp, Oryza sativa
ccttgaagacactcgaagaaggaatgcttttgctctggactgaggacagaaattcatatttcttcttcttcttttggcgtatgctacatgcatgttcaaacatagtggtgacataaaaagttttcctgatataggacatggaaaact

SEQ ID NO: 40363 - DNA, 411 bp, Oryza sativa
  unsure (1)..(411): unsure at all n locations
agcttgtagccagaaatcaatcattggaagccatgatctattggactttaagacatcagtttctgtgattgtgatttactctttccatttgttatatctacactactttaaaagaaggtagtggtggcggcaatgaatctgccaccagcctaccacacctacttccattgttgttttgcaaattaccatgaacttctaagtattaaaatctatactacattaaaataaggtagttccatacctactcccgttataggtttgcaaattaccccataaacttctgcgtattaaatattaaaaatcaatcaaatctaaattgatagccacatatagcanaatgataggtaacacatttcatggcaaagcgcatgctatttctggtacctgttaatattataatatattttttat

SEQ ID NO: 40364 - DNA, 210 bp, Oryza sativa
  unsure (1)..(210): unsure at all n locations
gcgtggtgaatgcggtcttcggaatatcttcttcacgaatacgtcattggtgatatccggaacgaagatcaatcttggagaatacagtggcacctttaagctgatcgacagatcatcattcggggaagagggtacttgttnttgatggtgacttcattgagagctctgtagtcgacgcaccatctcttcgtcttgtcgttcttctctaca

SEQ ID NO: 40365 - DNA, 445 bp, Oryza sativa
  unsure (1)..(445): unsure at all n locations
agctctgttagaccatagagattctcttatattgattatagaaatttgaagctgaattaaaataaacctctgctagattctcactgagagaaagtactatcctagactgtaggaatgttgtcaaacaggaggttgaattattatccaccaataagcattaaaccctctagtctataataaaagattaaccatctggacacctcatactatgttctatttgaatttagaataccgntttcacgacagttgtttgaattatgttctttttataaaaagtatatctcaactgcaggtcaatatatcactaaatgctgctgctggacgccataagataaccagggaagagagggaccaatttgatgaatctaacaattaaattatatttaaattaaaaacaaaggtgcttttcccatcatactttttgagaacttgtttattcccatat

SEQ ID NO: 40366 - DNA, 406 bp, Oryza sativa
  unsure (1)..(406): unsure at all n locations
ttcgtttttcttatctttagttcattacctattttcttgtgacatttctaactgtgttgtgnnncgtcgatatgatgagacacctagaatgtcttccgagatatcttcagcggataaagtctcttgaagtcctgaagatatttgccccacttgcccatgcttgtggagctggtaatctatcactggagctagaggatctttcatttcgctatttgtttccgcattcatatgaccatattgatcaatggttgatgagccaagagactgagaacaagctcttaatagaatcgtacaaggagcagttgcttcatgcactgaaagatgatgatgagttgagccagattgtgcaagacatctcaattcaagggcggtataatagccgtttcagtactatganaaagctagt

SEQ ID NO: 40367 - DNA, 403 bp, Oryza sativa
tgctatgcatgcatgcctgggtggtcatgcctgtatcgggctggaaaaaataaccggaaggggaagaagccagttatcagtatttccgaatcgtatcatagtatcttacgatactacgaaccttcccaaccaaaacgatattgatccccacctaatatcctaattttcatagtatctcgatactactattcattactacacgatcctatgagattgtaggtggtatcccgattatatgatccctacgatactataaaatattatttaaaataatatgggttgaaaataatgtaaataaatatgctcaaatttatataaaaatcagttaaatatatcacaaccaacatgatttcacttgataaatgtctctattgacatgacatatgtcattactacatttttt

SEQ ID NO: 40368 - DNA, 312 bp, Oryza sativa
  unsure (1)..(312): unsure at all n locations
gtatatgcatcttcacttggataggggatatatattggtactctcctctagtttattaatggtttggtcttcccaggatctaattcacgggatctccgatcacataaactgtgttaccaccatagtataactcacatgggtctcaaacccatctncttcgatgcattgtctatcacatttcgtgatagtccattcgtgaagggatctgccacgtttctcgctgtttggatgtaatccaacgtattaactccggaagttcttaatttcctgacagacttcaatcctcttttcacatgtctagacgatttcata

SEQ ID NO: 40369 - DNA, 397 bp, Oryza sativa
agcttcgtgaagaccttgagcaaggcaagtcatctcttgatcaattgcccctataatagaaaagtcattattattttgtttgcaacttgcattattataatcacacacttaacttgcttggcctcggtttgcgtgccaaatcgacggacctacctagtagtcgcactaatttccgtaggtcgtactaccctgattccttgtcgctccacccttgtggtacctcggtattcgtgctctctgagcgcgtataccaaatatcccacatacacccgtgtttgtcgaaaacttgggaaatgggtttgtgaagccttcaaaacccgacatgtggtgtcggtgtgtttgaaaataaaatgaattgtgaaaacttgcgatgcggtggttgtgcctatgtggcact

SEQ ID NO: 40370 - DNA, 381 bp, Oryza sativa
  unsure (1)..(381): unsure at all n locations
cgattcttaataatattcattgacatatattaanttttaggaaccctgggtcggcttgggaaaggctttgttgcgaacctacgataccgacgggtgttcggaataagttcgtatcttgtgggtaaagtgtacccctctgcagaggttaactaactgttcgaacagccgtgcccacggtcatgggcggatgtgaggtggttcccgctgcgtagatatgtatgcctgtgctctgtgaaaagttgttgtggtgtgggaatcgtaaccagaatcagcctatgtggcagatggacgacctgagtggtcagaaacgaatctgtgtgattcgggatgtctgcgggcatcatagactacgcttcccgagtggaagcggattgttgtgct

SEQ ID NO: 40371 - DNA, 444 bp, Oryza sativa
cggatcttaagcacctgtgctgcagctttcttccaactcctaggtgatgttttacatgcccctctctcaacctaatctgtttaccttgcaacagcatatcaaaaatcttatcacacttactaacataaaaagtatatctaattctcgttttcttagcaagtgtaagtttcaaagcaggacaaattaaaggtttagacttatgtgatttcacccactcggccacacatacatcgacatcatcatcagtagccgaatcaccatcctcactatttcctaccacattaaccgcaggctttgcattttctctgctcttattatctttaaatcgactatactgcctagcattcttagggcggatctgctgcactaaagctttctgtacaacctgtgtaatatctgaaaattcttgattctctaatctatctctaagatgaatgagcaagc

SEQ ID NO: 40372 - DNA, 379 bp, Oryza sativa
  unsure (1)..(379): unsure at all n locations
tcaatatatacggattaacctttgcagtaaaccccatttaacaatcacttaattgcccacagccattttgtaaagacgatcctagaactacaccagtgttattaaacaacgccgtgaaccctcactaacctgccttaacccaaggcctactatgatttggaccgaactggcatcccgaccctgggtcccagcctcgtccaagccaacccaggccaaccattccatattttagttgttgagcacaatttacgaattagaacactgacttgggtacattgctcggcttgcccatatcccanggctccgctattcgaatagatttactctgatcagaggtgtacatctttacccacaagacacatctatacttcgcattcca

SEQ ID NO: 40373 - DNA, 429 bp, Oryza sativa
  unsure (1)..(429): unsure at all n locations
agcttaggtaggcggccagcaatgcatgtttataatcataagcttaaggaatggaagcatatgtatcaagtacttttagtacctaccactatagtggagtagtccaatatattctggatcgattcttaactagcgatctatatcgattgagctctgttcatcatatatacatgaatcgaatcccagagataaatactcctcctactccacatggaactggaaggacgatcgaccacgacatacatatacgcgcgcatgcaatgcagccttcccttccccacaaagctaggatcggagtgagagaatcatatccgttcaatattctgtggatcacaagaaagcacaaaggacaggaaacgaaaacgaatgctgctacaaactgaaacgtcctacgttccttctgctgcctgatcctactncatgcaagaa

SEQ ID NO: 40374 - DNA, 357 bp, Oryza sativa
gaactgacaactacatgtgttatctcgagcaaccacgacgtagtgacgtccaccccattgaaccccagccgccgtgactccgccttgctcgctgacctcatacttcatcgaagggaaatcaaaacatgctgctctttgccccaaggttcgtctttgttgctcctccaacatgtccttaacttttgtgggccacttcttttcactcaggatatctacagttgcctctttgtgtctatcgacaaaccaactattgcacttcgaaaatgtgtatgccacaatagctgtaaccggcagtttccgaatgcctctcaatacattattgaaactctcggccatattactaatcatgatgctatg

SEQ ID NO: 40375 - DNA, 428 bp, Oryza sativa
  unsure (1)..(428): unsure at all n locations
agcttatcaagaaactgatgtgtccactcttctaacagaactacagaagcagacatccggttccaatattagcacaagaccaaattacaagtatgtgtcagctttcaaaccgctcagctacttctcaacaaatatatgactgctatcagtaaatattaacatagcattcattgatctcacttagtctattctagatggttgaaagaaaaatttctgaaaatcccagaagtgatgccctataattcatagctgtgtatttgcataattactaaaagaactttggttttttttctcaaaagcaacggaatgctatgtacgaggaatcattcgttgagtactacagtttttgtacctcagatcttctgngtaatcatctgtccgataaggaggagcgcagaaaataacgtacggaactttctgaacagctg

SEQ ID NO: 40376 - DNA, 291 bp, Oryza sativa
tgctgactctaagccgatgactactccgagcttaccaaatttcaccattaacacatccccccctagttttggagtacgagaattcatgcttcaaaatttcttgtcttgataactccaaaaccaatcttcctttgcttcttgtaatcggctttcatgagccgatactgatgtgctccaccatgttgaaactgatgcgcttgccccccgagccaatattgttgttcctcccgtaaattctccaccgtgaccatgatcttggcattgacttcttcttcagacctgggatataaa

SEQ ID NO: 40377 - DNA, 333 bp, Oryza sativa
agcttgaagctcgaattgacttgacttcttatctgacatgaagctgacagctggtcctttatgtttgacaactaaaagaattggagagattgggaggagaattttgaataaccgcttcacaaagaaatgccgaatggcgagaggagacaatttgcaagtagggttttcagaaaacttgtccttacggtttgaccatttggctcaacctacagtcaagttggctctgataccactttgtcacgcccagaaattatcccaaatttccagactattttgtgtataacatccctgtccaggaccagccagggtacacaaaacgatcagtaattaaca

SEQ ID NO: 40378 - DNA, 279 bp, Oryza sativa
  unsure (1)..(279): unsure at all n locations
atcaatatttttatatatattgtttatttataaatgtatgaattataattcaaaattgcacatgcaattgaaaaaaaacgtcatgcattaaataactgattcatgttcccttttttcaatccttgtaaacgagtgtgatcagatnagcacaaatgttaattgctatctgctacctataaaactaaaatttttaatttcatttgtttgcaatacgttggcctcatgctctaaatgatgcattatccttccaaccatatttacgaattcttcaacccattt

SEQ ID NO: 40379 - DNA, 442 bp, Oryza sativa
  unsure (1)..(442): unsure at all n locations
gatcttaagncacctgcggcatgcaagcttgggacatttgcccatctgggtgctgttccaaattatggaacagtgcaaccaggaagtccatggctctgacaattaatatatgcaaaattaacagcattttatataatctgataaatgccgagctgtgcaaatagtgtgagatagttagttaccttgtcaaccacaaaaggccattggtacaactgctagaactttttgctgtcttagagctgatctcaactttcaccatgctgtgcagctgctcatactttgaaggatcggatgcatattttgtctccaatctctgcatatagcaacagccacacaacagagcactgtcacaattatgctagacataaaccactaaaagcattgtgctttagctttccattgaccacaaattatcaaagagcaatacatcattacattgaga

SEQ ID NO: 40380 - DNA, 349 bp, Oryza sativa
cacctcattcttctcaatccaggatctagatgttattcttgaaatggattggttgacaaggcacaaaggagtgattgattgcgttagccgcaccatcaagttgactagtgcgaagggagaagtggtaaccttccagtctccagtacagcagaagccaggggtcagtctaaactatgccactggtgaagaacaagaggcagcagtggagaaaacctctatgaagttggaggatattctcatagtcagagagtatccagaggtttttccggacgatctgacaacaatgccaccaaaaagggatatcgagttctggattgacttggtacctggaactgcaccgatccacaag

SEQ ID NO: 40381 - DNA, 414 bp, Oryza sativa
cagcttctgcagaatgggcagaacatctcgaggcttaacaaagctatcctgctggctcacatccagccaatattcacatcaggaaaaacaaaatggaaataggtaaacgctgatccatatcagaatcctaccggtgcagagatgctcgagtgtaatcaaacgagatttgatttctttattgatttatgttttcaggtttgttagctggggtgttctcaagtttgttaatcggctgatagacatatttacaagtacaatgcaggtgaccgaccgagcgtgacatcctaataatccccacataattatgtctcggcagctgttatgctgtctcaaatccggtgataattgcagtgagttcgacggaaaataacataatggcgcacgaggcacacttgatccactaacacaagtaca

SEQ ID NO: 40382 - DNA, 371 bp, Oryza sativa
actttatttagtcgaagttagacatttcttcttatgattccacatttaaaagtcgcctaacatatacctggataaagtgccataaactaatcatgccagcttggacccctctcagttcagtggaaataagagaatatgcaactgagataactttttatactatttattgttgttccatgcctttggtcttctaactgtggtgatgtttatgttgtaacaggatgttattggtgcagcagagacaggttctggtaaaacacttgcttttggcctccctatcttgcagcgccttcttgaagaacaagagaaggccatgagattgtctcgggaggatgagagtacacaagatgaaaattctagagaaagtcact

SEQ ID NO: 40383 - DNA, 427 bp, Oryza sativa
agcttgtggcgagtagcttattatgaatagtgcgtgacgtttctgcacaatcatgtatgctgatgacacgactgtcttcataaacccgaataaagaagatgtgtgagctttcactgatctccttggtcgctttggacatctagtatcataatattgcctactaaatacgggcaacatccaccgcggctaggatagccctgtcccccccatatatagaagataaatgatccctcacagcgatgcattacccttggagaacagacataagaaagaactggaacgaagagattattatgagatgaattcatggcgacaggatgtcccgcccagaaattaccaaccagaatttctaagctgaatgtgcattaaacccctgttcaagaccagccagagtacacaaacgacaattgttgcctacagatccacg

SEQ ID NO: 40384 - DNA, 248 bp, Oryza sativa
agctttaataaatgtcaagttgctttgtttgctagctcgatgtttaatttgattagctcttagaggattaagcaatatagtaccaaaccttgtttgacatgtgttgctaatgagatgaagttaaaagatgctttgggtcgtgttaagtacatggaagaaattgtcaaataagatgaggtgctttcttgctcaacttgtagaaaacaaaaaggtcttttggatgcttgcaaaaattgtgctactcttac

SEQ ID NO: 40385 - DNA, 441 bp, Oryza sativa
agcttaagcctgtaaaagcatagcaaaaggcatgcgacgcgtcgattaattaggtgttgaaatctggaacgttcttggccatacaggcgctgcgtggccgtgatatagagcagcttgccgggtaaaaagattattctcttatcagttaacaacttttttaccacctttcatgcatcatgcatcattcaggtcagattagatgtgctcattggaaacggacagggatgatcgaaccatccatccatgggcgatccatggtgattcagaaaagtaaaactgcctttgtttcttgtgtagcacagggatgcaaacgtacaaaacgaccgtcacaagggtcatctctagctggaatcacatctcttagcttgttttatggatttgcgtcaggtgcacgcttcaatcctgggccacggcatgcatttcgatcacctcgtccttcgt

SEQ ID NO: 40386 - DNA, 444 bp, Oryza sativa
  unsure (1)..(444): unsure at all n locations
agcttncaactcactgcacaacgcagatattccatccagtacttctcccttagctttcgccgctgagcatgatcactggctacaccagatcgctgcacgcattgtgtttggtgctagtaaagttgttaacagcttgcaaagttgcgaacttcaaattttgccgacaagtggttggaggaacgcttttcaactacctagaactgactaaacctcgtgaaaatgacaggcatttagatccattttcagtggttgagcaatctcggaatctcctgtcctgtgctagtagatagtagctgcatgcagatcgactgatcgagcgtcaaacggagctgtcaaagcgtcaagtgatgtcctgagccacgcaccctgaatcttcagttcttaacttttctcttgntaatcttgcttaaggaggaagcccccgaacagccgacacactagtac

SEQ ID NO: 40387 - DNA, 321 bp, Oryza sativa
acttttccaagccaccaactccaatacagccttctcttcaaggtttttgtggctttctgaatttccacaaaggtgaaatagcgccccagtccatatgcactagatgcaaagatactcgaaaacccacttttggtccttgtagagccaaaacgatttctggagctcagcctgctgcaggtgctcatgaagctggattgtgtggagttgaatggaacgaaccaagactggaagctatttgtcttctgccattcaggtctatggcgtcgcctgcagcacatgactacagctagagcggcgccattactgcattgcagccctatg

SEQ ID NO: 40388 - DNA, 438 bp, Oryza sativa
agcttacccttcaggaacccaagacatgtcctatgtcttctaatgaagctcacaactcatcaaccgcattgatgcccctttcactgctaacttcttcctcggcgtcgccatcctccctgccaatgtcacttctccatcgcccgccgtcgccgctgctgtcaccgctgtcgttgccgccgtcttcgtcgccgccgtcgtcgaagcctcccccgccaccttcgtcgtcaccgacaccgtcgtcgacagaagctaaggttagggattgaggattatttctctcggtggtgtgtggcgatgaaagagaccgaccccgtttcgactcgaccgagtcagctatatattgcgacaggggtaatctgggcatttcgtaaaaaaagagaccactcttaatacggaaatgataaaataatgtcgctagcttcctacaacacattacac

SEQ ID NO: 40389 - DNA, 212 bp, Oryza sativa
  unsure (1)..(212): unsure at all n locations
gcaagtcacccttgaccaattgctcctataattgaaaatcataatattttgtttgcaacttgcattattagaatcacacacttaacttgcttggcctcngtttgcatgctaaaccgacggacctatccagtagtcgcactacttcctgtaggctgacataccctgatcccttgtcgctccaccattgtggtacttcagtatccgcgctctct

SEQ ID NO: 40390 - DNA, 349 bp, Oryza sativa
  unsure (1)..(349): unsure at all n locations
ctgagggaagtctcatgggaacatgatgagaatcctgcgaataaatggtaaaatctggacagaaggatgccaatccgttggcagacagattcagcgacatgccagatgattttgcaagtcctacttttgcagcaaacataaaaatatccccccacagaagtaaaatgctagacgatgacctatttagctccaaatatccaaaaggtgtgaacaggtcaagatcaacttcctttacctcggatccagaatcggagccattggtatgcttcaatctctcaagcagattgcaactntagtaaatggttctgtttatactctacgtagcagagcaattntatcccgttgacac

SEQ ID NO: 40391 - DNA, 423 bp, Oryza sativa
  unsure (1)..(423): unsure at all n locations
agcttggaggtctcccgacgtggctgatccttacgggctgtgtgatccgggttagtaatgtcgtgtgggtaaagtgtaccccctctgcagaggttaacaaactgttcgaacagccgtgcccacggtcatgggcggatgtgaggtgattcctatcgtagttttgtttgactactgccttgtgaaattgctgttgtggaaaggggatcgatgtttggaaaatctacagctgatgggatcagttaggcccgggtggccgtttgaaggttgttggcccgggtggccgtttaaaagttgntggcccaggtggcccgttgaaaagttgtggccgggtgccaaccttgaatcaattcaaaagactgatacattgcacgtactccgaccggacgagacgcactgtctcatccgtgtcgtttgagaaacact

SEQ ID NO: 40392 - DNA, 375 bp, Oryza sativa
  unsure (1)..(375): unsure at all n locations
tgatgaataaaaaacatcacgaggaataaatagtttgaatcaacgcaaccaaatagacggtgtgcagccattntcctctcgtagaatcgatactcccatgtcccattcactaaggcgcgattaaatttgatataatttttaaaactaatctcacaacaaaatcataatttagatgacaatctaatagtatttttttcagtaaaataatatttagttataataaattatttattaattaaatatttaaagagttgaatattaaaatacttgctacctctgtcctacanagatncgtagtttgtattgtttaatgtctaacgttgaccgtctgtcttatttaaaaattnntcatgaccaatatttatctattattat

SEQ ID NO: 40393 - DNA, 435 bp, Oryza sativa
  unsure (1)..(435): unsure at all n locations
ngctcgtgctagcagagctagatgatttattataccaagctttctggggaactattcatatgactgcacatatcacctatgcacccatttatatcaagatatcttagttcagtccagctgcccattttatgcaacgtcgttgatggggcactagtgttaacttttatgcatgacagattctgcaaagcctttatatttccaacttcttctggcaggctcgtgtaatcagcacgtaaaaacatcagattcttaagccgagtaatacttttgggtaatccatttatcttagtatgctctagctctagtgcctcctgttgttgtagatcgcctatttcctcaagaagctagctgatacttactatactgagccttatgtatttcaactgaaacaatctacctataccattaacgtagtaatctttcaatgtatcatta

SEQ ID NO: 40394 - DNA, 262 bp, Oryza sativa
ttggtgatcgccatctgttcatctccacggacaggttcctgtgctatttgatagctgcatgaatgaaggcgagattacatagggacgagtttgccacttttcgtgagaaaactctacttgtgccatcttcgagaatgatttctcatggttccttcagctgcgtgtcaaagagcttgtttccattggccaaatggtgctaacgattcttgggaggaatagctatgactactgatataacaactgtctcctaatgcggttgctg

SEQ ID NO: 40395 - DNA, 385 bp, Oryza sativa
  unsure (1)..(385): unsure at all n locations
agcttgagctcgattcactcaaggtctggaatctattggaaggaagcagtgcaatttacgatgactctttaccttgattntcatgagtctttcttttctccagcatcgtatacgtgtctaattgtgattttatattttaattaattatatattggaaatctttctcaactctttcttaaatctcttgttttcttcccgttgcaatggcatttttttctaagtacgtaaaaaataagaaaaattccgccatcgcacgcaacgaagacgaccgtcgccttcctcctcaccttcaccgcgacacccgtttctcctccgcggggccagctgagctctcccttccttcccccaccatgcggcagcgtcatggcctattgggcaccggatc

SEQ ID NO: 40396 - DNA, 192 bp, Oryza sativa
gatatatattcttgactatatgctttggttggtcaattaaccacattgctcgcggctacacctataaagtgcatctattccgtgcacctgactctatttttcaacctccacaacttcattttggtaaagtcctcggcaccatggcaagagaatgaacactaactttgagaatttattcagagaaaatatatt

SEQ ID NO: 40397 - DNA, 437 bp, Oryza sativa
  unsure (1)..(437): unsure at all n locations
agcttgattctaaactctataagagatatcttcttattggttacatattatttaaatggttatattttttaaaaaaaaaatcaacaaaattgattaatatatgctaaattatttcataaacatgtaaagtaaaatttaacttctacaaattacaatgaaaaataaataaatttaaatatggctacttaatgtatacagtcaaatttgttttttctacaacttgtaaaagttatatttgatcttgtatgtttgtggagtgatttctcatatactaatctatctcgttgaatttatttttaaatatttttataactatttggatgacatacaaacaataaggatgtcccctcaagagttaaatagttttcctatggggaaagctatctnttagagcatctacaatgtaatattaaagcagtcaatatactcatcctata

SEQ ID NO: 40398 - DNA, 397 bp, Oryza sativa
  unsure (1)..(397): unsure at all n locations
cagcttcaaatgtgccatacctcatctctatgatctntttgttggctctccaggcctttgcatagcttatggtgtacttgaatttgttctcgatgtgcctaataattgattttggttcaaagccaatgttaccaacaacactgctgtacatctcacttgccacaaaagctgaagtgatgtttcggtgatacttctccaccccttgtaagtagcacttgtgctcggtcacaatgctaactttccaataatcattccatttacccttatatgcatggacacgccacggacaatcttccttcatgcacctcacttcatacacataatttggtgacttgaccaccctanactctctctgcaatgaaactgcccaatgcttcaccgcctncttcatctcatt

SEQ ID NO: 40399 - DNA, 458 bp, Oryza sativa
  unsure (1)..(458): unsure at all n locations
actctgatcttcattgattgttgattcgacttactctgtactccaccaagatatgagattataatggcttgagggtttgtggggattctaagcccccatagacttgatgatagtaccaaacacttgtacttttactccatttcacagggtgtgtggattcccacatctggttcttctacttagtggcttcgaccttcaacacttctgctcggtggtggccatgcgagatgatggtgacgatttgaagattactgaaattcacatggcattatggttctatgtggcaggaattcttgctactatccgttctatcgtttagttnttctttgagaacctccacttctgttttcttgaaggatttttgaactcttgctgtctgtcattgttaaaccagtgatgtttagtcaccatctatatntatgttaatggagtttcatggctattattatatccatgga

SEQ ID NO: 40400 - DNA, 394 bp, Oryza sativa
agcttgggaaaggctgcaggagtacgtcactccccgtcctcatcatgggatggacgagtggctcatcctgcagaatttttcaacggattaaccctctcgtcccgggatcaactgaacgctgctactggaggagcacccttctcaaagacagtcagatgccaactgatctgattgagaagaggctctcaaatatgggatggagcgaggaacgactccaaacccgtcaacgcggcatgtacaccatcgaggggatgaaaatgctatctgctcagttggatctccttatgaaagagactggacaacaatgagaaggatgccaagcagggtaccgttaaggccctggactctcacacgacatgtgaggtctattgcaatactgggcattctggatgga

SEQ ID NO: 40401 - DNA, 331 bp, Oryza sativa
gtaatcctctccctattagtcctattgattctgacaacaaagaagtgttgattctgtctagtcaagccgaatccacgaaagggaaaaatgttattattagggatcctcggcccgagacaattaggatcaatgatgctaatgccaaagattgtgtagttatcaaagattaaatattttatttccccaagaattaaaaggcgaaacttaattttgagatgcctattgcttagtaccagaaaaggataacgagttaaccatattcataatcaaattattgattctaaaagaccaagatcatcttgcaggaagagatttggtcaatcaccaaagc

SEQ ID NO: 40402 - DNA, 374 bp, Oryza sativa
aaatttataaatgattacgtatgccttttaattaagtggatatgccaactttaattggggcttgagccacaccaactaaagtggaacaatggaatagcaaacaagtttcctgtacagtgggtgtcactagcagatatttagtgggagataacgagatatgatgcactgtactaccatcatggctccttcacatattggtcaactataatcacattaattgttactaatatatgtagtcaccatgacatgtacatatcggttggtaattaaaataatgtatagaacatatcatgtatatgtaacatcagcttctaactatctatgacgaatatcacaccatggaataagttgaaattattacatatatactccct

SEQ ID NO: 40403 - DNA, 368 bp, Oryza sativa
tcactaatcagcaaagcataagcggcataattctccatatcataccacaatatgtttacctaaataaggatatcatactccataatctggcaattagctacctgtcagaacggcagattgaactagagctagctaagcagctacataagtacagctagactacaacgactaagatcgatatacttgtacctcagaaggattccttcttattatcgttattggaatggtttgatccatcaatgccgaatttcttcttctttgagactttcaaaatccaacagatactcctaatatccagatctggtgtatgttataagcatggttagtgccgtcatgccacaggcggtggcttcaaataaactgcaaca

SEQ ID NO: 40404 - DNA, 435 bp, Oryza sativa
  unsure (1)..(435): unsure at all n locations
agcttcgcacctctcctgctgcgtcactggaacgatgggctgctccaacaccaatcgggatgtattccgcgaaatggacctagtatagattgcgctggcaaatgccacgggtttcctgcctcgctggagcaacaccccccgaactatctgtcggaatgcaacccagatgtttaggaaatcaaaagaagcacactgagttcatggacatggagatgattaatgtggaggaaccactgtgcaggaaaagatttgctagaagagtgagataatgggtaatgaaaactatcagcaggggaacttttgtatcaacatcagcgagagggaggcggngggataataggggtttgaaatgggggtgctaattcctgctgttgtttgatttggctgcagattgtcttgcttatatgatggataaagctaaacaaggaggtctga

SEQ ID NO: 40405 - DNA, 328 bp, Oryza sativa
  unsure (1)..(328): unsure at all n locations
agcattggtcaagccgaacgacatcaccgtgaattcatacagtccatatcgcgtggtgaatgcggtcttcggaatatcttcttcacgaatacgtaattggtgatatccggaacgaagatcaatcttggagaatacggtggcacctttaagctgatcgaacagatcatcgatccggggaagagggtacttgattttgatggtgacttcattgagagctctgtagtcaacgcacatcctcttcgtcttgtctatcttctctacanaaatcacaggagcaccccatggngaagtactcggacgtatgtaccccttntctttcactcttcca

SEQ ID NO: 40406 - DNA, 441 bp, Oryza sativa
  unsure (1)..(441): unsure at all n locations
agcttgtctgcctgaacagaaggcaatatttcactcgtaagaagataaaaattcttatcaactaaaatgttcaatgctacacaaccaaaacaaattatcgttatcaagccaaatcatgcaacgtagattctcaaaaaacagaggttcatatagttcactagaatcttaaatggtgcaaaaaagaaaaaccacgatgtttctcagttctcacttgaagatactacttcgcctcatgaaccattacactggttctttttagaaggactaatactaaggccctgctctaagcttcaactccaagcaacaacttccttggtttccattagctttccaaagtgctaaagtgtgttttgtgaaaaaaaaaatatatgtagaagtttcttttaaaaaacaaataaatccatctttcaagnttatagtagttaatacttaattaatcat

SEQ ID NO: 40407 - DNA, 374 bp, Oryza sativa
  unsure (1)..(374): unsure at all n locations
atgttgctcggctgaaatatggtgaaaatcttaagtatttatgccccattatatatgttatagtgctttttttatgcagaacttcctttatgcttattttttctgtacatatttttgtactgttccattttacctcaccaattgaaaaattatggtgcttatatatttttgtacatgttatagctagcactcgtgcacttatttattntaatttaatggtacagccctttcgtaattactaattaacataggacttgatatgctgtctcagttaagatgttagatcgctagttccaaaattccaattggtaactgagcaacagaattngntattggttaatgcttcgaatttttcaatcagctactattgatgt

SEQ ID NO: 40408 - DNA, 444 bp, Oryza sativa
  unsure (1)..(444): unsure at all n locations
agcttcttatagtgcatggtgaaacctgtattacttatgaactacatgtagaagatatatatatatatccctattcctcaaagtacagaacgagcgcaggtgcatataatcaaatcccattcagtatatgatgcatatacatgaaactccatacggtcaagccaatttacaataccttccacctggtgactttggaaatggcaacgacttaacgaatgatgaaggaccaactccagtagaccataccagcaaaccataaggaacctcttctccattgtccaggattaaattgttgggttgtacattcttcacaatgcctctcacaagcctaacacctgactgttggatgatcacaaagtatttttagtatttcactgccagctttcttatacgatccacacatatntttacgtcttggagtctttggacatgatggcttaaaat

SEQ ID NO: 40409 - DNA, 337 bp, Oryza sativa
  unsure (1)..(337): unsure at all n locations
atcgacttggtcagcgagccacgcatgcgctgcgctattctatccgcatcgcctggagtaaactgctgggtcttacatgtggcaccggcgcttgcaggctgggcaaccaaccttgcaagtgtcagagacgggagagagcaccggcgtttggccccgtctgtcacgctggctagccgtgggtatatcatgtgatctgaggctgtgtgtatgccctgtttagttcacaccanacttctctcaactttcaacttttcatcagcctagtgtctctctatcccaaactttccatcacatcatatcacattagaaacttttctacacacataaacttctaact

SEQ ID NO: 40410 - DNA, 445 bp, Oryza sativa
  unsure (1)..(445): unsure at all n locations
agcttgtaagagaacatagggtgtgtagcattcttttttgtccattggattggatgatactttagttcccatacaatatccttcatatggaagtcttattgtaatgaaattgcagagagagaaagaagctgctgttaagaaaattttgaagttagaacagcaggtggatgcaaaacaaaagcttgaattagatatacagcaggtaaagggcaaattggaagtgatgaagcatatgccaggggatgaagattcagcattgaaaaataaaattgatgaattgagtgaggagctgctagaaaagatggatgaactagatgctatggagtcacttaaccaaactttggttattaaagaaagaaaaagcaatactgaaatgcaagatgccaggaaggagcttgaaaatgtatgctaccttttaagtngaacaaactggatagtgttttct

SEQ ID NO: 40411 - DNA, 393 bp, Oryza sativa
  unsure (1)..(393): unsure at all n locations
gaatttagcagaacagacaagctgaaaaaaacaaaaggaaaaaaaaagaaaacttcaacgtctaagagtaagtttaatagtatagccaactactaacttcgaatcatctatagctaattcatacaatagttacttagtacactattaatgtctggtcccacctgtcatacacacattacgctntggagtccgtgctgcagctggctacagatttatagcccgctactcttctctcttcttttatctttttaaaatatatttataactgacttgtagcctgctattgtacctgctctaataaagatcttgggtattcattaacgcttcatggtgtaagaaaaaaccatgtggagtctataatagatgaagacanacaaatattactatgccata

SEQ ID NO: 40412 - DNA, 355 bp, Oryza sativa
  unsure (1)..(355): unsure at all n locations
agcttgttgagggtntgaagcgtctggcgatgtctgatcctatggtgctctgtactattgaggagtctggtgagcatatcattgctggtgctggagagcttcaccttgaaatttgcttgaaagatctgcacgaagatttcatgggtggtgctgaaatcattgtttccccacctgttgtttctttccgtgagactgtccttgagaagtcgtgccgtactgttatgagcaagtccccgaacaagcacaaccgtctctacatggaagctcgccccttggaggagggattggctgaagccattgatgacggtcgtattggtccacgtgatgatcccaaggtgcgctccaagatcctgtc

SEQ ID NO: 40413 - DNA, 298 bp, Oryza sativa
  unsure (1)..(298): unsure at all n locations
nggaggaaaatnnggatgagacaactaanggcctgtttagttctttantcagtgaaataaaaatantgggtgtntntttntaacatcttttttcattcccggccaataaaataaaattttaattctattataggtggctggtattctagaatgtcctcctagcccactggcatgcatagcaagaagtactgcatgttgtgcttcaacaaacttacccagccagatttttccctagaaccttgatactccattagtcaaggtgaaatggtctacccctactagaatgattatcagttga

SEQ ID NO: 40414 - DNA, 408 bp, Oryza sativa
agctttctcaccgtgttcgcctggatgtcctttgctacgtgggtacctgcctagctaatatggtggttgaggcatccggaggcacagcagatcacgcctgtcacgaggcagcatacctgatgatggccagactacgggagcgccacaactttatcttccacgacacggcgtaccgatttcacccttgtcgagccagcggtgatgatgtcagtactttccgttcgacagccggcgagaacgacaccacctttggtcacatgtgtgctatgatgaggggattggataggatgcactcggacctgcacaaggcgttcaaggccttgaatgatgggaaactcatgaggatcgtcgctctgaacgacgagatagcgcgcctgaagaaagagaatgctcaattaaagggtcttt

SEQ ID NO: 40415 - DNA, 403 bp, Oryza sativa
  unsure (1)..(403): unsure at all n locations
atcacactgtatacaagcccacaacagtgtgcgcttcatgtatcccaagcatgaaatgcttcgcatctcagcattttgatgcgccaccaaaaggtcaaaattttgatgatgtgaagctaaggcaggaaaagtctgctgtcataatcttattcaaaggcctagcatgatacagattatttgaacagcaatacaattgcagtggcttgtctgctcaaataacaagctaatcgaagcactacagcaccaaanacgttttttctaccaaatgtgtttccactaatgaatnttttcttcactctcatggcaaacaagatcatcaagtagcaagcctttagaacagccttcgaaccaatcctccagcccatagcttccgtattcctagctgtccagcccttcctatcat

SEQ ID NO: 40416 - DNA, 422 bp, Oryza sativa
  unsure (1)..(422): unsure at all n locations
gcttttangctacaaaagctgtctgggttaacttggaatgacttgnttttaccatagtcatttccttggtatgttatatgcctgttttcattatggtaaatagtcatagcctaggctattagacttattcattaccataatttttataatatttggtgggtaatctttagagttttctattcggatgcctgtcaagtgtgttcattcgtgaaccttttagagtgttaaccactcggattccttttaattatggctaanaagcagtcggctaagaatgcttctttaggcgccgtgtatgcttttgtcatatgatgcacgaatgtgctattattttgttctcaactatatngttagtttgttaactaatcacatagttgggggctacacctanttaggtgcatctattccatgcaccatattct

SEQ ID NO: 40417 - DNA, 388 bp, Oryza sativa
  unsure (1)..(388): unsure at all n locations
aaattcgttgagggaaactatcagatcacaagacttagcatcaatatacaggtcaacaaaacagcgcaatgttaaatcatagaacttcagcatatatatctattatgcgaactttaaccaagaactaaatagggtaggggtatcatatgatggcatgatgcacccacttggccggacaaaccaatggttggcaatgtatatgcgaagtacacgcagagctacatatattactccctccatttcaaaatgtttgacaccgttgactntntagcacatgtttgaccattcgtcttattaanaaatttgtgaaatatgtaaaactatatgtgtacataanagtatatttaacaatgaatcanataatatgaaaagaataaataattactta

SEQ ID NO: 40418 - DNA, 426 bp, Oryza sativa
  unsure (1)..(426): unsure at all n locations
agctngtcagtctttgataaaatgtaaactatttatctatcagttcaaataagcgcatctggtgtagtggtatcatagtaccctcccacggtactgaccggggttcgattccccggatgcgcattatttttgctctatttatgcattttttgttccatttttgtgtaataactatgctatctctttttttttgcaagtggctttcaatgcatagntntgtgtaattataattcattttttttattntttttgtttaataattatgctatatctcttttttttttccaaatggctttcaatgcatattttagtgtaataataatgcatcttttttttttgcaagtgcctttgaatgcatattctaaaggaaactaggggttggttggttcgattccccggatgcgcattattttttggtctattttt

SEQ ID NO: 40419 - DNA, 318 bp, Oryza sativa
  unsure (1)..(318): unsure at all n locations
agcacaatttttggggcattaataggtactcgtcacatggaactgctgatttgaggtttaagattgagcttgaagctaccacaagtttaccaggccagaacgtgatactggggccacttttcctataagtttgatgcctaaaaattgagaatatgaaatcagctttcgggctttcttcacttatgagcanatggggcttaatatcttaagcatgttcaacaagtcaaatgtccttatcaantttcttttatttgtcacattntgatttatacgaaataatgtcggtcgctgctgctacttcgatagagatgagtgatc

SEQ ID NO: 40420 - DNA, 447 bp, Oryza sativa
ttaagcaccgagcagcaagcttcttactggctcgtctggactttcatctagttatcgaaaatgcatacgatcggacgaccgatccagcgcaaactatcggacacttggacgatggacgcaccgtaccactcttctttcagattatgagcccacaagcatattgtctctttttcaataccaaaacctttctctcacataagatagcacacatactactcttgccctctctcccctacacatgcatgcattttttgtaataagctttagatgcttttttccaataatcatctatcaaatttgggattcgattacaccattaattcattttaattaaatctgtataataagatatcacatgactatattctgatcgaaatattttatttatattcttttttgcaataaatgttgtttaagctcttcacattattttatttatatatttca

SEQ ID NO: 40421 - DNA, 378 bp, Oryza sativa
  unsure (1)..(378): unsure at all n locations
tgttgattcatctactcgaacgcgccgagccaagcacgcccctttccacggagtcgaacgagccgagccgccgaacgtccactctgggcatattcatggcaagtgttcgattagacttctgtccacgcggcatctatccangttggggctgcagcgcgttggtttgcagccggtctgcaccacaatttttttcctaatatgatgcaccaaataactacgcttgcagcgaaacgaggcggcgaggggcaatcgcatccatacatgaccccgctggcgaacagcaacttctttttgcggaaccgaccaatgcattagaacgactnttaatatgagtatgactgaagtatctatctaatataattaacatacttaacatat

SEQ ID NO: 40422 - DNA, 436 bp, Oryza sativa
  unsure (1)..(436): unsure at all n locations
agcttggaaagggggcttatggagaggtttatttatgggttattgnggataaccgtttcgtagctgtgaagaaatntatcagagtagataaactatatgagtttgctaaagaggtaattgttcatactcaagtcaaccataagaatgtagtaaggctggttgggtgttgtaaagacaacaatgctccaatgattgtatttgagtatgctgctaatggaaacttgagtgatcttctttattgtggtgatactccaatctctttgggcacaagattgagcattgttatacaatgtgcggaagcattagggtgcatgcactccatgtacaatcccattgttcattatgattntaagctgtccaatattcttgtggatgagaactttcatgcanaaatatctgattttggaatatcaaggattctgtcaacagataacac

SEQ ID NO: 40423 - DNA, 394 bp, Oryza sativa
  unsure (1)..(394): unsure at all n locations
cccaacaaagaaaagactattcattggatgacagatggcatcatatactcagtgacatatgccaagtttgctgccattatggggtttccggctcgctctcgcaccaatcgtgtcaagattcatgatgagaagcccatggacacaaattctcttcacttcttgtaccaagatgtggactatgagttaggcaccatcaaaggtcttcttcccttctatgcctatctcaacaagctcttgcgcaaaactctcaatcccaaggaaggtgatgctagcaacgtccttgcctatacaagtaatttgctntacaagataaaggctcactcacagctctttgactcctttgacttcatctttgaagaaatccggcttatctccatgatgcctaagcgaggac

SEQ ID NO: 40424 - DNA, 250 bp, Oryza sativa
caccctgtgcgcctctgccggcgccaacctttgtacgctttctcgcccaccgtatctggacacctccccgcgccttgcgcggaatatggccgcctgtccgagaaaaagactccctcttactcctgtcaccctgagaggcctaccactgcatccgagtgagatggaacttcccgccgatggtgatgggcctcgagagaggccgtgggtcatcaacatcgacgatcttggagcgaccttacgccttcacgag

SEQ ID NO: 40425 - DNA, 305 bp, Oryza sativa
cagctcacaactagcaacacactttgaacagtacatccttcctatccatggaatctgacttggaattccagaacttcacctgctgctgctttgaactgacagattgctggcatttcagttaaccatcactatggcacttagctgttctttttactctttttttaaaacaaaagttcatttatttttggtgtgatgaggaagatgcctaactcgctaggctccaaaacaccagcttctgaaatttgggttatacctcactagggcactatctcataaacttctgtttcttagcctcacttgttctg

SEQ ID NO: 40426 - DNA, 392 bp, Oryza sativa
  unsure (1)..(392): unsure at all n locations
ttcagcctaaaacagcgaagatttactatattattnggttgctagaactcagccatgaaaacaaaattgaaaagaacttagaagttaaagagatgaatattagattgaaattgttcgggttcccttctattctacccgggaccaatatatatagctaattgccatgatcttttggcatttctactcggtcccacgcaatatgcaacgatggtttaccggaatatttgaaacaattcgatgtaacaaaatctttatcttctaacttgataaatatcgcacgcggcttggctcggtcgccggagccctgctctaacgcagatgcacgcgatggttgattcagcgaatccatacattcacgcagcagcactccatcacagcacacgtctgacccc

SEQ ID NO: 40427 - DNA, 412 bp, Oryza sativa
  unsure (1)..(412): unsure at all n locations
agcttctgatcgacgagctgagctgggcttagttcttgacagtggcttttaaatctgggcctgctcttttccccctttgaggcccatgcatccaagtttcgntatgctctctctctccctctctctctctctctcacacacacacacacacacaaaaacgtatactactagtatgattggacttgtgatcttatcttaaaaatggggggaagaaaagatggtgatcaattaatacttctgattacccctttcttcaccctaggattntgaccaaagatgctgaaagcaccttagacgtcatttgacatattcacagaggagtatatgaaacttggtgtgcaaattagaggctatngattctgataaaacaccttgcagacccaggatgagaaatatgaaatgactaataagt

SEQ ID NO: 40428 - DNA, 153 bp, Oryza sativa
aacacgcacgcaacaaagtccgtaaaagtttttatagcccctttgcagctaatttagtcacgcgtatcctgagagctcactctatttggcaacgaaagcaacatgcgtcacagcggtagctaaacatgtctacagctggcacttaaagcatgc

SEQ ID NO: 40429 - DNA, 427 bp, Oryza sativa
  unsure (1)..(427): unsure at all n locations
cttgcattcatcagcttcattggtcttgtcgttccgtccttcatggtttgcgaggctctcccctgaactgctgctgctgctgctgctgccgatgatgatctctcttgggcctctgcggcgcgttcttgggattggtgaaccaggtggtgtagaggaactgcttgtgcggcccgtcgtggtcgcagatgaggcggagcttctgcttctcccgcatccaccgcatcatgatcttcatctgcctcttgctcgtcaggcccctcagcccaacgtcctggacacgaaaatgccaaagattttctcgctcgtcagggatgcatgcgatcagggtggcaatcagaggaacacaagatcgttcagggatgacagtttccatctgtncagcactgctggttcattntgacactgtgagacattacgtcgaacaggt

SEQ ID NO: 40430 - DNA, 291 bp, Oryza sativa
ttgttcaagtattataacatttataacttcaatatgcaacatttataacttcaatatatcagtaacgatagggatttaaacattaaaatctatattttgcgataattttaatattaaataagtagttattgctatgcattgccttaaatcaatggtgactacagcattgtggtcaatcgcgtgtaaatagtacgttactaatgatggcctacctgataaatggcactaagaacagaccacaagatgggtcttacgaaataaggtcttgtataaactatagaggggaagtac

SEQ ID NO: 40431 - DNA, 284 bp, Oryza sativa
agcttctcaactttcgactgtatagatgcttttattcagtaagtggagaaaatatccttctaatggttcctctgtttcttactttaaaaatgcaattccacaactacttgtgattgactatgacaattatgaatttatgtgcagaagtcataaactcctgataaatgttgtctaattactgaactttaattattcttcagtcgggagttcactcatcgtgtaaaatcaatatcaatggctaaatttacttctcaagaagtttctgctcttcaagaagggggaaa

SEQ ID NO: 40432 - DNA, 354 bp, Oryza sativa
  unsure (1)..(354): unsure at all n locations
tacaaaaatgtcaaattgtcaatgtctgtgcactggatttcgttcagaataagaaaaaaaaaggaagtgtactggactgttgtacaaaagtttgaatgttcaagtaacttacggcacgtctggttccggcatctatgtcaatctttgtgccgagtaatatgaagggaaaatgtttgggatctgatgggctagcctaaaaaaggagccgaaatttttcagttgcagtcttccagtactgttaaaatacgacaaaaatgctgtactacttttctttntcctctgaaatgtaaaatggacttgtcacgttcttcataacctagtcaaattgattgatattaaccacgcaacattaaa

SEQ ID NO: 40433 - DNA, 379 bp, Oryza sativa
  unsure (1)..(379): unsure at all n locations
attttcttggcatgttatatgcttattntgattatgggaagaggtatagtctaggctattaaacttcttaattaccatgatttttatcatatttggtggatcattttaagagtttcatactcggaatttagtcaaacatgtatttttgtggaccttttgagtgtttggcacttcggccttttcataatttttattcttgatatattaaagctgagaagcagcggctgggtattttactgaataccatgcgtgctttgttatatgacgtttggttgtaaaaccacttggttcttaactacatgtttagtttttttaactaaccatatagttgggggctacacctattaggtgcatcttctcgatgcaccatgttttattt

SEQ ID NO: 40434 - DNA, 457 bp, Oryza sativa
  unsure (1)..(457): unsure at all n locations
ttcctccatatatctatatcatttcttttctccctctataatcaatttatcactctctaatttanccacaaccaattcagctaacagccactgatcatgtggatccactgcatatgaattaatcatctcttcaatccactggggttgaaccacataaatggcactcacttgggattagattctataaagagcattagtaaccacattgtccactcacttacgtactggaaggtatattggaacctcatcaatttagtcatgaccttttgttgtagctcagttcccaagatttgatcatcaagatgacacaagctcttatggtcagttctaatagtgaagggacccctatgcaagtaacaccttcacttatccacagccattacgatggcatgagattatttgttactaatggacagcttctgattattacgacctatagtctttgtgtataagcaat

SEQ ID NO: 40435 - DNA, 332 bp, Oryza sativa
gttcacccaaaatgcatgcatgatcatgagcataataccttttgattcaacagaatagagatccaatttatgatggttgggagtactcaaattcaggacatagaaagcaaaacggagaaattttatagtctcaacaacatgaactgttgccaaaatacaaataggctgccaacatggtggccaaaggaacggagatattgtcatccacaacatcattgacaggaatacactccactacagtagctgctaatgcaacaagagccacttaccaagtgccagaacccagcaacaggaagtaaccaggcaagaaagtgaacacatttttgatgcaa

SEQ ID NO: 40436 - DNA, 381 bp, Oryza sativa
tactgtacaaaattcctaataatatcccaaggccgggtccttgatggacgcttaaatggattaagacatgatccactataagctacggactgtgaccggcatttttttactccgaattcagggagctttcggtaaccaatcttttgaattttccggcggttacacatccaccgtctaatagctatcaccatcatgcagatcactatatcagtaataatctgtatagtagcaggggtctaacactagatcagtactactagcacagtagcaggggtgcttaagcacgccaatttagagctggtcaactggatatcctattcgtgcgaggctagctggaagtggactccgcttcagagtgggcacaattgacactccacacta

SEQ ID NO: 40437 - DNA, 282 bp, Oryza sativa
tgagcctgtcagaatcacctcaatagatcattttcattgttataacatagcgaaccccatttcaaataaaacaccaattaatccttggaccttaattaactagtacataattaagattattcgcaagggtcatctgatgacaagtgtgtgaaactcttccatatactggcgaacacttttgacatatggatcatataattcgacagcaatacgttatacgagcagctgcgtttattaccattgcaggtagaagcaaaataaacatatatatcacaagtacag

SEQ ID NO: 40438 - DNA, 295 bp, Oryza sativa
ttactaccttgtcttgtaaaaaacagataaggaagccgtcataattatcagcgacaagagactgtacttctctctgaataaaaaacaaacaacggctaacaaccaaggagtatattcagtgataaagaaataacaagcttacacttgcataatgttcttccttttatatgcacggatactacattttatgtactgtacatacatacatcatatgacactggaaaatgtctttcctcgctgacacacctgactaacgaaagaaatgttgggctgctactcacaaattgaataatta

SEQ ID NO: 40439 - DNA, 353 bp, Oryza sativa
  unsure (1)..(353): unsure at all n locations
cttttttggcctggattggtctcaaaaaataaatctagacttttataatatgttattggagcagtttttgtgagttgttagatgtaaatcgcgtggtacagaaatctgactgaaataggacacaaaaaacatgcgtttgcagtatagaccgtccctttttttaatagacatgcatgtatttttcctcttcaaacanagttttctctcaaattatttatccgatctacaatccaattacaccattgtgttcgttacaattaaatcttcgtaacaagatcttacattattatnatatgatgaaagaatattcatacttataaagtacttttattatatatggaagttacttttat

SEQ ID NO: 40440 - DNA, 399 bp, Oryza sativa
cagcttgtatgttgtgaataaagaaatttctttattattgagcatacgccatgcgcacactgctttaacaaatgtgcttaagtccctagaagacacatggttctaccacacctggaaatatatggcatatgtggtataaaatccgagtaaataaactcataaaggatttaccaaccgcctgaaaaatgaccacaatatataatcagcctaagccataatattggtcaataaaaatgcacacttacgtggcaaaaagcaatgatattgtatccaatcaattgcttaaaaacccaaacagcaccatgactatataatatagtcagcgggccagctatataaagctttactggttgacaccttttaagatgcattgtaccaacttctaaaaagtgagtaact

SEQ ID NO: 40441 - DNA, 377 bp, Oryza sativa
  unsure (1)..(377): unsure at all n locations
agtttgttataagagaatgtacgatatgattagagttatttgattttgatccaatggatgaaaaaaaactagtgcaattntcaaaatttttattgaacaaaaatgtggataagaaataaacattaattcaaaaataggaaataaaggggaagcagaataagagtaagagataagactatgcacattgaaaaaaaaggagaaaaaaattctagctatatagcacaaggatcccatctaaatcaactagaaccaccaataacttagagtaccaattaattggttccccaaaaagaactaggacttctcatcaataccacaaaactgtgtattntttctctgaattcctcatttggctttactcatgttctatntgcttt

SEQ ID NO: 40442 - DNA, 361 bp, Oryza sativa
agcttactggtgcaattccttcagatgttctgtcttctgaaatcactcacagggctcttcttgagcttcaacagctcttcagggcatattccaccgaaacttttcaacctgacaaatctgcaagtggtagaattgtctaaccttcatctcacaggttcaatcccaccaggactgaacaatgtgcactcactttcaatatttgatgtttctaacaacgacttagaggggtcagctccaattggatatgagtattgggggtttgatgggaacccaaagctgggtggtcatacgctcattcgcacctgtgcatcggccaaaacacctccaagtttcagactccagagaacaaagcactcaaaag

SEQ ID NO: 40443 - DNA, 418 bp, Oryza sativa
  unsure (1)..(418): unsure at all n locations
agctntgccattagaataaacccaagtacacttttccaccactctntntccatcactctttcttctctggtgtttatttctgccctttcaccttgttaactatactaagttcttggattttggtgatgacttcttgcagggtcaatctggataaatacacacatgactacaggccaccttggtggatgcaaacacatttctttgttctttctagttcttgcagattaattcctactccttacagattgtggagaagtattttttaacagattatggatgcaaaccatcttgtagattgtggagtagtattctttttgacgattttctttttcagactagaggttcttaattttttgttaacatattcaatttaaaacttcattttttttgctggatacctgtgtaattgatgcgtgca

SEQ ID NO: 40444 - DNA, 486 bp, Oryza sativa
  unsure (1)..(486): unsure at all n locations
gcttacgcctcattgaaatttctcctgtcagagcaatcattccctataaagcccaatccgctaactgggcatcagtcaaacttannntaacagcacctcgtgtaaattattcagacagaatctttgtactatcaaagcatcattagcagcagtttggcaagtgttgattacatctgaagtctgaaggtgaaagcatggtcttggtctcttgacattgacgagcatagtttaaggtggcttcccaagaatgtttgccacgcggtgcctgcaaacaaaaatgctaatgtaatgttgatgctactagattaccagaaaataaattattagatgagtgagatttgcacgagctataatagaatcaatagcaagcagtagcatcgaaagcaaaggttcaccttattatgaagatctgttcctggatatcgctactganatacttgtgaaagctatgggatagattatgcccatcgtattctgcatatcaat

SEQ ID NO: 40445 - DNA, 416 bp, Oryza sativa
agcttaatatacctaaaagcaacaagatctttatataaaaggcagatcaagcataccaattaagcacatgaaatataaggctaaatcaggtaagatcagcttgtaccctgatactccttgggccaaatcattagcttttacattttgctctcgagacacaagcttcaaagtcaccagccgaaattcattcatcaattctcggcacttctcattgtaaaccatcaatgtgtcatttttgcactcatattctcctgctaattgactgattaccaacaaggaatcacccataatctcaatagcatcggcttcaacctctttaagcaattgcaaccccttgagaaccgcttcatacttgtcttgattgttagttgcataaggcttaatagtataggcaaactcaaaaacttgcccccgag

SEQ ID NO: 40446 - DNA, 336 bp, Oryza sativa
agatccttatctcttaattcactggaaccctgtctccaccctgctatgcctctcgcttattgttgctaccatataacattctttacttgtcctggttttcttctctatgtccatcttgtcgtctaatatcaatatctacccctatttgacaccttacacaatgattttgctaactaataattttctaccagagctaccataatcatagttccaactatttactgtgccattcgatgttctcggcggtaaaatggtagtagattacttttactactgtgactatattacatcctatttctttctcagagatccatcttcgcacctaaatgcatctct

SEQ ID NO: 40447 - DNA, 403 bp, Oryza sativa
  unsure (1)..(403): unsure at all n locations
agcttataatacaaataacttagttgatttatcaaaaggtgcataacagtgtttttaacccatatacacacgactgctatgtgatgtcacgcattttagactgcattcagcagctgtggtcgggaacaaaccggccgctactgcacgtagaacggagcagttcattagcatatgattaattaagtattagtttttttaaaaaatggatcaatatgattntctaaagcaactttcatatagaattttttttttaaaaaacacacgtttactaatttgaaaagcatatgtgcagaaaatgaggggagtgagttggaaaactcaagtgccgaactcagcctgtttatgaaatggattggtacttgctattcattcatgggtctcacttatttgcacacggatagta

SEQ ID NO: 40448 - DNA, 349 bp, Oryza sativa
  unsure (1)..(349): unsure at all n locations
cttgtcttttcgttgaagattggtgtatggctttcaacatctagtcatgttatgctagctgagctagtgcactcagttgcagacttcgctaaccaggtagttgatgcttctacttttgctatctttntttgtaagctttgttgaaggttcatgtccagggcttaattgttgattaaacatcaggctcttcttgcatatggcttgagcagctcaagacgtgctccagatgctctacacccgtatgtatcgattgtcaatatggaaatgctgctatgttgacatataaatatcactttctttcattactggtattttctctggtaccataaattagtcccatttctgcatg

SEQ ID NO: 40449 - DNA, 445 bp, Oryza sativa
agcttctgattgcagggagttgcgtggactgtcgttcctgcatttatgtttctcgggtttgggcacttgtcggcgaaatgacccattccttgacatttgaagcaacagatatcttcccggactcggcattttcttttctcattttgattcctctgtcctggcactggagttaggctgaaactgtaatcttggcgaggattggagttgccttgatgctactctccgtaggaactggcgggttggttggccatcttcttcgtcggcagaaaactgaattgacaatcttttggtacgtgatcagttccttcacaaaagaaacaagtgattctgctcggtggacacctgtgagagtggatggccctcctcaccatgaacgcatgcagaagcacactagctggctaacatgaccgaaatctccacaacgagagcatgtcctaatatctat

SEQ ID NO: 40450 - DNA, 265 bp, Oryza sativa
aagttggtatattttggggcggaggtagtattaaacggtgtgttttttttgcagaaatttcctatataaaatttacttttaaaaaatcatattaatctaattttatagtttcaaatatttaatactcaattagtcatacgctaataactcacctcgtcctacgtattttctcaatcttatcttctcttctcctctctcactcaaactcagccaaaagtgttcagtatcaaagcacgtgccgcacaacactttactgtattacact

SEQ ID NO: 40451 - DNA, 266 bp, Oryza sativa
tacgagctgcactaccaggttgtgaaatctttattgacaggccgtcaccatacccctggtggggcttacttcgctggacgctgcaccaactccaggctaaaccaatattttaataacatttaagaaaccaaattctcctctcacttgaagttttcaactaaaatatttgaagatattaatccacctatattaatgtttgataagggactttatttaacaatactttggataaaagaataataatgtgtacagagataaaagtaaag

SEQ ID NO: 40452 - DNA, 312 bp, Oryza sativa
ccagccactccggaaggacgaccccactgatgaacacggcctccagaagtcgcgccaccccctcgcggatgaaagcttgacgaaccggggcctgccggcacactttcggccggaccggccttgcgcccggccgcacggcgagacgggctcaacaccttccggggaccccgggcataaccgccggactccatgcgaagacgccagcatatgcccgcaggaaggagacaagcgccgcttcctaattgccgtccaaaagaccaccgaaccgttgggacttggacgggccatcgcccagggcaacctccatgaccg

SEQ ID NO: 40453 - DNA, 339 bp, Oryza sativa
  unsure (1)..(339): unsure at all n locations
caaggatattttttatggataaaacctttttcacaccatactacttacaagttatatttgacgatacttcctttgttatgcttaaccaatagtacttcatcatgggctctttgtgaataagattttcataagaagtaaaaagatgtaactattctgacatgctaacaagctgacaccttanatcctatgaatgaaaatataccctataactggacgcgaccacttacattgagcgcgaaaacaacgaattacatcacaagttacgaatgtttttttcatacgtggacatatgtgaaatcctaaaaattctatatttgggcaatggaaagacatattctt

SEQ ID NO: 40454 - DNA, 445 bp, Oryza sativa
agcttgaaccgggggatttagtttggttgcacttgtataaagatagaattccagaattgagaaagtctaagttgatgcctcgtgctgatggtccttttaaaattgttgagaagattaatgataatgcatataaacttgagttgactcccgagtttggggttagtcccacgtttaacatatcagatttgaagccatacttgggagaagaggatgagcttgagtcgaggacgacttcaattcaagagggggaggatgatgcggacatcactaactcgcatacatacaacaatcctccaacggtcatttaaggaccgataacaagagctcgtgcgcgacaattaaatttagaggtgagctcgttcctatgttcttctttgtatgaattcgagaatatattgctacctaatgattatattgtgattaggaacaatggaggggacaagga

SEQ ID NO: 40455 - DNA, 350 bp, Oryza sativa
  unsure (1)..(350): unsure at all n locations
acatactcatcattcttcttcctagagaagaagctgcacttgttcttaaaaggcaccaaatagcatatcaggtcatctgatgaaccctgagttccactcgacactcaagactgttggttggcccgatctttcggtgagttgagataactatgatttgggagaaacgttgacgacccgactacaaccgtacaagacgttgttgtgttgcgccttagcgatcgatacacctctccatgggttggtgatctcgccggtgcanatcaaccctattcctgcaagcatatcatagaaacacgccagaacaagataatagcaatctgatattgcacataggaatgaatacacaagat

SEQ ID NO: 40456 - DNA, 411 bp, Oryza sativa
  unsure (1)..(411): unsure at all n locations
ttaatgactgacgctgcagctttgtgtatattaccacatctttttatccctatactttatgaataatctctcttcaagctatgtctaaagatgcaaaacgaccaaatattgaacttgatcaatctactgatccaggcttgatacagtctaaacatgtcggtttccgaatcattagttttgggatccgacaccttttggggtcacccaaaggtgaagtgctacaacggtattccgtgcgcttgcggaattatctgtgatcataagaaataccaacaacctcatgtaataatgcttgaaggcattgagttatgtcttgccttgcgccttaagatttctcgcggcttcagcgtagctatttgggtccacgtcagctccttggattnatagtcgaatggctgtaccgctaacgta

SEQ ID NO: 40457 - DNA, 422 bp, Oryza sativa
  unsure (1)..(422): unsure at all n locations
taagatacctatgcgagttcatactcctggangtggcattaccacatcccactattgcccattcgggacagctgaatctcatggttnaagcacttattcctcatttctctgaacctctgaatatactcatacacaggctcatcatgtctttgcttaattgctatcaaatcggacaatttcatctcatgtaccccactatataaatagctgcgaagatgcttatccaaatcagcccaactgttaatcgacccatatggcaaagaagaaagccaagtgaaagccgatccagacaaagacaaccggaataaccaagccctcaaggcatccacagccgatgctntaccacactgagctaaaaatcggctaatatgctcantaagtgatgtgctatcttgccctgagaaaatttgaaaatctagaac

SEQ ID NO: 40458 - DNA, 379 bp, Oryza sativa
cttcctccccgcgcggagctgctatcccgctcatccatctccgttggcggcttggggcgcaaacctcccccaccgaagaccgcaacagctagactgaaatgctccttacccgcgccgctgccgctgcagcacatgaaaaaggtggtcaaaacatcctgttcgctgatggggcatccaaagtgtcatccacgagtgcaaaaaccaccgcaaaaacagctctaggaggtaaagtgtccggtaccgacagataggggcatattatatcccattttggacgccggcggcgaatttaaacaagcgaaagaaatcagggagaaaatggactttccctaaccttaagcaccaagtgggtggagcaggtagactctatgaacacaaa

SEQ ID NO: 40459 - DNA, 374 bp, Oryza sativa
  unsure (1)..(374): unsure at all n locations
gtaggacttatgtatctcttgggcttttcctttaattgggctttgcaagcttccaagtgagctaggcaccttgcatcttatggatagaacgttgttttccttcaaatgttgcaaacttccaacttcgcactatctagtgcaggtccatttggaaaaatgttggctgatgggtagtgttcctggtgggggacctaaccaggtagtgtacacgattacatgtgcaaacctgaccattgttaagtattaaaacatcatactcaaatcttaaccagtactagtagtattgtttagaaaatcctagacagctgacctcctaatttgctagccaattaattangagcatgttttgattcagtgtatgcatggacaccttc

SEQ ID NO: 40460 - DNA, 209 bp, Oryza sativa
tccccgccccaacgaccctacggcgcgcgcgggccaaacgacaccaagacggcggacagccacaggacacagcacatgaagacacccagaaaacagcacacacagtaaaaggaacgaaacgagcaaccaaaacaaggccagcaaggcgcccaaacgagatgggcaaagctgccgccccccaacaggcagcaaggaagcacacagacaac

SEQ ID NO: 40461 - DNA, 376 bp, Oryza sativa
  unsure (1)..(376): unsure at all n locations
tttggttgtcaggcctgaagtgcctttgtataatgaaatattatcgatataataaagatgtgtcttttatatcatgtttgtgtggtgtaccccggcttttcctgggacggggattaatacactagcgttcgggaaaatgcnaaatttctcggtcgcgacaacattgatgtgaatcttttggattacttcaacaaaacgagtcaatagatggcgcttcttttgacatcccattagttcctacaggcttangatatggcagatcacgagtggacttacctcccctcgttgtgatcgccttaacaatttcaatggacgagtcgggttgccccggaatcctcccagattcatttgtagggactanagatgccaacggagc

SEQ ID NO: 40462 - DNA, 436 bp, Oryza sativa
  unsure (1)..(436): unsure at all n locations
agcttttgagcatagaaaaaatagacacgtttttcattctaacagtacgattctcggtatcatctattaccattagctcatctgtctttttgactcttctcacaatctaacaccttttctagatcccaaaccactactcaactgatcaccaaccgaatagaggaaggaggggaatgtanggtttatcccgaagtcaagttaatttagactcttgtcattctagctacgacatgtaagacatgatataaataaataaatattaaaaataatttatacataagaatttagcacatgtatcattagatgtccacaaaccagttaaaaatagactgggatgagaatcaaatccaaaatcaagttttaaattttaattcttggttgtagctaatgagctaataagaatataacgagacaggtaatacatgttaggaaactc

SEQ ID NO: 40463 - DNA, 374 bp, Oryza sativa
tggctccaactgcaccgacgcaaaaaaggcaacgactgtgctcttcctaaggcgccatctaggcgaaactttgaaaaacgagttcatgttcgaaatggatccatctgttctttggcaatccctcaaggatcggttcgatgaacagaagcccatcattctgatccaagcacgatatgactgggagcacttgcgattccaggacttcgactctgtggccgagtacgattcaactctccgcgacatcgtctctaagctcaaactgtgtgggcgagatgttcagaggatgagatatagaaagacattgttacattccaccaagccagttgtactcagatgatgacatggccagaattatcagagtattcagacttatc

SEQ ID NO: 40464 - DNA, 339 bp, Oryza sativa
  unsure (1)..(339): unsure at all n locations
agctttaagaagaggtacacgtctgcatattgttgccccgctcctccatgtagaaggactccaaggagcccttgctacagcttttgagaagtccaaaacaacgcgcctctccccacagtgaaaaacagtcaggtcaatggaacaagtgatctgcgacatatgataatgataagcagatggcgccaaagcaattatacatttctgttttccaatcacggngataacctgtcaagttggtagtactgagattaggatggcactgatatttttgattcattctaccaatacatcatacacctcggggtgggatctatcttaatgcaacgatgggctacaact

SEQ ID NO: 40465 - DNA, 314 bp, Oryza sativa
tctcgtcattgccttctagcaatggcaggctgttaaatactgaagagcttgatgtgggttccaacgggctttcgtcactccctgattcaataggaagccttacaccactgaagaagctaattgtcgagacacacgaccttgatgaattgccttacaccattggtcacttgtgtatcactggttgaactgcaagcaggttataatcacctaaacgctcttcctgaggcggctggaaagctagagcctctatagatcctctccgtgagatataacagtctcaggagccttccaactactatggcctctctcactaa

SEQ ID NO: 40466 - DNA, 334 bp, Oryza sativa
gacctaagcactgagcagcactgcgcgggtattgttctttctttattgctcgcgcgtggaacccttaccaaaggagctgacccctccttgggcaaaagcatgatgtgaccatgagtcgcccacaaaaaatgcattgagggcccttcgcacagggccgatcagatcaaatgaagctccgccaaacctgacctacctggaaaggccagtgaaactcctggcgccatggagcgcaggatcaggaaccgggaattcggttttgctggcccatggggcactacgctgtgaacacaccactcgctgatgaaacgacaagagagagccattcccatctctt

SEQ ID NO: 40467 - DNA, 314 bp, Oryza sativa
ttgattgcaatctctgaccatcgaagatattggggcgtgtcgggctgaacagcattgatctcccgttcagtcaacttttgcttccgtttagactcataagccaaagggccgccgaagataatggtgagctccttgcggtggtcttgaaatcctgccggggcgtcgccgtcgtccttcttcctcgacgtgctttggtcttcgtcggagttcttccgtgcagtcttggtgtattgatccgcgaattgcttatagacgaaacaatctttgggcatgtggttggagttaggatggtgcgggcattgggagttcatgat

SEQ ID NO: 40468 - DNA, 442 bp, Oryza sativa
agcttcacctcacccagctgcgtcgccactcttcacccaccattccagtgccgatccatccgagggaggaagctccaactttccctctccacctctctttcatcgtcggccgccgaaaaggggcacgccgccgatcgccaacgagtcgtctccatccctatctgattcacgttctattatcttctctccatgccgagaaaatccttttttgactccatcttgtttcgtccactgcagcgacgggaacgcgacctcgtctacggagctctggagcgcgctccaagcgccgccgcagccgacatcgtcgccgttccgaccgctgtagaccgatccaagccgagccgtcacgccaacgccttctccttgaagtcctcctcaaaacccctcaataatcccaggcaacggcgcagcaagtgcggagatcggccaccgtcttcttcac

SEQ ID NO: 40469 - DNA, 363 bp, Oryza sativa
aatcaagtattttaaaatatttataaacatgtatttctcctcttgtcaattttgatttccccgagcagatgactctgtatgtttaaacactctgcccgactagtcataaccaccaagcatcgggagtcggcctagtcacttcccaaatatgcatatgagtgacatgagttcgtcattaatggaacaaagtttcacggatcagagtttactactcgggtacttttgcaatcttaagagcagaaaatagattatcttatctctatgctcttgatttattccgaataatacttagcaccttgcgttactcggtccatccaacgagccctccggtgctaggaatcggcccaaaggcaaccatccatt

SEQ ID NO: 40470 - DNA, 413 bp, Oryza sativa
  unsure (1)..(413): unsure at all n locations
gctttcatagagtctagaacgccaatttcttatctgagtaagagatatcgccgtatactaacggtcggttgagccgaaaagtgacctgcggtctgaccgtgggccttaggccggtctgaccgggtctgttagccggtctgaccggcgtggtaaggccggtctgaccggccccactggtctgttgcactggtctgcgttttggtggcgatacagagccgctagagttgcaaccagtcagaccgagccgacgacggtctgaccgagccgnggacgatctgactggccactacactgtggtcagaccggccaagttgagtgggctcaatgattgccctgtaacggctagttttctagccgttacaaagtagtccggtctgaccagcctcacaatgggggtcttgaccggcaaacac

SEQ ID NO: 40471 - DNA, 315 bp, Oryza sativa
  unsure (1)..(315): unsure at all n locations
tgtttcaggggtaagtgtgtgcccaatgctttgggaaacaaacacttgtggactatggcatattcttcaccaaaaccccactcctatgtgacaatgatagtgccataaagatagcccataacccggtccaacattcaagaaccaagcatattgacattcgccatcacttcctaagagaccatgtttccaagtgtgacatagtcattagccacataagaaccaaggatcaactagccgaaatctctaccaagcctcttgatgaaacccgctttttgcangtgaggaatgagttaaatgtcatagatttctctaatg

SEQ ID NO: 40472 - DNA, 185 bp, Oryza sativa
  unsure (1)..(185): unsure at all n locations
aatgtagatacacaagaagagtctgggcggaactagcggagtgggcagcgtgcgagcgactacaatctagccaatggcggcaaacttcgatggtgctagaatggtgggaggctaccgtanatatacaagagacacctaagaggcactccgcactttggttgtgtggtcgcctgtgagatatggaa

SEQ ID NO: 40473 - DNA, 244 bp, Oryza sativa
  unsure (1)..(244): unsure at all n locations
tggtctatgtaattcttatacagcttggctcgtaattggattgaaaataataaacaattcaaaattgtgcttttaaatatatttccatactctgatattttacctgttcttgattcctgtgctttcactctgcgggngcattcattggtttttttcttctggatttcctgtaacttgagtcatatctgcacaaacattgacagaacaattgagattataagcaacctctatttcttacaatttt

SEQ ID NO: 40474 - DNA, 336 bp, Oryza sativa
  unsure (1)..(336): unsure at all n locations
aattttttttcccttttttcttttctctctcttccctaactggaaatactaatttgatcgacaattttgtgaatatgtgttggggtgtcctgactcacatatataaagtgtaccaagtgggattatgtacgttntgtataaccgcggtgaaatattctgtgaaatttaatggatccctcttgagtacctttgctttgagccatcgacatgcggtttgtggcaacttcctgagtgtcttctgtgcgggtttgctgatgagcacatgatatattccatcttttatttgcggatgacacgttactctnttttttaagggataacaagatcaagcggatg

SEQ ID NO: 40475 - DNA, 416 bp, Oryza sativa
  unsure (1)..(416): unsure at all n locations
tcgcgtctactccctccgcgccaaaatggtttatcctgtggcggaggccgacgagaagagccccttgcgccgcctcaccgcggaggagntctacgcgcgccaaggcgtggtcaactactactccaccttcgtcaacccgcgcggtctccgcatctttacccagcgctgggtccccgcgggcgtggacgcgcccctcctcggcgccatcgacgacttgcactggttcacgggggagaccagctggatggtgcagctaaccgccgtgcacttatgcaaggccggcttcgccgttaacccaatacgagattaatcaaaanttaaaataacaatacaataaaatccaaaagttcgattagaaaaggagagaccatgtacgaatacaatctaaaaataacttacactcgaaattaaaaata

SEQ ID NO: 40476 - DNA, 406 bp, Oryza sativa
tatattaatctttcggaaattgttgggtttccagtactaggatggccgtgactgatagtactatcaatttccgtcacctaaaagcaacaatttcctatgtcaaaatataaggtatgtttaacatacctttaactaaagatgtcacgatacgtactaactctttcaataatacgaatggtcattatatatatttagaaataaagggagtagttatttatgtgcgcatgtatgtataggagaccgtttaatagagagctagtgactgtaatgcccagtggatcgatcagtggcaaaatgctcttactcaagctggtcatacaatgttatacctctcacctttctagatacctctaatgatatgctgtgatactgctgctcatattgatgtaagctattatgtggaatg

SEQ ID NO: 40477 - DNA, 241 bp, Oryza sativa
acaaaatccagcatgcgcgcaggaacagcttaggaaggatcgataacgcgggcttacatgagtggatcggattatcctccccttgctgctagcttgctaccatcttcgtctcgtggacccctttctttgaccatcagtcttgaccgagccggacttaagagctgacaagctgggactgctagcgcgtactggggctgaattgaggccggtacttaataaacagatttatcaatatccacta

SEQ ID NO: 40478 - DNA, 351 bp, Oryza sativa
  unsure (1)..(351): unsure at all n locations
gaatgcacatggatggaacagccgtgatgtagacatcattagttagtattaagccttaataacaatcatggaccaagtagtactacgtagttactgttggtcaaacgaaaaaaaaataacagatcactcctgcacgaaccaacggtcgtgcgttttgtagtagatggtaacagctgtttggacggcaattctttatatgtttggagagatgacactgncgtcatcatgtcatggttacacttgaacagttntgctcgcactcatagtcctctaattagatactactacatacatggagaaagaaaagaagtcttcttaattaaatgacattaatttcgtacgttagagatg

SEQ ID NO: 40479 - DNA, 348 bp, Oryza sativa
  unsure (1)..(348): unsure at all n locations
cttcgcatattgggttaccaaccaagggtgttgctactaagtgctgatattttcatccaggttgcttacccaagaataacaaagtatgtaccatgatcctttttatgtccccgttccattataaaccatgtcatgtatccctccataattgacaatgcaacttgtatgattagacaaactgatactgtgatgcatccatttctcaaagttgctatttggtaatcttatttgtatgaatatnntttttaatttgattttttttttggaatacctggttttcatttgtcgcaatggtttctcttactaaccagatgaaatcacatggagtttgcatctgcatagctatac

SEQ ID NO: 40480 - DNA, 277 bp, Oryza sativa
gatgatttaatgaagtaatgtcttacaaaaatgttgtgctttccacagactcacaagaaatagaagtattttaggacttggccaatttataaatcacagggtcacgtaccactaccatttagcatcactaactgtggttcacaacaactctgcaaatcttattcactcataagtcatcatgcataaaagtaacatcagcctcggattacgaaagcaacacaagggttgatgtacttactaaaccatatcatttatttgcatatttcagtgcctcata

SEQ ID NO: 40481 - DNA, 387 bp, Oryza sativa
  unsure (1)..(387): unsure at all n locations
ttcgtgaaggatctaacagcattaaagagatcatgtttgattaggtcccaacatttcttatagaatgcgctaatgaagccatcgggcccaggggcttttttagacggtaaggatttaatagtgagctcaagctcttccatggtgattgcttcttcctgatcagagaggtcaaaactgctcatgcctaggctctgccaattcaaggacagctctctggactgaaacttgcccaatctatccgagtagaaattgaacaattcgtcctctttttcttgatgtgagatngcaaagcacagtgaggtttgtagatagtggataaagntctttctccttctcgcatttgccttgatatggaacagctttgtattggcgtctccttctttaatc

SEQ ID NO: 40482 - DNA, 183 bp, Oryza sativa
cagcatgcaagctggatttcttgaggaacttaactttactgtcatttcaagaagcagaactataataaaattgcattcgaaatccatgatcttccaagtgagtaatttggagagaagttttacgaagtaacatatacctcagtgatgcaccagcttatgagcaaggagttacaaaaaatgagt

SEQ ID NO: 40483 - DNA, 355 bp, Oryza sativa
gagaagagaactagcaaaacaaccgaaggtgcacttaaacgccctagtgggttttagtgattaatgacaaggtggttaaaggggactaacgtgtttatcaagtttattcacaggagtttactcccaaagcaagttgtgatggctaagaatgcaaggagaccccccaatttgaatgttcctaagtgcgaaaaataccgaaggtgattagactacgtttttctctttcgaaattgagtttatgaaaaaccgtactattaagaggggtttcacgtgtggatctagggtatacaaagtgctcttagtcatatccatgagtcaaaatatttttggaatcatttctaacaaatgaattttc

SEQ ID NO: 40484 - DNA, 192 bp, Oryza sativa
ctccctgtcaatcgttcaccgacaccggctgtaccaacaaccacacgcgagaggctccctgccaatcgctcaccaactccagctgtatcaacagccacacgtcaagcacatcggcacgaaaggctccctgctaatctgtcaccaacaccggctgtaccaacagccacaagccaaacactgaacagaattctc

SEQ ID NO: 40485 - DNA, 373 bp, Oryza sativa
  unsure (1)..(373): unsure at all n locations
tatattatagttggacataaatgatgaagcaaatataaatgtataaataacaacatgaaactacaaataactttgtccagttcaatatcagaaaaaatatataactaaatcctatgttctcatttagctacaaataatttaatatagagaaaattataagttacaaatcaaatagtgctaaaaataataatgtaaattataaaacaatgaaattagctggaaattgacaaaacttcttttagcctatatatatgaaaatttgattcattaattctgaacgggtgcctgcttaattgatataaattagaattntcatgttctattcatatcttatgggcttaatattntgtgtgtgatctaagagcatggttcc

SEQ ID NO: 40486 - DNA, 319 bp, Oryza sativa
gctaacataataaaagcaattatatctttatattaagggcagatctatctgttcacttgagcacatgaaataaaaatacagctcaaacaggtaagatcggctgaaaccccgatactactctaatcgacaaccaagaagcaggctcgagattatagatctaagcatgactcatcagaacaaactcaactgatgcacccataagtacgaaaagaaatacaatatctataacaataagctattgggagcctcatagaggggcgaatatcttatataatctaagccaacatccataattaacctaatcggctgctccctagcg

SEQ ID NO: 40487 - DNA, 369 bp, Oryza sativa
ttcaacaaccagcctttcttgaaagatcttgtttttattcaggctaaaactaccggtgctctaagcaagaaactagctgccaatgacaagatcttagaaaacataaatgttaagctagatggctatgcttccgctttccaaaaccagctgagatttaataaaatgctagaaactcagctgacgcaactagctactctagtccctgctaatgagactgggaggattccagggcaacccgaaccctccatagaaaatgttaaggcaatcatcatgaggggaggaaaatcgacttaggatccaccgtatcttaacactgcatgaactatgaggaacagcgaggatacatctcaatctagcacagcagggaca

SEQ ID NO: 40488 - DNA, 320 bp, Oryza sativa
  unsure (1)..(320): unsure at all n locations
agcttagatgcctntcatgctttgttgtgcagataccgcgctgtccaatggatgactggggttaattatttgcctaaatccagacgtgactcattatttgcataagttccggctacatcaacgagattttgctcttaccgccaaaaatggacaacttctccttcacttgaatatctccgttccaaactggaatacttaggttaatcgataactttggtcggataaatatcttgacccttcttgcagacctatatcttcgactacacgcggtcagatctaagtcatgggcctcatattttgggttcaagctgctgaaacta

SEQ ID NO: 40489 - DNA, 288 bp, Oryza sativa
ccgacgtcgacgctccgccttcaccggcttcgcgaggagcccgtccgttgccgcgacgcctacttctacgccagcgccgtcgcatcctccaccaccggcgtcgccgagttctccaccgccgcaaggaaccccgtctgccactgctccgtcatgatggtgcaacgccggatcggagggagagaagaacgacgagaggctgactagtgggtcccacaatcggttctcccctccttgccatgttgacatgccaccgtgggcaaaagcggcagatagttatgatgacatctc

SEQ ID NO: 40490 - DNA, 442 bp, Oryza sativa
  unsure (1)..(442): unsure at all n locations
agctngcacgccgtcggattatacaggttctgtccgctatgaagcgtaataccctactcctgtgtttaggattatggtagagttttacagaggtttcttcactccagagagcacactcgctttctttcttctgaagctcaggttttctgggagtcgtcccccaatctcagtgggcagggtcctccttttatagctcaaggggataccacatgcgccgcctctacctaccctccataggagggggatcccactccactttttttgggcttcaaaccgtgccttctcccggaagctaagcaacaaacggttctcgagtggaaaccggcgccgccccccgcctgacacggtggacagccctgtcattctctcataaatgaacgatgacttgcgacaacccttcctcgagtgacgctcggatgtgacgggtcatacccacccccac

SEQ ID NO: 40491 - DNA, 381 bp, Oryza sativa
  unsure (1)..(381): unsure at all n locations
ttcatttctcacatttttcttttattctctttctctcatctcctagttctctttaccctctcttttttccttttcgtcattgtttattttccttctctgacctgtnccgcagatcagctttaattccagggcatagaatggatccgttaaaatttatgggtatgaaagggattaaatgagttttcatgggtacatacggaatttactctatctgatacatattgattatccatgtatcgtagaatttctccatcagaaatgttatttttgacaatttctcacttgatatctataaacaatacattgccttaatctttgtttgattcacacaatgaaaatgattgatgccatttatattagttcagtgccaatttaaagatc

SEQ ID NO: 40492 - DNA, 434 bp, Oryza sativa
  unsure (1)..(434): unsure at all n locations
agcttcaacattgcgaccgatctgagttgataaacatctatgaatcatgccttgataggttgctcctgcgttctttaatccaaagggcatggtgatgtaacagtaagccccaaaaggcgtaataaacgaagtcttcaagcagtcggattcttttagtcggatctgatgatatcccgagtaataatccaagaagctgaataactcgcagcccggccgtgagtcaaccacctggtcaatgcgaggtaactcaaaagggtctttgggacaagatttgttgaagtcggtataatcgacacacatgtgccattgcccccgtctttttctaaccacgactgggttagccagccagtcgagatgaaagactttcttaatgaaggctgttgcttacagctngggttattcctccttgatcgcatccttcctgtcctgtgcaa

SEQ ID NO: 40493 - DNA, 268 bp, Oryza sativa
  unsure (1)..(268): unsure at all n locations
aggtgaaatcaaatgacggaattgttgtgattggttgagatgaggagatagatggagaatattaaatgagagatggctgtagttggttgagatgggactaggtgcataagttactacattttgcgacaaaatttaaataccagaagtagctatattttgggacggagggtggggcgtnntctcatatatttcattgccttgtatctccttctattcttcctgatcacattcaaccgtaatcatttatattcttatatcgttcttatca

SEQ ID NO: 40494 - DNA, 399 bp, Oryza sativa
agcttacacagctgacagagcgctatctgctaaatattgcatttgtaggtcacataccgacctccttgggataccctctactactgttaaagctggatcttagctacaacaaacttcaaggtaccatacctctagagattagtaatcttaaacaacttatctatctacaacttgcatcaaacaagcttaatgcggaaatacctgatgcattgaggatgtgccaaaacttagcaaccatccaaatggaccaaaactttctcagaggagacatgccaatttctttcggcaatctagatagcctaaccatactaaatatatcttataacaacttatcaggcaccatcccagtagcactatgctatctacccctactaaacaagcttgactcttcttacaaca

SEQ ID NO: 40495 - DNA, 371 bp, Oryza sativa
  unsure (1)..(371): unsure at all n locations
aagtgcctaagtccctaaaagaacgtgacaggccacaccttgaaatatgggctgcagacatattaggcctaggccaaaaaatatgccttcgacaccctttaaaggatgacgcatgtaacatggctccgagtaataaatcttccgggtaatatagaccaagtgtagctcatatgaatagcttctgatctgaatgattatcccctatgggatactccaaaataaatataataattgaatcccgactggcgcangtattcggttgatagcccttacggcgaataataattggtccagtctttgagcatagaanatagactcatgactatgaatccatgtggaatgtatccggaacaagtccaatatggagatat

SEQ ID NO: 40496 - DNA, 392 bp, Oryza sativa
  unsure (1)..(392): unsure at all n locations
atcctactgttgcagaggctatgaagactaaatatatttctgtttcaaagacaactccagtagttgaggcactaaatcttatgcttgtggaaaagcaaccgtttgttatgataattgagagcaacagatctctaataggcttggtaactctcaaagatatccaggatttctgcagaactgcgaaaactaccagggtacagactgaggtgatttgctgtcgttttccctcattnttccttctgcgattctgcttgatcttaattcataagttatgacttatgtataccaaactttcaactggacatgcacccttgtcttatttatgcactcttttcctttntttagatgatggataagaatcttgcctctatatcctcaagtggatatacaca

SEQ ID NO: 40497 - DNA, 376 bp, Oryza sativa
  unsure (1)..(376): unsure at all n locations
cgtttccaaatcagttactgcacttcaagtttgcctctttttttttcaaaaaaaacaaaaaataatttgacttcaatttgataatttatgtcccttctgatgctatgcattgaagcaacacctgacctgagagacagtgaattggaggagaatccaaacaaggacaggcgaaccgtcgtaaattttcctagaggcttgttcttgcgggcgaacacctatggtgatgtcagtttcatattgttcagtactctattntgcagctgaaagcatcagcggtatgtgtttaatatactctctgaatatggtagacaacggtttgctatatatatcggtacacttattatgagtgacgcagcggctgtcaaagtaaagcaca

SEQ ID NO: 40498 - DNA, 375 bp, Oryza sativa
agcttatattttcctttgtttctccaaacgaaaccctaaatatcctggaaaagagatactgataagtgctctgctccctatatccacaataattcagcatggtttcactgccaccctatataaaaccggaaagcagctcgatttgacgtgcctaccatctctactataataaagataaaaaaataaactagagtagttatggacataatgcttgtctttcaaaccagtatcattgatcctcattgcgaggactatatcgaaatccgattgctttcctttcaaaaagagaggattgaatcgaagtcctaatcgactctttctttccgtgctagcaaaatgatcaaaatctctagatatcatgttggtaggggaatg

SEQ ID NO: 40499 - DNA, 378 bp, Oryza sativa
  unsure (1)..(378): unsure at all n locations
gatcaaatatcggaaagggtttttggacacgaatgaaaaaactaatttcataacttgcctggaaactgcgagacaaaacttttgagtctaattaagccgtcattagcacatgtgggttactgtagtacttatggctaatcattgactaatcacgctcaaaagattcgtctcgcaatttacatacaaactgtgcaattagtttttctttttatctatatttaatgctccatatatgtgtccgaaaattcgatgtgaccgttttacgaaaagtttttggaactaaacaagccctaacagaatatcataagggatggcaaattgtacgtaagcccagcagcaaaagctctgtcagctatttgagctcngctcgagaagctt

SEQ ID NO: 40500 - DNA, 332 bp, Oryza sativa
  unsure (1)..(332): unsure at all n locations
gctctcaacgatcataatattatcggnccttgaatcatattattctaggatttacaccgcatatgctatacattgatatcaagtcacttggttgattacaaatatcaagaccactctgctggatggattatatattccttgactatatgcttagtttggtcaagctaaccacatagtcggtggctacacctataaggtgcatctagtcgatgcaccaactatattcttcagccctccacagtctttagatctggtaaaagttctcgggagatcattggatagatgattgaagtacttggctttggagtaatctggttcgagagaagattatc

SEQ ID NO: 40501 - DNA, 249 bp, Oryza sativa
cgctccgggccgtttacttggacggaggaagctgaacgtgccctcactcagttgaaggcgtatctcagctctcccccagttctggtcgccccggagccaaatgaacccttgctactctacttagcggcgaccccgcaggtggttagtgcggcgatggttgtggagcgcgatgaggacaatcctcattccgcgccaccccaccctgtgctggctggctccggagagagcagggaggagaggcccccgagc

SEQ ID NO: 40502 - DNA, 415 bp, Oryza sativa
agcttatgttcctgtgttacagaactgttcttatcagatgcgatccacacttggaaaagcaattttgacaaggagcttgagggggcggaggaatgcccaatctgttacagcattctgcacacgagcaaccacagccttccccggctggcttgcaagacgtgcaggcataagtttcatggtgcttgcctctacaagtggttctcaacatccaacaaatcaacgtgtcccttgtgccaaactcctttctagtccggctgtgctgcgctatgcctattttttttttgcaccgtagaaatttaaatttatactccgtagttattatgtcttgtcttacaaatttaatgaagggtagataaaaatatgtagttcatgtgtctccgttgtcccgtaattcaaaatgcgataattatcacct

SEQ ID NO: 40503 - DNA, 307 bp, Oryza sativa
  unsure (1)..(307): unsure at all n locations
gctccttgatggaggaggcgccgcacgagatgagcttcatcagcatcgccgacgtccgcatccgccctgccggtgtcgtcgccgcttgttgctggngcgtgcagccatcctcctcctgttgcttctgcttcagggtaacaagctgggtggtggtgtcgtcggcgctgcttgaagacggtggaggtgatatctcatcaatgccaattaaggactgctgcgccgccgccgggacagggacagggtcggtggtgcggtgatagtcggcgaggtcaaaggatgtcatgcacctcctgtgctgcggcggcgt

SEQ ID NO: 40504 - DNA, 382 bp, Oryza sativa
  unsure (1)..(382): unsure at all n locations
ggacctagttgagggagccgaagctnttgtgggattcgtcgcacaaggcaacaatccccacctcgcccaggaattatcgcaaaattagaacgaattgagagaaaaaattttcagctcggctttgataccagatttgttagctactctaactaagaacacacaaactntctcaagaactcgatatcgtctaccaatccgacaggattggcaccgccgccgccatcgccaccttctttcttgccgaatgaaacagaatattacagagttagttatatcgctctctcaccaattcacactccacacgcaactcacacccttacagctggcctgggccataagcccactctggcccaaacacccttgggttacgtttaatcattct

SEQ ID NO: 40505 - DNA, 181 bp, Oryza sativa
aagcttctgagcgaatcatgcgcccaacaatatctccatggcatggacccagccttcgttcgacccatccatggcggcacaccaagcgtaaccatttaaggcccgtgcagcccaacactatggtccaactgcacatgcaagctaacacatcatacttcgacacgccatattcacaccggcc

SEQ ID NO: 40506 - DNA, 424 bp, Oryza sativa
tacaggaagcacctaaagatttgttttttttttagtttactctaacctacaatgttgtatcctttgcaatttttcagcagctctaactctggtgtggggtgaaagataacaatactgcttacttatctatgtactccatcagctctactcaaattacactgtcttaccatgtttctcttatacaattctacaatcttctcatctcacacttgcttcattcacctcttttgatcctatcttcttttctacccatactcattactactttgtattcacctatcatttctcattaaactttatatatattctactatcttctaatcacttcataacttcacaccaattcttattcttttataccaaatctatatcccattatattcaacctctcccctccttattatcttttttcctcccattctct

SEQ ID NO: 40507 - DNA, 410 bp, Oryza sativa
agcttggatcaacaaaagtttcttgtcagcagttcttttccatgggccctgatatcattggtcgattcatggatatgcttcttgaatttgtccctctaagtaaagcatataccttgacaaaagatattggtcttcagagaaaattcctttgcaattttggtcctcgggctgctgaccctaagttttccagtgatcgtgaagttgaaatatcgttctggattgatctggttcagaaacagttgctacgggctcttgatcgtgaaaagatatggtcaagattgacaacaagtgacagtattgaggttggaacaaaagaaattcgtctagctttatgaattctccttccaaaataactattttccttactgcacgttttggaaaacgatttagcaatttttgggttttcattg

SEQ ID NO: 40508 - DNA, 325 bp, Oryza sativa
aaatctagctatgaaggtttaccaaaatcgtattggccaggtgtgataaataccatccctctgaacaaacctaaacattagctataacccaccactgttctttcaagaggggttgtgcctagcctttcttcaccctcaaatgccccaagtcatccttttgccatcagaacccccatcactagatcatttttaacactgctgaactcatcttctccacccatggtgctgctgcaaccaggatatcagcttggtgccttatgtggttgcaagagatagacaaatcatgaaatcctagtgcgtaaccaagctttcttaacatgggaaa

SEQ ID NO: 40509 - DNA, 373 bp, Oryza sativa
agcttttgacgggggaggctattgcttatcttgatatatcaaagcgtagaatgagccaagctgaagtactaactgacacgaaacacggctgatggtctgtccaaccttccaactgtaaagtccgtggaagcatcgtaaacatggtgcgcaaaaaattgatactagctagtaccgctgaacacacctaaaggccaggagagttgaaacatgacgtcctgctgaattctcctgctaaatttctcagatgcttcccattccaatgctactacgagctgcttgatggtggtggttacgagatatccaaaactaatttaacttctcatcacatgaaaaggttgtgatgaaaggttgagtcatgttatacatatgcttt

SEQ ID NO: 40510 - DNA, 407 bp, Oryza sativa
  unsure (1)..(407): unsure at all n locations
taacgctcaaatntagaatgtcatcgatgaaaaccacaactaacttattcaagtattccatgaacactttgttcatcaagttcatgaagaaggcatgtgcattggtcaagccgaacgacatcaccgtgaattcatacagcccatatcgcgtagtgaatgcggtcttcggaatgtcttcctcactaatacgtaattgatgatatccggaacgaagatcaatcttggagaatacagtggcacctttaagctgatcgaacaaatcatctatccggggaagagggtacattgttttgatggtaactatattgagagctctgtagtcaacgcacattctcttcgcttgtcttttattctacaaaaatacatgtgcaccctacgtgaagtactccgacgtatgtacccctttc

SEQ ID NO: 40511 - DNA, 445 bp, Oryza sativa
agcttggctccaataaagaccacaagaaatgtcgatagctccccaccacttgtcaaagacaagaagcgtgaacgcggcaaggggaaggtcggggagttggcgccggagccaaaacgggcaaggctgcgacgtcgatgccggtgagcaaagcggggaatgtcgtgagggcgccagcccaatttgagctatgcatgccattggtagaggacaatgtgttagccgtgatgggtattgcttgccgagagctacataagcaatacatagagctaagcaatgccaagcggaaaatgagggagtcatccatagttggacatcacgaccaccagccgttcctattgtcgcctgcctatataactatgggctttgatgacctcttcgaccttttcacgatccggaagttggacactggtcttctaaaatgctacaccttgtaagtgcatacctt

SEQ ID NO: 40512 - DNA, 330 bp, Oryza sativa
  unsure (1)..(330): unsure at all n locations
actcagcttacaatcagcggagggcaccaccattcaataccatttatggactgagagactngggatgcaatacttgggaaaaatgactgcttacatatactngcgtcccatcttaatgaaatntggcgccgntcttcggccgacccggcagaaaacatatacttgcgacaagtggagtacttgcaacgaacgggcaccgtcaaaactttgcgattggtgagagttcggtgagttactagtactcatcaattgctagacttttagcaggaatcaaattgagactgaaatacttcttctgtaaacatacaagttggtggttcaaaaaataaa

SEQ ID NO: 40513 - DNA, 286 bp, Oryza sativa
aatactcccgtagagatgcagataccgttacaacctacaaccaacgaatgttaagaaaacatagggaaaatcacaggcgaattcggaggagaaaaaacggtggctaaaatatattgcgggtgtggggactcgactcgagcgactatagaggagagaggatgggttggcctgcccccccctcctctgtttataaatgcagaggcgccgagtgccctagtcttcgctcaactcggaggaggaaactggaagagacccgcgagagaggcggtgccccgtttcgtcccca

SEQ ID NO: 40514 - DNA, 435 bp, Oryza sativa
  unsure (1)..(435): unsure at all n locations
agcttcagccattggagcaacatgaggtcgttgagctngacatgaagctgatcgccgagagagcagcatctccgaacaccgagatgcaggagctgatcgccagggcccangacgcgcacaaactccggcttgagctcgagaggaagacggcgcgcgagctcgagaggaagatggcgcgcgagcagctgcaggagatggagaggacggcacggccggtctacgacagcatcgaccccagtgtcatgaagcagctcgggatctccggcgatgcgcagtacatcgtcagcccggtgaaatctcggcacagtctgcatcggcgcggcggcggcggcctgctacagaagctcggcttcttcctcaaagaatagcaagaaccatcatcaatggtgtctgtaaagctctgtaagttcttgtacattgagacatatgctctga

SEQ ID NO: 40515 - DNA, 471 bp, Oryza sativa
  unsure (1)..(471): unsure at all n locations
acactatgaaactcaagcttggccgatgccttgtgtcnggctccgtcgtggtagctgaggatatgttatctgttggtgtggtgttgtagatgcggttttcgctcagttctccctaattaactgagcactgtaaggcttaatcccgctttctcctcaaaatgggatatcttcttcttaatataaaacgtcggcaacggtctgaccgttcgaaaaagaagactctacatatcttcttgactgcaagtcatagaaagattcatagaagtgtacaataataaacacaacaatactagaggccttataaaatgaggagtggtgtctctgctagtttactggctgaagagagtaccaactaacacaagaacagatctatgtgtggcacagaactctctcattctcatcagaacatcacagaaaggcaatcttaccgtatcatgtcagagataacctctgcagattctcagttgcatg

SEQ ID NO: 40516 - DNA, 464 bp, Oryza sativa
  unsure (1)..(464): unsure at all n locations
atccttaagtcacctgcggcatgcaagcttgcacgtagtcggattatacaggttctggcctttatggagcgcaacaccctactcctgtgtttgggattatggatgagttttacaagggtttcttcactccagagagccgccttgcttcctctcttcttgagttcagattttctgggagtcgtcccctcatctcagtgggcagggtcctccttttatagcttaaggggataccacatgtgccgcctctacctaccctccataggggggaccccactccactttttgggctttaaaccgggccttctcccggaagctaagcaataaccgattctcgagtggaacccggcgccgccccccgcctgacacggnggacagccctgtcattccctcataaatgaacgatgacatgcaacagcccttcctcgagtgacgctaggatgtgacaggtcatacccacccccact

SEQ ID NO: 40517 - DNA, 335 bp, Oryza sativa
  unsure (1)..(335): unsure at all n locations
tatatntcgtctntatctctctntntctctattcttctctattcttctctgcttctntgacctctcctgctcttttctatccccgagccatgcangcgacgggcggcggagggagaggcggcttggcagcgtgggcggtgagggcagcatggcgacgagggaaggggcgccgcgagcggcgggctgctcaaagacggcgctgggcgagctggtgaggggcgccggcggctggcaagcgcanggtgacngcggttggcgggcgcatggcgacggctgcaagcgaggggcggcggccacgcgcggtgagacggcggcggacaaaatgccccgcgcac

SEQ ID NO: 40518 - DNA, 425 bp, Oryza sativa
agcttcaatacaagagagacgagtaaattaaatattaatatattaataattaactattgtataaataggctattaaattgacgaagctagtagttagttatattatattatctgggactaactagctgtcattcgacaaattttagtatagcttaactggttagattctttgtggtggaaccagcccacccaggtttaaatcctagaattgacatgggtgctcgtatttacgggctatttattctttcagtggtaagtaatatacccgtcaatagcgaggcacttacacgcatcaataacttaatgggcttcaacctaactggaccaaccaacggtgctcacacgggctaaaaaaattataacaagcccatggtcaacttcttttttatcacaacttattacaatatatctatagtggaattata

SEQ ID NO: 40519 - DNA, 87 bp, Oryza sativa
cccctctatccccccccaccgagcagcccctcccccccccatcctcatcccctctctcctctcctgctctccccccccccccccccc

SEQ ID NO: 40520 - DNA, 436 bp, Oryza sativa
  unsure (1)..(436): unsure at all n locations
agctttntatattcctaaaagttggtgacactaataagaaatcaacagggtcaagacgtaagcactgcccaaacaacctctggtgggtgcaattgagcacaggcagcttccatcaccacgagaattggttctaacatgcatggtgcagggacaactgattctacgaaaagccaggagtaggaacaatcattaccaaagctagtactcacgtccagcgcaactacatatattaaggcaaataataacaccacagaaaggcaaaaggattacattatattagattaaacctaagatgttgtcatgtatttgcgagaaacagtaagctcttaaaattactaaatatgcccaaaaaaaagggaagcatatgttaactagagataacaataacctgataacaagccatactgtctgggtgacgccgcgagatacatataca

SEQ ID NO: 40521 - DNA, 345 bp, Oryza sativa
  unsure (1)..(345): unsure at all n locations
ngagtcaagacatggtggatggtcttacattctcacaatcttcagncagnttgctaatgtggacttgcagatagaaataattatatgaccatgcgataaagcatattatgatgtacatttgttgcatacatgcggtatgatcggacatggttttggaatttatttccattatggccacgtcgctatttgatgaaagaattggtcaaatgcaattatgcaaatatactgtaccaccaaacctgtcaccagtgaaagaaagggcaagggcggtcactattggataggtttacctcaacactttttttcttggtggggggggggggcttcttgcatacctactctata

SEQ ID NO: 40522 - DNA, 435 bp, Oryza sativa
agctttagttcttcgtgggaaccaaatttctgggagaataccttcgacgattggaaaattgcacaacttgtatattctggacctatccataaacaaattatcaggtcaaccccatccacaatcggcaacatttctcacctgggacatttttttcttgatgataacaacttgagtggaaatatacctattagtatatggcagtgcaccgaacttcttgaactcaatttttctatcaatgatcttagtggactgataccttctgacttaagtagttctccattctactctagaggctctaccctcttggttgtggacttttcacacaataatcttacaagacaaattcctgaaagttttgggtcaaataatatgcaacaagttaatctttctcgaaatgaattatctggtcctctgcctgaattctttcggcgcatg

SEQ ID NO: 40523 - DNA, 465 bp, Oryza sativa
  unsure (1)..(465): unsure at all n locations
ccttgatagtttcctcanattcaaatacttagttgcatatatactagctgctttggggtaactaacaggcgggtgaaattcttgtcattcctagcccccgccgagttagtccattcttgctccattgtgcagaatgaggaagcgattgtctagtctgttcaaggggtccagctcttcatcaagtcatcatgacgagtctagtactcgtccatcagctgatgtctcgatggaagacgcggaagctctgcgacaactcctgaacgacaccgacctcgaccttgtcggtgatcgggagagacaagcctactacatgctgagcgaccgggagtatgctcacacgcgagaatactctctggagctgctgaanaagataggtatggatgttgaatttccttctgtttggaagcggtaggtggcagagattgctgggtagatgacccgttctcatttgctacttgcaattct

SEQ ID NO: 40524 - DNA, 428 bp, Oryza sativa
  unsure (1)..(428): unsure at all n locations
agcttcanaattacttcataaaagatgggatgtcatgccaaaatttctattgaatttattgtggtgattacatacaaatcggaggtgcctaaaaggtttgcaacttccgcctccaatgttttttttgtcatactacatttgcacctatgttttcacactttttttgtctccaaaatttagttgtaagttgatgagagagaaaatgtgtgtggggaagaaagaatatatagaaatttagttcatttgctaaacaaggttttataaaatagttgagaaggaaaactctagtgaaagttaatcttaaataatagaaaacaaactaaaatgaagattaaaacaagtaaaacacattacaattagtttaaaactttacaaatagtgtttaagaactatttggtgtaatatnttatgatttttggatgaataaa

SEQ ID NO: 40525 - DNA, 401 bp, Oryza sativa
  unsure (1)..(401): unsure at all n locations
aagcttcccagcacggctccgtttgccctatcttccggagccgcttctttntctgtctaacctcggacgcggtggggcgcttgtggcccgccgacggtctgtccgccactcactcggcgccccctccgtgcggaggagagggcggccgggattcagacatcttccatttccccttcggatcgccaaccgaatctctcccaggcccacggttcggacctggtgccctggagccgctgcccccgccagagccgccgatccggctgccgcccgcggtcgcgctgctgctacctgccaccgacggcaccggcgccggcgccaccctgacgggaccgacctctgccggcgccgacggccgacatcacagccaggatactctcccggtcgtggtcgctatatagggg

SEQ ID NO: 40526 - DNA, 417 bp, Oryza sativa
agcttgcgagatgatcatatgacaattattttttcacaatatattacagctgatcgatcgagctggtagctactgtagctagcatgcggccgcgattccgaacgatcgtcagctgggcgtcgccgtcgccggtaacattggacggtaggacaccggattttaaaaatgttgatggtttctgaagcaacacccaagtgttaattattggagtatattgtgtgtaagagtgacaggtgctaccaaaaaaaacgctgttcaatcttccgtaagagcatattactaattgctagctgatgatctatgaataagctccgactgactactagggggtcatcaatgctcgaaactactataatacaattccgttctcaacaacttgagaactttatctagcgatcgaagaataaagctatatga

SEQ ID NO: 40527 - DNA, 483 bp, Oryza sativa
  unsure (1)..(483): unsure at all n locations
cgccttctctcagctnttctgacatggaaataggatattgtatgtgtgcctggcaacagttctcaagcatggactcgaacaaaatagagatgggcagcttcatggcttctctgtccccttgagtcctttcacctctgctgccattatgtatgcttaacagcaacaactacaagctcaagtgcatgctttacatctcgtctgcctgcagtctcgttgctgtgaagttgacaagcatcatcagatcacattcaaaatttcaggcaacaactccagggcgaaatggcatccgagaaattagctcttcagcctcttcgatgcgacctgcctttgtgagcagatcgaccatgcaagcatagtgatcctcgcctggctcaacaccaaacttgtctgccatggcgtcgaagtatatccagtcttcgtctcacaacccaccttggctgcaagcatcatgacagagtanaacgcggcgtgggtcggtgcatg

SEQ ID NO: 40528 - DNA, 414 bp, Oryza sativa
  unsure (1)..(414): unsure at all n locations
agcttcttctaattgattaatttccttaatcgaatccactaaaaatcctactgttggtgaccgataatttccatcggccaattccagaggccgatactaactctactcgatgacgacttcggtgcttaccaaaatttggcattaacagtatgcttcagcgcctgtacatccatttgttttcttcatgcaaccagtgtttgttggcaggagaagataagtcctagattgcaatgagcacactaattcatttacttgagaaatgtaaatttctggaaaaaaaaaagaagaagaagaggattttatatatggatgatcaaataaatcacctattcatccgaaactcattttcggaattttcgaaaatgtctgcaagtcaaacatgcttctggaaattntcggacttatccgaaagca

SEQ ID NO: 40529 - DNA, 430 bp, Oryza sativa
  unsure (1)..(430): unsure at all n locations
ctttagtagatctggaagatgctcacatgacagntaatctttatgaggaggagaanaattgaggaggaaaggggaaggggaagagaggtttgcacttaccggaagagaggaagaatgggaatgggacaaccggcgtattatagaggtggccgactgatgagactgagggcgaccggcagaggacacggccggcactcactaccggtggtggtggaggagggcacggcgacagccccaaacccttacctgtttggcaagaggaatctgagtttgaaggagggagttaatantgagattggtcacgggagttacatttntagtccccatcccttgttnggnttcacatcgaattccatttgaaggagggagttgatggtgggattgatcatgcgagttacatttttagtccccatcccttgttgggttcaca

SEQ ID NO: 40530 - DNA, 414 bp, Oryza sativa
  unsure (1)..(414): unsure at all n locations
agctctatccacattatcatcttccatgtctacatgctttgaagacgtggagcacagcttcgacctctcctcgcagacttggtttgtgctagtgtcttggctcgaagagaagatattccaaaaccttcttaactctccaatcaagtttttttagaagaatcttatgatgcttttcaatgattgaaggaacaggaaattaaatagttgaatatacatgcagaaccttcgtatttgcaactgtagcgcgtccacaagagctacgagttcttccttttcttttgtcgcagaatcgagtctactcgcagcatcatttattcgcatatcagcatctgctgctgaaactcttgctttctctttcgccctcacaacggctggctttaaaattacagcattttctctagctnttcctaattc

SEQ ID NO: 40531 - DNA, 481 bp, Oryza sativa
  unsure (1)..(481): unsure at all n locations
ctttanacaagaatctggtgaatgttgtatagatacacccaattaattgagcagttgaaactaaagcaaaacatcatgcagtgctaagcagaatgggtgtttggagcaaaagatcgatcggtggatgtggctagcaggctagggcttttctttntgtgcaggctgtgactgtggcgctgtcttcccgcgccttttgttttggcaaatggcaatcctctttcccgtgactcctgcctggctcgtgctgaccaaaccaaaccaatcaaggccgtgtttagtttgtgtgccaaaaattttttttatacgtacacatatttaaagtattaaatgtaaactaataacaaaataaattacagattctgtccgtaaattgcgagacaaatctattaagcctaattaattcatcattagcaaatacttactatagcaccatattgtcaaatcatagcgtattaggttcaaagattcgtgcgtaattaca

SEQ ID NO: 40532 - DNA, 377 bp, Oryza sativa
ggatacttaagacacctgcggcatgcaagcttacccatccccgcatgtgattcgtaagctctactgggtcatgccgccggattaattgcgtctgacaaaactcgcactgcggaaatggcccacggtgctctgtcccacctgggcatgctcaccattattgtcctggaggacctgccgtggttgacgtaagggttcgtcaatgctcgcctcttttccttgggcttcccgcatctgaaaaagctgcacctcaagaaccgccatagcaaggacctcgccctagtggtggacgcattgctgtcagtgtcagcggtggcgaagacgatcacagagcttgtcgccaacgatatgctcctttcgggcatcgaactgaatcacgc

SEQ ID NO: 40533 - DNA, 463 bp, Oryza sativa
  unsure (1)..(463): unsure at all n locations
tatagctgatagcattccaccacgtacctctgccactattactaagtccaagtacgcaataactatattgttttatacttatatatgaaatcaactcgttccaatttggaaccaaggccattaacaactcgttgcccagcctagataacacgtgtaaatgtgtaatataggaaaagatacacccatgcccaaaacaaagatggatttggttacagtcctaaaaaagcaataatatgatactatnttgtgacgctattacatcaaattaacctatggatctagggtaaacatatcataacaaataaggggatgtaatatatataataaccagggaatgtgcattgaaataaacaaacagcaccaggagatataataatggtgatgatcatgctgtctcanataggactacatacaggataggtgcaccagactaatttggcatcagcgaatttctattagaact

SEQ ID NO: 40534 - DNA, 467 bp, Oryza sativa
  unsure (1)..(467): unsure at all n locations
cgtatccgcgatccttagagncacctgcggcatgaagctttacaagccgagccgagcctggctcggctcgttttcacccattacaccatgacacaatgacaaggcgagcacatttatggcatgtttagttggcaaaagattttgcccctcaatgtcatgtagaatatacggacacatatttgaagtattaaacatagtctaataacaaaacaaattgcagattttgcctagaaactgcgatatgaatttattaagcctaattaatccgtcagcaaatatttaatgtagcatcacattgtcaaatcatggcgcaattaggcttaaaagntttgtcttgcaatttcctgaagaactgtgtaattggtttttttgtctgcatttaatactccatgtatatgtctaaacattcaatgtaacagcatgaaaaatttttgttgggaactaaacagacccttagaaatggtgat

SEQ ID NO: 40535 - DNA, 406 bp, Oryza sativa
  unsure (1)..(406): unsure at all n locations
ccttgaaactaagcttggggggttttgtgacggtcgntatcgatcagcttcgtctgtctatattactaaaatagaggagaactagtgatgctcgcaatgcatatatctgttagaataataatattccaatagtattaggtatactaaccttgtgcagagaatgacactaaagtggagaagaatcgacatcaagacagatgataaatcaatcggacgatgtcgagaaccagacttatgtatgaatgggccaagaactcagaaataacacgacacattgagccaaaattcacaagtctaccgaggaggacaacaaaggaggccgcatgccgaagatgggctgtgttgggcaagcccatggttcatcagaacctaccgtggcgccgatgcatgcaaggtttggatggac

SEQ ID NO: 40536 - DNA, 412 bp, Oryza sativa
atgcaagcttgcattaacaaccaactgcacaacctatgtgctataacacaatttgatcctccaaactttttaggcggtttgggcaagagaggatgaccaagttttgttaagatttacttctcaactgacacaaaataaacaaagcttaacgaaatgggaatgggcaacagagccagcgcgtgcgtaccatccatgattgcctagtaaaccttcacctccggagaacaatcagattttggcaactcgaaccgacttcttgcagccaacaatcatggaaaaaaaaacaccagaaaatgtcagcttcgattcgtcttaggggaggcgacggggagcagcgtgggacgaatcacatacagatacaccaaccaaccggagtgtccgcgacgaatcccgcggtgaaatagaccggaga

SEQ ID NO: 40537 - DNA, 435 bp, Oryza sativa
  unsure (1)..(435): unsure at all n locations
tcactcctctgacacatgaagaatntagtcagtgggtaaattctttattaaatcctatgtgtgtccaacgctctatccgaacacatgtttatatagcattcctgtgtctttcaatcctctgttttatacgtgcattcctatcacatttctatgattttcctattacaatgtttttttaatcctgcattccgaataagccctaagcatctttggaggcttacggtttagcacactccattctctagtgtgatgcgtgttatggatcatgtacacgtatgtacatttatgagtgttgtatgcatgagttgcctgcaccttagtacaatatgacacaacacaccatactcacatncacacacatacccacgctctcatacacattgaatcgtacgattgtatatgaacaatggaggatatagatccgtccttttgatc

SEQ ID NO: 40538 - DNA, 432 bp, Oryza sativa
agcttgtttcactacgtggacttaacctgtcacacaatgccttcacaggacacattccatcgcagcttaattctctgactcagctggagtcattggatctctcttggaacaaccctcacgggaaatccctcctgagttagcttctctaacttctcttgcttggttgaatctttcgtacaacaacttgaccagaagaataccgcagggtaaccagttcgggtcatttagcaacagctcctttgaaggtaatgtcaacctctgtggaaagccactctctaaacaatgtgatactccaggctcaacatctccaagtgcatcagctccttcaggtaccaacagtttctggcaggacagacatggcgtgatccttttgttcatcttttctggcctggggtcacagtgggcttatattggcagcctggatcaatcatt

SEQ ID NO: 40539 - DNA, 434 bp, Oryza sativa
agcttcacccaaggaacctcttagaattggaccagtttcaatgcctgaacaaaccaacaccaccctgattaaatctgagcaggatccagaaaggggtatccagagaacacctcgagaagtgattacaatggtgaaagggggaaatctttgccagcagaaagtggttcagcagacgctgagcaggcaaaaagagctgcctcatcaagtagcgtgcctactcccaacagagatgtttcaagaaaataccatgggccactatttgactttccatcctttaccaggaaacatgattccatggtgtctgcaaattacaacagtaatctagcactcggttatgacgtgaaggatttgttagctcaggaaggcatgatagttcttggcaagaaacgggaggataatttaaaaaagatcagtggcttgcttgcaattaatct

SEQ ID NO: 40540 - DNA, 472 bp, Oryza sativa
  unsure (1)..(472): unsure at all n locations
tgcaatcctttgtttgatatcactaagtgatttacttcttgttaagtttgggccgaaaagagacttgcgtctcaaatcgacttaagagatatttttcaacaactcaattggtaatgtatcgacctcccgggtcagatcattacctctcggctcccagagctatttcacttgattaatcggctcccagagcctttctcattttctcggactcccagagtccagctgcccagcagcacaacattccgcttccactcgggaagcctagtctatgatgcccgtagacatcccgaatcacacagattcgtttctgaccactcaggtcatccatctgccacataggctgattctggttacgattcccatcccacaacaactnttcacanagcacaggcaaacaaatctacgcaacgggaaccacctcacatccgcccatgaccgtgggcacggcnntgtcaaacagtagttaacctct

SEQ ID NO: 40541 - DNA, 429 bp, Oryza sativa
  unsure (1)..(429): unsure at all n locations
agcttggagaagaagtcttaggtgaagttctggcttataccccagttgagcacctgtgaagatggagacgtangcccgctagtccgctgctgtttatttttgtttgtcaggcctgaagtgcctttttaataatgtaaatattatcgatataataaagatgtgtcttttatatcatgtttgtgtggtgtaccccggcttttcctgggacggggattaatacactagcgttctggaaaaggtatttttccgggcgcgacaatatgattgtgattgcatgaatgtaatttatttccaaattatatgtacataatcaaacccactaatttcgatgtaattgctttatttccgtccatactaattaatactttctatgtcttgtgtgtatatatatacgtgcagcgatggcattctattttttacacactccag

SEQ ID NO: 40542 - DNA, 505 bp, Oryza sativa
  unsure (1)..(505): unsure at all n locations
taaccttggctcgtcccgagtgaaggacgaaagtaaacatatacttggttgttgatcaggagttgctactatgctgcatatctcaaacatacaggtgtaaggtatatgtactctctctgagattaaataatctttggcacggtggttacccttacccctgattcccacgagacactgcttctccttgccttgggcggttaaaagaaagaacagcaatttagagtaccaatcacccaatctttattcaactcttctttcggaagttttcaaatgattttganaaagaaaaccaagttcttcaattgattcactcaatctctctaagtgtatcaatatgaattcctcaccaaatgttgcctttatgattcctactctagagtttgatatgtggagctcggtagggatcaaacatggcatacttgcattcacanttattactaagtcaaaaatttatactaaagcagatgactaaacatactcaagatcaagatcgngcaaaatgtgt

SEQ ID NO: 40543 - DNA, 422 bp, Oryza sativa
  unsure (1)..(422): unsure at all n locations
gcttgctcacttaccgatcaaggtggttgttgtttgatatgtgaacgcctaanatggcctatgtttatgtgaagatttgatccttctatgtggcatgaggtaaccctcgctcggcttgggaaaggctntgntgcgaacctccgataccgacgggtgttcggaataagttcgtatcttgtgggtaaagtgtacccctctgcagaggttaactaactgttcgaacagccgtgcccacggtcatgggcggatgtgaggtggttcccgttgcgtagatttgtttgcctgtgctttgtgaaaagttgttgtggtgtgggaatcgtaaccagaatcagcctatgtggcagatggacgacctgagtggtcagaaacgaatctgtgtgattcgggatgtctgcgggcatcatatactatgctttccgagt

SEQ ID NO: 40544 - DNA, 504 bp, Oryza sativa
  unsure (1)..(504): unsure at all n locations
tatgtatctatagacaatccggtaatttagctacaaaccagtgatgtgtcaagtcgtgtatcacttgctcaagtagcttacaataagtcgttcaccaggttatttagataaatacatatcacaagttttaagtgcaagaaatctcacaaacctggcaattaggacaactagttggtgatttatcaccagtttcagatgtgtttgtatttgggtctccttccccacatcggcagatcttgaactggcctgcattctcagtagtctgtgaagatgatacctatcaaaagtatggaacaaaatggagtgaatactcactaatgccacagtaaagtgatgtaattgaccttgtgaaacttgagtttagcaaaaataaaaaacttttacatgataggtattgtgtgcccatagtgtttaatatagtgtcataacgaggtcttgagacanaatgctaatattttgccagagagaggtgctatagagcaatggtatattcataactttgat

SEQ ID NO: 40545 - DNA, 466 bp, Oryza sativa
  unsure (1)..(466): unsure at all n locations
ggatccttaagacgcctgcaggctgcaagcttcgtgggttatgcgggacacatgcttcttgtcgttttttgggcgcaacgactttgagagcttaagctaaagctcttcttctatctcctaatcaatttcaaatcccgttgtcggatgctcacgccgagtcggttcacgagaaccctaacctgcaacgccggtcactctcacttcccggctcagatttgccacacagatgatttgacagtctcgccaattcgccgtacgtgtttcgctttcgagctagccgcgtcgtcgggttcatgcaccgccccacgcatcgaccgatcgatcgatcggtcgcgtaccgacggggacacggngtccatccacgtagatcgtagacgcattctcacacaccgcggtgcacgtgcaccacggcacgtactacgcgcgaccaatcgatccatgcaattaccggtgagtgtgacatggc

SEQ ID NO: 40546 - DNA, 451 bp, Oryza sativa
  unsure (1)..(451): unsure at all n locations
tctagccgtagacaaattgcagttaaatttgaaaacccacatacggngaagatgttagaaggagcgagaatacacaattttggcgttggttcaagttcgaggcgaaggaaaatttttgttgtacttaagtctagtgaagtgatcgtctgtagttntaccctttcttttccgtcttggtttaatgtaccaatactaaggcacttctcggacatgagttatgggagtatgtgattgacttcgtcatgttgcctggtaagtactatgctggccgatggaacagtatgatgttctgcttgctaagggcgacgtgtggttgtgctcanggttaggggcggaaatcgtgctggctccgctttttattgagctntctttgaattaatttaccttcatatttaatataagctattcctctgaaaatatataatcctgtggtcttgtgtgtactctgata

SEQ ID NO: 40547 - DNA, 434 bp, Oryza sativa
agcttgaagaagtttagatactttctaaagaaactaactaccaaaaaaaactacaacatgttcaaagtttaaccttgatgacgccacgacaaaacagcatttcaacacttctttgacgataggaagaagtccagcatggtgtactccaatccctctacgtagaaggctttgtatccctacaacctaacagggaaaccaaagtttcaaacagaaacaaggataagattgtcagactaaaatcatttgtgctactagatcacctgtggaaggttcctatcagatcctttaaggcgtgaaaaggccttgtcacagaagaggcggatttcacttttctctgagttactggtgagatctgcaccaaacatgctctctgctgatctatcacatcgattttttgagaaagcaaaaattaccacctgtcaaagaaccatata

SEQ ID NO: 40548 - DNA, 449 bp, Oryza sativa
taagtaatgtaagcaggcagagatatagggaaacaaagaatgataggagtattaccgaacatttgagagattatcttcaggcctttgaatattcccttcatctttatcgccatttgtgagtttctccacaagcaagatctccctacatcatgaatgacaatgttcattaccaatgtgaagaaaaaaattagcttgggtgctacagactcatatattttgaatcgcatatggcaaaaggaaagcacagcagcttacctccaaactccaaagctagtgtctcgtttgcaactagcaaagctttgaaaatcacactctatttctgaatcttcagactaagttcagtctgaagaacaacaagaagaaagagatggggaagaaacaagataaaacttgattagcacaagtagttttctgtagatggagaagaggcagaggaggaactaaatctt

SEQ ID NO: 40549 - DNA, 430 bp, Oryza sativa
agctcgccaggttaaccacccacaataacctgcatctaacatgtgcttaggacttgtcatctgcaaatctttgttgtatgattgctaagaatgttcaagagtatctgcactcttggaattgtgaatgcggagttacggtgacttctttgaactagtttgatgtactgttcttgcgaggtattgtgaagttttgtgaggaacttgctcaaagtttcagtgtccttaattctgcttagtgggagttttaggtcctagaatgggatatccatttggttgagagttgatgacatacaaatcatacttggtactatatcaataggctgaactgttacacaccatctgagtacttgagtccttgttgttctccaaaccacatgttattttctttgctccagtatgattcctgaacttatccatattgcttccatga

SEQ ID NO: 40550 - DNA, 503 bp, Oryza sativa
  unsure (1)..(503): unsure at all n locations
acctatagatactcaacttcttcgctgacctcgtgcccgcgtgccctctttgtcttcttatggtgactaccactagcctcctcctcctggttcccctccacatccctttccacgtgcccctgctgggtcccctccgcatccctctccacgttccctttctcgttcaagtactgatttggatcctcgttcccctcttcttcattccagtactggctgcttccctccgcgattgtatcgtacaatatctgttcctcatcgcggtcagccatctgttgatacaagaaacatctgctaagtcacgagacatttatgttttaacaatctaagtcatgtatgctaagcgtaaatgtcgtacattataaccctacacaaccttacgcgctaagtctaattacaaatcgngatataagctaaatctacgtgacgtatattatacaactctagctagtacataatgatatactaagtctaattacaaataaaataatattatattataactc

SEQ ID NO: 40551 - DNA, 466 bp, Oryza sativa
  unsure (1)..(466): unsure at all n locations
tncatttcctatgaactgacagcattgtgaaccattcttctttgatttattctttattcttaaacgttactcaacattaggtgctgatttctgtcaaatgccaaaatgtttggattacttatacttgatcaactaaaatgttatcttgtattcgtggattcttcagtgaagttccatttgccatctatagcagttcttgttcggagtggatgcttctatttggtgatacgaaagaaagcatangagatcctttangtgtattcagtatttgtttgaaagcacaatatgaattcttctgctgatcacaatttcacgtatacaccatattttnttgataaaaacttngtggacaatattcttgaagcttcaatggatcaacacttttactcaatggtccaaaatcgccacacaccgcgtatgagagatattgttgatgatacgttgacatctgaaatgatggaagaaa

SEQ ID NO: 40552 - DNA, 387 bp, Oryza sativa
  unsure (1)..(387): unsure at all n locations
gcaagcttgttatggacatgatactgttntactattggaagctcnaatcggctccagaagaacagagttgcaaaatgatttgacggccgaagagtactataatctatggccgatgaacgggaggacttggttcantcgcgattacgagcactcgcaaaagttactagggataaggaacgtgttgctcggcattataataaaaaggtggtgcctaagactttttcggaaggcgagcttgtgtggaaattgattttgccgattggaacccgggatagcaaattctgcaagtggtcaccaaattgtgaagggccgtttcaagtccataagttgtgtctaaaggggcttacatgttgcaaggactctattgagaatttatgggcgagcgct

SEQ ID NO: 40553 - DNA, 453 bp, Oryza sativa
  unsure (1)..(453): unsure at all n locations
gctcttacaagttcttaccaatgcaagcggtatggtgacatacaccgactcaaccaagcaccccaatggaggttggatgtatcgatgccttggcaaacacttgctgtacgggtggcaataaatntgtggagctctgggtaggcttaaatatgtagcaaaggaatagcaaatgctcaaatcagagaatgcaaagttgaataattgttcaaagtcaagtaccgtgctggtcctaggctagaacgtactagagacgcgagcctagacacaaacaataccacaagatagcactaggaacaactcatgcacaactctgatatatgaagttcagctcaaacataacnagattttctcttttctttctttcttctttcttcttttcttttgttttctttccttttctnttctaatttttgtgcgcctgtttcttttcttttcttttttttgcacctttct

SEQ ID NO: 40554 - DNA, 367 bp, Oryza sativa
  unsure (1)..(367): unsure at all n locations
actgagctgcaagcttggtttcctctcctgtattaattctcnttcaacatttagtcaagcgattggccatgattttttctctgttgctgttgtaacatcactagaccgaatcacgcttgcacaccttactgtttattacagtttggttgaaccataatcccttttccacatgggaatccttttctaaatattataattaactcaggactgccctacaaaaaagtgatcaccaaaccatgttactacgctccaaactctcactggcgagtgtgacaaaagttaaccgaaaccttctataaaaagcaaattaattttgaagcaattactacacattacactttacattatttgcatactgtacaattgc

SEQ ID NO: 40555 - DNA, 481 bp, Oryza sativa
  unsure (1)..(481): unsure at all n locations
ntggagaagaagtcttaggtggagtcctggcttatacccttgttgagcgcctgtgaagatggagccgtaggcccgctagtccgctgctgtttatttttgtttgtcaggcctgaagtgcctttgtaataatgtaaatattatcgatataataaagatgtgtcttttataccatgtttgtgtggtgtaccccggcttttcctgngacggngattaatacactggcgttcgggaaaaggcaattttcccggtcgcgacacagactacccggngcggtccgtcttctttctcccttttgcaatggcagggctggttccgctattttcttctttcttcatggatgttctggagttctacgatctccagatggcgcacctcacccncaacgcggtgatgacattggccatcttcgcgcatctgtgcgagatgttcattgtngtgcgcccatctcttcggctggtccggggtggtcttaccgtgcagt

SEQ ID NO: 40556 - DNA, 397 bp, Oryza sativa
tgcaagcctgtgaagaaacagagcacttacaaactgttggctgatgaggaagacaacgatgcttgaaccatcacatcgactagtcgacagagctccgcgagtacattctctaagagtacaagcattttaggaggaaagctgaataccatgacgatgggaatgatgatgatgtaagtgtagggcaagcgcaatatcatgctttggatatacccctttcacatattgcgaccctgtgtctcaactgttgtaatgtattaggaaacaaaaataacacaggattctgggaggaatgtgataagacgaacataacaggtggatgatgaacatgatcggtatgatactgatgtgagttctttcaggaaccacatttatcttttcatgaaatattggaagtacg

SEQ ID NO: 40557 - DNA, 204 bp, Oryza sativa
gaagagagtaccgtacaaggactcggcataattccggaggtgctgtggatcttctcctatgggttttatattgcttattactctgaatacgctatagtatacttcttgagtaagttgagacgatcctgtgagaatcacctcttgactagatccaacctagcatacaggattattgttcgttctgatcaactagaatatagagat

SEQ ID NO: 40558 - DNA, 453 bp, Oryza sativa
  unsure (1)..(453): unsure at all n locations
catgcaagctttatatgggaactaaatgacaataagtattatgtttttatgagcacaaaatatcatatttacccgataatagaagtaatcgtacagacgtaaaagatggtacttgtcagcaggcccatgcttgttgacatacttcaggagcttgatttcatcaaggctctggtcaaaaaaatctttgntgttttttatgattttaacacacacatccattcctgtgtgtaaatcatgtgcttgtatagctttactgaatgctgctgaacccagatattctgtgacatggtaacgtccagcaatgacagagttgagaacaacatggaatattttgtcttcttcaaaaccagttctgttatattgtcagcaggatataatggagttaaaaaatatcgttagagataaacaaattaacagacgcaaacaccaagcatgataccaagtatcaattta

SEQ ID NO: 40559 - DNA, 431 bp, Oryza sativa
  unsure (1)..(431): unsure at all n locations
acaagngaagcagncaaggggttcatgaaagtagattcaccaagagcctgtataaccatatcatcgaccgctcttctcgatgcccgatcatcatatataagcaatgtctggaaaatgagatcaactaacaatgctgtatctgatggtgactctgcaggggggacaaagcaatcttaagaaaaacagctttgcatcgatcctatacatggaatagtataatgaaatgaaggtgtatcacgcagatgcgtagcaaggaaagtatgtgtttgtgtgggtattaacctattagtgcgggtggtgagggatctatacatcaattcagcggccttggttcgtctgtacaagtttctagagaatatgaacagccgtacacaagtgcgtgtgaaanaatatacactgcatggaacagagacatgcagctcgagcacata

SEQ ID NO: 40560 - DNA, 370 bp, Oryza sativa
atatgttataacttaactcaacgtgtaaataggctattaaattgacgatacttgtagatgatactatctattagtcgggactaactaactgtcattagacaattttttgtattgctaaaatggatagaggctctgtgggggaaccggcctacccagtgtataaactagaatggacatgggtgctcggatttacgggctatgaattatttcagcggtatgaaatatgcccaagaatagcgagggacttacacgcatcagtaacttaacgggcttcaacctaactggaccaatctacggtgctaacacgggctaaaaaaatgataacaagtctatggacaactttttttgtatgacaactgactataatata

SEQ ID NO: 40561 - DNA, 112 bp, Oryza sativa
  unsure (1)..(112): unsure at all n locations
cccgcccctccttcctttcttttccaccacccctcnccccagaggtgnttgtctttactcctcaaccgctgtgagagaatcccagtgggattttctatcccctatagacaca

SEQ ID NO: 40562 - DNA, 407 bp, Oryza sativa
  unsure (1)..(407): unsure at all n locations
ctttgcgtacttaccaccgacaccgttctattttgtttcttccgacggctgtttccttcgncgcaagggatggggttctaattaatcaacgttcccatggtcacccttgatttcacggccaggcaatggcgctattttctctttaagttctcgaaaacaccgcgctacggatatacacgcctttctcgtcagctactacaggactctgncttcagtactggtcctgctacccttcgcttctacgcctgcgcttgccaccatagactagcgtcgaaacgtatcaagaagattgcggtcaagcttgcgcttgtcggcccgagtgaaatgaccttatgtgcgcagtacaatatagatgcgcacgcttgggttggggcctgagaagggttatgtgttggccgatagctgta

SEQ ID NO: 40563 - DNA, 504 bp, Oryza sativa
  unsure (1)..(504): unsure at all n locations
tcctacgcgcaggctcatttcgcagtgctgcaacatatggctgatttaaccccatactntgaggagcatttagcgaaggtcggacaggacaatattggtcgatcagatatttggatcaacagagaacatggtgctcgcttcaacgaatggttcaaggatcgtgtagcacggtcgaccgatggcccaagtgagatattacaaaggttggcaaggggtccatcttgggatgttgacacatggcaagggtacgatatcaatggatacacattttacaccgtcacacaagatgagaaaagcacagtgcaaaacagtggagtccgtatagatgcatatcaggatcacgctggatcgagcacatactatggccgcatagagcagatatgggagctgaactatctgaacttcaaagtccctttgttttgngtgcagtgggtgaatatccgcacaggtgtcaatgttgacaacgaaggcttcacattagtggacctggccaagattggatac

SEQ ID NO: 40564 - DNA, 430 bp, Oryza sativa
  unsure (1)..(430): unsure at all n locations
agcttctagtgcatatttgtactgcaatgaattgttatgtgaaaataaatatcaagggtaccttcaagtttactggagtgtgctagctagcatcttaaacggcatgcagtggccgcgagattaatgttgcatctatcttcgccatgtgtgttccttttctcttactgcgaccattttgtttgctgacaactatgaaaattctatgactgttaactgctgcatgccagcattttgttgccaattatatcctttttaactcaaacggaggtgggctctacantttttttaaaaaatttactttacaaaactagcctacattagcctggtgtttggacagatggcgcggccgcccggcctatttaaacccatccaaaatttagaaggctctangttgtgcataaatgatactgtttcatttggttatggatga

SEQ ID NO: 40565 - DNA, 473 bp, Oryza sativa
  unsure (1)..(473): unsure at all n locations
ggctattggtggaactggcggaattggtaagaccacacttgctcatattatatacaatgataagaaagtggaagggaacttcgacaaacgtatatgggtttgtgtttccaaagagtaccttggaacgtctctattgagagaagttcttcggggtatgggtgtgcaatatggagcagatgaatcacttggtgagctgcaagtcaagcttatctcagccgttagtgagaagagttntctcctagtgctagatgatgtgtggcaatctgacgtgtggactaatttactacggattccactgcatgctgcatcaacaggagtaattctagtaactactcnacttgatattgtcgctcgggaaattggggcagatcacactcatcaagttgatttgatgtcacatgatgtaggatgggagctactctggaagagtatgaacgtcattgaagaaaaacaaagtgcaaatctgcgtgata

SEQ ID NO: 40566 - DNA, 434 bp, Oryza sativa
gcttggacagggaggatacaaattcagatttttaacaaccatggcgaggcatcgaaacagatcatgcattggcggcttctgccacggcggcggcggcgtcctggttccgcgctggaatcttggcgatctcttcccatcctcttctacctccagcttctctctctcctttccagaaacttctagacacttgtatcagctagctagtttgcttctctcttttcccccaaaatacttgtgagagttgtattcaagcttgttgttactaattgggagaagagggttcctaacaatctggtatcagagctcaccaatccccaccaagctcaccaagcaagctgccatggaaagtgaggacaagtttgacatgcttttgaggatgctcgaggagttccagcgaaggcgggaggaggcagatcatagaaggagagctgatt

SEQ ID NO: 40567 - DNA, 422 bp, Oryza sativa
agcttagactggaggaacaatccattagggttacataaatggtccgagcgtccaaagtgtgggtgcagagatcgctggcaggtggctacatcctttgctgaacaaacattcgaaggagatattttgtctgccccaatgtagacaacgatttcgttgtatgtctaaccatttacaaaatccgctatgatttgcacaaaattactacccaaactgaataacattactatttttacatggcaatccaaggatgggtggatttactcgatggatcgacaatgtcactccatcatatcatggccagaagataacagagtcagaaacacaagtagagtatcaacgattgaaggaccacgagaatgcaatgcattctgaccgacctagaaggggccgataggttaccgcatgcttgattcgtcgggatc

SEQ ID NO: 40568 - DNA, 476 bp, Oryza sativa
  unsure (1)..(476): unsure at all n locations
tgttntctcttcntttacttcacatatatcactactgatttatatgggaaaaacaacactatatgagtcgccaagtccacaaccgatacctatcgacgtttgatatcacgactacggtatttggacagtatggagatagtcggtaccatggtatatgcgagattgaggtaaaagagatggagacatgaatttttatacaggttcgggccccttatctgacaggtaatagccctacatcatgttggccgaagccgatatgctctntattaatctggaccacacaagtacaatatttgggataacctatctgactgtcgtcgacttggcggcatggataatcagctcatagtcaatgacagagtagtcttccttctcaaatataaacccgtcgagatcagaaatggcgctagattcctcttgccaaccttacaggcaccggatggggatatctaggctaatctctaatatcgagatct

SEQ ID NO: 40569 - DNA, 427 bp, Oryza sativa
  unsure (1)..(427): unsure at all n locations
agctntatttccatcttctttcttttctttctttttttttctagccatgcctttccttccttttctcattttctttttgccaagaacttttctaggagaagaaagccagttcaatgtacgagtttatttgaatggatatttttgtggaaagccaacttctagtgtagaagcttagcttaattttatatgtggaaatggaaagtggtaatgataatgaccccttgatcatgagagtatgaaagatatctaacacaagtcacataaatttgacaaagcttaatataatgtcaaacagtcatatgcatgataaggtttgatcattaatgtacttgcacatggccttggtaggtataaggtagagtcaattggagggtgagctttaaaacaattntattttgaaaacaaattcccaagagtcataagaata

SEQ ID NO: 40570 - DNA, 474 bp, Oryza sativa
  unsure (1)..(474): unsure at all n locations
taactaagaaaaagtcanaataacttataatatgaaagagatggagtagtaactaagtgctatttaggaccaaaattggacttctaagttcgactaacaatacttatgcactgaaacacctaaaagcccaatccactacagttttggcctatgtggcaacaagaaggctccaaatgtcatcttctattgctgatttagccaggtaactagtaacaatttaaacaagataactgaaaacaacagcaattccatattcactccctcgcgctctcagtacctctcaggcagcctcaatttcatgctcagtaacttgtctgcagtagaattgagaattngagatactatctcatgtnggacatgttagcgacacatgattcagtggtaatgtaagcaacgatcctccaccctcatatgcaccaccatgattacaggtggngaaataaagctcatttatgtccatgaaagcgtcacaac

SEQ ID NO: 40571 - DNA, 417 bp, Oryza sativa
  unsure (1)..(417): unsure at all n locations
agcttanaacaaatgttgcatctaaagtttttattaacaagaaatcattagtgtaccagagctgtgcggccataatgatcagattcattagggtctaatccacgctctgaagctgatgcaacaagaagctatcccctttggaagctgcaaagcagagtgtgattgggaaatccatttggcccctggccaacatgtcatcgatctcctttgcgacagcaacaatggaggcaatttctttcttctctctcagatactaaacatcacaaggaagaagaagaagaagaagcatctgaatagatcagaattttcccctttctcgatgccgggagcggttttcgttgtcgggaaaatttgcttacctgaataagatngntcatgacaattgtcccatctgcaatggtggactggatgatcctg

SEQ ID NO: 40572 - DNA, 485 bp, Oryza sativa
  unsure (1)..(485): unsure at all n locations
tcatggaaggagtgaaggtacccatcactgaatttctcttgttaatacactangcttttttcgaatttgaatgaatacattgctttcaaattcttgtgcacaaatgtaccatcgtcttatcatcttagcatagggatgcgaagccatcaccggctttgccgtgctcgttgtcccagtacgcgctttggcgcatagtgcaaaaaacggaccggaccggttaaaccggaaaaaaccataactaggaaccttgacggctcggttcacttcaaagaccatccatgcaatcagacctgtaaaaacaaggtgaaccgaacagtttttgggaaaaccaatgaaccgggtggttnttgacaaaccgagtggttcggcgtcgtgcgtagaatatgccacacgtgacgccgagcaattcccttgggccatctcggcccatttggccgtggcacctatggtagaatntcccttgctctcatctctgtcgtcccatc

SEQ ID NO: 40573 - DNA, 148 bp, Oryza sativa
  unsure (1)..(148): unsure at all n locations
agcttgctntggcaaagtcgtctcccttctttatatactcttcgtcctgcatccttcgcccaaatggcctccggcttggcagagtacccgcatgatccttcgcctcctccgtccttgttccatagtcttcgccattggggggggggag

SEQ ID NO: 40574 - DNA, 365 bp, Oryza sativa
  unsure (1)..(365): unsure at all n locations
ctcagcttctaaaatttagatttaatgttgggtgtttctatatatctttcgttacagctcgtttgatttttgagaagtacaaattattttgagttccttctcacgcttctcattttatttgaatttaaaatctaaattccgaataggttgatggacatggtggtgcatgcaaatttctctgtattttcttctcaatcaaaagtaaacttttatctgcttcagtgacctactagtaaattgtcatcaaataagtgcctcanagacaaatatcgatattaccggtgtaaacaaacaaatacaacattangcgcagtggcggagccaggatttcaaaagtgggtattcccgtctaatcgctgagccgt

SEQ ID NO: 40575 - DNA, 429 bp, Oryza sativa
agcttatgagaactaacagttgggagagactatgtgatcaatcctctagattatcactcaacttgaattgctactcacctcacctcgcctaaggagttctgtccgtagccaacttgtatttggtgtcggtcaataaagacatatcttcttatgataggaccttagaaacaagtcaagtgatcatcatcgagtcaatgtccttggcataagacatttcaatgtctcgcaaatgacaatcaacacatagcacatactccccctgacgacaacttttgtcacaaaccatgttccaatagcataaaacatctctcagatgtatgcgtaggcaagaatccttcagatcctcaaaccattagtcttaagagacttatctcatttcaccactaaaacgagaataaggaacatagagagtaatgccttccatcacta

SEQ ID NO: 40576 - DNA, 336 bp, Oryza sativa
tcttgcttaccatccacgtgtggatgataatattgtttgtttacttgatgctataatggtgagtcactattatgacctgctaaattatattcacgaactgtatgttgttagaaataaaataaatattcagtgcttaatggtaattgatagcaattctgttgcctcatctcacttctttctctttacatttagttgactctgtaatctgtatacgaacaccatgtacactaagagttaaaaagtaggagtgcatctaatctaccccctccccccccccaaaaccctcctgagctatatacggtgcgccacttaactcccctgactatgaatccatct

SEQ ID NO: 40577 - DNA, 373 bp, Oryza sativa
agcttcagttaaccaatgatactttatacttaatgctcgaggatatgtactcaaccaagggccaagcgtccaacactgtgagttggccaatcccttctggcgaacaaattttcactacattctttgatttgaatgttactttcatacttttgcagggcaataccaatggacatgaaaagactgcaggatgcacttatgaaaatggaaaatgctgtttttgtcattttagctttagctccagggacattttgcagcagaaaaactgtaccagataacatcccgtgtctctctgcgtcttgtgatagatatttttccccttgggcagtttgatctaggctttggtcactgcatccatttaccctaaggagcaaat

SEQ ID NO: 40578 - DNA, 496 bp, Oryza sativa
  unsure (1)..(496): unsure at all n locations
tcccgttatattgtgctgaagagatgcacttgatagtgaagttgtaagggctgtgtagtttcacccgagattccgtgttcaattttcaacacactcacatttttttcttaaaaaatgtttagagggggcctctcttcctccaaatctctttttttttttcaattctgtgctgaataaaaatggtggggaattggggattttaaattggtaaaatactttgataagcattaatgtttgacaaggtggggacaatccgccacgatcaagaagagatggcagaggtgagcacagattataaatcaaacagacctgatagctacactaactttgcaagctaaaccgaaattatgtctgattgtctcaagcacaactgcctgactgactcgtttttcatttcaagtgtngatccaacttgcattggcatttggagtaacagatggtagcagagtgccattctcatatgaccatgtcannaaagtttgtccatttgtatcct

SEQ ID NO: 40579 - DNA, 504 bp, Oryza sativa
  unsure (1)..(504): unsure at all n locations
tgaagacgacactgtagcanggaggcgtactagactntctttgtgtctttgctaccaagggctaattaagggagggacaccaagcagacttcgggaaagagagggaaaagactgcacgctgagagagagattgggcccagcaagtgagaggactnttcctaattcggcccgaaaaggaaaaaggggactntaattacttttctaattaaattaatcactgaaatgatccttgaattgttaaaaatacttctattgctcaaataatttcaagaaaaatcctgaaaatacttggacactcaaagtatttaaaaatattaaaactagaccatntaatgattaatntaatatgtggataattactgaaatgttgtttgtatgattaaaattacgaattgagctccgaacaatccaagaaaattccagagagtataattaaccatggataatctaataaaaattaatccatccatgctttattntaggagatttatttccacattaact

SEQ ID NO: 40580 - DNA, 347 bp, Oryza sativa
  unsure (1)..(347): unsure at all n locations
tgatacaagggcatctgacaatgtatcactaacttactaaactattcaaaatatctgncgccccctctcgcgcttcattgtaatgcaacactgtaaatagacattgagtgatctaaactatggtctctccacctaaaggagaacgtacgaacatgctttcttgagctgcggtggtgatctctacatcctgatccaacacttttttagctgcgacatcaggcgcctattgttctcatgctggtgtagcacgaatattcttatgaattcttattatcaatggcatgccttcatcactgtcacgatctctgttattcttcagtcctactggaacaactgtgcatctacat

SEQ ID NO: 40581 - DNA, 407 bp, Oryza sativa
  unsure (1)..(407): unsure at all n locations
gaccttgaaactcagcttcccgccgctcattgattccagccgcgaatgaagctcttcacccctcattgtcgcgaaggtcgcgaaacaccgcgccgcgtggacagtacctcgctgcatctcgatctcgtcgcggcatcttccgcactgtctgcatcancgaagtgttggaagaatcgccgcgccttctctacctctcgtgccctctgttgcattgttgtgtgtggtcgccggaaccgccgcacctatgtcgtcaccggtgtagttatcccaagggcttaattcatataatctaatccgtgggtgtctagcgcgctgcatctccgtgtgctgctgcagaacgtagcatcatcccttactctccgatcgctttggttcagtgcgacttctatccgcgatctcttatcatg

SEQ ID NO: 40582 - DNA, 426 bp, Oryza sativa
  unsure (1)..(426): unsure at all n locations
agcttgagtacttggaggaggcattcacaacttctaactggatagtgcgcatatacaaggtcaaacccccgaagaataggtcttgaggagaggaatcatctcttggttagtacgtcggcgctattaccttgaggtacattgtgtcaagtcaaaacgtattggagttcctacaggagacgggcaattgatttgaaaatctgcatcagctgcccccaagtgcgatcttttgttttggtgagactgacggaagtagaccataggtcagtttgaagtaacgatcatccgtcttcccctatatcattttgttagatgtaatcaggtgccattcagaactagcaattgcgacgaccgagtactttttgattgctgagcatggtatgacagtactccagatgtntttgtaagcacaacagcttatttgcgtag

SEQ ID NO: 40583 - DNA, 493 bp, Oryza sativa
  unsure (1)..(493): unsure at all n locations
tattacgaagcttgctcgcacatagattactccatcccgcttacatatgactggtttcggtgccttcctccatctttaaataactgataactttagctttactatttgaatattgactagtaattactctgaaatggttagagtaattgaataaaagtttcatgttttatgtttagaatataatacaattcaataacatattattccttttagtccttgtaaatatttagtaaaacgacgagtggctaaattcaaaagggaatagtgtccactatcagtcatttaaaaacatagggagtantttgtcttttgttttacatcattggcaagtatgaggaagctatcactgaattgaattgtcaaccagtagtaacaattctcaacttatgaaggggaaaaggaatgttgttttttatccttcggagttcaacaatcatggcccatctaaagaggggggagcagcgagcggatatggagggaaagcaatctctcg

SEQ ID NO: 40584 - DNA, 295 bp, Oryza sativa
  unsure (1)..(295): unsure at all n locations
agcttgcgctggcctggtcaaggagagaatagtgatgtggatgacgacagggtagtggcacttgcccggcgagagggaggggaangggtgtgaggaacanaaggattggacacagggaagtggaggcggtgcgccggtgcctcgctggagaaggtgaaggggaaggggaagagaggctgtgaggggtggntaatctaactattttcctctttcatgttggactaatatgcatatgccccttttacgtatacactaaattttgtgtcgcttttaccagatgccttcatttctattt

SEQ ID NO: 40585 - DNA, 496 bp, Oryza sativa
  unsure (1)..(496): unsure at all n locations
tacanaagagaagagganagctacaagagccatacccgaactcttctgaaggcttccgggctcctgatttctactctattcctattccaccagctagatactactaaactaaacttgagagaaatgagagagctattgcttgagttgtgtttgtgaagtgagaagaggagctccttttataggcaggtaatgacggttgtgacggttggaatggtcggtaataccctccaaccgtcattggggatcaataccagctgtccatccaaatcctgcatccatcggcgccacgggaaccatgggctggcccaacccagcccatcttcggctagcggcctcctttggtgtcctcctctgtagacttggtgaatttggcccaatgtgtcgtgttatttctgagttcttagcccattcatacataagtctggttcttcgacaccgccgattgatttttcgtctgagttgatgtcgattctcctncactttattggcattctct

SEQ ID NO: 40586 - DNA, 396 bp, Oryza sativa
  unsure (1)..(396): unsure at all n locations
agctggacgcttcttcccaccactgagcagcacctcgtcgataagccttgtcaagttgatatccgcggttccaccgggcagcgtcaccctcgtggccatctccttccactccgcgcgcgacgccgcatctcccgccctttctccccctccatggcctcccgtatcgtggcggccacgtcgctccgctccacctcgccgccgatctccannccgacgccccactccgtgcgcttgtaccggcagatcgtctgctgctccgcgaagaacggccagctcagcatcggcacgcccgcggcgaggctctccagcgtcgagttccacccggagtgcgtcaggaacacacccaccgcggggtgctcgatcaccnnnnnnngnggcaccatgtcgtcagcatgc

SEQ ID NO: 40587 - DNA, 345 bp, Oryza sativa
  unsure (1)..(345): unsure at all n locations
ntcatgacaaggcatttccaaagccaacacaggtttaccatatgccgacaagaggggtcccagaccaacaacaggttatgtcccagaccatactgtgccaggaagcccaggggtcctccccgacaccaccccggcgaatccacatgtctctcggcatcaaggctcccctgataagctagttactcagccaggagtgtctcattccacccatgtggtcgnacttgtcttatgtttggatgaaattccaaggaatcggtccttaagtgcgagagcgggaaaccatacacccggtacatttcccggtccgccggtntggaaattcatttanntcgcaagcaccgaccc

SEQ ID NO: 40588 - DNA, 426 bp, Oryza sativa
cacataaattagaatgttatgggttacatataactctgcaaatattgtttgctgaatatcacaatataccataactgataataacttgcatctattgaagaactcttattcaatactttgagggtggacttgtacttaaaatcattccaaacaacaccaattctcgtggagcggtgggataataatgcccgccatctatgtgaccatctattaatttctaactttgaagtttgtcatgctagtagaatcagcattgtctaaataacattttgtgattgcgttataatgttgctattttcttcctgagttgtcttccagtggagctctgtgcttggcttttctgggtctctccttttgttttgaggataacagagatgagtgagcatcgatattttgtgttttggtgtgatagccccatatgtgttc

SEQ ID NO: 40589 - DNA, 515 bp, Oryza sativa
  unsure (1)..(515): unsure at all n locations
gacactatgaatactcagctatgatttctcaatgcttatgctcttaagaaaggtttcatcattataagaagcagctatcattacattggaaatactaaaattataaaaaacatgacattntgttgttctcgtcaaggtaaattctttgtttctttntatagttacattaactttcaattagagacattttgtttcaattagtgcactgtattaacaggaagtagaggtattgacaaaagagcagaagcttcaggctatggcgatagttttagtaagccagaaactcgatgcaaatgccaagcatgtatgaagataagtctcatagatggattctattctatctatcactntgtgcctgaacataaccataatcttgccactagaagtcaggctcatcagttaagatcacaaaggaagataaatgaagctcaagttgcaagcattgaagtcgcanaatccatanggatntctactaaagcagctattgatttgatggcaaaacaagcttgtggatt

SEQ ID NO: 40590 - DNA, 435 bp, Oryza sativa
gctttgtagcttatatgagcacacaggccattctatccactaaaaatgattatgtggatacgctgaatgcaaatatgatccacaaacttccagggcaaaccaagggtattatagctttgactctggtgatgatgaccctcacaatactattctatggactttcttaattctaccactccaaatgatctcccaccacacgagctaatagtaaaaataaattgtctcgtgcttcttcttcgcaaccttgatcctaataatgagttgtgcaatagaactagactaatggtaagagaatttcaagataatgcaattgatgttgagattattggtggtcaacatgctagcaaaagggcattcatcccacatatccctttgtctccctccgataatatatctcttcctttcaaaatcaagaagaagcaatttccaatatgt

SEQ ID NO: 40591 - DNA, 465 bp, Oryza sativa
  unsure (1)..(465): unsure at all n locations
tcagcaagaacagttggngaatgttagaattgggaggcgagtatctatgtcgacccaaggaaagatgaaggttaatcgtgaatgctaaaagcaactccagtgaaattcttgacaaaacatatttcacagatgaatctctgggtattgttttggaaaagacaatactcacagattgcgccaaaaatgctattccctctgtttcttattttttttatgatggtggttagttaaaaaatgaactaaccaacgtttctttttttttaaaaaaaggattctgatatcccatgtcaaaatagatatgtttctttcaagcgaaaaaggcaaagaatgaataatcaatgacagctaaaagccaattctatcacacaagcataagtaccgcatggattcataaaagaaaaggtgagcatgtgagcantaaagcatagtggagctgggaaattgcaaagctatcataaacataca

SEQ ID NO: 40592 - DNA, 415 bp, Oryza sativa
agcttccatgctcccctttctgtttatctaccattcttcacctgctgccttgctgctgatttgattaatgatcattcctaactgtcacttgatttgcctttttcttcgttcctggctgcgattaattgccggtgaattggttcatggaatcttcaggcttgggaaggattttgacaaggcgcatgctgacggtgctcgcaacatttcctactacctctcagtgactcccagtggtcagttcagttcatcattcttgccttgctccactgaagaattcaaaattttgtgatttccatttctttcatatgagttttccactgtttattttctaaaccttttgaagctttttggtgctgatggttctactacttgtgttcatctcaagggaaggagaagaacccacactttgtagatg

SEQ ID NO: 40593 - DNA, 446 bp, Oryza sativa
  unsure (1)..(446): unsure at all n locations
nggagctgatgctgtccaaatcactcctcagacgatttctttcaccattgtaagattcatcgctgcattgagaagcaatagcttgaatatgacttactgttgctgtagccgtctgaagaaactgaacaagaatcacattttcgttgcagctgccgtcgtctcctggcgcattcaggttggaacagagttgctgaagcttgtacttgatggattgccacttgactgggaactgaacaatcgaataagccattgatgctgaagccgatgcctttaaaatttgcagcttctcactgcattctgctacctccattcctgcactcctgttgggatcaaaactggttcttggagttggagacatggaattgaagatatgcagaatagtagttttctgtttagtaaatgataatgataaggttcttatagctctagtggtctgcaatgtatat

SEQ ID NO: 40594 - DNA, 408 bp, Oryza sativa
  unsure (1)..(408): unsure at all n locations
agcttgcattaaatacctaaattctcgtgacttgctgagtacnaaagtactcacccttgctctatataaatatatatagatcctccgccctgaagagaagataaagcaagtgaagattatggtttcgtcctggttaccagccgtcgactgtggtgttgggtgtttgttcgttggttccgctgctgctgttgttgttggtgtttcctcgtccgcgtcgtcggatgcattctcgggctgttctgagctgcaacctaagttaaggtaaataagtcctctatttattttaaggatttgcaatgattcatatttgtcaccgtgggtaccagcgctatgttctgggactagtactgagatcgcggnttcttangaagcgggtcgcgcttgttttcctacgacacgctccagtca

SEQ ID NO: 40595 - DNA, 496 bp, Oryza sativa
  unsure (1)..(496): unsure at all n locations
ngataaagctntatatggcttaaagcaggcacctattgcttgtttctctaggcttagcaagaagttatatgatatgggattccaagggtccaaggctgatacttctttgttcttttataacaaaggagatttgattatatttgtactcatttatgttgatgatattattgtcaccagttctagacaggaagctgttccagccttgcttcaggatttacaaaaggagtntgctctgaaggatcttggagatcttcattactttcttggtattgaggtaactaaagtgtctggtggtatagttcttactcaagataaatatgtcaatgatttgttgagaagagtaaatatgtttgactgcaaaccggttagtacacccctgtctacaantgagaaaatgtctataaatgaatgagatcctttangaccaaatgatgcaacacactatacaagtgtagttggtgctttacagcatctaacattgactaggnctgatatt

SEQ ID NO: 40596 - DNA, 429 bp, Oryza sativa
agcttcttcccttggatcattgaaagctataactgaatttctgaagagccctgctatgaacatacctgtctgtgacttcaggcttgggccagtccttcggaaagatcgcactgaacgccagatttatggtcagaaagaagacacaatatgctactattttggctttcaacgtaaaagtatctcctgatgcccaaaaattggccagtcaagatggtgtgaagatcattcttgcagatgtaatcgatcatttattcgagcaattcagaaaatacattttcccaagagatgagaaaactgaagaagttgtattcccctgtgttctgaagatcattccagactgcgtattcaacagaaaaggcccaattgttctatgtgtcgacatgctgtatggagtagccaaggtatttacttgcagctgattggcgaaat

SEQ ID NO: 40597 - DNA, 465 bp, Oryza sativa
  unsure (1)..(465): unsure at all n locations
ttagcccaaacaaatgaaggatgtacataaaantttggagtataatagaagtcaaatacacacaaaagaaacatattagaaaaaacacaatcaatctaagttttattaactcacagatgttttactgcttcaccatcatcacagtaccacgaattttttttaaaataaatgagtaggctaacatccactacaactgaatccacaagcccatttctgatgaatgactagtgtgaatgactagtgtgctacacgaactgagaattccaaacaacaatacatggagaaggaaaaatagaacaaatacacggnggagctcttaaatntcccacanaacccactgtgtccaaatngngacgcaaatcgcaagcacgccccattccaaanaacaaaaaataaaggggagcacctccacctcggtgtagtacgatcaacctancacgaaagcatcgaatcgatcatcacagc

SEQ ID NO: 40598 - DNA, 407 bp, Oryza sativa
  unsure (1)..(407): unsure at all n locations
gagctttagagaaagtctaaaaccttcactctcttctnaaccaggttggatccactgtggatgtagggggactctagttcctcctaccccggggagaaaaatctaccacggggttggaggagctatgaagaaggcaatgagcccttcctctggcccatagctagatccacccaaaacagaacactacacatcccatcaactattcaaatagtttattttagatctctcaacataacctcggacagttttagtcacctctcgcttacgtggtctcctagtcattaagataaaagatatcccataagatccacatgtcatcctttatcaaggtctttctccttccctctgccacgacactcttcctctcttccatcccattatcctctgtaaccgagtgaaagagcaag

SEQ ID NO: 40599 - DNA, 467 bp, Oryza sativa
  unsure (1)..(467): unsure at all n locations
tgtggtggaggagcttgaagcaactggagcttgtgctcgattctccgtcgcgtcgtcttcccctcccgccgcagatcacccagctccgtcagcgcagtgaggcggcggcagtggccctagcggctggtggtggcgaactggcgatgtgtcgtgtggtgcggccgtgccacgtgcggtggatgaggagtgaggagtaggaccgaggagggactacggtttgcttgcacttttgctgttgtctatttgtcttgggcttgggtctttcttttgtattgngctgggtctttgcggatgtctgatggagtcctagctcgttaaagctcgcgagctagctcgagctggttctttatctctaacgagctaaaatgccagctcaactcgttaggaaattcaaacgagccgagccgagcatgtcacgagtcgagcgagctaacgagccacgagctttctattcatccntatacgtg

SEQ ID NO: 40600 - DNA, 418 bp, Oryza sativa
agcttcgtcaggtaagccgagaacagcacattccaggacaatttcatgctaaacaagaaatcaaaccagagtaaacaagatgagtaaccttcaactaaaccttgggctgtcttcaattagataggtttacaaagtgactattggaaactattcaagtaaaatggagattttaagtttttacctttattattggctacctttattcttaccacaaggaaagtactacgtatcagcaagttctttcaaggcagtacgtttgctaataatgtctagtgtggggatatttacctgtaacagcactgactcaatttctaatgcagacagcttataaccaccaactttcatgatgtcagcatttgtgcctacacaggataatacaaatgagacagataacccaaaacgattacaaatagacagt

SEQ ID NO: 40601 - DNA, 469 bp, Oryza sativa
  unsure (1)..(469): unsure at all n locations
ggaccaaggcgtgagtcactggaggccacagatggagtctgtcggcgaacttcaccaacaactggatcttgtcaacaagttgaaccaaacttcttcaacgacgtcttcccctcgagttccgttgacagacgaggaaaggaaggcgccgttgctgcctacgccgccgattccatctcaagcggctgctgcggctgaaggcggaagcaagatggccagtggccgcctacaagttcatgaacaccggggaagggcactgggagtggcaaccaccctgtgcccgactccggtcaagggtacgtatgaatctccttccacatctctgaaaaatnttgagcaatntgagttcgggaatggggattgtgatggggatcagtttgggcgccagtataaccatanggttcctaaattagatttccctaagtttgatggttcaaatcctgtggattggagaatgagatgtgagcattat

SEQ ID NO: 40602 - DNA, 407 bp, Oryza sativa
  unsure (1)..(407): unsure at all n locations
agctntacaagtttacgacgaacgttcagtgattgatcantaacttannagctaataacatacacctcatatcgtatgttttcagtttataagttactgcaaaaataataattctaaattttgtacaaccaccatctaaaatgttgctacgtaagatgaatctaacacgatgaaattgggcaaagatctgtacagactcgttgtccaataataggtcacattccgtcttagatagcaacattttagaacctagaaagtagtaatttatttttttaaaattgctagtttttaaatcgttaagtatattaaactatacgttttcgttataattattatttggttgctgatcaggtgtagcgtatgagataaccaacaagctcgtcgatgtactgctccttccgttcctg

SEQ ID NO: 40603 - DNA, 483 bp, Oryza sativa
  unsure (1)..(483): unsure at all n locations
actaagcttattatcccggccgttcattggtttttctggatntaaatttttacacgttcatatagcagtcaataagcagcctataagattgttatttcattaagttgctaatattcacttggttatatatggntctttatggaccctaacttacatacattnttccatcacagtggccggcaaagcaatgctgacggacctactcaggatgagaggtaaatgatggagaaatgctaagttcataacatattaacttgtcttatttgagcaatttatcttatgttctgtacctccttcggtaggcccatggagcggaagccttctaaccagcagattgcttcaccaccgccaaactatgaagatgtcacaagagatacacaggataataatcatgatggacgcgatgtattntatgttataatgtttgatcagtagacatgacaacgatctctgatttctgaactaccgctcaatatcagaaat

SEQ ID NO: 40604 - DNA, 352 bp, Oryza sativa
taatgccatgctccaaagtaagggctctattgttaaggataataaaaactaattatgagatattaagacagagtttcaccacgaggtggatcatagaaattattgttactttgttattagccatgatgtgtaactcatttcattattacaacttagcttcatttagtttcatggtccatcctgcttttttatgttaatttataaagtatcctgcaccaagaaaaacatttatgctcatcagtagctcaaaaacttgatcaaagttgagtccaaagaaaatgcagctaatgaatcttgagcagttgtgatcacaaaagatgaaattgtcatgagctcacatgtattcgagcta

SEQ ID NO: 40605 - DNA, 463 bp, Oryza sativa
ccttgatactaagcttgacagaagatgctgctatacatggactgacgtattattctataagatcggatatgtcagataacatgacttgaatctaaataatccataagatatagataaaaactaatccgtttcaccataataaccggatactctagaggcctacacataggctctaacatccctgtattccaagtgtgagtatcgtggatattaagaccagagaaggaacaaacgagagtactcaacaatgatagctatgtcctccattgtcaaggtaaccaaagcgaagagattgataagctctgatatagatagctgtgtgtatagtagtagtggacgaggcagtcaaagccggatgccgatgataagttatctgccaagccataaaatacataatgagtgccatggagtggtcacgagtgcgtgcaatggcaccgtagatcaacgtgcatgtcaacgcact

SEQ ID NO: 40606 - DNA, 312 bp, Oryza sativa
ttaagtcaaacgaggcatgcaagcttctccaaatcactcctacactctcatctactctcacaatcttacaagaaaggctctagatttgagtggaggaagcaaagggaccttgggagaggctacaacaacctacgcgcatgaaagaactgaagtggaatggccaaaaaatgagctgggtgcgatctaaatatatataacggctatgtgacgtcatctagccgttactcacatttttgaactggaggaagtccggaagttcctgaccctcggaactttcggccacacttatgcaaatttcatccaatgcacggt

SEQ ID NO: 40607 - DNA, 507 bp, Oryza sativa
  unsure (1)..(507): unsure at all n locations
tactaagctggtagtggcaggacataattatatactactagtagtactatctcttttatgggatattcccggtcgatcaggatagtgtcgccattccttcgacagaaaggctgcaggtagagtcgttgtacaaggtgtgtttaggtggaaaaaaggaaatttttgggtatcacatcggacgtttgaccggatatcggaaggggattttggacacgaatgaaaaaactaatttcagaactcgcctggaaaccgcattacgaatcttttgtgactaattaaaccataattagcacatgtgggttactgtagcacttatggctaatcacggactaattangcttaanagattcgtctcgcgatttctccataactgtgcaattnaggtttctttttatctatatttaatgcttcatgcatatgtccaaagattccatgtgatgttttacggaaaaaattctggggaataaatctttctagtagaattatcagatcagataagtgtgacct

SEQ ID NO: 40608 - DNA, 84 bp, Oryza sativa
  unsure (1)..(84): unsure at all n locations
agctntcaagagaattatggagctanggtttttgttgctattntattctttgggatttatatcacgctgaaactattttcgcgt

SEQ ID NO: 40609 - DNA, 418 bp, Oryza sativa
  unsure (1)..(418): unsure at all n locations
agcttgaaacttgggatgaatgcaaaatactaatgataaaaagatttgtgttttcatactatagacgcgctctccttgagaaatgggaacatctaaaacaaggtgacaaaacgctacggagtactttcatgattttaaaatttggatcacttatagtgcgttacaagaatctaatgagaacacaatgactagattcttcagagggcttaatttcaatattcaggctgggcttgttaatgtgacatataatcatataggccaattgttcatgcttgcttgcattgttgagcgcaaaattttggagaatccaatggagcaacaagatatgcttgtgcctnctatcactgatgttttgcaagaagctcagaaaagtcctcaaaatgagaagaacgagtatgttgagacgtacttncatcac

SEQ ID NO: 40610 - DNA, 485 bp, Oryza sativa
  unsure (1)..(485): unsure at all n locations
ngcacttagcaccaaaccgcacccacatccatactacatccaatgtccgaacaacagtggtaaggcgaaggtaacaaaactggtgcacatntaatttgcaattggaaattaccatgatgttgttgaatgtgatgttgtgcccatgcaagcatgtaatattctgctaggtagaccatggcaatttgatagggattctatgcatcatggtaggtccaaccagtactcttttctgtaccatgataagaaaattgtgttgcatcccatgtctcctgaagatattttgcgtgatgatgttgctaatgctgccaaatccaaatgtgagagtgataaaaaagcccaatctgatggcaagaaacctgagacaatcaatttgaaacccaaatgcttacttgctactaaatctgatattactgagttgattgcatcaccttccgttgcctatgctntggtatgcaaagatgctttgatttcacttcacgatatgc

SEQ ID NO: 40611 - DNA, 438 bp, Oryza sativa
agcttgccacattctataagatgcttatctactacacgccacaaatctaggcaatgttctgaattatccaactgaaagtaattaagtgtatatagtctcactttagagctcagagcattttataggacaccaaacggctgatgctttcttatctcaactaaattattctaggacaggtgatgtaagctttaaattatagaaatgcataatgtttggagagacgtgagtgccactcatggaatctgaagagaaggctataatgtcttggcctactctattttataaggtcatatgagctataaagctattcaaggttcaaaactggagaatcgttggcttctaaacccgcaagtatgtgccgtatgtcccctgtcatatattatttgctatattattgtcaaggacatgttatttcctcatgtggtattcttggggaag

SEQ ID NO: 40612 - DNA, 353 bp, Oryza sativa
  unsure (1)..(353): unsure at all n locations
atctcaccttgtgccgtcaccacttctattcgattctgtcnctgaccgattcttcgggtcttgtaggacgaaaaagggggtttcttggggttttggtttgggggtccgatttggggttcggaatccctgattgattctttcttgctcggcatttcgattggtttggtggttcttggcttgtttgagcgagcggaggtttgggattccacgggtttttttctccgagtcattctggtcaaagcttgggagacagagagagctactccagcttntagctagttcgattgtggcgaggatgatgcggtggccgcgcccgtctgcggcgctcaagttcttggtcctgcttgtggtgc

SEQ ID NO: 40613 - DNA, 469 bp, Oryza sativa
  unsure (1)..(469): unsure at all n locations
tctaagaacccttaatttccaggttctgacttctagctcattttatgaactatacaactacaacttcttagaatttggaccaaaagatggattgtttaaggaaggttctaattctaagagaagctgcaactccttcaaagtgccctacggaaggatctgaaaggtgccactgtggagtgatgatttatagctagcttgaatgcttgatgatgcctgcaacgagttacgagtagtatagctagcttttggtggtgagagagacgtangtgttgcatgcattttcgtttgtactttgccagaccgtgatacttcttctgaagctagtgttgccgtgcgtacgtatagattgtatatgtggagctaatccctcacgttgttgatcgcctttgaaagtatcgcactgtgcgtgaaccaagatttctacgtcgcccacgccaatagactttgtcacttttgtagcttcgctagc

SEQ ID NO: 40614 - DNA, 431 bp, Oryza sativa
agcttaatatgaatcaggggaaccttctcatcttctcacgggtttgaatatatatactccctccgttccataatgtaagactttgtagcattgcccacattcatatcgtactaatgaatttacacacacacatagataaatagatagatagattcattaacatctatatgaatatgagcaatgctaaaaagtcttacattataaaacggaggaagtatttgttatgcccgcggcaacgcgcggggtcccggctagttattaataaattcagaggtgtaaacaattatctgtggtgtgctcatattattaataaatttattaataaccatataggcagaaaaacgagttcacgttaagtcggttaatttgattcatttctgctttaaagggaaatctgtctatttcaatagaacagtagctcacactgtgag

SEQ ID NO: 40615 - DNA, 325 bp, Oryza sativa
actaagcttacaaggtggtggactagacgacctgtgttcgatttccttgtgctgactcagttatttgattagccaatgaaccacttcagcaaaaatagctcacaaaaccatcaaggaagttaaattataccggttttaatagtagagggggttaggatatctggtacaattgttgaggggcacgaatcaaatagagggactcaaagtaagacttattccattcatggatagcgatccaacgggaccgcaatcgtcggtagccggaataagttcactttagttaccttatagttgtccccatcctcattttcgttctttatcgcta

SEQ ID NO: 40616 - DNA, 421 bp, Oryza sativa
agccttggcggcaaatgagaagcggtatattacatttctattgcctatttcacatctcagttaataattaatgtgctttaggttacgtatcatgttacttttgtgtgccctgtgtggatgggtcttttttttccagcaactccaaagaatgcaagggattaatatgtcatgatgatgttcaattaaagaagttcaagttctatgccacgttatgtttgcttattactattttttttggggcgggaaattaaaagcgagtataatgatacagtgttagaaatattattatccatagtgacattagtgatgaacctttaggatactacgagtagaatacaatatagcagtgctcgagagcttacaagtttcatcgcacttgaacaaccgtgatcattggcaacaaagtcccctaatgatcaac

SEQ ID NO: 40617 - DNA, 440 bp, Oryza sativa
  unsure (1)..(440): unsure at all n locations
gacacatagaaactaagcttcatcaacttctaaactattagaaggagctctctctatanttttgntctagattcgccactgattttgatggtgtaatgatgtataagttcataacaaacaattccatcatatcgctcaaccatataggactactccatcagtcctaaaatatactacctccgtcccataataagttaatctagtatgagatatgatatatcctagtatatgaatgttcatattcatactactaaaatatgtcatatgttgtactagattaacttattctgggatgaagggagtagatatttctagcgttcaaattttgtcccacaatatagctacttaaagcaccaaaagatgtttatagtgaattaatgataaaatgtctaanataccccctatgtcacaaccccaacctcccaccaaccaggataatt

SEQ ID NO: 40618 - DNA, 416 bp, Oryza sativa
  unsure (1)..(416): unsure at all n locations
agcttagttntattgtcttgtgaccataccttaagcttagggtggtgcattttagtttggtgatgcttatagtgcatctctacaatggcaaaggtacaaaacttaacccattaaatgtttaatgctgccttttttttcaacattgtagatgccctaataacattagcatatccatacttcaggctgcattctaaacaagcctactttattttttttccttatcaacgtgatttccaaataactaagtggtatattttacatgaaagttttctatacgaaagttttttcttttaaaaaataaaatttatttttaaattttataataattactcaattaggcatgctatatgttaatggttcaccttatatggtgtgccgccttaaataccaacccatcctccgctccgagtcaactg

SEQ ID NO: 40619 - DNA, 448 bp, Oryza sativa
tggcagaaacaattctacgcacaagaacagaaaatcactgtataaaattggaagggaataaagggcaacgaagaagtagccaaacaggaattggctaccgcaggcagctctagcatccacgaaatatctgaaaaagaggacaaaagatctacccaaacagatcacagaccaccaacctatcatgaacacaaccacatcctctccaagaaaaaaaaagaaaaaaaaagaaaaaaactcgaacacaagcaaccatcaacaggaggacatggagaacagcaagcccacaacagaaagagaaggggatagcagcaagcaagcaaaggcgagatcgagctccctacctcttcctgccgatctcccacttgctggatttccttccccaagcccgctagctggtatttctcctttgccatgaccttggaggagaggagaaagggagagagagaga

SEQ ID NO: 40620 - DNA, 425 bp, Oryza sativa
agctcgctttaatccattaatggatctctttaaacgacatcccatattttcgtttcctttcatgacaaaacctttcgggtgcgccatgtatactttttcctcccatctccatttaaaaatgccgtttttacatccatctgatgtaattccaaatcataatgtgccactagtgccattataatcctgaaggaatctttacaagagactggagaaaatgtctcattgtaatcaatcccttctcgttgcgtgaagccttttgccacaagtcgcgctttaaacttttctatattccctctggagtcatatttggttttgtagacccatttacaggctactggtttggctcctttaagaaattcttctaaatcccaaacatcgtttaggttcattgaattcatttcatctttcatggattccaaccattc

SEQ ID NO: 40621 - DNA, 385 bp, Oryza sativa
  unsure (1)..(385): unsure at all n locations
atagaatactaagcttataaggggctaggaggcggcgacgaaggcccactgctgtcttctactagaaggaaagctcgagctcggagagagaaaagccgatccgattcgaactcgaatccatcgatttccaaaccgatttagccgaagtttccaaaggagaaaaggtagaggagatctcgaggatcatttcccctcttttgattcggccagagaaggaaaggagcggccgaatttggaagggaaccgcggcggcggcgcgctatggttcggccgggcgacngcggctcggggaagacgaacctgacaggcgggacccacctgtcagcgacagcgagggcgcacgcggctgcggtggactgggccgactgngctcgggagagagaaa

SEQ ID NO: 40622 - DNA, 343 bp, Oryza sativa
agcttgtgctaaggctataaatatacctctatggccatgtaatgggggatccccaaaaaaatatttcacgaatcaatacaattgcttttacattccaactctattgagagaaccacgcctttcgacgtggcataattgtccattcgacaacagctggcgccgtccgtggggaacctagaccgaaagggcgaaatgggacccctttcgccacacccacacccttcaccacagtacccgtgaggtacggcgacaagggcttggggcaaaagtgagttaagtccaagctggggggctacgaagccaccccagcctctagacacctttcgccatacgccacgccctt

SEQ ID NO: 40623 - DNA, 393 bp, Oryza sativa
  unsure (1)..(393): unsure at all n locations
ctaagcttattgctagcctccatatcggagaatgtctgttgcttatgtcttgaattaggatagatnacacggtatatccaccatcttgaatgagttttcattgatctaattaggtcttatgtatcttcccacgcttaatgctgcatcggttaggttcgatctgttaagtactgttttgaaacattttatctagttatttctctgactactaatagagatagtatcagagtctcagcccatcttacttgtattagtcattctacttccatatttggtcatggatccgtctaatctgcccctcataccaaaatcccatccttctaagtatgtttagctccccatcgatctnctantncatttgcctttctacattggcttcagccntatatattt

SEQ ID NO: 40624 - DNA, 397 bp, Oryza sativa
  unsure (1)..(397): unsure at all n locations
ccatgaagtacttgcacgcccaattctgttttctcatgaagtcgnggcggccgtcaaaagttggcgctgccctgcagtccgaatccaccccgcgcgaatcctcttccctcggatcctctccatcgttcctgagtaaaacacgagtgcacgcgtctccgatgtataaagacgaggaatatgaactcaagaaagaactcacctgataatttagttgacgtgcacgagcgcgggtaataggaccatcatgctgtatatggggggacgtggatgtatcgatggtgttgatgtcctcatcagtgcattcgtgtcaaaatatcacttcgcgattcgcgcggcgaacttttgtcattactaccaataatggcatatggggttgctaagttttcaccgtatgaaa

SEQ ID NO: 40625 - DNA, 444 bp, Oryza sativa
agcctgcaatgtgtacctgatgttcggactccatccatgcctgaatgtattgtgtgttcgtctcacggtgcgctatcgtttgaccaatggaagtaactctgaccggatcgatccattgtacgaattgacatgttctaacttgctcctattttaaaacatgtgtaaatagatgtaagtgcatgaaagtagtgattactgattagtgcatgaaagagagatctaaagtaggccaatcttaattcactacgtgcatatggacgtgttccgtcgttgtgtgggtactccgtatctacacctcaatgtagttgcacaatgtacggtatgtctacgtaagatgttatgatggagtagaaatcgtgtagtggtttatgtattcagtacagttaattgaacttgttacgaataaatcatacctgatcaacgattcgcattggaagaactcat

SEQ ID NO: 40626 - DNA, 421 bp, Oryza sativa
  unsure (1)..(421): unsure at all n locations
agcttcaaggttnggaatacacaaactggttcaatatttttgagaattttcaacttctgggtgtatacctaagcgtaggaatttcattcatacccatagctaacaatagaacgccttaacttcaactttattttgcaaaccattattacatatacttaactagaaattggattaaattcagttcaaactggtttgaactaattagtaagctagttagcaagcaagttaatgatcgtacaaaaaaatttaaaaattgtccatactcatttaaagtggatatataatcaaatcgaacctcgaggcctatgtagggatgaaaatggttnttggaagtttccggttttcggaagtgtattcggtaatggaaagcatcagtcggaatatttntggaaacggaaacaaatttgaattttcttactta

SEQ ID NO: 40627 - DNA, 442 bp, Oryza sativa
  unsure (1)..(442): unsure at all n locations
ggctatcttcatcgatgatctccaacgagctagtaccttttactttattttccttttcttaggtttgtcaatatacatatattctaatgtttttctatttagctntgagaatactaccaatttttacggatggtattgaggttactgcattgaaaagtttggtgagaacaataaaatagacatcagaacggatcaggtgtacgtagtagtttgtgtgagtacgaagaaactggtctatagtaactacatatttttcattttttaatgtgtgtactagagaaaatacccgtgcattgcaacgggtgaagattattttaattntattattgttactaganaaaaatgcccatacattacaacgggtgaagtctatatattaaattactgtgggagttcacttggatatatatatatatatattaaatttgtttggtgctctatg

SEQ ID NO: 40628 - DNA, 407 bp, Oryza sativa
agcttcttgaaaaaataatagagaaaatatttttgatgttcctcaactcctaactatgtcacttttcttcttccatatatgatgtaaatcggtgcagcactgcagcggtttccccttccaagtggaacatatgtggtggttcagactcttgcattgccggtgtggaggtttgagtggatcaaaattttgcaagaattcaactctggtgagaagattttctgtcatactatctactctggttttcaagcagtgtacctgaacagagagacctgcactatgttggatggccaccacatagacgccggctcaacaagataacgccggaatattcccgcccagccgaaccccagcatctgatggtactgtatcgcacacgcatgagaaggaagatatatttttttttattt

SEQ ID NO: 40629 - DNA, 505 bp, Oryza sativa
  unsure (1)..(505): unsure at all n locations
gggcattnntcaaaatatacaagtcaataacaaagaactactctcttataaaccacatttattgctggagattgagatgaaagagatgcaaggaatcgtccctgcattaagtacattaagaaatgatcaaattcattctctgaaaagactgaaagcaaatgatgagaagaaaacaccattgtaatgttgcaactattagcaacttaatacaaggtatatgaagaatatttagttagattcaggatagatgatgagaaaaattaatcagaggatatgcgataaagctatagttaggcttacattcaaacaacctaattaagtatcatctctatcttggttctgtactaacaggtgccaaacaaagtatagtatgattnttcctaagactaaggtaaccagatatttaaaatacatatcaatgatgaagaaagaanacagacctgctctaaatngattctatacacatctggtgatgaagcagcgcanagcatatcacaagaccagc

SEQ ID NO: 40630 - DNA, 407 bp, Oryza sativa
agcttgtccgcccgcgccttgagctcaccgtactctgtgcggaagcaccgagtcacgtcgcattacttggtgacctcgtcgactagctggatcggcgtccgatgggtcgatcctagcggggagcgatgaatttatggcgaattcagggaagggggatttgggtttaaggtgtttggttgcttggtggagaggtgggttgtcatggtcgccgtcagcctcatgttcaccgcctccttcttcatgtatggcgggtccaggcagtcacaaacgtgtggctggtagctaggcacactggggctgtggatggcacctgtgtccatcaccacggtgtaggtcatcgacgccggtagtagcagcaaggtgacgtctaatgcggccacccagtccatcgcaacaacgggacacaa

SEQ ID NO: 40631 - DNA, 433 bp, Oryza sativa
  unsure (1)..(433): unsure at all n locations
tcatccgtggcaactggcaactgtctcactcacatcatctttattgtgttaaaaaaaaagtctcacatcatcttccttatttntaagaactgtcgaatcatcatcggccaaacgcactattcctgatgggccgatttgagcacaagtatcagcagcctttctcgaaaacggcccagtaatagcttgtctcatgcgccgttattttccactctagttgtttgtgctantcctcaacgaaaacgactaccccgattagtttgaaaagctggttgacacttgacacttcctccattctactccctccatattaaaatatancaactnttaattggatgggacatatangcagcgtgattcgttccattgaggcatggtatgccgctagtattcaagatcgaagcccaaacaccgcacagatgaaacgctttggtgc

SEQ ID NO: 40632 - DNA, 334 bp, Oryza sativa
tatcatgacgctatactaaatgttatggctgctatgggatactctgataagcggtgttgttgggtgaggaaaatttgctcttatgcatcctcttcagtttttttaaatggtgttcctggtttggactttcattgtaaaagaagagtaaggcagggtgatcccctctaacctttgctttttgtgcttggatctgatctcttatattctataataaatatggcacatcaaaagggcttgttatctaagccaattcccatgggggatgaccataacttttcaataatgcaatatgctgatgatactttgttgtatgttaaggcttgtggtaaagaac

SEQ ID NO: 40633 - DNA, 388 bp, Oryza sativa
  unsure (1)..(388): unsure at all n locations
aaaagaatcatacccacaggagtagggtattacgcttcatagcggcccgtacctgtataaactccttttgtctcatcgtcttgggggggcctgatcccctcaagatgacttggtttcgctctcgaagcctcaaatttcacccgctgcccccgaccgaactaaaaaaaaagggggcctcacggttccctggtagaggagttaaccctccgacacttatagtagagacacatttctaggaaatactaacataacaataggtgtggcaaactatggcatacacaactntcaatcaaaaagcaagacagttatagactctaagtacacacatgatctaaacccacactgtgtagcctagcacaatacaccagatgtatataataagtagtgg

SEQ ID NO: 40634 - DNA, 431 bp, Oryza sativa
  unsure (1)..(431): unsure at all n locations
agctntgccatatgggtgtattgttcgatatccgaataaccaaatttcctgagtcgagcagcaccgcgtaaactccgtcgtcttcggtgacaatactgttgggacttccatcgccgtccatagggtgcggcctttggaatctgacaatacaagagcagaattgttgctgatggagagcgtcgcggatgaagatgcagcgatcgggtcgtcgcggttggcaacccaaacataggtgcgctcggagatattgtgataccatataccaaggaataagctctggttggaggtggccggggagaagaatccgagcgcaaagtctccacctttggagatgagcatgtcgctaggagagattagtcgcttcgcatgtctcaactggtcatcgcatctgcagaaagagattagtagtagcatgtggatgaaaactggga

SEQ ID NO: 40635 - DNA, 462 bp, Oryza sativa
  unsure (1)..(462): unsure at all n locations
ngactnggtgcgaggaggctggtttagcgatgtctgccctgttattccaaaggaaggggcttctttggcatatacccatggacaattcanggcatagtgtccttgttctctacaatcgtgacaaaaggggacatcctcttctggcattggaagctcattgacctgtgtggcaaatgctcgatcaaacacatactgattttggtcttgacttccaaccaatggtagctgtgaactaagcggcatgcttggaatggaccaagggtgtgccctggttaactctcttgaggccagtggtggattgagttgaaaacttgagttactggaggcataccctctgacattctntcctttttctctgttaaacatctgttacagggatcgaggtgagagaggaaacaagctatgaaagaatagaccagaactatggacaggaccttcaaggaactaactctctttggtgat

SEQ ID NO: 40636 - DNA, 405 bp, Oryza sativa
  unsure (1)..(405): unsure at all n locations
agcttctgattgcagggagttgtttggactgacgtgccggcagctatgtttctcgggtttgggcacttgtcggcgaaatgacccatttcttgacatttgaagnaaccatatcttcccggactcggcattttattttctattttgattcctctggcctggcactggagttaggctgaaactggaatcttggcgaggattggtgttgccttgatgcttctcttcgtggaactggcgggatggatggccatcttcttcgtcggcagaaaactgaattgacaatcttatggtacgtgatcagttccttcacaaaagaaacaagtgatcctgctcgttggacacctgtcgggtggatggctttctcaccatgacgcatgcagaggccactaactggcaacatggaccgat

SEQ ID NO: 40637 - DNA, 462 bp, Oryza sativa
  unsure (1)..(462): unsure at all n locations
tgtttatttcgttttccgcgcgcacgctgtccgaactacttctttcatcccanaatataagcattnttagctatgaatctggacaaccgtgtgtccagatttatagccaaaagttgttatattttggggcggaggtagtattaaacggtgtgttttttttgcagaaatttcctatataaaatttacttttaaaaaatcatattaatctatttttatagtttcaaatatttaatactcaattagtcatacgctaataactcacctcgtcctacgtattttctcaatcttatcttctcttctcctctctcactcaaactcagccaaaagtgttcagtatcaaagcacgtgccgcacaacactttactgtattacactggcgttcgtggtgaaacagtgaaggcaggaatcacttcagcaaccactgacgtgtatgctccgatcgatgtcccgacatcactacat

SEQ ID NO: 40638 - DNA, 425 bp, Oryza sativa
agcttcctagcactagcaggtggtgatggtatgcacgtatgtacatacttacatatgctgtgtgccagccaagatcccagatgcggtgcaacgtcagctaatctggcttcattgaaacaacaattcttgagtcggatgactcaccctcacctggtaaatctctctattcttgggctgaatcgaataagaatattgatgggcatattatgttccatgcaatgcagttagcctgagcaatcaagccccccatcaacattcctttattctcttttcccctctgtttgcaggctaataaatattcttaagactattactactacagtatatatctcctttcatatggtcgagtgcttgctcggttgcagcagcaggtcgaacgacgtgagggagtatggatccaccaacacgcccatctgctcattcgc

SEQ ID NO: 40639 - DNA, 495 bp, Oryza sativa
  unsure (1)..(495): unsure at all n locations
tcttggnttttgttttcttcattatctatgccctctctttcttgtaccatgtgtctaagaggaggcactagaaacctccagaaattcccatatgtttatcaaattgttgattntttagtgcatatgtaactttttgatccaatggctattatttatctaaactctttattcaatggttgatatgtttttgatgatgtggcgtgttctcgtgtaagaaagcttgttacttccactatataagataagataagatttggaagtgactgcatttaatatacagctattgcttatattaccataaatgcaattgtattttgtatacaattatattgatcaattgcagttataatatggactcgtcgtgattactaacatagatatttctcttcccccccccctgaataatgtcgtaattttgaggcctcnaancacaaatgatggctacttctggccttctcttcagaatactataatagatgccttacttgcatatgg

SEQ ID NO: 40640 - DNA, 352 bp, Oryza sativa
tttttgtctcaaatctagtgtctttttcacaatttttgaacgctcgaatgattgattgatttattcctgataccgtaaacatgtgattactgtgtgtgggtgtaattaataaatgtggtttattttttaatcgttgctaaaaactgtatggtgcttttctactttagatactttgacttgaatattccttttacttaattttttaataatgacctttaatttatgcgttttaccactattattttgtaaccctaagagatttgtttacactggagacaatcaggtattacttgagttttttgaaattcgaaaaacatatgagttgttttaaataaatagctgtttaaaataa

SEQ ID NO: 40641 - DNA, 311 bp, Oryza sativa
  unsure (1)..(311): unsure at all n locations
ctcaagcttggtacaacagagagaaggaggcataataaggttggtgtaatgaagctatggagcaaccaagaatccccgccaactgaaacgccacgtcatgctgaacgttaatggggaggaangtgcttctacccatgtcaatttcttacttttaccatgctttcaccattctgtgaaccaagattcttatactttaattttgacacaccaattcaccaacatactcatacaacacagcangaacacctgaaatatatttctccactagaactatccttccccttattcccatctataaaagtaaacaccac

SEQ ID NO: 40642 - DNA, 356 bp, Oryza sativa
tcacctttctgccttttacccaattcccttctttataatccgctaaggatcgtgtgcaaacagaacttccggcatcctgtggcgggcgaacaattctgcaacgccgtgggtaaggtatcttctctcctccaacgatcggcctgatgaattccttccccttatctggatttcccaaatcattgtatggggcataatcatatattctgtcagataatttccgaacacctgtgccatcttcttttatgtctttaagttccttctcccttagttctctaagcccgggaggtggttcaaaaaggaaatatggcttgatgagaccattcatttattatcagaaatctgaatacgtaatcttc

SEQ ID NO: 40643 - DNA, 481 bp, Oryza sativa
  unsure (1)..(481): unsure at all n locations
nganagcagattagcaaaacaagggtgtgtttagttcatgtcaagattnggaagttggttgaaattgaaacgatgtgacggaaaagttggaagtttgtgtgtgtaggaaagttttgatgtgatggaaaagttggaagtttgaagaaaaagtttggatctaaactcggcccaataagacatataatcagaacagaacttacattctgaatattggaatgcagagatgatactggactggactgaacgagtgacctgtactcctcgaagtttgacctctcaaattctgagcaatcgtctgcatcgaaccatatatatagaaacctcaggtaggctatatcacacaaaatgtatatgcaaaatatagccacaatttcaagatgcttagtacagatgtttgcggaggcaaacaaatacttgtgaaaaggggtgaacttaaacttaanatgaacgcttccatcannaggtaagacaacacacaaat

SEQ ID NO: 40644 - DNA, 410 bp, Oryza sativa
  unsure (1)..(410): unsure at all n locations
tcaagatattgagaaggtttcggaaccattgtttttctatttgtacagcacacgtcaggaaggtgaatgttttggtagcttcacacgccggacggtgagtaatctttctgcaaatactcgtgaatgattttcgagacgaatcatttggaacctcacatgtagattggccactcaatggttcccaaaagatatcttattcttgtccattgtacggncttcctgtgctcngagttactaatttaatagaaaaactccaaagaacagtgatttgtttccttctgagagtattaaccacaccaagtctgggctaaactaacatggacactgaatcaaaatctgcttgctcattgcacctganaatgccacaccacatcagattnttgatggatgtntgttgccatacaatgcat

SEQ ID NO: 40645 - DNA, 427 bp, Oryza sativa
  unsure (1)..(427): unsure at all n locations
gcttaagatagtgaataacaatattctattttgtttgggtattgntagggatatatcttttctggntaattatcttggttttccaatacatttaggaagctgactaacaagattggaaattgttacgggaaagaattgagaaaagcctaagtagctggaaaggtaaacatatgtatgtgggtagaagattggtttatttaactttgtattaataagtctaattatggttatgattttttttgtttgatattcttagaggagtgcttcaaaagattcattattatagatcaattttcttttggcaacggataaacttaagaaaaaaaatatagacttacaagatgagatgtcatctgtcaaccaaaagaatatgggggacttgggttntataacatagatattcaaaaccaatgtcttctaagtaaat

SEQ ID NO: 40646 - DNA, 489 bp, Oryza sativa
  unsure (1)..(489): unsure at all n locations
tgccctgcagccctgcggtgaataactctanttttggacctccataagtgggccagcacggctgagaagcgacatgaatttctcctggtagtcagcaacggaaccagtgcggcggagttcggcgagggtccccaacttgttgtggcgaagagggggcccgaagcgcagttccaccatctccttgaagcgtctccacaacggcgtgccgtaggcttcttcagcatgcgtgtaacactcctgtgcctcgtctgtgagatggaacgctgcgatccaaatcttctcatcctcaacggtggtgctgtccatggaaaaatgctcacaacgacttagccaagtcattgggtcccctttaccattgaagatcgggaaatctcacttgtggtagcgtggaacccgactgtctgttgtgccgtcatgctgatgctggtttgaggccganggtttggtgcccacgatccccttcgtgtcgacttcagcgatctttgtgct

SEQ ID NO: 40647 - DNA, 430 bp, Oryza sativa
  unsure (1)..(430): unsure at all n locations
gctttgccccgtatattaatagagagtgttatattatcaaaagtatatacagggtcagtctaaaaagacgaccgacccatataaacagatcattaggtggtatctcccaacgctccaaactcctagagccttgtcgctccggctttaacccatgctctaccctcctctttgatcttggctagcaattgcaaagatattatatctcttcaaaaatttttgaacggcaatcattcatccttccacacacatgcagttcttgcatcacatttgagagaatggagagcacggcagcttttaaatggcaagaaggaaggtttanaattggacatgaaacagaaggtgcaaatcattcgactctcaagatcagaaaatttagttgatcagaaagtcagacagtgggtgcatgtgtggggtacttaacaaattggaa

SEQ ID NO: 40648 - DNA, 171 bp, Oryza sativa
ggatcctttggatagagcgatgtccgaagaaagaactttgttttttaaaactgatattgtctgagggtatgataccaaccgcaagttcgttgccttgcccagcctctctggacaacatggcaatctagtcgaactcttatacagggatgtaacctttgcacaactaagcca

SEQ ID NO: 40649 - DNA, 433 bp, Oryza sativa
  unsure (1)..(433): unsure at all n locations
agcttcccctgagaatttatccaaaggaattgtattatagctcgagatntttttatgaccattcgtagaaagttttattcttgaaatggtgttaccatgcatggtattgagctcatcgagaaccgagctagctcgagcttgacacaatgacatacctgctcatgacaactgaactgaattgtctgaactcatcggcatgtggcaagtttccctgtggacaaagccttccatgacacatgcatgtacaaagtcaggacaaccgacgccacttccgccgtgaacaagtttgcatttgtagcaggtactcggtacacagctaacgccatatacttatgggacagaacatgatcatcttaattagctcttgggagtgatcctgaacaaactttcatgagcagtacattggattgttctctgatataagcctcctact

SEQ ID NO: 40650 - DNA, 491 bp, Oryza sativa
  unsure (1)..(491): unsure at all n locations
gacctataaaactaagcttggatacaatggatgttcccgtaactttcccaacaccagtattgttatggtgctgatggtcttcctctgattgtgagtatatcagaatgtcatcgatgaaaaccacaacgaacttatccaagtattccatgaacactttgttcatcaagttcatgaagaaggcaggtgcattggtcaagccgaacgacatcaccgtgaattcatacagcccatatcgcgtagtgaatgcggtcttcggaatgtcttcctcacgaatacgtaattgatgatatccggaacgaagatcaatcttggagaatacagtggcacctttaagctgatcgaacaaatcatctatccggngaagagggtacttgtttntgatggtaacttcattgagagctctgtagtcaacgcacatcctcttcgtcttgtctttcttttctacaaaaatcacaggggcacnccaaggggaagtactcngacgtatgtac

SEQ ID NO: 40651 - DNA, 421 bp, Oryza sativa
  unsure (1)..(421): unsure at all n locations
agcttcgtgcaggagcgagaagatcagtttatatttgtctttctgcgaagatcaagtggagtattttcggagatgacctaaacccaatctttcccagaagagtagttncgctgctctctagatcgtgtgttgtttgcttgtgtgtaggggtatgggttgcatcattggtggggatgccaccatactaggttgtttgcttaagcaacttgaagaataaaagtctactcacaacatatcagtaggcaagtggtttagtaccttatctttagcaacccctctcttccacctctattccgtcctggcagcggatggttagtgtcagagataatatcaattaaagtcaccaatcaatggttcagttgaaagctacgaggattcccagtgcagaagaaccctgctcgtgatcaacattggtggtcaa

SEQ ID NO: 40652 - DNA, 441 bp, Oryza sativa
  unsure (1)..(441): unsure at all n locations
acactgtcgtattggttctggttcagtaagtgcccataatatatgttatgacactctgcaatctctttcaaacgaatatgcagaacaattattcttataatgcagagtatgattgggagattcaagatgccttatggacatggttggcacacatgcatttcatcaagtttttgtacctggagaacatttgggagattttgtacagagttntatcccatcgtgatataagcaaatgctagctagcatgtactagctagtatgggttctctatagtctgtagacttcagccctatttctttgattactcatcattctttcttgatcaagacattataaccttgtatgaaatatattatntgcatgtgtggatgcatggatgccatngatacttctgcannctttatgatnatctattacattataaagctcatcatgagctca

SEQ ID NO: 40653 - DNA, 410 bp, Oryza sativa
agcttgggacttgatcgaagttcgtggcttgtatgatatgttcaaagacatcaactccaaggcccacttcacaatccgtccgttcgcttcgcggttatgaagtatattcccgcgggaaacgatgtgaccaccgtgaccgagtgactttgaaaatagtgagataatttcctgacggtaattaagacaccatataataacttttgaacctgaggataccttgtcttggagttggctaaaacctcgctgacaaaatagattggtcgttggactttatgaatatggcctttctcttcacgctcgacaaccaggaccatactcacaacctgtgaggtcaccgacacatataacagtagcggctcttgtggatgtggcgaggccaaaacttgtggagtggtgagagatttcttgaa

SEQ ID NO: 40654 - DNA, 221 bp, Oryza sativa
attgattggatgaattagagaaaatcaacatctgcccctagaggcgcccggaccccccttatatattggaaggagtccgggttacaaaagataatcaatatcccttacggaatacaccgatattgattaaatacaaccgtgaccgacttagtctcaaagtgggttctttgtgtacaagttaagaaacaaacccgagatgcaaataagaattctatacatat

SEQ ID NO: 40655 - DNA, 422 bp, Oryza sativa
gcaagcttgatagatggtactactatcttgctatcttgtaactaattgccaacattgcacaaatgtatatctgccacagatatcaagagatctgatcatcataatggcccttgcatccttgttgcgacaagccggccgtgtggtggacctgatttcaatctaagctagatgcacaaactgtagcaacattgatctgatctcatctcatctcatctatatatgttcatatttatttttgttttttgctatatagttagtggtgaattttctaaaacaaatgttgtagctagccatgcatacatgctactataacagtaccgacatcgatctcatgcgcatgaaagcactttttttttctattagttagtatagaaattccctatatatataattagcacagcaacttcctaatattaagaaat

SEQ ID NO: 40656 - DNA, 498 bp, Oryza sativa
  unsure (1)..(498): unsure at all n locations
tctcctcgtgcttcacatcgtcaagcggtcaagcgtattatgaggtatttgaatcatacacttgagtttggaatttggtattctacttcatcttctatatgtttaagtggatattccgatgctgattttggaggttgtagaattgataggaaaagtactagtggaacatgtcattttcttggtacatcattgattgcatggtcttctaggaaacaatctagtattgctcaatcgactgctgaatctgaatatgttgctgctgctagttgttgttcacagattctttggcttttatctactttgaaagattatggtcttacttttgagaaaatacctctcttttgtgataatactagtgctatcaatattgctaagaatcctgttcaacactcacgcacaaagcacattgatattcgttttcactttntgagggatcatgttgagaaaggagatgttgagttgcagtttttggacaccaagtngcaaattgctgatatt

SEQ ID NO: 40657 - DNA, 218 bp, Oryza sativa
  unsure (1)..(218): unsure at all n locations
agcttgctatgcccccgccaccaatactggtccaccgtccttctncatcccagcagctctggtgtcgacgcctcgccgcccacccgtcctgctacccaccgctaggccgctgcctcccacgaccatccatttaagcccggtgaactcccccttcttccccctccccctacccctacaaggaagggtataccttcctgtagcgaaaaattattgcaacc

SEQ ID NO: 40658 - DNA, 190 bp, Oryza sativa
tagccgctgtaaaggtcttaccacgagctggcaacccatactctataatggcagcacaatggttacagaagaactgcaaaggtaatttgaagcataataaagtatttcaacacattgacagaaattattcattcttcatatgtttctatttctatatctatactacataagaagacagcggtggtggttg

SEQ ID NO: 40659 - DNA, 419 bp, Oryza sativa
  unsure (1)..(419): unsure at all n locations
agcnttggagaagaagtcttatgttgatttttggcttataccccagttgagcgcctgtgaagatggagccgtaagcccgctagtccgctgctgattatttttttactcttcttattgtcaggcctgaagcgcctttgtaataatgtaagtattatcgatataataaagatgtgtcttttatatcatgtttgtgtggtgtaccctagctntttctaggacggagattaatatactagcgttcaggaaaatgcaaattttctcggtcgcgacagccgcaaggggatgtgcggagccatggttcctggccacacgacgatggagccgccgacgagggaggagcgtgtcatctctcaccggccggagtgtctgccangcttagtgtcgggctgaaatcaaggaggaaaaagtaaatcctaata

SEQ ID NO: 40660 - DNA, 498 bp, Oryza sativa
  unsure (1)..(498): unsure at all n locations
ntgaaatgaattcaaggtgtccagatgaaatagttatgttatttttgtgagcgtttcttcttatgatccaaattggcaaggaaggctactagagacttatgatactcacagtgatgcttttgaaattgcacctgcctgctggtgtgtatcttaaaacatttccatccaatttacgaaggaaagagtttattccacaacctcaattcttctgaaagtctagaaatcaactccctcaaattcttaacaccatcactttacccgcagtagtttgggtaactgaaaatatgtgatcaatttgttgttataatgggaattttgatagctctaattattgcttaaaataacggtaatcatgtgtcatattttctgttcattagcgaatcaaaccctgtacaggactacaagaaaattccttcctttcagctgtgttaaaaaatggtacctcccaatcatgcaatagttnnttttttanagtccgtcaaccatgcaatagtaact

SEQ ID NO: 40661 - DNA, 408 bp, Oryza sativa
  unsure (1)..(408): unsure at all n locations
agcttggcgtcgntgacgcaacatttttatattacngttgttggatggngcangggattggaaaacaacttcgttacggtggttccataagcgccagcagcacaagataagaacgtgctcgttagtcgttccggaaggtcttcagaccagtggatggtgtgaatctcactcagggaggttagcatgggtagcacctgaattaggccccaataagcatatgccatggggtgcgcaaggaatatatgttcattgtcttccaggcatgtattgcataactgacatgttggggaggggatgattgacttcttgtgcatggtgacagcaatatgtagtctgttcatagtcattaacttgcacgccccgaactagttctcgacggaactagcccgtgacgctctaattaatctg

SEQ ID NO: 40662 - DNA, 404 bp, Oryza sativa
  unsure (1)..(404): unsure at all n locations
ntgcactaatctcatacgctaattggcagagttgactctgttatgtcagctgctaattgcgcttatatgcctctacctaattgcattgcatgaccacttctatataaacatcgctgtgcttcgacgtacgggaagagcaacgagctgtgtcgacgctagctaagccaacaccaacgaagattcgaagctcgcgggtttcttggctttggtcgtaagcatcaaaaatggccggagctggagaatacngcggcggcggcggcggcggcggcggcttcngcggcgacttcatggtgctgcggccggacaagggcggcatcggcgacctgttccacctgctgtggtcgtgcaaggtggcggagaacgccgccgtggactgccccatcggcacggagatcgccgagcgt

SEQ ID NO: 40663 - DNA, 417 bp, Oryza sativa
  unsure (1)..(417): unsure at all n locations
agctttggagaagatgttatatgtgaagttctggcttataccccagttgagcgcctgtgaagatggagccgtaggcccgctaatccgctgctgtttattttcgatggtcacgccttaaatgcctttgtaataatgtaaatattattgatataataaagatgtgccttttgtatcatgtttgtgtggagtaccccggcttttcctgggacggggattaatacactagcgttcgggaaaatgcaattttctcggtcgcgacagatttgaacacctgatccccttcagtgctctgactctactcacacgcctgtttagctggagggagtttttaggagggattgngaatttatagggatgatgctattgactgcttttcttgattgggagacatgggaatttcagtgggatcactggtgg

SEQ ID NO: 40664 - DNA, 459 bp, Oryza sativa
  unsure (1)..(459): unsure at all n locations
tgtgaacacttgacatactgtacgctctctcttatacgacttgttataacaatcacaaccttaaattcttcttgaacaataagatttaacacatgtgcgacacaacgattattaaaaaaaatcacctccgcacagagcaaacgcttttttacaagattatcactcaataaattgttgaaagtatcattaagtattgattatccaatgagagtccaaataatttgtcttcaatatgtcacttatgtagggccttcaatattgcattaaacatgttcttgtaatcatgtggtgtttcaactattaaaaatctaatgatcctcgtatacaatttccacttgtgatcgataaaatgataagcgatgcacaaatattctatggttnnggttgttggtatcggtaatgaggtagagtngctcggaaactctcgcaaagatagcttatgcactaatgtagttaccc

SEQ ID NO: 40665 - DNA, 413 bp, Oryza sativa
agcttcatcgatccaagcaagctaagccatggtgctccaacacagtgatcgcatggacagcctcttcttcccacagacgagctgggtgagcggtccgatcaccgtgggcgccgggccgtctgggctcgccgtggcggcgaacctgcgggagcaaggcgtgccgttcaccatgctggagcgcgccgactgcatcgcgtcgctgtggcagaagcgcacctacgaccgcctcaagctccacctccccaagcagttctgcgagctcccgcgcatggcgttcccggcgcactacccggagtacccgacgcgccgccagttcatcgactacctcgaggaactacgccgcgcgttcgacatcaacccgctcttcggccacaccgtgctctccgcgcgctactacgagacgatcgggctgt

SEQ ID NO: 40666 - DNA, 435 bp, Oryza sativa
  unsure (1)..(435): unsure at all n locations
ngagcttgactaccgagctngattntntagtaaaataatatatatttcaaggataatctttaaaaaataattaatttctagttcatcatattaatagaagaggaaaaaaagaataaaataaatatataatgccaatacaagccatacaaataacatatttaatctcctaatttattaaataacaacaaaaaccatttattactaggctcgttagaagctcgagctcngctcgacgaagctcgcgagctttgggagaggctcgggctcggctcgtctggagctcgagccgagcttgaatcgagcctangacgagtgtggcagtagttgtgggagtggcagtagattcaccactcactagcaccagtactctcctttattggaccccacagtactctccatntataggagtatagaatgggcaccgtagatctatac

SEQ ID NO: 40667 - DNA, 391 bp, Oryza sativa
  unsure (1)..(391): unsure at all n locations
agctntgcaaggcacctttctctacaaatcttgcacacagaagaaaaacagtagatcagcgttggcaacattataactattctaagtaataattactacacttactacagtactacatcatcagcagattgatgtgattgaatatttataaaaaaatctatcaaacaccaaattagtttcattaaaactaatattcagaataatttaataatatgcttgttttgtgttagaaatgcagctataatttctataagtttgatcaaaattaatttaaatcaaataagaaaatgttaaaacaacatataatatgaatatattacgggtgtaaagtgttcttcgagtggaaccctctcgcaatgccgaagatggccacgcgggtctcaacgccggg

SEQ ID NO: 40668 - DNA, 393 bp, Oryza sativa
tatctcttacgctccaggaatggatcagtcagaacatcaccaccggctcgccgtcgtcgccgccgactggtgtcttcgcctatacgggtggttggtcacaacaccgttgtcaggcgtctacattttcaccgaccggccgccacgtccgccaccgactggtgtttccgcctgcacgctggcctattatgccaccgttgttgggcgtctacgactccaccaccggcctgcctccatcgccgccgactggtgtttccgcctgcacgctggcctattatgccaccgttgatgggcgtctacgactccaccaccggcctgcctccatcgccgccgactggtgtttccgcctgcacgctggcctattatgccaccgttgatgggcgtctacgtcttcac

SEQ ID NO: 40669 - DNA, 377 bp, Oryza sativa
  unsure (1)..(377): unsure at all n locations
agcttgcatanggactggcaatggttgcaacatacctttagacttgcagtgttcaactttggcctgctgacaagtagtacactgagcaacatattgctgcacatccttttgacgcctgtccatgcaaacagatttttgattctctgataggtagctgtaacaccagaatgcccaccaaccccactgttgtgtaatgcaagcaaaactgcctgttgtgcttccttatgatgcccaagccatattcttcctttgatcgaattaccccattaaccaactggaagtggtcacatcctttaggctgaaggggcagaatttccaagagctgtttagtttttggatcatgctcattgacggagcgtggggctcctcaacgggag

SEQ ID NO: 40670 - DNA, 478 bp, Oryza sativa
  unsure (1)..(478): unsure at all n locations
tcgntgattcccagtgaggatctagctgcttctgttcgntgagattcggacttgcatgttccgcccatatccatttagaccaaggcaagtctgaagagtgaagatggtgcagccttttaacgagcagagcattgttctgtcggccaacatccttgataccaaggcctccaaattgctttggaatgcagattgaatcctatgccactaagcatctggctccaatgcagctatcctcccctgtccagagaaatgctcttctcatccaatctaagtcttcaatcgttccttttggaagcttgatggctggcatcgcacatgcaggtaagctgtcaaggatcaggtaagctgacatcccatctatttaaacaaccccaactagggtcagtccgatcacccacagcccttgngcataaagctaagggcttattcggntcacaggatttccacatcacaggaacaggaaaaacgtatgaatagt

SEQ ID NO: 40671 - DNA, 437 bp, Oryza sativa
catgcaagcttgggttatagattactttgggcgcatatgtgctaccgatggtggctatgtcactctgtgaatcatttgccaggtggtgacattttggttagggagcaatgcattttgacaacccatgttactgctatatacttatgatatatgctgccactaccatataggggatggcagtgtgaagtataaagtaggggttagtgcaaacccatgatgtaatatatggcactactatgtgggtgattacgaagtactactatgtagggatatgtgcaaaccaaaatgctgtaatgcatgatgtgttattgctgcactagttatggagctttgaagtctaatttcagtcatacagtatttctcttatataaacacgcccagctgtgttgctgctatatttgatacaaggagggttatttaagagagaaacaaagaat

SEQ ID NO: 40672 - DNA, 489 bp, Oryza sativa
  unsure (1)..(489): unsure at all n locations
nttcgccgatcagtgcaatgggtcctgtctccggcatcgacgactctcgtcttcccacccgggcagacgtttcggttcggcagcctcgacttcgtcaccaacaacttcggcaagatctctctccttgactcggagtcggaccagtcgggagagaaccagatttcggccccgtttggactcccaaacgcggctganagttacttcaagaccatctcaatcgagtcggcttcaaaccactcgggcgagatcgcatcttcaccaacctcaccagatcaagacgagggggcttacccaccgatcctgatgaagctccccgacgaattggcggccgtctccatcacgacagcatctccatcccgtaggcctaggcggaagtcggcttcaacaccgatttcgcctagcttcagggaagtcggcgtcatcctccaaccactncggcacggttcgacggatcagctggacgggcactacagctcttccaccgtgcac

SEQ ID NO: 40673 - DNA, 430 bp, Oryza sativa
  unsure (1)..(430): unsure at all n locations
agctntctctttcttccgccatgaatgtgaactggatggtttaatttgcgccgagatatggctggagaggaatggggaatcggagcggtggacacggngagaaatttcgtgccctcttgaggatggtttggagcanattgatgaaccctagcttcgtcggcatggttctatactgtancacggagtgtggaatggcgagagtctcggcggggaagacgaagcgacgtttggacttcggtatttttagggtatcgggagtactaatgggcctaggcctgtacagtacttcagcccaattatgttttcagcgtggcccgttgtgatccctagggacttaggcgctttttgctttggcaatatgtgctcacaatgacacggcccgatgctgttaaaattctttttaacacgattcaataattctttggaatta

SEQ ID NO: 40674 - DNA, 224 bp, Oryza sativa
acctatgatactaagcttgcaggacctcctgagctagtgagcattatgcgaggaaatctgcagcgccagcttgatgcagtggatattattgctcaacatcaggtcctcacatgcatggctccttggatagagaatctcaactttgttagactactagaatctggttggagcgagagattgctgaccagtctttattacctgacgctgatacactcccctcctcc

SEQ ID NO: 40675 - DNA, 386 bp, Oryza sativa
  unsure (1)..(386): unsure at all n locations
agctntaaatctaccggtttacctccctcatcaagggcgagatgcccgttggttgccataagtgtcttgatgggcttcncatcctccatgccgaacctctcannagatccttgatgtacttcgtttggctcacgaacgtctcatccttgagttgcttgatttgaagtccaaggaagaagctcaactctccaatcatggacgtctcaaattccctagacatcatatcaccaaattccttgcaaaatacctcattagtagaaccgaatatgatatcatcaacataaatttgacacacaaagaaatcatcaccaatgatttttgtgaaaaggttggtgtcaacttttccaattttgaaattctttgacaaaagaaaatctctcaatctt

SEQ ID NO: 40676 - DNA, 409 bp, Oryza sativa
  unsure (1)..(409): unsure at all n locations
cgatcatcaagaagctggaccgttcgtcttcaatccatttggcaccggagatttcgtctgcatcaattcttgcatgggtcgtcgaactatgttctggagttggttgtgttaaagtcccaaacttatgttgggtttcatttattctcggttgttaaaaattattgaaacaaaattacttttatcacgaatataaaagagaccaaatgctccaaatagagcatatgaaaagatcagntgttgaacaccctgaaatagaaatttctgaactaaagaattaaacattaaacagttaaatccctgatgtaataaggggaaaatatgcactgtgagagtgccttctcactgtagaatttttcattttactctagaanaatgtacttgttactattcctactctgaatntttttct

SEQ ID NO: 40677 - DNA, 433 bp, Oryza sativa
agcttaatgggacctatccttcctcttggctatcagctatcagatggatgcatcctactactgttagtatcactgttggtcatttctcaattccagtttgctcttgcccttaaagattcgacacccctttgatggaataatgcagatctcaatctgcattagcatgtaccttgcagaccaacagcgttatcacattccctagtgccgcttggtttaaaccttggtaagttggtaattgttggtcatgaccaatcttgccactgtgcctttcctggcataaagcaatggtgggatgatcttgggtcagtaaagacaagaactgaactgaaagatgtgcttgagcagaccataaactccattgtcatcattattgtgcgtttaacctttgctcaaattaatgccggtgatcctgatggaggtattaatgtgcaca

SEQ ID NO: 40678 - DNA, 461 bp, Oryza sativa
  unsure (1)..(461): unsure at all n locations
ggtctcctccactcagaatcttcagaagaagatactagtatactgattcactntattgacaaaatattggttctgaanaaaaaaattatgtgacaggtgatcagagatcatggatgtatcagtatcaggagtcgcagtcattagtttcgtttttaagcctacaggaagaacatgtttaattcctgatcgtgtgtatgtgaattgtgaaacggtgacgtaattagccaaatagccaggcatgttttggatgatgaggatcgattttgtgaattgagtttggtcaggtactcttcctcctctctgtctactgcacaacaactccaatgaaattatcatgatgcaacagcaacccagattaacagaccaactagaaaactgaaaataacttgatacataatttgcagtgatgaaatcaagttgggttccattgcacactagcatcccgactgctcacctaacag

SEQ ID NO: 40679 - DNA, 481 bp, Oryza sativa
  unsure (1)..(481): unsure at all n locations
taacgtcctanacgaagttcactaagttactgggttctaatcttatgtttggtgacgtatatatcattcataccatgctaaacaaagattgagctatggcaatttactgcccatatgcacatgatgctgaatttgtcagggatctgcaaataccatttcttggatgcatgtatatcctctataggttagtaaattgtcaagaaaaaaaaacatttccatacatttaagccgttttacaaaactgaaagttatggattgtggtctattntatactgcaaattagcagccttcctattctctggataaacaaccgacattatatttttttaaagaaattaaaaaaataaccaatagctgcattaaattactgcaactggttcaattttttggtgttgctttgcactatcatgatcatcaagagttaaatcacagtgcagcactgcagctaataaaaacccctatgatcccaccttactataac

SEQ ID NO: 40680 - DNA, 411 bp, Oryza sativa
  unsure (1)..(411): unsure at all n locations
agcttcgacatctattgcgatgcctctcgttaaggactcggntgtgttcttatgcaagaaggccgagttgtggcatatgcatctcgtcaattgagacctcatgaagcaactatccaacccatgaccttgaattagccgttgttgttcatgcactaaaaatatggctccactattttatcggtaaccgttgcgaaatctacaccgaccacaaaagtttgaaatatatcttctcccaatcagatctgaacctaaggcaaagaaggtggttagaactcatcaaggattatgacatgggtctacattatcacctgngtaatgccaatgttgttgctgatgcgttgagtcgaaaaccgcaatgcaattgcttgtcggtaaaaccccgatcggagaccttatgttcggaaattcata

SEQ ID NO: 40681 - DNA, 519 bp, Oryza sativa
  unsure (1)..(519): unsure at all n locations
ctattaggacctatgaaactaagcttaacattgcgaaccgattgagttgagaaacatctttgaatcatgcgctgataggttgctcctgcattcttcaatccaaagggcatggtgatgtagcagtaggccccaaagggcgtaataaacgaggtcttcaagcagccggactcttttagtcagatctgatgatatcccgagtaacagtccaagaagctgagtaactcgcagccggccgttgagtcaaccacctggtcaatgcgaggtaacccaaaagggtctttgggacaagatttgttgaggtcggtataatcgacacacatgcgccattgccccgtctttttccgaaccaggactangttagccagccagtcgggatgaaggaacttccttaatgaagcctgctgttaacagcttggtaattcctccttgattgcatccttcctgtcctgtgcaaaacggcggagtcgttgcttgacgggttttggcgtcttcttaacatgtanagagtgctcaatcacc

SEQ ID NO: 40682 - DNA, 421 bp, Oryza sativa
agcttctgtactgttgttggcaaatggcaatgcatctcacagagcggtgagataataactcttacatctcatggtcgcttctgtattgttgttggtcgctgtgtattatgtaattacatatgatcaggagcaaactgtgtatatgtaatttttatttgtgtggcgctgtgttcgttcaaagttgattctgcgaagaatactattgtttcggagctgtatgctgcagattgcgtgtgtaataagtcaataatctgtaacagattcctgtgttattgtgaattgctatacattggacgtccgggacaataatagcagcctgcagacaagaacagccaagaaacacaacttgccactcgcgttcgcttctgtattactggtagccacttgcatctataaacattaaattgtgtcatgtaactat

SEQ ID NO: 40683 - DNA, 492 bp, Oryza sativa
  unsure (1)..(492): unsure at all n locations
ggatgctgaagntagtatgctatctctattagcatccagttacttgtattntattacaaagatgatgtctaatcttgtaaataactactccagaatgctcctttctttgtcacgaaactaagaatcaaaacattgccctgcgtgatattgttcaagtaagtgcataaactttcatcattttacccatcggatttggataacgtgtgcttaaatgtttggtgctccttgctataaccttttcatcatgcgaggaccaatccaatagtcanggttctgtttttgctctcgaactgaaattttgttctttatgaagggcattgctgttgaccggttagttgggtttcaagaccttggcagtaaagatgaattttcaacaagagccgctggaaatatactcaagatgaaaggtatctctattacatctncatacacaattctgtcanaacattngaatgacaaatatgataacacacaataatgtnctataatcga

SEQ ID NO: 40684 - DNA, 384 bp, Oryza sativa
agcttgtaggcattaatatttcagtttatatgtaaagtggtcaaaatctatacaatttgtcatttttactgtataatacgcattatcaaatgaaacgggtgccatttagtatctaacatgacctttttgtaagatctaacttgacctaatttgatgagtggatattgaaatgaatatatgtgttttttttatttggacagtcacaaggagatccttcgtcttgcacatatattcatataatattcatttatgttccaattcctaacttgtttttgtcctttcttccaaatgggacctagctaggtacaatcagaacgaaacctaataaaaataatttacaacatgcatgtccaagcatttaattaatttcatgagcttaaatta

SEQ ID NO: 40685 - DNA, 485 bp, Oryza sativa
  unsure (1)..(485): unsure at all n locations
tacataagttgatatgggttatgggaatttaaatagtatatataatgatgatccaaatgtaaaagtaaggtgatgtgtttttataagagaagaagatgaggaagataatttggaccatagatgaattatctaagggcaaaaaacaattgaggtggtatggcttaacgagagaagaaagcgagaaagataatttggacctagattaatcatctatgagctaaaaacaattgatgtgatataacattaattaagtgaggatgaactatatcggtatatagcatattataaaaaatggtggaaatatatatttaaatattatttgaattacgtaggatgatgattgaccatgcttgcattntaaaactctaaaatctatctatctatctattatatactaaaagtccattaaacttcctacaaacgctcttaagccgccacgtggcactcctacaaacactctatagccaccacgtggcactatctaa

SEQ ID NO: 40686 - DNA, 312 bp, Oryza sativa
  unsure (1)..(312): unsure at all n locations
cctattgcaccatttctttttcttgctaaccaacactttttttcttttaacatattgttgcctgtactattttctgctttttttttncttcccatcatatgcctggttatgaaaaggtaccttatggcagagcacaatcttatctgaagtattaatgaaaatttcctattattttacaaaaagaagggttgaaatttgagtttctctaaacattagaattgtcataaattgagtgattacatgcacattttttacaaaataaggacttctggttgtgggattccataatctggctacaaaatcatgtattct

SEQ ID NO: 40687 - DNA, 459 bp, Oryza sativa
  unsure (1)..(459): unsure at all n locations
tcttccagtatctagacgatcgatggaattcataccatatgcgaccgacgatccatgcataactctacaactcgacacgtacgtacgccttccaaattttcggcgaaatgcacaactacaactcgacacgtacgcacgccttccaaattttcggcgaaatgcaccagctatagctagctagctgcttggccggtccttatttttcttggtgttgtagaagataagggagaccagttgaaaatttgtaagccgaactaactaacgtgtactctccctctataccccaaaaaaataattcctaaagataaatctagataaggagttcagtgcactggtggagaaaccatctttcgtcggtcggccgatttcacaatagtcccggatgcaataaaaacccgggctaaagatgatctttagtcccggntcanaagggtaacgggcatatntgatctttagtac

SEQ ID NO: 40688 - DNA, 415 bp, Oryza sativa
  unsure (1)..(415): unsure at all n locations
agcttaacccatcctcctctcctctcctcccactcgctctctctcccgcagcggcagccgctttgccgcactagcagcagtagctactactaccaagcaacggtagacgacagcagcagcagcagcagcctgcgccgcgatcccacccacccggacgaggaggaggaggattttttccccctctctccccttcgctttcctggagcttgaaggatagggatcgaggaggaagaagacgaatcaagaagcaagcaagggtggttttgctaacctctcgctgtgcttgggggttgttttcttgaatggcttcttcgatctgggtgacggngggtttcgtcgatcttgttggtgggggtggtgagggttatttggtctcttctccggcggcggcggcggccatggcgatggctgggct

SEQ ID NO: 40689 - DNA, 478 bp, Oryza sativa
  unsure (1)..(478): unsure at all n locations
cggcaaattgtttacaacgatgcannaattgtgaatgaaatagctcanaatgatattctcttgctttcacggtattcctttcataataatctttaaaaaatatatcccttggtaaaaacaagagatttgtacataacaaaattatgtgtctcatttctaatcctagtggcataacaaggctgaacaaacgtgcgtgccaggatgttgctgttttagggtcaggatttctcaagcttgatggtacatgatttcccttttagctgacaagctcttagtttctttggtatgatttaactatccatctaaagctattatttactgaaagctcgtgcaaggaaggacactaaaaaaattgaccacagtgtgaaggaaagggcagcgcggcttaacccatttgcgagagtatgattnttcaatatgtttagataattgaaccatccatgtgctntaacttttgntcctttctacctctatgtac

SEQ ID NO: 40690 - DNA, 483 bp, Oryza sativa
  unsure (1)..(483): unsure at all n locations
agctntgacgtcattaaaccacacactttcttatttccataccgatatccagaacctaccatgtctggggtgctaccccacgagaataacctagtctaccgggtctaaccccactcaagaagtgtggtcgtactcggttcgtttcttgcttagcttcttgactcggtccttaactgaccagggtcggcggcttaccgttcccagaaccacccatattctattcgtgccgcccaatcgaaatcatttntgtttaattaagttcttgagttttcgcanaggttttcatgctgtgggtggcgcttatgtctccacccgatctctaacaatcacttccatcgagtgatcagtataaccacatccacatatcacacatatggagtgtataacgtctatgtaagcagggctaagcagtgaataaataatcacacgtaaagtaatacactcaggtaacaacggtgtgtaaatacataaggataaacaata

SEQ ID NO: 40691 - DNA, 423 bp, Oryza sativa
tcttaagtcacctgcggcatgcaagcttggatcaacgtgaataatgctgagcagtgctctcctcaccgatcaacttagctcgcccaagaatccaccaaagtatccaaagagatcatcccaccaacaacatcttaggagacatcaacaagggagtatccactcgttctcgtattgcaaatttttgtgagtattactcgtttgtgtcttctcttgaacctctaagggtggaagaagctcttaatgatccggattgtgtgatggcgatgcaagaggagttgaacaatttcacccggaatgaagtgtggactttggtggagcgacctcggcaaaatgtgattggcacaaagtggatcttccgcaacaaacaagacgaggccggtgtcgtaataaggaacaaggcgaggttagtggcgcaagggttca

SEQ ID NO: 40692 - DNA, 428 bp, Oryza sativa
  unsure (1)..(428): unsure at all n locations
atcactaagtgatttatttctttctaaggttgggcccaaaagagacttgcgtctcgattcgactttaagagatgtttttcaacagctcagttagtaatgtaccgaccttccgggtcagatcattacttctcggctcccagagccattccacttgattaatcggctcccagagcctttntcattntctcggactccaagagtccagctgcccagcagcaaagcaatccgcttccactcgggaagcctagtctatgatgcccgcagacatcccgaatcacacagattcgtttctgaccactcaggtcatccatctgccacataggctgattctggttacgattcccacaccacaacaacttttcacanagcacaggcaaacaaatctacgcaacgggaaccacctcacatccgcccatgaccgtgggcac

SEQ ID NO: 40693 - DNA, 456 bp, Oryza sativa
  unsure (1)..(456): unsure at all n locations
taaatctattttacaagtttgaaataattaaacctcaattaatcctacactaatgaatttctccgtttgcataccgacacttctttattattataaaaattgaagatgttttcaccgaaattntggtacctcatccgtggttgaagtggttatatgtcctccgtatccaattcaacatgaagttaaaataaatattatacatcactatcacaacccaactcaaccgttccacaccatcccatcacccatgtcgctgcctctactcggcgccgtgtgtgcctctcccccgattggcttctttnttntttggcttccttttctttgtnttttctccttttcttttctcctgataatccttatactcgccctctccttgcaatttcctctcttttctctttttccctcctttctctcttccaaaattcactcataaatattntcctttggaatctatca

SEQ ID NO: 40694 - DNA, 390 bp, Oryza sativa
  unsure (1)..(390): unsure at all n locations
tggaaaaaaactttagaactaaacacaccctgagtaatagtctcgattcccatgaanaccagcacgaacatagggggtgtttagataaaggggtgtaaagttttgacgtgtcaatagggtgttcgggtactaataaaaaaactaattacagtatccgtcagtaaaccacgagacggatttattaagggtgtgtttagttcctgaaaaaagtttaaagtttaaagaaagttaggagtttgaacaataagctgaaagcttatgtgcgtacgaaagcttttgatggtacattatatgacggaaagttgacaataggcggaaaactaacacggctcatgcttacttaatccatcatcagtgaatgtttactgtatcaccctattgtaaaccatg

SEQ ID NO: 40695 - DNA, 329 bp, Oryza sativa
atactccatgcgcacactggtttaacagatgtgcttaagttcctagaagacacatggtttcaccacacctggaaatatatggcatatgtggggtaaaatctgagtaaagtaactcataaaggatttaccaaccggctaaaacatgaccacaatatataatccgcctaagccataatattggtcaataaaaatgcacacttacgtggcgaacagcaatgatattgtacctaatcaattgctaaaaacccacacagcaccttgacttatatataaaaaagtcagcgggacagttatataaagctctactgtttgacaccttctaagatgca

SEQ ID NO: 40696 - DNA, 460 bp, Oryza sativa
  unsure (1)..(460): unsure at all n locations
tctattggtatggtcacataggcttatttatcatatcaacttttgcaagaagtcatcatttgcaactacttttgccaaagggtacataacttagcaatatacaacatttgcatcacaacggcccaccgaccacataanagagagatcaaacacagtggaataaaaccatatgtcaggttcacagtgttccatagaactgaggactcgcatgttccatgaacgaattttagatggactcattntatcatccgaaatgaaatatttaaaggtgaacacaaagttaggccaccacagtttcctgcaggggaatctaaccaaagagagccattaagatccatatctgtgatgcaganagcgattaggcaaatgtcttgccataatcatctagaacttggtgatcaattccctcgatcaattcccttcttctttcgagcgatgttgagcgatcctgtgacatgct

SEQ ID NO: 40697 - DNA, 467 bp, Oryza sativa
  unsure (1)..(467): unsure at all n locations
tcctgcaaattaataggcacagcatacttctctttcattatatttctggggtccccagntgattctgtctcagaaaccggagctcacaaacagttgcattgactgtattcagcaagtgtggttatatgatattttggcttatgtaatgaatcaacaatctgcacaccatcatatgcattgacctgtgaagccattgacaaaattcagactcgtatatgttaattaatgtggttgaataacaaccaaagaaagcgcggccaagaaggcagaatgaagtcgtatgttagtacattattaatcagtgtcatatactccctccagttcaaatacctggtggtnttacctctttcacaatcttcaaaatacgatgttctacaacttctagcgaattttggacaattttntaaatctcataaccttngcaatattgatcctactanatagaaagagagaatgccagtagaaag

SEQ ID NO: 40698 - DNA, 448 bp, Oryza sativa
  unsure (1)..(448): unsure at all n locations
agctntgcctcatatattaatagagagggatttaattatacaaagtatgtacagggccagtcggagaagaccggcccacaagagagaagttctttaggtgatatctcccaaaaatccgaactcctgcagcctagccgctccggctntgacccaagctctgccttcctctntgatctttgcaagaattgaggctggtgttgaggctgtgcttcgaaagatccttgcattacgctccccccagatctcccaggtgactagcatcagtagagttcgcagaggggctcttggggtgttgggggaattgacgacgaggttccaccagtgttcgatcgaggggcagtcattccatttgtccatttggaggtcagtatgcgtccatctctgaatttctgcccaaatcctcttagtgactctacatttggccagaaggtgaagcactgattcgtcg

SEQ ID NO: 40699 - DNA, 476 bp, Oryza sativa
  unsure (1)..(476): unsure at all n locations
agcttctcttactgaaggngggaaagatagatcaagaatgagtacaaccaccgttttttttaataaactttgataattgtttttgttgcttaataaatatttccggtgctctgaaaattcaagtaaaatttgagggctcattntagaccaaggagaatttaacaaaaattctccgggccacattcgaatttttcttgtacatattntagtgttaaccaatttcttttcgaattttaattaattctattattccttttagagaatgatttttatttcgggatgaatttatcaggacgtgacatgggcccttccggcctggccttcggcccatctcctctcctggttcttctctatccatttctcggagttntgtgtngattctatnggtatttgatgaagttcanaaaccatccttgtatggatacatattttctctcactttagtatgattntcctcccaactnntagagttatca

SEQ ID NO: 40700 - DNA, 387 bp, Oryza sativa
  unsure (1)..(387): unsure at all n locations
ttttcatgtcaaccattgattgctccatgtgtctgaatgatctccggcctttgtgagtttgtgttgcaactttaaaagattgagatgtgcatgcagttatggacatcatctccttattntgctttccttttctcttccagttactgtaacatgttattgtttaatgtagctagatgactcactttattatttttgagaattagctagatgaatcactctgagtcctatctcagaccctttatttcttccttttgtgcgcgagcggaactatggatggtaaattcaactgacactcggacactgttttccatgattgtggagcttattngcttgcatctgaacaacacataaacaacgttgacaactgctattgaatatatagggaac

SEQ ID NO: 40701 - DNA, 319 bp, Oryza sativa
  unsure (1)..(319): unsure at all n locations
ttgaaacggccttaactaccccctcagtgcttggtgtgtttgaaacaaccttaactggcaacccaatgcttggtgggtttgaaacaacctcggaaatgcccactggagtgttggtgtcagctaacaccttgcttatgtcagaaatcatatcacatgttctttttgcacgcaaatcaatcattgtcctctttgaagttgtcagtgctgaaacaaactcatcctgccacatggcactgtgcttctcaatactagaatttaagcttgctgaanactgagacaaaatgaaacaaaagagaggaacangttataaacaaaaaaa

SEQ ID NO: 40702 - DNA, 357 bp, Oryza sativa
  unsure (1)..(357): unsure at all n locations
ttcgtcattgcccggtggtgcccgacgtccgcttggcatctgtgtaagttgatggagtaagcattctaattttctaactaactcctatggctttatcccattaagggagttgtgtcgatatgaactttgtttcgcaagcatggtggaataaactcatttacaacacaaccacaatagatatcataaataacatcacagagtttcacaaatggtacataaatcatgatgcaattgactgcatacatacgcagtccaaataagggtcatccaaacgatacatcaaaccaatcatcaaactactcgtcaatctaggtaagggaaggggtgtctcgcatactatccanaaaccatctgata

SEQ ID NO: 40703 - DNA, 136 bp, Oryza sativa
  unsure (1)..(136): unsure at all n locations
gttgcggtacatactagtgctaaaggatgcacttaaacactctttgtgccggngnngcgcgagngcacataccctcgtgtaatatgagagaagctcgcgtgcctaccttttacagtcccatttcttgacctgatgc

SEQ ID NO: 40704 - DNA, 452 bp, Oryza sativa
  unsure (1)..(452): unsure at all n locations
agcttatcataaagggcttcgacaaggggttttattcgttctttgagcaaaaagataaagatcggatagattcgaaccgcaattgcaaaggtaatcactactatgccagcccaaatcatgatcttcaccaacttggatttggttctctcgcgaaaatcgcgagttgcagagatgagaaccatgaaaagcaagatcccgaataagaaaacagaaaccgaggaaaccacaagagtgaagactagtagagtctcgtcttttgtcattctttgctcctttttcactcaatgattcattcgaatntcccgaccaaaaattctatatgtctattcatagggcctcgttgctaagtgctacaagatatagtgcactggaactcgtggttatggacccgaatcctttagtatggaacattgtctnttccaagtaaaaacccccagtatatgaaagaatga

SEQ ID NO: 40705 - DNA, 474 bp, Oryza sativa
  unsure (1)..(474): unsure at all n locations
ccagctatacgctagaaagtttgaaagggtgaaattattttctcttgccgnctaccgggacgagccaccgatcgctgatggtggntgctgatgatcgatcacgacgacgacgagagcgtcngctgtcgcgatctcgtctcacacctcatggaatgggcatcgctgccggccatcgtggtgggcgcaagcggcatggcatcgggtggcaacgggtggcatgccggttggcggcggtggtcggcactccatgatcgcgcctatcgaacgagcggaatctncgacctgacgacctccgtttctcgactccttggatcgacagttcctaacctggtggtagacttgttgctaatgcgggcggcatgacgaanaaaaggggtcgaggcatcgagtacgtgagagcanggatatatatagcaacttctactattacctatttaagccacatatgtatacccactactagctcattctcta

SEQ ID NO: 40706 - DNA, 467 bp, Oryza sativa
  unsure (1)..(467): unsure at all n locations
agcttctccagatgcagggtataccttccagtgcatatgaagtggaacatatctatgtaagttttgttttgcctcgatacgaatcaattactttttttgaacatcatacgaagtcattgtaacctatttagaactggaattttaacaaagattgtcctatgctgtagccatgggacttttttttattatacaccagcttgcacgaggtgcattagtctttgtcgcctaatttggttcctcttcttagctagaggtatactaagaaatactagctaggttctctctgtacgagcactaatgcatttttgggaagtatggtatctcatctgaggtgtgtgaatttaggcaataaagaanaacatatactcatgttgtagtttttgtttagaattgaaatagttattgataagagaaatatgcttaacatgctacatgcatagtcatattgctaaaatgtgacatttcat

SEQ ID NO: 40707 - DNA, 476 bp, Oryza sativa
  unsure (1)..(476): unsure at all n locations
agcttgtatgacttcacctgtgaggtttgttatcttggttgccaaaagaagcatgacacttagatatgaatttgttatgggtgtaatgcttctaggaaatcttggtgtcatgcttctttgcaccgttcagtcgtgtaattttgttatgggttctttacttgcgatcttcaagatatgaatcgtgtaatttcttactttttatttttagaattatggaattcctatttttagtagctttgagcaggattacaatcgatttgcaggcatatttgcaagaaaggtgataaaaaagccacgtgcatcttcctctactacaaacattctgcttagggcacaatntcgacatcagctatttggataaacttttcacctcattcttagatataatatatataattcgtatgatagaatttctattaacatataattatctacagaggattcatatgattaacattatacttctataagcagtc

SEQ ID NO: 40708 - DNA, 451 bp, Oryza sativa
  unsure (1)..(451): unsure at all n locations
agcttttcctttctctctcctcaagagacgtgcctttcccccctctctttctccnctctactcaacaaggcgggcgacgaacggcggaagggtcgaggaggccaagccgcgacggtggcgggcatgaagccaccgtctccggggccggaagccgccatcgatgtcgttgccgagctcgcccgatctggtggcggcgtcgcggagccgaggaccgccacggtgagagggatggcggcgcacgacgattccccgcgggcctgccccctcctcttctaccactgcggccgtcgacctccacccaccccaccgacggcgcggaacgaggacgacgacgaggttaggcgccaaattcactgccgncttttacttcgccgcctcctcttccaccgccgctgccttctcttctcttcangacgtcgacgctgcaccgtcgatctcgcttgatctgtct

SEQ ID NO: 40709 - DNA, 482 bp, Oryza sativa
  unsure (1)..(482): unsure at all n locations
agcttgtgttggagtattatcctcagcanactgcttggaaaactgatggatggtgtaccagaatcaacaacaaactccattggaactttccattctagcattatagaatatgaaattgagaacaatgggatcataactgcttatactcatagtactcagaaacactctgtactgaagagatactctagtagttactgcttactcatcgtactgagacactccgtactcatcctactcattgtcaggagatacactaataggaacattactgcctactcatcctactcggaaacactctatcctcagtaggtacgctaataggagcggtactacttactcatcttactcagaaatacttacacatagatgatgcanaaggtcatggngctgtatggngcataacaatttgctcgtcgccacgaacactcaagtcanatgatggacaagggcgtcatgggaatgggagtaagaatgtggcaaac

SEQ ID NO: 40710 - DNA, 453 bp, Oryza sativa
  unsure (1)..(453): unsure at all n locations
ggttcactcctataatttaacttatgaataaatccgcgtgcatttgaactttaccaatggtttcctaatgcttatcggtaccttttcccagtggcacagaatactttccttgctgagttcctggacaggtacctaccattcaggcatcggtggtatgacttgcctcatcgtgcacccaaagggacagttgctggcttagttgtcggggagcttgagctttgccgtcgagtctttatggtcctgtaccgcatgtgagatttataccatttcgctatctttcttgtataccatattttcataagataatgcacactgttcagattcacatgagaattgtcatgatatggctcttggtggggtggtagatcttcaaacaaggatcctggagcattcangggtgaatcccttagcatgaaggagcatgcangtgagaatagaactactcatatgatc

SEQ ID NO: 40711 - DNA, 449 bp, Oryza sativa
  unsure (1)..(449): unsure at all n locations
gcttgnacttcctctagtcataaatatttgttgtattactctttaaatgatgtttgacaattcatctcatcttattcaaaaatttacttcaaaatgcaaaatgtaagtaaaggatagagtaacattagtaaaaacacaacttacaatataataaagaagtatttcatattattatatggtattttttaataagatggatagtcaaaagttatatccaaaatcaattgcgagaaatatttatgaccaggtagagtaacttccctacatgcatcatttaagcttcgttcggattagcggttcgattgagatatttagcagcatgcgagatgagacaagttattagcttataattaattgattattaattatacaaacttaaaacatggatcttataacataaaacttctatgtatagtttgataaacgtgcttatagtctcacgtggaata

SEQ ID NO: 40712 - DNA, 477 bp, Oryza sativa
gcttctgaaattcagcgagaattacgagatcgactgtccaaacctgctcatcaggttgctgcctgctccatcagcggagtggtctgggacagtcaagatcgtctgccaggagtccgagctcgaagcagaattgatctactacaggagcaacgctttcctgggactaagtggcgatccaagatgtgttaagggtaagatattcagctcaagatcaagagagatcatctgcgagattgatggacattgggatcggatcgtgtcggcgaaggatgcgaagaccgggaaggtgtcggttctgtacgatgctgaatccgccattgctgacctcaagacacctgtggtcagaaaccaagaggtaacttctttctgacaatttgtgctcacaagaaatctgaacttgtgcatttttcatgctgcaagtcagatggcagtatcccagagataaaattcagactaagtccacatatgattcaattc

SEQ ID NO: 40713 - DNA, 466 bp, Oryza sativa
  unsure (1)..(466): unsure at all n locations
tactaagctngaaagggtaatcttttcctccaaatgcatatttatccttcttgaatcanttttcacatgtcaatcgagaattagctcatcttattgtggtgctatattatcaccaggaaaaaccacaaagaatcattggcaaacttgaagatagatcatttacatgtgagcaccttacgcgtgttgaagtcgtatgctcggaggatgatcccctggtcgaagacgtggtgaacttctttgtaaatagtggactgacctctgctcaggttcatatcatacgccgggtgtagatcaagtacatgtgagcaccttacgtgtgttgaagtcttatgctcggaggatgatcccctggtcaaagacgtggtgaacttctttgtnaatagtggactgacctctgctcaggttcatatncatacgccggtgtagatcaagtacatgtgagcaccttacgtgtgttgagtcttat

SEQ ID NO: 40714 - DNA, 475 bp, Oryza sativa
  unsure (1)..(475): unsure at all n locations
agcttgagattcanatgatagaagggaaccagaatcaagatagttagcatactgaccttagtgtaaaaccttggctcccggtaatgtgtaggattcactttcctttntgaatctccagactgatggaaacaagattccctaaagaagatatagccgccaacctttagccatcttaccattctctttactagcttctcaacctacagtaacagtatgagttagcaaactcagaagacatagccaagacataccaagtttcaacacaaagtcgatttatatcatccagggttcatttcccaagacatattcagatgtgcaaagaaggatcgcaacagatcttaaatatgcttatttatttgaaatgagacacgatatgaggcctattaagtactatctgctcattacctcctcgtctgaaagatacatcagtaaccagtttgaaaatatcagaatcaatggagtatcctcaatcatc

SEQ ID NO: 40715 - DNA, 499 bp, Oryza sativa
  unsure (1)..(499): unsure at all n locations
ctaagcttcaccttccatgctganacagttaatctcaacacaaactattttactggcatagtgcctcaaggctttggggcatgcaagaacctgcaagagttcattctattcagcaatggcttcaccggtggcataccaccgtggctggcttctatgcctcagttggtgaatgtctccttgggtggcaatgacctttctggtgaaatccctgccagcttgggcaaccttacaggtctcacccatctggatttcaccaggagtaatctgcatgggaagataccaccggagctgggacagctgacacagctgcggtggctgaaccttgagatgaataacctgaccggtagcatcccagcctctatcagaaacatgtctatgatctctatccttgacatatcctttaactcattgactggatctgtgccaaggccaatatttggtccagcccttagtgaactctacattgacgagaataagctcagtggggatgtcgatttca

SEQ ID NO: 40716 - DNA, 459 bp, Oryza sativa
  unsure (1)..(459): unsure at all n locations
agcttagtagacacagttgtaatttctttccgatagcatatcagtatgaagagtgcccttttactcgtaatcctgctgacgacgacggcgcttgctaccggcgtcctcgcagcgtataatgacccgcttcagccagactacctcctaccttcggatggcaagccaggttacccatacacgagtaagagcaaatttaatactataactaactactggctccaaattatctgtagtcaatttaatagagatgactacgcgacgtccgacgaatcggacgatccacatgcactggtcttcctctcgatctccacgctgtagtatgccgcatgtagtgctctctgctctctctctctctctgcacgatgcaaccatgccttcaactgttagcatagttgctctctcttccctcacgttcacgtaatatanaaatctatntgactctatgctatnntttcttct

SEQ ID NO: 40717 - DNA, 483 bp, Oryza sativa
  unsure (1)..(483): unsure at all n locations
tcaacttctaaagcccctaagaagaccaaggtgactttttatgtgcttttggagaagtatgagaagcaaggtggtgagaagattcacaacaaagggaaaagaccaagatctccccctaaggagcgaattggtcattcaccaagacggttgcattcaccttcatatcatcatccacaagacatgtcatggagtccctatccgatgccgccgccgggttatctttatccttactttatgccatggggggcaacacctccaatgtacaatcatatgcctccaatgccattcaaccaagggtggngaggaccacggaggccaattcatgagcatttgtcttcaccaaacaatagccgattntatggtaaaaatcgagctaatgaagaaaagaagtaaggaaacacaccaaggtggaggaaaggacttcggaggtgattactatcanaatagggtctcatgatgtgcctataccttctggagatggag

SEQ ID NO: 40718 - DNA, 334 bp, Oryza sativa
  unsure (1)..(334): unsure at all n locations
tagcaagtgtgagttctggttgtccgaagtcaaattcttagggcacgtgatatctgctaaaggagttgctgtggatcccgaaacagtgaccgccgtcaccgattggaagcaacccaagacggtcactcagattcgcagtttcttgggtttggcaggatactaccggaggttcatcgagaacttctccaaaatcgctcgacccatgacacnagttgtgaagaaagaagagaagtttgtgtggagcccgcaatgcgagaaggcgtttcaaactctcaaggaanagctggtttcctcgccagtgttaatcttgccgaatactcgcaaggacttcatg

SEQ ID NO: 40719 - DNA, 91 bp, Oryza sativa
ctagggtgtacttacaagttcttttaaaaaccattagaaactaacaaacatataaagggggttaaccgtccatactgaactatataagcta

SEQ ID NO: 40720 - DNA, 451 bp, Oryza sativa
  unsure (1)..(451): unsure at all n locations
agcttcccacattatcttaattaactctactctcctctactatattatatataaagacattgttagctttagcatgatagcctctcatcgtttgtttggatatcagaggctcaagaaatcgtttgagaaaatatattaaaatttcaatttaagttaatttaagattttctttatcgtagtttatttatcagcattgtcttgtctcttcaaactactattaacacacatatataaaaagtgttgtccataaatttattattgccatggatgaagcaatcagatcctaactactagtctttaggccttcttaatttattattntacatgcaagcagagaataggggaagaaaaacataatagtaaataaaaaaaataagtcatgtgtntgctggcaaagctcanctgtgataaggtagagagagagtggatgatgcattattattggcacatg

SEQ ID NO: 40721 - DNA, 416 bp, Oryza sativa
ggtcctatagaaagaaaaacaggctacctatattctctgatggcatgtacacttgtgcaaaagctttctagtacgatcagtatacattcggaggaaaagatttacattttcgagtatcagagttagcttctccagtcttggcgagttctgaaggaagacagattagtgtatagaagcttccatgctgacaccagtgaccgagagtcaggctgacaagattgaagaattttggacaccactgcagactggtttggattgtcagctgcacaagaacgaggtgattatgtggctacaaaaccaaactagctaacagaattgagtgtgttaatatcatatcgatagtatgcttgcagtgcatgtattacaacatcttcaagataatgaatgctaaacgaccacggagaatatataagaac

SEQ ID NO: 40722 - DNA, 431 bp, Oryza sativa
  unsure (1)..(431): unsure at all n locations
tctaaccatcctgaaagtgacatttcaatagttccagccttataaaagggaggggcaaagattgtatgatttgaagctgttatatccttcaggacccttcttgcttgaaaggaacggtttgaattcagtgaacaccaaatcccctatcgcgatggacttgcgtgcgagaattggttgcacacatcctctaaaaactcagttatcaccaaacatactcttgcagaatgctccatgtaagctgaaaaaagaaataagggggatgatcaatacagtaataaagtataatagatttcagcatcatttgcctgaatttttcanaatggagttatccctaaattaatcagtcattacctgcagatgcatttgccttctatgacagcaactggtagaaattatcaatactgcagaagcaggctatgnttcacttcttt

SEQ ID NO: 40723 - DNA, 457 bp, Oryza sativa
  unsure (1)..(457): unsure at all n locations
agcttgtctgaattttcgccgggtcgaatatatcttaatctcaaaaacaagcagctacaaccaagattcagattggagagtagtagtagtagttcttttaattgtgtctcaagtatctgagaataacgctagctgatacctgatcatgctcgatccgcaaaatgtacagccatacgtgcatgatgtgtatatatagagagatcgatctgtatctggagataacaataatgatggatgcatcatatgcatgatgaactgaactgtaattacgttggttatgctaacttcagctgcatcatcaatcccttggtcctcctatgcctgtttactgcatgttgaggattgagttcagtgttggtgaaaagaaagacactcggatttaaacctaatggttanggtttttttacacattgggtttcctgcttgactgaaaaatgtataatatcttgagaacaat

SEQ ID NO: 40724 - DNA, 485 bp, Oryza sativa
  unsure (1)..(485): unsure at all n locations
cttgcacctgactatctcagatgttgatgtatgtatgttttatctgaatccgaanctaaatctgagaaattntcaattgtttttcacccagtgcatgagcaaatgtgtttacttcaagctcctatgtaaaatgtgctgctttcaagaggctttcctcaacgttgcccacgacgcacatgcaagacacgtgagctagcaaacaattgtggatgtggaatgaataacggcaaactcgattatagactaaatgttgagcgaccataatagcataatagcaggaaacacttttaaactcttgaggggatgtcctctcatttgctcaaacaccactcanatagttattaaaaaaatctcanaaaataacattcatatgacatacatatatcactnntaaaataaaattaaacttaaactcaactcacacattgagaaatgaanagggcaaattcaacatatgaacaatatagtattattcatcccataat

SEQ ID NO: 40725 - DNA, 492 bp, Oryza sativa
  unsure (1)..(492): unsure at all n locations
ggatcttaagcacctgggctgcagcttcttcaaaatttgaagttttctgtctgtctcgatcagacactattttcttatggacgccatgcaaacacacaatccttgccatatacaattccgccaaccgacttccagaatatgttgtctttactgggatgaaatgagccactttggtaagtctgtcgactatcacccaaatagagtcatggcccgatgacgttctgggtaaaccagtgatgaaatccataccgatttcctcccatttccattcaggaatcttcaaaggctacagcaaatcggcgggtttctgatgttctgccttgactcgctgacaaacatcacatactgctacgtattctgcgatttcacgtttcatatttgcccaccaaaatctttccttgagatcctggtacattctggtactaccagggtgaatggagtataaggtatcatgagcttctttcagaaatgcatcttttanatctttggtgg

SEQ ID NO: 40726 - DNA, 460 bp, Oryza sativa
  unsure (1)..(460): unsure at all n locations
agcttttctgctgctgattaatgcacgcatgcatggcgtgcatgtaaccgaaccagctatgctagccgcactgcgcatcagccagcagtgatgacgacgcacgcaggcagctatcccacgccgcctgcctgtgctgcactacaactcacgcgttggaaaccaggccatggtccacgggagttagccgggcagtcagcccattgggccgcgaaaacgcgcgtctaaaaaaccgccgcaagttatttaggaaaaactttcaaatctaactatactacaattgtaatataattccactgtaactataatattaacttgtatataagtattaaaataatatacgcaactntatatctaacttatatagagattacaatgtagttacagctatattggagttacaaattactccatccgtccccataaaaaccaacctaataccggaatgtgacatatctagtac

SEQ ID NO: 40727 - DNA, 104 bp, Oryza sativa
ttaaagggggcaaatgttgattgaacgtaatcttagaccttttgctgaaagacggttaaacacgaacccaaatccctatcatgattgctgcataatgctaacac

SEQ ID NO: 40728 - DNA, 429 bp, Oryza sativa
  unsure (1)..(429): unsure at all n locations
taattatattacacgttatttctactattatcatattaaactcttgcaacaacccatggggtttcatctagtatatcaaatgagcgtcttaaaagaattttgtcccccactagaattttgtcaactgaaatactaaacccttggggtgtgactgttagaaccaaatcaatctacttctttggctagtttgtgcaacagttttatttgacgtgacatgtngacttgaccaccatagctaatgtggtaccaatttatttaaaaaatgatcgtggggcccatatgtgagtgagggttctgtttcctctctccctctgcagtagtgaggcanacaaaaaatgccatttgtcatacatgtcagatgggcctcttctanggctaaggcagcgcgaggttgccggtggtatcgaggggggctagtgagggtaccgt

SEQ ID NO: 40729 - DNA, 453 bp, Oryza sativa
  unsure (1)..(453): unsure at all n locations
cactntcagatattcatgtatgcttttctattcctgngcaaaantttgcatgtgctactaactgtgtcattggcatgggtatgtggaatcccatacccaccttgtcagtctcaacaacagaaaatgtaacctgtgtcaagccctctgctacattaagtatggcttttgaccaatcttagttcatcaagagctaattattctcagaaaattgagagctgagtctagtcatcatgaaactngtctgcctcaatgaacttaaaattnnttgacctagtatattggccgagaaaatggtgcatatatgaaaatctgatgatagacatgtttgtttcgcatgtgcaatcactctctttcttctgagcaccatcctgggaacagcagtccgtataccttgtgagggtcttaagcagcgttngcaggctggaatcttcaataatgtatgggaggccattg

SEQ ID NO: 40730 - DNA, 278 bp, Oryza sativa
  unsure (1)..(278): unsure at all n locations
atatatacacatggtcttctttaaaaatattcttaaatttataagaagtaacactaatttatctcggttgcatggcaaaaaattccaaacaggtatagaagtgtgtatatagatcaagaaaacaaaaccggccttaatgtcaagtaccagtaattaagcacttgaaatgatacttccttcattccattaaagtagacataatttatatttaagttnnttcaaatagatgttcctacctataggctctacacatttaaatagagaggaannattaatga

SEQ ID NO: 40731 - DNA, 454 bp, Oryza sativa
  unsure (1)..(454): unsure at all n locations
tatctaattaagctgaggtctaaatagatattcttaatgtctattttctttcgcgaaaccagctgtctcaaaccacgtgtttctttgaaaagctatatatacacatggttttctttaaaaataattttaaatttatagtaggtaacactaatttaactcgtttgcatgccaaaaaatcctaaacaggtatagagttgtggatatagatcaagaaaacaaaaccggccctattggccagtaccaataattaagcactgaaaatgatacttcctccatccattaaagttagacatattttatatttaagttcnttaaataagttgttcctacttataggctctacacatttaaatagagaggaatactaaatgattgatcacgaatcgagaaaccacttttatactaaatggttgtacgcgtgcatatatctttgttctggtatataccacgatga

SEQ ID NO: 40732 - DNA, 474 bp, Oryza sativa
  unsure (1)..(474): unsure at all n locations
taagtactcatgggtccctaaatttcttctagatcagcggctaggtccatttgaagttaatgctgttaggaggcccgaatccgaatccaaaacgtgtaaaactttatctcttgtctcctatggaccaaaagtgacgtggtgatatgaaaaaagacttggagaaggtcttggtttggtcctcaatcaacttcttcaatcatccatgcattccttacgcttggtctcttttctttcgcccaagaaagtacctctgcaaacgaaaatacacaaaactcattgtgtagcaacattggttcaaatatatagcaagtaaatcaaatatagaacatatgcacctttggttgattaatatataagataatcatggttatatccgagctagtcgtgtcctcatcaatatggcattagctcagtcatggcaacggttntcaggctaatttcaccaccccactcaataatcctcccaccggtcac

SEQ ID NO: 40733 - DNA, 332 bp, Oryza sativa
  unsure (1)..(332): unsure at all n locations
ctaagcttcgcttcgctgagaagaattaagttaagtgggctttcggtttttcgcttctttnttgaagttattttggatttttggaagaccgggaactggattaaaattgcacctgtgtactctggttgatgcatggaccgaggttaaatgcacatatagccggtgaattgggtttgcgaatctatgggcgtgacaaaattcattttcacaaacatacctattaaaagacacaccttaaaaaataggtatattttcgctgatggtcaattaagaggccttgctgcaagtttcacacccagccggttcatacttnctttatgatttactccccc

SEQ ID NO: 40734 - DNA, 454 bp, Oryza sativa
  unsure (1)..(454): unsure at all n locations
acttatagatgccttntgaacacttgaaactttactgagtatgccttcagaaagcaagtatggcagtacaatgttcattgtttcatttgcatcagatgaagtagtaagtgacacatcacagagcctaactgtcaacaagcttacagctcggcacaaactgtcaccagcatttcgcacagtttccttaatatcatccattgctcggaaggtggtaatccatatttttctcaaatgcttagaaaccttaacaaagggaaagataagcaatattttattctcaaaataaatcctaaaccagttattcatagcttatgcaaaacaaaatagttacatgattntntttaaaaaaaatcanaattagcaaaacaaattatctacctgaccatatcttcgaccttgaataatgtnctgcagtgcaagacatgaagcttcacgtgaacgccaaagcctcgat

SEQ ID NO: 40735 - DNA, 481 bp, Oryza sativa
  unsure (1)..(481): unsure at all n locations
agcttgtgtatatttccaggagatgttattctaattaattaggccaccaggtcaactttttagtaatctgaaagaagcgcttgttgaaggaggcaaaattaccttggcacaggaggtgactcaaaggttggaaatgttacggagaacaccaatgcgtggttgagtaatcaagcacataacgtaagacggcatcttagctcttttgactctttagtttgtcagaaaacggatgtctcatttacaacctacatgatactactagtaaggtgcccatgtgtctgcaagaggtcatcaacctcatgttcggccgtatctttatgcttctcangcatcacattcgactgcattcatgaagaatgcgcatctncggtcaaaaaanaaaaaaaggaatgtgcatgaatgcagcagatttttccttcctttgagtatgtctaaatacgaccgaagacatccatatatctatctacatcgatatccattg

SEQ ID NO: 40736 - DNA, 422 bp, Oryza sativa
  unsure (1)..(422): unsure at all n locations
aactgctgcctgaggtaattcatttcctgaccttgctctaaccctatcagtgccctcactaagatttcaaaaacaatctatgaagcgatggaacaaaaaaaaaatgattaagttagccagtccacatcagaacaaataaattaaagaacaaggagttctataattgcacattcgacggaaaaatgccaattaagtgtacagtataagcatggcattatnttttgactttttgaatccaagtcaataagatgtgccacgtacgtagacaataaaatttattactatatataagaacaaaaacaagattatatagagaattcatatttcccacatacaatcattcttcacactacagatttataagagcattatatagtttgcatattgacgcactatatcgagatatttctttgcataaggga

SEQ ID NO: 40737 - DNA, 433 bp, Oryza sativa
  unsure (1)..(433): unsure at all n locations
agcttgctctggtaccctagcanagtgcgggcagcgagttctttattatgaatgttgcaaagtaagaaggggcataagatgagataaaattagctgtcaaatatattaataaactctggatcttggtttttatgaactattggctgcgttcatttggctgtgttctcaaccccctctcgttttttgcgtgcatgcttnttatattactaaacgggtcttttttcaaaaataattttataggaaagtttcttcgaaaaatcatattaatcaacttttcaagttagttttagctaatactntattaattatgtgctaatgagttgttctgttttccatgccagaaggaaaggttccaaaccggcacaaacgaacgcaaccttattatatactctatctatctacgaagttatcttcagatgaacttgcacatact

SEQ ID NO: 40738 - DNA, 456 bp, Oryza sativa
  unsure (1)..(456): unsure at all n locations
agcttgatgctgacaacggcaagaaaagtttactcctcatggtcaacgagagagccctgngaaatatttcctccattaatccgttctttccatgcccgtacacatgtggatcttgacatcgatgactgcttcaaaacatgtgctccttttctttttctgaatgatgttgtttgtcatgtacctcaccaatccgatcttgcaaatctgtgaggtcccttcttttcgccaaaaaaaaaaggatgtgtttttcctgcccatcaaaaaaggataaatattctgttcagttntgtcattgttaaaacagcgaanaattgacgtgatgaagctggtagaagtcagatcaaataaattaggtcatgataaaaacagttcaataatagctgaatcagtggatggctgctacaagtactatcgaattattgtgcgtggaagtcagacttaccaataaactgtagt

SEQ ID NO: 40739 - DNA, 420 bp, Oryza sativa
  unsure (1)..(420): unsure at all n locations
tcagctgaaccttctactgagagctaatcccacctgtgttattaagctctgaaatatttatcatggatttggtgtccatctttctgtggaaactagaaataatcttgaccttgatcactccaatttgtgattatcaaatcagctgtgctctgaaaacaaaaataatccttcaatgtttctcatggttaaaaaaaaaagcttttctatgtttatgatggggtacctctcccaatgcatgggttgttctagagggtttgagggtggaccacccttgatattggcccaaaaagatcccttcttcatatggcccatatccactacataaacacggcatactaaactatntatattgcgtatttttgaacctttagactcgaattagttggccctgttcgatctcccgtctggagatactacacc

SEQ ID NO: 40740 - DNA, 432 bp, Oryza sativa
  unsure (1)..(432): unsure at all n locations
cacctaagttcccgtgattttcttagtaccaaagtactcacccttgctctatataaatatatatatataggtcctccgccctgaagagaagacaaagtgaagtgaagattatggtttcgtcctggttcccagccgtcgcctgtggtggtgggtgttagacccgtggttccgctgcttgctgtggtgttcgcctcgtccgtgtcgtcggttgtattctcgggctgtctgagctacaacctaagttaagggaaataagtcctctatttattttaaggattgctatgattcatatntgtcaccgtgggtaccagcactatgtcctgngactggtaccgagatcgcggtttcgtaggaagcggttcacgctcgtttccctacgacacgcttctgtcanggtgccgtgtacggcggtatcagatngnggtgtgacac

SEQ ID NO: 40741 - DNA, 374 bp, Oryza sativa
  unsure (1)..(374): unsure at all n locations
aaaatgtttcaatgctacacacatttcacaactcagaatcagctgcttatttgacatcttccatgctcttgctctttagctattcggattcttccagaacaagctgcactgatcggtgcatgcatcttcaaacacatgtgcagtacgaagtaccaaagcaaaatctttatattcgttcagcgcaactcatgcatgaatcaggagcgcacagatcagattggcaatttatcgaataccacggctgcctttttacaaaagatacaacggataaatcgcaccgcggcatctcagtttgacatcgcttgcaggtcggcttgacatattgtggcanacatctccctcacgcacgcgcgggcaagcatgaggtcaatgca

SEQ ID NO: 40742 - DNA, 444 bp, Oryza sativa
agcttacttgcagagctggaggaagttcttggtggtgagggggcacatgtcggtgtggaggtccacctcgatgtcccccacgctggtcactatgagaaccgacatctccggcggagttcccctcccgccggcggcaggcgcacggcggatcgccgacgagggtttttttcctttttttctcttttttcttcgaaaaaagatgagcgttcgatttgtttctgcttctgggctttcttttgtgggaatttgcgttgcgtggacggatcgggaacgaactggaatctggaggtggctaaatgggccgtgtagcgggccagcccagtagtgtcgatcagggcccgttgatagtgctttggggggcctttctgggctgaccctggtacagtccgtttcatctgcccatcgatgtatgctgacgtgcgtcaattgtcaagcatatggatg

SEQ ID NO: 40743 - DNA, 468 bp, Oryza sativa
  unsure (1)..(468): unsure at all n locations
cagctgacgatatgccccgtgcggtctctgttactgacgcctgtccaccggcagcagtcttggccatcttccggccgccatgacgcgaggaggcctgtcgtgtcgtcggcgatgccttccttgaactccaacagcgcgttcatctcgcctgggaagcagccgccggagccggacggccgccggagttgcgtcatcatcacttgcaacgccgtggccgctgccggtgtcagtagcaacagtaccgtggtggtggtggtggtgatggcaagggacaagaacatggcagtgaggaggctcatggtgtagctatctccggtgatcgaatcgatcgaccagttttagagaacatgaaaccgtactcactaacacagtccatggcttttaacccaccatcagacgaagctgcgctgcgggagcctgtgcgtacagtctgtctagtnggataaaatggtggtgtttgaatctcat

SEQ ID NO: 40744 - DNA, 409 bp, Oryza sativa
  unsure (1)..(409): unsure at all n locations
catcctngcaataacatcgacctggatgatcagtctgagtactaatgtgcatagttgctgcataaaaagaaaaagattgtcataaccttgaacaagatactttgatgaaaaaaaagaaggcatcaatagcaggctagtacaacatagaatggatgccggtagcatgtggacttttctgtgcctgctatcgaaaaactacaaccacaacaatgaactaaaggtcagattgcacaagttatgcaaagtagcctttacaaatatactgcgactntacacggatcgaaattcgaaagcacgtttgatgaaacgtangcacagatcaacttactactgaatggaacttctcgaaggccgcactgtgcctgagtatattgcatttgttcatcaatgttattttgttgcaagaaca

SEQ ID NO: 40745 - DNA, 88 bp, Oryza sativa
atcacacacattgcaatggtttgactgtaatgctatctcaacctgctcaagcttcatcggcatcactcgcctggaattttcacatttt

SEQ ID NO: 40746 - DNA, 403 bp, Oryza sativa
  unsure (1)..(403): unsure at all n locations
gcttatcttggtcttcactaaagcgacacaaacctctagaatttctcacattcttggacaagaagaagaccttcttttggggaagagganggatgggtattgatgccaacacatggtacactttgaccctaagttggttttggtttttcgattatgtaagttgcttttggtactgagatacttttggcaattaatcggcagactcttgtttagtgtggttgcagaacaatttgagtactactttatttttttccttcattatagtagtatgggtaacttcctgtattgataaagttgcttggtcaaatggcagcttgcgtacctacctttacaaagacgtgatatcgtggtggataatgaaagcaatgaattactttctccctgtgaanggacttgcatgaca

SEQ ID NO: 40747 - DNA, 471 bp, Oryza sativa
  unsure (1)..(471): unsure at all n locations
agcttcaacattgcngcagatgcggcagttttaggccgccgccggcaccgccacactgcagaacgccgccagcgcctgtacatgagatggcgccaggggagccttgaacagctcgaggtaccggaggatatcctgttcgtccgctttgttctcatcctcgatgacgccgagtctcttcatcaccacccgctgtgctctggtgatcgtgtggatatgtttcccaccattcatggcggcaaggtgctcgctccgccttggagtgtacggngacgggcggtgtcaagggtggcggggacgcttcccgagaagcgacgaaggcggtggtcccaccagatcggccaaggccgcccgccgcggtagcagacgccttcggatcgatggccgctccatcgcgcggtggagacagagcagagacgcacggtgaagatggagtgactgggctggcggngaagcggcgtggcccatcaacag

SEQ ID NO: 40748 - DNA, 417 bp, Oryza sativa
  unsure (1)..(417): unsure at all n locations
tactcaacacaccatagtatcgaacaaatttgcggtaataaccagttaatcccaaaaattcacgcaattccttcacattggtgggagttggccaattcttgaccaccaatatcttatcttcatcttgtgacaccccatttggactaataacatgacctagataggccaacctttgttgtgcaaatgaacatttacttctcttaaccttcaggtgatgttctgttaagatctgaaacacagattgcagatgctgaacgtggtcagataaggtntctgtgtagatcaatatatcattgacaaaaacaagcacaaactttcttaataagggcgacagtatactattcatgcagcccttgaaaagtgctggtgcacttgtaaggcaaaaggcttactctaactcaaatgccatgggagctt

SEQ ID NO: 40749 - DNA, 479 bp, Oryza sativa
  unsure (1)..(479): unsure at all n locations
agcttgcgagggtcaccatgttctgaggatgggctgagtgtggaagtatactcacctattatgcaaactgaatagatttcctctatagcctagcgattgtggcctcttcttctgctttgcatcgcagtggcagtgaacttcgccttggttgcatccggtgatggatggtcctctgatcagccctccaatcgaatggccgtcctctttcttgtcacagcgaggaacagcagaagagcgtanggagaacgtggaacatgaacagcaagactctgttgcataagtgcatgtttggtgaactggaactgtatacgaaggcattcgtatgaacattgaatgagttgtgctcctccaaaacagttcaaacaatattctgctagagattaacatccagggaacgttgaattcatatattattagtctttccatgcanatcagagactctggtgttcagtccagtggctcgaaatgccaatcaacta

SEQ ID NO: 40750 - DNA, 443 bp, Oryza sativa
  unsure (1)..(443): unsure at all n locations
gctttggtagaaaagagaggctttatgctcatgcatagtaactacttgcccacttgggttatcttaactcactagataaagtgcacaagggcatgagagctcttgcaaggattcaatataatgcaatggagtgctaaaaccttaccattgctactatggagtgggtatatatacccacaacaaccaaaactagtcggtgggggcgaaatcccaactcacaggtgttggccggtcagaccgccttggagtggccggtcagaccgaccttcattgtaatggctagaaaactagtttgttatagtgcatttaatgcacgagcaatggctagctggtatgaccatcanaggtttgttaacagtgaaatttgcaaaccccgaagcatcatcagcctagagaaagatcggcttagagtctggtatcgccgagtgaatatcagtcgcact

SEQ ID NO: 40751 - DNA, 481 bp, Oryza sativa
  unsure (1)..(481): unsure at all n locations
taagcttaacactactcaagccttggtgccatgttactaggctcgagctncattgcttgcaccattgtatggcttggccagcgagaagcaagaagcgagagtgggggagaatgaggggtacaatggacattttatagtgctataatggcacatctttagaatagctccattcgaaaatattacaacctagtattgaattaaatacaatttagtactatgaatctagataggggtccaaattcattatactagactatgctaatctaatacgatgttgctatattttgagctgaaagatgtactccctccatacttataaagggaagtcgtttagaacaatggttaagtcaaaccttaggaatataaatcattaataaccctcaangtngtgagtttgaaaatataaaaattatatgaatatatttggcttgaaaatactttcataaaagatacatatatcactctttataataatatttta

SEQ ID NO: 40752 - DNA, 435 bp, Oryza sativa
  unsure (1)..(435): unsure at all n locations
agcttgattggagcctgacctcttggctaaagtcggatatgatttttgagtggccgcaagcagatgaggaactggacatggatcagagctttgtggacatggacatggtgcggatcagccctccatgccatctagatttgtcgatggctgcttgtgatctangagtctttccttccaaatgccacaagccaagttgcaatgcttcaatgctctcctccacgaggcctttgtcatcgtctcctacccaagctttgctaccacagcgagccggccccgagcttcgctatgacactcctatccaatattcgtcggtgccgctctccacatcaagctcgaggaggtcagctctcattggtaagctcaatcaatggtgaattgtgaagtgacattgattgattctaaatatcggcatgtgtgatagcatgccattatggg

SEQ ID NO: 40753 - DNA, 442 bp, Oryza sativa
ttgggtctcacacctcggcaatctggtctattctctctctccgagagaacttccttgatggcaaggagggcatcgagcagctatgcaagctccctatcctcctcttcctcaagctctactaccagtcatatatggggagagagctccacttccgggagaagctattcccgaggctcaagcagctgatcgtggacaatatgcccaaccttgatgagcttagcttccaaggaggcgcccccgagcttgagaggctcacgctcgccgtcctcaaagagcctgcagatggcatctccggcattgacaagctcccaaagctcaaggaggttgagttctttggccatgtcatcgtcgactccgtggtggagagcatggtagctgtgtgcaagaagcatcctaacaagccgagagttacaggggagatcgacaatggaatggactctga

SEQ ID NO: 40754 - DNA, 467 bp, Oryza sativa
  unsure (1)..(467): unsure at all n locations
agcttgaaacttgggatgaatgcaaaatactgatgataaaaaggtttgtgttttcatactatagacgtgctctccttgagaaatgggaacatctaaaacaaggtgacaaaactgttagggagtactttcatgattttaaaatttgtatcacttatagtggtttacaagaatctaatgagaacacaatgactagatttttcagagggcttaatttcaatattcaggctgggcttgttaatgtgacatataatcatataggccaattgttcatgcttgcttgcattgttgagcgcanaattntggagaatccaacggagcaacaagatatgcttgtgcctcctatcactgatgttttgcaggaagttcagaaaagtctccanaatgagaagaacgatatgtttgagatgtcacttccatcactcgcgaatgaagagaaggctgatgcagctacattgtctgaagaaagt

SEQ ID NO: 40755 - DNA, 472 bp, Oryza sativa
  unsure (1)..(472): unsure at all n locations
ggctnttctcgcccgcgccgtgctccaatgccgtcctttgttccgtggcgcggctacaggtacgacgccggtattggtgcgccatcactgggccgccataaatcgggcgcggtttcttggcctagaaggatgggcgcgtgcgcacgcggcttttgcataggcgcggaggcaacctcgcggtgagcccgcagctggggaaggaagagacgagacgaaaccacgaggggaaataggagcaaaatcaacagctagctgcagactgcatgcatctgcagttggttggttggtcggcgcgcaagtggagggagagttgagcggcggcacggcagcacagggcgttctgggcgactctccgcgtgggttgttgcttgctcgacgcccaccgccgcattcgcccggcccgcctctgccgcctcgtcgcccgctatcgtgtcgccccgacgacccttctcctaccaatgggaggaaagtg

SEQ ID NO: 40756 - DNA, 440 bp, Oryza sativa
  unsure (1)..(440): unsure at all n locations
agcttcatgatgtggatggtgcccggcccgtcattcctctcgacctcgacggcgtcgatgaatccggcgcagaccttgggcagggagtgcacgtccaagcagaccttccacagcctctccaccgacaccgcgacggcgcgctcgtcggagacgaaggccggagccatctctatctaagctagtttccacctgacacttgctgtgatggctatagctagctcagctcagctgcttttgcttctgcttcaaaggtgagctgcagaatggggatacttataggtgaaagaggaccgcatccggctnttctccggttgatttgtagtttagtttgatatgtggaattcagggttntagtatcaggaaattggggctatggagatcacatggtttgacctgtggaanattcagtggttcaatttatntatgcagatgatcgatca

SEQ ID NO: 40757 - DNA, 483 bp, Oryza sativa
  unsure (1)..(483): unsure at all n locations
tgcttactaatgttatcaaggcccacgctatcaccaatttctttatgagtagcgtaagcgctggctgcagcgacctctcaacgctgcagtcctactcacgaacacaacaggaacccaacaccgaagaagtgaagatggtggtcattcgcatattagtgtgagcacaagatagtagcattttgtcacaccgtccatttggaaactaattaactgtgcatatgctatgttatgaacccctgngttcatttcttaaatgccaatggattaaactagctagtctagagacctagagatctactcctatatggattgatttgagtttggaatctggaggagcgtcacatggtgccacatgcttgtttctcggatgaacaaaaagattcgctgtggctcgagcggaacgaggaggataaccacgggtttagtttgaaatataactactggcaattaatgttagtattgtattatagcatattgtactgg

SEQ ID NO: 40758 - DNA, 458 bp, Oryza sativa
  unsure (1)..(458): unsure at all n locations
agctngagcgtttcaaccacaatcacaatataattctcatgatttaattnttacacaatgaanatttgatttgcgaattaacttcagcaaagaactgcaaaaatactcaccaaaacggaatcgtcatggcggatataatagatttccgtgaaaatactcgagttggtttatttattcgttggagttttttttattcacaggtcagagaacacgtgcactatagagcattgaaaggctntgacagcaattcttgccagggtttaaatacaatacataaatcataaataaagcaccgactatttacgtccattgtgtttgtgtgcaccctgaatttcttataataacccanaaagaaaaggtcaaattggctgctnttanagctccagggtggagatccatttgctgcaattctgttgcttggctcaacaggcgccattgaattctgttactgccttctt

SEQ ID NO: 40759 - DNA, 423 bp, Oryza sativa
  unsure (1)..(423): unsure at all n locations
gcttcagctgaaccttctactgcgagctaatcccacctgtgattttctagcttgcaaatatttatcatggatttggtgtccatctttttgtggaaactgcaaataatcttgaccttgctcactgcaatttgtgattatcaaatcagctgcgctctgaaaacaaaaataatccttcaatgtttctcatggttaaaaaaaaaagcttttctatgattatgttggggtacctctcccaatgcaagggctgttctatagggtctgagggtggaccacccttgattgtggcccacaacgatcccttcttcatatggcccanatccactacatatacacggcatactaaactattgatatatgcgattattgaacttttagactctagttagttggccctgttcgatctcccgtctgggagatactaca

SEQ ID NO: 40760 - DNA, 455 bp, Oryza sativa
  unsure (1)..(455): unsure at all n locations
agcttgaactctagctcatgaggaggtgaacttgccgtcaatatgtggcatctacactacccttcgatcttttactcgcttcctttcatttattcttctgaggttggctcattctctatatatcatgagtctctctttttacccttcacctatccatcctgttcatagaccagtagactttataaaaatgcctatattgccctatgttggaataataattgataagatttcctcgaaaactaaaaccttcacaacaaaatgattcagttgatgtgtttntaagtgaaattacccanatcaccagattccaaaattcanacaaactttaaaatcaagattagaactttattatcgatatcaaccaaattntaaggggaaacaaattggttcgaattcactgagaaataaaaaactgattctggtctcatattctaggtgaaaatatctgaacatct

SEQ ID NO: 40761 - DNA, 448 bp, Oryza sativa
  unsure (1)..(448): unsure at all n locations
cctagtaacatctttctcagcaacgatgttatcctcttcttcatgtgcttggtcagtggctgccttcacatgcgtaagagactcttgaattgtagcaatctccttgcgaagctgatcagccttttgcttgtttgtttcagctaagtgcaatgattcctcttcctgctgtgctgcagccaacctcatatccaatgaagcttcaaaatccttcttgagctttctaagctcctgttttgctgcatcaagatctgccaaagcaacaacatactgttcccttgcaacatccaattcctgctttaaagggccatcttttccaacagcctcaagcgagtctccaccttcaagctgctttgttcgagtttttgcatcctctgttgcttgaatagccagctctttggactttgtgatagcatccagcttattggtcanggtcctcaacagtttctta

SEQ ID NO: 40762 - DNA, 491 bp, Oryza sativa
  unsure (1)..(491): unsure at all n locations
ttgccgacgctgntggatccgaccaggctggattcttctctcttctcccagnggccattgggagagaagaagccaacggagtgagggaggacaagcggccggatccgcgcggncgcaagacgagcctgccactgcctgagctcgccgcagtcactgtcgccactcctaccaccggtgggtccactgccgctagatctgaccaggcccgatctgccaccctgcgtcctctggttggtgggagagaagaagccganggagtgagggaggagaggtgttcgatccaagcgatcggaggccaagcccgccgtcactcgccatcggtggatctatcccagccagacctgtgactgacagatccgcctctccgtgacctcctgccgtcgagcccaccactacttgtcctcgccgccatcaccgtcacccccgctcccgccgtcgccgncaccagccgagcccccaccagctcgagcagcgggaaaggaggcgagaag

SEQ ID NO: 40763 - DNA, 314 bp, Oryza sativa
  unsure (1)..(314): unsure at all n locations
ctactaccaaacagttgcttctcaggctatttgctgtatgtgagtcgatgataacacgagtgtagatatgctccaacgcttntatggctacactgaattcgtattctgtcttccagtataatggcatactatagcaacaaaactggtcacgggtgacttttcttttgttcttattgttctccatcttagcacagtcaccgagttttgccatttgcatgcacgaaatataggccagcggcgtacgtaataagcatcgatctctttctttttctttttctaagagatttgtccgatatattacaaggaataaagta

SEQ ID NO: 40764 - DNA, 465 bp, Oryza sativa
  unsure (1)..(465): unsure at all n locations
cattgtgtctgcaaattctatattttagttttccttctaatcatcccatctaggagcagttaaatatgatccaaattaaatacaaaccgtactacttcttggactgaacagacccaaaacctggactgaatattcagaaattaaacaaggggtaaaaggctctaaaattcagtctattgtacgacagaatctaggtaaaccatcaaagaagatcttcatctcctacaagagagttctctagctattgaatcagggccaggtgccggtcatgccgcgaggcgctaattagaatggaacaccgcanagtaaaattaaccaccatatatacaaagaattaaaattaaaatataccatttattttttatttctcagaaatatactggatacaattntattgacacaaatataccactgatattacggtatcgcgttgagagagcgagaccgctcggtgtcgcatgtgga

SEQ ID NO: 40765 - DNA, 471 bp, Oryza sativa
  unsure (1)..(471): unsure at all n locations
agcttngattgctcagaccttgatgttatttatttgcttcatacaaatgcttctaaagagagagataaaggcagntgtaatgctgcttaaatgttgctctcttcagagtagtacacaaatggactccatggaagtagttaaagatgtggtttgatatggttctgggtagcattgcaataaagaattcatttagtctagtactcctgaattgatgctttatttccttatttatggacaatttttgaaggcatccattntaaaaggcattcatatctnggtcttcattntttttctttattcttggtttcatctgggntattgatgtttggntgctagctcaattcatgtttttctcacttattngcaggtgttagtacaggtactggaacattttaatcaagtcgagtcacctctgcatggntagtgttctcngtcaggcanaatcgctacaagatgaaagaagatattatg

SEQ ID NO: 40766 - DNA, 469 bp, Oryza sativa
  unsure (1)..(469): unsure at all n locations
tacgggaatgtccttccgtgttcccactgtcgatgtctctttttgtgatctcacagntagaatcgagaaggctgcctcatatgatgctatcaagagtgctatcaagtaagtatatagcttccaacgcaaggggaatgtacatctcattntgcgcactgttgctagaactgcatcttgtggcaggggataccgctcagtgatgtatgttactgaaacatacatgtgaaggattcctagaaaagtgtagttacgtgtgttggtgggcgcagaactgcacaagttatccttaagttagtagtgtgtccctgacgagaatatgctaattgttttacaggtctgcatcagagggaaagctcaagggaatcatangatatgttgaggaagacctggtttctactgacttttgtggtgacagcangtattgccttttgtcttgagaggccctgtaagaaatctgtaatgcagatct

SEQ ID NO: 40767 - DNA, 465 bp, Oryza sativa
  unsure (1)..(465): unsure at all n locations
gagctgaccatagcgtcactatctcttacacngccgtgaggagaanggagggaaatgtggaggtagggtggatatccagccaccacgagcttggggtggccagaactgtgcgtaggggcccgtttgacatggaaggcggatggacttatccaggatggcgagtgcaggttgctccaatgatggagagcggngcacttctacgtcaccatcaccctgatctagcctccacaaggttggctgcaacggagacagggagggtgatctattctttcactatggtagagacgataacctgttacatgtttttttctttgttcatcttcttctattctcttctaatgcatgcaaatgatatgtgtaatagaatttgattgcagtgattcaattggttggttgtgtcanaatttgtgactcgatttcgtanaatgtgatgttgaagaacanactttgattgatggaaaataa

SEQ ID NO: 40768 - DNA, 470 bp, Oryza sativa
  unsure (1)..(470): unsure at all n locations
agcttacctcaagtcctcaatacttgactatttctcatagaaggagatggtcgcattcaagagagctcttatacagatagtactacttaattacgtaactaaattaattaagcactcacatatgacgctttacattgaagacgctctaatacacaaattnaatttaatagtctatgggagtaatgagccgaaaaaatgtctcggatattaaaaccagtccaacccaagatactagacatagtttctataaacttcacatcatcaagaaactagtaccaaacactactcttacaatgcaaatatcaattntacatacttaaattaaatgctacttatctcacatgatgtcttgaatgttatgtagaaaccatgtctcatgcaatacctggctctcttctctttcatcatttattcacttgccacatcatctttaattctaagtgacagtttatctaatgctatggcaatac

SEQ ID NO: 40769 - DNA, 482 bp, Oryza sativa
  unsure (1)..(482): unsure at all n locations
agctttgcagcagctggctttctctgaaaacaatgacccgatcggcgatcgaacccacggatattgaagaaaacatcccagagtctacgtgtggtccattggagacgcgagcacgaagacgaaaacaatccggtattcgagatatgccttgattattcttattctggttagcgccagttcagaacagacgaattattatgtactccttctgtattttaacaaatgacatctgattnttaaatacatgtttaactatttgttttttcaaaaattatgcaaatatataatatataatatataaatcatgcttaaaatacttcaaatgataaaataactcacaacanaataaatcataattatgtaatttttctaataagacgaatggttaaacgtgtcatanaaagttgacgacgtcatttattanaaacgaagggagtactanactaacanattgctcatgatttanagaatatgtaaacttc

SEQ ID NO: 40770 - DNA, 371 bp, Oryza sativa
  unsure (1)..(371): unsure at all n locations
tcttatggacgagcgagtgattttctagaggcgaacctccgcccncggccgaactcacgaaaggggggtctcacgactccccgctatcgaggatcttccctcgacaactggcgcgccangtatggggcggttgcgcgttccgagaggaaatcgcttcctttcgtcccaagtttctccaggccttagccgaccatggtcgacatcctggaagtagaggaggaggcggtggcgtttacccccaccccgtccgggaatggtgattccggcgagagccgaggccctcgtcaccgtcgccatggttctncaactcctncccaccgcgaaccttcgcggagggaggattccactcgntcgggtggttcagctctctc

SEQ ID NO: 40771 - DNA, 449 bp, Oryza sativa
gagttgataaatgatgctcattatttcgctcggaagatagctacagatgtattagaaaacttctgaggctagatttctgatgtaaccagaccatttgcgtatgagcttgtcttgattgtgacagtctaacttatggctttgcttaaactgtaatgcgtgttaaaagttgaagatttctctttggactgtactaagcctaaaacctagttaagtggtccaagaattataatttctaatattatacaactaaagtaaatcaatgataagccaaacatgaagaatacaaacaacatttgaagaaacataatactccattattattcatatatagcgcccccccccttgattcagcggcatatctacgattatggcatgggtggttcgacttacagaacacattctaaacaccccatataataacaaccgccatatctatacacctttaaaag

SEQ ID NO: 40772 - DNA, 307 bp, Oryza sativa
gcagtcgaacactatggcgcaactgcacgtgcaagccatcacattgcacttcgccacgccatatccaaacggtcttccgcagcaaggtgccgtgagaaagacggggggcgaaacagggctgccgctaagtgagggaatcaagattcgtcatattcaccccaattaagttccacccatccgcgatactcggcgaaacggacccaagagtcctgccatctacagccacgacgaaccgtcatgggacaaataccaagcaagaaacactgctcaatggatcgacgcttggacttaattatactaacactta

SEQ ID NO: 40773 - DNA, 451 bp, Oryza sativa
agcttatatcaattggcagatccataagttctatttcatgtactatggaggtactaaatctcgctctgttgggatatcgtcctgacccacccctgcatgcacctgggtaaaatgcaatgtacgtgcagatccatatcgatacctaaccacttgggaccctatagggattgatgagacctccaaatggcagtaagacgtgacattaattaggaagttcgctggatatatgctcacatgcataaaataaagcatctcgatctcacttactcgatggaatgtaattgatttcactacttatgattgaaacgatgcatgtgtccactactgtacacacagttgtggataagtggcaatgcctggtccttataagagagaattacacaattacctatctgctgcattgaaccaaccgacaccatgaacacccatcctgatattgacatgctggaag

SEQ ID NO: 40774 - DNA, 462 bp, Oryza sativa
  unsure (1)..(462): unsure at all n locations
ctaagcttgttactacccnctctacgtcggtaacacgttctgttattttgtgctccttcattctctcggactttgggtgcattcagcattatttactcttctgccatcatacgtcgggctgacagtgttgatccataaagcaaaaccacacatcattggattctcctgaagaattaattaaattagagaatgggatatgttatggtaacgcgaaccagaatggaaaacaattaagcatgtaacaacacgccctttggaaccgcgcaacctagtccatactatgggtgggcccacttacacatagcacacatatactttcatccttgctttgtgtaatatggttaacctaggagtgatacgactagagggacaaaccattataagttgggtgcagcctttcactacattagcaagggtggatcaaacatgagcacaccgatctcatgagccacacagtccata

SEQ ID NO: 40775 - DNA, 458 bp, Oryza sativa
  unsure (1)..(458): unsure at all n locations
agcttgngtagagaagatttcgccctcttgcttcttttggcaggagggggaggtgcggcctgctgtcnacctccataccgtcctccccaaaatctgtatcatactgtaattggagatcttcatctctttgttcaacggcaggagggagagatacaacagttggatggggacgcgtctgcagcggacgagaacttggcgctggccttggagttatattgatctcaatgttgtgcttgggccattgaataaaggtcccacgtgtagccccaagagtcagaatctcgtcattatgtgggtgtgggatagtgtagccaacccaattgggcttcactaagtccacctgaactttggcattgctggctagcagttgcaccccatgcactncggtctccggggtaggcttgaacgcttgaccctctgcggcagtaattgcaaatcctggtgtcaccctaacgact

SEQ ID NO: 40776 - DNA, 322 bp, Oryza sativa
  unsure (1)..(322): unsure at all n locations
ggggtttttttttactacttattaanttttttgtttattataatttcctttgtaccgttccattttcccacatttcgtcgattgttcgtttcgtttcatatttcgaatcttttgttcgaattccgttcaattcgttcgaaaaaaaggtacgaaggtgagtatttcgacgttcgacgtttatcctaataggctacatgatataccatagaataggggacacaaagagattatgtaaagttacagatactagaggtatttgccgtacgccgaaccggtacggctacgggggtcgacaaccgggaggtggaattgtaatcaaatg

SEQ ID NO: 40777 - DNA, 482 bp, Oryza sativa
  unsure (1)..(482): unsure at all n locations
gctngcacatatgtatataaataggttactttttctttgctattttgtaaaataatattcatacaatgtttatttcaccaaaaaaaaggagtagcttgaaatatgacttattgatatttgaaaccagaatatgtttgatagctatatacttgacaattatcaaaaataggttggaggataatttgactaggaagacatgtganttttgaacataagcagaattttattgctacttgaaaacataatctatttgatagttaaatattaacagtaataaaatagattggattatagtttgaccacagaaacatgtaacattatactttacttagactcacaattaaatcagagtaacaaaaccgtagtctgttcattgngatagaaaatcagatattgagatccttcagtcttttttttctttttggcagaacacacttaaacatcanactattccacctgggtgccaatatgtactttgtatg

SEQ ID NO: 40778 - DNA, 411 bp, Oryza sativa
  unsure (1)..(411): unsure at all n locations
tcagctttggagtctggactatcggtttggctaggatgtcttctttttcaattctaangntaacttgcgggcatatntgagttgcccttatattccttccaggggaatgtactatcattggtacacgtaaattttgggttttccaaccatttcttttcacaaaagcttgtgatatgaaagaatgggaagctcccgaatcaaacagaactattgcgggtacggagttgacagagaacatacccatcacaacgtctggagcatcctgagcggtttcagctcgaatgtgattcacacagcctcgaccaaagtggttggaagcacgtgaaccttgtccacttgcctgagtgctaagacgagactgagctgccgctggagtaggagttctggcagtgctgccattagcatgccctg

SEQ ID NO: 40779 - DNA, 451 bp, Oryza sativa
  unsure (1)..(451): unsure at all n locations
cgtgcagcagcatggtttccgcatatcccagaatgtatgtctttcagcaattgtctcccttcctctaaagatacgcaacgttgcagaactcctgaagggcttttcttgtataactcagcttcatgcataacataaagtttgctccgccttgaaatccgctcggcttcatctttgtcttgagggagttcttgagaagtcaaaaatcgtatgaggggctctcgccagtcggcttcaatcatagctacgtcatgagtgcccgcaatttgagcagtatctctgtgaggtaccgtcggcgtataaaggtgttcgacgaaaacatcggaaggcgccacctcgcgcttggatccaaagttggcaagtctgtcggcggcttcattattgtgtcgaagaacatgacttnagtcgagtccatcgaacttgtcttccaanttgcgtacctcttgtcgatatg

SEQ ID NO: 40780 - DNA, 475 bp, Oryza sativa
  unsure (1)..(475): unsure at all n locations
gcttaatagntaaggagaaccttgcgctttattatttttatntatgggngnaataaaagaccatgtagttntgagagaatccactcagtaccactgagttttccccacttctacaatataccactgactttgtcaagttgaataatatgccatcgagttttccttaacctccactgcgtgccatcgccgtccacgagccattagttggcctccgtttgctggattgattnttctctaaatgactaaaataccctagcacatcatccacaccaaatcgatctgctgctgttctagtcatttagagaaaaatcaagttcatgtgtcggtataggcactgtgattttactatggctcggtttgccgatgcatctgttcatgcttctggttgaattaaaatcacagcgcctagcacatcagtcacaccacattgatctgctggttctgctagttcactgacatcctactcagacacaag

SEQ ID NO: 40781 - DNA, 472 bp, Oryza sativa
  unsure (1)..(472): unsure at all n locations
agctngacgctacccctacctggcgcgccttctgtcgaaactagatttcggcaataataaaagggggtggctatcaagctaggaaagtgtatgggtttggagacaaaggatttatacaggttcaggccttcttataaaagaagtaataccctactcctgtccggggatgaatccgccgagtgtattattgattgtatgatttagggaaaatcaacatctgcccctagaggcacccggaccccccttatatatggngaggagtccgtgttacaaaagataatctatatccctaacggaatatgcaaatacagatgaaatatagtcgtaaccgactaagtctcagggtgtttccttgatacacaagttaagaaacaaacccgagatactagatagatattctatctacattaggtatcctgtacccagtccaaataccatcgccgtgtagatatgggatatccataatctccac

SEQ ID NO: 40782 - DNA, 325 bp, Oryza sativa
  unsure (1)..(325): unsure at all n locations
tgtcattgcattgcgccgcgaacgagttgatgaactccatcgtgttcgctatgaacatgttcacctgcaatgcggagagagagacacacacacacacgcagtcagagacgccaaaagaccaaaatcgtttgctcaccccgaaggtggagcaccaccagatgagatcgaccgtggagatcggagagggggtgagggggcgagtgaatgcggngcggaccangtagatggtcctctggtcggagacggcgatggccctcgcgctcttcttctcctcctcctcctnctcgaacccctcgtncctcggcgccggtgcggaaggaggatg

SEQ ID NO: 40783 - DNA, 433 bp, Oryza sativa
  unsure (1)..(433): unsure at all n locations
cttatctcttacgctncaggaatggatcagtcataacatcaccaccggcttgccgtcattcgccgcgactggtgtcttcgcctatacgggttgttggtcacaccaccgttggtgggcgtctacgtcttcaccgaccggccgcctcgttcgccgccgactggtgtcttcgcctatacggttgtttggtcacaccaccgttgttgggcgtctacgtcttcaccgaccggccgccttgtccgccgccgactggtgtttccgtctgcacggttggcctattatgccgncgttgntgggcgtctacgtcttcgccgaccggccgcctcgtccatcgtcgactggtgtttccgcctgcacggctggcctattatgccgccgttgttgggcgtctacgtcttcactgaccggccgcctcgtcccgcgctgactggtgttt

SEQ ID NO: 40784 - DNA, 445 bp, Oryza sativa
  unsure (1)..(445): unsure at all n locations
gcggtatgcaacacgttgcagattaagctagccaatcttttttatttatcagacaccgatctgtagagatgcattgatctcggacagacaggcagactggccagccgacacagattntggcattagcggatatatataagtgagcatagtttaggtacgaaggccgaatagccttattataatcgttcatgtaattaaggaacgaaaatcgctacaaaattgtctgacagcttgatcaaaaagctttcactttgtaaactctcaaaggagtgttaagattcatgcaaatatgaaaataaaattctgccgcgcgctcgcgtgaggcgaggattgcacctacgacctcacgcacatatgctcgtggtgctaatcgactttctgcacttacagcctcgtcggatagcctaataaaccaaagaanaagccaannatttaaattttaagc

SEQ ID NO: 40785 - DNA, 463 bp, Oryza sativa
  unsure (1)..(463): unsure at all n locations
gctagattctacatgtgttttgtcttgttgagtgtgtgtaactctctttttctcctttatgtggttaactagcaacagtgaagtgtctgatttgttggatacctcaattcatcttaacagtattcaaaggtgtgctcagcattttttttcctgcatagaaagagtcattgcacaatgcactcatataatctaaatataactttgtcatgtattttaccgagatatgctacattnttcacttgctgactgatntttttttctatggtttcacacttcacagcactgaacccacgagaaaacagagcagatggcaggacaacaatcactatccgtgtgcatgagtgcatttgtgaaagcgtggatcgtgtggtgttttttcttcttaanaacagaactgtggtcagcgagtaacgaanattgacagccataagaaggaaaccaatgaanatgatgcagattacca

SEQ ID NO: 40786 - DNA, 477 bp, Oryza sativa
  unsure (1)..(477): unsure at all n locations
tgaaactaagcttccccttcgctacgtggctctgcttagcgctcttgtatccttatcggcccgacctcaagcccccctggagggagcgtctcggcatgttcgtggcttcaccttccttgtgccatgggacggtacttcgaccctcttctggtcgcaccagtggattcagggtcattttcggtggccttcctagtttcggacctcttccttgcagtgcccccgcatctccgagcaacacgcacagtagcctccgcccttgctgacaactccttggtgagggacatccgtggtgccctcacggtccctgtcatctctcaattcttggtggtctgggatgcagtgcttcctatccagctctctccgggcactgaggacagtcttgtttggcgttggataggcgatcagtgctactcaaccgctcagcttaccatgctntcttcctggagtagcactcctttccttgcgccgacctgattt

SEQ ID NO: 40787 - DNA, 476 bp, Oryza sativa
  unsure (1)..(476): unsure at all n locations
agcttggatgaatacctggaagggatgaagctctttctcaactcagttccatgagcatgtatgtattcaaagtacatccagaanaaaagtttattcagaccaggaaactttttctgaataagtttattcaatgagcttgtgactcatgtgacttgatcagtacttattctgctgtctgttttctatgccaccttttagtcaattgttgctggctgtagtaaggagcgcatcaatntanggcatgttcagaatgtagtcaaacttaaaccttaccaagtttggcaatgccaaaattttggcaagatggtaatattgccaaaattcttgctaaaattntagcaggatttcttatgtattgactaaatttagcaaccaaataaacatagacatttttttgataacttttgccaaaaatggtatggttaaaatgacatcaaagtgaacaggccccttaatatctctctcatcagatatat

SEQ ID NO: 40788 - DNA, 464 bp, Oryza sativa
tttattagaatactcttctatatacatttatggtattgaaattctttccgagtatatgaatgcctactttactttatgttcatgttataccgaatataccgctagcttatctgggacatgctttggtgcgggtatagtgtttgcttatgcaattactctatgtcatgacgatgatattagagtagtatctggtagtttaaacgtggtgcctagattacgggatatcattatttggggttatatgcagcggatgagaggtgggtcactgatggtgacagctcaatacgggtattcctccgcgcgtgtatataattctaagttaattccctggggagggtattcctccgtatttagccctggttgtatggccatgatgggcttgtcgaaagaactcggcagtcaggggtggctttctcgagtaccaggagagcatcggatagagggtattagctagtatatcgggt

SEQ ID NO: 40789 - DNA, 462 bp, Oryza sativa
  unsure (1)..(462): unsure at all n locations
gtcggtgcttggaagaataattatatatcacctggntattcagataatgcatgttagtttcttcagaanacttgtataataatcattcttattgaactcaatcaattaccttaaaatggtataactgcaagaacacttcgcccttccaaaatctcgcgctgactgatgatatcacccactttaatcactatgcaaaaaggatgaatgtttttaaactttctgtatgcataatcttcctgaactttactctgaagtcttagcggcaaccagtgcctgccagtacgtgtggcgatcatgatctacccattgatttgctttttgtctcattntcaatgagaatgatgtcaaaaggacctacttgtggatatgattggcaccatgtcgatcgtcccgaattggttcagtccatttccaaaaccggtgacacaaaagtctcagttgttcactttgatgtcattttta

SEQ ID NO: 40790 - DNA, 477 bp, Oryza sativa
  unsure (1)..(477): unsure at all n locations
cttgacacaccaaccattaaaaatgatgttccacctctttattactttatggaactcatctttcttttggagaaagaaggcctctgcttcctcaacatgcttgtaccgacagagagacatcaaaagtatctggaatccaaccaagtcaagctcaaacccataatccttcctcttgtagaacatatctatcgcctcctgcaccttgtgcgcgcctgcataccggtttaacaggacagcaaacattctgtttgtgaccactgactggcggctctccacaggaatctcatcaaacagttgtctcatgagcctgaccttcttcatcctcccaagaatgtcaagcatctncgtgtaggcccttgacccatgggtatactggggcagaccagctgcccatttgaagaaagatagtgcgactttccaatgggacctctgcttctggagcaccttagcacaacatcctcatccatctcgtctgca

SEQ ID NO: 40791 - DNA, 484 bp, Oryza sativa
  unsure (1)..(484): unsure at all n locations
gcttacaacacatacaacttaagccccccttcttcatcactattacgggctaatcgaatatcttacggtttgaaaagcgtgtcgtccatgtgataatctagcgggaaacgtgctgtctgtcttcacccacctatgagatcgatgcctttntaatattattatcacgtacttgcatggtactccacttatattccctccgtactcataaaggagggtcgttaggacaatgttgaagtcaaaccttaaaaatataaatcataaacatctctcaagttgttgagttagaaaatattaaaattatataaatagatttgtcttgaaaaatattttcataanagtatacatatatcacttnttcaataaatattttatagaaacacaaagtcaaagttgtggtttggagaaccgtgtcgtatctaaaacaacttncatttatgatacggagggagtatacctnctcaaaacaccttcatatatgttcctc

SEQ ID NO: 40792 - DNA, 451 bp, Oryza sativa
  unsure (1)..(451): unsure at all n locations
actcaagctgtatagcaattatgatntagtgngtactaactatataggattagattatattgcttcgaccctggttaggtaggattttgacctcatagatgcatgcattcaccaataagagtgtagcagatggtgctaatcgatcggtcccgcaattacttatcaataaatggtgagggcaaaccccgtgtcccaacaagcaatcaagccttgcttcctgcttatcaaactgtgccctttgatatgtccttactccttaacaaatcttatcgactactgtaatttttgcattgaatctgtgggttcaaaaagtttcagtgctatcagtttcagagtaatgtcactctttgacaacgaattcacactctcatgttcttctgcttgttcagataagtaattcatcaggtcattatgacanatggacagtggntttcttgataccgatggatat

SEQ ID NO: 40793 - DNA, 453 bp, Oryza sativa
  unsure (1)..(453): unsure at all n locations
acaggtgggagcgatcttctttattgtgcagaaacccaatggtctcaaatcatgcacattggtaatggtgacttggctgtccataatgggcggtctcttcaagactgccacatcacctgagcggcgcacgaatctgggcgagccgatttgcctcgcctggagatacggtaatatcgcttctgtcggcgagcgtaatttacgcgcgcacgatatgatctatctcgactgccgcaaccgcatatccatctcacgcgccgcangcgggcgaatgggattagtggaagcgtgggcgcgagaaacgagggggcgaaataatgggcgcgagaaacgatgagccgggcacagngttggcaagggtataaaggcactgaggatgggatttgtctccttactttcgccatcatttcccttgccttcgcagcttgcgtcctaactccttcttccttgcgccct

SEQ ID NO: 40794 - DNA, 471 bp, Oryza sativa
  unsure (1)..(471): unsure at all n locations
atactcggcttanacactgaccancnacagggtatcacaatctatatcttgttgctctaaacgaccaagtatattgtatatatgcccatgggtagctggagttttatcgtctcgcacgtcgcacctgtcaacaaggaaatgatttaccccagctgcataactagagttcatagcatttcaaacacatcatgatgcttccgcagtcaccgccccaattctgttcaggtcaaatatttcaatccagtagccatcagggtctttgataaatgcaatgcccttcattttacctgcagccaaaagccgtgttaatacatntaccgttgtgctctaaatatcttcattttcaacattacgagagcaaaatacagatggaaattcataagatgcaaacacaatagtgggaaacaagaaaagaactgctccgtccaattccacaaggtacagatgcatggtaggaggtacataatcacc

SEQ ID NO: 40795 - DNA, 480 bp, Oryza sativa
  unsure (1)..(480): unsure at all n locations
agcttcctagaagattcacccaaaatcttcatattctgcgaccaacagtcaagctcacaaaggtgagttctttcaagaatgctctgcaggacaatatatttgctaattaaagccaacagaactcattaaggcatagccaacctgccttgcagctcacgagagtatatgcatcttcacttggagagggtatatatattggtactctcctctagtttattaatggtttgttcttcccaggatctaattcacgggatctccgatcacatagactgggttaccaccatagtataactcacatgggtctcaaacccatctccttcgatgcattgtctatcacatttcgtgatagtcccttcgtgaagggatctgccaggtttctcgctgtttggatgtaatccaacgttataactccggagtttcttaatttcctaacagacttcaatcgtctnttcacatgtctagacgatntcatattatcct

SEQ ID NO: 40796 - DNA, 419 bp, Oryza sativa
acctactaagtcgtgtttagaatcatagcaactaaccttgattgcaaataggggaagaatcaaggtttcagctgatcttaactgatatgattgcctttctttgtttaatatcttcaatctagtttttcatgttatatctgccctttatataagtatatcactctatttaaatatatcaagctggtattcaattttggccagattatcatatttgggattgatgcttgtttggtatatctacttagaatgatattcttatataaggttgtatcagagcaatagccaatattgtatctttattaacctaaactctatatcatctgctaagatattatttgacgaaaatccgtgatcggccgatagtgccggaactgtgttggcgcgaactaagccgacgaacacagctgcttgggagatct

SEQ ID NO: 40797 - DNA, 416 bp, Oryza sativa
  unsure (1)..(416): unsure at all n locations
agctgagaatgctgaatcaaaatgtacattgttttcatacactaacttagagcttagtgaagagttgtcatttctgagaggtcgagtatacactttagagaattcactgtgcaaagccaaccaactgaagatgtccgcagcaaaagatattggcattaaaactaaaactatcactgacttagttgcaaaacttgcattggaaagagagtgccttcatttacaggtataaattttattattcaagaaaaaaatactgtggtcagtattttaactttgtcctgtgtatttatgttctttgtatgttatgtaactgtacttcgtatgaattttaccaaaagtactttgtatgattnttaccaaaaaaaattgatgcttatgattcacattgttcaaataatatctttggggttctggac

SEQ ID NO: 40798 - DNA, 456 bp, Oryza sativa
  unsure (1)..(456): unsure at all n locations
gttctcacgattaactcttacatctttatgacactctaatcatgtccatataaatcgtccagttatcatatataccgcataatctacattggactcatcatctaaacttcatcggcaagcctctatcattgaagatagccgataggtttatgcttcgataccaagcaagactatgcggtgtatctaccatcttgaatgagctttcatcgatttgcttagatcttatgtttcttatcacgcttaatgctgcatcggttatgttcgatctgttaagtattgttttgaaacgtgctatctagctctttctttgattactaataaagatagcatcggagtttcagccgatcttacctgatttagccatctttgattccctacttggatntggatcgtctaaatcttacctttatatcaagatctcatctatgtagaatatattaagccttctatcagtct

SEQ ID NO: 40799 - DNA, 477 bp, Oryza sativa
  unsure (1)..(477): unsure at all n locations
agctnttggcttcccctctcgaaagaagagaactgctgatgattttatatgttccaatgtatgtacacagaagtgaaacttcaccttatagcatccaggagattagacatataatcattgtggtactgtatccttttatcatcttgtaggacgtcttctaatctaaaaaatgggtggttggcatcatccatacctgccataaacagctccctttgttaactattattatatgctttttaaggaaagaattcttatctactgtcaataatctccagccaacataccattttcagtaatgactacgggcgggtttccatacttttctttcacatgtttcatcagcttgaacataccccatggaactatgtgcagccaacttgatgctgccttgaaagtgatcaatacaaattntagtttcaaccaatcattngactagaaatagcataaatgaaaggataggtataagtataacaagtc

SEQ ID NO: 40800 - DNA, 472 bp, Oryza sativa
  unsure (1)..(472): unsure at all n locations
cctctaatttaatacaataacttgcttgcacttcttttgcatgattcctcaataatgctttagttggaaatatttgaaacaactgttttgttgaacttttgatggcgttgtcctttcttgagaattgcgctaacctgattgtcctggcaatgaaaggagaacagacaaaaagcatactggtacaatgacatctcaagtgccataactcatgagattgcttatgttccttatgatacaagaaacacattaaagagcacccaattctttactttattctcatgccacattctttnttctttntgtggcatgtgtcggcaacagcataactaaattatttgtgtgagcatcatcaaaaacagatattcaagacaccaatagccatattntgaaccataactgctttgcctattgctnttagacaaaanaaaatatttgcataatacaaatcaatagtagtatcttatactatctg

SEQ ID NO: 40801 - DNA, 438 bp, Oryza sativa
  unsure (1)..(438): unsure at all n locations
gctgacattcggaccactggttataccagtttgtcttcttcgatggaccactcggcaggatgatccgagcggtcaaacttgattgcaatttctgaccatcgaagatactggggcgtgtcgggctgaacagcattgatctcccgttcagtcaacttttgcttccttttagactcataagccagggggccgccgaagatatggttgagctccttgcggtggtcttgaaatcctgccggggtgtcgccgtcgtccttcttcctcgacgtgctttgttcttcgtcagagttnttccgtgtagtcttggtgtattgctccgcanactgcttgtagacgaaacaatctttggccacgtggttggagttaggatggtgcgggcattgngagttcatgatcttgtcgaacgtgttgacgcgcgaacgctgtcgagaagagtgagtg

SEQ ID NO: 40802 - DNA, 470 bp, Oryza sativa
  unsure (1)..(470): unsure at all n locations
agcttatctcatcttgcacaaaaggttaccctacatgaacaaaggtttgcagaggctaagaaaaatttcaaaaagatcaaccacgtatacccttacatgtatggttccgatgaagaggatgattccgaagtagcaacagccgagtatgtcaggagcaagaaggttgtgccatgtccataggtgagaagttctgggaaagaggaaagatttgattttgatatcaccaaggctaataagattttcgatttgttgcttcaggaaaaacaaattcaacttcctgctggtcatgtgattccatcgactgaggaactaggcaagagaaggtattgcaagtggcataattctggttctcacaataccaatgattgcaaagttttcaaacagcagatccaggttgccattgaaggnggaagataagtttgatgatcaaagaagccgatgaaggtgatggtatcatttcatgtaattgg

SEQ ID NO: 40803 - DNA, 489 bp, Oryza sativa
  unsure (1)..(489): unsure at all n locations
atcctctnagtcacctgcggcatgaagcttaacctttaaaatatttgcatcatattgtatactgaataacataattgaataccataacaaagtttttggccatagctaatttaccaaacttttaaacgattacatcatatgttgatggacggccggatggaaccgagacggcgagatcacacggtgcatgcatccgctggtactgttaccctgtagcaaaggctagctgccctgtggttcaccggtagtgggttacgaaaactaaggatttaatatggtacccggtgctgtacatggcggtgggtgaatgttgaaccatagtttttagtgagtttccttcaagaatctagctagggccctgtttggtttatgtactactcactgtttcttttttcctttataagaacttgnttatgactactatcttngtctcatttaagngctagtgtgggtttgtgtatccaaaattcgacctttcctttttatttg

SEQ ID NO: 40804 - DNA, 475 bp, Oryza sativa
  unsure (1)..(475): unsure at all n locations
tcacttncaaatacccggtcctaccactctgcatcaacaatcccatcaaatctgacctctagcctctggttgacagggtggtcagaagcctgccaacatggaaagccgagcagctatcgccaccagggagaagcgcaagaagcctttgctagattagtcgcaaaaccgtctcgtgagatatagccctgttctgtaactttttcttttccttttgctcagcagctgtacgaactcctcacttaatacaatgatcagcaaatcctatgcatattcttgaaagccaaataaacaactaanaatagtatggctggggtgcatngtattgtttaaacttcttttcttatttggtaggtagcatatgtgctcaatggaatgatgctatgtggcttatagcaatgctaaaacgtcatcctatgtcattatcactaacacaattgctatattcttgttagacaggctctcaactataacatct

SEQ ID NO: 40805 - DNA, 356 bp, Oryza sativa
ctgagctgcacttagcgacgagaaaatcccgttttctgtgctgacggacggtcattacactggactgagaagccctgagcaaacgctctattatatggtacttatcatgcggacggaaaaggaagtaaagattgggaccaaatgaagctatattagtggtataatttataattaaaatagatataacttttaagaaattctattattttataaagaatatcctttatatttgaccgcagaacaataaaaatgtttatagacactgaattttaataacacatccttgggaaaagtcataccgatgctcgctcttgggacaccgtctcctactaatagcccctgactacaacaacaac

SEQ ID NO: 40806 - DNA, 384 bp, Oryza sativa
aatattgtcactcctttcatatcagtttcaattaatataaatcctttcatatcatatggaaaataaacatcgttggtacatatgcttttttgacgctgttgtcgtaagcttatggataaagatatatatactacctctgcttcatggcataagtaattttaactgtttataagtcatgtttataccaaatttaataaaaaatagtaatattttcgatataaaacatgatataactatcataatagtcagtagtgaaactaattcgttgttataagtattactatttctttatatgaacttaatcaaacttttaatatgtttgataataaaactatatatgaacatggtgatattaactaccattttgatgccttgatatgcaca

SEQ ID NO: 40807 - DNA, 409 bp, Oryza sativa
  unsure (1)..(409): unsure at all n locations
tcgacagatgaccttcttccacgtcgntcaatcgctctactattaattcaccttggntggactcgagcaagtagctgtcttcacatttgaaaccgaagctattanggcttgcaagaatcttaaatccttcattgtgcctgccaggatcataaactgctaaccttccatcttgagctaaaaagtatagcaagctgttatggagaactggattggtgcccggcgatgcctgaagttgcgaccagtcgggactgttctccgccaaattccagtcctcccactcgtcactgtttgttcggatggcactagcaacctcaattgtgaacatcgcctctataccaaatagcctctcatcacggtcggagacaacaaaattaaacagcgcataagggttttgtggcaacacttcaac

SEQ ID NO: 40808 - DNA, 411 bp, Oryza sativa
  unsure (1)..(411): unsure at all n locations
tgctctaggataaggtcttatcaagctgctttattccatttgatcactcatgcttattcgaaagctttattattcttgggatccggatctgttattcattcaatggaacctcttggtggatattcaccagataaaagtcagaatatggttcttatgggtggtttaagaaaatacattccaattacaagaactcgttttttatggggtaccctttctctttgtggattccacctcttgctngcttctggtccaaagatgaaatccttagtaatagttggttatattcacccttttttggaataatagcttcttntactgcacgattaactgcgtnttatatgtctcggatatatttacttactcttgatgggtatttgcgtgttcattttcaaaattacagtagtactaaag

SEQ ID NO: 40809 - DNA, 472 bp, Oryza sativa
  unsure (1)..(472): unsure at all n locations
gctgaatgcatgtacacacccattacattgtgtcttattctctctgggccgatcgatcgatcgatgaatcgaatgattggtggaatgcgcacacattaaacgactgaacgaattattgcacttttttgggacatatatggatccaccaatcaatgcatacatatgtatacttcctagtatattctagaatgtagttaattacctctattggtcaaagtttgttccaaactatagctaaatccaaagcggcagcatatataccctatgtatacaagttctacgtgcacactctatacacaccaactaattaatatcataaaaagactcaagaaaaaaataatgcatatacttttaatagtattatacctacatgtaaagttntaaagttcaaatcattatatnttagccattacaaaaataatagttttaagaatataanatttgcacaattttctctttttattgctggtat

SEQ ID NO: 40810 - DNA, 370 bp, Oryza sativa
  unsure (1)..(370): unsure at all n locations
gctgctcaatccaacacgcgtttggacgctgcttatgacgaggtcgtccacccaaaatgatcgggcctggacatggcgcttatggtaacgccgcaagctcttctgggagcgcgccgctcggaagggcgcgtgccgccttctctctttcaagtagtcgaggtcatctctacgaagctgattttgatcagcctcgcaatacatggtagcccgaggagacctcanggtgagctcggatgggagaaccgcttncgcgccgtagaccaggaagaaaaggcgttccccggttgctcggcttggtgtagttcggttggcccagagcanccgctgcaactcctcgatccatgaatcgccgtgcttcttgagtatgttg

SEQ ID NO: 40811 - DNA, 494 bp, Oryza sativa
  unsure (1)..(494): unsure at all n locations
ggatcttaagtcacctgcagctcaagctaagatgaattaaataacaaatgaacttatttcatgctgtttatcttcactagatctaatcaaccaggccttaatcatgcacgaccaccaaaactatgataacttaatattggagtggaccaacctttgcagctgggtgtgcaaggtctaactcccgcaatatacaattgccatcattagttacaacaatacctgcagaaccaaggaaataattcaaatatggtgaaaaatgtcctgacagttctacaaatgtagcatctatattcggagtgttttactgacatatgaatgcaaaaatctatccaccatcaactctaaataaaatgcttaatgcaccattcaaactattccttgaaacaactgtataaccatagaagttacatntaaagaacacaatccttaatgcattgtccaaataattcgatagaattattgtattaattatgaatataggacaangtggatgc

SEQ ID NO: 40812 - DNA, 466 bp, Oryza sativa
  unsure (1)..(466): unsure at all n locations
agcttagtaaattatttatgggttagctctatattctgataggccagngtgtatgacttcaaataattcagaggagcttcctatttaccccgatgtggtagtttaagtgactaagcgtgtccaatacaacggtattgtgccacgtagtgggttcccgttgtgtctgccaccacggcgttaagtttaaggcgtgggcccgccacttaacggttctaggtcatataacgtgtatggcttaggatggagagacacgtatcgtgctggtgtaggctaaatcatgaattntggaaaagctttgttgcggataataaatcgggtacttatgtatcgcgtgccatgctcttgcatgattattatntcgcatcatgtgggtaaagtgtacaaactctgcagagtaaaactaatttgatagccgtgcttgcggtcatgagcggcatgagcgggcgtgtgatatgtattgagtata

SEQ ID NO: 40813 - DNA, 451 bp, Oryza sativa
  unsure (1)..(451): unsure at all n locations
agcttctcttctcgcgcggtggtggaggcggatcggatttggaangaagacgacgaanagggaaggagggtttgaagaagaaatggtggtgatacccgaatcggattgagggagtttgttaggtgcacccagtagaccgtgggcctgttcactttgatgtcattttcaaccttagcaaatttataaaaaaattctgtagctatataagaaatcctgccaaaatnttggctcttgttntctgcgtcaaagtgaacacgccctataccccggaagcagctatgatgactagagtcgttggcttattaacggcaatttataaacaaaaataatctgnaataaaactttatatacgtattcttagcgatctaaaccaaagactgaaaataaaattcgatgaaaacctcaaatcactccaattaaataaaatttaatttggtgatagttaacataa

SEQ ID NO: 40814 - DNA, 345 bp, Oryza sativa
  unsure (1)..(345): unsure at all n locations
aacgncactcttgacacctttgctcgcataaggccttgcgcatcttgttctctacatggaacgatagaccgatatctgtctgcatggatccattggacacgatacatgaccatgttcttcgatgaccctgctccgtggtataggtatacacattgtggcattctgccctgtagacaaagggagctgcttcttttgcgtcatgctctcacgaagaaaactcttgtaggaagcataaccaacactggtgaggagcgacgcttatctatcgatactggatggcgattgtgcatgcatcttgagagacaagaatatgcgctcacatactgagagaagatcttacacagt

SEQ ID NO: 40815 - DNA, 462 bp, Oryza sativa
  unsure (1)..(462): unsure at all n locations
agcttcaagtccatgtcgccatacgcgctggtcatctctcaacggcacccccatttcattagcgactgactttgtcacaccctccatcatgccaggatttgatttctctaataacttggcatatatggttcgctttatatcaggagggtagtgcctcctcttcttgatattgatacctagacatggttgatgatgcttagtacgtgcaaatattacagtcacgatttacatggttngcatagttttgtcatgtttactcatggtatatatcgaccgcaaacaagcaacaacagcaagcttactcatggtttgcatggaactgtgcatgcatagctatgtgcaaaggctcatccagtaaacaaactgagcaaaaaaaaacacttgcgtgtattacctatgacggaatcattntgatcaacgtcatgtgttccgctgccagcatccatgccggcatgtgctcta

SEQ ID NO: 40816 - DNA, 471 bp, Oryza sativa
  unsure (1)..(471): unsure at all n locations
ctcagctgctggttttctaacgacttctcaactcgtgatgtcttttgcctattcacaagatgaaaaatcacgacctctcaagctgcaaggtccttctcagcgccatgaagacacagccttctaaggtccagcagtcatgaatctctcttatggatgtggacaaggaacaaggagcgacactgatctcggatcgattcgttgggatgatcgacatcgatccccacgagctgtcagtcctacacttgctctaagactatggctcatcatcaacaagtacaccacgcgacgtatntgctatcggtgggaccagcacgtctgcgcacgctaatgcagaagcggagaatcaagcggtcacgccggtccagcacctcgggaccatcaacgcaatactgagaagaaacccctatgatcccgtactcaatgatggtctcgaacggtggacagaacgactacnggaatcagtagccaatc

SEQ ID NO: 40817 - DNA, 313 bp, Oryza sativa
  unsure (1)..(313): unsure at all n locations
agcttataccgtgacagaactctgttatgatatgagtctatactgaaaatcaaaaagaataaatcatctaccagacctatagctaattggcttatcactaaacacctgctcttccttgcagcttgtctggcttgccacatgcagacacaacgcctgctcgcgttcgccgcacttgcactccggcgccggatgtaacacccctccgagcggcccttgttgtttgccttcacgtcgccactcgattgccggaggtcaaatgctangaagggaatgagcacaggagatagtgttagacccttatctgacgtcaacc

SEQ ID NO: 40818 - DNA, 438 bp, Oryza sativa
  unsure (1)..(438): unsure at all n locations
ntagagaagaagtcttaggtggagtcctgttttataccttatttgagcgcctgtgaagatggagccgtaggcccgctagtccgctgctgtttatttttgattgtcaggccttaagtgcctttgtaataatgtaaatattatcgatataataaagatgtgtcttttatatcatgtttgtgtggtgtaccccggctcttccttggacggcgattaatacactagcgttcgggaaaatgtatttttctcggtcgcgacatgggcccccgtcacactgcgccatataaaagaagggtggaggccggcactgcacattggacgagattcaccgtcgccgtcaacttcaccctacaaactctaatncgatcgagaggggccgtactcagtgacgggaaatgccaccgccgcgccacgacctcgccgggatcgtccacgaccacc

SEQ ID NO: 40819 - DNA, 328 bp, Oryza sativa
  unsure (1)..(328): unsure at all n locations
taagcttaccttgcagtttacagaagattatcccaacaagccggcgtctggtctgnttggttctatgatggtccacccaaatagtaagctctctttccgtgtgaatatatattggtcaataattaccttacatttgtgaaccaataaagaacttcgtttttgaataatggaaaacttatttaacatcatactattcatgccgtttatgccgatggaagcatctgcttggatattctacagaaccacgggagccctatatatgatggtgcttgcatattgacttcaattcaggtacctttttgatcaattttcagactaaccaaaagca

SEQ ID NO: 40820 - DNA, 471 bp, Oryza sativa
  unsure (1)..(471): unsure at all n locations
agctttgccattagaatgaacccaggtactcttttctactacttattnttcatcactctttcttctctggtgtttatttctgccatttcaccttgttaactatactaagttcttggattttgatgatgactttttgcatggtcaatctagataaatacacacatgactacaggccaccttggtggatgcaaacacctttctttgttctttctagttcttgcagattaattcatactccttgcagattgtggagaagtatttttttgacagattatggatgcaaaccatcttgcagattgtggagtagtattttttttatgatttctttnttcagactagaggttcttaattnttgttagcatattcggtttaaaacttcatttttttgctggataccagtgtaatcgatgggtgcaaagaacccagttaaaccttttttttcagtgaggacagtgcagagaacccagtaca

SEQ ID NO: 40821 - DNA, 463 bp, Oryza sativa
  unsure (1)..(463): unsure at all n locations
tgcatgcttggaacttcatggcttatcgatttgccttctgttatctgctggtagacaatgtgatctttctttttaccggaaatgggaccatccaagcaaggtttgctcgacgatggtccatcagcattatccaaaacatgaagctgtggcgtggtgtggttgctagtttcagaaaatctttttacgttctacctgtgagaccatagtagattcaatccagagttattgtgttcgtatgcgttgcgtggagaaaacatccgatatatatatttgtctgtggtagcttgattttggaaaatttgctagaacaaaaaagggatgtatatcatgcggcgtagattcagtatcagggaaacccttttttntntttgagaactgcaaactaaaaagagtagtagtttgcctcgagaggaaacgaaacacggtaagccaatatagaattataactggatgaatgagtaac

SEQ ID NO: 40822 - DNA, 465 bp, Oryza sativa
  unsure (1)..(465): unsure at all n locations
cagcttgatctcgccatcccgaccacagaagcccggttgttcgtactggaacctcttggcaccacagtgtttacagtcaggctcacgtttcaaaacattntcgctctgtgggatggtgctatacacaaagtcgaacggatcaagaattgaagagctcggtgcttgcgtgtcatcgtcattggattgtaccatctcgtcatcctcatcatcgcctggtatagcggaaaggagttatagattgaaaaatccataccagtgaaagtgagagatttatgtatgatggcgacagtacctagcccagcaaacatgtagtgttcatcgtcggtgtcatcatccatgaaggaatccatatctaatttagttgaatataaagtgagtatgaggaacggtacaaattgcgagtataaataanaacatatatagatgataccatcatcacagttagacgatcgtgcaagatgatct

SEQ ID NO: 40823 - DNA, 285 bp, Oryza sativa
  unsure (1)..(285): unsure at all n locations
aaaaaaaggtgcggacttaatctgcacgaaaactcatatctcttcatctccatgcaatctatgcacataaacttatgatggagagcaccacgacgatatctccctccaacccggccttccgatcaaattcaacatatcggcatggcattgtggcctacatccaccggatcggtgttgcgtcgtacggagctcaccttggcgacatctagcggattgacgacgacngtggagaccacggctgcaccggtgccgccactgtgcgcttgtcaagcccatcccgtgctc

SEQ ID NO: 40824 - DNA, 478 bp, Oryza sativa
  unsure (1)..(478): unsure at all n locations
gcttcagccatatgtacatatgactggagcaaaattgtcatgccagaagctcagtttccgctatttttggccttaccgagtgctggaaagggtgggtgcagtancctaccgtttggaattacctcctggaagcttgatccatctagtggtgcacgtgtccttgctcaagaaaatggtgaaacccggcacccaggtaagtcctgatttgcctgtccattgtgttgatcaggaacagaatgttcagcctgaagctgttttgcgtcggcaattgatcaagcgaggtggtgcggcggttccctatggtctgattcgctggagtggattgcctgaagagctggctacctgagagaacctgcgctaacttcgacaacgctttcctgatgctccagcttggggtcaagctgttccttaagggaagggaattgtcacgcctagctattatttgggcctacattgttatcgggcctgcatctgtatt

SEQ ID NO: 40825 - DNA, 484 bp, Oryza sativa
  unsure (1)..(484): unsure at all n locations
tggaacgtaccatntggaatggaacttgcagtaagacagtttattcaaaattggcagggccgaaataatcgattcttaattagattntgaattaactagctagcttggggaaatactagattcaactatgagagctactaatgttattaaagagaagatgaaatatatattattttacaaataaatagcgatagatgagaagtgcaggaaaatataaagtaaataaataagcacgtgaacatataaaaagatgagagaaaccccagaacccttttgtggctgattntacccctaaacgattggaaaaggttcgctntacaccttaatatcatttctcttattntactctntatacaagttgtattttaagttcaaattagttatagccataaacggtactgttatcaaagttganaaatggtactattaccagtaaagttttgtatntaaatcagtcttaagtgctnttaacctacgtaaacag

SEQ ID NO: 40826 - DNA, 381 bp, Oryza sativa
gcttgggatataagaacccaaacttgtcgaagtttgtgttccttgatggtagacaccaaagcctttggcacccacacacaagtgcggtactcatcattgtaattcccattaaaataagcaaccactttggcctctgaatttttggaaattacatatgaatcatagtaaagaccctctggccagaacttcctggcattataaccggaacttccggccagccccttcggcctatcagaagcccgaaacttcctgacaaaatgtccggaacttcctgtcttacagggcaggaacttccggtcattttgcccggaacttccgggtgtctgaccagtgaggggacaagtcacctcacttgcttgtggagcttttccttctcttaca

SEQ ID NO: 40827 - DNA, 320 bp, Oryza sativa
  unsure (1)..(320): unsure at all n locations
cagcattcaaaagtcacttactcgcccaaagctattttggaacacgatcctagagctataccatattattaatcaaggccatgaacccacacgaacctgccttaacccaatgcctacgatgattcagaccgaactggcaaccccacccttgtgtccagctctgtccaagccaacccaagccaaccatatcacattttatgtggtaacaaattctaagaattaaacactgacttggtacattgctcgcttgccataaccgtggcgcggctatcgaatagatatacttgatcaaggtgacatcntacccacaaaacatcttc

SEQ ID NO: 40828 - DNA, 481 bp, Oryza sativa
  unsure (1)..(481): unsure at all n locations
cttctatcgcctagctatcttacacattatttttatttcttattatcatactaaactcccgcggcaacacgcggtgtttcacctagttataattatgatctagaataatgcccgatgtaccttagactgccgttaaattcatcagcatattccatagtcgccttgtagctgtgcaatttggattccacgcaacacctcagtagcgcattcctttcctgctgctgcatcagattattttataatagcgaaaatagattcgaatccctcgagaaaaatgacccattctagagaagattcaaaaaagtttgacaatatagaattatgtgatacagcaatacacaaacaagaaagttcagttctgatctccacaagttataacaaanataataaatttaattctaaccagtatatgtgtattgttcacaataattttttttaactggtagaagtcaaaataatttaagcatgcactacttatcat

SEQ ID NO: 40829 - DNA, 272 bp, Oryza sativa
tcttttgatctaatcagccttgaactttgaaagctactgttgaagtatgtaaaaaaagttcacctcacctttaaaacctgaaatgaataacttttgctgatttaagtccaagcgattaccatcatgatttcaaacatgccccactagatgatcgatctcaaataaccaattgagctcactattcaccgataatatatacggttggttcttcacatataatgcctaggctgttgctattatatgaatacaactactgtgtgtgtgtcgtgtgt

SEQ ID NO: 40830 - DNA, 469 bp, Oryza sativa
  unsure (1)..(469): unsure at all n locations
agcttgatgtcgagaactccggttcttgcacattgaagaagaanctttctatgggatggccgacgtggagtttgaactcatagacttcgaacttgtggaaattaagaattttgttgtgctgaattggcactctggggataaccccgtacccttcgatgataggactagattaatcctgaaaggttttgtccgttggtgtcgtaggctctccggacctctcattatatttgagggatgaagtgaataattcaagccatcaaacaaacataatgaaacatccgacgcctcgagagaaggatattagagacattgatgggcctttagcctgccagtcaacttcagcctgagatgtgcccgtcaaaccacacgaaggcggcgaccagatgtatcacacattcaggagacttgacaaaatggctaaagatctacgatatctcanatatccttaactcatactcatgtgaatcta

SEQ ID NO: 40831 - DNA, 215 bp, Oryza sativa
  unsure (1)..(215): unsure at all n locations
caagctntcctagacactatttctcactagaatattcttctattctggcctatcattcgcttggagtncttggatgaaccggaggatgatctgatcacacaccgttccttggatttgacacatttggaatactccgtangggaagtgctaaatcgcggtatatccgtgcacttgcggattntatctatgatcgtaagattaccaacagcgacatg

SEQ ID NO: 40832 - DNA, 479 bp, Oryza sativa
  unsure (1)..(479): unsure at all n locations
agctggttaaggtacccatgcaagcagagtatgataccgatgccgagtctgatacaactgtgcaaaacaaaagcgtacacattcctttgctgcatcaggccttgttctcgccgctgaattgcagatgaaaatttgtcaattatataatctagcaacaatcagttgtcattttgcatataagaaaacaaatgccaatgctaatcactctgaatctgtagtacctgccatcagcggtatcgtcaccactttctttgaacaacttcttagctgtgccagtgccaggagatggccttgccctgttttgcaaccatagttagctaaacagagcatagctaggctactttaactaaaagcatggaagactgagaagagctgtaaccttttggtgtgggacttggatgtggttntcttagtagcagaatgaccacccatttgggaaaggggcaaatngtcatcatcctataggatcagctaaatca

SEQ ID NO: 40833 - DNA, 422 bp, Oryza sativa
  unsure (1)..(422): unsure at all n locations
tgctaccgacgcagctattcgcatcatcactggtactttgtttgagaatcaagaaggtcgcgacaaattccagtactaccaagatgaaggtgttcatcttgcggcaagcttctgcacagccaacctatgcccatctctccagcttggaaacactctgagccgaactgctcgcaaagcagagatatatcgggaggggatgtttgcattcataggtgggattattgatgaacaccaggagaggagagcacaagatatgtatcataaggaagacttgatagatgtactcctaaggatccagcangaaggctctcttgagtccccagttagcatggaaacaatcaagttcttaanttttggtagattnttgccattagctacagcaaaactacatgagttttctcctcattnttctaacctaatgg

SEQ ID NO: 40834 - DNA, 458 bp, Oryza sativa
  unsure (1)..(458): unsure at all n locations
agcttatgttgatgatgtagtcgtcaagacctatcttaatgatgacctgatcgcggatttagaaggaacttttgcaagcattcgtgctttcaggatgaaactaaaccctgaaaagtgcatcttcggagtaccgtcagggaagttgctcggatttatggtatctcaaagaggcatataggccaacccggagaaaatcaacgccatcctcaacatgaaaccgccaagctcccaaaaagacgtccaaaagttgactggttgcatggcggcgctcagccggttcgtctcacgactcagcgagcggnggatgccctttttcaagctgctgaagaagactggcaatttccagtggggacccgaagcacaaaaagcctttgaagacttaagaaacttctaccactccccagttttgcctcgcacgtcacaagagccgtactgtatatgtgcggtgacctccagat

SEQ ID NO: 40835 - DNA, 476 bp, Oryza sativa
  unsure (1)..(476): unsure at all n locations
tgaaactcagcttctttactgaagggggagaaagatagagcaagaatgatttcaaccacagnactcagcaagccacaccggcggatgcacgattaatgcaagggggtacaaggggtaatgatatanngggttaagtttgcagtaaacagcatttaaaagtcacttagttgcccaaagccattttataaagacgatcctagagctacacagtattattaatcaaggccgtgaacccacacgaacctgccttaacccaaggcctacgatgattcagaccgaactggcaacccgaccctgtgtcccagctcgtcccaagccaacccaggccaaccattccacattntagttcttaagcaaattttaagaattaaaacactgacttgngtacattgctcggcttgcccataaccganggcgcggctattcgaatagaatatactctgatcagaggtgtacatctttacccacaagacaca

SEQ ID NO: 40836 - DNA, 353 bp, Oryza sativa
  unsure (1)..(353): unsure at all n locations
gcttacccattcacaagagacccaaactttttttcttgggaataagctcacttaatgaccgttaaaagtgatcgaaatctaatccatgaccccaaaccagataaccggatatcttgacccccaaacttttaataccggtgcaatttgactccctgggcggttttggaggacggtttcgctgacctggcgcctacgcggcagtattgactcggtcttttttctacgtgacattgacgtggngcttaggtggcattaaaaataaaaaatatgcgtgggacccatctgtcattacacacaaaataaagtggggccactgacatgtgggccttaatgtcatctctcttcactaccct

SEQ ID NO: 40837 - DNA, 452 bp, Oryza sativa
  unsure (1)..(452): unsure at all n locations
atggatctcttttattacatcccatattttcgnttcctttcatgacaaaacctttcggttgcgccatgtatactttntcctccaaatctccatttagaaatgccgtttttacatccatctgatgtaattccaaatcataatgtgccactagtgccattataatcctgaaggaatctttacaagagactggagaaaatgtctcattgtaatcaatcccttctcgttgcgtgaagccttttgccacaagtcgcgctttaaacttttctatattccctctggagtcatatttggttntgtagacccatttacagcctactggtttggctcctttaggaatttcttctaaatcccaaacatcgtttagtttcattgatttcatttcatctttcatggattccaaccattcagatgagcgagcgcttctcatggcctcttcatatgaagtgggatca

SEQ ID NO: 40838 - DNA, 473 bp, Oryza sativa
  unsure (1)..(473): unsure at all n locations
tgcagcctattgtgcanagtanagagcccaatggatagattctattgaatcccgggaaatgctttcctcctatcctttcttaccacgtggggtcacgtactaagcaagccaaaggccagaagagtaagaatcagaagagaaaagcgccgatgcgaactgaaggagaagtatgtaagatggctattagcagcaccgaatggcctcccgcagggataactattcctagacgtcaaagaggaaataccttccgaggtgcacgacagttgacccagcacctcctaagccatggcggcagagtatctgatagtgaagggtcagatcaagtctcctcggattatgaagatgagtctcttcgacatctcggcgaggaagagatggaatcaaaagcatgcccncgttgtggagaaaatggacacgttgctagcatgtgtttacactctgcctcattggaggaagacatccaccaggtgaat

SEQ ID NO: 40839 - DNA, 462 bp, Oryza sativa
  unsure (1)..(462): unsure at all n locations
agcttatgtggatgacgtagtcgtcaagaccttatcataaggatganttgattacagatctagaagaaacctttgcgagcatccgcgctttcaggatgaaactaaaccctgaaaagtgcatcttcggagtaccgtcagggaagctgcttagatttgtggtgtcccatagaggcatacaagccaacccggagaaaatcaacgccatcctcaacatgaaaccgccgagctcccagaaagatgtccaaaagctgactggttgcatggcggcgctcagctggttcgtttcacgactcggcgagcggnggatgccattcttcaagctggtaaagaaagcagacaatntccagtagggacccgaagtacataaagcctttgaagacttgaagaaacttctcacctctccaccagttntggcctcaccacatccgcaagagccgctattggtatacgtgtcggcaactt

SEQ ID NO: 40840 - DNA, 487 bp, Oryza sativa
  unsure (1)..(487): unsure at all n locations
tgtcgcattgtaccgcccagcttgcgtttctttgtatttgtttgttcccttcggtcctggcatcttgagcacttgatacgcgtagtgagatgcggccatgaacttcgcaagtgcagttctcccgatgatggcgttatacgctgtatcgaattcagcgacatcaaaggtgatctgctctattcggaagttgtttgcttggccaaaagtcacaggcaatgtaattttgcccaatggtttggacgaggactagggagtaattccatggaagggttgatcggtgggtgtcaactcgcttcgtggaattcccatcacgtcttaagtgctggcgaagagaaagttgattgagctgccaccgtcgatgagaacccgcgcgaccttgatgttccgaatagtggattcgaccatgatcggatagcatcctgggatgatggcagtcttgggatggtcttcttccgaannatctatcttctggtcagaccacttcatc

SEQ ID NO: 40841 - DNA, 448 bp, Oryza sativa
agcttctcctgtgaatgagagcattatgctcttctatcacatcatcacagaaccaatcaatgatgcagtcactagaacaatgcccgctatatctctcccgaatcaaaatgagcagccatgtttgtgggtttcaattcgctacttatcatcggtgaaatcgaaagtctgcagcaataatgcaatacataaatatattcatgtctataaacagggagcttgctatgcttatggatgattcatgttgaggatacaatgtaccgatggtaagcaccgtccctttttgcttaaggcagtgcctcgtattcatgtaatgagggagaaatgtgtaatacagacaagttccatgaggattcttttggaagaagcgaatatgtgactatgcgtataaatcgctactggataaggagacctacggtcttatttcaaacgaactatgttctaacctcga

SEQ ID NO: 40842 - DNA, 469 bp, Oryza sativa
  unsure (1)..(469): unsure at all n locations
agcttgccgccgtcgtcaccaccggtgctcttttagtcgncaccgncgncttcggacttcccgggcgccgccttggcggtggcgtccttggcgcccttcttgggcgactcgctctcctgcttgtctttcctccagaagaggaggacgcagcagaagaggagcaggaacagcaagcagatgccaccgactgcaaagatgagctccctcttgttgagtttccgtgttggccgctgcgacaaaggcaccggcggcgacgccatggtcgctggagaggaaatggaggtgcaaatggcggagccattgtacccacagagctggatgtttcccgcgaacgagctggcattgaacttgctggaaagagctacaggcacaggccctgacaggttattgtaggacacattgaaggatgtcagatngttcaatccgtcagcgactcggtatccctcggtgaggttgtctccacacgtca

SEQ ID NO: 40843 - DNA, 339 bp, Oryza sativa
  unsure (1)..(339): unsure at all n locations
acagaacacttcaacacgctttgcacactgaccaatggctgcttgaccttgatctccagtcgatcttgaactggacgacgcacatgattgatcaactcgtcgaggtctggaccgctgcccgggcagttcagctaatagagcaccaggagtacaacataacatggaagctcaccagccacagagaatatacggctgcatccgcatacaaagtacaactcctcggctcgacagctacaaacttcaacgccttaatctgganggcctngcaccatgaanatggtaaatcttcacttagctaatcatccaaaatagagtctggacctccgaccggctacaaac

SEQ ID NO: 40844 - DNA, 397 bp, Oryza sativa
  unsure (1)..(397): unsure at all n locations
ctagatatatggtgaaatttttttttgcagggaacgntgaaaatattaatatatctttctattaactacgaaacacattaaacaacttataatattaacagaaagattcaaagtttgcgttgaggtttcgcgccatcatttcctgtgcttctccgttttgatttactcttggctnctttggatagccagagaattcctttttagaatctcgctacaattgtgctgttctttttttctgccgaacatgtcgtgtaaaattaagattcggggagattaaaattcctttacacctctaaactctaatgattgaatgtggacggagccatgaacagatcaaaagaaaggtccttcgtacgcagaattagaagatttgaaggaatagctcgtttctctgatt

SEQ ID NO: 40845 - DNA, 335 bp, Oryza sativa
  unsure (1)..(335): unsure at all n locations
tgagtgatacaaccctattctttcattcttcaacctacaagtttcaatattatgataagaattcctcagtgcatatgattctatcagtttccatggagtgtgtatgcatcatgcatgcatgctgagcacataaccctatctatctatatctaggtccgccttcattgtggtgccagcaatctggataagtgggggaagttggccccattctctaatctgctgatgatgcgtaaatggagcacatgcatgcgtgtcaaagtgtcctganattttacaatttggccttttataaactattttacaaatagacccctgaaaaacttaacccgaaatga

SEQ ID NO: 40846 - DNA, 401 bp, Oryza sativa
  unsure (1)..(401): unsure at all n locations
acttcgtcccccagatgctccactccatccaggtgcccccctttggattccatcctaagatgaatggttcatacagggtgtcctgcaaatcttgccagattggattcatatgtggtctttgtgtgtttctaacacgggcaactgaccgagttccgttcctacgagggagaggagatgcagatcanggagaagattgtgcccctcaaggtttgccttctcttgctaaccgcagattgtcttttgtaccttctgtttccaccatatgaattggagtggtgatgaatgtgcagaatgacctccggataaacaatactgtaatcagagatcagttcttgtgggtaagtgtgcatctgtacatttcaggattcttgtcgttatttggaagatattccattatcgag

SEQ ID NO: 40847 - DNA, 417 bp, Oryza sativa
cttctttcattgatcctctttttgtgatagaagtgaaccgagcgaattcaatgcccatcctcaggtacagatagtcaagtgtatgttcacgtccgcgcagtggcgcactcatgtactgatctcacttatcctaaagctgaggcggagtggcatactctctttaaaagaaaatcaatttacgataaaatgtgttgttctagtatatgtcatgttctattctagactgattatttttgggacagagacagtaagccgggagtagtagttcttcttatgatcataagccattattcgccactggctagatgctaaaagatgaatgcattgcacgaggtgagagggagtcggccggtcaagcagctgatggtcctcacttctctgccagttagccccttgcagctcctgcgctgctccggc

SEQ ID NO: 40848 - DNA, 352 bp, Oryza sativa
tggttgtcacccaaatgaatgggaatgattactcatcgaactctgtccatgcatttcatatcggaaaaatgagaataaagcttccaaaaggatggtctacaaaagcaagagagtcatactcgaccacaatgaaagtacgcgcgtagtttaaatactgttcatttctcaactatgttgtgttctttgaactgctgcgtgatgttatacagtcctccttaaaatatgtctacactttttcttgcttattctataagaatattgagaatattggtttcccctctagagcttccaatcgtatctttagaacaagcaagggttccaatattccatatctcatggtcctgaatgggct

SEQ ID NO: 40849 - DNA, 469 bp, Oryza sativa
  unsure (1)..(469): unsure at all n locations
agcttatgtggagaagagatgtaacattattattaagggggntggctctcatgcaagagctagcttaacacaatctctaagataaatacattanatgtataagtgagagatagagacaggagaaggaaattatacccaaccttatagctaatatattatatatgtatgttgattntaagatggactaatagtatgaagtgagctatactattatcctcgctcttaatcaatctctggatcttgatggtacggacaatccattcaatataactcaattgttaaaaatgtagaaggaaggaatattgatcatggaggcacagcctcttctccagtcaaaggcacaaagacaagacaacaatcttaaattttattttcttttgcagtattctgagagggcaagagatcacctaagatatatttgggattgatcttgcaaacaaatactgtcgagcaacttggtagtatagtg

SEQ ID NO: 40850 - DNA, 468 bp, Oryza sativa
  unsure (1)..(468): unsure at all n locations
agctntactatggggttgtagcaactccttatttaataataataaagctcactttcctcgcaaggggatataaaattgcctctatgtcctatctatgctactcttgaaattttcttgtgtaagttctttgcaagaaatagggacatacttaatgtcctgattcaataaagtagaagattaagggcattatttttgggttgaatcattatgaggcgttgtcgaaattatggcccttttttactgccacatttataggggagaatatacgtctcattaaggtcgagacacttcacccttagaaatttctgacatctatcattaattagatgataattcgctaagtaaagctaagtgattcaagttcataaggtattatgcttccattacataaataataaaatcagtgggagctcatcaagagctctaataagatcagcaagaattattccacctcatttatgactcata

SEQ ID NO: 40851 - DNA, 451 bp, Oryza sativa
  unsure (1)..(451): unsure at all n locations
agcttgataacaacatattgagcattttttatattctatgagaagatcacactcctgagacttctaaaccatcttaagatcttccaaagcaaaaagtatcagttccagcatcgtgcctgaataacctgcaaaggataaaaaggctaatgtcaatgccaactgtcacagtgactacttgggatccttgcactgcataatacagattacagtataacttcgcacgctgttacttgcatatgaatgttaacatcagattctgatacccatttccacaggatgacttgataaaacacacccttgatctcgtccattccaatcaaaaccttcatgatctgccacataccagatagtggacgtgcaggtcctctcaagaatttgtgactgacaagcaggtgttctctccattactatcgtctattttaaggccaaccatatgctncacttttatgct

SEQ ID NO: 40852 - DNA, 467 bp, Oryza sativa
  unsure (1)..(467): unsure at all n locations
agcttggcaagatgatcaacaggcgattgttatactgagcgatgatgcttgttaccttgcggcgagttaatttgcttctgatgatctgttttatggtacatgttctcagcanggctatctatttgtttgggcttgttgcctgttcatgacatcatggtagtataagagaacacacattggttgccccaggatgctgaagaagaaccaaaatatcatgttgcccacctgtcaaatctcaaagagtgctcaagtaagatcatgccgtgtgaagtagctacgcaatataagtaattttgtaatatgcatcacgtaccattgtgttattgaatttatcttgaaggtatttcgtcaagaataccaggggaatctgagcaggacagacactaacaacatcagcctatataatactgatggagtagagatatcaatgagaacatttcanaataagcatagtccaagtgtaatgg

SEQ ID NO: 40853 - DNA, 340 bp, Oryza sativa
tgtcgatggctgtttttggcttctttctttgccttttatcttggtcttggtagcttaagttacctaagtgtgttgtcacttgtggtttctcgcataatcttttgctacataactgtgcattgtaagggttggttctgttttctttttacaatgggataccttcttctttatataaaacgtccgcaacggcctgaccatacggaagaaaaaaacattactccggccggtgaccgtcctgaacaaaaacacagaacgcctgaggctgcgttctttcttcttatgaacagtgattaccgaaaacggagcgatccattagcacatgaatacataagtatctgct

SEQ ID NO: 40854 - DNA, 335 bp, Oryza sativa
atcatccaaagaatagcacagcagcgcatgcgcaaatgcaactatcagagaatggagattggcattccttttggtgatctgggctcctttctaaattctgatgatggtgtatggatgtcatgttaagatataaaactttacttttgtggcatgaaagaaacataagcctaaatgtgcactcaactatatttgcttctcttggactaaggacccccactcgttccgttatcctctgcttattcataccgcttattagaaaaaagaaggtataagtaaaacttttatatacttatccttagtgatacacaagtaaatgttgctaaataaaccaccat

SEQ ID NO: 40855 - DNA, 430 bp, Oryza sativa
  unsure (1)..(430): unsure at all n locations
tttttaaaagacattatttttttaaaaaaaagcatggtagaacaagttttctaaaaacttattctagttggaatgatcaaattaaccactgcccttgttgagataaatcattgaatgtggattatggattttgatttaaaaatatattanacacttttaattcccccacgcccttcaccggccccttccccaaaaaaaaaagttgcctaagcagcttagtagggaaagattttcgagaaaacatatnttttttaagcttagaagaaatggtctgttctattaatcagataaataagctntaaaaacagggtgcaagcacatattccaccttcttaaaaccaatagtgtgcctcacattgtactgtcttagaanaatatatttagatgtattatgaagagcaattgctgaatctaatgggtcgccagtact

SEQ ID NO: 40856 - DNA, 455 bp, Oryza sativa
agcttgcagtccgggagagatacaaggggcctgaatagatccacaccgcaaatggtgcaggtatgcgaattaaacatattggtcatgctttagttcatacccctcgtacattgcattttaaaaatgtccttcatggtccacaagccaccaaaaacttaggttcagcatctcgtcttgccgaagataattatgcttttcttgagatttactctaagtattttttggttaaggatcttgcaacgaaggacataattcttatagggcgatgccgcaaggggctctatcctctctctcctggaacctccaagcatgtctacagtgttgcgccgtcttttgcaagatggcacagtcgtctcggtcatccatctactcctattgtgtcaagggtagttagcaagaataaattgccatgtcaatcacagtctcctagtgagtcgatttgtgatgcttgtcaa

SEQ ID NO: 40857 - DNA, 446 bp, Oryza sativa
  unsure (1)..(446): unsure at all n locations
gctggtcaaacttgaagaagattgacttatgacaaacccaaaacatgttataatacggaacgggatggagtagtaacatagatagtggatagcaaagcttgtttccagtataggctgtaacaattcaaccagggatcactgagatgctagcacgtctgactagttaggtaacagggtgagttgttcactacaaatacaatataccccaactaaaagtacactgaatctgataaatacagagtacaacagttggacagaaataagtcaattcaaataacagaacataacctggataaaaaattattctaccttggtttttgacacggcatcaagtgccatcagatcatatgctaaatacctcctcttcaatcctgaatctggtactgtgtctataatcatttctccatcaatcanagtcatctcatgtagtcccttggattggaaaa

SEQ ID NO: 40858 - DNA, 442 bp, Oryza sativa
agcttgatggcatagccatgtgctccatgacgtatggttgcagaagtcgttgtagccgggcggttgaacgggtgattaagccgaagatgcacgaggcggaacgatgaagtcaatgccaatgtcgtagacgcgtagatgttgacgaggtggtgggcgacgcatacccattctctgaacgggaaaaagaaaaattggcggcagtagcaatatatgtcgccaaaaccaatctgaacctcgagctcacggcgttgatgttcctggtagcatggaggagctcacatgcagcatgttgactcaagccatgcatgcatatgtgccgccgcagacgtcgagcatgcatgctcgttgcgtgcatacacaggtgcagaacagctagagccatgagtagacggtagacgatgagattgctgttggtgctgcttgacgcgaatgacaaaagatg

SEQ ID NO: 40859 - DNA, 457 bp, Oryza sativa
  unsure (1)..(457): unsure at all n locations
agcttgagcaaagctcagacttagcaacatgaacatgctttatcatcatatcagcaggattatcatgagtacttatcttgcatacctttagcttaccttgcgcgactacatcgcgaacataatggtacttgatatcaatgtgctttgtcctctcatgaaacatctgatctttagtaaggcatatagcactttgactatcacaaaacaagttaatgcaagaatcaactccacaaagctcagcaaacaatcctttcaaccaaactgattctttacatgcttcagcagtagccatgtattctgcttcagtggtagactgggcaacaacaggctgcaatgttgcattccaactcacagcacaactgccaatggtaaacacataacctgtgagtgaccttctcttatccaaatctgcagcanaatcagaatccacatattcaacaagccccttatcagtcct

SEQ ID NO: 40860 - DNA, 464 bp, Oryza sativa
agcttaatggaacaaatcatatcatcacagtctacgatttctgatatgcaggtaagaaaaacaatatttgaatatcatatataatttagttgtaatatttctgtttttattggaatttacaggaacaaaattcagcacactctacttttgttgcgagtccaagtgcatttcaggtatgaaatattaattatttaattgaatctaataattcaaattcaaaagcaaataagtattgatataaaaattttgttttgcagaattcaatgatattaacaacaaatcgtactgatgctaatattgaagaatggaataatgatgcggcaaatgaggcatgttgtcttggatgtattacttcctgttgtagtattaaaaattatgataattgtagtaaattttaactgtaatgtaattcacattccaagaagatgagagtaatgaagaggatgcaatggataattggaatc

SEQ ID NO: 40861 - DNA, 435 bp, Oryza sativa
  unsure (1)..(435): unsure at all n locations
agcttattagtctgaatgaaagttgaactggtttctaaactccaattaaattgaagtgctaatgtaccaagggagagagcgcactggctaaaacataatatagaaatccttcaccgggtttatgaactagtagctgtgaaataccgttaagatagaagtaactgaggtcaactccgcaaatactagatttgtgtaccaaccagtgccttgttctatatatcatggtacatggctgggtttcacctacattttgaacagaagtgttagccatatgttctttagactgattattgccagttagtgaggagctgattctgtttgacgcaccattcaccttggcgacctctgcagcgatgtcaaatgcagattntccagagcctattatagtcaccttcttccctttgacaaattcagctgcattatccatgtaagagt

SEQ ID NO: 40862 - DNA, 329 bp, Oryza sativa
catgcgcatgtgaaccttgctggtcatgacacctccattaaacaatcttcagatgatgctaatggttctgcatcagatgtctcaaggttatatcttgcaggttctgaaacaagagagtctagtttggaagaaagaaatgctggttctatcggtcaaacttcagaacagtcaattgaggaaccactttcagcatctaatttggacagggattcacatgaccatgtgggtacgtcttcggtgaatggtaaccttccaaatagcggtcaacttgatgcagaatgtgacaatgggccaagcgaaaggacaaattacagtactgatgcatctgg

SEQ ID NO: 40863 - DNA, 409 bp, Oryza sativa
  unsure (1)..(409): unsure at all n locations
actcaaattctaagaatccttaattggtaattctaggaaatgaattaaaagtcagaagctggaaaaaccagattcttcagcaaattctcagaagctatctaccaaccaccaaattctcaaaatcttaaagtccccaaacaagaacatagataatttcgtcgcacaattacaagggatgagatttgagcctaggatgcatcantaatttaatcatctcatctcccaatccttcatgtatacagcgtgcattattacttgaactctaaaggatcgactaatctcgagtagaatttagtatttaattgtagatactactatgtnttatttttaatatttcatncgttattatactatgttntacttttcaaggattggcttggcctgttgtaaaatagttaaatttgtctct

SEQ ID NO: 40864 - DNA, 469 bp, Oryza sativa
  unsure (1)..(469): unsure at all n locations
tgcagctnacaaagcgaggtgagtccgcgcctttaggcgcgaagatgacatcctcacaaaggcgctcggaaccaaagaatatcctggtcggacttcgggaattggtagcgatgtgccctggaagcatggactccctcagtacagcttccaatacaggaaacggaaagtctccaagcaagagagggacgctcgtttgaaggccgaacttaaggttgaggtcattcaagaactagaagctagcatgaatgcaagggtggaagaaagggttaataaggtcctcgccgacatgaatataccccgagtcacaacacctgttatgcatccaactcctcgtgcacaacacgacccgagtccgtcacagcataggagtagttgtgcatccacagaggtgccggcccctggtctcccgatcgcaccactagctgcagtggaccacatcgaggtaattggttgtatccgatccatatct

SEQ ID NO: 40865 - DNA, 439 bp, Oryza sativa
catgcacgcttatttcctttgtcactgtcgaattataaattcgatctctagtttcaggatgaagaacgagcatgccggtaaactaaatttgctgccagcacttcaccgggcctgcttgccatgcggagagacatcctaaatttcacccctagtaagcatgtgcacgtaattagaacgcgaatcataagcacaatacgatacagacgaaggatctgcccaaaactggatatatatttatggtcaaagtaaaccaacaacgatgaaaacagaattaagctagtattgcagtataaggagccctcgattgctgaatgtacaaaatctcttgagcatctaaaaatctggatctccagtgcaacaagaatgtctgagaagcagtacactgtcagtagctaaacactgcaccttagtctcttccacatgacaggagatgaaacat

SEQ ID NO: 40866 - DNA, 437 bp, Oryza sativa
  unsure (1)..(437): unsure at all n locations
ggctgcagcttctgtgaccgttgtaatcatgatgtctaagttccaactggctgtgttacgcaaaccattgattntactccaaaattcaatggttcagatgtgactgaagttacttgtggtagtgttaagatgcttgtgaaggttacttggtctcttatggtctgatgacaaatgaggcgcagtacaccgtacttgtgaagcctgtggcgccttacttaatcatatattgttaataatgcaatgcaatatagtaaattttgtctaaacaaagttcattgttcttatacccttttgttttaatttttttgctgtcaactttgattgcaatattatgattgtgttaaaaaaacaatatcgtctgacattttttaaaaattaccttctgagctgttctgggtgatcagccggtcgcaacaaacgggtgcagaactgcagat

SEQ ID NO: 40867 - DNA, 454 bp, Oryza sativa
  unsure (1)..(454): unsure at all n locations
agctngcatctttgaaataatcttgaaacttatgctctcattgngaccatgtagaaatggaattaggagcaagcaaactataccatgtagatgcaaagtttgacaaagaaaggggaaacaactttaacttaagcaaatcatcgctactggccttaccacattgatcaataaatcggccgatatgctccattggtgttctagcatcctcatctgtgaatttcgtgaagttgggcacctcaaatccttgcgggtatgggaccgaatctatgtgttcaggatacggcctttgatatgtatgcataactattttagattctatctcattactatcccgcaagacattatcatcatcttttccaacatccacatgaccgatttngtgaatggtcttangtgacaatgctatttcactttcgcttgtatacaatccaaactgtcatttagttcggctata

SEQ ID NO: 40868 - DNA, 446 bp, Oryza sativa
  unsure (1)..(446): unsure at all n locations
catgcaagcttatttaaggatggcataagctatttttatgacatctcgggacaagaaactaccaatagatattcacgtggcttcaccaggaccacttaaaagtccctatactgataagctaaaatgatttaggctgtatgacaaacttcgcagtacaatcttcaccgtgtaccactattgtanggtcttagccatacttcatatattgccgcataaattcaaatgcactgaaactgaacaaatggagtatggacacatcaaatatttcgtaaggaacgaaacagtaaaacactgatggcttcttaataaggtaaaaaacatacttacatgaaacaccttcttccatcacatctgtcatcttgcaagaaaatgacataatcttcaccgtaagtttgtccatgataagaacctangagttacanaaacaatttatgcgtatcacattc

SEQ ID NO: 40869 - DNA, 452 bp, Oryza sativa
  unsure (1)..(452): unsure at all n locations
gcttaccttatctggtagaatctgtttctcttccaaataatcccactttttttgtaagtctaagaagttagttatagaatatggaaaatgaattagagagctgtttgggaagctttcatcacataatctcccactccctaaaccgtctatattntcacccatattctaagaatctttactcgtagaatctagaaaataaactagaaatctaaaactgaatctaaaaggctggctaccaaccagtagattttcagaatcttaaactactccaaacaaaacctagaaatcggatgctgagaaatctagcttttctaagccggctacatccagctatttcttacaatcttaaactccagacagatcctaaggctaagagaggtgcanaaaanaacaccaacctaccgtatgaatatntttgaaatattgagctaagattaaccgaagtacgagct

SEQ ID NO: 40870 - DNA, 413 bp, Oryza sativa
caatattacccaatgtatgaagactagctatgcttgcaatgcataaattccaaataaaatatctacttccactatatactatgctgctaacatctatgttggagaagcacatataaatggaggagaatcgacaacaaaatagacgatcaatcaatcagaggctttcgagatccagacttatggatagatgggctgagaactcacaaaagacatcatcaattaagcccaaaattccatgttttggattgaggagcaaatgacgagtcagcctgccaaaaattatgccgtttgggccagatcattgttcggccgaaccctcatcacagccattgaggttggggtttggcgtggacgctccggatgaactcctgatggcggttgcggagcattttcgacaattcccatactctaca

SEQ ID NO: 40871 - DNA, 288 bp, Oryza sativa
  unsure (1)..(288): unsure at all n locations
agctagtgtagattattatttgacagcttgtcatggccattntcatgaggaactacagttggctttgtatctagaacttgctctgtgaaactcagtcgtgctttcgaactaaacgaagaagatctgcttatattgtcagggttagatcttacatcagatgtagatctattctctgaaaggctccggccatcagtactaggagtcgcaaagtgcctgctgacaaaacacattactaataaggctgttcgagatgcatgaactaaatactacaagaaaaatagtcatgga

SEQ ID NO: 40872 - DNA, 220 bp, Oryza sativa
cgagctgcaactctcaacttttgcactttgcgtgccaacctatttatgactatattgaaccatttgtttggggatagaaataagcagactaatcaccccgactcacagtataccaggaagttgagcagatataaagatggtatagaatttgagaaagcacattgcaatatagtgaagagcaaacattaatataaaagatatatatatgccaacgcaaaca

SEQ ID NO: 40873 - DNA, 464 bp, Oryza sativa
  unsure (1)..(464): unsure at all n locations
ctgcagctgtactgtgatctacaaacaatcttttgtggcaaaattccacttcctcgtaacatggggactcttcgatttcttgaccttactggaaacttgctttctggaagaataccaccatctctagcaaatatttcatctctaagttccatattgctaggacaaaacaatttatcaggaccaattccagaatccttgagtcanatcgcaaacctgaataagctagatctgagtggaaacagattatcagggtttgtcccagtcacactgtacaataagtcgtcgcttgaattctttggtataggaaacaacagtcttattggaaagatacctcctgacattggtcacacacttccaaatctcanatcgttggtcatgtctctgaatangtttgatggatcaattccaacttccttggccaatgcatcanacctacaaatgcttgatctctctagcaatcatct

SEQ ID NO: 40874 - DNA, 424 bp, Oryza sativa
  unsure (1)..(424): unsure at all n locations
tgatgtcaaagatatcatgtagcaatccattgtcctgtcataaaaattatgaatgccagtctgaatataaagcagaaatataagtaatagaaaagaaattaatatgcataatttcaccgatactaacttgtgcatgcttcagaaatcctcgcccaaggaaccgcctcaaatagttcaactaaccaaagatacacaaattagcaaatttataaatgtgcaagcacaaaagttcagataatcattgaaataaaacaaacacctgtattgattcacgccatgatgtaactcttanaataccatgcttgcctgcaattctaagtgattcttcaaggcactcaccagtctgcanaaaaggtaattagatgatcagannannaagctattatnacattcatgatacaacaagaatacaatanagttagac

SEQ ID NO: 40875 - DNA, 433 bp, Oryza sativa
  unsure (1)..(433): unsure at all n locations
cttagctgtatccctgatcactgttccattgcaacagttctaattgcaaaaaacaaaacctggtctaatttagttcaatatacaaaaaaaaaatctttgtctcatcgcaaattaattacggctgtgtttgaagtttgtttgatttctgtttcaaggttctaactgaacatctgaagtgaagtgtagtcagtcttaatttgggactttctgatctctctatgacaaatgagctttttttttttgccataatatatacaacagctagcaagtagcaaaatgagcattnttggggttaatggtaactgaacatatatgtatggtggcaactgaataaagtgtgaacatatgtgagtacttggaggctagagccaggtgttggtttccttttacttgcttcgtgcttctacaactacaataatgcaagtattcatat

SEQ ID NO: 40876 - DNA, 466 bp, Oryza sativa
  unsure (1)..(466): unsure at all n locations
atgcacgcttgctacttcatcaaccatgacgactctatagtttgttatctcggcatacgtcactaaatatgatgccgtgttattttattacaacaagtggtggtccaatcttcaatatttatcttcactcaagcaatgactactcgacgacaagaggttacagttctcgactctatgttcaattgtttcccaactaaccaaagagtcgggggctacacaaatacaagactctcanaattcgacaagttgaagcaatcaattaatcatccaacgagtcaatttcaggagtcattatcttcgtctttgctttagagcagagttatcaaccaatcagctcagtttcgacgagttggacaacatcatctactttcctccaagtaaagcatctgcaacagctataacaccacattgatggaatatcgtcactgacatcatcaccagcacctcttgctcatcgggcctgaca

SEQ ID NO: 40877 - DNA, 443 bp, Oryza sativa
  unsure (1)..(443): unsure at all n locations
agctngcaaaggctaaagctcaaggttctctttattttcctttagctgatggttctatggttttgcatcctactgagtatgatcatgatcacactaaacttttgattgcccttatgataattcaacatgattacccatttagaattgttgagcataaagggtttaatgccttgatgaagtggatgaatcctcgctatgaattcactagtcgcaaggccataaaaatgaatgcatgaaattgtatgaatctgaaaaggaacatctcaggaaaagtcttagggaggctgagaccataagtttaactacagatatatgtggacattaaatcaaaaccttcagtatatgtgtttggtggctcattacatagatgttcattgggttntgctatgccgtgtcctaaactttgttgaggtggagccttctcacaccgctattgtcatagc

SEQ ID NO: 40878 - DNA, 461 bp, Oryza sativa
  unsure (1)..(461): unsure at all n locations
agctngacacacgcagaanagctgctgttactgggagaggaanaataaaggtgccattagccccaaagaagcttgatcttggcaaggcgccagtagctcctccaaagcctctagccaaattcatattgggcatgccattggtcggagacgatgccttattcaagatgggccctgcttgcaaggagttgcataggtacatggagaagtccaacgcaaggaggaagaatagagagacctccatgttgggccagcacgatggtcagccgttcctcgggcctactgccttcatcgccgtagacttcanagatctatgggacctctacagggtgcgagcgatcgacaccaacctccttaagtgctactccttgtaagtatttgttagtacgcgatatggtagtgactgtccataaattacgcttaccctgactcttgtcttgctcgtangttaacctggaagcatg

SEQ ID NO: 40879 - DNA, 440 bp, Oryza sativa
  unsure (1)..(440): unsure at all n locations
agcttgagatgaattatgtaaatgacattgctgaagaggtatgactatttgcattattcttttntatacatgttatagatcttatattacaatataaatattaatttgcagtcaatgttgaagtacaacgatgattatggcttcactgatttgaaaaaaatatttttgtaatgcatatgatatatatataattatttattggatgttctgtagtttgggcagcacaattttcaggtaaaagaagagccaaaaaatgaaagtagtgatgattatgaaatgaacaatcatcgcanaacaaagaaagagagatcaaacatgagatctacaaaaagatcaaacaaggtatgtataattgctttcttacataacaattcgtaaagttgtttatagtagtacactaataatgatgttntatggaaccatacattaccgattctgat

SEQ ID NO: 40880 - DNA, 443 bp, Oryza sativa
  unsure (1)..(443): unsure at all n locations
tattattgattccacaatgtataattaaattaaaatatacatacatatctaaattgagatcctaaggtgggtacaaccctatcttattatgctgacgttctagattattaacttttcaaaacgaaaactgaagaattcatgttatttttaaaggtatattttatttaacacaaattgttaatagatctatatgatgataatataatccagatctttctcattcagatcagagcttctttgcattgtctaattaatatggtgacaaccctatcngattctttattgatctatggtaataataatatgatctatctaatcaaaggaccatatatttgtggctaatgtgggaattccttataatgcttacaaatataaaccatagctgtgaggagtaattttatacaaaccttttgatcaataatatgtcaatcgaagctgataag

SEQ ID NO: 40881 - DNA, 447 bp, Oryza sativa
  unsure (1)..(447): unsure at all n locations
agctgctatgatgctgccttgattggagatgttgttctaacaagctggagcagcgctttatactgaagtgcacttctatgtccnctatgatgatcatctaagtatctagcttttcatatatgcagcacacaactatcaaaataagataaaatttcaacatagactgtatggtgtgcattatgcgctccttgatcatggtagcacagaactatcanaataagataaattcatgtaactatgtagaacatctcttaacggaactccaattgtggtatcgcaggacgccggacatgtcagcgatgcatcatgatacctcacatgatctgaaacacctgggagctaagctgaaggatatcctgccggtatgataatacatatcttgaaataggatactatcanatctaattctcaagaaccattgantacttacgatatgcctgacttatg

SEQ ID NO: 40882 - DNA, 443 bp, Oryza sativa
  unsure (1)..(443): unsure at all n locations
gctttcatatgatgcctaagacagcggcggtggcagcacgtaacgaaagacgagctccaggctattcgtcggcggcggcagcgatggcgggactacacgtctaccaaactgaccctgaagtctggaaaacgtgcctcttgttgggcggccataggtttgtgtggacaggagccgttgcattgcatggacggtggataagtgatgactacacgttcgtgccttcacagggtgaagtcagacgatccaaatccggttaatgtggctcagccgtggatgattagatgggtatttagcaaaggcgcatacggcgtgcggaggaactcggaaattctatcgttattaggggtgtaagtggataactcgtgaaacccatttatagactaaaataagttgcgaacctacttattnntaacctatagtgggtgtgcagctgacccacttac

SEQ ID NO: 40883 - DNA, 415 bp, Oryza sativa
  unsure (1)..(415): unsure at all n locations
ctgcagctggcgcctataagtatggtgagtggagataagtgtangcatacatcatgacagattgaaataaacagtatcgatctatgaggtgtaaagtattttgtaggaaattgattacggagagaatagttacctgatttagagggatgctgtcatggctttaattcatgctatttggtccaattcggcagtcagtcaggattttctttttcatgattcttaaacaatggagccagaacagatcctccttatgtgaaatatgcaggtggtaatggaggaagaggtggtgatgtcattcttgagtgttcaaggtcagtctgggatttcagtggtttgcaacatcacatggtatatgtttaaaaccatcgtagtgtccgtttcgtccagagatgcatatactttttctgcacttact

SEQ ID NO: 40884 - DNA, 472 bp, Oryza sativa
  unsure (1)..(472): unsure at all n locations
agctntgcggtagtcaagtggtccctaatcatgcgccgtgcttgtcgcttaaggtgatcaaattgggaaaggaagaatcacttctgtgcttatctcggagctggaacagattangacaggatcaggatggggtgaaaaaaagatttaaaaaaagattacgactgaagtgcacgttgccatcgattccgctggcatttgcagcatgtttgtgcagtataattaggaagaataatttgatatctaatctgggcatgttccaaacagcttatggatatatggatcattcgagcntaaatgttnttttttacaaacgtataatttctcacaaaaattctgtatcacataacttttctatgatatttgttagctggtatgtaatttttaagtcatccatatgagcaattntccttttgaccataattatccaatcattccattagaatggcgttgactaaatatatatccgaaatcg

SEQ ID NO: 40885 - DNA, 466 bp, Oryza sativa
  unsure (1)..(466): unsure at all n locations
gcaagcttctcgggtttttggtctctgnccgatgtatctatgccaaccccgagaagatacgagctatagagcggatgcgcccccccagcaagcttatggatatgcaatgcgtcaccggttgcatggccgccctaagtcggttcatatcgaggctgggagagaaggcgctacccttatttaagctcctcaaacgctccgggcccgttacttggacggaggaagctgaacgtgccctcactcagttgaaggcgtatctcagctctcccccagttctggtcgccccggagccaaatgaacccttgctactctacttagcggcgaccccgcaagtggttagtgcggcgttggttgtggagcgcgatgaggacaatccttattccgcgcacccccaccctgtgctggcttggcccangagagagcanggaggagaggcccccgagccgaacggtggcccaaggcccccgac

SEQ ID NO: 40886 - DNA, 466 bp, Oryza sativa
  unsure (1)..(466): unsure at all n locations
gcttaagctaatggcatatgtgagggggactattaagatgtggcccttctcttctctttagagaaaaggcacaatcagccttgctaatatatatatatatataaacctccaagggaagagaggagctttcaggaccacaccttcaattttgtgagtgtgtgtgttcactgttcatagctactaactttctgtgagccccatactagctctctctctctctctctctttctctctatggcctttcaccttcagagagtatccctgataagaaaaaagtgtacatattattggtgtgttttttgtatgcatttccttggtgttatatgcaagcatgacttcacagttagggtcacacatagcacaagcacttgnngtggaatttaggggtcctgttgatttgattaggatcactctagcttagcatagctagggtccttttgttgatggtgtgtgttggtgtgacttg

SEQ ID NO: 40887 - DNA, 449 bp, Oryza sativa
  unsure (1)..(449): unsure at all n locations
tgcagctggcttctcttatgaacaagctgtctattggtttggattgtagcctcgatgttcttgtgttccccgagatcggcttacctctgcctggctttctccagtttgaattgatgctgctcgangtaaacaagctgagtaaaagcatctactaattcctccggaagagagctttgatatctgaaatcttgcccgatcgagccacagttggtcaccangttatctagtgatgctcctagccgatgggagatgtcttcgagtgttttcttcacatcatcagacaggagagctgttgctttactggtggggtcttcttctgttcatcgaggaatctttgatgtcaaggagaatagatcggctaagacctgcaagagacatatcatggatgaataaggatcangatatgnatggccgatctcaagttatgttaataaaactactggatagta

SEQ ID NO: 40888 - DNA, 456 bp, Oryza sativa
  unsure (1)..(456): unsure at all n locations
agcttaacagcttgcaaccaggtggtgagtccaccagntggtctattcgaggaagaggaaagtgatccttggggcacgccttgttgaggttggtgaagtcgacgcacatcctccacttctcgttggcctttcgcaccatgactgggttggctagccactctggatggagtacctctctgatgaaaccagccttaagaagtttatcgagctcttctcgtatggcctgtttccgatctgatgtaaatctccgcagtttttgctttactggcttggcatcgggtcgcaccatacgtttgtgctcaatgacctccctggggacccccggcatgtcggacagctgccaagcgaatacgtccacattgtcgcggaggaaggtgatgagcgcgagttcctatttctcgttcagtgatgccccgatcttgaccgtcttgtcggggttgacactggagagtggga

SEQ ID NO: 40889 - DNA, 448 bp, Oryza sativa
  unsure (1)..(448): unsure at all n locations
agcttctttaatcatgagacagtgtttctatattttatcatgaaacagtggaacatattntatcctatattntattagtcgcgtgtgtgcaaatgaattcctgatcatgaccctagacagagaacatatgtgtatatgtgccacagaaatttacacgatggaaactaagtactccacatccccaaatcaccttgagagatggccgcacgtatcatatcatgctgaaaagattggccgtggagatgagagagttggtggcgagtccgatgaacgcgatgaaggaaaaccacaccgcgctgttgatcttcttgttgaacggatccttgccgaagctcgacatccacagatccgtgcgggacgctgccgccgactaggccgacatgangagatacgccaacacctgcagcgagaccaggaagatcagatggtcagacaccgganacacctc

SEQ ID NO: 40890 - DNA, 244 bp, Oryza sativa
acacttccttttcctcgaatagatcaatgggggactcatagccgctggattgtgagcttctgaccttgcttggctaccccaaatacatgggaagagacgagagaaacaacatatcacccgtcgggtatctgtacgtagatgcattcgataataccgcagaacacttccagacatgcccggcgactacgacactcaaaacatgcaggctactcacacatgtgcagacaaacaggactatgatgac

SEQ ID NO: 40891 - DNA, 443 bp, Oryza sativa
  unsure (1)..(443): unsure at all n locations
gatccttaagcaccgcggctgcagcttggcaaccagacgcgctatgatttatggtatggccaacagcccgctgtgcatttcctgcgcactttcgggtgcgtggggcacgtcaagatcaccaagcccgggctgaagaaactcgatgaccggagtgcgccaatggtgcttctcggctacgagcaaggctcgaaggcctaccggctctatgatccagtcagcgagcgcgtccatgtgtccagggacgtggtgtttgatgaagacgccgcctgggactggtgaccagtgacgcccgatggtgctccccagctcgagccgttcaccgtcgaacaggtggtgacgaccaccatncggacggcacctgcttcttcgcttactccgccttcgncacaatcgcggttccgtcagcccccacgacgccggcacctccgtcgccttcgtcgccg

SEQ ID NO: 40892 - DNA, 424 bp, Oryza sativa
  unsure (1)..(424): unsure at all n locations
agcttctcttactgatcagcaaactcccatggatcttaatatttatctttctgctgctaacagtgagcctcctatatataactactaggcaaggtgtaatagtactttcaataaaaaaaatcctgaggacctcacatgttactattatctggttgggaggtcttgttatttgggtgtcactcgtcctgacattttcatgtccagttcttattttgagtcattttgtttttcctcacactcacctccactataaccatcttctttgtgttctgtgttatcttcgcgggactatctctcattgtctttgctttcctcgctctacctctttatagtttcaggcttatttctgatgctactgngctagcgattcctatgatcgtcgntctctgtcagcttactatgtttttctttgtgtatctctcat

SEQ ID NO: 40893 - DNA, 394 bp, Oryza sativa
  unsure (1)..(394): unsure at all n locations
gatctctctcatggatttagtggctgctggatggcggnccgtggtacggttctacagtggtgggattcttgtttgattttctacattgcttgctctcctcagctcggcttgattccaaccttgccagggctttattttttttgcatcgctcatcctcattggtacaggtttaatatataaaactggatatttccttataggtgacggtagtggaaccgacaccaattaatttggggcgttagtgatccctacttggtgtcaatgcccgntatccctctataccatgttctatagtagcgatgtttattagatgagacgatactactacataaaccctcatgagggaatgttcatatatatgtgccggtttttttttaaccgacacctgtctact

SEQ ID NO: 40894 - DNA, 352 bp, Oryza sativa
  unsure (1)..(352): unsure at all n locations
agctggactggttgggaaagcttttgattctgagagaagatacaactgctacaaagctccctcaaacatacgcatagtatatgctacgccatgtggtgcgtggctcgtggcgggaggaaggttttaaggtccatttagtacatctgctattttaaagttggaggaaaagaatgtcgctttatgtttatatgtaatttttaggagtagaatacccgagttgtataactccagctctacgggataagtgaaaactntactaaacaggtcctaaatcagactcaagtagccgttctgatattctttttctgcaccggacacttgcgtgtggtagaatggattatggatccatggg

SEQ ID NO: 40895 - DNA, 412 bp, Oryza sativa
ctgagctggttgtcattgagatacattttccttaacgacgagaggttgccgagtgacggtgggatgatcccagtgaagttgttcttccctagtgacatgatcttgatcctcgacaatccgtcaagccaatcagggatctcacgattgacgttgttcaggtcaagttttatgctcacgaggcgagcgcagttcctcaagccatgtgtgatcccaccttggagcgaattgtttgacatgtagagtgtcgataaccatggcagctgcccaattgtcgaatgcatttcaccttggagtgaattgttgacaggtcgagatatttcattcgcgacaatctgccaattgttggagggatttcaccgtgcagcagattgtatctgacgtctagagttctgacgcatgtgagtgctccaat

SEQ ID NO: 40896 - DNA, 397 bp, Oryza sativa
  unsure (1)..(397): unsure at all n locations
ctatgctcaaaccaacaaaaacctaaacaagagaccaagaaaaagaccctatttagactaaataatagtgccattaaatagatctcaatttatggaaatactggaagtggaacagggtcaatcggacgaatggatcgagagatacgaattttggaagtttaattagaatttctggcgaaggaagatatttgtggaacaaggggggattgattcatgagatttatagaaataatattctcaagaatattattgaccgtctctgacgtgcgggaccaaaggaaatgatttataaggaaaatgattcatgannatttggaatagagaattgtttatacgacaaggggaaaaagattattacccacgcataagataaatgattactgaattatagaaagag

SEQ ID NO: 40897 - DNA, 407 bp, Oryza sativa
  unsure (1)..(407): unsure at all n locations
tggggagatacagcaaaggaggagatattctatctgctaattgccctcgaggtgcctcgtctacttggatcatcaaaggaagagaggtactgagaatgggactgatccgtangatcggagatggtcgtaccactgaaatatggcatgatcagtggatagatggactactgaacaatgaagccgntagggagaatgactgatgatccagttcagttagttgccgatctcatgttgcagaatacaaaccaatgggatgtggagaaggtgcagcggattttctttccgttggatgcggctgctattctgaacatgccaaggccgagaacagagcaagatgatnttngggcttgggcatgggacagaacgggcatatntacngtgagatctgcgtacagggaactcattca

SEQ ID NO: 40898 - DNA, 455 bp, Oryza sativa
  unsure (1)..(455): unsure at all n locations
actgtactagatgacacctcttatgtttctagctaggggaagttataatggtaaataagcaagaatgaaccaatgactctgtatggtaggcaccaatatataaacgcagaacatgcgaccacgatgatcgggttaattagctcttcttgatggtgtggcctcgtgcatgggatgagctgataggtagtatatggtagggcttaggtggtagaaaaataaaaaatagttatccaaagaatagaaacaataaataggaagcttaatggccacatcatgccacaggcaaaaagatgaatgaaataaaattgtgcacaatcatcttactacagtttaaactcatgaatganataaaattgtgcacaatcatcttactaaaattgtgcacatcatgccttatttattctagttgtctacccatccatttcacaggttattatntattacaaatactataa

SEQ ID NO: 40899 - DNA, 413 bp, Oryza sativa
gaactcttccgaagacttccggactcctgactcctattctaattctattccactagctagatactactaaactaaacttgagaggaatgagagagctcttgcttgaggtgtgtgttgaagtgaagagagtgagctccttatataaaggtaggtatgacggttgtggaaggggaattgtccaaagtgccctccaaccgtcattaggatgcaatcctggacgtccacgccaaaacctggatccaacggcgccaggattggttcggcgaaccaccaagttcggccgaacttggggccggcccaatccagcccaacttcggctggtggcctcctctattgctccactctgcagaacttgtgaatttggcccaattcatcgtgtaattttgagttcttgcccattcatacataagtct

SEQ ID NO: 40900 - DNA, 480 bp, Oryza sativa
ggatcttaagcacctgagctgcagcttaaatccatcaagcggatttttaagtgttaatatttatgaccaaaaggagtatatcacaacatgagttaagttgtcacattttcatactctaatctttgacaaatactacttgaattgttgcaatgttttttctttgagtaaattacgctcatgatatatgaacttgtgtgattggtgcaaatagatataacaacttgtaaattgctcactttgatataataatttggctagttggtgcgaaccaggtctaaatgatccacacaaataaaatttatctaaattagcacacactaataacgtagcagcatacacgtatgattatgatttggatatcttatttcgaatccaaataaaaggataaattagatgtgcaaaagttttattttcatgtccaggatagagtatttatttcatttcttgagaaaaattgatcatctatatagctcgtctaat

SEQ ID NO: 40901 - DNA, 423 bp, Oryza sativa
  unsure (1)..(423): unsure at all n locations
aagcacgagctcagctgaatggcggacagatttttgtgttgttgtaaggagtttgataaccaacatacgcacgaacttgcaaatcctgaccatgttgcttttttaggagttcatcatgtgatgagtgattttaagaaagcccaagcggtcgagcttcgcatgagtggccttacgccctttcaaatcatggaggttatggagaataaccatgatgagttagatgaggttggttntgtgatgaaggacctttataatttctttacacggtacgagatgaagaatatcaagggtcatgatgctgaagatgtgttgaaatatcgggcgtcttaggaatgtgttttgggcagattctgaatcacgtttagactatngctgctttggtggtgttgttattttcgatagcacttaccatgtgaacaagta

SEQ ID NO: 40902 - DNA, 437 bp, Oryza sativa
  unsure (1)..(437): unsure at all n locations
agcttgaatgaactagagagcaaagttttttattgtataaaangcgcngaaataggggggagttccctctcccggtcggntggcttaagtagtgcacccacaacggtcaaaaccgacctgtggggcccactagccattgcctcaaagagggagggagccgaccgttgcctggccggttcggctgaaccagggtgttcggctgaacccctggtgggcccaaccggccccactttcgactgttggattccaactgtcagtgtggtcgtggcacagtgaatcttcgttggaaattttattttggtttgctctgaaaagttcatttgaagaatttcctcacaattcaaaaatcctaaatgcaactttgaaattcaaacatgcgatgatgcaaaaattcaaattgttgaaagcaaaaatgcagggacataccaatttacctg

SEQ ID NO: 40903 - DNA, 255 bp, Oryza sativa
cgccctgtgcgcctctgcgggcgccaacctcagcacgtcttctcgcccaccgtatgtggacaccttcccgcgccttgcgcagattacggacgcctgtcggggaaaatgactttcccttcctcgcgtgacagtgagaggccgtccaccgcccccgagggagattgagctttccgccgatggtgatgggcctcgacagaggctgtggctcatcaccatctacgaccttgaggcgacctagctccttctagatcgaca

SEQ ID NO: 40904 - DNA, 356 bp, Oryza sativa
atacatatatgtacacctcaccagcaacacctttcaatccgtctgcaacacacaattttggtggctccatcctcccgtcctctacaataagaggtctgcggcaatttggacgagtcatccttgcaataagaggtctgcggcaccagcccaatagctgacgcccgatccattaattaagggaaatactttctccttccgtcctaaaatataagaatctaggattgaatatgatgtttcatagtacaacgcatctggatagacttcctgtcatgatacattataataggaaacatctcattcaatcgtaggttattatatttgagacggaggaagtacataggacatagccactggaa

SEQ ID NO: 40905 - DNA, 371 bp, Oryza sativa
  unsure (1)..(371): unsure at all n locations
tttttattttatttagatatggttattttgagacagatggagcaaagaattttttgaggttttttttcttgagttttcttgtttcagccttcctaccctttttgcaaccttgtgtgatataaataagggattcaaccagcttggaaaattttcttgtacacggaaattgtattccagtcaaaatccgtttatcaagcatgtgggactatctgaatttttgaaccaatcttcgtatcagtctccactgcatgtttgtattcgtgaaacttctccatttgatgcgcctcctccaaagcatcacttcaatctctgaaatttccataacanagttgagaggtttcaaaattcaggttgaaaagtgaaaactagac

SEQ ID NO: 40906 - DNA, 393 bp, Oryza sativa
  unsure (1)..(393): unsure at all n locations
gtgggtgggtgatctgtgccttgattaaataaagtacgcatgtgctgaatctctgggattaagagaagagtttcacgatggaccaaatattcagattcagaagataaaagacaccgtcattaagtagttggattaattactcagtacagtatttaataaccgaccggttacagacggcaagcaccagaaccctgaacacaagggaagaaaagctgcaaaactgtataccccaggcagcaatgacctgccatggatgcaaccatgcaatgctgatgatatatatgccattactgctcaaggtgtggtgagcctaattgttaggccatctgcatgatggatgatagtgggtttatggcaattattcgagggcattatgaataaatngaatgttac

SEQ ID NO: 40907 - DNA, 203 bp, Oryza sativa
ttctataggttttaggaatacccattttatgcctaaaaagtctcatacatcgtttctgatcacctattggatttttcatgacagatgccgctcctttcctaaaaatctgcaatggattcatacaaaggaatctcagttgttttacaagtgaattgataaaggccgcctcaattgttttggcacaaatataccatacataacct

SEQ ID NO: 40908 - DNA, 413 bp, Oryza sativa
  unsure (1)..(413): unsure at all n locations
tgatgccagcaggatgaccggttgactaatatattgtctatttcacaagaaaaaacttattacctacatctttctgtatatcatccatncccccaccccaacccaccccaaccacacataacataccccctgcatacgcacactcacccctcgtctcgctctctcagtctcgggtaatggctattatgcacgatatgtgtggctgctaaacatctagattaaatgtggttgctaaaaattattacaaccacaaaaatatggtcattatatgccattgaacgttccatcgctaaaagtattaaccacttcgaataaattcatgtcacgaattctttaacgaatcccactgtaatggcccctatctattctcagcgatgggcccaactcaattcatgggtattaatctgaatatc

SEQ ID NO: 40909 - DNA, 443 bp, Oryza sativa
  unsure (1)..(443): unsure at all n locations
cgcttgaataatgaagagcctgaacggctgttgttcttgctctagtantggttctttggctgatatttttttcattattgagattgtgaacgtatgcatcctgacatcttgaattgttgatgtggtgcagtaagtgataaaaaactgaggcatttattcagaaagtattcactgcgttttatggctttatatcttataccttccaaattccaatggcggcttcaaacagcagatggtttcagcaatagtcttgcctggatttggagcagtggtaattctgttatgtgggggggcacttgaatgttgaaacttcaagccttgtttcttttatgttctgaaggcttcaagccatgttagtgtatcggcatatctgttagtgaatcagaagtggttccgtactcactaattttacaacatgaaccagagggtcagcacgtgctgtg

SEQ ID NO: 40910 - DNA, 452 bp, Oryza sativa
  unsure (1)..(452): unsure at all n locations
ttacacaaaatctacagctcatctttttattctattttatgccctttcagagaaggtagctgaagggtcactggtttacaaacaatgtacatgctantagtataggccaatggatgtagtcgatgcggtaatattgcaactccgacccctgctggggcatgcccaactcaatctattggtatttggatgaatatccaagatttatttttttacaaaaaatatatatatggtatgtaatgcgtatgtgtatgaaaaaaggttgtatttaacctaagagcccatattcatattcagtacataatacgtatgctatatattccattaatactatgtgattctatacatgccaaatactaggggttntacctataaatatttatntttaccctattatatntcgtcaaagaatcctaggcccacccttggctcgaccttatacttagtatgggcct

SEQ ID NO: 40911 - DNA, 333 bp, Oryza sativa
agcttcttagtgttttggggatgtggttttttggtctcttatcacaagggcggcgaggcggaggagcgcccggaccatcggaattcgaggcgggtgagtgacgattgctgttttgtctgggagaacattaatccagaccggaattcggttttagttaatcttcttctggtagtttgcagttagtgttatggtagtaggggcgtagttaaggcccgtttggcacagctctggctcccaagtccaacttatttggagctggagctgttccaagcggtccaaatcctttgtttttcggagcggagttagcagagctactccacaaatttgtactac

SEQ ID NO: 40912 - DNA, 395 bp, Oryza sativa
  unsure (1)..(395): unsure at all n locations
acagactttatagttgcagaagaagaaaactgctgtgaagaacatatcaacagcaacactcaaaccggctccacaagtaagatattttaattcttttattagttgatctcaacccgatttgtctaacacttgtctcttttacagtctcctnctcctccttctccttatgtacaacaatcatcaagtgaccgaactccatcggctgtggggagtgttaacgaccaaatttggtaatatcagtatcggaaagggaggatggatcgaagcggagtcagaggcgaagatcgattcaagaacagagcatgaatcggctgagtccggatccgccacagatgagatcggctaagtcagagtcagactatggtaagtgatacggtcgattacgacaatatgac

SEQ ID NO: 40913 - DNA, 417 bp, Oryza sativa
  unsure (1)..(417): unsure at all n locations
caagctgccatacggccatacctgatttatatacactctctgccctacgttgntntactagtatcagntttttttagaaaatggattaatacccgacctctacatctaaactagtatcagttagccacttagccagcggtcagaggacgaagaactattcagagtcctacattgtacgttcagttcctttcagaaanaaagaaaggagagaagagagtactacgttgagaaaaatagtataggagacaccagtctcaaagctntattaaaagggaagggtggtacgtgtgtctctaactatcaactagtgcatttccatggccctttggatgcatgngctgtgtggttaaacctcaaagcgagcttggtccgaagcatttggctttgtcctgacgatgacgacatgacaggacacac

SEQ ID NO: 40914 - DNA, 303 bp, Oryza sativa
gtctattcgagccgagctcgcttacacagccaatttaaactactacttccttcggtccaaaatataaaaaggtttgaatggatgagacgtattttaatactaccaatttagatagactatgtatttattaaaactccttatattttttggattataagacgaagggggtacgagcttaaagctcttcttctcgccccttgttggtaaaccgaccaccacgggatcgacgtctcgctacgctgtggcgctgcgtgcgccagcgccggtgcaaagcgtgccataccgtacctgatcgcaaccagt

SEQ ID NO: 40915 - DNA, 228 bp, Oryza sativa
atttgggagaagaagatgaggtacagtccacgacgactcaaatgcaagaaggggaggatgatgatgacatccctttcaacgatacaaccacgcctattgcacagcaaggaccaatgactaaagctcgagctcgcgaacttaattatcacgtaaagtcattcctagctaatcatacaagttcttctcagaattgggtgctactaaatggatgttgtgactaactgctgt

SEQ ID NO: 40916 - DNA, 291 bp, Oryza sativa
  unsure (1)..(291): unsure at all n locations
cttgattcaaaacttggagtcttggaagccgtggatccagttgctccatgaccgaacgaagagagccgagcgaccgccgacgaaggctattgagactacnaggcacanggggagtgggatggttggactcggccgcggcgtggggactatagcgggccctaaggcgtggggttgccgccgcggaagggacggagagtttttttttttgttttaccgaaaggatcagagagtcggcttgattggatgcactggatgggtgcttgtaggttgatgaatggcttggcttttctt

SEQ ID NO: 40917 - DNA, 383 bp, Oryza sativa
  unsure (1)..(383): unsure at all n locations
gaaatgcatgagagctgctggttgtgctaatgctctgttccttttggtgttctttatatatgcttctttgagatattttcatgtctttctctcggaaggaagccctgaatactatgttattcttgattgtggaagcactgggacaagagtgtatgtttacgaatggtctgttaaccatgacgatggacacacatttcctattgctntgaaacccttaggaaatgctcctaagaaaaaatctggtaaattaactgggcgagcctatcagcgaatggagactgaacctgtgttgaacaaacttgttcacaatgaaactggattaaagatgaacatagagcccctccttcgatggctgagaagtgattctagacgtcacacaaaca

SEQ ID NO: 40918 - DNA, 432 bp, Oryza sativa
gtggcgaactggacatggcaaaacccgccttcttcgagctgggctgccaggcgaactggtcatggcgaagcccgccttcttcgggaggtactcacgcgacgcttcgcctcgcattatccttggatcatagccctcgccacgggtttcggcagatttgggaagagggcctaatgccatccgccaacatagtggcagtagatacagggagatcaaatgttttaagatggtacaaataatcggcatttgttattggatctaccccttgtatagggatgattgcaccggcctaaccggcccaactcccggtctaaccggcgtccagaggcacggtcatactaatctgaggtccagtttgaccagcggtgaagtcgcgatctaaccggccgtctagcctggtcggaccggctgtatgcaccgtccactcctcaccag

SEQ ID NO: 40919 - DNA, 443 bp, Oryza sativa
agcttgctcgccttagcagcgtgtagataattatattcattacttaatgtaaagcatttccattaccttaaagtgcattgcttaatgaaatatctcaagagaacatatccgtaggctagcttatttcagaacttaaaaaattaagcagtattccgttatcactcttcaaggaaaaaattgaatgtatgatcgaatagctagaactaagccaactagaggagattgaatagttgtagtatccaaaaaccgaaattcgatgacgatcgtccgatcggattagatgcaccggtctgatcgctggatgatctcaggtctgaccagtatagtagctccggtttaaaccgccaatggcccaaagtcgtctatcaccggcgtatccccgccggtctaccatgacgatgccgtcggaaggctctttaccatcctacagtaaacgggagcat

SEQ ID NO: 40920 - DNA, 335 bp, Oryza sativa
  unsure (1)..(335): unsure at all n locations
tcagcacaagagcgagctgcttctcagcaccaaccccgtgcacaagaaggtgcccgtgctcatccacaacggcaaagcccatctgcgagtcgcatgtcatcgngcagtacctcgagaggagttcccaactccggcgtctcgctcctcacatctgactcctacgatcgcgccattgctcgtttctgggctgcctacatcaacgacaaggtgatcgtcaaattgcctcggttaatcgatctgaatttgcatcgattgatgtgatgttgtgtgcgtgtgctcgcgtgtgtcctcgttgcagctgatgccgtcgtggctgcagtcgtcgatgggcaaca

SEQ ID NO: 40921 - DNA, 358 bp, Oryza sativa
  unsure (1)..(358): unsure at all n locations
caagaacaccgccggcgaaatccacgagaggaactngaaatacaaggccgatggctgcagctttgctgcaacaccaccacatacagagatcgatcctcgcttgccggcgctctacgaggaggcggaaaggctcgtggggatcgaccgccaaatggaagaaatcatcactaggtttctggttctggagagcacaccgaccaacaagtgcagcatcatttcgattgttggtcagggaggcttangcaagaccactcttgctcgtcaggtgtacctgagaatccggggtgaatacaaatgttcagcttttttgtgcgtctcacaaaggcctaacatgaatagcctcttgagggatatgctc

SEQ ID NO: 40922 - DNA, 381 bp, Oryza sativa
ttaaggatgtgcagtacctcacttgatgtatggccgccctaagtcgatttatatcgaggctgggagagagggtgctgtccctattcaagctcctcaagcactccagaccatttatgtggacgaaggaagctgagcaagctctcaatcagctaaaagcttacctcacctccccccatcttggtagccctggggccagaggaaccgttgctgctctacttggccgcgaccccccatgcgatgagtgccgccctagtagtcaagcgcgaagagagcggaccggaggcccccttgactcgcgatggcccttcgtcccctgaaggcctggtgcccgaagcccccaacccccgggaggacccccgaggaccccgtgggaggagggga

SEQ ID NO: 40923 - DNA, 303 bp, Oryza sativa
  unsure (1)..(303): unsure at all n locations
agcttgcttcctctccccaagaagtttgatggcaccatactctttgncatttatgatgaccctcatagcctagacatattatatcagtgtcaagcaattcattaactgatatcgattcaagtaaagttacatacctgatcccatgttcaatcagactcaacattngatgattcaagcagagctttgaacgcatttttagcttcctataagtcaaaagaaaagtgtacctatatgagcttaaaacttgaaatgcacagtcaattcttaatatgtgcaagtttcccttaccaacttattagcata

SEQ ID NO: 40924 - DNA, 353 bp, Oryza sativa
  unsure (1)..(353): unsure at all n locations
agcttatgctggtgtgtgtacattctgtttttagacaaactaacttctttactaaacttattctaaaaataaactgtacccgacacgttgtttctaactagtaccggtttgtcaaacattataaatagactaaaattacatatgtaatttagggacttataatgtaaatacataccgactattnttttatgaaaaatatggcgccataaatatagctacacccttataaaaaaaaaatcgggtggttcttgtactgagcatatatgtatggctagctcgtgatcttgttaacactgagccactcggatttctctgccaagtgatatatagctaaatccaacgtagtaggagaa

SEQ ID NO: 40925 - DNA, 402 bp, Oryza sativa
  unsure (1)..(402): unsure at all n locations
caatacttggctttaattttagcaatcaaagcattaaacaccaatgttgtcttcaactgtttaggagatttcacaacacacacttccatacatctaagttactaatatatggccacagaatttgtgaattacgggaacttgtcaaatttatttaattntcttatccatctgaggttaaatagaaccaaaaaaacatgaagtttctgactgtcgatgctaatatagtatttatctacctatttatgtcatagttacgacgatgtttacttctattactgaataatgattatcttgattgtcaactgtgatgttgctgatcttcgttgaccgtaggagaaacccagagtatgttaatcagcaatatctagagttactatactaatataagcttanntaatagta

SEQ ID NO: 40926 - DNA, 406 bp, Oryza sativa
  unsure (1)..(406): unsure at all n locations
ggcagaccttagcggcaagggtgttacaaccattattggaggaggtgattctgttgccgctgttgagaaggtgggagttgcaaatgttatgagccacatttcaacgggaggtggtgctagcttggagctgttggaaggaaaggaacttcctggagtcattgcacttgatgaagctgtcactgtggccgtatgaggctaagtttcattttgttgcatcttcttcatgtaccattctaaacttgctatattctactcctttctcgcacctcttcaaccactcgaaatgtaagagaccaatgttttatagagatgctggaaatcgtttgaataacttcccagcattttgtgtttggtggatataccttacctcangaaacatatatatcaataccttacgttgtttccc

SEQ ID NO: 40927 - DNA, 214 bp, Oryza sativa
  unsure (1)..(214): unsure at all n locations
ctgtccgcatccggtcacccgacggcaaaaaagtggtgccacatgaaaagaatccgtcacgtgaagggacatatgtaaactattttccatgaatttcgactgctactagctagtatctctacactagtaaaacataatataagttntttttgattggttaatattnttgtcttanaatataagtatatttgatcagggccatcctagggacgtg

SEQ ID NO: 40928 - DNA, 404 bp, Oryza sativa
tttctgggcggaagttcactataactcgctatatgatgctcgacgcgagaaaaaataaatatttctcatttcttatagtgcgctatcagatttggtgccttgtactgttatacatccctttccctaataagaggaaaatacccattactttgcagatctccctagcaaatacaagcctaggaagaagcactggttattggtttagtaaccacgcgggagctctgctttggacatggattatattgcttggccttttggcccctcctgatagttggagcttggaaccctgaagagtggaatcctctgtggttctcttccttgaagcgctgaatgggtttgccggatgcactcctcaccacagtacatacagcattagttatactataatactgagagaatttgag

SEQ ID NO: 40929 - DNA, 99 bp, Oryza sativa
cgtttcatgggctttggctgacgtctaaagagcgagcttggtgttgctttgctcgctttggcacagcctccaataatggcgtgatcgccgcacagacga

SEQ ID NO: 40930 - DNA, 166 bp, Oryza sativa
  unsure (1)..(166): unsure at all n locations
ttaatatactccttgttggtagatcacgacgaaggntcttaatattatttgttcctcgatgaaaattactcaaagtagtccaaatctcattgagcagtttgaaaatgagccaacacgatcataattccgaacgagaaattaccactcaaatgaatattggcgagct

SEQ ID NO: 40931 - DNA, 387 bp, Oryza sativa
  unsure (1)..(387): unsure at all n locations
taccggggaacatgaagcaccatcttggngttcttactgctnngcaaacngacatatatgcacgactcctgttgtatttggtgctaaagcgacatcatacctgcacacagtgatccaatgagattatggcatatctatacctatactaattaggtactttcaatgagctttcacgttaatcagaaagatctaaccattaattaagaaaatcgtttaatcatatctgttgattttttataaccttcgccattataagcctattactatgttcttctaaaaccatctaaggcctatcttatctcatcggctagatacacaatgcccatcattcacgtangcacatggatgtaatctagcagaatatatcattgggagtgcacacacgat

SEQ ID NO: 40932 - DNA, 336 bp, Oryza sativa
  unsure (1)..(336): unsure at all n locations
aaaaatccttgtcgaaaggcttttctgaccaatgtacgaccggcggcatgtgatccacagatcccttcgtgcatgttgacgaggaggtgtttgccgtcgtccgacgagacgcatttgagaagtaccctgtttggcgccttcttgtatagatcattgccgatcatacagtagattntggcctagcgggttattttcttggcttctgcatcgtcgtcgggcaactcatcgctacttatgaatttaacgagtgcgatccgccagtcgtctgtggtctcgatgtcgggaacggcgcgttctatctctgtagcccccacgctgatgtcgaaggcgactatg

SEQ ID NO: 40933 - DNA, 229 bp, Oryza sativa
acctgcgaatataccacgtcgtcatcattgcttacaacctagatatatgcttgaggtattatcccaattgcacatattaaattaatgcgcttggtatccttaaaatcctagcccttctgctggcggactataattactcgatatacgctaagttgttccctaaccccatagtctgatggctacaccattaggtgcatctacagcgtgccaccgacttatttcaatcctt

SEQ ID NO: 40934 - DNA, 388 bp, Oryza sativa
  unsure (1)..(388): unsure at all n locations
agctntggaagctgacttaagctcttnatgctcttttngcatgtgtaaacagtaagcgcaatcatgtgactgcatgcactccaaatcccggcacattcttgccttcttggtgctctctggtcacgatttgacaaacacataagtgtggttgcttattgttcttggatgaggaaggtaagattactctagtaatagtactagtactaccatcaatactattatgttaccccgttccaagctgcagctagcgacctaatcatatttttaattttaacagaanagctcaacaactccaccaccagccactgactagtgggagcagtggtatgctgtgtacaaaagtngcgttacaagggtgaatctacctgcaggtgtcacgtacgtttct

SEQ ID NO: 40935 - DNA, 386 bp, Oryza sativa
  unsure (1)..(386): unsure at all n locations
ctgcagcttacaagcgaggtggttcttcttanatgcgcgaagatgacatcctcacataggcgctcggaaccaaagaacattctggccgaactatgggaattggtagcgatgtgccctggaagcatggactcccgcagtacagcttccaatacaggaaacggaaagtctccaaggaagagagggacactcggttgaaggccgaacttaagggtgaggtcattcaagaactagaagctagcatgaacgctagggtggaagaaagggttaagaaggtcctatccgacatgaatataccccgaggcacaacacctgctgtgcatccaattcctcgtgcacaacacgacgcgagtccgtcacaacatatgagtagttgtgcatncacagag

SEQ ID NO: 40936 - DNA, 202 bp, Oryza sativa
tacgagcacatgaatatcactgtggaaaatcgtgtttgtgtcaaccagaacaacacatgatgtgaggaagttgcctatgcaaaataaccggcatcttctgctgctgtagaacctaagaactaggctgaaaaaagtaccaagctatcggtacaaaatgctaagcaagcaaaacaatcactaattgcccaagagctggcacact

SEQ ID NO: 40937 - DNA, 194 bp, Oryza sativa
  unsure (1)..(194): unsure at all n locations
agcttgtcgtaggggtcttgtgaactgcactgagntgntcaccttctccttctgcttccccttgctccacttctgcaattacgcaccacatccncaacacacagatccaaaaaggacaaaacaagtgagcgtttgagacgaatcgaaacaagcagtaattcacaggggatctggatgaccttcttcttctgctt

SEQ ID NO: 40938 - DNA, 381 bp, Oryza sativa
  unsure (1)..(381): unsure at all n locations
agctntactatggngttgtagcaactccatatttaataataataaagctcactttcctcgcaaggggatataaaattgcctctatgtcctatctatgctactcttgaaattttcttgtgtaagttctttgcaagaaatagggacatacttaatgtcctgattcaataaagtagaagattaagggcattatttttgggttgaatcattatgaggcgttgtcgaaattatggcctttttttactgccacatttataggggagaatatacgtctcattaaggtcgagacacttcacccttagaaatttctgacatctatcattaattagatgataattcgctaagcaaagctaagtgactcaagctcataaggtattatgcttc

SEQ ID NO: 40939 - DNA, 250 bp, Oryza sativa
  unsure (1)..(250): unsure at all n locations
agctntagttgttgaggtcattagctacaatanacgattcttacactngatcaattgaatgccatcggngtcatctgaccccaatgatataactgaagctccgcccctggtcccttgggacattgttgagcggccaccatgccacccttggcaggactctccaagtgaaaacccctgcccctttaggacattgttgagcggccaccatgtcacccttggcaggactctcccagtgacaacctaatccatt

SEQ ID NO: 40940 - DNA, 375 bp, Oryza sativa
  unsure (1)..(375): unsure at all n locations
aagcacctgggctgcagcttaacactgtacatttaaaaaggtatnttactgtcattgncaaatgctgttttaggtgttaaaagagagaatgatggctatggtctagacgcggagtactctattatgcaatccactccttannaatatatataaaaaaagcacgtaccaattttacgcgggaaaatttattactatctgttatctaatcatcatactctatattaaaaatgtaacctattcaataataacggtggatttagattgtaaccgccgagatattgactgatatagttctatacaaactatgtactacgtttcgttcggatctcccgttctaacctactattaatccaccccgcgtgccacttcattctc

SEQ ID NO: 40941 - DNA, 184 bp, Oryza sativa
  unsure (1)..(184): unsure at all n locations
agcttcgccgaanagagaaaccgtgacaaccaacttttctctctccgtctcagttgacaaatcataaaccaaaaactaaaaataaaaatgtttttcgagtttttttttttttgccgattcaacaagagagcccacccttttttccccatttcggataaggctcacctcgccgttctatggtggg

SEQ ID NO: 40942 - DNA, 452 bp, Oryza sativa
acgtgtatcatcagaagtgacaaaatcttgtttttctattttgttatgtctttctccaagtcgatgcacatacctggtgagccaatgagttatgagtttcatggacattgcatggttaaattgtggttgctgagataaacttgagatgtgtctcaagataatctgtgtcttgctgtgcacactataattatactgtttttctgtgcttaaaagaaattctctttacttctgaacttaattaatacgtgcattattatcaagatgtgtatcagtgctccataacagtttaaataatatatacacatgaacacaatactatgtaagctatgtgatcatgcagcaaatttaagatgtaactgttttttccttgaaaacacacgtgtgttgtgcttcatcgcattatgaagaatgaaaacaaatattaaatgagggatcaacactgatccacctct

SEQ ID NO: 40943 - DNA, 438 bp, Oryza sativa
  unsure (1)..(438): unsure at all n locations
gctgcgcatttttgtttttggttgtataccgcgaggngcgaacagtgagagtgggcatacgtgagaacccgcgcgaaacagtgaagttctgtcggagaaacacggcctcccccgggcaacgccttctccgctgcagagtccagcccaaacagcgatgaattaatcacacgaaaccaaacacgacaatgagctcgcgtgaggccggtgaggcggtgacacgctagtactcaactcaaatatccacaaggatagatgcccactgcccccacggttctcatacattatccaggcagggccctagttcttgttattctgtagcagcaccacaagccgtcaaaaaaagacgataaatacagagcacacctcgctttagcatctcggccgttggcaattacgcagcatcatctggatttgatgggaaccgaagatattcattta

SEQ ID NO: 40944 - DNA, 228 bp, Oryza sativa
cctacaactggcccgcttacccatttgtttgcagtgcacatacgtcagctgtatgatctttaaatatgcatggcatattgaacaggttatacgctagtagagagaactaccataatcttcctaaatttgccataatcaacttttttgggacgtgaactttaaaaatatatgagtggttaagatgaatgcttctataccacggtgtaaacaatatcgctggtaggggaa

SEQ ID NO: 40945 - DNA, 304 bp, Oryza sativa
  unsure (1)..(304): unsure at all n locations
gcactctgttttgtttcgatttgtatatgaactcttcatagaatataaagggcattggagagctgactacgtctatagaacttgaattatttctttgatggaaagaaactcaaacagaaaaacaggatgctctttgttgntccccttggaaaagctngcttatggtaagctaaaatatctatacatttctgctcctgggtcttggtacaatgcttctangttgagtaatgtatctccatcgccccaacatcttgagaaactagttctttctggctgctggttttacaatgtcccaagtggatta

SEQ ID NO: 40946 - DNA, 294 bp, Oryza sativa
  unsure (1)..(294): unsure at all n locations
acaagtccgacttatgagacgctagtttggtaagatggcacattgatgacttaacagntgattcagtcatagcatttggacttaattgctccaaattaattntgctaagtatgttatggtgctctctatttggatgccataaatctccagctcccacaatagttaaagggtggacaaaattttacccctgatgcattcatggacttattttttggtgctatagaaatgagaaaggtcttacgttatcacaaatatttgtgatatcttacaatctgacatgattcagaagtattc

SEQ ID NO: 40947 - DNA, 460 bp, Oryza sativa
  unsure (1)..(460): unsure at all n locations
agcttcttgttctcctttcttcanaatagatcataaacctaaccagtaaggcaataacagacatttaatatcaccttgcagatggactgataacttaattatttcagaaacacaaacagatctataccgtccccgcaaaaaaaaaaaaaaaaaagatctataccgaatcttcaacagtgcagaaaattgctgaagaaccagttcaaactagatcattccaacaaggctgtgtttagttcagcgcaaagtttggattttgattgaaattggagatgatgtgactgaaaagttgtgtgtgtataacaggttgatgtgatggaaaatgactgaagtttggatccaaactttggatctaaacacagcccaagtgagatgctattccagggataatgggtaagttaaaaggccatgtcactatgttagagtgctacatagcgaacaattgcttcactactaccac

SEQ ID NO: 40948 - DNA, 467 bp, Oryza sativa
  unsure (1)..(467): unsure at all n locations
accttaaaactcangctggatagcaaagagaaacatttgttgataagatttacaacaacaagcccaactacaacaagtcgaatggttctaaccaagggaggaagatggagaatcttatgaaggcttttcaacaagtttgcgccgccttcgagccactaagtgatgtagatggtgaaagtggagatgaagataagggaaaaaagtctccgatgtttgcttcatggcgtgtggtgaatctgacacagagtatgaagataatgagggtgagtgctttgacgaagctattaatattttgagtgcaaataataaaaagtgtgagaagatgtataaaatataggaatttatcattgaatctcttaagtctgaaattgataggttaaaatctcttattcctaatgatgatgattgtgataatcgtgagggtttaatgaatgagatttcaaaaatagagatgttatgctgcacaa

SEQ ID NO: 40949 - DNA, 306 bp, Oryza sativa
  unsure (1)..(306): unsure at all n locations
agcttctcgggttnttggtctctgcccgatgcattgaggtcaaccccgagaagatacgagctatagagcggatccgcccccccagcaaacttagggatgtgcagtgcgtcactggttgcatggccgccctaagtcgtttcatatcaaggctgggagagaaggcgcttcccttgtttaagctcctcaagcgctcggggccgttcacttggacggaggaagctgaacatgcccttactaagttaaaggcatatctcagctctaaaccctaaaccctaaaccctaaacgctaatcccagtcctcgaaaa

SEQ ID NO: 40950 - DNA, 364 bp, Oryza sativa
  unsure (1)..(364): unsure at all n locations
tctaccgaacgcttgtcgaaaatgttcggaagctcaaagtgatcagataggtgttttagcttctgaagacactgagctctagcatccttcatctctgttctcacactatcttgcacatatgtcacgaaattctgatgccttgatgccttccattgcagagcagaaatcagcacgagttttgtcgaaacatgatttcggcaataataaaagggggttgcgcacgagacctaatagcggatggatgcggagacaaaagatttagagaggttcatgccctctcaatgagaggtaataccctactcctgtntggtgatttgaatccgccgagcgtgtattgatctgacgatctagttgtgtcatcatg

SEQ ID NO: 40951 - DNA, 261 bp, Oryza sativa
  unsure (1)..(261): unsure at all n locations
tatgcatccttcacttcacgaaccttgtctttgtaccaatcaaccatctctttaaatttacccttgctaagggaagtatcagactcatcatgtccacgaanagcatcaccttgttcaatgagaaaccttacaacatctaaagaagatgtcaacagaatcttggatctaatttcttcctccttgctaacaatctcaatttctttagatacacttgtctctctggtcataaagncttcacatctattcctatcatcatcgcga

SEQ ID NO: 40952 - DNA, 320 bp, Oryza sativa
  unsure (1)..(320): unsure at all n locations
tcgatttgctacgtcgaccgtgccatcatttcgtttngctcctgtagggcacactagtcgctggttacgtggggccacatgccagtcaccttcccagcagtatccatccatggggctattttgcctttttaagttttgaacgacgaaagttttcaaactatttcatttaatcatttcatctcatgcgatcgatgcattaacatatagggtggtccagctagcgaattctctgagctcgtcactctctgtcctcaccggataatatattatcgcttattcatattcgtacgagccacacaagtcaccatgctacgtatcgt

SEQ ID NO: 40953 - DNA, 430 bp, Oryza sativa
  unsure (1)..(430): unsure at all n locations
agcttgagctcacctgtgtctgattcctttttaagggctcgggaatgtgccgctcaaccttgacctcgcctgcgccaagctgccggagagtgaggcgtanttcgttctgctccagtagagagaaggaagaaaggaaaaatgacaggtggtcctaggttgactggattgcctcctaagaaaaaaccagagcggtttggatgaggggtataaattgcatggttttaagagatgaggggcgtctaatacccgattntaaagttaagggtgtattttagataaatataatagttgaggggtgtaaaatggacttatcccgatntgaacggactattataccatggattgtctacaaattaattattnttataaatagaattttcagacatagcttataacaaatgctctatatagtgcagtaaaataatgattt

SEQ ID NO: 40954 - DNA, 305 bp, Oryza sativa
  unsure (1)..(305): unsure at all n locations
atattcttttcaatacaagagaagggttgataatattgttgctgatgacttatctanaatgcacttctcctctcaatattgtgctctttctgtggtccaaccgatcctgattcacgaggtgatcaattcttatacagtggatcctcaagctcagcagctactagctgagttggctgtgcattctcctaattctcaagggtattcattgacacaagggattattagattccagaataagaattgtgatggatccaatgcatgactgcatactaagttgattcaagctcttcatgcttctgcacttg

SEQ ID NO: 40955 - DNA, 469 bp, Oryza sativa
agcttgcataatgattatgcaacatttgttaccatgacatcaatggacttccaaaatatgtatattgtgattcccaattcatgaagcatattataaaacaaaggattaaatatccatatgtaaagggagttaaattcccaactaagaagaaattgtgttgtcaattcattgctaagttaatgggttgaactggaatcatctggataaatgcctggtatcaatggactagctgtggatgcgggaatatcttttcaattctcatagttcatgctccaacaatgactggtggggataactgtcatggttattatgtcagtgatgatggttcataaccttttactagtttcatgaactggataggattgctgatttgctgccagcatatgttcatcagttcatataccagacatcctatatggaagttattgtgccaatcctattctcatctagacttttcatgaatactgat

SEQ ID NO: 40956 - DNA, 439 bp, Oryza sativa
tcgcgacattgtgttaagccaagtcatggacgcgtcgtctgtcgacgactatagtagcgccagattggagaagtctgtatcagagtatcagtaaaggacactttaacctttagtttcatcacgtcatattaatttctttttttgttaggtacgatatattctgtgttggttaagtacttcagttgaatctctctttggttattggaacatcgcgttaatctttttggttaagtatatacacttcagattaagctctactttcaactactaccaccatataagagtttcggtaggtgtaaacatatatgctctgtttgttgattcagagttgtttgttgtggttctgaaagtccgaacgcaccacaaaattggcattattgggatgcataattcttgttcgatcactccaaaattttttgccattccattgcatagcaca

SEQ ID NO: 40957 - DNA, 268 bp, Oryza sativa
  unsure (1)..(268): unsure at all n locations
accaaagagtagctcttgcatgatggcagtccaaccagcctggttttctggaaattntcttcgngactgcatggcatatctggaaacagcgtaatggactcatcttcagaaattttcagccttccttccattcttggaaatctctcttcacaaatgagattcttctgcatctttgcagaatgaaagatccactgaagcaatttgtttctaagtggttacaaactttatatgatcttttcatttctttcgcctgtccgtgtcaatgtac

SEQ ID NO: 40958 - DNA, 427 bp, Oryza sativa
  unsure (1)..(427): unsure at all n locations
gtggattattcctgtcaatgtatatttctctctcanaattgttcaaggtataggattagtgttacaaatgccaacactgtgacatgaaaaatactcatctcaaatggaagtcaatcatatcacttgatctttgatcattaacatgatcatgattacttcttcttatggctttatggtaaatgccaagtagtaagaagaaaaatgaataaagttacattacatgtatgatatttgggactatatgggccagaatcaattaatctctatgcaattcaatgttagctctgtatatccgaggcgatattatttttgcagagaagagatgttcagatcaatatcgctgatgttgactccattgtaagcgaattgtgcatacatccacgtgtcatcagagcttatcaactgcacatgatagtttgcaacaaag

SEQ ID NO: 40959 - DNA, 433 bp, Oryza sativa
  unsure (1)..(433): unsure at all n locations
gacagccgagccaagctaggtttctagttcgttatgataacaagccgagccgaggtagctcggtatcctaacgagccaaccgagttagctcgttatcctaacgagccagaccgagccgagccgagctagctcgacatccacccctaacgacaacataatatttgctatcatcataacaataattagtcaaaaatacgatcactcgtatcgagtagtaaacatgatccacaataatatagataagctacatgttagcataataaatagtacgtactactgcaatctgcatataagaatggagatgaatntatatacatcattgtcactatcaaagtatcccacagtcaaagtgtaacttcgatatgatcacaagacanaatcatgtcttagtgccggttaacgaactaagaatatntcagtagctctaaatcat

SEQ ID NO: 40960 - DNA, 391 bp, Oryza sativa
  unsure (1)..(391): unsure at all n locations
ccgaggctgaagcttaactcatcaactgtccatccattttgtttcgtatntacanaataatatcggctacaatattgaaatcagatttaaaaccagtagtcctcttgttaggttataaaatgtttgactctgacacttgcaactgcttcagtttgaccaaattataaaaaaaatagtatatatttttacgcaagataatttattgaaaaacaaattattataattaataaactaatctggaatgtaatattactatattgctataacgtatcaacttaagcagttgctttacatagtcaaaatttatacctgaacggaggagaacaatatattgataatattttgattcatatattgatcggaaaacaactgaatataattttatgatctg

SEQ ID NO: 40961 - DNA, 347 bp, Oryza sativa
gcattcagaggctctcatattgttgagatgttgccttcatagctatatatattatatgtttttttaccgtccaacactgtacagggtccaactctcaaccgtggataaccggatccaacgactagcggagtatcacgatacccttgatcttttagatggtaccgcataactgaaaaaagggagggaagaatatatttcggtggatggatggatgctgatgaatggagaaggtcttactttattggtacatacatattccaacaggtatcggtaggcaattatctgacgcatactgcagggacacgacaccgcgagaccatatgactgcagggtggccttcgcctctt

SEQ ID NO: 40962 - DNA, 192 bp, Oryza sativa
  unsure (1)..(192): unsure at all n locations
acacaanaagagccagcaactagaagatttcaccaagtggaaacaagagtagaataacagatttcaccaaacacaagtgaaaatgtagttcatagtactacacaaatagcacatgtncagactntagaccagaccaaggggacagatctaacatggaaggcctaaagatgggatttactcacaagggaatga

SEQ ID NO: 40963 - DNA, 282 bp, Oryza sativa
  unsure (1)..(282): unsure at all n locations
gacaaaatccatatatataacggctaggggacgtcatctagccgttcttacaagttgaacggaaacctgcatgatgttccggcaaaagtgccaggaactttccggcagcacttaagaaattttttgctttgaaacaacgcccggaagtttcggccagaaccttcgggtagccctctctgtcctgnggagaaaatcatttttcaaaaatgatttcacaaactctttgactcatggatatgacttagagcacttggtataccctacaaccacacttgatacccc

SEQ ID NO: 40964 - DNA, 475 bp, Oryza sativa
  unsure (1)..(475): unsure at all n locations
agcttgagatcgagccccatgattcatcttgncttagcccaatgacttggtgaacccaccgatcacccaccttgtcagaaaccctctatgagattaacatgttggcctataatagttttgggtagaccactataaccataaattttccatatcaataagaactggccgcctgtccgatagacataagtttattactctgaggaggcctagtaccaatacaaaatctttgtttgtctgactagcatcctcctccagggagacaacatgcaaacaagacccaggaaaacaagtttattgtccttagatatttcttgacgacattaagtgcacctggcaagggcattgttttgtattttaagatctcgatggaagatgcctaccatatgtagaatttctgactnggngttttctgacaatntcagcactagagataagaccaacccattgataactcactcatcatatcaatacacat

SEQ ID NO: 40965 - DNA, 192 bp, Oryza sativa
  unsure (1)..(192): unsure at all n locations
tagaaactcaagctncatcaagtcagggccaccgnggtttcgtcaacganggttaccacaacaaccgggaccctgggagatcngacccggccagagaacgccccccaactagctcggaatcgtcatcgccaacacatggagcgatcgagagcagccaaaggccccaggcacgcacccgaccagaagaacaca

SEQ ID NO: 40966 - DNA, 462 bp, Oryza sativa
  unsure (1)..(462): unsure at all n locations
agcttcgaggccggccgtccatgttctttttcnttcgtccattgtcgcaagcccttggtgatgttgttcgtattctcatctgttgctacagctagcgatatatcaaagctcttgcctcttgaacaatatattcgttaacattgggtatttgggtgctgtcagttgatttttgagcacttagtcgaggcgtcttgatacggcgtgttttgccaccagaaatttgttaaatgattttttaataatcattttgggagggtaatacatgccgcttttttaagagaaacatagtacaaacacaatagttcatatacacacgcgtacacttatccatagaaaacatattcgagaaactggaccaatgatatatcttcaaattagtgaagtcaccacanacgcctcgctattaataggtacgtcgcctactaanaaataattagcccgtaatatgaaatcatgtcaagt

SEQ ID NO: 40967 - DNA, 438 bp, Oryza sativa
  unsure (1)..(438): unsure at all n locations
agcttaatatactaagaggcattatgactttgtatatagggcagatttaacatgtcgataaaacatatagagcaaatgtagttaaatcagataagatcggctgaaaccccgatactaccctaatcggcaagcaagaggcaggctagagattgagattctaatcacgactcataagatcaaacaactgatgcagctataagtatgagaagaaagacaatgtctagacaatcaagccattggaaatttcatagagtgatggatatcgtatataatctaaatcaacatcaatatttaacctaatcggcagccctctattgatnagatattagccgatgaggttagataacgatattgccagagattatataagaatatatgataactcgacgaatacatagacangattagagtatcataatgatgggaagcactaatccg

SEQ ID NO: 40968 - DNA, 340 bp, Oryza sativa
  unsure (1)..(340): unsure at all n locations
ccgcagcgcctgaaactggattcgagaaagcggcttccncaggatatctgcaagttgcccttctgtgccgatgtaactcggtgtgatttccccattctccacggcttcacgaatgaaatgaaattttgtttgaatgtgcttacttcgatcgtgaaaaacagggttcttcatcatggccagagcggattggttgccaccctgagatcgacgacttcagttgctgcattcctgaggtcaccgaggagccgggcaagccaaatgccctggcatgcagctgttgcagctgcaatatactcagattcacaggaggagagtgctacaactttctggttttgagact

SEQ ID NO: 40969 - DNA, 428 bp, Oryza sativa
  unsure (1)..(428): unsure at all n locations
agctctaagatgtgagcttccgtgtagatgctgtggaggccgagggtgccgccatccacagccgacaacgcgacgccgctgccgcctcaagagctaccactgctgaaaggtacaagaccccttccccacccctaccccatccctaatatgtctcctctttcccgtaagtatccctgccgtcgatcttttgtaaaaacatcatttatgctcaatatattcaatgtaaattgtgctagaaattgggaatcctcgatgagaatttctgtatatctacacccatggcccatcagtccttatgtttacaacattaatatatcacagttnttacctttcatgatcaaatataagttattcacaataactgcttgtgccaataagattgttaacattatgattatcctgttcaggtgagccacttttttaatact

SEQ ID NO: 40970 - DNA, 333 bp, Oryza sativa
gtgctccacctgtttaatgcaatgcgtatgcttcgactctctcggtgagagggctgtctctgcaattgccgccagggctttgagggaatccttacctggatgtcgggtgccatagttagcgccttcttttcagacacttgcattgcaccttcaaatatatagatactcctacttgtctccggagctggaagaggaagaccatgcatggaaagaacctgcgaactcaatagtattatatataagatgtcaacgagatgcactctcgtagtagaaatctatgaaggctatacatgaataggaatctatttcatgggaatcacatgtgaatcaatt

SEQ ID NO: 40971 - DNA, 138 bp, Oryza sativa
aagacgtgaggggccgcaccgcacagtgggtagtcgagctcatacaattagaagtccactttgggccaagaacatccatcacattccaagtgctcgctgatttcgcagctgactaaactatgtcctagaattagaaca

SEQ ID NO: 40972 - DNA, 439 bp, Oryza sativa
tcacctgcggcatgccagcttcgccgctgcctccattggattcgcatttgcttattgtaacccggccaccccttcgttgtcgccgcacatcgccggaaagtcgtcgcctccgtggacagtacctcgccgcccttcggagctcgtcgccggccatcttctgtcgctgcccgtcatcgtgtaagtgttggtaagaatcgccgtcaccttctctacctcccggagccctccgtttgcattattgtaccgtggttcgccggcaaccgccgctcctatgtcgttcaccggtgtagtttatccctagagtcttaattccatctaatctaatcttgtttggcctagcgcatcatcgtctccgtgtgttgtcgccgaccgtaaccgtcgctcttctctccgtcgtaccgttctcgggaggcctctctcgattcacggagatgttatg

SEQ ID NO: 40973 - DNA, 389 bp, Oryza sativa
tgcttgcctcctgcagtgagagagatcttttacaagtattctacattagatcttcatggataacaatttaacatatcgactgctgcaaggcttcctttacctgtcattatgcagttgcctgatactccgttttactgcatataatcagccatctatcctcttcataactttgaacacaacactgttaattccacgtgcaatttgttgataatcaagtgtgctcataagcataaaccaacttataatggaagtgtatgacctgactcagataaccaatacatatccaaacttccaaagcatacctcaatctcatggaaatcagatcgatatcgtgaaaggccatcaccattaacaaaaagagaaaaccctgcatattataaatgtggatt

SEQ ID NO: 40974 - DNA, 197 bp, Oryza sativa
cgagccatagagcggacgcgccccaccagcacagcaaaggatgtgcaacacgacaccggcgacatggctaccctaagccggatatatcgaagctgggaaagaaggcggcacctctacgtaagctcctcaaaccctccgggccgacacccggacggaggacgacgagcggaccgtcactcagtcgaacgccggcccca

SEQ ID NO: 40975 - DNA, 328 bp, Oryza sativa
acgaatatgggctcgcccgcacaatccactccattccaaactgaccagcctttatcttcttccttccaagccttatcccattcacttcttcttcaataaatattggtccttagcaacttgtgactccttatggccttgaccggtccttcgacatttcaccaagcacttgctccttcaccactacatccagtcctcctcttatgcatggctcattgcgtagctaagtcttgccaaccctttactacatcaagccatcttcgatcacttatagccttgcatcacgatgagacaatattttactccctcttcatcatcatcttcttcatcg

SEQ ID NO: 40976 - DNA, 323 bp, Oryza sativa
tgcaccacacatccatatgagtagtttgcacattgtatttaattttggctctacttgtgtagattatatttatgagtatgattgctgaatgcccgaaattagagtgttgtgattgtagcattttacttgtacccatgtaaataggacaatgatgctcatcttgtgaatgtatggataaatatagctccgtctatataggacctgatcgtatagttttgataagtgaatatgctctataactgtctcttatttgagacttagaagctatatctatttgtcttcagtgtgtattccaatattgccttatattttaggcctagttt

SEQ ID NO: 40977 - DNA, 485 bp, Oryza sativa
  unsure (1)..(485): unsure at all n locations
tcttaagcgactgccgcatgcaagctttgcttgataaaatagttttnattctattcaaaattttgaactcaaatgaccatgtttctatctgtttgtactccaaaagcagtactatattcagcacaaagtcagtcatataagattntgttctttctagctctaacataaccatgtgcaaaggcctctagggaacttgtgcatgtgatgcagttttggttcaaagctgtgagattagaaagttctagatgttatatagtcatgacaacatgaatcaattaatattgataagaaccagaggcaaactaagtaagatccacatcataagtacctagccagtagtaaaatctctgatctcacacncncaacatcttagcactataccaaaatagaacactcanaatatgatggccatcggcgcttcttggtctcttgatagaaggatattatgtctgattcttctacacacacgtaatacagaacaacac

SEQ ID NO: 40978 - DNA, 390 bp, Oryza sativa
atgaaacagggaattccactgtaatgtaagcgcactatactaatactcctactacttctaataagaagagagaaaatctgcatgtggggtcctctactgagctgtcaatcaagtaaggtcgaaccgtttggtgacatgatttattttccttaattttacgaaactggagttttccataattttactactatcatttctgtccatacaaaaccatgataccatacagacatcaactttctgtacactgacgttttacatggaatcgaagacaaatattaaatatatatttctatggcacaagcgtaaatacatcggtaatatccttcaaactagaatcaatcgttgctagtcatatgatacggtcgatacaaaatacttgatgatatatta

SEQ ID NO: 40979 - DNA, 398 bp, Oryza sativa
  unsure (1)..(398): unsure at all n locations
agctntagatgattactaaagtgtatattataggatacanaaaatcctgagatctctcagtgatactctcttcgctnttttaatagatgacaccattaacttttaaacacatgcttgatcattcgtcttttttttaaaaaaaatatgtaaatgtataagatataaatcatgcttaaagtattttgagtaataaaacaagttataataaaataaactataattaaatagttttttttgagaaaggcgaatgattaaactagtaataaaaagtcaacaacatcattcattgaaaaacagaggtagtatatatttgaacatgacctctcgataccctgtggttaagccacgtgacagtttaattgtcagcccgtagatctaatctgaacgttcgcacaagc

SEQ ID NO: 40980 - DNA, 455 bp, Oryza sativa
tgcgatgatccctatgcctactacctttatggagatgattacaatggcgctcagtaggtcttagtacggtcgttgcctgtggcaatggtatgccgctgcctgaattccgctgccttatctatttttgcttttggatgtattccggaccgctcggtccgatgatttaagacaatgcctacgggcttatgatgtaataattagcactagactctcgtgtatgtgcttttggtatttcagctatgaactcgtgtaccagactacttgatccagggaaatggtactgtttacacgaatgattcctgttatataaacaggggtccacagataattagctacggcagtttatcattaaatcgattcaaaagtcatgtgaccttaatccatcatttatgtaaattgcgatgaatggttgttaagatacgtgtgactttgaggtggccttaattataatacat

SEQ ID NO: 40981 - DNA, 293 bp, Oryza sativa
tcattcctttgggatatatgaaaaggttggttgagggcatagatgtatgcctagacccacccaagttcaagtcctcatcgaggcgaattcggatgcctatttcttcttaattaattaaaaatgtcacctaagtcctcctatgttggttaaggttctcttgatgcgatttgtaaaaagaaacattgctcaaattttatcggttctggtcttcatgtcaacagtgagcaacccactgggtaaggcagtcgtggtgcatgccatgaagttccattcggtagagagccatgtctgga

SEQ ID NO: 40982 - DNA, 445 bp, Oryza sativa
  unsure (1)..(445): unsure at all n locations
agcttcaaacatgggctattatgaaatgttatcaacaacaaatgcatccctgtccatgattggggctgcaggtgcagtccatctgggaaaaacgggtcctcatctgacgtcgccagcgtgccaagaaaccgctctctctccaggcaaatccaagaggccaaaacaagcagcatatgcagctgctggccggacggccggccacagccagccagttctgatttctgaacagcgaacgaatttattgcaagatgtattttctgtacattagactttntttttttctgtgtgtgtctttnttaacttcatctctcaaggctctggtgagttgtgatccaaattcatttgcacttaataaaggctagcttctgtcgtagcggagcggaagcccgtcgccaggaggcttgggccggagcgtcatttcttttaagggtccaccatatatata

SEQ ID NO: 40983 - DNA, 288 bp, Oryza sativa
tcactgtgaacgttgtatctattgtattgtcacattgcttccacacttaaatctccattgaaacgcagagctaaaaaaaagtagaatggaaaaaagataggattttcatatgcatacaattgcaaaacagatgattgcaaaataccataataaccaatttattagctcgctcgaaaaacgtaagaatcggatgagagagacttaaaaagaaattgtctaatatgttgaagctcttgctatctttctccataataggagcggcaacgaggcggaggggggaagtgggag

SEQ ID NO: 40984 - DNA, 436 bp, Oryza sativa
  unsure (1)..(436): unsure at all n locations
acctgcggcatgcaagcttgccctctccttcactcctaggccattatgtttttcatgtgaagaanaacgcaaattcagccagtgatttaatagaggggcccgtttttagttgtgcaaattcagccgtaatttaatagaggggcccattcttagtttttctaaataaaatttaggttttctgttggagagattatttttttacttattattttcagtttaggaaacccaaaacaattttttagtaggatatgatacacaatctctcgatgatgctccaagtttataaaagttggctttactactaaataaactggctctaataatacttcctccgtcccagaaagctagtcatcctgctgttcagaataatgtccacaanatttgtcgttgtagcatcttgaccagcgagctaagcctagtctatcccatcgattca

SEQ ID NO: 40985 - DNA, 342 bp, Oryza sativa
ataccatttgccacatgatggatttttgactgatttttagtaacaattcttataatatcttgccatgtaatattacaaattccagttcaactaatcctgctacagtctacatgattttttatggtctgggatttgaaatgttaaaatattggtcattcatgctatgatgcataagaacatgacttgattattgtggaaattgtatgtgaagctgtcatgttccatattatgagtatgtgtggaaactgtactcaaattgatgaactgactagttgatgatgtgtttaaaagagaactacacgtggatgagtcatgcatgctgatggatcccgtgggaccacc

SEQ ID NO: 40986 - DNA, 331 bp, Oryza sativa
  unsure (1)..(331): unsure at all n locations
ttgcaagcttcaccctatgacctgtgagctgggactttattttccgagcagcacattccgcggattcacgcactgccagaacttgatctgagaaagacacgagcagcaacggtagcatttgaatgacatacctgcaagacaaggatcacaatgaaacgttttggatcanacaaagcctacaataaatggtatctcacttacggctcanatagtttgccaagcttctcacacaagcactcaaatcctagtaaagctccttcgcgagattttgcagaagctctggaatgcgacagattagttatagtttcttggccaaaaggacagaaaatcc

SEQ ID NO: 40987 - DNA, 419 bp, Oryza sativa
  unsure (1)..(419): unsure at all n locations
tagcattctggcatcgagctattttgccgctgngatctnccctacagtatcgtcaccgtagtagagtttaaccaccaaattcgggatggattggtgtggttcctctacgcctaggacaccagaatatcgaaccatgaacgaggaaaggcatgagagaaatattggctagtaattgtgaagccccaattcttgactggaagggacaccaaaggcctctgccctccctctctatctatccaagagatggaagggcagagcttttttttggttttttcatcttttcatcaaagagttgaacaatgaagatagatggcaagtgcctgatcgatttgatcaggtcgtgtaggaacaaggttcanatcggtcgttcgttaggatgcctcagctgcatacatcactgcactttcacttgacaccta

SEQ ID NO: 40988 - DNA, 356 bp, Oryza sativa
agcctagatactaccatcagttgttctatatttctattctcaaacgctaaattatttctttaataaaatgtagctatttcagaaagattaaaaaaaaggctgtagctccgcattcaatagttttatcacaatgaaaaattcgaacttatattctttttggcaaggagaaaagggcagtattaagtgtaactgcagaacaacttcactttggaacaaagatcaacagagtagtcaccactaacctgataaaccctatttcttgttgctgacgacatagttagtatttgccttttgtgcataccaattcaatgcagtgatttccttgaacgtctacaaagatacctgaatatgctccc

SEQ ID NO: 40989 - DNA, 442 bp, Oryza sativa
  unsure (1)..(442): unsure at all n locations
tgccatttagctatgaacggctattctgtttaattatattctncanangcatcacaagggtgtctgccaactccttccaggactaattctagtttctttgtttgactttgaccttcccccgtactccaatgattattttcttggttatgggtaatgaactagttgtgtggcttgagcagtttcacattaatacggtccatttagccttatgcttgttaccagtatagcacataactattttaacttggctgtgtggtttgaatccagcttctaatgcaaaacctgctggagcttatacttaataaatgcctggtctgatatgggatagacctgacgtttataaccatttattagtgttggtttcgagagaatattgccagattatgacctttgttgtcaagagtgaatgctatttgtacttctcactgtttgttgcctatat

SEQ ID NO: 40990 - DNA, 97 bp, Oryza sativa
  unsure (1)..(97): unsure at all n locations
agcttggggatagcaactagcctctgtggaactgganattaccctcccagcagccaacaaattcgggtccagtcttggtgattgccctcgctccctt

SEQ ID NO: 40991 - DNA, 479 bp, Oryza sativa
  unsure (1)..(479): unsure at all n locations
agcttaatcctccagatcatcactcttcgttgagatactcctcttctgatgaatgaatattgcaagaatgagcatatgacatactcaacaagccacacagcaaatatgcaagtgcacaggataacaaaggatggcataatatagctcatttgcataaacagcatttaatatttaagagaatagtaaaacagttaagtaattagtcaatattaaataaacaccatacaacacacccgtgttgtataggcccaacctcatatgaacaaccaaccccggttgaacataccaaacctccaaaccaggaatataccattccaaaccaggagtcacattaattaacacagttaccatttaatgtgtaatatgagactaatcacgaanaacattgctcaactcacccataaccgcgggtacggctattcgaatagaataaactctgatcagaagtgtaccactgtacccacaagacacaatcccac

SEQ ID NO: 40992 - DNA, 384 bp, Oryza sativa
  unsure (1)..(384): unsure at all n locations
tctcgggttcttggactctgcccgttgttctaggccattcccgagaagatacgagctatagagcggatgcgcccccccagcaagcttatggatgtgcaatgcgtcaccggttgcatggccgccctaagtcggttcatatcgaggctgggagagaaggcgctacccttatttatagctcctcatatgctccatgcacgttacttggacggaggaagctgaacatgccctcactcagttgaaggcgtatctcagctctcccccagntctggtcgacccggagccagatgaacccttgctcctctacttatcggcgaccccgcatgtatttagtgcggcgttgtgtgtggagcgcgattatgacaatcctcatttctcgcatcccca

SEQ ID NO: 40993 - DNA, 369 bp, Oryza sativa
  unsure (1)..(369): unsure at all n locations
agcttaggtgtcctactttntagtaaagtctgagtttcagnggaatgcacatgtaaattactatgtaaatgcaagagcctagctgactcgatgcatatataaagattgattactagtgctacatatcgatccatgcattgcttgcctcccaatcagagaggaacaaatatttgcaggaggaatagacaagatgcgatctttttcagttgtctccatgctcggggagcgattcatgtgtcttgagcagccaggaaaaacttttgtagattttttatctagtgctctccatgtcggattatgctcgccaaagtggagtatgtcgctgtagactgtattgcaggtggatctctctctctctctctctctctt

SEQ ID NO: 40994 - DNA, 454 bp, Oryza sativa
  unsure (1)..(454): unsure at all n locations
gttntcaggttcaatcatgcatgcttgtcttcatgcattctcaaactaattaaccgatttcaagaatatatatatccttccctccagccgagacggacgtacgctagctaacatgcatcaccacgcaatcagtgcatccgaatcagctaatcttaacccttgtcgtcattagctagtctacaaggatgaacagagacaaccatctcagtgcaatgataataagcagctcgtgttcgtaaaggagtactctctccgtccaaaaaaaatctaattctagatttgtatctagacataatggattatgtttttttaggacggaggaagtaataactagtactctgtatctggagtactactcctattgtaaactctgaagttcaagacgacgagcgagagtgacgcgcggagatggagaaataattccagtccagtccatgcatctcgatccccatca

SEQ ID NO: 40995 - DNA, 471 bp, Oryza sativa
  unsure (1)..(471): unsure at all n locations
agcttagctatgactatcttccttttcatctgcaacaangnnntatatattgtgctttgttccctgaagattacaagtttgacagtgatgagttgattcacctatggataggactagacattttacaatcacatcaggaccaaaacaaacgaactgaagatatagcattgagttgtttgaatcatttggttgattttggatttttcaaaaaaaatgtgaatgaagatgggtctccttattacagtatgcatgatctactacatgagttagcattgaaggtttcatcctgtgaatgtcttgctgtcagtagttctaacgtaagggttgtgcaaattccaccatctatacgccatttgtctattgtgatagatgacatggatgtaaatgatagagtgactttngaaagcatcaagacggatttcagcacactaagtaagagactgggatgttgaaagctacactcttttatgc

SEQ ID NO: 40996 - DNA, 362 bp, Oryza sativa
  unsure (1)..(362): unsure at all n locations
ggccaagctgtttaaggctccgtctcgttagnnngtttcacgcagatcatgtctcctcatattcatgaacaatagcaacgcctctctaagctggccgctgtggatgtacccagtgatcattgagttgaatgtgatgatatcacggacctccatttgatcaaacagagaccgtgcaacatcaacatggccatgcttgcagtatccatcaattatagcattccatgactgatgtcttcggcctctacccacagcatcaaaaacctctcgtgcatgaccaaagtcaccacacttcgcatacatgtcaatgagcgcaacgacaagattgtcactcatcgacatccccttctccttaacaagcaagt

SEQ ID NO: 40997 - DNA, 465 bp, Oryza sativa
  unsure (1)..(465): unsure at all n locations
agcttatagtaggcttatagctctctattattcttgctcttagntccagccatgatacgatcgagctcanagtgaacttcttccctaatccctagtggtccttattgtgcacgactgcttcccggttgagaacattcaatatcaacaagaaaactaaccgagcttttgaaaaactatttttacggactgtaggtaactgatattttaatacggtgtgtaattgttttacgcattcgtgaaaaaaaagatattttaatacggtgagctttcaaaattaactgagctcacagtaataaagaaattatatattgtatgttccacgggatggtgtgaagntcatagatatttttttattacataaaagatgcacatgactatggtactacacatgtaatagcaagtgcgtactttctactgcgcaatggttaatgagatgaaagctagcggaaatatatcttggctcac

SEQ ID NO: 40998 - DNA, 191 bp, Oryza sativa
gttccatattttttatgtgcgcttttgccgtctacctatgtggctctacctatatgtatctacccctctcgtgatactgcgagagaaatttaatctgtcacagttcacattgaactttctctgttcattcatattccagagttcagaatgtacttttatggattgtttcttggcatggttgtgcaatgata

SEQ ID NO: 40999 - DNA, 123 bp, Oryza sativa
aaacgggagagatgggttgtgctaagaccacccaccaccatgttcctgaaccacgagacattgacaacctgaagcacgacgacagcacccctgcaaacacgcagctctcgaagagaagctcgc

SEQ ID NO: 41000 - DNA, 77 bp, Oryza sativa
acataaattatgtgatacatggggcattctgcggtatggataacccgctatgctaggcacactttgtcttaatgtga

SEQ ID NO: 41001 - DNA, 259 bp, Oryza sativa
  unsure (1)..(259): unsure at all n locations
aacatattattatttgtntgcattttggcaataacatgcttggtttaactgatggaagtgaatgcaaaggctaccgaagtgaaaaaatcctccgcatgtgctatttcctaacgagagttctgacctggctagacgagactaanacttttaagttcctattacatcagatatttggacactaattataagtattaaacgtagactattaataaaacccatctattatctcggactatatcacaaaacgaaatctattgag

SEQ ID NO: 41002 - DNA, 366 bp, Oryza sativa
ctatgcggatgcagaacgaattgaagctttggagtcagagctcaccacatactgaattcagccactgctttaagggactcattcctccaaaaggattctgttcttcagagaattgaagaagtgttagaagatctagatttgccagagaattgtcattttagagatatagtagaaaaaatagaacttctgtctaatatggctgttggtgcttcttgtactgtacctgatggttataaacaatcatctgtggatgggaattctgagtctggtgcggccattgatagtatatatgatgaacaaaactcagattcaaatttatgggcatataaaataaatatgaaatacgatgagctacatatgagattc

SEQ ID NO: 41003 - DNA, 406 bp, Oryza sativa
  unsure (1)..(406): unsure at all n locations
ccgaagccttccaacctnccattgacagacagcatatancctgntttcatccaactactccagngactatgttctagtcagtctgatttgcacaattgtcattatctaaaattttgcataattgcggagtacttgttacttgggaaaggagggattggcttggtgcttttccaaccctgtatgcttcttattatgtccattaaaccactgtccaaaacaaagctggaaagatacctcgaacattactgtgcagaatatatgtgttctgtactttgccctccgtgtatacatttagtccagaatgcatattgaacctttntcaatatggtccggataagggcactggtaactatcataccttcatntttgctccaaacaagatgcattcacaacataatcgctccat

SEQ ID NO: 41004 - DNA, 228 bp, Oryza sativa
  unsure (1)..(228): unsure at all n locations
tcttaaacaagaaattgttttgacttagacncagccagggccgtctcttggcaaaaatcatcgtcaagtgccgcggtcatgtaaactctctttgacactttgtcgattacacttgccgatttaggggacattaatctttatgggaaggaatataccacatgccatgctctcttatggaacagatcagggaggacactccctactcttgaactgttcaccctccaccta

SEQ ID NO: 41005 - DNA, 284 bp, Oryza sativa
ttgcatctacggatatgtgctcggcgagcgtcgctaggattttgcaacttaccgtgtttgatatatggagtcgcaccccacttaatatgtcgtggcattcttggcaccctttgcacgtgactatttgcttctttggagatgcaaccaccgcggttgatttatgcagcagccacccgatgaatattaaagcatattggggatgctagattcagaggcccttgatacgttttataatatgacgctagagaactacagctacatatatcaaggtgcccattatatat

SEQ ID NO: 41006 - DNA, 175 bp, Oryza sativa
aaaaaaaaaaagaaaaaaaaaaacaaaacaaaaaaaaaaaaaaaaagaaaagaggaaaaaaaaaaagaaagaaaaaaaaaaacaaaaaaaaaaaaaaaaaaaaaaagaaaaaaaaaaaacaaacaaaaaagagagaaagaaacaaaaaaaaaaacagaaaacaaaaaaaaaaaaa

SEQ ID NO: 41007 - DNA, 133 bp, Oryza sativa
  unsure (1)..(133): unsure at all n locations
agcttagagataaacgcaggngcatgangtannctttcggnggngnggaagcaacactgatgtcaagattgctttgttcgctgatcctttttttntttggtgttacccncttgataataacggccacaagttg

SEQ ID NO: 41008 - DNA, 161 bp, Oryza sativa
ggaatcaatccagctctttgcacacatcgtattcccactgagcccgacagctcgccatctatggagccctcaaaaacggttatataattgcgatgataagaagttgtgaataacgatgtctgaaaactcctgcacaccgtgattatttactccatgccata

SEQ ID NO: 41009 - DNA, 464 bp, Oryza sativa
  unsure (1)..(464): unsure at all n locations
agctntaaaatatactttgttagttgattatttgtatcgccgaactatagatggtttacttttaaagtgtttaggtcctgatcaatctaaagtagccatgggagaggtacatgaaggaatttgtaggacgcaccagtcggctcataagatgcaatggctattaaagagagcgggtttttattggccgactatgctagaggattgttttcgttattataagggctgtgaggcatgtcaaagatttggaaatattcagttagcacctgcagctatgctacatcccattgttaaaccgtggccatttagaggatggggtttagtttttgttggtgagatacatccttcatcttctaaaggtcatcgcttcgtcctagtagctactgattatttctctaaatggacggaagcggttcctttgaaaaatatgactcataaagaagtgattaattttgtattacagcata

SEQ ID NO: 41010 - DNA, 283 bp, Oryza sativa
  unsure (1)..(283): unsure at all n locations
accgctactggtcacctttgtctttgactatatgaccaagcatcagctccgtgggtcgaactttnttgttgtaagttgccgaagtgcttgtggcgtacttgtgtatgtgctgnnncncttcgactcttactccttccaagagttcgagcgatacttcgcgtccctcttcacccccagagaacatcacccttggtgagttagcccctagctttgctggggtnaatgcctcatcgccataaagaagcataaacgggctaaacttggttggtcttgtgggggtcgt

SEQ ID NO: 41011 - DNA, 471 bp, Oryza sativa
  unsure (1)..(471): unsure at all n locations
agctnttcgtgctacctgagttttgtgttgtnttgatcanggatttaactggagtctctgtatttagacattaatttagagtattaaatatagactacttacaaaactaattacataaataaaagctaatttgcgagacaaattttttaagcctaattaatcaataattagagaatatttattggagcatcgcatatgctaattatggattaattaggctcaatagattcgtctcgtaaattagtccaaaattatagatgagttttattaatagtttacgtttaatattaataattagtgtctaaatattcgatgtgataaagacttaaaagttttagtcccatctaaacagggtcttattcggncataccttggttaaccaagatgactgaattgctatnttatttgtcctaatatataacaacttagtattaaaggattaagtattagataacctagcattacttcatt

SEQ ID NO: 41012 - DNA, 342 bp, Oryza sativa
gacacttaaaactaagcttttatgaaattgcccgttgttttcatcatgttatagaaaatatacttactatgacctacatcatttacatcggtgagatcaacaaaagtgtgctgcaaagaccttttctattggtgcttgatcaatgctttgtgcattgtcgactgtctatcttatggactttatgaaggtaatccgagcagatttgacacattggtggatgggacaacaggtgacctaggtttgcttataagatgaaaactgaagtgtatggttctaaagaggcacatgatgggctatgagccaacgttgctttcatgacgatgcggttgtgcggctttgctc

SEQ ID NO: 41013 - DNA, 134 bp, Oryza sativa
  unsure (1)..(134): unsure at all n locations
agctcgctcatgcttaagagaatcctggaatccgctcactgacggngngaggctgataaggtgaatatccctggcgctgtcatgtcgcagctcgagtggttgaaccacgcgcaggaggaggaaggcgnggcagt

SEQ ID NO: 41014 - DNA, 450 bp, Oryza sativa
  unsure (1)..(450): unsure at all n locations
agcttcggaggatccctttcttatacctgtatggngangaagacaatggcgctcaataggtcttagttacggtcgttgcctgtggcaatggcatgccgctgccttaattccgctgctttatctatttctgcttttggaatgtattccggaccgcacagtccgatgatttaagactacgcctgcaggcttatgatgtaataattcgcactagactctcgtgtatgtgcatttgatatttcagctatgaactcgtgtataccagactacttgatccagggaaatggtactgtttacacgattgattcctgttataaaaacgggggtctacatgatggaagactagttacatcacatgattaaaaatctctagccttttacactaatacaaaaatagaatggacagttcagatggacataggacgcttattaacttacanagtttaatcacat

SEQ ID NO: 41015 - DNA, 441 bp, Oryza sativa
  unsure (1)..(441): unsure at all n locations
tcanaatgatttatgcagatcatctcttgtcacaggccatatatattctacctagtttggaaaagggtagctagataattagataggagagaacaagaaaagaatttattctgccatgctctatcctggcaagaattggatggggaccaatgtctaatgaccaaagcttaattagcttctcaacaacacatttgcacctaataaaaagcctccaagagcagctggaatgcttgtcaagcatgcagtgagactacttctgaagcaaacctactaaagactaaagagagagaggcccatatcatcaaggcatgcatgcagaacatgaatagtgcctagatgatcagtgtgctccaccattgtagctcatggccagtattgcaacttgcatgtggtgttgttgtccatgatcactgtataccgctggatatcgctgtgatcatc

SEQ ID NO: 41016 - DNA, 443 bp, Oryza sativa
  unsure (1)..(443): unsure at all n locations
agcttacgacattcaatatttttattttatctttgataaaacaggcagacgttgtaatctttcataatccatcactatttagcggtttgtatttccattttggacgaagtgaagcatgaataaaacttttgctatcatcactgttcattgattggatgccatattatcagatttgttgaacagtacaatctcattattaatgctaaatgtaggtgcaaaaatgctgctcttctttaagatgtcttttaggttatagccttataagtacctgtaaagttgagtgatgctttttctctttactgaagcactctcttttgctgtttcagcggaaacttctggtaccactggtacattngtagtaatagatgagtgggttgaacggtagcatcagtgtgatcacgttcatactaaatctgtgatggtcatataccattgcactgaca

SEQ ID NO: 41017 - DNA, 383 bp, Oryza sativa
  unsure (1)..(383): unsure at all n locations
tcacatcttctctgnttgcattatcttttatattccactatgccaagtgagcaagtcatataacatgccctgaagaggatgaatcaaaggtaccactttatgaactggcatatgctcgattcaagcgatgcaccgagcacatccacctcgagtcgtccacaaaatcaatccacaacaatcacagaatcgacatctcatatactcaacatataagatgtggatatcatacagaatcgtcatcgtccaaaaacatgcatgaacaaaaccgacaaataaaaacatatacaggttaataataaaaaggtatagaggaggacgcagaatgagagaatggtgacgccgctgaaattaccatctacgtctacccgtccgcctaccaccgt

SEQ ID NO: 41018 - DNA, 304 bp, Oryza sativa
ggccaaaaacgaaccagcttattgcaatcacccgacaaacggaatgaggggaaccaaccgaccaaccggacgaaggatcaaggctaacccaccacccggcgcaaataagcccataccgacgacaacagaaaaaacaaaacccacgaccacccacccatgaggcacagcccaggcagccaaggcacggcccaccccccgccacaggaacgcgcccgcaacccaccgcgggggggagccacggaaaaccaccccacgcccccgcgcgcacgacaccaccagccgcacacacaacccgcccccgacc

SEQ ID NO: 41019 - DNA, 166 bp, Oryza sativa
cagtcatctccgtgctgaatacctgccactccctctcaatcccgaccagatctgggggccagcctatagatccggcgagcaaccaaccgatccagcagctgcgatagcatggaaccaaagcggcgagctgtgtgagcctcaccgacgagcagtgaggcaaagagag

SEQ ID NO: 41020 - DNA, 225 bp, Oryza sativa
ggggaaagaagaagagagaggagggagaagaaggaaaagggtggaaactacaaacaaggaggaaagaaaaggaggaaaaaggaagaggaggagaaaaaaaaggaagaagagaagagggaggaggagaaaaaggaagggaagaggaaaaggaggaaaaaaaaggaaagtgaagaagggagaagaggaaagagtgaagaagaggaaggcgagaaagaaagatggggg

SEQ ID NO: 41021 - DNA, 302 bp, Oryza sativa
gaaacatttcgcaagacacagaactaaccctcctggactcctgagaaaaacccttcactcccatatatttactaaagaattggcagattattcaccaacataataccatataaactacagaaatgtgactaagatggaatctatccagctcatacgccatccacaacgaactaaagcaatcatctcttagataattcttgactccatcactagacaagaaatatatggagacagtagtcacacttacattgggcaccagaccactccgggaatctccatttacagcgcatgggttgaggatc

SEQ ID NO: 41022 - DNA, 452 bp, Oryza sativa
  unsure (1)..(452): unsure at all n locations
tggtgatttgagaggaagatctatgatgaagacatggtangcaggattagatttatatttcttctcatcaatgccttgactcaattggtcaggtctgtatttatacaccgacacatgggctctcactggttcagcccaacatgatgaagtgtgccaaagactcaatacacccaagagtactgtaacacaccacgacaacatatgaacatgacattccctcccccttatgttgcagcttgtccccaagctggcgctgatggaaaacgttgccgcagttctccgatgttctcccaggttgccaaatctgcatgcatgcacgtgcactgcaccataccatgatggactgctgttctgacacgcttgatgagttggcggcgcactggacctgcattctccaaattctggacaggcgaatgagcacaaacaggcgtaccttactgtgataccttctt

SEQ ID NO: 41023 - DNA, 432 bp, Oryza sativa
  unsure (1)..(432): unsure at all n locations
agcacgcaattcagaggaattgtcaatgnatcaacggacccncnagggatcttgctcanagttgtgcgncgcgaacgaacgacaggagctctatttatagcctccatatgacagttacaggtaagggaaacgaccaaactaccctgcaaccgtcattgggatgaaatcaggaccgtccatgtgaaagatggcgatgaacggcccaccaaagtggtcagacgaactggaggttcggccgaacccaagacggctccgttcggcccgtttttgtcgtggacactaattttgaggccctcagcccattggcatgatagtngggtccatttggagttggtaattgattatggggctanatccgtgtaatgtgtctgatgccggagggcatttgtcgtggcggatggttttctctcatataccgcattcacatattac

SEQ ID NO: 41024 - DNA, 317 bp, Oryza sativa
acttgctcctatccctgtgttatattattatttctcccattggctaaacctacttggcaatgcaagacagagaagataaatgaaaatcatgacattgacatataattctgtctaggaaaagcaactcgggcatattatttcggttgctgatttgcatatgaacaatacttagtgcatacatcttctgcaatttgatagcttttttctatgtgtaacataataaaaacaaaactcttaatggttaagtataatataacttcaaccaaaccatacctcaaatcatggcctaataaagagaaataacattttcagttctt

SEQ ID NO: 41025 - DNA, 264 bp, Oryza sativa
ctaaatcatttttaatagcccttaacgtccttccgcggttaatgagccatatatataacctacttctgcatcaatatagagaaacgagaagaagcctagggccattccattattgtactgagagctgcgaatttgtagaactttggtataaacatattccactaattgatgttgtttcctacaaaatccgaacactaagtgaatgctaagacacaacacaatcgagtgcgtgatggctttacccataaaataacctgataatga

SEQ ID NO: 41026 - DNA, 397 bp, Oryza sativa
  unsure (1)..(397): unsure at all n locations
gaacactcaagcttacgtcgatttaatccttactcatactgaagaagatctttttatctgtccacataggngggcatatactaaataattacatgttaatagtaaataaattaccattgtaagataatggaaagtttttttccctctatttcttatcatataattgttntaatagaagacaaggtagctgttcacaatggatcagtataagcaaatcctgtatttcagttacgaagttccgtctgagagttgcacttggacctgttggagatctgatgctgacttcacgtataagaaataccattgcagatggaaagccattctcatttacatttgcatatcacacatacttgcaatatctgatatcacgacacctgtttaactctcgccaatccca

SEQ ID NO: 41027 - DNA, 438 bp, Oryza sativa
  unsure (1)..(438): unsure at all n locations
agcttatagaaccgctgggagtgttttatatctctgaattccaaataaaacaccgattgtcaccctgtgcatcattcaaattcagaggattcaagaagtcctaaagttgcaaaaaatccccataaacctgtgtagaaagaggcatcatgaaacaatcctccaaagtcctagatcacattcagctaattgattcctccttatataaagctagagcatgcagagcaggaaatttggagctatgcagttccttattccacaagtcatcccaaaaaagataagatttctcagactggatggaacattttgcaatacctctgaacaaggctgagagggcctagatgtctcttaaccaaaaggaacccttattaaaaaccaaatgaggtacctttacagagaagtaataattccataccanattgacccatggcagaattacac

SEQ ID NO: 41028 - DNA, 432 bp, Oryza sativa
tcgccatccctgtccaacagcactgtgatcacccaggatcccttagcaacgcatgcatgcacttcattcacctagaagcggcctctaaatcaacaagcgtcgtctccccgatgaccgccgccgctcgcgccgccgtcgccatcgattccgaccaccacagctcgcaagaagggtaccgtagggttcgcatttaagtatgccaccttttctattttggatgcacatcgagatcggcttccttttgccgtcggcgccggcgtgaagctcgccggagcgccactactctgctcggtcagccagcccctgctcctctcctctagctgtgccactgaccagcggaccccacatcattaggcgctgatgattccactcagagagagtttaaaacttgcaaggtctaaattataaaatatgttagaatgacatgtggga

SEQ ID NO: 41029 - DNA, 454 bp, Oryza sativa
  unsure (1)..(454): unsure at all n locations
agcttcggagagaagtacatagatcatngtttctttcacaacaatcttaggagaagatggttatgttccagttattcaatgtgtagatgatactattattataacaaaagtatattaaaaataagcttttttttcttcttaagtcccttcttcatactcatgtgcagtcaacaggccttaaaattaatttcaataaatcatatagcaggaattctgggttgcacaacaaagtccagagttgttgactgtggtccacttatagatagaactgacaggaggctatcttccatagaaatttatttatcacatggtcaaagttaacagtggtaattctanttttttcatcattaccaacctaccacatgtgtacattgaaagttccaaaataatcatgtaacataaagacagagcaaggaggtgttgttaccgagaaaatggatgcaactcaagtcta

SEQ ID NO: 41030 - DNA, 386 bp, Oryza sativa
  unsure (1)..(386): unsure at all n locations
ggtatgttgtgaataaagaaatctttttttatngggctttcgccatgcgcacactgctntaacagatgtgcttaagtccctataagacacatggttccaccacacctggaaatatatggcatatgtggtataaaatccgagttaataaactcataaaggatttaccaaccgcctgaaaaatgatcacaatatataatcagcctataccataatattggtcaataaaaatgcacacttacgtggcaaatagcaatgatattgtatccaatcaattgcttaaaaacccaaacagcaccatgactatataaataagtcaacgggccagctatataatagcttactgtttgacaccctttaaatgcattggtccaactccctaaaagttg

SEQ ID NO: 41031 - DNA, 179 bp, Oryza sativa
gcctaaacgcctcgctgctcccctagaggtgaacacctggtgaaaaccgtgtacattatgcctgtacaggtgatggcggcacatcggcatcacgtcgttcatggaaatgttgccaaacagactttgatactgccttcaacaccttaagatgcgtatggatggacgctattctatatgag

SEQ ID NO: 41032 - DNA, 417 bp, Oryza sativa
  unsure (1)..(417): unsure at all n locations
agctntatccctagctctctttngcgatccctaatcncnangnncnctnnngggattttcttcacttgggcgcgagcatatggatcgagggctccggcgacttcacctcatcttcttgatattggccgggagccctcacaattggagggggcgtcaagtgatgcttaaccttcataggtggaggtctacgggattctgctgccccctccttctcctatgtcgttaaaggccggagtaaacccttgccatacccaccgccgggagttcgcactccctgaatgcagaatcgctcctccttcggagtggatggagtagcggtgggtgtgacatacttatggaacacctcattccctgccttggtgaacagggtgcccacatagcgctcggcgggaggcggcgcggncttcccgtcatctt

SEQ ID NO: 41033 - DNA, 415 bp, Oryza sativa
  unsure (1)..(415): unsure at all n locations
tagagcacttgttcttcctcctctttcttacttgtgcattctctntcttcatcccaattcaattccttgattctccacccacaactcacctatggctggcaagtccttgatcccatacattggctcctcctccaattctacctacaatctcaatggagagccaacaccggcgaatcaattgatcccggtggaacactatatgatggaaggggtaaacgcactgtggacacagcctctcgcaacagtgccgggctccctgcaaatttggagcccgcctgcgagctccctatttcggccgaaccctcctcggccccattcggcagcgcgatccctctcccctcgtcatgtcatcaagaccaaaatccggtgggattcgcctgcgcgacagccgacaccgggagagctcggtcttttg

SEQ ID NO: 41034 - DNA, 415 bp, Oryza sativa
  unsure (1)..(415): unsure at all n locations
agcttgatccatcagtctatctttctatcttaagttgnngggcaggtgatggttctatctctaactgtcctctacaataagtatctcaaaaagatccctttgaggcggcttgtggctggagttcagacgatgtatgctttggcagttctatcagacttggtcctggtgaaacaagtgaaccttatgttggggataccgaatgagatccatgtgctttgtttctcggctctagcagaagcaattgctcaattcaaggtcttgccattctcagttctgttgtcaagccaatgcccacctggctgtgaaggttcgctnttcgctttcttcacatctggactggtgttgtcagcaatagtaagcggagtatttggagttgggttgtcccagttaattgggtgtctggtggggttacaca

SEQ ID NO: 41035 - DNA, 356 bp, Oryza sativa
cgtcaacggttctgcagtgttcaattggcgcccgccgctttgttgaaccctataatcaaaccatggccgttccgaggatgggcttcggatttcattggtcatatttatccttcgtcatcaaatgggcatatgttcgtgctagttgctacggattacttcacctaatgggccgaaaccgtgccgctaaagaatatgactcatacggaggtaattgactttattttaaagcatattattcatagattcggtattgcacaaacattaactatggatcatagtgcttcttttatgtctaatgaagtgaagaagtttgccgaatcttatggtattaaattgttgagctcttctccttacta

SEQ ID NO: 41036 - DNA, 471 bp, Oryza sativa
  unsure (1)..(471): unsure at all n locations
agcttatgccatgcacagacatggcgcaggtccattctntttattcatccaaanncaattcaccagtatacatatgcatcgatatagctatatgatctcgcttctaatcacggattgatctgctctttgtttgcatctactgctgccgaccgatgatcatcatggcgagctccacgcgaggcaccagtgatcatcaagcgcccactccgctcctgcatgcgccgacgatcaacctcggctaccgggggccacgtgctgccatggtaatcacgcactatggcaacatgatcatgcgcatcanacgatgagacacacaagtgtgttacatgcatgtatcgtcaacctgccggtatacgctatgcaattgcatatgcggaccgactaactttacatgggccatacaagataagttatcgattttaattattctaatacttagcagtagagagaataacaagctagatcatatct

SEQ ID NO: 41037 - DNA, 353 bp, Oryza sativa
  unsure (1)..(353): unsure at all n locations
ctaaatncactaacatccatataaatgggggcaatactaaaatgacttacattatgaaacggggtgattaactctctatagtagaaataactatattgtgagtgagctgaaataagaaactatgtagagtaaattcgcaagtaaagtatagagaagatttatgaagtccacaaaatatagaattaactaaaaacaataataaaaataatcaacttacagcattatgaatgtatagaagtaatttagtcaaatctaaaagtaacttatatatattataaaagtcacttactatataataaaagcgattacaaatataaatatttttcatccgaatataatcatgaagaccttgt

SEQ ID NO: 41038 - DNA, 341 bp, Oryza sativa
ataccagcactggttcctgtgactggtatcgattaacaggttaatttggagcgtcacgggctagtttctgtcgggactagttcggggcgtgacatagtgcatgcaaccctaatcgatggcaattaacgaccgcaatatctaagccaatgagatgtattttttggttatcccataaatcgaatggggttgaagggaggaggctatagtggctgggcttataaggattgtcggggaggccgtatatccaaacccatagcatctgataaggcctggagagggagggctatgtcggcggttgtgacatgagatcaaaagaggtacaacatatgagtggatgtgga

SEQ ID NO: 41039 - DNA, 345 bp, Oryza sativa
  unsure (1)..(345): unsure at all n locations
cttgtgcacaggtattaaggtttgtttttattctctcggnggggacttggtaacttattcccccgcacagaaaacggagcactctattagcgtgtgattaattaagtattaactattctgtgtaaaaaataaatcagtatgattnttaacgaactttcgcatagaattgtttttgtaaaaaaacacaccgtttagcagtgtgaaaagcgcttacggtgacaagagaggtgaatgagttgtgatctctttgcccgaactcgaacgcttcttttttcttgcgctagtttctcttttttattccccttcccacatcgcagggggccattactaatatcggtcatcccc

SEQ ID NO: 41040 - DNA, 427 bp, Oryza sativa
agcttcaacggtatgtagcgcattatttttttttatccaagcctccaaaccttctgtcgagacgagttttcacgcgagcaatccaaagtgcaaagggagcaagagcatgggcagcaaatctggcaaggggattgaggtccctgaagtgggggaggtcccggagaaaggctcttctgatagaaacacatgcgaagacggcgtcgggagaaggcataaggccatagaggggggcgccatgtccatgagcatgagcgaagatccggagggagagcaggtggcgcacccgagcaaagctcctagcaagagcgaggcgccatatccagagggtggtgaagggcatgactaattcccacatgtacatggcggcgaggagggagaggaggacgaacaaccatcccatgagcttgttggcgaggcccgacatgaa

SEQ ID NO: 41041 - DNA, 328 bp, Oryza sativa
agcttattcattagtaatacgtatttctattttgagattatgtagaacattcttcactacaattttacattttggcagcaaaccaaatatgatcaaatgcaattttaccttaccaaatatttggtagtgccaaaacttgcttatattttggcactaacaaaatatttgtacggtaacattccaaataggccctaaaaaataataaaattgtattttaccagtcttggagattttaatcttgtatagttttcaatataaaaagatttgataactattgatatttatacaaaaatataaagcaagtataaattcgccctcccccagagcg

SEQ ID NO: 41042 - DNA, 443 bp, Oryza sativa
  unsure (1)..(443): unsure at all n locations
ngatggcgataggtgggagcgaatctatttgcttgatgttttcacaatgaccttacaagactggagggtttggttagcactaatggaggcattgggtactttctatacatgtatgtatattggtagcgtaggctctttagatgtagaattgtattccctcatttatgttgagggaagactttgtaacttggaaattttgtttagcagatgccaacagagaatggaaaagaggaatgccctcggcaccacccaaatcattatttctcgtgtgttgctcattggcccgttcaatccagccattttggctaccagttgcctgtttggcactgaatttttttcagatgtttaccttcgtggtggttgtccacacttggtcatcaaaatcatgagttaataaatgacattcgccggttaattcctcgtgaaaatctatattctaattt

SEQ ID NO: 41043 - DNA, 492 bp, Oryza sativa
  unsure (1)..(492): unsure at all n locations
cgaccggatccttaagcaccgcggctgcagctnttgcgtttttaacctgttaccttagagtttagngntaaangngaactatgtgggaactatttcatgggttgtggaagtcgtcgtgccttctggacaccatcagttttttttccttacattgactactcgttggcttataagctgcggccagaatctaaatttgaaaacttcttaaagaaaatccaagaattacttttggagttgctattctgtactaggtatcctctcttactataaatttataacccaccaactcctaaaacttaacatacaaagatgccatcatcctctactaacaagatgccactgccacatcattatctagtaacaatcattaaatttaaacatcaaacagagatgctatattggctataatnttataatttattaaattctagagcttttaaatgccaggttgtaaatcatctatcacatatcacataattattcatatacatc

SEQ ID NO: 41044 - DNA, 436 bp, Oryza sativa
tgctgtaatagattaagtcccttaaccaaatatagcatgtatctgactatcgtcgatgtgacaattctcttatgggcttaccaaatttcatcgtttacagtaacctaaagtggattcataattttaggttatagcataaatttcctagagattatacaagtcctatgtgcaaaaagaaatgcttttatgctactcacaattgtagtgacattttcttgacataaaatgtaatattttatttaacaaacataaagtgtacaaggttatgaatacaagaaatttgactcattcaaagatgagttaaaatgaattacttatggattgttgaagtatgcctatctcatgtgtttcaattattctttttggactgtacttttgcatgtcgaactgggatttctagaacttgcagcatagtgcagcttcttcttcatcgatc

SEQ ID NO: 41045 - DNA, 167 bp, Oryza sativa
  unsure (1)..(167): unsure at all n locations
agctggcaattaccaccttacgncngattgccattcaagcangaacgaactgtatggtcgttttatgttgcgttatcggcccgccacttgnaagaactctgactgtgtcaatccattgtacgaattaacatttccttacatcctcctatgtacattcattctgggat

SEQ ID NO: 41046 - DNA, 465 bp, Oryza sativa
  unsure (1)..(465): unsure at all n locations
agctttcctctacgaggggggaatgattcatgtttatnacancgacacccttatgatatggacattattgagagcacactgtgtcatttacacttatgtgctctaaatgggccaactaggctggcctgattatggcggaaggggcccccatggggctggcggccctcttgtcctccttcttcgcctcggctccagcttgggcgaagcctttgtgcttcgccacatggccttcgccatgcgcctttcacccatgtggtcttcttggttgcgaggcgtagacatggtcctttggtctttgccatgcgccttcgccatatggctttgtcccgggtgaacttgacgcctccgacttgattcctcgcttgtggacctggttcggcaggtcctgtcgaaggccctcgtgacatgcctccaacagtgatgngtgatgagtgaattgtgtggtggttatttttctcgaagtgt

SEQ ID NO: 41047 - DNA, 349 bp, Oryza sativa
acgcactccacgcgttcatgttactatcaccgagatgagttctggcgctaccggaaaatagaagtctcacacacatattatattcatgggtcaagtttaagttctccctctcacacactcatggcagtcctaccaatggcgacaccgatgtatggcacgcctctcgtgcctacctcaacggttgtgccatcgtttcgcacctgcctcactcatgggagaaccatctacgcatagatactgcctacgctctgctatctaaatcgctatgcctatacccattccagaagtacggatgtactgtgtgtcgttcatgcttaacttcatgggtcggtccttaattgaccgggga

SEQ ID NO: 41048 - DNA, 282 bp, Oryza sativa
  unsure (1)..(282): unsure at all n locations
agcttgtgtgctggcctgtaccatatacctttattacganagcagcgagcttgcaagaaaagatctgtggcaatgccgcacattagttccgcccatggctgatataatccaaatctatatctctatgcgtgtaataggatgacctatccaactagttgtacattttattaaagtgcacgacggcgctcatagccagttgtgtttgggggtttaacttgacctctatgccccagcttgagatcaaccctgctaacttctgctggcggatctttacacgagaat

SEQ ID NO: 41049 - DNA, 361 bp, Oryza sativa
tctcgtgttatagcacgctgacatgtgtgacatgcatgttctttgtgacactcaaatgacctgaaacacttattgctaaattctgaatgatatggcgttatttccgctagcacctgttgcttaaattctgaatgttatggcgcgctatcacctgttggtttgaattgtacactgaaataactcttcatgatgtagcagccaattatgtttgtttcggtggaaatgaatatctcaaattatgatctaatttgtgtttgcattatgattatgtgcatgctgtcatatacttttaatgttgattttttttaagccgattcaatgtacagagtttaatcctctcacttacaagccagtctacatg

SEQ ID NO: 41050 - DNA, 411 bp, Oryza sativa
  unsure (1)..(411): unsure at all n locations
acttcaaccgatatgcccttangcacggccatacataacatagaaatcacacgtggaaggggtgggcaattagctagagcagcaggtgctgtagcgaaactgattgcaaaagaaggtaaatcggccactttaagattaccatctggggaggtcccgttggtatcccaaaactgcttaacaacagtcggacaagtgggtaatgttggtgtgaaccaaaaaagttcgggtagagccgggtctaagtgttggctatgtaaacgccccgtagtaagaggggtagttatgaaccctgtggaccacccccatggnggcggtgaagggaaagcctccattggtagaaaaaaactcacaaccccttgtggttatcctgcgcttcgaagaagaactatgaacaggaanaatatagtgata

SEQ ID NO: 41051 - DNA, 344 bp, Oryza sativa
tcgatgatgaatccacatgagggattatagaaagaatccatttgccaacctcatgtagaacttcatcctaagttcgcgtcgcatcggcttatgtctcatgacatcaacgataccttgaatactcgaactctacatttttggtaacgaagagacatccctatttcccccgcggcttaatacactgcttactttaattcgctctgacctcaattaatgtgataacccgtcttctctctttaaacaagggcgcttccggttctgtgcgtgcttaaacaattttgcttctccatttaacatatcttagatcaatatttctatgagaactactgactccatacttgctg

SEQ ID NO: 41052 - DNA, 463 bp, Oryza sativa
  unsure (1)..(463): unsure at all n locations
agcttaaggatatagntgattgacactagcatcttgtcactttcagaagctagtggctgtggctacaattgtgcangagcacgacggctcatgcttgtaacatccttgtcttccaactctttcccttggctttacaaccatgtgcatataaagttctgatggtgccatgcgctttgggagtaactgaaggtgcatcggatgtacactaatcaaactccaacttttggggctcctttgaaacacaacaattctgtaggattttttttttaaaaaaatagttcattcttgcacaaattcctccaaaatttttcaatgatactaatacaaaatgatttcattcactggtgtgaaacattatctttcatcctctcttgcgacatggtaatagcaagggtactataatcgcgaccctgatcggaatcagaagttttagtaatatcacaatcttggaacatacataaaa

SEQ ID NO: 41053 - DNA, 445 bp, Oryza sativa
  unsure (1)..(445): unsure at all n locations
acttcgaaacncaagcttctgacctctgccattggattcaccatttccggatcccatcttcgtgcattcgccttccaatgggggaacttgtgtagctgtgtacatgaagaactggtgaagtttacatggtggaacaagtcttctcttttgtcttgggggaggggggttagcacgagttacgtctatcattttcagaccataatataataacactctcttatnttatattataatcggctattactttttccagtcaaacttcttgaacatcgtaaacgacacctaattagtttattaaaaataatatttaatatatcctgataacatgctctgtttgtgttgacaatattgctatatttttctctaaacttacatcagactcaaatacttctgacttaataaattcaatgccctttttattaaggacatacgatatctttcactt

SEQ ID NO: 41054 - DNA, 488 bp, Oryza sativa
  unsure (1)..(488): unsure at all n locations
atcttagagcacctgaggctgcagcttcatctttcagaaagggatagtagtaatacaggagtaaacaaaacatatatagaatcaagaatttagaaatagtagttaacacagtagtaaacaaagtatatgttgtcatatgttggaaccgaaatagtcatagntagagatgatttacaatagtttctaccagtagtagaacccataaatctatgattaaggccacatctaatgataataatattagtcataanatacttacggcagagaccatcgtagagttactcaacagtttaacataggagtaaacgtggtactagtaattaacaataacagcatgctgtcaatgtttatcaccagtatctccaatggttgcttgcatcgatcctctagggaaggttaaaatcggatggggatcacatgcagtcatagtagagacttgcagtttagcagttggagtcatttttcatcatcggatcatggcaatcaac

SEQ ID NO: 41055 - DNA, 437 bp, Oryza sativa
  unsure (1)..(437): unsure at all n locations
agcttcctgctaccaacgtgcattatgtttncaccactggatgcccgtattaatctgatggctctgcatgcaacgcatcacgaacaacagacaaatagagcaagtacttgctctgaatgcatcgtgtcatcttgtggacgatttanaacttaatttgcatccatatatgcatgtcctccgtgtaaatatctgaatgtcatcatttcatacagtgaacacaaaactgcaatcatatgtagctgaaccagaacaagttatcagccgcagcgacagaggcgagaatcaacaccgacagttcgacacaaaactgcaatcatatgcattccgccncnccctcctctacttgatctatttcttctcccctttttgggagacaaaacaaacgactatatcaatgggtatgtgtgcatgtaatccatggagtatgctagcactta

SEQ ID NO: 41056 - DNA, 437 bp, Oryza sativa
  unsure (1)..(437): unsure at all n locations
taataatttccaaaaaattactttctgctccctagaactaaaatataaggcctaaaatttacaatcttgccttcctacttggactttacagagnttttcttcttcagttctataacactgtatttcttattattatttacaaatgttttcagtagggctctcccctactgtttccactagtaacgtgcacaagcaggacttacattgtagttaagtttcgtcaaggaatccaaaagcaattgctctccaactattatgataattttcttgaccatttcctcacgagtaatcttgttttcctaacaaatagaaaaaagtgtggttntaaaacattgaaacacagaagagaactgacagcanaattcaatgacacctgacaacagaacattataaattggtcagacagtaacaccttcagctcttgataatgatgaaag

SEQ ID NO: 41057 - DNA, 463 bp, Oryza sativa
  unsure (1)..(463): unsure at all n locations
ctcagactctgggtatacatatatgatgtgcgtgtcatcttacgatatgccttnccattcacatattctacaaatatcataagcagagcatcgcctcactgtgtagaccatatcataagcagagcatcgcctcactatgaagtctacacttattccaaagtgtaacactaaaaaagtggtgtaacactaaaaaagttgcatcgttcatttacaccctctataaaatagtgctctgaagaataaggttcacgaagattaaacacaatgctctgatagaaacatgtacaaaggtacttgcatgtgtgcaaatagtttcagtactaaacactgacagaagaatgcatagcatataatttctgtggcatgaaaaaaaatgaatggatgttctcaaaagtaatgtcaatggctgatttgtattctaattgataccaggcactagcttttccataatattgattgaccc

SEQ ID NO: 41058 - DNA, 334 bp, Oryza sativa
agcttatacaatatgtggtcaaagccgcgatcggtctgaccacgtcccttcgccgttgatcgagtcgacgtggctttcctgacgccgtcgacgatcgatcgagcaggccatcgatctggtcgtccgtaattcatctactaaccgcttgcggctgcaggttcgcgcgcacgcacgcacgcgttgcatttgcctagtccttcgggttggtgtggcttctgaaaccgactcctcccccactcttctcccacgcaaatctgaaattgtgaagtgagcggcttgcctttaggcttatatatacggagaccttaacaccacgcaaagagagagggaggag

SEQ ID NO: 41059 - DNA, 333 bp, Oryza sativa
  unsure (1)..(333): unsure at all n locations
tgtcattncaattcatgatccatagcactctctgaggttcttcttatactgctgttcgaggatgactgagttatcttggtctatgatcagaatatccgatttatcactgtctcactcgatccacaacgtatggacctcactgcagatctttggatcttcatgttgtcatataatcgctggatctattatacaatatgggatggttagatcgactgctctatgttcatatgggtcttttgggcattctttatagttgctcatcctactgcttggttatgcacattacttactctaacatctatgttggcatatttacgattctgattgttcatc

SEQ ID NO: 41060 - DNA, 458 bp, Oryza sativa
  unsure (1)..(458): unsure at all n locations
agcttctctctcccatcaatagagcgacgagtaacagcatttcttctgttagaattggtgctgccggtctctgcggctttcaattttagaaagcatgaatcacacacacgatgtggcttgcctggagttggtgctagagcagccttcaacacttttcttgaactgcaagcatgacaatgaaccagcccacagttgtagcaatcatgtctctttctagtgaaaccaaatgcttgcctgcaacccgtgcagacagattgatctgcacctgatacccacttatgtatgcaaatacatgttgtgaaattngaaccacatgatatactcttgacatgccgatctttaagtgcttcaacaagacatggcttcttcctgtccttgagatcgccatgaccaagtctttcattggcacccattccccatgtatatacttcatttctttgaagtcaaactggaacatg

SEQ ID NO: 41061 - DNA, 373 bp, Oryza sativa
  unsure (1)..(373): unsure at all n locations
tgactgatgccagtctgtctagctatccatgtaagatatctgattcctttcaaatttggtctccttttcttttgccgcatactggtctactggacaaatgatcggagcttgtcccgtacactccggtcagtacttcgtgcaggaaataacatgtttatactttgcttctgtaaagtaaatcagcaacaaatcatactagtgcacatctatgctgttttatgtacgagatcaaccgtttgtaatcccaagacaccactcgtccaaccgaagttgtaagttgtaacaaaggggattgatctgganagcgtcagcaactcatgatcactaattaagtactactacttcgtgatcccccgcgttgtcactcgtggag

SEQ ID NO: 41062 - DNA, 406 bp, Oryza sativa
agcttataagcaattaagtaagcagaccgttcatactaatagaacaaacctgaagacgtttggcaactgtttctttgactgtacgtacgcacgcctgcggaatatgtaacaaatacgtatagttgttcagtcgttcttgcctggtgtgtgctagctgctgctgcatacccatactgatcgtaccactactctacttgtactcaatcccttcagagttctactactactcctgtatactccttttttattaaaaaaagtattgtctatactcgtaggagtagttgtgagagagtatcgagtaccgctgtgtttactcgcaaaaaaacatatcaactccaacttctctatacatccaaaccttttaccatacatagataaacttaaaccttttgtcaatgatctcatt

SEQ ID NO: 41063 - DNA, 433 bp, Oryza sativa
  unsure (1)..(433): unsure at all n locations
agctctcggcaatttggcgaagaatanactattcggattaataacagaattaaaacaaatacaggttaaactaagtatattaggcataacaagcgcttcgttcttgtagagtagataattggattttgattgagttatttttctaacggaaaaaggaaaaggaggattcaaaatccttttttcttcggactttcccaaacacaaaatacctccttgtattcgcactctcaaatgagagtggaagaaattcgactttcatataatatcttaatagaattccatgtaatgatcaatgcattttttggattctatattattcgcatgtctagaatcctaccaagagaataccccccatttttatgtaattgaagtaggattgacgaataagaaataaacataatactggttattagtgtcgcataaaacccgaaat

SEQ ID NO: 41064 - DNA, 459 bp, Oryza sativa
  unsure (1)..(459): unsure at all n locations
tatgccattntcaatccaatcgtggantttatgcctgttatacctgtactcttntttctattagccctttgttggcaagctgctgtaagttttcgatgaaatctttactactctgtctgccaaattgaatcatgtattcattctaaaaaaattcgaaaaatggataagagccgagaagtcttatattatgaaccttcgattctaaaattcaaattcttctacattgaatgtatagctgcagcaataaatttggatcagcctttctactccctgcatctacgttgagcaggtatctttaggtaaccgcacaatacctaacctaatttattgataagagtgcttattataaatcaattcttggcaattttttcaaaaattggattttgcatttttaggtgtcaaaataaacaaaacccatcctagtggatttgtgtggtaaggaaaacgggtatctattcc

SEQ ID NO: 41065 - DNA, 336 bp, Oryza sativa
  unsure (1)..(336): unsure at all n locations
agcttacaatatgtggagtattantgcaatctttctattagaatcacgttgagaatcgatgtggttttcaatgtgaacttaatcagaaactctcataaccaaccgcgttaaacatgtctcactcagatgggagatgtgtgaagtgccatctcaaatacatagttctagcacagtttgaagaagttaattaggaagaaaaccataaaaattctagaaatttaaacggaccaaaaagtaacttatcctgngagaggacaggtgatgcctttctagaacatttagcatagtcgcaactaatcaagcagtagcagtagtctacgtgctctctaatcacat

SEQ ID NO: 41066 - DNA, 410 bp, Oryza sativa
  unsure (1)..(410): unsure at all n locations
caataatttatctagctatatgtagtagttagcctggattttgcgtagaaagtntcggccaggttcttgatgactaaaactgcgaacaaaagttcaggaccagcttctccaatagctccaactgcgcctgcgtagaccgcgagcccaccgactgcgaagtcaccgactgcggcggccgccgcgatgacacagtcgatccgacagctagtctcgttccacacgaagtatcccgttccgatcacccgcgttctgaactcccttcgcgacgagcgcgactcctctgcccaagccatggagaggagcgtgcacgacgcgacgactaacacgcttttgatcatctgctcgtggatcatgtccggattcaccagcagcttctacggggcgtgacttattttacgatgccgcccacc

SEQ ID NO: 41067 - DNA, 458 bp, Oryza sativa
  unsure (1)..(458): unsure at all n locations
agctntactgtntgacaccttttaagatgcattgtaccaactcctataaagttaagtaactgcggtataaaaggattntaaggtattgggcacttgatcacgcgcactttggcctaagcaaaaagtgcctaagtccctaaaagaacgtgacaggccacacctgaaaatatgggctgcagacatattacgcctatgccaaaacatatgccttcgacaccctttaaaggatgacgcacataacatgctcccgagtaataaatcttccgggtaatatagaccaagtgtagctcatatgaatagcttctgatctgaatgattatcccttatgggatactccaaaataaatataataattgaatcccgactggcgcaagtattcggatgatagcctttacggagaataataatcggtccagtctttgagcatagaagatagactcatgactatgaatccatgt

SEQ ID NO: 41068 - DNA, 468 bp, Oryza sativa
  unsure (1)..(468): unsure at all n locations
acttcctgcaaccattcgaccaacaaatgtacaagtttgtgtcatcaaggtaaatgattaaggacagaanatagtggatccgaataattaaatagcttaactgcaagaaaaaagagggtgcaaaaggcatggcagctattttntattntgtaatccaacacagtataatctctgtatttttttttntgcttggtacagtgtttacatggcttgtttcactgaaataaactatacaagaaggacttgggctttcggatcacagatatgggtatatggcacagcttgcttggtacattgtttacatggcttgtttcactgaaataaactatacaagaaggacttggngctttggacccctgatgtggcacagcagtacatatgtatgatggattaatactcagagcatatagtgttttgataaatcaattgcaatgaggtggcaactatgggttcatgagcatatcatgg

SEQ ID NO: 41069 - DNA, 420 bp, Oryza sativa
  unsure (1)..(420): unsure at all n locations
agcttaatggttncacttataacactatagtatatgttattacattgagttcccatattcatatttttttagagaagggtattcttacccggcctctacatccaactggatatatacgggcctctacatccaactggatatatacggccattgaaatagggaacttagccccgcaaataacccaatctgaaattcgctcctacggagatttgaactcaggaccttggggtactactcaggtcactgtaaccactaggctacatgccctttcgtcatagtgatgttaatgaatctagatagatatatatgtctagattcattagcatcaattttgaatgtgaaaaatgccaaaatgacttatattgtgaaacggagggagtatgtagcaagcatatatcncctcgatgcccagtcgccgct

SEQ ID NO: 41070 - DNA, 392 bp, Oryza sativa
  unsure (1)..(392): unsure at all n locations
taganaacaatatggccaagctgaagataataaaaaatctttcagtggtacattctatcaagcaactcgatcttttacatggctctgaaccagcaagaagcctgaaatgaaggaaataaacagatccaggtctctaaccagtctgaaaatacatcgtttagcataagtacgtagtgatctatggcatttttctgtaaatttttgtactctggagaacaatctattggattttttatccatgaatgaatgaagctgatacctgattgagggaaagttagaaacatcaatcagcaggtcaccaatttttgtcttagtagcaggcaataataatggcatcgattgtcgtcgctgaccaccaggatcgtcacctcgttctcccactgcatcggatg

SEQ ID NO: 41071 - DNA, 480 bp, Oryza sativa
  unsure (1)..(480): unsure at all n locations
agctntggatgaacacggaaatgaatagctagtgaaaaacaaacaaagcagcanatcctctttctctgtgggggcaatgcanagcttcttcagacaatccagacctctcctttggagccttccctgccttcttgcttgctttcacaagcatccatgattctatggttgatccttctgtcccccatttgcttctatctgcgtctttatctaggcctggccgctaatactttattgagtggatcatctacttaaatatgagagcgtattaaatattntaataaataaagttaataaaggatggtataaaacaagtggtataaaaaacacagtggaagagaattnttcgagaaaatgtgtggttttaagtgtggagtactttttttaacaaataacggattataactcggcctctacactaataggaagatgacacagccaagcatgaagcaaatgattcgttcaataatccggaaataatct

SEQ ID NO: 41072 - DNA, 302 bp, Oryza sativa
  unsure (1)..(302): unsure at all n locations
ttacatcatttacaactcagcccaatgattcgagtgaaccttctatgaaatttacagctcgactggctactaactttcaggtcagattcttaaacaaacaacgagatagatctttcacatttgcaacatccaatggaaagacttgctactaactttcagttcagattcttaagacaaacaacaagatcntcacatttgcaacatccaatggagagagttgctactaactntcagntcagattcgttaaacaacaagatcgatctcatatttgaacatctaatggaaaaggctgaaaaagata

SEQ ID NO: 41073 - DNA, 451 bp, Oryza sativa
  unsure (1)..(451): unsure at all n locations
agctngactaaattagtcagtggatgtcaacatctgattatattacaaagactgaaatgtaacttatgcagagatttagaagtatatgcttaacagcatagccaatccatggaccttgtactccgtaattcatataaaagataattggaccaagaaacataaacacaacatcctaaggagcacaacctgagtatgtatgtatacatccagtggcataccatcatcgaccatggatatttactcagacaaaacacaatcggcaaaataaggtgcacagccaaaagtgtaacacaacagcacaccatanaaaacaaataagcacccaaagtttgctctgacattgaactaatattaatctgtatgaaactgaanaaacagtagatctgaaagaaaatgaacagctaanaaggataccaacaatacacgttgacattgaactaatattcatcta

SEQ ID NO: 41074 - DNA, 444 bp, Oryza sativa
  unsure (1)..(444): unsure at all n locations
agcttcagccaccaagtcaaaataagccttagcaaaattntcgaaatttcagaagcttcagccaacaagtcaaaacaaggagtaatgatgggttggttggcttgttacatggttcagccaacaagtcaaaagtgagagcacttaaatgctttctcgggaagggctgattcacttcacaaagttgcaaaagggttggctgttggtggaggcagcaataaatgcatttaagggtggctgatgtggtgatgagggtgctgctggttgtggtgaacgaaaatttggtggtgttgaaggtggatttcgtggtgaatatgatggtgatggtggcagcggaatgaacatgaatgaggtggtggtggaagtgtttgtggtgacgaaatcgtgagcagaacccgaaactctataggacaaaactagtagaactagcaacttaaccaatcgatg

SEQ ID NO: 41075 - DNA, 361 bp, Oryza sativa
  unsure (1)..(361): unsure at all n locations
tcctcagatgagaatttctccctaattggagctatcataccctgaanagcttaatcggctaactgggcatcagtcaaacttaagctgtagcacttattcctcatctccctgaatctctgaatatactcatgcacaggctcatcatgtctctacttgatcgatgtcagatcggacaatttcatctcgtgaaccccactataaaaatagttgtgaaactatttttctagatcggcccaactgttaattgatccatatggtaaagaagaaaaccaaataaaggccgatccagacaaagataaccggaacaacctaaccctcagggcatccacagncgatgcttcaccacactgggctaaaaatc

SEQ ID NO: 41076 - DNA, 422 bp, Oryza sativa
  unsure (1)..(422): unsure at all n locations
acatcttagtggcattttctattattcagcaatcacaaattcacaataggagccttgctgtttgggaaggggaaaaaaatacaacatttccttcatcgcaagtgttcagtagcaagcattttgcacataaatcaatagggaaatcgttatgatgataacagcacattcatcgagcagacaactagaatacatgaacaaccgaaatacaaggttttcttttactatacaaaactatgatgaatgatttgcacgcatgaaggatatagtggaaaaaagtatatttattaaaggcatcagaaacagcaaaccattacataagcaccttcgatttgtgaaggacgactttcatgtaagaactaaagcaacagcgaaagcttgcagttntaaagatgtcgcatcacatgaaatttcccagaccatac

SEQ ID NO: 41077 - DNA, 458 bp, Oryza sativa
  unsure (1)..(458): unsure at all n locations
gcccgcttagccctgattatcatgtgttaatggcgctcccactctacttcatgtccgtcttggaactaccaacctgngcaatcaacgaaatcgaaaagaaatgccggggttttctttggaagggtgacgaagatgctgcaggctcgtgcagcttggtggctcgggagaagctntgcctccctatcaagcgagggggattaaggatcagaaacctacgcctaaggggaattgcgctttgcactcggtggatttggctgccgtgctgagccagagcgtccctggacgcgcgttgcacctctttctgacagaaagtcgctgcattgctttcccgctggtagccaagtattgctggggaacggagcctctacctcggtttggtgcgacagttgtgtgccagactgaggatcagtgcantacagatctccaattctttctctattgcaagctgagtgcatcat

SEQ ID NO: 41078 - DNA, 397 bp, Oryza sativa
ctctatgtagcacactactgaaccaagatgatctggaggtcctcgccaagctacccaagttacagtgtgttaggctccaacacatttcatgcacagggagcgtgctcatcttcaaggaagatgatttcaaatgtctcaagtaccttcttattgagggttttaacttgactaatgtcacttttgaggatggatcagcctgtgagctcgagaagatggttttatcttccaccaccatagagtctatctctggagttgatgggcttccaaaattcgaagagcttgagttgaacaacagccctgtcccgaatgaggtgaaagaagccattgaaaacaataaacggataaatcttaaatgtaatgaaccatgaactcaagacccaggcaaacggagatgaac

SEQ ID NO: 41079 - DNA, 433 bp, Oryza sativa
  unsure (1)..(433): unsure at all n locations
ntacaagtattgaaactaaacaaaggaaatataaaaggaccgaaaccgttattacgatcaataggacctatgtccagaagtgacccttcagcaaaactatcctcaacacaaacgtgatcaagccagcggaaagaagtgactttaatacagcagagaagagtgactgctgaagcccaaaactctccagatgaccaaggtttccatcaagcttcaattcttctggtgccagtcctccatccaaatcttgagcttctattcttctggtgctaaccctccatccaaatcttgagatgtatttcacttgccacctaccttgtaagtctgccccccaactctgcgcccaactgatggctcggataatggtcttgctgcctcgcggnggaaggctagctcgctggggtggtgccgtggtggtgggatgtgaatatatact

SEQ ID NO: 41080 - DNA, 377 bp, Oryza sativa
  unsure (1)..(377): unsure at all n locations
agcttccctggtgtcttcagccataagaacgaanagcaaaggcaggtgatgcaatgctaccatctagctgggacacgcattctgaaatcttacaacgaaagcagttgccctacttgggatgcattctgaaacctgacaagaaaatcagttttgtcatcagatgaagatgacaatttcaggcatgtaaaaaaaaaaaaaggacagacgggagcattatgaatcttacaacaaaagcagttgccctacttgggatgcattctgaagcctgacaagaaaatcagttttgtcatcagatgaagatgacaacttcaggcatgtaaaaaaaggacagatgggaggacaagtgcgatgcatcatgtngcttgacaatatatttc

SEQ ID NO: 41081 - DNA, 434 bp, Oryza sativa
  unsure (1)..(434): unsure at all n locations
tgcatcgcgccgcttgggccacctcgccgggccatacatgttggcatcatcgctccctcaccttccccattccaatttccaccagatcagacgccatgaggacaaaaaatggtcctctgcatcacctttgcagattcatcaacaacactgttggccctcttgaacaggaacatgctgaaagaatcactgcatgacaccatcgctggtagagctagatgagaccagcaggcaaagcccaccggtgtacagatcggtgaaaaggagagactcggtggtgacagagagataagagagagtgcgagagcctcggcgaccaaccacctaccaactcctcgttcggcgggcgctcgcttcgatgggcgntgcccagataaagccnctgcgctttctgctgcatcttgggcggatgtcgtctggtccccgcctgctcctcg

SEQ ID NO: 41082 - DNA, 353 bp, Oryza sativa
agcttcgatttcctgcgcaccgtgatcccgtatgttttcgacatatcaatctcttcacacctcttgccacctgtgagctcccaatcgaagaggtaaagccaacttgcaagcacaagctccatactagttaacccaagtgttattccaggacacaccctcctaccggagccaaaagggatatactcgaaatcattacccttgaaatcaacgagattcgcgttgaatctctctggtttaaaaatctcgggatcctcccaatacctagtatcccttgcaatggcccaagcatttacaagcactcgagttccttcggttatgtcggtagccatgacgttgcactgctcacggcattc

SEQ ID NO: 41083 - DNA, 432 bp, Oryza sativa
  unsure (1)..(432): unsure at all n locations
tgcattataccaacaatcattntatatcatgtaagaagtatagaccctatgggtgtatatagcgattattcatcattgtttctagtcggaggacttggcaaacataatccaggatggtgttggcaaaaaaaaaaaatctagaatgatcttagaaacactagctaatatacatctctactagagacctattgtctgaccctgctgcaaacaaattgttaacagaggattgtaccacttacctcaagttcataagcctgagttctttctttatcatcttggttatcagatccttcttctttatattcatcattttcttctctgtatccttttcagtataactagcattttccaccttcttttgtatataaccaaaggatncacagacaataccagacaccgtctcatactgatgaccctgcaaacaaatgcatt

SEQ ID NO: 41084 - DNA, 448 bp, Oryza sativa
  unsure (1)..(448): unsure at all n locations
agcttggaagtgtgtgtgtgtgatatgaggtagtgatgtccttttatagggcagttatgacggttgtgagaaggggaaatgtccgaattgtcccgcaaccattattgggagagcatctggagcgtccacgccaaaccctatgatcaacggtgatcggggcggtttggccgaacctgggctgggccctcctagcctagccttcggtcggtggactccctagactctcctctgtctatttctcggagttntgggttgatttactgatgttttgatgaagatcacaacccttccttgtatggatacataattctcactttagtctagatttcctcccaacatcagggtttatcatctgcatacaaatatacaccaacacttgtggaatatgtgagattaagcacctatncactatgtggatgttttattatctaaactttatgcagatggg

SEQ ID NO: 41085 - DNA, 375 bp, Oryza sativa
  unsure (1)..(375): unsure at all n locations
ngagctgaattgaagaggctctattgttctatattgtatactagaataggaagagagtagagtagaagaagtcgtaagaattccggagttgtcggtaatcttcttctatttcttttattctgtttatttctctgaattcaatataatattcttcgtgagtaatttagatttatcttgtgagaattatctcttggttagttcctaaatagcatataggattattgttcactataatcaactaaaatatagtgattgctttggtgagttataaacactaaagtagatattaattgcttagacgtggtgtttacgtaattggtatccagtaattgctgcgtatcccactgtacgtttgtaacagtgaaattggtaatc

SEQ ID NO: 41086 - DNA, 466 bp, Oryza sativa
  unsure (1)..(466): unsure at all n locations
tattgtacactntactaggaattcaatcaccaaacacattcttgctagctattatatcttggcttccatggaacatctaactaaccataaagcatgcattcttcacatgccttattacattgtaccaatctcatttttatatgatgacctggatagctaactagcttgcacatcaggaccaaccatttatttatttatatttattagggaagatcgtatatagtggacaaagcctttactatgtattagagtataccccaagtccatgtactgctagtatttgtccttcaaacctacgtactattgcttatctacggcatgcttcactcacctttattcctggctnttttaaaaaaaatttgccaggactaccaatttagctagctcatggtttcccattttcagataatacttgtagtaatatacaggttatggtacattagttgggagaatatgtgaacaaact

SEQ ID NO: 41087 - DNA, 429 bp, Oryza sativa
  unsure (1)..(429): unsure at all n locations
taacatgcactatctcgtcttagctcaatgagtcccttctaatattnttagaataaaataaataaataactggtgcaccgtgcagggcacatatgaagatgcgtctatttgggcatgtgcaatagttattaatagagagcatttagccttattaattaaaaatatttattgatataggagagaggagagataaacatcgtcgcgacaattaacagcgaataaagtaggaaaaagaaaaaatatatgaaaaaaaggttgtttagacaaattgttagtctttactgtctcactggtgtaaggatatatagtctttaaattaacgtatattgcttaaaagtgtatattgggctatcgagctttacctttaaacatgcccaacctatgtactaaaccacatataccaattattcaagccttacaaaataacct

SEQ ID NO: 41088 - DNA, 425 bp, Oryza sativa
  unsure (1)..(425): unsure at all n locations
agcttatattcaaatctaaattaatcatcaatggcacttcagacattngcaaccaaacataacaatgaanagaaggaaaatgtaacagcaggggcatggaagagatcaagctaaaatttcaggggcatagaatggatcgggtaaatttcaggggtatgaaagggattaagtgagttttcatgggtacatagggaatntactctatctgatacatattgattatccatgtatcgtagaatttctccatcagaaatgttatttttgacaatttctcacttgatatctataaacaatacattgccttaatcttgttttgattcacacaatgaaaatgattgattgccatttatattagttcagtggccaatataaagaatctagttgcagctacagttntaaatatgaaggatccttataaaaaagaa

SEQ ID NO: 41089 - DNA, 473 bp, Oryza sativa
  unsure (1)..(473): unsure at all n locations
acctgccgcatgcaagcttcgcaatccgtgctgtgtacagtgtactcggttgcattgtcaacttatagataggtatgttgaaattaaaatgcatgagtgtggatcggatcaattggcaagaaacacattgtcagcttctgtcctttttgttactattattttttgggttctttggaacattggatcaatgttatgtcaaaacaagatttgttttgactttgacttacgatccgttntgttcaagtattcggatgataatgcaacaagcctaacgaanataaccatatacttctttcttttacgttacccaccatatgattctccatgtgtgtgttttggttttttaagatcacctaacaaaaacaaagaactcctttgtcaaaaagaacgtgtgttttgtttcgcttgttttttctttggtggtaactgaaacttgagaactatgagctgttccgtcgtgtgatacatgtgga

SEQ ID NO: 41090 - DNA, 453 bp, Oryza sativa
  unsure (1)..(453): unsure at all n locations
agctttcttggtttcattctgaaataatagcaaatccagtttggtccatggaggggttatctgaaacattatgaccataaaacatggtattaagcattgctagccaagaaatgtgtggtttttagacacgatgttgataggtgaattttatgctcatccattattagtctttgcatcgtgggaactgatttagtaaactctctttagtgtcatggttcaaatagcgtctgttctacctagatgataggtatccatatggaagtcttggctttggaattgctctccttttgttctcctgtgattaaataactttaacatgtgtgtgaagcanggacgcctatgcagcaaacgaagcataggaagccacaccgctttcgtccaagcacagtggcactgcgggagatcatgagatttcagaaaccaccgaactgctgatcccgttgcaccatttct

SEQ ID NO: 41091 - DNA, 404 bp, Oryza sativa
  unsure (1)..(404): unsure at all n locations
taagcttcgtcgtcatagatctcctggaattcttgatatgtgttttgactagttgataattataatttgcgtgtcgatgcgttcttgcaggaatcgtgcacttgagcagccaacaacaacacccgtcatctcgaaacatctatgcagatgtagttaatctttctcatgtccttcaatttctgaattcccgtaagatttaaattaatttgttggcatgttactacaaaatctcgtagacagttcatagccacctttacaaaccaattctaaaatgaatatgtactttctgaaggctaaattctgaaacaattagtaatgttggtgatagtgattctgaacatggctttgtgtatgtccatgcanggatatggtggcagcggcgacagacgtggaggtgaatgact

SEQ ID NO: 41092 - DNA, 485 bp, Oryza sativa
  unsure (1)..(485): unsure at all n locations
agctntgattcccgaagagttggccgatgttctaactccagttgcttatctcgagcaacatcagttcaagctggaaaaagccaagctaagactagccgaacgccgtgagcgcaaagaaattgaagccacaatccaggctaatcggcagctcgtgcatgaagaaaaaaccaaacttgatcagctatccgaaggtccgatcaaatctaatattgatcagctcgaagctcgcaagattgagctcttggcacaacttgaagaatgcaatgccgaattatatctggagcacaagaaactagccgatctcccgcggtctgtcgaagagtaaaaagcaagactcanatcggctatcaagaatgttgctgaactgactaagtctttgaagatcattctggaactgatgctcaagatgctcaagctattgaagaagtcgaacaaattaggcanaaagctatntcagctatccagcaatacttgtctcaataact

SEQ ID NO: 41093 - DNA, 215 bp, Oryza sativa
ttacatcggccgatccattggagagagttgtctttgttatggaacttcaccaaggcgcgcttttgaaacattaatattatatccgattataatgctaagataattaacaaaagtatgttgattgctttgcatgggagtaccatgagatgccgggtcttagccgcgagcttgttgagcatctgcttccaatttaaccgggtttttagtcttataag

SEQ ID NO: 41094 - DNA, 468 bp, Oryza sativa
  unsure (1)..(468): unsure at all n locations
agcttagtacgaatcttggtgtctatatgactggtgaatctgaaaaaaaaaacactgccaacgaatgttagcaaatccgaaaaagaaaaatcctcatgttcgcaaggtggtttgaaaggctccagtgtccatgaaccgaacggtttctaattcttcagtagcaggatacatagggggtgtttagatccaccggcaaattttttttccctgtcatatcgaacgtttgaacacgtttacagagtattaaatatttaaaaaaactatttacacagtttgcgtataaattgcgagacgatcttttaagcctaattgagccataatctgacaatgtggtgctacagtaaatatttgctaattatgaattaattaggcttaatacattcgtctcgcagtttacatgcggattatgtaattngttttggtattagtctacgtttaatatttcacatatgtgtccgtatatctgat

SEQ ID NO: 41095 - DNA, 455 bp, Oryza sativa
  unsure (1)..(455): unsure at all n locations
agcttgatgtcgagtgtgaggttctacgcatggntcggcatcgcaacttgataaggatactaagcatatgctccaacttagatttcaaagcactgctgcttcagtatatgcccaatggcagcttggagacgtacttgcacaaggaaggccaccctccactaggattcctcaagagactggatattatgcttgacgtgtcaatggcaatggagcaccttcactatcatcattctgaggttgttttgcactgtgacctcaagcctagcaatgtgttgttcgatgaggagatgacggcgcatttggcagactttggcattgcaaaattacttttaggcgatgacaactctgcagtttcagccagcatgcaagggacactangatacatggcttcaggtacttgcattaactattcatgaaaaaccattntgcccaacacattttgttatatatataat

SEQ ID NO: 41096 - DNA, 446 bp, Oryza sativa
  unsure (1)..(446): unsure at all n locations
cgattgatctcgccgaatcaaatagctgatgaagatgatttcaatctcatcgggagacgtattctggctgggttggatctttctggcccgaagtcaacgagtagcttcttgttgaagaatccatctcttgaacacatctcgtcggaatcctaaagcaccaaaaccccctacctagcgcgccactggtcgacgttgatgtcgcgattccggtatttgcatagtatggggatcgttggtactaggatatatgcgagactgatgtaaaagagatggcgacgaggatttntatacaggttcggatcctgttagccaaagccgggcgttactcttattcatcattatcgcaccagtataatatctggagtagcctatctagctgcttgcgacgtggtggttgaacatttccgtctactcagtggaacattccgatattcttcgtgaatagc

SEQ ID NO: 41097 - DNA, 360 bp, Oryza sativa
  unsure (1)..(360): unsure at all n locations
agctngacacaggacagatatcaagtaaacatggcacaagcgagcagataggtaaaaccctgaccccatataattagcaaaacatgcatatttatttgcaaacagtaaaacatttgtaaattgggatcaacatgctcaaggggaatgtgtgacttgccttgcttcttcaaaacaatcttccgaactcttttcctcgcgaccgcgaagttccgaaacgacggattctacacgttggcacgcaaaacgaggaaaactctaataaaaaccaaggaaacagtacataaaaagtaaacaaacatgtagagctcaattttagatgaattntgcaagttgaatggcccaatttggagttcgtatgaa

SEQ ID NO: 41098 - DNA, 441 bp, Oryza sativa
cgagacactatccaatgctcaagcttgcacagaattcaacatgtgcaccatgggtcattccaatatgggaccatgacttatttgtgggaccaaaggagagcatagtcgctgacttggaggcgaatttttaattaatgtaaacaaatattatcatgcttatttcagatctaacttttagttattcatggtaaagatgaaatttgtgtacccttctgagacgaagcagcttacaagagactggattctaatgaaagctgataaagggtggagatcctacaaaagccgtttaaagggaagatactttaatcctgatgtgaggactctaaacgatatattaaaatatgttccacaatgtgtcaatggatatcaatggcgtggtcttgtaaaatatggtgtcacgataaacacaaggtgacctcttcattttaatgcttaacatac

SEQ ID NO: 41099 - DNA, 422 bp, Oryza sativa
  unsure (1)..(422): unsure at all n locations
agcttcggtatttcaaagttttaagacctatttaataaattntaagtaaaattatattgaaaaatatattattttgtttggatgcttgctgcgtaattgcgcgggtcacccagctagtttgtataaatgtatagataagataaatagttaaacattctagccttgcgttgtatattaagaaaacaaagctacacagtttacagccccaccaggtaattcctgctggccagcatgactagtaaccgttaactggaataccgccatccatttcccgatcaggctaggcttagacttttaagtcagtttattggcttatagaatttataagccggtggatttaatgtcctaagtttagtggtggagtcatacatctacctcatataagtcanaaaaagcttctccaatctagcttttggcttaat

SEQ ID NO: 41100 - DNA, 453 bp, Oryza sativa
  unsure (1)..(453): unsure at all n locations
tgttccacatggagctccaaacttgtcttgcgaatgctctatccatgagtaggngattagccgtttctggttcaatgccgcagaggggacagatctcactgttatcccagccccttagttgaagtttatcagcagtgaggatttttctgtgaatcatcagccagccaaagaatttgcatttattttccgttttggccttccaaacgaaagttgatctgttgtcctgtatacttcctagaaactggatcctgtaagccgagctagccgaatagcatccatttggggtccatctccatgatatggaatcctcaatgccattctgcatatgaatttgctgcagagagtgccaaagaatgatgaacttcctgacttggaccgtgctgttcattctccgcatctgacgaagccagcgattatcgccaaggtcctgggcaacccgtctgtttttctgga

SEQ ID NO: 41101 - DNA, 468 bp, Oryza sativa
  unsure (1)..(468): unsure at all n locations
agcttgggaaaaagattctaaactcctgagagcatgttccctcaaattctatatgccaatagttattgcaaaattttaacaagagataggttcatatttgaatatatacatatcactaaacatgtaaatccatatatgacttatataaattataaaaaaagataaattaaactctgacaagtatattcataatcatatttgtttttttatagcttgtataaatcttatttgaactgacatatttgtggactgatatagtaccgtacatattaatatatctttttattttttatagttgttcggatgatatattagagatgaggaaacatttcccttctaacgtgttgtgcagacagtgaatcaatgggtgaatcatcccattttccacgttggtgatggcaatgttcagatcgatttcctgcgagctgagatgaatccagctncnctatcagctcatggtgtatttct

SEQ ID NO: 41102 - DNA, 416 bp, Oryza sativa
  unsure (1)..(416): unsure at all n locations
tactntctggaacttccattgtatggctattatctatgttctcacagtangtataaaagtgttagcggtcgacctgtggctgtaaaaaccaatgttagactcttattggttgagtcaactgaaaaaagaaatgaaaaaataaaaaataatttacggataaagcttttacatctatcatttaaaagtcaaggctagaaaaaatagactataataaataagctctgaaatcaacttaaaattaagttttggaattcaaattataaaccttctgtattacaagtttgcattgcatatataaatctagcttggatatgatatgggtggtaaatttggtgagaaaataaaactttggacccgactgcatcaagttagatgaatctaaaaatcatttggctaccaggngaatagtcaaaatt

SEQ ID NO: 41103 - DNA, 453 bp, Oryza sativa
agcttcatcgctgcagctcgacgcccgcgtttcctcttcagtccgacggagggttgactaccactaccctacttctactggataccctctcacattcctttacacgcgcccctgctggttcgcctacgcatccctctacacgatgccttcctcgattaagaactcggttggaacctcgttcccctcttgttcattccagggctggctgcttccctccgcgattgtatcgtacagtatgtgttcctcatcacggtcagccatctgttgatacaataaacatctgctaagccacgagacatttatgctttaacaatctaattcatgtatgctaagagtacacgtctgtaattacaaccctacacaaccttacgtgctaagtctagattccaatcgcgatataagcctattctaggtgacgcatattatacaaccctatctagtaataattatata

SEQ ID NO: 41104 - DNA, 443 bp, Oryza sativa
atataacaatttaagtaatgtaatgttctcaatgacatgtgatctctgtcaggctgccttgtcttgcatgatgaccttgtatcatcttggctttcttttctctttttattttttttaaaaaaagtttatttcttgtactcaatattcttttcttactagtatgctatcctgaatataggtgaaggaactggtttgcttcgccttcatagcacgtacagacatgatttaaaaatatacagttcacatgaaggccgtgtgcaggtatacttttggccttctttttttcaatttatagcccctctgaaatagttcaatttagataatctgaaatagtttcattttttaacttaaccctgctttcctttctatgtggacattggcatgccaacaggattacgataattttacctgtgataggaattgttgtagtacctttcactact

SEQ ID NO: 41105 - DNA, 342 bp, Oryza sativa
  unsure (1)..(342): unsure at all n locations
agcttctccacttcatcaaaattntcaacggcttcaccaatatcgttctttgtagaccaatattcttgcaccctcttttgtaaccactctaaattagcctctttactcattatacaaacttatatggcttagccgtgctacactagccggctttacagagataggtacaaatttgccatcggagatactaataaaatcatagctagaaagatccctccccgataagcattggatattcccatgacgccactcaaaagtagcatcggccattgcaacctcggccgatgtatccgcttgaacaatttcaacatcatcgccgtcccattgaattaaacattgatg

SEQ ID NO: 41106 - DNA, 384 bp, Oryza sativa
  unsure (1)..(384): unsure at all n locations
tgctcgattngctcggcatatttaacaccttcaacatgatccatctctctcgtatggtggaaattacaaatgttagccaagctcttcaattcgatcgcttgatattggtattactgtcgcgtttaggcgtttaattaacaatcagcgccttgtaaggttactcggcatgtcaactcgaaagtagtcgctacattgtcatcgctcgcttgatcttctgtttttcagtattttacagaacacaacactgaagtatgtgcgcgcacaattactccaatgaacacatactcttactggaaccatttttcagaagagaacttttatgttgtttgcatccaaaaaggtaaagatccaactggtctcaatcataggaaccattgtaaaagt

SEQ ID NO: 41107 - DNA, 391 bp, Oryza sativa
  unsure (1)..(391): unsure at all n locations
agctntctaaatcattaaactgtgcttctttgaatgataactatatatatttaataaaataaaataaaatatatttttagatctgaagcagacatgcagttgatttttaattaattatgtgctaatctactttcttgatttagtggctgcactaccttgngacatgataaatttatagcgtctttcatggcgatatatagcagttaaaaaatgacctgtttacggcaaccaggagcctctttcgcacttgagcagcgtcaaaattgcaaaatattcagcttaaactaccaaagggaaacgagtgtcaagttggtgtaagaatcacgcaatatattctctgtacggacaaatcaaagatatgatctggaggcagtcgaaacaaacacgtccc

SEQ ID NO: 41108 - DNA, 355 bp, Oryza sativa
  unsure (1)..(355): unsure at all n locations
gttgtctcatggactcctatgtttntggttactctttctttctgtcaacgtgaacttaagcccgtacatatcaaacaaaaacggtaatcagtttagtagtagttcaatgttgtcgttggcttgactgcaaactgcgaattacatctttgctacttcacctgtaaaatgtttatctctatcaatatctgttatccaagagttattttctcacagttatgtattatatgcagggaatagtgctgctgatcatcttgatatcacgactcaaatgtatgatgggaattgataccccatcaaagttcgacgctcccccggaatcataagcccactttaaagcagttctgaatggaaactc

SEQ ID NO: 41109 - DNA, 447 bp, Oryza sativa
  unsure (1)..(447): unsure at all n locations
gcttcatcaagaatatattcagcatcaatgtacgcgattggcaatatcaatgatcaatgaagccgattggcgatacgtgagcaccctgtctctattccaatcccatgattcttcttgattgatggtgtgcttaactgttccttttcttatctcaggttaagctccatagaaaaattgctaggcaatgcatgttgttagtacatactacttttcacccttcaggtctcatatgattttcatgactaatcattatagttcagggaacttaactaaatagggtatatgctttctatntgcagaaatttatatttcccctatgttcttgaagggtgaatgttcgattatcctaaacatttatcctttcagatagtcatgttagctactgatctaagtgtaatctttttgtcanaatcatcgaatattaagaaaatgtaatgtgtctgagaa

SEQ ID NO: 41110 - DNA, 443 bp, Oryza sativa
  unsure (1)..(443): unsure at all n locations
aaaccgaagtaagctacctcctctggcaccctgccatcttgtgtctgcgctactacctcatccacccgaattgaccattggtccctcgttgttgctggtttgctgcttgaagggaggcacaactcatgcgccaagcaagaagcatggcctatggccactcaccgcgctgctgagaaggctgttcacgacgagtgacggtagcaaggagtcgatgctgtggctggtgctgaggctgctcattccggtggtgctgctggtggcggtctgtgtggctttctacatgcgcagcggacctcctgaagtagactgcatcaactgttaaattcttgtatattgtcgtctactttacatncggctgtagaggtccgtctgccagctgtgcttcacaatcggagtcgactactacttgtcacggtaagtatttccgcggctgctggtgtgtc

SEQ ID NO: 41111 - DNA, 460 bp, Oryza sativa
  unsure (1)..(460): unsure at all n locations
ctcgtcccngatccttaagcaccgcggctgcaagcttcatgaagtacttgcacgcccagatctgagttctcatgaagtcgtggcggccgtcagaaggtggcgctgacctgcagtccgaatacaccccgcgcgaatcctcttaccttcggagcctctccatcgatcctgagtaaaacacgagtgcacgagtgtccgaggtataatgacgacgaatatgaactcccgaaagaactcacctgattgtttagttgacctgcacgagcgcgggtaataggaccatcatgctgtatatgaggggacgtggatgtatccatggtgttgatgtcctcatcatgtgagctagctacaccattatattggcgtcagtatgaaataaagtccgtattcggataatatgaatgaaggtgagtacggaagctgaatgaagtaggtttctttacatactgtgcgatgcatcatg

SEQ ID NO: 41112 - DNA, 192 bp, Oryza sativa
cgggcgttggtggggagacttgggcccataccacggcccgaaaggatttcggctgaaaatagtttactgtggaaccaccagcttgagagaacctagagatggtgctcccccagtatgaccacagtctcaccaaaataccctgtcgaaagagaagcaactgaaagcccatggataacaaatcccccggggaaa

SEQ ID NO: 41113 - DNA, 472 bp, Oryza sativa
  unsure (1)..(472): unsure at all n locations
agctttaataatatggccgtgatctgtcattacgtgcgactatctccactatagaaagaanaataagaaaggatcaaattttctagtatttactagaaaagggggctttctacatagggatcgtcaaaacaacgattttgccctatcagctgtaggaagaaaggacacttcacgagaatcaaaataggaagaaagaaagtatggcctatactactctatggatagagttctcaaattgatagagaaagcaccgtaaagatcaattagtgaccgactgggtcgatacaactaaaaaaaactgcttacttatcccatgatatggggcannaattangaatccgcttatgtaatagagccgatccactaagggattaagcagcggtgtagtatcagatcccaaagatagtaagttcttttttcttgcttatggngaaaaagtctttttcaaggattctataganatttcatatat

SEQ ID NO: 41114 - DNA, 360 bp, Oryza sativa
  unsure (1)..(360): unsure at all n locations
ttatagaaaaattcgaaaaaaattcacaatatagattagaaatatatcactccacaaacatatttgttagaattcaacttctacatattaaaacaaaaataacaaatataactgcaaaagtacgggaactattttcagtttaatttgttctttttgttgcaacttgtagaaatctaatttggccttgcatgtttgtggagtaatatatttcatattaatctatattatcattntttttaaatttttttaataactatttagatgacatggcagcagcgagaagatatccctttgacggatgagaatcatgccattatgccatgacatacgacaacatagtccacggtacacccctcctag

SEQ ID NO: 41115 - DNA, 465 bp, Oryza sativa
  unsure (1)..(465): unsure at all n locations
agctttcgacagtcgagtctgtatgatcatatgcttaaccttcttctgaaatgcacacggatttcccactctgctaataataagcagcaaattcacttaagatgtgcttagatccagcggcaaaactatataccgtgtcacatcggatatacggacacacatttgaagtattaaacgtactctaacaactaaacaaattacagaatctgctcgtaaactgcgaaacgaatttattaaacctaattaatccatcattaacaaatgtttactgtagcaccacattgtcaaatcatggagcaaatangtttaaaagattcgtgttgcattatacacgcactctgagtaattaatgtttattgttgactatatataatacttcatgcatgagtcccaacattcgatgcgagtgtgaagaaactggccanggaaatctaacagggccttatactccatccatcccatttg

SEQ ID NO: 41116 - DNA, 316 bp, Oryza sativa
  unsure (1)..(316): unsure at all n locations
ctctgaggttatttatagaattttccaggccaaacataaaaatcttttgctctaattagccaacataggtgatgttgttattatggtatggtcggtgtanaatacaccatgaggcatcctctaactgtgtgggcagaccaacaagaataccattttctttgataggaacgttcagtgactcaattttaactatgattattttttgcttatggaaacaatgtgttctatcaaattgactgttgtgaacctatattcgttatggggatgaaattgttctcaatgggaaggaaaagtctatttacctcacatttatgga

SEQ ID NO: 41117 - DNA, 355 bp, Oryza sativa
agcttaagcctgacggtactattgaaaagtacaaggctcggcttggtgctaagggctatactcagaaagaaggcgaatatttctttgacacttagtcaaaaaggtactgtggaattggggcttcactatattgggtatcctgcggtactggagggttatagtgattctaactggatctctgatgtggatgagatcaaagccactagtgaatatgtcttcacattgggtggtggtggtgtttcatggaggtcttgcaaacagaccattttgacgaggtcaaccatggaaacagagctgacagcattggatactgctactgttgaggcagaatggctgcgtgatctattaatggatc

SEQ ID NO: 41118 - DNA, 404 bp, Oryza sativa
  unsure (1)..(404): unsure at all n locations
tgctacgccttganatccgctcggcttcatctttatcttgagggagctcttgggaggttaaaaatcgtatgaggggctctctccagtcggcttcaatcatggctatgtcttgagtgtccacaacttgagtgatttctttctgaggtatggtcggctcataaaggtgttcgacgaatacatcggagggggccgcctcgcgcttggatccaaagttggctagtctgtcggcggcttcattgttgtgtcggagaacgtgactaagctcgagtccatcgaacttgctttccagtttgcgtacctcttgtcgatatgctgtcatgttatcgtcaaggcaagaccactttttcataacttgatttacgactagctgtgaatccncacgaactattagacgctcgatccct

SEQ ID NO: 41119 - DNA, 375 bp, Oryza sativa
  unsure (1)..(375): unsure at all n locations
agcntttatgccgngccgtanaaaattcgattagccgagaaactgtatacttttgcaagcgtatgtacttatcaattatcaatcaacatacactaagggtgtgtttggttggctgcatgtatcttggctcgcacccgcctatgcaacttcggcctgtttggttgcctgttccaagatctcagccaggctccctaggtgcaagattccctccacagcctggcccgagaggaacgcaagaaatgagcttcgctcctcagcctggctgagcggatgcaggcgcgggtgcaagcgtgtgtctgggcgatgcacgcgcctgcagtccactcacctccacagtctcatttgcatcttccctatnctcctaccnctctcttc

SEQ ID NO: 41120 - DNA, 314 bp, Oryza sativa
  unsure (1)..(314): unsure at all n locations
ccgctagcacgccatacaaagggggcaacgtgttctgtggtttataggggcananccgcctgacctgtgcgcatcgtcaaagcgcgccttcttcttcgccttggcgacacgaagagaataacctgcgccacatcaacaagaagaatacgcacagagagaacctaagaagcccgcaacaacgaggtgagagaggaaagagggaaggtgagcgaggcacccagtcttactgcgggagagggagagccgtaccggaggcgcgtttgcgactgtgccgcgcggcggcgactgagcccgggggaagggccgtgtactta

SEQ ID NO: 41121 - DNA, 365 bp, Oryza sativa
agcttacaaaagagtgaaatagatgttggtttgaatagttagaggtgaatgaaactcccccttagtgtatgcatatggaagatatgagtgaagctcatatgcatatttataagggagcaaccgaggagagtttccttcatctctactcattcgtgggatgcaaataaacagtaagaatagatatgatatgcaaaagatacgacatggtgagcattcaaaaggataaaatcaacatcacatcacaatcaacaaataagacactaatagcataaatgaagtgcaatatatataaagagcagctaagagcatctaacagacattacatccacacaaatagagaattattacatgtccataagttctta

SEQ ID NO: 41122 - DNA, 452 bp, Oryza sativa
tggggtcgccggatcgagtggcatcacctaatgaacatttgaagaatgtcagtcatgaggggaattcgtcagcaacgagtagggaggtgacggttggcagagatgcagccaatggtgtggcaggagggaagcgttggcccagtgcatcgatccatgttcccttgtccctccccagcgttgccgccatctcttggtgttggcgccaatgcggtcgtgggtttgtgccgctagcactagcggcctagcccgcttctaggttccaaccgtcccacttcaacaaatcgtggccgccctttgctaagactcttcctcgctttctcatcgtcggcccatcgccctatgctccagcaccactcgtagatgcaccacggtagcaccagctgccggagtccatcgctactcatccacatccccacatgaccaactcccacatcatcatgacgctagctttc

SEQ ID NO: 41123 - DNA, 402 bp, Oryza sativa
  unsure (1)..(402): unsure at all n locations
cgcttgattacgggccacggcaaagaaagaggtanagtcagttatattcattcgcattagggaaaatccttcattaactcatcctgaatcatcacgtttacaggattatgccgcctgcgtaaagtgcgctccagaacttaacgtggaggtaaaattatgcagtctgaacgtatttatttggtatgggcccatcctcgtcatgattcattgaccgcacatattgctgatgcgatccatcagcgggcaatggagcggaaaatacaggtgacggaactcgatttatatcggcgtaatttcaacccagtgatgacgccggaagatgaaccagactggaagaantatggataacgttattctccagaggttcatcagctttattcagagctgcttgaacatgacacg

SEQ ID NO: 41124 - DNA, 442 bp, Oryza sativa
  unsure (1)..(442): unsure at all n locations
ctcgacccgcgatccttaagtcacctgccgcatgcaagcttgatctttgccatcanatgaccaaatttacagaatcttacttaggttgctccttagacttacatatttcttattgatttgcggaatgatgaaccgactctattatgtgccactttgtcttattattacaactctgaaaatgaccgtagtctaatgggagaacaatcatatgaaatggacaagaggcgcatatganatgtgcgatgtacatctcactaaggttgacgccatgtgatttatttcttgggctactttctaaattatactaagcattagttttaacaaacttctacagttgatctcagcgctagctagatacagtctcgcaatgtcatgctcaaaattcacccctaacacttacagggatgataatctcaatatttatgagtgacatgcgaaacat

SEQ ID NO: 41125 - DNA, 463 bp, Oryza sativa
  unsure (1)..(463): unsure at all n locations
tcttccanagcatacggctttctagatgtatatgatgatctctagacagatagatcttatatgaatcgtatgatgaagtaccacataagtggatatataggaaaggaatccaaatctgccgaatcgctcatgttatgatcttctacatcctaggtctccgcgttccatcatctggcttatgttcttcatgtagcattcatatcgaatgactctatgaaattacgtcgatacttctacatattatgggtaacgtaggagacatccctattttcccccggnggtcttaattaccacagcttagctntcaattcgcctctgaccatcaaattaaatgtgaataacccgtcctcctctctttgaaacaaggggcgcttggccgacaccgagagcagccgccggaagccgtcgtcatcatgcagcgaagacttgccgccggaagcgatgaattgggaatgtcgcaagg

SEQ ID NO: 41126 - DNA, 442 bp, Oryza sativa
  unsure (1)..(442): unsure at all n locations
agcttctgattgcgggggtttgcgtggactgacgtgctggcaactacgtttctcggttttgggcacttgtcggcgaaatgacccattccttgacaattgaagcaacagatatcttcccggactcggcattttcttttctcattttgattcctctgtcctggcactggagttaggctgaaactggaatcttggcgaggatttgtgtttccttgatgcttctctccattagaacgggcgtgttggttggccaccttcttcgttagcagaaaactgaatcgacaatcttttggtacatgatcagttccttcacaaaggaaacaagtgatcctgctcgttggacacctatcgggtggatggtctntctcacaatgaacgcatgtagaggcacacgagctggcaacatgaccgatttctcacaacgagagcatccttaagtctattt

SEQ ID NO: 41127 - DNA, 433 bp, Oryza sativa
  unsure (1)..(433): unsure at all n locations
tgcagctgaccaagatactagatgtaaatagtgtgattttatcattaggtgtgcttgtgataattaattaatcatggctaagcatatatataatttagcaaggtcaatacaagtgacgcaagctagtcaaattatcacccaagtttgccaaatgatgaatattaagtaaacatggcactagcaaacagataggtaatcctataataccatgcaattagcaaaacatgcattntatttgtaaatggtaaaacattntataaagtatgctcaacattctcaaggtgatgaggacattaataccgccgatacatccacgcctacataagtacaacttcatggtcctattacccatgctcatgcacgtcaactcaattaacagtagagttctctcgtgagtttgatgtccttttataccctggagatgcatgcactc

SEQ ID NO: 41128 - DNA, 362 bp, Oryza sativa
agcttatgtggatgatgtagtcgtcaagatcaagcagaaggatgacctgatcacggacttagaagaagcttttgcaagcattcgtgctttcaggatgaaactaaaccctgaaaagtgcatcttcggagtaccgtcagggaagttgctcggatttatggtatctcaaagaggcatacaggccaacccggagaaaatcaacgccatcctcaacatgaaaccgccaagctcccaaaaagacgtccagaagctgactggttgcatggcggcgctcagccggttcgtctcacgactcggcgagcgggggatgccctttttcaagctgctgaagaagactgacaatttccagtggggactcgaagcac

SEQ ID NO: 41129 - DNA, 321 bp, Oryza sativa
  unsure (1)..(321): unsure at all n locations
gcttggcaccttggcgatcttcttnctccctatcttcctcctaccttcaaccctctactttagtttctagaaacttccataacattgtattaacttgtttcctcctctccttttccccaaaaacactttgttccaggtgtttatcatagcaatcgaagtgagagatttaggtctctaacaatagcatgcctctatagtaacaatgaacttagaaaaaacaaatatggtggtcacagcccacttcatgttagaataattgggctaggcccaatttataaatataaatctcacagcccataataaatattgaggataataata

SEQ ID NO: 41130 - DNA, 274 bp, Oryza sativa
  unsure (1)..(274): unsure at all n locations
atctggcccaaccggcggagggaaacattcacacacactgtattacagttataacttatgttcaactcatcacatggcagtcctaacaatggggaaaccattggagagcccctgtcttacacatcgagaaaccactatgcatggatactgcctccgctcggctatttacctccctaggtctatccccattccagaagtggggatgtaccgggccgttcatgcttaacttcatggctcgggccttaaatgaccggngacggtactaacccttccc

SEQ ID NO: 41131 - DNA, 381 bp, Oryza sativa
gctgcaatgtgacatgacacaactgctgttgctcactctcattacactgagcacggaggggcgtacgatttctttattcacccgtgggagtcatggagaacttcttctcagagcattttgtccttctagatgttctcagagcatgcattgcattgtattcgcatgcaatttgaagaacaatggaatatgcatggatattatactgaggaaggactaaacctgtttaatttacaaatcgtgagtaacatatgtagccttattcacacatgaccacgcgtaattgaatacttgaaggaatatcttaaacctaaaccatgcatatagccgcaggatggaatgatgcatttcttgagaaacaacttaatagtctgatacccacac

SEQ ID NO: 41132 - DNA, 449 bp, Oryza sativa
  unsure (1)..(449): unsure at all n locations
cgcgatctctaagtcacctgcggcatgcaagctntcttaattgagccgactccatcaagatcacaactgctggcgatttgacgactcccatcagctgctagtgacttgacgactcccatcggcagattccagccgatactgactctaagctgatgatgacttcgggcttaccaaattttggcgttaacactgggccatgcgtggactcggtccaacatgcgcccttcccccttaagtcaccgatggctagggcccacttgtcggctgacatcataatccttgttttcctgttgaagaataattaataaatgacatcataaatcattttaattccataaattgatttaaatggctcacaagttctaaaattcataactaattcatacaaactccaaaataaaccattttacatggttgtntacttttcatgtacctatttacttgggttg

SEQ ID NO: 41133 - DNA, 349 bp, Oryza sativa
tgacaggttagttatttaatactatccctacaacttacattctgccaaacaaataaaaaccttcagcatgcccgatattttataacttaatgtgcaaatgatgaagagtgcaagcatctaattttctcctctgccttgacacaagagtctacgcctctggaatggtcctaccgcactgaaaacactctatgcataataaatttctatgttgcaaggcacccagttatgccagttgcttctggttatgtcccaacatatttcatgttgcaaataagtataatgcagctatgcttcacgtacaacttccaatctgcatctttaatattcatttaactatttcattctgtca

SEQ ID NO: 41134 - DNA, 467 bp, Oryza sativa
  unsure (1)..(467): unsure at all n locations
taagcgcttcatagcatatgtaaatagtgacaaaattaataaaaatattaagaggtaggtcataatggatctatcaatcataccaaatttttgtgcaaatataacttatatatgacttatataaagagagattatcaaaaaagagaaatgttgntaggcagtaaggggaaccgctttcaatagttcaaggatataaaacgagataaaaaattatttcaggttttatgtgcttcaccaaatagctcaggagagtaaagtggatttttttatatatttaccaatttaactattcactgtagattgtaatatgtcctanagaaataaaanaatcaaattttatgtatgaccaatattagaaatggtcaaaatggtactgcttatatagaaataatactcatttggtcacaaattttcataaatgtnttaacccctacttaanatacgtaatttatctgattatttaatag

SEQ ID NO: 41135 - DNA, 423 bp, Oryza sativa
  unsure (1)..(423): unsure at all n locations
tatcgaactgacctgcgaggaattggcccagatttggttcttatatcattcagcacctgccgccgtcgatgacctagagtcgtcgtcttctccgagcttctgcaatattagggtcttcatgcggggcaaattctcccagtggcacaatcgttggcgagtttctaccatgctcaatcacggcatggcggaggaggaggagctngctangatgctcatcgaaagggacaatgaaactgcccttaacaaatatctctctcgtggaatcgatgtcgcccagaaactgctcgacctattagacttgcgcaaggagattgacatggtgcatgtgatcctcgcggtgtgggtggaaatgctgttctatgccagctaccagtgcagcaaagagtcccatgccaagcaacttgaccaggggggcgagttgac

SEQ ID NO: 41136 - DNA, 299 bp, Oryza sativa
gcactctttgggtaccacatagccagagatgttgaatgctttatatatcttagaaaccttttcacggccactaagtgacactccttacgagcggcttgaaaccgtgcacacatgcaaacactaaacatgatatccggcctagatgcggtaaggtaaagcaagctaccaatcatagaacgataaagctttaaatctaccgtgttacctcccccatccaggtcaagatgcccgctggttgccataggtgtcttgataggcttcgcatcctccaagccaaacctcttgagtagatacttgat

SEQ ID NO: 41137 - DNA, 130 bp, Oryza sativa
  unsure (1)..(130): unsure at all n locations
agcttgcacaactagtgtccaatattcttgtggtgncnactcgtgtccgcttgtctgacgcggggagacactcatctgaccctgctatgcgtgtccaaattccaaactaaaggaagggatttggtggcgg

SEQ ID NO: 41138 - DNA, 441 bp, Oryza sativa
  unsure (1)..(441): unsure at all n locations
gcttcattgcagatgacagcgctagaataagcactatgcccagaaagagattcctgttcttagcgccggtgaaataccttcaaaataataatgtgcccaattcactaaatcactctctccaaaataataatatgatactttctagtagtatcaatatgaacactaggaagtgtcccataagaccatactcccatccatctaaaatcccttatattatgggataaagagagtacttagatgcaatggaatgtgtccatgagacgagttcagtttctggacttaaacgctattntctaagttataagcaaatagacacgcctgcacaagtgtnatactccttccatcccaaatattagaatatagaaccgtcccacaatacagtctacttgcccagattcgagtaatagaaaatgtcctatctgatactacgttcntatattt

SEQ ID NO: 41139 - DNA, 446 bp, Oryza sativa
  unsure (1)..(446): unsure at all n locations
agcttccgtatatgctagccagagatttcatgaaatccgtttataaactaacaaaataatgatgaactcttaaataaatctcatgaaaaaaaaattaacatttagttttaattttttttacaacttgatcgaaaaatcaacgggttttgtgttttccaactggtccgagttgtctgaatattacanaatttggaccggatttcactggaattgtaaacatgtgtgactgtcttaacagcagcagcagcagcatatgattcgcgtcttgcatgcaccggctgccatggtcgaggctgaaacggacggatgaggatgcgaatggcgataagcgttgttggattggaccctcggcgtttcatcaacgagcaatgaaggggctgacaacgattctcatctgtcaccaatgaatagtgccagtgaaatgtgggactattggagcgttgtca

SEQ ID NO: 41140 - DNA, 416 bp, Oryza sativa
  unsure (1)..(416): unsure at all n locations
agctngcattctccttggtactaattatattgtgtatgtcttgcgagtaccattcatattcatcttgttatctttcaggtgaggatgaaagtattgatgtgtgttcttcctgccctacacgggcggtgagggtggtgagtanctgttcaacttggctcttgccccagctggtcgcccgtgtaggatggttgacactccacgggttcttttgtttatttgaatttaagagacttctgctgctattcttttgtgttgtatgacaggtttatgaacccgattatgttggtggtggcggcagtggccaagggaggcaactggtgggctccccagaggtgacggnngcgctgatccggctccctcttnctctccctctccatcgngcctccactaatggcatgtagatctagggagggggg

SEQ ID NO: 41141 - DNA, 455 bp, Oryza sativa
  unsure (1)..(455): unsure at all n locations
ccttggaagtgcgtgtatgaagtgaggaggtgtttcctntatatagaggcaggcatgacggctatactatgtgaattgtcagaaatgccccgcaaccgccatcatgagatgattaggaccgtccataccaaaacctatgatcaacggcaattaccagggttcagccaaaccaggggggtcggccgaacctgggctgggccctcctggcctggcctttggtcggtggactccctggaccttcctctatctatttcttggagtttcgggttgaattactgatgttttgatgaagttcataaccctccttgtatggatacataattctcctcactttagtctgatttttctcccaacttcacgggttatcatctgcatataaatatataccaacacttgtggaatatattcgaattagcacctatcactatgttggaccgtttattatctgatcttat

SEQ ID NO: 41142 - DNA, 461 bp, Oryza sativa
  unsure (1)..(461): unsure at all n locations
agctntggaattggcataggtatttctctgaacaatattgttctattcaacctatgaggaattatcgatttctgatgttgatgtatatattgtgccaaatctgtgtattcataatcagtctgacctatttataaatacattattggcttcttacgagctctgattttgattgaaatagtgagttatgttgataatctttcatgagatggtgtatttgtaagtgttcagcaaatcaagtaggtcggttccaaaaataaataaataaaccaatagttagctattggttaataattctgaatacagggcatatatatatatattgatctatatttcagctgttagagatgttgatcctcacatctaaaaataaagtctcttgcactaataagattcatctggtggcacatctgcaattacacacgtatttcttcaaactcgcgatatttctatatgaccctatt

SEQ ID NO: 41143 - DNA, 264 bp, Oryza sativa
tgtgtgggcgacgtggggcggctagagagtatttgccttgaatccattcccaccgaggctcgcctcggtgaggaaggtgaccttcgtgccgctgtatgcgatctccatacctctgtgggaggaggataggccgtcatgtgctaccacaccaacagtaccctccgcgctcgtcgagtggatgaatgaataggtgaccctcagctgttgtcgagcccactctgccgctggagaaaggctgaccttgtgctgtatcgctcgctccgt

SEQ ID NO: 41144 - DNA, 427 bp, Oryza sativa
agcttactgtgagactccacttcaatggatatgttttgacgatggaacgatgttgcattgagaaagacccggaggtcttcaactgtcatatttttaaccggaaggatattctaaaaagttttattatcccatttcaggcgacttgtttaccctgcaaattgtttccgtcattttctagtctaaaaaatttgctgggcgatctgccatgatctgtatcgatagtgatcgtcttaaatcatttcaatggaaaggttgcacatgctgggattgtatttcacggacagtaaagcatctactttggctgcagcagacgcagcctgccctccatttgtttgccactgcccaagaatctaagatgacatgcattaaacttatgggttgaagtgacaaatggtgaaatggaggcctcaactcacggctggatttg

SEQ ID NO: 41145 - DNA, 370 bp, Oryza sativa
  unsure (1)..(370): unsure at all n locations
cgcttattatcattttttgtgaggaagcttattatcaatttatcatgcatcacttacacatatatattttcattaaagaactacagtacatcactacagaaaattttgaaatagaacagtacagcatgctttatgtttcgacgtgataaaaaacaaagagtgcttaaccagtaaataatttacatatccaaaagactggaattttaattaaacatgcacaaaaattaaaaagtaaataatttttcaactccaaaagagtggaattttaactgaacatgcaaagaaacaaaaaaaatcatgtcatanatcaaaatcagatcaagaatcaacctgtgctcataatcggtccaaagcacatcggcatcagcat

SEQ ID NO: 41146 - DNA, 338 bp, Oryza sativa
cttaaaatcttatatttaatttcccccattctattctcatgaccctgcgacgctcgcgtgttgcgcatttgtttggcccctgggtggtaagagcccaacctctctcccatctatatgaacgattctttgctaagtgtgggggctaagtcttctagccttatcctagccttaagttgagctccaggtgccgtcgaagcccgggaccccctgtgctggctcttccatagcggctggctttggacccgccggctggctacggtgcccaacccggctcaactgtggacagggattgctggctctagaatttttcggctctcacactcgtgcggaagtaatcg

SEQ ID NO: 41147 - DNA, 463 bp, Oryza sativa
  unsure (1)..(463): unsure at all n locations
tggtacgtttatntaacgtgacctgaattctgaacactcttttcctccaggtcactgcttcgaattactctattattgacgaanaatgcgaaacttcaagaaaaagagggagaatttacgtgtaaaaagggagagtaatatgtttgggtgatctggttgtgattaatttaatcatctttcanagtgatattagaagaaataatgtgttgatcgacctagtaaacgttttatttacagcagggaaatatactgtaggagacaaacgtacataggagtaaaaagaaaaatatactaacacgtactacctccatctcatattacttgtctttttgagttnttgtttgtcaatgtttgatcattcgtcttattcaaaaaattttggaataattatttatttttcttgtcatttgctntattgtcaaaagtactttacatatgacttatctttttttatatttgcact

SEQ ID NO: 41148 - DNA, 416 bp, Oryza sativa
  unsure (1)..(416): unsure at all n locations
agcttgctgattaagcataattacataagtttactcctaagaaacatcatcagctctagtcgctgtggctgctaatataagctatgttgttcactattcacttccaagtatgtgcagcagcataaagtagttgtgtatgtacaaaaaggagttgttataaagaacagaagggcatgtcaagtataactgttgtgatataacatgacagttaggaattgtaccagtacgccagcaaagatgtctcaatgatctgatggttatcgcttcatttctgggaaatgaaaattaagagagatgccaccatagcttcaaattctgtcctgaaggcaccgtcttgcacttcanaaaagtagctacttaaccagtaaaatcatgtatcgtcattatctctacagtcagccatgtcaataaatgat

SEQ ID NO: 41149 - DNA, 446 bp, Oryza sativa
  unsure (1)..(446): unsure at all n locations
tgcattatcactcccaatgtatatgtctcgagctatcattatctccaaatgttgtggtattaaatgatattcttttctttgcccacatgtttatgaatggatttggccaatagataaaagagatatccttctcgtcatcaaacaatgtaagcaaatgttgatcatcaaaatgaaagctgtagtggccaggaacaagtaatctattactactagtactagataccagttttatagtaccattaataatctgattgggtagcaaagtatcagttggagaagcaaagctttgccatagaattgtatcaccttggcctttcacgatgaggtttcctctctccaataaccgagcctcttggacatttgaagagctcacattgtttgtccacacaatctgaccaccgtagtcttgaaaaccatatttncgtcgatgttaacttgatctggat

SEQ ID NO: 41150 - DNA, 459 bp, Oryza sativa
  unsure (1)..(459): unsure at all n locations
ggggacatctcttcccnccactgatgtaactngtatcacatngcatattttccctttccaattacatattngctttccaattgcatattataaaacttgaaaacaacataaaaatttgcaaaataaaaaaatacaaaaagataggataggtttgagtcatgctacgtaagacaagctagttttctttgtagaaatgatgaatagttgctctggtttatatctcttatatatgggttcttgataagtgctctctcaaaggtcaaataaaagtagccaacaattatccgggaacctgaggtaaatgagctgcacttgctgatctaagtctaggttgttgcgagatatgagatagtaaatatgagttgctatgattatgatactagtttgactngaattccggatgttttgttttcaaaatgaataaattgaaagttcctcatttgatataaattcctaaca

SEQ ID NO: 41151 - DNA, 443 bp, Oryza sativa
agttacattctaagctagtggagtaggaatagaacataagtctgtttccggaagtattccgaagagttcggatatggctctaacaactctcctttcttcttttgtaagacttgtactttatttacaatattcttctttatacaactttggtattgtaataatttccgagtatatgaataccaactttactttatatccgagttatgttgattttactgctagcttatctgggagatgccatggtacaggtattatgtttgcttatgcaattactctatgtcatgacgatgatattagagtactatctggtagtttacacgtggtgtctagattactgggtattattatttggggttatatgctgtggaagagaggtgggccactgatggtgacagctcaatcctgtattccttcgcgtgtgatataatcctaagtaatttcct

SEQ ID NO: 41152 - DNA, 420 bp, Oryza sativa
  unsure (1)..(420): unsure at all n locations
gatatatataaatatataagtcgtagttaatgtgtgataaaaataaccttgcagctaaatgaacaggtaaggctgggtgcattgtgtagccagcagtggcaactcgtgcaatgaggtgttccagctttaggtctatgatgttctgacctctttatgggccttangtgcactaccttgtgcccattgcatttgaatgtctgcaaatagaaagataaatatgttaatacaagtgatgaatgaaatttaatggctcanaaggtggtagcctaaatagtgctttagaaatcatctgaagcccatacaaaggaagaaatgttgattcttaatcaatataaaatgtganaccaatgatacagtgcaagctcaataaatataggaatctactgtacttatcgaatgacataccgatcatagttaatt

SEQ ID NO: 41153 - DNA, 372 bp, Oryza sativa
  unsure (1)..(372): unsure at all n locations
catactcctncggtggctcaagttgggttgttttcatggctgcaccaatcatatgacgggagaggggagtatgtttacaagtcttgatgagaagggtggaagtcgtgaaaatattgtcattggagatgatggtaaaggaaatgtaatgggcctcggtaagattgccattttcaagaatcaatctctatctaatgtcctccttgtcaattcattaagctacaatttattatccgtgtctcaattgtgtaagttaggatttaattgcttggttaccgatgtggatgtgacccattttaggcgagatgactctngcatagcattcaagggagtggttaagggtgatctctgtctcgttgatttcgacgtaaatag

SEQ ID NO: 41154 - DNA, 488 bp, Oryza sativa
  unsure (1)..(488): unsure at all n locations
agcttattgaaatctttattacatttgatagaaatntattgtttaaaaatacaagacaaattaacaggttactttgccaagaacctaaaataggctgtatgcttacgttggagtaaacacacaagactaacaccaaaggagagcttatcaaattagggccacacaaattttagaaggcttatacagatcagagaggggaaaatgttattttaggataaaatgttattttatctcggaattcaggaagcacacacgtagctacaataaaacttctaagagaacatttagcaacagaaacattaagtttgaaacatacactccatccagatgttctttgtagataccatcaaacatgcggcatatttccatgatcgtgtacagctttccctgcatggccaaatatgtacaaaccaattattgtcattagcacaatgatcaagaacatacacacaaaaaatgtgcactacattagcaattagcataaaaag

SEQ ID NO: 41155 - DNA, 409 bp, Oryza sativa
  unsure (1)..(409): unsure at all n locations
agctngtcattcttcatgtaattccagagctcatcagctagattatctgtttnttcagcaagcagtctaactgtatccaaaaaaaccttctgcacaataaaaagaaggcaaaggaatgaaatctaaatgactttgagcatttgtatgcaagcaagcagtgaaaaattacttcctattacatctcgtttccactaattgtagcaaggatgaactaggatcaagcggaataaaacctactactccctccgtcccataatataacaacctaggaccggacgagacatttcatagtacaacgaatctggacatgcacatccggtcctagatggctatattataggacggagggagcatttagctatttcctctggtacaaattactagctttatccaaagtcaaatatttata

SEQ ID NO: 41156 - DNA, 403 bp, Oryza sativa
atacaccctttttgtcgcagccgtacgcttgtcatacactggcgcaattcctattgcacccaaacctccaggcgtaaagccgtgaaggatcgttattcagagttcagacggcaggaaggcgaggggacagcgtatcgcggaggccggactgctgcatgtggtgggctttccttagtgagcctacattggcctctacctcgagcctcggcgcaatttaatgggctatttcgcgtgtattcctctactggcttcctccgttggaataagttcactttgactcctttaactactggactaatctgattcgtattgaatcatagtaccggatatctcgactcccccaacgattttcatccttaatcagaaaaaccagatacaacatatcctcaacttacaaaccaac

SEQ ID NO: 41157 - DNA, 452 bp, Oryza sativa
  unsure (1)..(452): unsure at all n locations
agctngagtgtgtgtgacattagagctgcctttacctaatagttgataggagcgtgtatattcttgtgtatgtttcttgtttgctgctaaccatggcaggattgcgcaaggggaaacaagatggtcatgctcaacgtcaacatctacaccttcgacgagatatgacaacttcttcacgtgatgcatatgaggtacatgactataattntgcacaagttgcatgtaagttaccactctatgatggaaagtatgattccgctgcatacattaattgggagctagcagtagaaaaacaatntgatgagtatgatttttctaatgctcaaatgattaaggctgctagtaataagtgtaccggttctgcatcttttttgtggcatactggtgggaataagctcgaaacttgngatgaatgcaaatactgatgagaaaagaattgtgtnttatactat

SEQ ID NO: 41158 - DNA, 422 bp, Oryza sativa
  unsure (1)..(422): unsure at all n locations
ttccccgttaagactaagatcagtatctttaaatccattgtttatgaattggtcagaatcagcatctagcttagtggcatggaggatgaggaaaaggagaaagaagaagggcagcagagaggaaggaagcatggctagttggctctccttccttctgcaagagatgggaggggatgaaaaaagaagaatgcagtaagtagatggatgcatcacaggctacaccgggcagctattagagagtttatcanacttttaaaacttaggacttagtttaaaaacaggaaaaatggtgtatgcgtagattntctttgaaaagtcatacttaaacttattctaggtgatgtaaaantgctggtcacaattcttaagaattgataatatcctggtggaagtcctaaccatcgaatatgacgggagggata

SEQ ID NO: 41159 - DNA, 440 bp, Oryza sativa
  unsure (1)..(440): unsure at all n locations
tcagcttgcaaagcgcagatgcctatttnatgacatctattctgctctgggtagagaaggcctgttngatactggtgatgaaaatctggctatggatagaggggagtctgctgatacttctatttcatgcctagcgtcagggttagcaaatcttggcactgctgatccacctgaaaggggctactcaataaacgagactacaaatgaggagggatacttgattgaaggggatgatccatcaccattcaacaaagacgaacaagatgaccaaactgatgcacatggtgtgtcttcgccagagccagaagatggtgtttctagaccatcctagccatgctgatattggttgatttcttctcgagtgcagatcattctgttcaaatctactgtacacgctggtgaagcaactgaatggcaattgattagacgaggaacacact

SEQ ID NO: 41160 - DNA, 462 bp, Oryza sativa
  unsure (1)..(462): unsure at all n locations
tggattaggaacccaaaccggcaagtttggtccttttgtgnagnnaccaaagcctntggcacgcacacacaagtgcggtactcatcattgtaattcacattaaaataagcaaccactttgccctctgaatttttggaaattacatatgaatcatagtaaagaccatctggctggaacctcctggcattatgcccggaacttccggtcatgtcttgtgcacggccattggcccgaaacttcctggcaaaccggccggaacttcccggtgggaatttttgagagacagagactcccacccagaggtttcgcccggtttgtccggatgttccgggtccctggcagctcacaagaccagtcacctcacttgcttgtggatgcttaccttctcgcacaaacatcaagcattctttctcatntaccatcacacgcttaggcacaggacttccacccgaaaacccgagc

SEQ ID NO: 41161 - DNA, 414 bp, Oryza sativa
  unsure (1)..(414): unsure at all n locations
ctgccatgccaggctctgagcctagtgcgccgccactcccgaaatctgcagaagatgacatgtctatcgatgaggttgacattcctatagaggacatggatgagcctgttgccactccagaggagacaccaatggaagaggcgattcgagtgacccgtgggaggctaaggaaacgtattgccgcagtttccactgctgatggcggtgcagcaaattaactgcatgccatttgtcatctatttccacaaaatatgtgcttcagagctttagggcgatcacctgtttggttgcagcagatatctcttgttccacattatgttcttcgagctttanggtgatctgctgtttggttgcacgcagcacatgtctttggtggtataattattgctttaacctgcttctttagtagtgttc

SEQ ID NO: 41162 - DNA, 474 bp, Oryza sativa
  unsure (1)..(474): unsure at all n locations
tatggaggagtgtagcaatcttatactccacggctcctttattagaagaaggatccggngtgtctgttcacggctgttaagtaccaaattaatgccgtcaataccagcataagatcaaaaatataaaacatccaacatagtggtagggtttatttctaacaatttccacgagtgttggtgtatattcgtttgcaggtgaaactacctaagttgagaagaaatatacatggaggaggagaatcaaactcatatccgaacttatggagtttttgacccaaaaacctaattaaatcattcaaatgcgccgtgctcccagttctggagttgtatcataagggtgattcctactcctgaggtataagtagttttaaaattaaaaatttgaggataagggtgatatatgattntattactcctttactttctcatngatttatttattcatatctcttcacatnttaatcattatattat

SEQ ID NO: 41163 - DNA, 464 bp, Oryza sativa
  unsure (1)..(464): unsure at all n locations
agctngctaaatgttcagtgtcatattcattttagatntcaataaacaaagaataagcacaatcaacctaaactgttcatcaagtggctagcaacttgtcaaggaggcctgagagtaacaaaacattttttttcatttctttttgataaatgaagctttcttaatctcagacaatttcatcccggtgataaaattatactaagactactcctaatttaagtttttcctttcttttaaaaaaaatagattagattaaatccggcctctgcacctttgtggggtatatacagccaaacaaagtcacgagtacgtaagattntgccattacatgggaaaaaaaactaagtttaacagatccggagagagaacaaaagattaagcttcgattcttcttctaaaatctcaaccaaaagtagagtaaaacttctagactcgttttcttcttcaaggttacctgcattgga

SEQ ID NO: 41164 - DNA, 481 bp, Oryza sativa
cggaccttcaaactcaagctggactccgttctcggaaacgactctactattgtgcacccaaactaattcaccgggttgaaatagcatcttctttctgtctttgtttgcctttgcagcataggactgaattatcctctcaatggtctccttcgtcttctcatgcattttcttcacataatctgcacgctttgttgcttccatattggcacgttcttgaagtggcaggggcagcaaatcaagtggtgtgattgggttgaagccatacacgacctcaaacggactgagttgagtagtagaatgtaccaccctgttatatgcaaactccacatgtggcaaacaatcttcccattctttcaagttcttcttaatcatcattctcagcaacatagaaagtgttcgattcaccacctccatttgtccgtcaatttgggagtgacaagtcgttgaaacaacacttagtcccagcttacccacaagtctt

SEQ ID NO: 41165 - DNA, 491 bp, Oryza sativa
  unsure (1)..(491): unsure at all n locations
atccttaagtcacctgcggcatgcaagcttggtgggcccaccatataccaagtcttaaacggaattgtacctcgtatatagaaggagtttcggataaggaaagaaagtatagttctatatggaaacgacaatgactactcggatcgtatccatacttgtctccctagttctacttgtacaaggggacatctatgggtataaatacaaaaccccctatgacgagaggggacgacagacacgcatgctagaacaaaccaatatgccgccagacatcgacatgagagattagcctagacagacttaatttggtgtctgcggaggccgacaagagggatctatcgccatctctgatctcgacgagctcatattagaggaggaagagtactaccccattggtcactacgtgntggtgtcgtgctgcatgtcgacgaagctagataggtattccaaatattgtacttgtgtgattatgatgaatatagagcaacact

SEQ ID NO: 41166 - DNA, 437 bp, Oryza sativa
  unsure (1)..(437): unsure at all n locations
gacacttcaaactcagcttgagcanattatagcagagagttggttatgcataaagtttgaagactcaaggaattcaagagcctgcatnttgcattaaccgaatctgaaaatcatatttgatgatatttacctcaaccaaggttccatacaaactactatggatttaacctgtaattattactatgtaggtaactttatttattttcctatcacgtgtctatttctgggaagattgtgtgacagcattttcatatcataatcaagcagaattagttgcaccgaagcttacagaaagaaatattttagcacaccaatcatgtagatattaaattataacagtgccacatagatgatactacctctntcttaataactgacnaatttgactttcccaattaaacttgacaaataattgccttaaattgtagaccaagtga

SEQ ID NO: 41167 - DNA, 482 bp, Oryza sativa
  unsure (1)..(482): unsure at all n locations
agcttagagtccatatagaaatgcaatntattaatattagaaatcagaaattaaaataagggatattagaagaagagtatagagtctttataggaatttagaattaattaaaattaggaataaaaataataaaattaaaagtagagtttagagtccatatagaaatacaattggaaataataaaaattcagttttctttaaaaataatattagaagaagagtctagagttcatatagaaatataatttattaatagtaaaaattcggaattaaaaaataagtctagagttcatatagaagaataatttaaaaataactaaaattctggatttaaaataagaaatataggaataaaatttataaataatagaaattcatagttaanaaataaagtatgttggaagatgagtctggaatccatataaaaatataatttagaaataactaacaatcgatatttaaaatagttaataactattatg

SEQ ID NO: 41168 - DNA, 423 bp, Oryza sativa
  unsure (1)..(423): unsure at all n locations
tcctcatatattcttgccagttatgcatctcttgtgtctatgngngngtttgtataagctggccagtcctaacattccggaggcctggtgcagaacaacaaactgtaataatagtctaccaagtgcaaaacacatgatggagagatatctaatattaatcagtaggttccctataggtttgttagtaggaatggtagataaaactgtctgaaaatacaaaaaagaaatcacataatgatgcaccatatttaattgaagatatatcttggtaatgcgtcttttatgcttggtaactgacaattcttttaacatgctttactctggtctgaatctataagaagaccttctttgattngtaggtttgtggtgaaaatcttaatatgaagcaaatggaggaagagattgaactacgtggtccacctg

SEQ ID NO: 41169 - DNA, 328 bp, Oryza sativa
agcttggcgcacacgaaagagactatggcttattaagacacgcgcgccccgtacctggcgcgccagatgacggaacgtggggctactcaacgggagaccgcgcaggcccccctttgccggttcagacggaggcgctaactgaggctcttccccctcgatctgaagaacgtcaggcggagaggaagtgcacaagacaccggcgacatagacaggttcgggccgctgataagcgtaacaccctactcctgtgttctggtggatctgtgcgtgaaggaatacagagacccggagagcgagagtgagttcaggctctagaaccccttcccca

SEQ ID NO: 41170 - DNA, 471 bp, Oryza sativa
  unsure (1)..(471): unsure at all n locations
agcttggctggctggtgcccttantatctgacatttggggggatcaatgccatgtttcaatgtgtaaccgttttatttctaggttattcctcttttaaaataatagaaggttttattaatcaacgaaaacatctaatctctgcagcaacaacaacaagtacgcaacactataaaagagagaaaactagacaacatgacatatcatgttgccttgtgacaccttactagggctgtcaaaaaagctagagactcgtgagctgctcgagctcggctcgagctcttaacaagccgagcccgagcctaacctcaagcttgtgagctttttcgagccgagctcaagcttttcacgaggctagatgtatatgtacttttattttttatatgacagactagtaggctaaaagatcaattagtatacatttatttaaaaaaatagtatgtgtggtattaatatataattctaaagtatct

SEQ ID NO: 41171 - DNA, 462 bp, Oryza sativa
  unsure (1)..(462): unsure at all n locations
tcccggtttagctcgcttttatctttcccgctgcattttttatcttttatanttttgtaagacgtgggtctgtatgtcaacaattgtcgtttgtgtaccctggcttgtcctggacagggatttaatgcacattcagcttagaaattctggttcgagaatttctgggtgtgacagtttatcataccgatcatatcaattcctcaacctctaaatggccacggnttaataataggattcatagccgacgccggagctcgttgaattgccccaaacttctgacaatcttgacaccccttataatacctgaagcaatcctccagcattgtcagccaaaaataccctacacgccggagtagccacttcatcttatgggccgattggtgagtgccacaaattccttcatgaacttcatcgatttgcactntagcctgatcggcactcaagcacttaagttaacactca

SEQ ID NO: 41172 - DNA, 410 bp, Oryza sativa
  unsure (1)..(410): unsure at all n locations
ttcagcagatgtattatgagctgtatgacattatttngncggcaggtacatatatactttactcggcttaatcttctcccttaatttctataacagtagtagttcaccatgtactagctagtagtattattcagagcacggtggttggggctgaatcacttgaatgcaaaaacggtgacgagagaaatctcgtgtgcatctcccccatggattttagtggatgcacaagctgtacaaaagctaaggacaaaaccaattcatcatgtgagcaagtactctcttaaaaaaagacatctagtatagtggttgcagtgacctgagtagcgttataagattctgagtttctaatattaaatagaattgaccagcgagagttattagtcatcataaatctggcttggagagagtgc

SEQ ID NO: 41173 - DNA, 320 bp, Oryza sativa
  unsure (1)..(320): unsure at all n locations
gccgcngctcggctgtgcgacaaggcgttggacgtgctcgcccagatggagcagatcggcggcacggtcgcgcccaatgtggtcagctggagcgcggtcatcggcgggttcgcgtcgtccggcgacactgaccgcgcactggagctgttccggcgaatgcagcagcaatggctctcgccgaacgtggtgaccatggcgaccgtcctctccgcttgcgtcgacctactggcgttacggctgggtcgagagctccatggccacgccatgatagccgagctagatatgcactcgctggtcgagaatgggctcatcaacatgta

SEQ ID NO: 41174 - DNA, 377 bp, Oryza sativa
  unsure (1)..(377): unsure at all n locations
aaatactatgcttatttttgttatgtactctggtaaatgcaaatgaccagtatttaactggcaggtaactcattaagttatttcacaggaagaacaacagtgtatggcatggaaaaaactcttggcatttgaaaagtgagtaaacatatgcatgatctaattcattaagagtcacggtatctctttgctgtaattatataagctaatctttgttttcatgttctttttctaaaaccctgtcccaaccaagtaaaattgtgtatgcttcttgaatttattcaataacttgagcctcactggtcactacctggtgcaattaagcatatgagtctttcaccaccttcaggcctangaatcttgtttctgttaattctaac

SEQ ID NO: 41175 - DNA, 463 bp, Oryza sativa
  unsure (1)..(463): unsure at all n locations
acagnnccatgagaaccagcaccatattgtgtttattcttgacaaggcagctactcaccgagatcgatatccgctggagacccttcaatacagagatcaaggtgactacgtctcaccaccgccacaacagaactaattttgcgactagattgtgcaacacctcggaagagacggagcacatcgctgaagccactggttttggcatataacttcagattaaggccacaagcacgtgaatgtataatctcaacatcaactgttgcttgaactgcatttacaagcagaagaaacttcacacccaacccacacttctcaccatacagacggacagtttcggtgaatgatgttgatctcaaaatgttggtgaattcagtgcatccttcaatcaatgtgccacctttgggcttcatctcagcctcatgtgagtcttcacgtcgaatacagaagttgaaatcatacagtg

SEQ ID NO: 41176 - DNA, 400 bp, Oryza sativa
  unsure (1)..(400): unsure at all n locations
gcaagctnggntcctggcatagtcatcatctgcttgttcatgactggaggactcaaatatgctctccagctcacagacctcagagcatatgtcctgctcagcaattatgaaagggaagaagccgttgctaaatccaccatcttcaacctgaaattaacgatggcattctagtaaattcaaaggttgtgacagaaaacagacacatganaacagcagacatatgaaaagctgtaccttcacaaatcctctccctcttgaactagggagaggacaacagaagttcagatattcaatatcatcatgctcaacgccatcaactatattatcggcgtcttcctggaatatacaactcccttcaaatgagcaaattagcctgaaaacattagatgatcaatcttta

SEQ ID NO: 41177 - DNA, 322 bp, Oryza sativa
  unsure (1)..(322): unsure at all n locations
tctcgagcacaagcactctcctgtcgagccangtgtcgagcgtctggacagcgaggtcgttgatgaagtcgaagtgcttcttgagcgcgtcaatggagagcggctcgccgatgaagcggcgcagcttcttgtgctcgtcgcctgttgtggtgaggaggctggtcggcccgagcacctgcttgccggtgtagaacaggttcaggctcaccacgccgtccttcccgacagcatgatcttggccgccttccttcccgtcatgaacaccagtattcttccaagaacatacgtcttgaacaccttgccgaaccttgccagatcaatc

SEQ ID NO: 41178 - DNA, 330 bp, Oryza sativa
  unsure (1)..(330): unsure at all n locations
ctaacatttntccacacaagctgcggtagcttagtagttaaactacgcttgcctagcgntgggcctatatgtttccgcttcgcttcggcttgtagaccgcaggcaaatttcaattttagaattaattcatttgttgtataatacttggcttttgaccgcaaacaataaaatctgttctaaaattggttttcttctttggtcacttgtcctgtaaattgtacccattctttttttcgcagggtctctttatttgaagaaaaaaatatactacacaataaaaattctgtaagaattttatcatgtaggattgttctcttatataaccatttg

SEQ ID NO: 41179 - DNA, 371 bp, Oryza sativa
  unsure (1)..(371): unsure at all n locations
tggctcggcttaagcaagccgcccagagaagcagcagcttattatatattatagccaaacattaacaagagcaacatntcaagcatgaacaggaacagcaggaggaggcagccagcaatggcggccgacaggcaacaacgatacatcctcatcaatggctctgcaagactacatgcaatacacacacatctgaagcctgaaggagataagctaagctagtagtacactactggagtacatgagaaattctcgatcatcatcagtcacagagcctcacaagggctcacatctcacaaaggaaatgttgctgacaggaattaagttaacacacacacactgcacgcagagctaaccaaggcatcaatcaccac

SEQ ID NO: 41180 - DNA, 465 bp, Oryza sativa
  unsure (1)..(465): unsure at all n locations
agcttgtccaacctatcaaggacaaatacttctattctcatatgcggatttattccagctggcaagtgctacagcaattgaggtctgatcccctcacgcccccaaaaaataatgaaaaatgaagtacctaactagtctggttttaatgtacgaacactatattctaccttaatgatccatttttgtcaaacttgtactaggaagctggtggtccaaagattccaatgacatatggacggattgatgtcacaggtcctgagcagtgtccacctgaggggaagcttcccggttagcaacttatgtttcactggattttccaaaacactaacatctgtactgatatcctgtcttgcttacttcataattgttctttntaaattttaaatgtaaaggttcctatgtacattgtctctcatcagcttaatatatcaaccgaccttaatctttcccttggaaaatatggga

SEQ ID NO: 41181 - DNA, 372 bp, Oryza sativa
  unsure (1)..(372): unsure at all n locations
atctagcgctattcttntatgctatctttntccactgatattttagtttatgctgnacaggtttcagtaattggttacataccttactctgggaagcctatgaatttcctgctattatctttgatgtatgcctactactgcttcgagtatgtacatcttaatgtctttaagcattctttcaactccctatgtcttatacatttgccaagctagcgtattgttgtaaatttaatgaactattcttgtcacgtacaagtggaacttctttgcagtgagcctgaatgaaccgcttgatttcttgagtcaaattgtgccttttttgcttggatcggtatgttgataatcattcattgcatatggtgcaaaatatat

SEQ ID NO: 41182 - DNA, 442 bp, Oryza sativa
gtcacctgcagctgcagcctgaacttctctgtaattgcagatggtcatgtattcacagattctattggggtctatataatcacaaacataagcaactaactaatttatgtcatgtattctttctgagataaaatttgagtttgaaatatgatgacagttagttagatcagaagtgtttgaaaaacaaaaaagtgtttgaaaaacaaaaactatttatgaggagcaggaaacaaatgtgtatgcatcaccgtcaccgaacaccgaacaccaataaattaatatcccacaatgaattaatatcccatactcatgtattacctccgtcccacaatataattggacgatatttggataatggaatatgctcatatacaaaatggaatggaatataaatgatcgatctcatgtctagttgatgccataatggccattaaaactcaat

SEQ ID NO: 41183 - DNA, 426 bp, Oryza sativa
  unsure (1)..(426): unsure at all n locations
aggatcgctagaattttggatgagtgaagttcttttttctgttattgacaacaggaaacttgtcctttatgtttctcctcttaatgaaggcactctgattnttggataccaattgttgtagtttcggtgtcaatcaatttgctaggagtttagagaacattttgccgaaagcatgaatgaagcttattggcctgaaatcccccactctgcaagcattatgcttttttcggcaatagggcaatataggcccaagtcatgagccagagatggtgaaaggaggtgttatatgcttggttgatcacctgtaccaaatcttgtatgatctctcagcattnttcaataaaaaagctcctgtgaacccatatgggctaggtacanttattgatcgggcatggaaaattattattttttatttcttcaactgtg

SEQ ID NO: 41184 - DNA, 468 bp, Oryza sativa
  unsure (1)..(468): unsure at all n locations
gcactagcaagaaacagatgcgtcttctttcttgtgtnntgtggtagcggactgtggagtgcatgttcagagtttcagtcgcacgctgcctgcttgcctgggatcctggaaatgattcctgagattccagtgcacttcagtccagtggataatattctggtttcagtcaagctgtgtgtaaaacaactgtgaacagttgtggatgccggggccttcgacgacgtaataaggatcatgaaataaaatccagtcagtgcagatttgcttttgtattttgtttattatgttgccggtgctagagattcagtgcctatttttcttggaagcaaaaccaatatgtattctaccatgagtggtagagcaaagatgtaagataaaatgaaggatcagagaaactctatctggtgttgaaaccagggaaaagaaaaaaaagaactatccatattatatgaaaaaaatatggttaag

SEQ ID NO: 41185 - DNA, 457 bp, Oryza sativa
ggccttcgaatgtatgagcgtgccagttgatttgatcctgttatcaacaaaaaatagagacaaagaattcgtggttaaatctataaatgatagccgatcggctaggtgccgatgacatatcatttatctttgagccgatgtcatatatgaatcgatcggcgattataaatagatagtaaggaactaaatctattcgatcggctgtagatattaacgatatataatcctgttattaatatatatgccccccaagtccgggatatttgataatgttccggatttgccgtgtaccgactccgagcaagtttcgcactctgccattttctgaccgttattctatcgctttaaataccaaccgttgccctcaaaaaaatctcacgccgtgacttccgttttcaccgcccaagcgaaactttgtcccttctctctccggcgattccttcgacgcaaaagcgat

SEQ ID NO: 41186 - DNA, 472 bp, Oryza sativa
  unsure (1)..(472): unsure at all n locations
agctttctaccctgggtcggtgctagaaactggacatgacattatctctctttgggtagcacggatggtgatgatggggatgcaacttggtggcgatgtgccatttgagaaggtaatggctaatgcatggatgtgcttcctgtgccattaaaactgtattataacattttagcagttcaatctatacatttcatccagtttttacactattgtctttcatacaacagtataattctgatcgaaattcaaacatgaaaaaatctatcttcaaattgctagctggggatgttataatgaaggagaagtctatttgagactacttcgttcgtgagcattcattatttctgctctgccatttgtcttcaataggtcacactaattttatctgaatgtactctagtagcttgttaattttggacatatattacatttntgtcaacatgctacttcgactaggcacaatacatgggtg

SEQ ID NO: 41187 - DNA, 218 bp, Oryza sativa
  unsure (1)..(218): unsure at all n locations
acctttcatcctcttccataaatagccatattctctcaataatgggtcaagagatacgtctatattaataccaggctgacngggttcctgtatgaggatacagagtaatacatatttttcgctttgaccagccaggtatgaagatatacatggtgagaagcactgccagtactatgtgactgcttatgtttcaaagattaacttcatcgtactcagac

SEQ ID NO: 41188 - DNA, 425 bp, Oryza sativa
  unsure (1)..(425): unsure at all n locations
agctngacgaaaaatgattgatatttattttagaataaaatggacaatgccatgttagagacaagtgagttgcaaaatatcatcaaatatgaaaataacatgtataggccataatccatatgttggcacatgcgatgggttttatttttaaaacactagtttttcggatggttatcaaaggtggcccaatttattatcagctaaaagcctgtgactttcactcgacgaaaaggtggcctgacctgctactggagaccanaacaatatatttaattcacactaaattatttctctgtagctacttaaacctatcgttagttcggtcgatggaattaatactgcaagtgccaatcagatcggttggaacacccagtcccttgtgccatcccatgcagatcgaggcaatcacattcattatcatatat

SEQ ID NO: 41189 - DNA, 427 bp, Oryza sativa
tcactacgcttgtagtagcacatgctggatcctacagtttcatatcatctgaatccattcaattatcttctgacatggcatgtatccaatcatatctatttaattatctcctgacgtggcatagagctcagtttgttgagcttacctgatagtcattgggaacaaatcctgcatctacggcagctctggtcgcacccactacagaggagaaacataatccgtcagaaaacgaatgcacagcgaaatgaatttcacgagccttgataggttcaaataccaaccgcaaagaatatgggtgctacctattaggtatagatggacaaagggaaaaaaaaaagctcaaacctgctgctccaagtttctcagcaagctgctccaatacttttgaattctcagcacttttaaacctctgcctcagttactacta

SEQ ID NO: 41190 - DNA, 431 bp, Oryza sativa
  unsure (1)..(431): unsure at all n locations
agcttgacatnttgtaatatgtaatgcatgtgaagttcacagaactaactctggacactttcagaatgctacagtgtctggagtgggaacccactgggtcttatcagattgctgccaaagagcttacagaaaatggcactataagtgatcagagtggaccctctggcctgattgatatccacctatcatcagaaatatctgatggaaatcttcctgcaaatcctcaaaaggcaatcatatatcatcctacagtatctcatcttctagcggtaggttgtttatgcatgttgttctctttgaagctcagttttacataagatggaaatcaaatcttgatagaatcacggatcttcttttaggagattactcttgaaatgatatattatgctcaccatccagtgaactggatgcgtattttcccctttaacaat

SEQ ID NO: 41191 - DNA, 418 bp, Oryza sativa
  unsure (1)..(418): unsure at all n locations
gcttgattaattggtaagacacaatttatttgttagatcactgcttaattgatttcttgctgtgcttgccgagtggtgatgaacattcactgtcaattgttgtcacccggccccttccaatttcgtgtaccatattcaaattggaaattgcaggactactccaagtccaactctctctttaaaatggcatgccgtacgcatgcagttgcaactagctagcttgctgaagtaatcccagctagctaccgggagtcggagacatactccctccgtactcgtaaaggaagtcgnttaggacagcgacacggtctncaaaacacaagtttgacttctttttctattaaaatattattagacagtgatatatatatatatacttttatgaaagtattttcaagacagatctttcatataattt

SEQ ID NO: 41192 - DNA, 461 bp, Oryza sativa
  unsure (1)..(461): unsure at all n locations
tcacacccctaggggctatggtgcacgtttcaaatttcttttattctttncatattacaaatatgcaaatataatcttattttggttccactcaatttcaggaggcagaaaagcgatcagagcagacaagtgagtacgaaacagaactactttttcccccatgaaatatgtagatattttgctcatatcttcgtaatttatcaggtgaagaactagagtatagaccagttcctgcatctgagtcaaaacccccttcagatgaagcggtaatacaaaatgatgaactttatcttccattgacttggtaacaatcagtggtgaacccagaacaaatattaccgggggtccaatacatagtaattatctaattattgactgatatactatataaaataatataatttagttagaattggataatctacccggagtcctgtgaccccggtagttaacgtgggagc

SEQ ID NO: 41193 - DNA, 409 bp, Oryza sativa
  unsure (1)..(409): unsure at all n locations
agcttggtgagctcttctcgtatggcttgttttcnatctggngcaaatctccgcagtttttgctttactggcttggcatcgggtcgcaccatgagtttgtgctcaatcacctcccttggtacccccggcatgtcggacggctaccaagcgaacacgtcagcattgtcgcggaggaaggtgatgagcgcgagttcctatttctctcctagtgatgccccgatcttaacggtcttgttgcggttggcactggagagtggaacgatcttaattgcgccgtcttggttcggcgtcttgtttgtcttgctcactttcttgggtggctctgctgtggcaggtgggctgggcgtgttctcgaccatgtcgaggcttcgcttgtcacattgcacctgcagcttagcattcacttgaa

SEQ ID NO: 41194 - DNA, 462 bp, Oryza sativa
  unsure (1)..(462): unsure at all n locations
ntatttctctctctgtttttatagccataccctttcctttcttttctcattttctttctttcttgccatggattntctaggagaagaaagcatagtctaaagtaggaggttatttgaatggaatttttgtgggaagccaacttctagtgtagaagcttagcttaattaaatatgtggaaattaaagcggaaatgacccctcgatcatgagagtatgaaaaatatcttatcacaagtcacacaaatttgacgaagctcaatataatgtcaagcagtcgtatgcataataaggtttatcaatgatatactttgcatatggccttggtgggtataaaataaagtcaattggaggaatcaactctttaaaaacattnttttctttctttgaatacanattcccatangtcgtgataatagttgcaagaattctttcanatttaatcatctacacatagcaatcact

SEQ ID NO: 41195 - DNA, 362 bp, Oryza sativa
  unsure (1)..(362): unsure at all n locations
actcaacgctctatggggatcctctgtgacccacagatgtgaatatttatgtggcatattaacgtttgcaccaaaccaaaattactaagagcatatttaatgttaattttaccactttacatatgtcccattaatttacttntttagcattggatactatgggaggagtacagtgtatcaaaaatggaaggcccatattcggaagttcaagcaaatacaaaccgtcaagttgacatgtggatacgaccatcctttttttggcgttgctcagtgtggtacctcgacaagcattccaacaagttcctttcacgtgttgtaatctcgccaaccagctctgaagaggaaggtggtgtgggtgtctt

SEQ ID NO: 41196 - DNA, 455 bp, Oryza sativa
gcttgtcacgagtcaagcgagctaacgagccatgagctttccgtccaccctacccgcacacaaagatgccatccaccctacccgcacacaaagatggtgatcttcgcaaaccatctcgggcaggcggacccggttttcgcacgggaagatgtccgttgggctgcctgcacaaatactttctgtagtagtgacatatatctttgctttctacaaagataccggctctatatttttatcctgcagtgccattccttttgcaatgatctctagtagtgacggcctaatatcatgtgaccagctaatgtgaatttgcgtgagtagaatatttttcccgtaccttctataatgagttagttggaatctatgatatcaagcgtttagcttaagtagttggccatgttttatcatataaatctcacttggattcatgattcccagttactcaccattgcaca

SEQ ID NO: 41197 - DNA, 447 bp, Oryza sativa
  unsure (1)..(447): unsure at all n locations
gaaaanggagagagtnggctctcatgctatagctatctatncacatattttaagatagatacataggtgagagatagagagaggaggagaaaaaaaagaggtaaccttatagcccatttactatatatgntaactctaagataagctataaactcattggtggctctattattaaacttgctcttacagtactattntcaaatggtgagcaccatatattaattgtgaaaacacacacacacaccgatgtacacgatgatggaaatttactcctcttcaagttgattgaatcttgtctgaagttttatataaaccacactaactttagataaaagccctnccactaccataaaacctaacttcttcgttctacaatgtaaaactttctaggatgaggacatatcatgtgaaaacaatgntagtgttgaaaaaatatgaacatcatat

SEQ ID NO: 41198 - DNA, 396 bp, Oryza sativa
  unsure (1)..(396): unsure at all n locations
agcttaaagccatgaatccctttgagcatatctggatctggattctgcacaacaaacatatacgatgagtagtatctgacataaatataatactcaacgaaaattcaaacattctaaaacggctgcgaatatgcacctctcctcttgtcaattatgattctccgagcagatgactcattacgtttaaacgctctgttcgactaatcatagctcccaagcatagggagtcggcctacgcacttcccanacatgcatatgagtgacatgagtctgccataatggaacaaagtttcacgaatctgaattactactcacgtactcttgcgatcgtaagagaagaaatgaattatcttatcttatgcctctgatcattccgaaaatacttgcaccttgcgt

SEQ ID NO: 41199 - DNA, 330 bp, Oryza sativa
  unsure (1)..(330): unsure at all n locations
agtaaaccagcccatatcaatcctctccgtanaataacaatcaccttgtaattaaattgacttttagtattctttcctatgtaaagtttgataggagcacacttttattntcagctagcatcagctcaaagtataatttgtagcaattcatttattgatatatagtgattctttgtatactttgggtcttgctgtttggaatactttgtagcaattcattgattgatataattggaccaatctaacattctagatattgccatcttctttttggtacctatgtattaatcatgtatatatctactgtaagtatatcatatatatatttgc

SEQ ID NO: 41200 - DNA, 360 bp, Oryza sativa
  unsure (1)..(360): unsure at all n locations
agcttgggggttntgttgacggtcgttatttaccaatttctaccgtcaatattaccaaaataaaggagagctagtgatgcttgaaatgcataaacatgttagaataataatattccactagtattaggtatactaaccttttacagagaataacaataaagtggaggagaatcgacatcaacacatatgataaatcaatcggacgatgtcgagaatcaggccaaaattcacaagtctacgaagtgaagcagcggaggaggccaccagccaaaatgtgggctggttgggccggcccaccctggttcggccgaacctgccgtgaagccgctggatgcanggtttggatggacggtgtggatt

SEQ ID NO: 41201 - DNA, 392 bp, Oryza sativa
taagcatagaaacgacgaagatgttcaatgttccaagagttgtcgacgagagtaccgtcttcgcgcttgagtcggtaggaacctggtcgggtgacttcagagatgataaatggcccctcccataaaggagataacttgtgccgatcccgtgtagtttgaattttccacaaaaccaggtcgccgactagaaaggcacgggatcgaacattgcgattatgataacgccgcaacccttgtaaatatcgagccgaccgaatcaaagctgcttcgcggacttcttccaatcggtgcaagtcatccactcggtcctcttcgtagcgttcttcacggaaatttcgaaagcgcaaagattcgaattcaacttcactcggcaacattgcttcttgcccata

SEQ ID NO: 41202 - DNA, 428 bp, Oryza sativa
  unsure (1)..(428): unsure at all n locations
tgacgacctctacacagatggatcttatatgaatcgtatgatgaagtaccacatgagtggatatatatgaaaggaatccaaatctgccgaatcgctcatgttatgatcttctacatcctaggtcttcgcgttccgtcatttggcttatgttcttcatgtagcattcagatcgaatgactctatgaaattacgtcgatacttctacatattatgggtaacggaggagacattcctantttcccccggnggtcttaattaccactgcttagctttcaattcgcctctgaccatcaaattaaatgtgaataacccgtcctcctctctttaaacaaggcgcgctttctcgtctgtgcgtgccttaaacaatattgtcttttcatattaccatatctctagagtcaataattttctatgaggaactactgaac

SEQ ID NO: 41203 - DNA, 400 bp, Oryza sativa
  unsure (1)..(400): unsure at all n locations
agcttagggatgtgcagtgcgtttccggctgtttggccgccctaagtcgttcatatcgaggctgggagagaaggcactgcccctatttaagctcctcaaacgctccgggccgtttacctggacggaggaggctgagcgggccctcactcagttgaaggcgtacctcggttctcccccagtgctggtcgccccggagccagatgagccattgctactctacctggcggcaaccccgcaggtggtcagcgcggcgttggtcgtggagcgcgacgaggacaacccttactccgcgcattctcaccctgcgttgactcgacccgggagagagcatgcaggagaggcccncgagccgaacggtggtccgaggcccccgacggcggagctggcccttcgctgttgt

SEQ ID NO: 41204 - DNA, 436 bp, Oryza sativa
  unsure (1)..(436): unsure at all n locations
ggggtttggtcaaaaggctagtgaactattggttgatatccattcttatctagaatattttgttgattgtgtccactgtccagccacttttataccatttggataaatcatgaagcaacttactttccatttttagtgcatatagttgcgtgtttggattcacatattcttggtttatagctgaaaattgcaaggggtatgcggctttaaccccaaggtcccatgttcaatccccaacatgctcacaatttcttcttaaaaaaagtttggagggatgtctctccctccaaacctcattttttcttatagctgaaaatntcaatatatggttacatgtggaattgcaattttgtttcagtgatgaggatgatgacgacgatgatgacactgaagctctaatggcagagcttgaaagaatcaagaaagatagagctga

SEQ ID NO: 41205 - DNA, 462 bp, Oryza sativa
  unsure (1)..(462): unsure at all n locations
agcttcttgcctaggtagggacaataatctacacattcacacacatacacacactcgctaatcaatacccgttctgtatactactacttgaggctatctcatctctcactttttctctttccttcttgttttttctccttgcttccttcggggagctggccggtaactgttttggcgatggtcagatccgttaagcggaagaggaggagcaaacgctgtggcgcgggcatgacacgaggtggtcgttggtgagcccgacggcctgcatgaacgagtggatgacggtggggccgactaaccggaagccgcgccgcaccatgtccttgctgatcgactccgacttggacgtcttcaccgcgatcttccggctgtatttgtagctccgggacagcggcttgttgttacgaacctcacacgtatntgtgaaaacccgaagccctcctcactgttcatcaatatatc

SEQ ID NO: 41206 - DNA, 427 bp, Oryza sativa
tcgaacctggttggagagttaggtgcagctacaacttctttagaaatctaaagctctcccaaacaattcagttgttttatctagattctcagaaactgagaaactgcaattatagaattcacagaaatgaaagacataatgtgaaaaacctagcttttttagattcttaaaagctaactaccaaccagtttcttctcagaactttaagcttcctcgtaggtgaaccttgacgtgaccaattttcagcatccggtaaccggtggagctccttgttgccgtccacaatcaccattgttggagattgatctctctattccgattacaagcttgtactataaagcaatatgagtgccagattttctctggtttccatagcagcttcctggctagcagtgtgtgtaccaaggaaagaagtccgaaccgtgta

SEQ ID NO: 41207 - DNA, 416 bp, Oryza sativa
  unsure (1)..(416): unsure at all n locations
agcttcagatggccataagagtggacgtaattattcggcaccgggccgccctagaaactatatgctaacttcagaagccaagatcctattcatgtgcttngtatttgtttgttatctggagttaagcctaattataacccatttttattcaagagtagacgttactcgagttataaggaagaaccggtttctagtaataccaaaacggtgcatggaaaccgtacttaggaccatgtataaatatcgtatatatcgacactccctcagaataattatgttgatataactaaatgcatattcgcattaatatagatcccgagatatcaccggaatataaaccatgcctattgctttgtatgaccttatatagcatagtatattaccttgtgaccctaaaaaacaaacccaactaggga

SEQ ID NO: 41208 - DNA, 436 bp, Oryza sativa
  unsure (1)..(436): unsure at all n locations
tctgtcaaactncattaatggaccctgcagcaacagggtccgagctgttgcttgtgttaccgctaacttgctttgaactctcaagagcaagcttcttgagcatagcagcatagtaatgttgatactgaacaagatggataacatttagcatcccccataccgtatgggtttttcctgtcccaagccgcccttgcactaatgtgaaaggccaaggtttctggtttttcacagctccgttgcttgtgccaacagctgtatgcattgcagcccaatgaaatcgctgatagcttgacgcccgttgaaagttccatgcagatgatcaacacaatntggagtgaaacaatatgcatagcaggtggctgctcttatacttgtggagtgctctggacttggctgaatataccattttgcttccgaggaaagaattttgttaaac

SEQ ID NO: 41209 - DNA, 459 bp, Oryza sativa
  unsure (1)..(459): unsure at all n locations
tgctacgtcgagaaatccgctcggcttcgtctttgtctttatggagctcttgtttagtcaaaaacttgacgaagggctctctccggtcggcatcgatcatgcttacttcttaagtgcctgccgtctcaattagttcttttcttggtactgtcggtccataaagatactcaacaaacacatcggaaggagctgcttctcgtttcgaaccaaaattggccagcctatcggctgcttcgttatcatgccaaagaacatgagttaactccaatccatcgaacttgtcttctaatttacgtacctcttctcgataggcagccatgttttcatcgaggcangaccactctttcatgactttgataacaaccaactgagagtctccacgaactatcaaacacctaatccctaaggataccgcatccttaatncatgaagaatgcctcatattctgcacattatgcg

SEQ ID NO: 41210 - DNA, 372 bp, Oryza sativa
gcttaggagggcacagctaacgcccacctatttcgtatttaaagcggtctatgcagccgcaccatgccgcatttaatgcggcgtgctgcgcatctgaccggtctgtgaccggtcgaatgaccgatgcgacggcgactgtgtaccctcgccttgtcagtgtgtcaagcggcgtgcggcgtgctccatcccgtcccatcataatgaggagcttcacagcctcttatcccggtcagagctggtccaaccactctgagctgacccgggtacttgtttcctggtgtgaacgggaacccggaagtcctcaaccattaaacggcgaatgacaagggcgccccgcatgatctgatggtccccacgcaacagccgacgcgc

SEQ ID NO: 41211 - DNA, 410 bp, Oryza sativa
  unsure (1)..(410): unsure at all n locations
gggtgtctcctccggtggaactgcagtcgggaagggattttgcatattgtttgtcagtgaggcaaggatggctcttccctctcctaaggcgaggaagccggngaggtagtcgtcagcgaggcttctacggaggcttttgtggcggacggtgaagcagtcatggggcttctcgtcctggttggtgagtggcttctctctttgatctcagctagcccacacggtgacctgatgttgtttacacatgattcagttggtgaatatggacatgtcttgttgattcccaacctagacgtgctataatatgctactagtatcaactatggagatttaagattctttttttttcttgaaaagcggtgcttatngtattacttatcangtctggaaggtttgtgttataatgatgcata

SEQ ID NO: 41212 - DNA, 335 bp, Oryza sativa
  unsure (1)..(335): unsure at all n locations
atgcaagcttgacacccaagtgacacantatcttctattttaatgcgatgctaccccaacgccgaaatgaacaaacaagaacgacacccacgaaggacatcaacccaagctaccaaggaaccactcctacacacagctagcatcaacaatcctataaagagattgcagtgtgtcatcgttgccaagcttcgtcgccccagcaaagcaactccgactctaccccacagtaaccagataagagtgatgaacacgcgctgtagcaaggaacgaagccaaggaagtgaggcctcgtcaaacaccctagacctgaagagcttcggggacattgcaggagt

SEQ ID NO: 41213 - DNA, 410 bp, Oryza sativa
  unsure (1)..(410): unsure at all n locations
cttggagaagaagacataagtggaggcttggcttataccctagttgagcgcctgtgaagatggagccgtaagccgctagtccgctgctgtttatttttgcttgtcaggcctgaagtgcctttgtaataatgtaaatattatcgatataataaagatgtgtcttttatatcatgtntgtgtggtgtaccccggctttttctgggacggggattaatacactacccgttcgggaaaaggcaattttcccggtcgcgacaagctggtatcagagccatctcgactgtaggataagccaaatggataaaacctaaggacatattttataaataaaaatatttgcaaaagatctccttttctccttctnctaatgctattngcaaaaggtttactctnttctttcttcggattca

SEQ ID NO: 41214 - DNA, 245 bp, Oryza sativa
agctctgcgctataataactcctctcctctcttagtaactgactcttgacttcattgaaacaatgatccgcatgattaatgatccgtacaaacatttcagtggattgtaaacataattccaaaaaagtacctatccgacacagcagctaaataaagaggcgaaacaatctctggtgccaactgcataacttcaatgacgttcaagattcctagctgaagatatcacaagtgaaattcttctgtaa

SEQ ID NO: 41215 - DNA, 378 bp, Oryza sativa
tggaggtatgcaaccctgctgttgtatagtataacttgctggatgtgagtgcattgtattacgcttggcggtatctcaccttggagggaggtgttccataagccgagtacctggagattgctgcatgaggaaagctcatctggaatacggccttcaagagagatgatgctcatgttcaggtaactgatttgtcccaagcgcccgagctcacttggaatttttccaaggaacgcgttgcttgataagtcgaggcttgcgatggagctcacatcgccgatgcaaggtggtattgaaccaccatggcctttggagctgacgttgagtgccatgactcggagttgggtctgtgtgttgctgcatgaaacactcctccaactg

SEQ ID NO: 41216 - DNA, 163 bp, Oryza sativa
tgcagctttaaccatatgggacttgtagattggtgatgcatgtcataaatactctattatgacccatacacatcaccaataatgtcagatgtcttatcatgtttgctgtcaacaataatatgtattatcactgtgaacattaactgtaaattcatctgaactc

SEQ ID NO: 41217 - DNA, 431 bp, Oryza sativa
agcttcagaactcagaggcacagaacatggagacatgggagaatcagtggtgatgatgccgtcagatctggagcttgctggcgaggtaccatgagtgcattgcaaggctaccgaacgccatgatgttggccagagacgacaggccatggatcatcccgaacttcttgttcatggccgccagcgttgggttcgtcctcgccacctacgcgttcttcgaaaacccgacctcgctgccgatgccgaggtctttctcgatcttgtgccgcctcatcatcatctgtagaaagaagcctaagtcaaaactcaaaactgtatatcgataggtactacaaaagagcaccctgaagtgaagccatgttggggctacaagatgtttgtttaatcaatcatcattcgttggacttgtcaagagcataacaaaagaataatgt

SEQ ID NO: 41218 - DNA, 397 bp, Oryza sativa
agcttgttgatcataattgtagatgaattatgatacttgaacggcctcattctgacttcatatgaattaattaccaattttacaagactaaatctaattaaagcctatttaaaaaggattatataaatttaacacaatttatggataattttactatatagatatttattttatacacttttgcaacttgaaccacattaaaccgagttacaatgaattagttatgaatttttaaagattaaaccgcattaaagcatttatatggattttaattgaattatgacgcactatagaattattttgaaaaaaaaaaggatttattgcatcatttaagacggttcagtgtaaaccgtagtcacagaaacggttcacataaccaactgcctatatctaattg

SEQ ID NO: 41219 - DNA, 282 bp, Oryza sativa
  unsure (1)..(282): unsure at all n locations
tactgtaagacgcnggaatgactgggacttttcttatgttggccaccgagtcgtccttgtgcttatcagacgagaatagccctggatatttataggagaacacttcactcttccattggtccgtccaaaaaaggaaataatttcccgatcccaaaacgggcttatcaatttctctgaacaaaacatcatattgaaaaatgtctcttcaccaaaaagaaccacaaccttttctcatattgaaggaccacatttggatatgatgtggaccaaatcaacttcacc

SEQ ID NO: 41220 - DNA, 414 bp, Oryza sativa
  unsure (1)..(414): unsure at all n locations
agcttcaagcctgggatgtctggaatcacactcatgtggaacagagcccaaaagccacaggaagatgtccgaactcgaaacagagaaatcatggcgaccgcacacaaaaaaatcatgtgccttcctcaagaaagatgcggagcctttcatctttcgacataaatcacagaggtgccggaaacaagaagtcagtaataggttaaatctctgggcattgcatgcatcccgcttcgagttgttttcagtaggatcaatgaagcgtacgttgagctctcaaatgaaacgaggataaatggcgatgaggttatgctccggatgtaccgtaggctacaaggtggggcagccgtagctntgcatttggtgaaggatgtctagggcaggtacttcagttccggtagctgctggcgtatataa

SEQ ID NO: 41221 - DNA, 237 bp, Oryza sativa
tcttctctttggcgttttttttagacacggggggttttagaataggggctaaattgctatatctcatcaaggatttgttacccaaaggaactttctcactgatcttgccacggatctactaatgtacttgctaaaactgcctttgtaacatttaataccctaaactatcagcccatctggtaatgccaaaatggttacgctgttgaccatttgtgctccgggaggagcctgggatca

SEQ ID NO: 41222 - DNA, 380 bp, Oryza sativa
aggtacacatttaattttcatcaagggcacatactaaaccatgaattaactgtcggcacacatttagttattcttgattatcttgcaggcatttaactaatcatcttgattcgctgggagaccaaggatgcagagtgctaggcacatttcagatcatttaattagtgatagcatggagagaagagtgagggtaatacaggtattggaagaaaaatctaacatggttgactcacttaacggtagctaatgtcagcagacctgacggtggtggcactaaagggatgaatattgaaacccaatagcatagaaggaaaagtaactcttttagtggcatataaggaagccgggtaatttataatggtatataagagattctctat

SEQ ID NO: 41223 - DNA, 410 bp, Oryza sativa
agcttcctttaattgattaatgtccttaaccttatccactaagaatctgactactgtggactgattaatttcccttgcccaatttccggactctaaagccaatactaactctaggtcgatgatgacttccggcttaccaaagtgttaacaaacggctagaccgctggcagctctagtacgaccgagctacctcattcagatcggtgtcagctctggcttgtctggaccgtcgagccatggcatccctgccggctccatgggtgcccggacaaacccagctcagcctgatcatactgaccaagagccttcggtcagactgacacacaagccgcgatgaaaccggtatgtcccaatggtcaaactatctaccgtcccactaaatgaaatagatttgaatctaaccatacacc

SEQ ID NO: 41224 - DNA, 343 bp, Oryza sativa
gcccgcgaggccaaaagcttttcgccattacctatggctttgggcacatccccgaggccatatgggctataaccttattacctatatccctgtaaagtccttaacatgtaaatccctgataccaaacctatagaaaacctgatagggctttaaagtctatagggctgtgaaggggattaaaaaaatttctataaacacttactgtttcaacatgtgagaaccgttttgagatgactgcgttcacacaacttaacaattaaaaaactctacccaactacgcctaggcagacagctaacaaaaacgttccttctaaccgtatgctcttatttcaagcttccataa

SEQ ID NO: 41225 - DNA, 416 bp, Oryza sativa
agcttaactttaggaattatgtcacaatctatgccttcaataaaatacccataagctctctaattttgtactcacgcttaacatcgatgccttaccgagccaaatattgggcacgtatcggcactcctggtgtcgattcagccactatcgttcgatccgcttggtagcaatgatctctccctcgcaaggaaaaaaaaaacagaaacagtttaaaggaggactcacttaaaaccaaatttatgattactgttggcggagagggtgatttgctggtctaattcttttaaggatggcccaaatcaagaatttctagtgtcaaactttagcatactcttaaagagatgctctaagataagattacacacaagattacatccatgcctgcatcgatctcttttttcatgctgaattgattt

SEQ ID NO: 41226 - DNA, 341 bp, Oryza sativa
  unsure (1)..(341): unsure at all n locations
cactctataatacntaacgctttatatntggaatatggcatttgtgatgggtatgcgttctttatgtacatcacntacaccggctgggctggagcatatgcaaccagtactatacaagtgtcatataatattcagacgtgcatacaggtgcatgtgcccatgtaagtaatgatgcaccattagtgataattaatcatcaatgttattactaccatccgttctgggatcaataatttaacacaccccatttctgtttttattaaaaataatgttcaacaatattatcacacagccacgtaggattataccactcttgattatgtcgaggggcggaatttata

SEQ ID NO: 41227 - DNA, 333 bp, Oryza sativa
  unsure (1)..(333): unsure at all n locations
agcttatgcttgnttggtttattgagcaatctgtcagttgaatcagaaagaggcagcttgtgtaagcaaatcagtcagaccgcctgccagcaccatctttctttctagccatcccagaatctcgggacgagattcctgtaaggggggtagatttgtaacgccccgattttcgttcgggtttaaaaatcatacacaatgtattttctagaaattatacaaaagctacacctaatctaatcaagcgaaacagtgggagaatattcatttcccttcaaatctttggccgcgaaaattggcactatattgcgcctacccaccttccgtatcctcgca

SEQ ID NO: 41228 - DNA, 410 bp, Oryza sativa
agcttttacaaggcggaataagtctatattgcctccctcaactcttgccttgaatcgtccccctcaaccgcaatacctggtataacgcctcctctatgtttgaaaaccagagcaaattagcacccttggctgtttagatagcgatttcatcatacatgacacttataggacccacatgtcattcagaaaaaataaaaaaaaaataataattctacatgtcagccattctaatcttaattatttttcttttccctcgtctctctccgacgaggcgacgacgacccgtctgcccgtccgtccgctcctttctcggctggagccaacaaatcagatgttctgttgtcgccacccctgttgtcaggctccctacgaaagccacgagcctggtttaacaaatcatgacttgcata

SEQ ID NO: 41229 - DNA, 432 bp, Oryza sativa
tctcagctagttctactaaggagattaggtaatggatatttagccgacctggtgctggatggagtttggcagctgtggggcgcagtcaaaaagccataccgatatcggcgtggacgaacacccaaagcagctcgtcgtgataattgatgccggtcgctttctcctcgcccccacatgcgttccacctctttctccacccggtccaccgcgttctccacgcctgcctcaccccgtgggccgccacgacgcgctacctcgaggccgatcggcctccactgcgccatcgccatctccgccgcatgaatcatgctccgcggctgctcctcgtcgccacaccgcttgaagaagaatgagagcaagagagaagggtcgtcttgccgctgctcagcgccagtctctcgctgccgcgggtgcctggcaactttcgcggga

SEQ ID NO: 41230 - DNA, 436 bp, Oryza sativa
agcttggagaacgggatagctactctgttggtgatgctacaactagctcgttgggaagagcagccgccaaaatgctaatgtgcaactcatacgcaaaatgggtagtacatgattttttttccctttccggttttcatgctaacatctgtgtatttgtgttggagcgaagaggctgacggaactatcatttcgcttattcggaataagcgaaatggcatatttgcaaacgaataataatttataaataaaacttttatatacatgttgttagtgatctaaaagcaatggttgaaaaataaacttcaataaaaaccctaaaatcaactccatatttaagggtgaaaattcaatcttaactgataaatataagcataagcgaaaagatgagactgtctgccataaagtccgaccgagaaaagaattactatataccact

SEQ ID NO: 41231 - DNA, 414 bp, Oryza sativa
  unsure (1)..(414): unsure at all n locations
tcatctccatcacaagctggcttgcgtgctctttgctccctcttttatctcctgatctaatgacataatgacatgtgagagcatccagtccaaagtgagtttctagtaaaagatactagcccatagtgaaaacttcgtctctaggatggtccatattgaaactntggtaaaaatacctataccaatgtgcaatttactcatttataaaaccctttgcggaatcgcaaaccatgcatgcatggagtccccattcaagagaatatataatgagttcctccatactagagatatgcaagaattaagaagcatatatatattatggatttgccaattggttaatatttagttataaaaaaaacatttagaaattcgaatatatatgatgctggcctataatttctcacatttcattgc

SEQ ID NO: 41232 - DNA, 437 bp, Oryza sativa
  unsure (1)..(437): unsure at all n locations
agcttccgtacaaaacgtaaatagcagaactattatcatatgcttttgttatttcttcagaaagatgctgatttattcttatgtagtaggttagcttactttaaggctgcgtatgcattgtatgactctgacttctatgttaaagctgatgatgatatctacttgagaccaggtgcataccaatgccctacatatcctcttacagattttgacttggatatcatattttttttaatggctggcactttcattactgatatctattctgcagatagaacttcattgcttttggctaatgagcgttcacatacacaaacatacattggatgcatgaagaaggggcctgtttttactgacccatagctgaaatggtcagntctgttatttagtcttgtatgacataatgaaccccttttatgccatattgttttttttat

SEQ ID NO: 41233 - DNA, 314 bp, Oryza sativa
tgactatttatagtgtttttgcttcaagtgatataggatgaatttataccagcacacttgtgaaggtgccatctcctcatattaactcatcactttttatgattgtttggatgacaagaatgggtgaaaatcccctgaatgaaataaaaacaatttgtacaatagtcaatagtctcataaaattgtatataaaaaataagatgaactggataaggaaaaaataatgatcattctctgctcaccagacatatatgacaggtgaatggcggttctcggtttaagatggattgtatccgctcaagattctctgtgca

SEQ ID NO: 41234 - DNA, 436 bp, Oryza sativa
  unsure (1)..(436): unsure at all n locations
agcttgcaaagcatgagtaacaaaatcaaattcctctcccaatcaacaagaatcaacatttcattcaatttctacatgaacagcagcagcaacaaccacattcaaatgcaatgaccattgagggaaaaaaaattaccacatcgaatacaatgaaccaaggaactcatcatatgaacataactcgtgattggatatantttcatggcaggagtaactcatcctgagatgggcatgggcattgtatgctgagcactattccttgaaggacatgacggtctcgaacgcgcctaccagagccttcaccctgctcttcctctcctcaaggagtttgcttttgtgttcctcaatcacatcgttgctcttcggttcatcttttctccaaaccttgtccactttcgctctcgcctcttccttctttgaagcttggaatgaacat

SEQ ID NO: 41235 - DNA, 388 bp, Oryza sativa
  unsure (1)..(388): unsure at all n locations
tactcagcttctaagggtgcttggcggtggactgatgtccacgtcaagtatttccttctcgtcactagctaagatatctaagtacaccaactgcttcattcttttgattgactcagacagcactgagcaatgagatcctctaacttttgtgatccggaagctttttagctgaaccagtttgtttgcctgttgcacaaaacacttgcttgcctctattgtgaacaatgtctgcaaagacttaagcttgcatataccgctaggagcaccaacaccgctacaagcattcagactttgaaaactggagtccttcactgtctcgacaaacaaatgtcgaagcttatctagtntggttattccactgggcagtctacttatgcaactgtgatga

SEQ ID NO: 41236 - DNA, 334 bp, Oryza sativa
  unsure (1)..(334): unsure at all n locations
ttacagcacctgctgcatgcaagctttttgaacttattcaatccgggcaaaaatatcgcacccgtgtggtctcaacatatgccaatattggtgataattgacaaaagtacccgcgcgattcacgaagtgagtttttgccacgaacgcactccatacactccagtatgttcaaacatcttgttttggcgctttttgaactatttcattccggtcaaaaacatcgcacccgtggggcttattatatggcaatataggcattatttgacnaaagttccccgtgcgaattacgaagtgaggttttgccacgaacgcacccaatacaatctaatatgtt

SEQ ID NO: 41237 - DNA, 411 bp, Oryza sativa
  unsure (1)..(411): unsure at all n locations
cgatntttgagctgccactacctagtagtttatatgaacttctatctctttgngtatgtctcttgctttctactaacaatggcacggatacgcaagataatctgggatagctgcgctcaacatcgacatcttcgtcgagacatgaggagggagcaacatgaccattatgaggtaagtgatgaagttctatgtaagatcaaatctgcactgcctctatttgagggaaaactatgatctcgtgcttacattaattgggagctagcgtgcgataatgaatctcataagcatgtcttgtctgagatacaaaaagttatgtgtgcccctagtgtgtatataaacatgcctctaatgattggaaacatcctaatatgcataacaagataccacaatcttgggaaaactgaaactata

SEQ ID NO: 41238 - DNA, 369 bp, Oryza sativa
  unsure (1)..(369): unsure at all n locations
agcttcacnccagaagttggttactaagtatgctgtgttgaatgggataggagtagaccgcatcacagtgtggcatccatgcatgcccttgcgggangacnagtttcttcgccagggcacgcccagagctatacggaatggagggaaatctctgatgtagcaacttgtggttatacgaaacctacgtatagacnccntgaatagtcttagcactaaagcatagcatagcatagcgggcagcagctggtacggccattagtcacgagaaatgcatgccactatacctgacgaagccaactttatgcctgtttacggaatttaaaattctgtgaagcagctggtgagaagctatctggtgagaatctggag

SEQ ID NO: 41239 - DNA, 179 bp, Oryza sativa
tgtttacttttcatacaaaatcatggtatcatgaaacaaataagctatgtgcctcactgaaattttcatacgctcatcgaaaattttgaacataggttcgaaatcttaaaattatgggtgaacatttcaaacgatagttttaatatattcagcggttattattcagaaatgaaattttt

SEQ ID NO: 41240 - DNA, 407 bp, Oryza sativa
  unsure (1)..(407): unsure at all n locations
agcttgaaaccagtttcatgtctagtgacacgtctttttttattattatttttagataagggtattttttttacccggcctctacatccaaccggatacatacggcaattgaaatagggaacttagccctagaaacaaccaatctaaaattcgctccatagaagatatgaactcaggaccttatggtaccactcaggtcactgtaaccactaggctacatgcccttttgtaagagacacgtctactaggcgacaaggcagcatcatttgccaaagatattgtagtataaacagctatgattaggtggatgggttccggcctcctaacaaagatctcaatcgagatcgacagtgcccttcctgggcactactactaacccatnctttgatatctgcgttatatatttg

SEQ ID NO: 41241 - DNA, 488 bp, Oryza sativa
  unsure (1)..(488): unsure at all n locations
ggttgaaacgagtgacacgctcgatcgagttatccacgatcagtttgtttccttttaattccncagtgcttgctgacagttgtatacatttaataggctcatatcactagctagtgtatatacaaaatgaataaaagatgtataccgccaaatcatatcacttgtggttcctgtagaagcatcatcactgcaccgtctaattaaaccgatgttaattgctgctagttctcgatcaataaagggtcggcagcgagatacacattactgctagtttttattctgaaccagcacaagatacatcaaggaccatattatattgggtgaccggttgaaccgtcaactcattaatggcttaatttacacactcctgtcacccatagaacccttgtcctcctcagtcaccgncactgacacttgatgctcaccctcctttggcacagacactactaccaaaatcaatatttatacgggcagaacctatatttgtt

SEQ ID NO: 41242 - DNA, 422 bp, Oryza sativa
  unsure (1)..(422): unsure at all n locations
agcttattattctgatgacatttgtggccttcttaaactttttataaacatcaggcagcacagtgcaagagcanaagaggatgtatttgtacttatagatgcacagaattttccaagactcatgggcgatttccataaggtgatgtttaaacaaggatatacgctaaagtgagtactggctggcttctaatcttcatattctttcttagttgcattatagtattataccattggctgcttttggtgtgtagtgaatctgtagactctatcaaaaatcagaccttcgcatgtacgcatttgtttgatacatctgatttcttgtgctaatgttcatgtcaattcactattagccacacagattctggaatccaaaatgttgaccacgaatacagcagacatttcaagtgacattgaaagaactc

SEQ ID NO: 41243 - DNA, 426 bp, Oryza sativa
  unsure (1)..(426): unsure at all n locations
ctatgaaactcagcttcctacagacttagagcttcattgagcatttagaatgtactgtaattgtagctgggatggacccacatatatggaacggaggacaacacttgcaggcagtggcggagctagggcccgaccatatatgaactgtagttgaatgtgctgtaaaattaaacaaagcaaactaatcgaatggattttaatgctcgattgatattttacacttaattaattacctctctgagatttccgttttaaacagaaaaatgttgagttaaggtcgtcctaatctggtaactaaaattcctagacatgcattatcaaacatacggaatatgtagataatgagtatagttagagcatnntacaatgaagctccattgagcatttacaacgtgggaaaatatgtagtgcaaactatatatgtag

SEQ ID NO: 41244 - DNA, 414 bp, Oryza sativa
agctctgatcgggccacgtggtgcctttctcttatcaaataagtctatattatttgagggaaaaaacgacgcctagacatgatcattttgccaaaccatcttcagattcccacgctcggctttgtggagaaagaaaaagattcatcaagaaaaaaaatccgtccaaaaaaaagaaacaaaaaagaaaggagccccaatggtctatcgtatacaaaggggagagaagtgcaaattaacaatggggttttccataaaaaaaatgaggatttccaacctagaaggatcgatgggctctaaaactattcttaacagagtgcaaagcaacttggttatagcaagatttctatatatttgctaacaaaacctataacacctttataaatacaatcacctattttatcatgtaatacaaaa

SEQ ID NO: 41245 - DNA, 368 bp, Oryza sativa
  unsure (1)..(368): unsure at all n locations
atgattctatgtacggtaatatgttctgagttccggcacgcaatggatgtgctacacctgttgttaatgtggctgcattcgcagaagcaagacttatattcgatgcgtattctgaagagctctctatnttgcttatgcaattactcagctccaaccataatgcatccaatgcagtgttaatttcagaaatctgggacaatgcatcagaatgatctttttcagcaggatgatctggatcctttttctcttgcagagtggtgacaagagaactcanagcctgcacaactctaagaattgcagcgccattggctgatgatgtgctaagaagagccttttcagaatcctcatacaagtgaagctccttcatt

SEQ ID NO: 41246 - DNA, 364 bp, Oryza sativa
agcttagctagatcttatttttcgctgcagattttttcatggtgaggactaagtgcctcttatgtaagtagttattcgctttaattattctgacgaaatctgtaattaaatcgctacattgtgtacctccgctgattcctggacgatggtcttaatgcacaaattatatcagaaattacttgtgaatctctgggctggacaaagcacggtcactttgctggcaagtgttctaagcggacacgcgctggacctatgttcgtccagtcccgcgtcaatcatgcatttgcataggaatcacaggcatcaccagacgacgtgctgggcaccgttctagtgtaattattttggcgacatactttttgat

SEQ ID NO: 41247 - DNA, 278 bp, Oryza sativa
  unsure (1)..(278): unsure at all n locations
attcttcgcacatcgcanaccaatgatgaggtctgctattcagatctcgtcatatctctcgctgctctttggagcacacgtggcatccaccaattaacaagtctgtctgttttttatttaataatcgaatcaaatacatcgtctggctaaatttctaataactcctcctcttgaaatggtggaccaacacccacttgaatgtatttccaatgtactactattgctagaattgcaaatatcctaactagctctagtaaaagtaggtattggtttgcatt

SEQ ID NO: 41248 - DNA, 416 bp, Oryza sativa
  unsure (1)..(416): unsure at all n locations
agctttggctatctttggaaagaaatttgtttgaagtgtatcttttgtccgctaacatttaagatgataccagtctgttctgatggttgagtgatattccatgtccattacaggtaactgtatctaaggacgacactgttattcttgatggagctggagacaagaaatccattgaagagagggctgagcaggttcgtacancattaattcattgcgttactagtgcattattttgaaaatcgcggctgttgatagattatataaatgctgtgttgcagattacatctgcaattgagctaatcacttctgattatgacatggaaaagctacaggagcggttggcaaagctctccggaggtgttgctgttctataggtgaggtctacactattatgtttatattgaggaatatatatt

SEQ ID NO: 41249 - DNA, 419 bp, Oryza sativa
  unsure (1)..(419): unsure at all n locations
tgggctacttgtgttgcatctgagacatggttnttgcctgtgtcctgatttcgttgatcgcctggtagatcaacaccatatcatgccaacgatgttaaactgtgccacaaacctgtagaaaacgtctgtgctacttaacatcgtactaccatgcaatacctttctgctctgagtggtacattgccatctaaaagaattagttgtttttacttctagggaattctgcttggccggttgctagcatggacctttcctctgtattgttctggtctctgggttgattcttgcatttgaatttcttgcgcgcgttaatacatttatgtgtggtgtgttgattttttatccattgaaattatcatgaatgtagcgcgctgggtgctactaagccaccggagaagtatgcatagttgctaactatt

SEQ ID NO: 41250 - DNA, 354 bp, Oryza sativa
aagcttaacctcttacgctgttcagcgctttttcccggcgacaatccgctgagctaggagaatgagcccgtcgcctactggaagccgcccgtgccgccggcggtctggccgttcaagtcggcgccggcgccgaagaagaagaacgactacttgaagatgataaacaataacatcatcttgaactagaataatccgcatgaggccgtgtagggtgccgccaatgccgcagcatgcaacaagaagcctagtgcggtcaagatggaggacacggtctagttcataggctaccagtacagggcgccgatcatgacgaagaagcctgacccggaggcggacaagatgaatgagcatgag

SEQ ID NO: 41251 - DNA, 397 bp, Oryza sativa
  unsure (1)..(397): unsure at all n locations
ctcaagcttgtggcagctgatgttgaccatcccatgcctttaagtgttactggcttggagactntctgcctgagctacaagggtctatcttctgatattntttattcgttgttctaccttctgacaaaaaaatgatatgccaactatatatttcaggttcaatggccactatctctagtaatttcaagataatctttgacaaaataccagctgatctttcggctgatgttccactgcaagcatgttagtcgacaattgtgtacagcatggcaaattcaacaagtatgaatgaaccttttcttcacccccattatatcagcttaattggtttctgtntactcgctgactgatgtagaactctcaaccangtgtttcgttctgtccaaatctatgaaca

SEQ ID NO: 41252 - DNA, 398 bp, Oryza sativa
  unsure (1)..(398): unsure at all n locations
agctntacaatcattgttcatgagattagaattatccttactcagtacaccatattctttctttctactgaattttgagttagagattgatacttgtcaaggtaatttacatattatgaaaattacggatatggtaaacgacgtacctatcgataataaggtgtccatgataacttaatcaataagatataccgacctagtctctaagaggtgtttataggttaaaggtgtgtacattcatacaagtgaatgtgcgtgcgtatgtgaatgttcacgtttgtatcatgtgttttaaaaaagtcattaatttttaaggtattatatgacacaaaaataataattttaaagaagttgtactacagttcatcatgcataatggtatactcctacatgataaa

SEQ ID NO: 41253 - DNA, 369 bp, Oryza sativa
tcggaagctaaaatatctccactctggtaaaatcggaattgtgggtcagcaaagtatagcagagagaagtctagagctttgtactggagcatgctgcgcatgctacgtacctcgtctcgtgggagacttcaacaggcgtgatgcttgcaactacaattgctgcatccagccccgtgttctcatgatggacttagataatgatttccctatgctaccacgagggagcaggaaactaaaaagcctgcatacactccgacacgtgcacttggcgtggggaaacactgttatacaagagatagagagactcacccagctgcgtaagttatgcgtggtgggcatcaacaagaagaatggtccatccttctattc

SEQ ID NO: 41254 - DNA, 437 bp, Oryza sativa
  unsure (1)..(437): unsure at all n locations
agcttatcatgttcagattggacacagggagtttattattaattcatagtacaaattacagcatgtgaagaagggaatgaatcacttatcataagccctctttctatcctccccttatctcacttttggttgaccagctcccattttgatttactcaactatctctgtctgtcttcccgctctaaacaaccagcctttttgctgtttagctatccaatntccaatgcattctgaaattcacaaaacacacaatttgtgaactttgctcgagaatcctagaagtctgggtctcatattctcattagccaagagcactttcattattttcagtggggcacacataatgcccatggattccatattaagggtttatgtgtacattctcatctcaaattcacttttcatggaagactcatgttggcaaaacatccacattg

SEQ ID NO: 41255 - DNA, 414 bp, Oryza sativa
agcttcgcagatccctcattgatggcggcagtgtactcaacattctcttcgccaagaccctggacgacatgcagatacctcgcacggaattgaaactgagtaatgcaccctttcacggagtcatcccagggctgtctgctacgccactcggccagatcactcttccggtcacctttggtactcgggaaaacttccgcacagaaaacgtctgctttgaagttgctgatttcgagacagcgtatcatggcatactcgggcgcccggcgttagccaaatttatggctgtcccgcactatacctacatgatgatgaagatgcctggtcctcgaggagtcatatccctgcggagcgacatcaaacaagccatcacatgcgacaaggaaagctgcgagatggcccaaacccgagagatcg

SEQ ID NO: 41256 - DNA, 425 bp, Oryza sativa
agcttgtgtgcacaggatacgttcacttaatctaaatatcaatcaaatctaaattctcttgtttggtatttgcaggctcacatgtcaaagtaattgcaggtactgctcaatccaaatcttcctttgttcaaatcaaagtaaaaagaaagaagaaaatctatctgttacatacagagtcttatttttatctactactgtcatacattctcttttacacattacaatcaccaagtctggggtctttatattttctatcctaatcaacgtgtcgatagtatgctcctccttcgatttatgtggtagcatgggcttcccagcatgttcctctattccattttcctgagttataagaccttagtatcaataaacagtacgctatgagactttgggcagaaagaatgcaatgcactaatttctctctgcat

SEQ ID NO: 41257 - DNA, 324 bp, Oryza sativa
  unsure (1)..(324): unsure at all n locations
agcctattatattttgaagcgaacatccatctatgagccccattctcacatgtccctcctctaatctttacccacgtcgcagaacttctcctctcattaattcgtaccgactcgttcatgctttcacttgatcagctcaccccaatcgattgaattaattncttcaacttaattcgtggccattcccgtcaccatcagatggagaggaaagcacgcagctgctaatctgtctcctggctcgtacgtactatgcgtaccactctacaggcaatagcaaatgtgttccggctcaccaaaaagcacaagcctcatgtatgaaaaaag

SEQ ID NO: 41258 - DNA, 388 bp, Oryza sativa
  unsure (1)..(388): unsure at all n locations
aacgaccttctctacaattttaaatagctactttttgcaaaactcaatagaatttgatctgatgtacaatctcacttttagctaaaacaagaatgcaatagatcctattgagcctccaaaagaatgggtctcttttggaaataagacattttgactctaaaagctttggaacacatttcaaacacatgttgaaatacttttgaaaatattttcacacatcttggccttctacataagatttttgacttttgaccaaatatgccttcttgaaaacaacgaatgcaacttttgagatttctcaagttctgagagcataagatacatgaatgtgggttgcacaacttcaccctanagtatctctcacttgaaataaaaacattgaacattt

SEQ ID NO: 41259 - DNA, 425 bp, Oryza sativa
agcttagttacaatgataagtgtgccaattatccgatgtactatgtaactactagaaactaaatttcaagccaaatagttgaaaaattcagagagggaaagagcttactagctggcaaggggaactagttaacccaatattgctcttgttcatgattgctacataaatgggaacttcggattggatggatcgtactttctctttgattatcttcttttgcaatgaagatagacgactcttgctcttccatgatagaatgtagggagggccagcagggccttcaaaatcctcactctcctgagattcatcagaaactccattcctgttgcttttcagggaaacattttctgctacaacaaatctacatgattacataactgtacaataaaaattgaggttcgatttctttcgtatacagtttcaca

SEQ ID NO: 41260 - DNA, 370 bp, Oryza sativa
ctttagaaactgggggacatctccatatcactacatggatgagctctaatattcggagttgccacacattctactgttagcataatatggcgcctactagcaccttagcacttgaaaggatcacatagattcttgaataaggaggatactctctctggtaataaaaacatattcgggcaagattcatcacgcttttaattttcatcatcggactactcaaattcttatttacaacacacaaatgatatatgatatttttcttgaaagacactatcagcggaactattaatttattactatttaaagaaaattcgaaattatcgatctcgccaaagcaatctattttgattcaagatagggggcctttact

SEQ ID NO: 41261 - DNA, 421 bp, Oryza sativa
  unsure (1)..(421): unsure at all n locations
agcttcaaagtctctgcccaaaggtttttgagaatttagtgtaatggtactttcatgatagtaaactagttattgaagagaaatgtatttaatacttgaatacaatggggcccttgtatttcctgtttactattgcccatttcctccaaaggtttttccttaaaagttttggattaaatgctataaaattcacgaataacttaagctcttgagagatgatcttgctatttgttagctactccatattttcttaattcagaacaacctatttaggttgtttcaaatcatagactgtttctgaccagttttccatcattgtagatgcgcctgaacaaggtctcagaactcatacacaattcttctaaccaccagaatctagacagtgctggngtctccgttcattttcaagaaatcattgatt

SEQ ID NO: 41262 - DNA, 384 bp, Oryza sativa
  unsure (1)..(384): unsure at all n locations
gctaccgngcttactatcattgtcacaaattccctataaaaccccatccgatcgccagggtggtatcatcagttcatcaccaacaaacaaaagaggaaaaaaaacatatacacttctagtgattgtctgattgatcatcaatggctagcaaggtcgtcttcttcgcggcggcgctcatggcggccatggtggccatcttcggcgcgcagcttagcgagtctgagatgatgctcatggacaggcagtgccagcgggaggtgcacgacagcccgctggacgcgtgccagcatgtgctcgaccggcagctcaccggccaggagaggttcagccgatgttcgccgtccggcgcgctctgctgctgatgcaatctgccagcgcttcaga

SEQ ID NO: 41263 - DNA, 426 bp, Oryza sativa
agcttaacatgcacagacgcttcttcatcattcactatcaatcactacatttaaacatcatgcctatatgttatattatctatatatttataatttattaaattttagagctttgaaaatgcaagcatgttaaatcatcatcctacataattcacataatatttcaatatatatcttcattatttctttataatatcctatgtacttatatagcttaacctcaattaggtaatgttatttctctcttctctctctcattaagacacaacacatcaattgttattagtgtgtatatgattaatctatggtccaaattattctccaccttttcttcttcattaagacatatcacctcagttaattttattctttagatgattaatctatggtttgaactttctcctttttttttcttctctcataaag

SEQ ID NO: 41264 - DNA, 396 bp, Oryza sativa
agtacgatttctttcactcaaaaactaacatagggcgaatatatgcttggcgcataccttaagacctggtgtcaactcgttcaaagtgattgcctatgatgacatgttatatcgagtgggattggctggaagcacatttttctcccacaataaagtggcacccgtactctgatttgcatacgggagttcactttagaagcatcatcaccaatgatgcaagacatgctctcgtcccacttgtccatcaagaatgcaactctggtcccattagcatccgtatcaagtccttgaaccttttatacgaccatacattgtagttacctctacaggaagatgatagaaacatgatcctgtatggaaaattgttcatcataccttgcgaggattacgatcgat

SEQ ID NO: 41265 - DNA, 424 bp, Oryza sativa
agcttcaccgcactggagcgggctaaccatggttgaggtcgtctggaagccgccctgccggagcgcgccgaggatcgccggagctgctgccgactgccaagacttctatcagttctcatgccggaggtcaagcatcacgcatggcgtcgaaaccagcggatgacgatggaggcaagtatggctgcagtacagaggaaggacgacgggaggacggcgagccagtgctgttggatggcaacaagctagctaatgcatgttgattaagttaattattgtggcaacgtggccaaccaatcggaggatgacatgtcatcgctgctacagttccatgcacaaaccaatgcgtgtgctaaagaagtcctgtttggttttcttatttgtcccaaatgagatgccgagctttgattaaatccggccgccatct

SEQ ID NO: 41266 - DNA, 371 bp, Oryza sativa
acacttgaatactcagcttctattgaaggccatgagaaggtcaccggttcagcggttcttaaatatcggactaatcactatcaggagctgtacctgttataattaattctatgtatgtaatcgaccccgcgtgcccgctttacaaacagtgccgcacctgctgttcgattggttctgcacatgtttgatagctcaaactagataatactaaaacagctttacataacttggaatatatatatatagtggcctccgatgattgggttcagtttgagccgcgaactgctctttatttacagtggcatcattatacaaggctatacagagattacagtgttaagtataattcttttcccaatatggtacttagt

SEQ ID NO: 41267 - DNA, 372 bp, Oryza sativa
agcttgctgctgcgcatatatccaatgagagtttataccggccttctgtggcgtatgagctgagctctccggatggtgcggtgtgagtcgacaatccaacagcagcgagttcaaatgctatatgcaacattatgctgcaaggtgtgctccacagacaggcgcagtgccacctgaagctgcacactcctgctacggagacctcgtgctgagcatgccgcaccacttgctgctgaagaagcgccttggtgccacatatcaccgcacctgccgcgtgcaactacgacatctgcatctccattgcactggaggcatcatgtatcaccggtgaaactacttaagcatcgccgcggcggtcatggctgaatacaacca

SEQ ID NO: 41268 - DNA, 416 bp, Oryza sativa
agcttaccatgtaacttccatgctaagatattaagcaagtcactaaaatggaagaaatttaagccaactattttgtgctcatatcagcaaaaaaaaaaaagtaatactgaccttcaattgtaaggttgtatgcaagaggggaatcagcattccttctttcactaagaggcagcactggaaacagctttgcaaccaggacttctcatttctatgcagagtaaaaccaggggaatcatgcatccaggccttcaaagcacaatatgctagggactgcaatacaaaatataggcaatacatttataaaactgtggaggtcaaccacaccaccattcagtccaaaccaaatgaatatttgatggtgttcaatcagagctcagggagatattcacttcctcagctggaaatgatgcgattat

SEQ ID NO: 41269 - DNA, 378 bp, Oryza sativa
agctggtctaatgtagctccatgtacacagtttggttatgatgatggtgtgtgctcactgctgagtgttgctcgacgctcttagctggtgaatcatttatattttttaatattttctgacacgtttatatttcttcatgatacagttagaagtaactccttactgggtgcagaacatgataatatattttattcagaagtagcagacatcatgaagatgaagtaggagcaaagagtaacactctactctttgtgcctataatctttcattgatcaaataactgaattcttgtgcttcgtatagtctgcaagttcacctttttgtggctatcccaacatatttgttaccttttctgtctggagctacctgttggttcac

SEQ ID NO: 41270 - DNA, 269 bp, Oryza sativa
tagtactctctctctattctaaaggataaggtatatctcattctgtgagaacacgacttatacccatcatgactctattacactataattcttttaaaagatattgatgctggttgactcgccttacaaatatgaacttcttccatatgattatacttttgcgacatataatatattgtagagaagcacttggtaaccaaaatcttattctaatagaatagaatacaccctatatttgagaatagagaggactaccttcatttttaaaa

SEQ ID NO: 41271 - DNA, 267 bp, Oryza sativa
agcttccccggtgacacgtctacatcggtctcgcgtgccgggccggccccgctcgttagtcgtgataccgcggccgcgaccgcgatggatcgaaatgcccagtgccagcgagacgtgcagcgcggtgtttggattgtgggagcagggttgcggtgggccatagacggtcagcgacgcccccgtaccgtggcacgtgatggggtcgccccacgcgcgcagttactgtggagtgttgtggaaacgtttgtttaattcgttttctattat

SEQ ID NO: 41272 - DNA, 369 bp, Oryza sativa
gggagttcacacttacgggggcggacaacactatcatcaagctgatcaagcacaattaacttcacaatgcccatctggagttcagatcaacatcaatcttgctccgattagcgccaatgtgtcataatgaaattgaatggagctcatagaagtccatcactattcacacaaaagcactttgactctgactatccaccttagtccttagctcagtacctctcatcacacaaatcagaagcatcttcaatcgcccaagctataccagcgaatctacacctgcttacaagaaattctctccatagcactcgacatgcgttctagcacacaattctcttattttatcttagtattattattatgtaaaacaga

SEQ ID NO: 41273 - DNA, 435 bp, Oryza sativa
agctttgatgttcacataataacatgttaagatgccaaatcctatcagcaagcaatagcatgaacttcaagcaaagcattactgcaacagcaagcaaaacttcatcctttattgtctcagattaactgctatgtccatgttgccgtcagtacatgttctatgtactagcctagaattacaaacagcatttcgccgaaagattcacttgggggaaacaaacagtctgcgaccacagcctcaacaacgaaattacgagtataaactctataaaccccctcatgaatccgccagatcatattattcttttcttcttctatattcatcttggtatatatttctataaggactgtgaatgtactcctacctacaaaacattgggtaaatggcaagtgtacttcaactttggatgtgaccggagcgcttgctggagcgccg

SEQ ID NO: 41274 - DNA, 308 bp, Oryza sativa
tgtgtgtgtggtggtgtgaggcacatgcacggatggagccggtggcgatatctcacgaatgcacgaacgatatatgtgtgtgtaccactaggccctgctagtgggcagtggccgtcgtcatcgacgactttgaaacaaagttggaagtcgtactcgtacgtacgtacaccctatctctgcatattgctatcgtatgtataagagagaatctattatatgccactaactttgtcacacgtctatgatttgccactgacttcttgatggacgtggagatcacattcatgtatggatgacgcaaatgatag

SEQ ID NO: 41275 - DNA, 404 bp, Oryza sativa
  unsure (1)..(404): unsure at all n locations
agctttaaggattgtttagtagagctagctcatactttcaaaataactctagataaacaaagccgntaactctctaattcatttttcaaaaatcaatttagcccaatccactctcttttgaggtgaagttgaaactgcttggccaggttctaatttcaagcgggatggagatattgagttgaagctagatccctaccaaatatgcccttaaaaacagaatgtactgcttggctaggttctaattccaagcgggatggagatattgagttgaagctggatccctatcatatatgcccttaaaaacagaatgtatatcactgtaccatatttcaccacaatctcacatgtcacttgtatattataagaatgcgcaaaatcatacatagataaatgagttatatctg

SEQ ID NO: 41276 - DNA, 445 bp, Oryza sativa
tggactcataacatagaatgcacttatgtatttagtatgtacaagaattatgctccgccgaacaacacgatgagctcttgtgcccccacaatatctttgtttatccaaaataatagggctaaatacggataggataactcccttcatgatatcctaatagcatcgaagaaagctagttctcgatccgatttgctcggaccgaatcgatgatgaacttcccttggcttataataaatcaacttttatacataaatgttaacttatagcctatgttcagaggatctaaacatgccctatctataaaagatgatttattttgggacagaggggagtacaatgatttcctaaaacgcaatggatgtggattaagatagggattgctaatatttgatcagaatggaatatgtcgatcgtttgtatgcagaacattcaataaagtactact

SEQ ID NO: 41277 - DNA, 410 bp, Oryza sativa
tcagcttgttgatattgtcaactaagacatcaaattgtgcttgagacttgatcttgcgcgccgcgtcgacagattcacattaatgaatcaccatatataagataatggcttttgaggtattgattattgttaccttcaacctcctttaaagtcgaatccctctgtcttgccagctctgccttgtcattttccagagtttggatctgcttctctagttgagatatcttggcagcttgcactacattaacttcggttaatcaagattacagagataacaacacacatcagttgggcagagtttgcgcgaaccttttgatgagccactcagttcgaaattggactcctggagctcaacaatccgatccctcagatcgtgttcattctttttggcaagttctctggcctcgtgc

SEQ ID NO: 41278 - DNA, 457 bp, Oryza sativa
  unsure (1)..(457): unsure at all n locations
tatttcaccgcattaaaagaaatgcctcttctatgatttcataaactactacctattgtcaagagtttgttgctaaaaaaatcaaatgcgattgttgcttcactgcgttgcattgtcaatcaccttattgacattttctccgagtgtggggttcccgcataaactctccaaggcagntttatgatgatccaagattgngacactgcacaagatataaacatttaaattgtcctagcattatggatagaatattctacaaaacaattcagaatgtatagaaatatagatgcataacttctacaatctacaggtcagcaatattcagaacagttgatggccacaatgtgtgttcccaaaatatgttacagaatatactgaatctactcatgaagtgtaccgaaatcgaatttgatataaatgaatgcagaacgacatatgctgaatctatttctaaaat

SEQ ID NO: 41279 - DNA, 431 bp, Oryza sativa
agcttgataagatgctatacagctgcagtttttttactttatgtacaacaggctgtcttctaatcaagtatcaatgattgctagtatcacactcaataccatcaatctcatcatcttcgtcgtcttttacaacatgcgcaaggggatttgcttgcatcttcttgaaatggcttataaagactgttgcttctgtgatgagagcattccttgcatcctctacaccacctgcctgttgaatcttgacacaatccagaactttggaccctgcatctttttacgaggccctgttgtgccttctctgcgggacaatcggacaacatatttctcatgtaagataacaatttttatatgccttcataactgctgtgctcgtgtcaagcgtgtttatgccaacactctttacaattttcaaccttgcctacagtttttcc

SEQ ID NO: 41280 - DNA, 391 bp, Oryza sativa
  unsure (1)..(391): unsure at all n locations
catatcttatggcgtactggaaattgtcctcgatgtgacactaatacttgatnntgtggttcatagccaatggtaccaacaacacatgatgtacatcttacttgcctcataagcttgaagagatattctgtagatactcctccaccccattgaaatagcacttgagctctgtcacaatgctaactcttcaataatcattccatatacccattatttgatggacaccccaccgactatatttcttcatgcactcacttcatacacataatttgtgacttgacaccctatactcttttgaaggaactgccaagcttaccgcctccttatctatcttatagcaaaattgccctaaaaccccgtctctatactccaggtcataacacctctgatt

SEQ ID NO: 41281 - DNA, 418 bp, Oryza sativa
agcttgtagcatgcacatacctggaggattgtcactcatgttggatcaatcgatctccagccggttagctcctcttccggcgacggcgaggcgagaggtagacgaaggcgacgaccaggatgcagaggagactgacttgagaggtgtattctaatgaaacttttcaggtccacggccgttttattggcttttctctaaccccgttctaactttgattatacagattttaccttggttttcgttagcatgcttttcaaacagttaaatggtatatttcgtgtgaaaacttgttatatacaagttgttttaaaatatcatataaatccatttttaagtttaaaataattaaaatttaattaatcataatggcaatgactttctcgtttacgttccattagctaccagtagtgattagaat

SEQ ID NO: 41282 - DNA, 287 bp, Oryza sativa
atatctcctttcatgcatattgcttcaatgatctacaaacatgaacacattaatttgtaaataaaaataccaaagatatgatagttgagtcatgctagaagacagctattcttttgtgaatgagaaagtgcctgtctattcatgaaatgggtcttgtaatgcctctcaagatgaattaatgcaacattatccgaaccgagaaaggctgacttgctgacaacccagtgtgcaaatgaaataaatagagctgaccgacagttgctgatcggtgtgcttctaagaaatga

SEQ ID NO: 41283 - DNA, 416 bp, Oryza sativa
  unsure (1)..(416): unsure at all n locations
agcttctccaacacaggtggcatttatgtaaaagaggtgaatatccattcaatatattcgacatacaccagtttgctgcatttttgttataatatttctttttttgtcctattttcttcattacactgcttattgggaccaaaattcaatttctcagaaaggaacctttagtgtaggtgatccagcccaggactcggttgataagaattggctgtattccaattactcgcttttacttanattatatctcaagtctaatccatagcaatagcaaaatacatttttataaggcatgattaacgcaagcaagaaccatcagtaagcatcgataaaaaatcattaattaaataactagggcaccatggtgcctctgtacacagaaagtangtattcttttttcctaggtatcatgctat

SEQ ID NO: 41284 - DNA, 360 bp, Oryza sativa
  unsure (1)..(360): unsure at all n locations
tatggaatggatntcgtaattagcatatgtgtaatattcctatataatgtctaaanatccgatatgacagggacttgaaataagttcctgaaaaccacacagccccaataaggaagtcgaagacatgagacactgtagtctgaacctacctgcatgccatacacagctatctattagatcgatttggtagcttgcctaccggccacctcgacgaacgctgttgatcttactgcgtaatttcgatactatatgggcaaatatatgttacaagtactatcaatcgacctggtacgttaatatgactttgcagtctagtacgcttgcggctgaaatgataatggatgcataccaccacgtact

SEQ ID NO: 41285 - DNA, 406 bp, Oryza sativa
acctgagctgcagctttattcttaataatgtaattcatgtatttctttgctcatccaagggtaaaatggtcatttttatagaaaatacacggtcaactaacggtcaactgacgggaggggtatgcaagggatcaaaatcaaattttgggggtatataaggaagtaagcaaaattcaggggtatagaagggattaggaaaaatttcaggggtatataacggattttctcatttaagatgtgatcgtagaacttgaaagcgtgacagatcatagtcgatatgatcaatagtgcggtgtgttgaaactctatatccataatatctggagcttaagtgccacgtaccaaaacctatgtatgtttgtgccactcacatcataatgccctataggtaagtgaaatttactct

SEQ ID NO: 41286 - DNA, 439 bp, Oryza sativa
atagcttgtgcatggtcatgtaaatagaagaggtgtatcctagattaattcctggcatgcatggagcccgaacagtgggagagtgggacaatatctactcacgctttggtttcggcgtctttggagagtgggcacaatatatatcatcgagcccgtcctggtggtgacttatgcacagtccggcctgagagctgactccaccatgcactttcaaacattatagcaggataatactccctctatcttataatatataaactattgacacatgctattgaacaatgtcacatttcatatatattatgtttgtttatcttgggtggaaaaaatacaacgttgaatatattagcttcatttgaaatatatatagcgtacgtatgagaatatcacaattggaattgttactagaacgaaaagttacacacttctatatgcacat

SEQ ID NO: 41287 - DNA, 426 bp, Oryza sativa
agcttgcacctcaacgaattgttattcatgcattccgaagctatcctatagcccgcgctgcaacagctccaattccaatgaatgcactaccacaaggtgtcaatgctcaatttcagccccagccaccagctgacaagacagaggccagtatctgcgttgtacctttggaggttccaatacagcagctgagaaatcaagtacaagatgaagaacccgagtgtaagacagttattgtttgttacaactgcagtgaagaagggcattactccgataactgtccccaaccaaggcaaaatcgacctccacattaccgccaatttacacgaagcagacattccaatcgtattgtggtcactggagcagacgccgtacccgtaaggcctcgtgataatcacaacctattgcagaaacaatgcaccaatgctc

SEQ ID NO: 41288 - DNA, 351 bp, Oryza sativa
gacacatagatactaagcttggctacattgatgtttcgcaactgtccaacaccttattatatggtgctgatggtcttcctcggattgtgagtatatcagaatgtcatcaatgaacaccacaacaaacttattcaagtatttcatgaacactttgttcattaagttcatgaagaatgcaagagcattggtgtaactcgatgacatcaccgtgaattcatacagtccgtatcgcgtggtgaatgcggtcttcggaatatcttcctcacgaatacgtaattggtgatatccggaacgaagatcaatcttggagaatacagcggcacctctaagctgatcgaatagatcatcgat

SEQ ID NO: 41289 - DNA, 416 bp, Oryza sativa
agcttaatcctcttcgatcaatacatatttctgccctctcgaagctacaaatagtgcgaactgagcttggctattcgttgctgcactacgtcaacgtacggagaaacttccaagatgcagcatatgcaacatcgatcacgcggtgttcaagcattcaacgatcgggtcacatgcattatatatgcatatgcaggcatgctgcacgctagctgatcgtcgaagcgtacggttgctttactcggctactgagacgacttgtgcgttcatgtatatatatacaagctaggttaagggctgaccatggtcgatagcggccaagataagggctcgattcggcggcacgccatgctggattgggcgtatatagagctaaaccacgggcgggagggaagggggggagagaataggtcgtcttc

SEQ ID NO: 41290 - DNA, 427 bp, Oryza sativa
  unsure (1)..(427): unsure at all n locations
ntattgatcttagtcatccaaggatactcccggcctctgttccacgacagtgcacacagccaacaaactccaacacactcaaaataaaagagaataaaaacagcgtgcaagatcaaggccctacaacccgaagactatgtcgccacccatataccggggtaaaaaactccttgaccacttgctccaaatgtagacaatccgaagtgacaaagtcctgcaaatggggtttctggagaataacccatgatcggagatagctctttctttntaacttatgtgaataatatgttgaacttcatcattgaacttaaggtttataaacagtggcttataaaccatgcatataagctaanataaattaatgagcctaaattgatatatcatgtacagtcacaccttgtgcatgtttattatgcaaagctcaata

SEQ ID NO: 41291 - DNA, 366 bp, Oryza sativa
agctctagagatgtccaccttgataaagagagaagacttcttttgccgatgaagcagtttcaccatgttttgtacataaagaaagttgtcatgaatcacccttttccgaatgaaagcactttgattttgagagattacgagattgagcttcggggggccaatctatttgccaggattttggctaggatcttggcaaagctgtgcataagactaatcggcctatactctccaactctggtagcatcccctttttttggaataaggcagatatttgctgagttcaaatcttgtaatctgtctatggtttgatcaccaaaatgcagaattgcttgtgttatgtcaacttcaataatctccgatcccacg

SEQ ID NO: 41292 - DNA, 365 bp, Oryza sativa
  unsure (1)..(365): unsure at all n locations
cgctgctcctcagcgaattgtcatccatgcatctcttatcagttctatagcccgcgttgcaacagccccaattccaatgaatgcactaccacaaggtgtcaatgctcaatttcgccccagccaccagctgacaagacagaggccagtatcctgcgtgtacctttggaagttccaatacagcagctgagatatcaagtacaagatgaagaacccgagtgtaagaaagttattggttgttacaactgcagtgaagaagggcattactccgaaaactgtccccaaccaaggcgaaatcgaccctcacattatccgcaatntacacgaagcagacactccaatcgtattatggtcactggagcaaacgc

SEQ ID NO: 41293 - DNA, 444 bp, Oryza sativa
  unsure (1)..(444): unsure at all n locations
tgccgcatgcaagcatttaattatatcttttttcttgacataacatgtaccctgtctaggatctatttgtcataaacaatagatcgaaaacaatcaatggatacttttatcccatgccaagttgtatggccttaacccacttatattttcataccatattgccgagatcaaaacatttaatggatgcttgatggaatggaaatctataaaaaaaatagaacaataacatgataaaaataattgaagactgaacttgtttttcttctaaatttaactttttttgaatttgaaacccattctaaatagcaatgttcaaatattttaggagtactgatacaatgaaaataactaaaatcttaaataaaatataatagaaaattggactttttggcattatgtnggaaacaaaatctaacataaattcagttcgaagtatacaaccct

SEQ ID NO: 41294 - DNA, 431 bp, Oryza sativa
  unsure (1)..(431): unsure at all n locations
agcttctccatcccttctcctctctcttctcttgtctctntattgtgcacgagcgggcgtgggcggtggctggcggcgggcaaagagaagagcggcggagaggagataggcggtagcggtgctggctggccagcgagttcaagatcacccgctcgtcgatgaaagtttacaacggctggtgggcagtggaaaagcggcagtcgggcagcatctacagcggcacttatctcggcgggaaggtggcagcggcaagctcgagggtgaagccggtctccgtcaaggacctcgccctgccaagcaggacgcaccggctgctcttggtgcgatccatggcggacctcgtcggctgcctccacacatccccataccccgccttgatctccccacgccccacctcgacctcgtcgcgcctcggctcgacctcaccggtc

SEQ ID NO: 41295 - DNA, 365 bp, Oryza sativa
tactcaagcctgatcagcacgaaccacatgactattagcgacatgaaaatgatggatcatatcagaagcacggactttagagctttctgttctgaataaagatgaccttatcattaccatagtatattaagcgtctgaggtgtagcattgtactactgcccaggtgaccccccatacctcggcagttccagctataaagactcatggcgctccttacgccttatgggctggcgccattgcccattcatcattcttatcacttccatctccaccgtcttcagcgctgggatcaacatgcgtaatctctgaaacattgcataccctaagatcatgtaccagtatcagccttgagctagttctcacat

SEQ ID NO: 41296 - DNA, 433 bp, Oryza sativa
agcttagcttgcttgcggttgttgttgcgcgaaggcttgctcggacggagccacgtgaatgcggccaacgtatgtgtcgactcaaatgtagacatgaattctcgtatggcctagcttatcaggcagcccacattgaatttactagaaaggtttcgcgcgctatgcggcgcggccactaaattacgggaaacagaagaatgtaagattagagaagcaattcttttacatgtaaatgacgattcattagttacatgacagtacaatatttcatagcaagaaggcaagggcaaacaagtttttttttttttgacatacagagcccgtggacacacaaaaactaattcattgttgcaaatccatgccttattaattttgttttaagccacaacacaatgctagcaccacggtacaaatggtttcgaagttggactat

SEQ ID NO: 41297 - DNA, 467 bp, Oryza sativa
  unsure (1)..(467): unsure at all n locations
gagcnctanagatggcccagcagccagccgtctatataattcagctattaatggtacgacgtaaattccccttgtcatccttggataaatatgtaaacattgctcacagctaggcatatcgaatacagaagtgatacacatacgccttgtggattttgtcccaacatttggtgcaatccatgtggacgaaagaagccagcaggcaaagaattttcttaagatataaatcaaacgacttatgatattatacacaggttgttaaaagaaggtttttctgacaggacacggggtcgggagattcgtttgatgttagtcttctcgatggctatcatactatgatagaacatatccacatgcgcatgggactcgcgtaaggcgggcctatcctcctctctgagcagtgagccttattctcatgtgcatactgccgccagaactactccatgtcatggctctttttaagctag

SEQ ID NO: 41298 - DNA, 355 bp, Oryza sativa
  unsure (1)..(355): unsure at all n locations
agctnttagtttgttcaaggatatatgtgaagaaagacaaggagtggacactggccagaagaactgagaagctctgttctatcatcgtttatatattgcatgcttagccgaagccaaggctaccttattaggacattcataatgatgacaaagggtgtgtttagttttaggggtgtaaaaattcggaagtatatgaacacatatttgaagtattaaacgcagactaataataaaataaattacagattccgcctgtaaactgcgagataaatttttgagcctaattaatccgtcattagcaaatgtttactatagcaccacattattaaatcatggcacaattaggctcaaaaaa

SEQ ID NO: 41299 - DNA, 439 bp, Oryza sativa
  unsure (1)..(439): unsure at all n locations
tagcttgaacganctgagtccgagcncgagccctagcgtagctcggtgatgtcatccctagttctggtttacttgatacacacataacccggatagtaaatccacgtatagctcgcgcaggggtccaaccatgataccatagtctgtatatgggaattcatacgctcatgatattagaagaatcaagcggtatgtgtcgagactacatgtccgtacgataccatcgtggtattgtattctacacaaggtaccgccgatatgttataatggcaatttagtcgnactaatctatacaagtattgacatatccagagatgtggtatgggtacctagaacatggttgttatacaatatctattgtgcgagtgtttctgaagttagcccaactacagtttaatactgggggctcgcttattatccttggataaatatgcttgtt

SEQ ID NO: 41300 - DNA, 414 bp, Oryza sativa
agcttcatattccagtccaccttcatgttaattttcttttgtccatatgcagcagcttcttttaaatcatatatatatgctgcgacacaaggcacagctagcgttcgcgaaaaaaacacaaggcacagctacaaaattatgcagagagagaaacctaatgcatgtactgagtttctctggaccaaagagcgtggggatgagcggtgcgggcgatgagtttattccagttgtctccaattcctatggttctacaataattggaatttttttctttgaaatcttacagcaattggactttttttaagaacacgcagccgatctatgtaggcgttagagataaactccgacaatcgtccacccgagaaatacaaccactaggtcaaaatcatttttcatagcactatccttgtatat

SEQ ID NO: 41301 - DNA, 200 bp, Oryza sativa
  unsure (1)..(200): unsure at all n locations
tgctctctcttgtagggtggaacgagtattggggtcttttcgacagccagatatctgtgaaaaataaactaactacctacgctggttgtatctataagcgtagcggccctcggtgaatgacaagattagtataattntgtctttcccaaattatagcttgaatattgcttaaagcaaacctgcccatgatagatgaacaa

SEQ ID NO: 41302 - DNA, 412 bp, Oryza sativa
  unsure (1)..(412): unsure at all n locations
agcttgcacctatgcacttcagtgccttgtgttttagtggntagccctaaaggtgcagcgccagcctcgctgcggctgacgctactcaaggcactttagctgatacaccttgctnttgcgcttaggcgagtgctttatgtgctgttttgagtaaggcatgaattaaggttcaaaatcatggctggtgttttatgtttgagtttgaccatgtcatcctaaatgttagttaatgtttcctattcttaaagcttatttttttgccaactatgaaatataaaaatgctgggaaatataaaggcactttcttcaaaatagacatgcttttgtttaacaaatggcacttgtggtctacttggttttaaagtgcacatctcacgctgtcttttttctccatatgcagatgattggtctg

SEQ ID NO: 41303 - DNA, 186 bp, Oryza sativa
  unsure (1)..(186): unsure at all n locations
agctnttgttccctatcacttgggcttgcttgtgccttttgtgcaagagcacctaacccagcccatgatgcgcccattcgtggcatgaattttttttatttataatttttattattaaaagttttacaaaaataattttccattttgaaaattgacggaaatagtcgcctaccgccctctgggagg

SEQ ID NO: 41304 - DNA, 399 bp, Oryza sativa
  unsure (1)..(399): unsure at all n locations
tatgtngatgatgtagtcgtcaagaccaagcagaacgattacctgatcgcggatntagaaggaactcttgcaagcattcgtgctttcatgatgaaactaaaccctgaaaagtgcatcttcggagtaccgtcagggaagttgctcggatttatggtatctcacagaggcatataggccaacccggagaaaatcaacgccatcctcaacatgaaaccgccaagctcccaaaaagacgtccaaaagttgacttggtgcatggcggcgctcagccggttcgtctcacgactcagcgagcgggggatgccctcnttcaagctgctgaagaagactggcaatgttcagtggtgacccgaagcacaaaaagcctttgaagactccaagagacttctcaccactcca

SEQ ID NO: 41305 - DNA, 397 bp, Oryza sativa
agcttgaagaacctttcttctcaaataaattttctgttcttatcaatgttctttcgagatacgggtaagtgtaattatgtttggtatcatatctttcttgaacataccttctcctaccaatgccattattttttagggtttccattgatttagctgtttccacttgaagtgttagggagaaccaaacagtttgttcatctcaattttagcttatagcttccaaaaacttttggtctgtgtcttttctgatcatgctggatcttctgcgttgaccacttccgtaaacaggttgcatgaaaacatgaaatgcatttgttctgtgaaaagaataactgttgcaagagcaatatcaaacattctccaaaacttgaagtgtcttgaattttggaaatgtgag

SEQ ID NO: 41306 - DNA, 385 bp, Oryza sativa
atattagaatttgcctttaatcatgtcttattaacagctatataatccaaattatatcctttaaagttggtgccttcataaatactacctccatcccaaaatataagaatttataaggttggacacggatatcaaggaagtatgtggaattaaatgtgagaaggctgtgattggttgagaggagaaagtatgtggagaatttgaatgctgtaagattgtgatcggtggacaatagaatgtatgtggagaagttgtatattctgggacacatttagaatgctaaagttgatgtattttgggatggacggagtaacctctctattggtataaatggcaatataccaaaggctctaatttcaatattccatctatgaaacttgagttg

SEQ ID NO: 41307 - DNA, 401 bp, Oryza sativa
agcttcaatatcttctcaatagtttgatggattattgacactgacataatcagtaacacctctactttataggacctgacgtcttcgccgatgctaatgggatactacgtttgcggctccggttgcttccgtcattgtcgactagttatttcgccttcacgggtgaccaactacacaaacgctgatgagcgtcttcgtcattatcatcggctgctacaccgctattgactggatcaccgatatcgtcatcttcatcaacacccgtggcagcctccttaacataggcaactctactgctatcgatgggcaacttgataaacataaccggctatttctgttagcgccaatggtcattaacaccaatggcgtttgccgtcgatgaatgattcctcattttcatg

SEQ ID NO: 41308 - DNA, 423 bp, Oryza sativa
  unsure (1)..(423): unsure at all n locations
agctnttcatttatgggttatcatacttctgttcatcatgttctgcagctagtccatataggtgatgacaccttgcaaagttggggcagcaaagaatttaaggttcaggttgacctgactgaacaagatctgtcatgtggatgcaagctttttgaacacttgggaattatatgctcccatattatcagagtaagtgtgaatattaagcagttctcataacgctgttgtgtttttgtgtgttaatgcatagtgtttttgcaggttatggtacagtatggtttcacggaaataccgaagaagtatatcctgaagaggtggacaaaagatgctagagattcaatcccaaagcacttggaggagtcgtacttgaaggataaggaggcggcatcatcgagaacttatcggaacaccctcctgcacaag

SEQ ID NO: 41309 - DNA, 417 bp, Oryza sativa
  unsure (1)..(417): unsure at all n locations
agccgatgggattgtatgaccggcaggaagttcaatctatttctcccgaagtagcaaatcaaagatcttatcagccttggtaacatcaaagtcatacctctcttcttttccagaattcttcacccattggcatggtataaccttcttacttctaacccattcggctgctgctatttcaaaatcatcatcatcatcgtcatcagacccatacatgtagggacagacatgattgaccttttaaaagcttttcctggcttctgcaaacctctgctcatgcagggttaccttctgtgcaagatgtgacaaactatcaaagtcttgagacgagaacttctccgtgatcggagctaccataccatgaaaagccaaatcggctaactaggcatcaattanactcaagctgtagcatntattcct

SEQ ID NO: 41310 - DNA, 288 bp, Oryza sativa
  unsure (1)..(288): unsure at all n locations
ttcacaagcgcttctatgaaataccgagctcttcttgctctctangacctaactctatccaagctcgagagccctgattcgttctggataatcatctgaggactatctcttgttagattgggcagatagaaaacacggattttattgatataacgtgaatatcccaacactgttacttatcttgtactacgctagaaggcccacaggccccaggcattcatggagtcgagagtaaacaaaagagagcacaagtagagcagagagagactacaacgagggggatgttgc

SEQ ID NO: 41311 - DNA, 190 bp, Oryza sativa
ctgcagcatgcaactcgcttttttgacagtctatccacattatttcacagacacagcaccgaccaaactacatccacatctcaaaagtatccaagccccaaataaatctccacccaaacaaagcatatctatgaagatgatctataccgacgaatccttgtatgcatcctcctcctgacctcaaacaatc

SEQ ID NO: 41312 - DNA, 398 bp, Oryza sativa
  unsure (1)..(398): unsure at all n locations
ntgngcacaatgtcttacagaaacatcatatcngtgcaatatactaaaatttcactatgtataatacatagtgtgtttaagcatatactcatactgaaggctgaaaatacactttcctatactatctaccctatttccttccgaactcccctaattcatgatggaagatatgaagaagcaaactctggtaagcagcatcatgtggatgtattacctatacctaaacttatctattatatacaaaaagtccattaaactatctacaaacgctcttaagccgccacgtggcactcctacaaacgctcctaagtcgccatatggcacaatctaatctcaccgtcgattttcacttaaattggtggacgcgctattgtagaccattagatcagatctattat

SEQ ID NO: 41313 - DNA, 427 bp, Oryza sativa
  unsure (1)..(427): unsure at all n locations
agcttataggagaaatttggacttttacatctatgttatntggcagagtcagccccaaatttcttggagaaagttactgtcagctatcataacaatcagggcatagaacccacttggnttgcagcctatgcacacactntggaaatcaagaaacagcaggattttttaaagatggcaaactggtatttcagacataattcaacaaatcatcgatgctctagaactatggagtaaccgggccaatcccaacaccagagcaaaaatcaatctctggtctgagacaatcagatgaggttaatgtaattttagcttcttgtaattttttgtatattntcctccttctatctcctttcccttttttttctttttttcctgcttcacctttcttcaggcaactctgtaaccgttcatttctatcaatgaaatg

SEQ ID NO: 41314 - DNA, 382 bp, Oryza sativa
aaggaagacaatcgttgatcgaatcacttatttaagcgacacgaatggctgaactgcggaggtgcagaatatatccggctagtccacagattagcaactgtaacataatagtgatcaccatcccaaatgatcacttccattcctacatgaagcgaacagagtaatattatctggttgaagaaacatctgatagctaaaaaagtcctatccttgaagacgtcactgtaggacaagtattacctggtgaaacactattacggcacgagggtatgcctacatgtcatcttgctgttgggacaggaacattggagagagtgctctctaattccgcaatcttaattgatgattcgagaagaaccttagccacaggcgcatttaagta

SEQ ID NO: 41315 - DNA, 421 bp, Oryza sativa
  unsure (1)..(421): unsure at all n locations
agcttgtggagttgtggagttgtgggccttggattgtgctcgttccangcgtcgtctgacgctgaatttaaccagcccatctgacaggaggaaatttacctgaaacccagttactgcttttcatcatatttgttgttctaaaactcgtaaaaccccgctacaccgagtgaatttactccacaaacctttttgttcgaattccgatgattcccttgtttctttcaaatgattcctttgtatctttcaaataaagatatttgaaatagtaaaatgagaacaggagcgatataagttgaaaagaaatcggcttgagatggaaagagagaatatgtcaacttgtcaagcagatgtatcattatacagactcaataaacgaattcttccaccatttcacatttcataatttatgaagtatgacgct

SEQ ID NO: 41316 - DNA, 411 bp, Oryza sativa
  unsure (1)..(411): unsure at all n locations
tcagcttcacactaattgaaactttaactcatgttggaaactttcaggtaatatttgaaaactctttaactaaaatttgaaaatattcaacttaaattctaatttttttaaataaatcaactcaaaatgtaaaactttcagcttgtattttgaaactcttaagtcgaaatttgaaaactgtcaactttaaccatgaatactttactcatatttgaaaagttgaactcctaaatttcaacttttgagccggtgaggtaaatttcaactcgatttaattgctaaataatttattataaaaaagtgctttaaaccacaattaacactaactgtcactcaacacattattagagtcgtgtggnggcangaagtgcgcgccgcttccagcgcagaatgcccaactaggatgcatac

SEQ ID NO: 41317 - DNA, 433 bp, Oryza sativa
  unsure (1)..(433): unsure at all n locations
agcttcatgatgggtctttctcaccagntgattttgctctgtcttctgagaaagaacctaaaacttccccaggtttagttgtcaaggttccagaatttccaaatgattcagatgatgaattggaggaagagaaagaaacagaagttggtgatcatgatgatggtcatacaaaatctgatgctgctttgagtgaaagcactgttgacagcttcaaaagcaaatctcatgtatctgtcgatggtgctctagcatcagccttggaggcacttcttggttcaaccaagaaaacaccatcttcgcaatctgctgcttgccctgccagtaattcaactgctgaaaatactactgattcttctacctgcccantttcttctgaacaagttgatgagacatccactaatgatggctcggctggccaattatctggtacatt

SEQ ID NO: 41318 - DNA, 394 bp, Oryza sativa
  unsure (1)..(394): unsure at all n locations
gagacacgattccactatcgagacaatggtccttctatccattatgttgccaatatttcctcaaacatgcaggtatattccagccatttctttgagcactgcatgttgataataccatggtctatctgcatgtctataggatgttagcaataatggcatctattgttatttgcattttcaatattttaaatcattggttcttattgtgtgtgcatcaatagtaatttctcattgttgcctgttgtcctgtacactgttccgccttttctcttcaaagtctggattgatggcagagagtatgcatctctcttcttanaagaaagtgacttattcaaaatcttagtaccaggatattctctaagcggatgggtgggctttgataagacatgagtat

SEQ ID NO: 41319 - DNA, 415 bp, Oryza sativa
  unsure (1)..(415): unsure at all n locations
tcttaagtcacctgangcatgcaagcttggcaatacataagctagaccttgaatgatgtcactatcttgtcacgttgcctacaaagaagagtaaaatgaaggagcttcagtacctaaatgttctcaattgctactcactcacagcaatgcctcatgctatgggccaacttacacatcttcacacattgcttggttactttgtccccaacattggtagtagtgcaatgtcagagcttcaatcactgctagacctcaatagactatggctgtatttagatccaaagtttggatctaaactttcgtccttttccatcacatcaacgtgtcatacacacacaacttttcagtcacatcatctctaatgttaatcatttttcaaactttgcgctgaactaaacacagcctatcactagtg

SEQ ID NO: 41320 - DNA, 420 bp, Oryza sativa
  unsure (1)..(420): unsure at all n locations
tcctgatgatagtgcattggcatgttcttactggctataatggaacatggcctgcaagtgagtagtgactataggtcataagagtaactcgacttctctgtttgggaatgtctnttccaatatttattacatcgaaaagaattacaatttcctcacaaaaaagaaagtacaattagaactacatcttgagaatttccaatgaattaaaatataactctttagaattattggagattaaagtctgatgcattntacaacagtgtagagaacactatgcctattgtcctgttgaccattattagttcttttttctggcttctnttcctcctctctccaagtttatatatttgtcgacaagagacagacatgatctaagaaaagtgcttaccaacctatgaggcacattgcattgttcttaca

SEQ ID NO: 41321 - DNA, 416 bp, Oryza sativa
agctttgcttaaatcgacgaagttcaggagatatcttgttttctaccttcagaattacagtactacaaatgcgaaggttaagtagaatacactaagaaccattgaattgttaatttgaaagcagcaaacaatcaaccagaaatttggtcagtatgacatctataaattgtcaaattgtaaacaggagatgatgctagtgctagctaagcatttcatcaaacacattgcaagcatgaatatagaacatcaacctcacctgttgctggtggtgctggtgtccttatttgctagcatgaatgatgtccaacggccctagtcctgtgccctcggtccagcgcatccctgataacaacaacaatgaaaaattatacatgatgttgatgatgacagcagtggtggcacaagtagccggtcta

SEQ ID NO: 41322 - DNA, 367 bp, Oryza sativa
gatgataggcgtataacgatgctttatatccattattgtttttttgaactgtagatcatgcgaatgatggttagccagttactatcacacagttgcctttcctcccattcatgataggtacttgcggtgaccacataaaggtggctatcctgaggattcttgaattcctctttttctttctattgaccaggaagaaaattgggatattactacaatgagcctgagattctgccaccacttccagggtatttctgaccttacatctgatttcccttcaacgtgtagagtttatgtcattactcacgggctatgcttataaatctgagttgggtgtcaccgtacagtgtaggatcctcagtcagggatc

SEQ ID NO: 41323 - DNA, 422 bp, Oryza sativa
  unsure (1)..(422): unsure at all n locations
agcttcgggcaatttggcgaataataaactattctgataaataacagaattaaaacaaatacaggttaaactaagtatattaggcataacaagcgtttcgttcttgtagagtagataattggattttgattgagttatttttctaagggaaaaaggaaaaggaggattcaaaatccttttttcttcggactttcccaaacacaaaatacctccttgtattcgcactctcaaatgagagtggaagaaattcgactttcatataatatcttaatagaattccatgtaatgatcaatgcattttttggattctatattattcgcatgtctagaatcctaccaagagaataccccccnattttatgtaattgaagtaggattgacgaataagaaataaacataatactgtttattagtgtcgcata

SEQ ID NO: 41324 - DNA, 411 bp, Oryza sativa
  unsure (1)..(411): unsure at all n locations
tatgccatnttcaatccaatcgcggatgttatgcctgtcttacctgtactctnntttctattagcccttgtttggcaagctgctcgaagttctcgatgaaatctttactactctgtctgcccaattgaatcatgtattcattctaaataaattcgaataatggataagagccgagaagtcttatattatgaaccttcgattctaaaattcaaattcttctacattgaatgtatagctgcagcaataaatttggatcagcctttctactccctgcatctacgttgagcatgtatctttaggtaaccgcacaatacctaacctaatttattgataagagtgcttattataaatcaatgcttgcaattctttcaacattgattttgcatcttaggtgtacatataacaaaccca

SEQ ID NO: 41325 - DNA, 411 bp, Oryza sativa
agcttatcaaatgataattgtggtccacaactgatacgttgctggcaacatggacaagtactcatatatacatagttcttctctcaaaaaaacaagtatatggcgtgctaccgtcgccctggcggtttggactgttgcttcatcctccctacacgtactgtgcacgtcttgcaccttctcttccaagtactctaactagtaaaacgtactctatagtctacttcgtatgtactacgaacatttctttgagaaaataattagtagccgccgatcgagaagaaaaacatcatgttcgatctagtatcaactaaactctccagtgtatttcggcggcttggaatttccatgtgttttgtccgagttaaggaactgtaccaagtccatatgtccaggaaataaataaataatgga

SEQ ID NO: 41326 - DNA, 353 bp, Oryza sativa
  unsure (1)..(353): unsure at all n locations
ttgtaaatagcaagctgatggtactatcagaatcaactcttgactacaatttggtggaaccatggaaaggatgttctcaataagttgcaactttgaagcgcacaaaaataataggcagttattattattgtctggtctatggatttcgtttgtgccaaagcataaacatcgacaactgattagtgagcacataaagaacaaaagatgtttttttcctgacaatntcagtaacgcggaagacttataaatgttttagaatccaaatgataattataagacaccgcatgttttcttatgaaacacactagttcaactctacacactgaatccaaaggattgtacacaagtaaatc

SEQ ID NO: 41327 - DNA, 396 bp, Oryza sativa
  unsure (1)..(396): unsure at all n locations
agcttagagcctctggggctcctatatatttccatttctcatcaccaagtgtgtaaacttgaacgccatcgaagctgtcaacttttgcacggatgcgagtctcatgactactagcaaggaagtgtgtaaccttgtattcttttgtcaatgggtgaaatccaaagctgtagaacgagaagtgatcgtccgtcaaattctttgccggtttcgcaagatgcaggcattcaccagttgcaaggtttgctatcttgattgttgtagtgtgtgtgtataagcaaacaagcccattggaggaaccacacaggaaatcatctggcccaatcactggcacatcccatattgactgngaccaggcttcatcgatgaggatggcttcgctcgggtacagcccacatg

SEQ ID NO: 41328 - DNA, 253 bp, Oryza sativa
tactaagctctgttccctcactgtattgctcttgtctcttctccctttctaagctcgagagggatggaattccgccggatccgtttggaaacccgctcttcgacgctgccgtagcggctggtggtgggctacactgcggccgcatcggtcgcccgttatgccctagatgactgctgctctgggggatgatgaatacgatgatgtttgtctatctatgatgctaatatcgtccgtcctgtcctggatggatggt

SEQ ID NO: 41329 - DNA, 396 bp, Oryza sativa
agcttattgaggatttcttcaatttagaaattgcaagcgacgcatctgaaatttgtgaaaagacagccttttgtggatacatatttcaaaatggcactggaagtgatttggttcaaaggtgagagttgtgttccccatgttgtcaaccctgattaagtattacgcaattacatgtgtattggctgattgatgaatagcaattaaggacctgaatgtctttaaattatttgcctgctgccgttatttattttttgaggggtggggatggggggcttcatctgcgcaccacttcaaaaaaatttattgcgtcctgtaaattgccagaatcaatatgaatccaactgttgtttagaatgaaaactggtcttcatctttgcattagtgcatgttgtcata

SEQ ID NO: 41330 - DNA, 458 bp, Oryza sativa
  unsure (1)..(458): unsure at all n locations
tcatgactatagattgttaaactgcagatcgaagtccaattatacctacaagttattagcagacatattagcctgtcattccactggaaggatcggtcttgcagagaaaaaaaaagtttctttttattttgtacaatatttgtcctatgtgttcctgagtactagtatgtccgaatggttctttcctcctctcagtttcagacactacataaagattctcacttaccgcatncaattcttgctcctgcattgtctgttggtttactgagttcatgaccaccttcaaaatatcaaagtagtacaatgagcagcagcataaaaagtgaatgcttcaccatgtgatactaaatggcaaaacataattgtgcatgaaacctattctaacattatgctcgcaatccgcaatttgactcaactgatggatacttgagcatgtatnttggaacctaccactagtc

SEQ ID NO: 41331 - DNA, 411 bp, Oryza sativa
agcttaagtcgaatttcaacttgatttttattgtgatagatgctattatactcaacacggtcaatttctttcagaatttcttacaaccatatgtattgaatttggaagtaaaagctacacgatgagttatccactcgagatattagaattttatttttttatgtttcttacgaaatttatccaaatttgatggcaatgctgatcccgcgttgtgatgaatttctgtggatggatgcagacggcggtggccatcggcaaggagatccccaacgacatacccaagcatggtttcgacgtgttctacaagaaccaggagtacaagctccactacaagttggagacgaagcacctgcaccgcaaccgcaacacggcgaactccatagacggcatcaggatggcggccatggagaa

SEQ ID NO: 41332 - DNA, 258 bp, Oryza sativa
tattacatatcagctcatctctggacactcatgcacacacaactcaagcaaccactctctgttgaaagcgaaagggagaccaaaccacacagaataaagataaagaaaccaatctgtatatgtactcctctcttttttttctttgttctttctgaagtaggtatatatactcaaaactcaaaactcaaaactaaaactgtgtgttgatcatgcgctatgtacatcatcagaacactaaaaaaacgccggatatgtata

SEQ ID NO: 41333 - DNA, 415 bp, Oryza sativa
agcttcctttgattgatccgacttcaccattatcacgacagcatggcaacttgatgactcccatcggctgtttcctccaatcggttgattccagtactctaaagccgatattgactctaatacgatgatgacttcgagctttaccaaatttcactgttaacacacagctattgaagaaggaagaaaagtttatctggtctgctgaatgtaataggagttttgaagaattcagacgacggttagtatctgcaccagttctaattttgctagatcagatgaaagacttctatgtctattgcgatgcatcccgccaagggttagggtgtgtgttgatgcaagatggcaaagttgttgcttatgcttcacgacatgtgcgtcctcatgaaggcaactacccgacccacgatctggaatt

SEQ ID NO: 41334 - DNA, 358 bp, Oryza sativa
tcgatgtcctttcgctcccgacaatcggctaatctctgcttggccttctccagcttgaatcggtgttgctcaatgtagacagctggagtgagggcatcggctagctcatctgggagtagagcttgaatatctgcaaaccttgccctgatcgaaccacagttagtcaccaagttgtctaatgatgcctctagccgatgagagatatcctcaagagtctctttcacatcatcggacaagggagctagagctttgctggtggtatcagtttctgtttcttcatcaagatagtctctgatatcaaatgagaacagatccgctaagacccgcagaagagaaaattgaagatcattatagatca

SEQ ID NO: 41335 - DNA, 315 bp, Oryza sativa
tctaagacgaccgcagcatgcaagcatgtgatgagaagaagttttgtcatatttggtaaatacactggtataaacatggtctgaataaatggtcacaagtgtcgatctcgactcaagcttgaccccaagatggatggcgcaaggcaaaggtataacggaaactaaaatgttttcttagactttttcctgacttggagtatggtggagaccgcgattgctaaattgacacccgactatcaaaaagggactataaaacgagctagaggatgaacttgagccatactacctcataatcatatacggagatctggtagg

SEQ ID NO: 41336 - DNA, 438 bp, Oryza sativa
  unsure (1)..(438): unsure at all n locations
tactaagcttgactgctacttttgtcttaagatataaagatctggatttgtatcacatccatctaanatcccttatatctgggacggatggagttcaaagttcacgtggtacaatcttgcgactagagagtggaactcctgtgagtgttcgattcagtgcgtgtctggcataaacacgcaatatattgcacgatacttggtggacgtatactggagtacatactaccaccaccaccgtcttttagattacacacttagacctttgttagttgcggaaaatatttgggtttgattgtcatatcggatatactaacacacatttgaagtattaaacgtagtcttataacataacatattacagattccgccatagaaccatgagacgaatttatttagcctaattaatctgtattagcacatgttactgtggcgcatatt

SEQ ID NO: 41337 - DNA, 427 bp, Oryza sativa
  unsure (1)..(427): unsure at all n locations
agctntgatcctaatttacctagtaagaatgaccttactgtaacttttggntaacatatgcttgggatntttctttntgttatggactccaacttgctaagtttatatgccccgtgctgaaaattaatttattacactggtagagattgtcctatttcttgatggtttactaaggaacttaaaaatatttaacaatgcgataaaggatgtttattcattgttgaggattgtgcttagatatgtcgctgttcattaaattcatcgatgctatagcacacaatatttgaagtcaattcaagctacactaaatcggttcttaagaaattaatgtcatgtgttgatctcaatcccatagttaccaacagtatattatgtcatttcaaagtaattatagatggtatttaaaaacacctctattaaattaaat

SEQ ID NO: 41338 - DNA, 479 bp, Oryza sativa
  unsure (1)..(479): unsure at all n locations
acgctagaaatcaggccattgaagcactatcggnacaaccacaaccacgataggagcccaattcagtcctgcttgccgcatcaccgtgaggacgtacgcacactcacgcctctgttctatctatatttcttgttggcaactcgctcttactctatgtccctaccagtgccgacgcctcttgccgctaatgccacaattaatcctcgcctcttaccgccaatgccacaattaatcctggataactaatcgacgcctcagcaagatgatgggatgtcaccgaggctgggcacatgcaattccttgcctcctctatcttatgttctttntactaagttcttaccaatcaatgcattcattcgaatagctgcctcactgttcaattacgccataatagctctgattattccagatcgaatggtatggtagcgcagatttatctttcgtctttgtagtgcactcactgtatcgctatgaaacac

SEQ ID NO: 41339 - DNA, 437 bp, Oryza sativa
  unsure (1)..(437): unsure at all n locations
agcttcggtagcaagcaatggcagtgtggtcgccataaaaccttgtttctcctgagtcctgacaattgcgttgccatgacaaattgacacctttgtattctcctgacgttcagaagtagctatcagattaaaaaaaaaggaacctaaaaaataagagaatatagcattcgtgtgattgcttagctgattagtgctgtaatttatgtgcgatcacactaccggcatggtcagcgcatttctgaatctaagttctgcaatggcaagattgccattgataaaggagaatgtcggtaataatcaaatcgttgacgtgcatcggacgctgcagaaggtggggaatttaatggcgtcaaatgccagtaatattntgctctggaatttggggggtatcgggaagccaatcccccacaattcttattctcattgatgcgttgaaa

SEQ ID NO: 41340 - DNA, 394 bp, Oryza sativa
  unsure (1)..(394): unsure at all n locations
ttctactctctccgtcgcataataagtgaaggtttttactgtttatttgttaagtttgaccattcgttttatctgaaaaattagtgtagatataagaaacagataagtcatatgtaaagtacttttgataataaagcaaatgataaataaaataaataataattctaaaatttnttgaataagacgaatgatcaaacagtgacaaacaaaaattcaaaaagacaagttatatgggacggatgtagtacaattcaaaagaggataaatagttggctagttagctagtggtagtactagtacagtcagccatggatcgaacaatttacatgctaccgactcaggcgagaatctcatctagctatagccaaaagctcctcctctccccgatcttttc

SEQ ID NO: 41341 - DNA, 363 bp, Oryza sativa
  unsure (1)..(363): unsure at all n locations
agctnttacttagatctgtgtggtatcatggtgtaccttgattattctgatcaacattttggagatcaatgctttggatgattttatgatcgcaaacgccggcaacagaaaacgcgcaaagaaccataattaagctgaggggataaagctccatcattatcttgcttaagttttgttggccattattctttaagttagtcgtcatctttagttcactatcttaagattgttagccatttatcttcaagtttgttaggcgtgtcaaatcccttgatctataaaaaggtatcccggtgttatgaataattaattaacgattaaatctattcacgtctatgcatgtttagagcctctcgctctctg

SEQ ID NO: 41342 - DNA, 432 bp, Oryza sativa
  unsure (1)..(432): unsure at all n locations
agctntcaaacaattttccattctgccccaatatgccattgatatgacaatactcttaatttgttggctttcatgggtactagacaaattgttagcatgttgttcttcactaacaaataaacttctcagcccttgcttgtgctcatacatactggccaatgtgagaaataaagtggcaaagcgagtcacagctggtctcacaagatcttcacctatcttcttcatcattagatcaagaaccctcccatgcttgtagataaaccggcacgccttctttgcacaattgatgcaactattgaaggcctttatcttcccaatatcctccaatagcaaatccaagcaatgtgcagcacaaggtgtccaaaacaagtgtgggatcctctccataagaaattttcccgctgccttgtagttggatccattgtctgtgac

SEQ ID NO: 41343 - DNA, 51 bp, Oryza sativa
ctggactacctatacatttgtcgacaaatttttcctcaacaattgacagat

SEQ ID NO: 41344 - DNA, 359 bp, Oryza sativa
agctttggctctcaacatgaaccttgaattcgtttaggcaatctttaatgttatatgacagatctcgtacttgctctgcccatacctttagcaagtcatctttcttctttgttacttcagcagctcttaagaatgcctgaatagttttcagctcgtccttgatgtacctacaaatataaattcaaaagcaataaaatttattaaaataaataaatagatgtgatggaaataaactactaatattcacagcgcctcgttagccatgagagtcagaactcccacaacccctcgaaaaagagagatcctacgaatcgtctcattaatttaagagaacacaagggtgcaaaccccttcttttg

SEQ ID NO: 41345 - DNA, 294 bp, Oryza sativa
cgcatgatgggtcttcttggggagctcattcaccccaccacagtgacaagacagagccgatttggttgtccttgaagtcaatacatagctgagatactgtcagatgaatatccgatgtagaagtattgttgtaaactggggaataaggcatattcaaactgccccacaaggatatcgacttccttacgccattaaccagcaactttcatctttgggcattgacaacccgaccgaggctctgtataaaaccttaaacatgcactgtctctgtgactgtggataattagcacattt

SEQ ID NO: 41346 - DNA, 417 bp, Oryza sativa
  unsure (1)..(417): unsure at all n locations
agcttctctacctcatcaaattctttaacggtttcaccaatatcgntctttgtagactgatattcttgcaccctctattgtaaccactctaaattagcctctctactcattatacaaatctatatggcttagccgtgctacactagccggctttacagagataggtacaaatttgccatcggagatactaacaaaatcatagctagaaagatccctgcccggcaagcactggatattcccatgacgccactcaaaagtagcatcggccattgcaacctcggcagatgtatccgcttgaacaatctcaacatcatcaccgtcccattgaattaaacattgatgcaaggtagaaggcacacaacaattggtatatatccaacaacgacctataataacattgtagttaccctgcacatc

SEQ ID NO: 41347 - DNA, 452 bp, Oryza sativa
  unsure (1)..(452): unsure at all n locations
tcgagagtcantgggcgccctncgatgtgacggaagattatctgaaggagatggtggcgcacggtgttcttccagcgaatgagatcgtcgagtggcgaccatcattcggtgaagcattcccaacccgcgatacttatgagatcgaggtatttgctcatttcttctatggcggnttctcccttgcaacctcaagattttttcggggaattgtgaatttctatggaatcagcctgcatcatctgaacccaaactccatagtgcatattgccaattttattcatgcctgcgtaagctttctgggcattaggcctcattatgccttgttccgccgcatcttcttccttaagcctcagccaaacaagagcaaaccatgtgttgttggatgcgctggtctccaacttcanggaacactaaagtcaagatacttctccatgccctttaagacctcaaac

SEQ ID NO: 41348 - DNA, 419 bp, Oryza sativa
  unsure (1)..(419): unsure at all n locations
agcttcaaaataattnttctcttaaattacctattcaatctaagaaccgatcacaccattatattcgttgtaattaaatctttacaacaagatatcgctggattatattttcataaaagaaaaacatgtgtttcaatcagttaatacttgttgtttcatgtgtaacagcaacatgtttcaacatgtatcttcactatgtttcataaaatatttaaatgttccagttgctgacttttttgtttcaccatatatataacatgatgttttacttgttggtcaactgcaacatttgaccatccgtttttttaatttaaaaatgtttcacctaatgtactcataatgtttcactatgtatgaatcaactattgcagtgagttgaaacatcatttcgctattcgctaaaacattattntcatata

SEQ ID NO: 41349 - DNA, 417 bp, Oryza sativa
  unsure (1)..(417): unsure at all n locations
tcaaaatntcttcataaaagaggggatgtcatgccacaattatagtgattacctcgtgattattacaatcggagagctaaagggtgcaactcatcctcaatgtttttttgtcatattacatttggagcctatgtttgcacactttgttatctctaaaatatttgtgtaagttgatgagagagaaaatctgtgtgggaaaagaaagaatatatagaaattttgtttatttgctaaataacgttttataaaatacttgagtaggaaaatatagtgaaagttaatctttaatacaagaaaacaaacgtaattgaatattaaagaatttaaacttaagaataataataagaatattcggtgaatatttatagttttgttgaatatgaatgtcatattgatgatgttgaagagttggatatt

SEQ ID NO: 41350 - DNA, 388 bp, Oryza sativa
agcttgtgcactggcatgccgtaaaacggattgtctatactatgctgaggcacccagcagattcagtgcagtggaggacaatcgataggatttaccagaaattctcaaatgacccaagaaacatgcgtttcgcaatgtgtacggacggcattaatccttttggtgatttgagcagtcgtcacagtacatggccagttctgcttgttaactataaccttcctccctggttgtgtttcaaaagaaagtacattatgcttgccatgctcattcaaggaccgagacaacctggcaacgatatcgatgtgttccttgaaccgataatcgatgacttcgaaaggctatggaatgagggcacacgaacatgggacgcatatgcacaagagtattt

SEQ ID NO: 41351 - DNA, 269 bp, Oryza sativa
tcacaaggtggtggactagacgacctgtgttcgaagccttatgtgctgactcagttatttgattagccaatgaaccacttcagcaaaaatagctcacaaaaccatcaaggaagttaaattataccggttttaatagtagatggggttaggatatctggtacaattgttgatgggcacgaatcaaatatagggactcaaagtaagacttattccattcatggatagcgatccaacgggaccgcaatcgtcggtagccggaataagttcac

SEQ ID NO: 41352 - DNA, 363 bp, Oryza sativa
  unsure (1)..(363): unsure at all n locations
agctttgcctaatggagtgctatatacacaatttgtatgattcaaagcgctgaaaaaattattcgattgtgctgagatactagtgatggagtcaaaacggtgaccgaattgggagaatcgattcaacacgcgaatacggatgcattaggtttggagttattgacaaaacgaatttttttgcttgtgtttactctatctggttcatagattctaaggagatttggagaaaccggcacgtttgttctctgaagaagaacaaagtaggtgaagccagccagccacagtaaacagctgaatatttttagcattngaacccatccgtgaacaaccatgatttgcatacgaatgcgacgaccagagtga

SEQ ID NO: 41353 - DNA, 443 bp, Oryza sativa
  unsure (1)..(443): unsure at all n locations
tccactattactcaactgtacaagttagtttatatgcatctgtcagtgcttcattgaaggaaagaagctggcccgctcatctcggtataaagctatgtctaataaatgagtatccctgaattactatgagtctccaatgtcatcatgtacgatattagagatgaggccaagttatgttgtatgacaggagccaaaggccttattagtatttggccataaaatgtcgtagtacttttctatttctatggcgagcccttatttgtactaaaatttgatcttttccactctttcccttcttcttaacataatgatgcgcagctctcctgcacgttcgagaataaaatgttgcagctacaacatgtcctaaacctagattctttcaacttggagaggaaatatgatggatgcctanctctattttagaatataantgtcatggaaat

SEQ ID NO: 41354 - DNA, 397 bp, Oryza sativa
agcttattaattatgtaatcgccaaaggttgttgtatgcgagtatacaacctcgggtctccagatcggctcattgattttaccatagcttcatttttcattactcctaaccccagcagaagcatccttataatattaatccctggtgctactgcagccaggaaaggagcatagcttcctgagctgtataaagcatcaatatgtgagtaccaatatggtgatttatgttgaccagagaaaattagatcttcttacctgaaaagaggccaaaagagcaagaataccataccgatagttatatgcacaagttttctattgagtttctgcacgcaaacaaatggaaattatcaatagaaagcatcatcgtattgaagcaaatctcaataagaataactact

SEQ ID NO: 41355 - DNA, 390 bp, Oryza sativa
  unsure (1)..(390): unsure at all n locations
tctgcttgcatctattaactaatagcacagttttatacatctcanaccccatttctgaatatttgttgaaattactactgtnttgaatatcttcagataattcgtaggccatgagaaccaagcttctttgagaattgttgttctgcaccgctttccataaatcatacctttgagaaccaagctcttttggtctgaacaattgcattcatcacaaattaattgttaaattcttgtttgttcctaattagattatacaagttgctatagaactcanggatttcctgacatcggcaagttaatatttacctgaatcacttacctgcaaaacctctttgactaatggtgttatctaaacttagttgtaatcacgagttactaaatcttcaaata

SEQ ID NO: 41356 - DNA, 417 bp, Oryza sativa
agcttgtgactcaaaaatatctatgcagtattttctagaatggattaaagaaagacctgaccctccatattcttccatgtagatttactagtatattataagtgacgctcctatatgattcatattaaaaagactagaaatgacgttagagctccaggttgtctcccatcatttaaccattgaagctagcttttataatttcaagcctcacttgcaatctacaatattcacatgatttcattaacccaacctatattttatttctgtaattagttgagaaattttctaatccaacatatatgtccaaataacaggtagcttatggactgaagaggtatcacctaattggttgtcttcatcagcacaacaaaataaaatgccattctaagtgaatggctgtttttattctatcacaaa

SEQ ID NO: 41357 - DNA, 318 bp, Oryza sativa
  unsure (1)..(318): unsure at all n locations
tagagggtggtcactggcacgcgcaaacctgagtccccacggctcataggtagtggcccctggatctggctcgtgcctcttgcccggaggtcgtgtgctcttgcgagcagtgctaagggtgcgagggcctccaaggaatgtgatgcggggaacaggggtctcattctctacaggatcagtgatgtctggctcgatctctggctcggtgtcggctccctctgtctcggagtcgacctggatcggagtctccaaactggaacccaacttgggagaaggtgtanggatcagtggagtgtgcaccaacttcagaacaagtgg

SEQ ID NO: 41358 - DNA, 137 bp, Oryza sativa
agcttagagattcatgctccataccttctcctctaactccggcgacctatcgatcttcttctgcggtgccagcgactcactagactatgacagaggaccctacagtttacggtcccggagtggggtgtgggtgggag

SEQ ID NO: 41359 - DNA, 381 bp, Oryza sativa
taatactcactgctctggacaagtaaagcagtgattattgttgggaagcgaagtgaagtgaagaattgagaagcatgttctaacaaattgtgacagcactagtacaaaataatgtttgataaaatggagtgaactttctgctactgaaatgtttgtacttgcttgttgattctggcatctatatatatctttgttacaacggctaatccggtgacaaagtatggctgataaaataatgcaaattgtcacgatataatggtttgccttgtaatgaagaaaggctttcgcatttgtctctagaaattacctattcaataattcaaaaattactactatccacaaagactattatcctccacctaatctctggcggctcttcta

SEQ ID NO: 41360 - DNA, 377 bp, Oryza sativa
atctttggaaagaaggtggaaacttttttacgtgtccaatgatattacattcccctgggagggatataagggcaactcaaatatgcctgtaagttaaccttagaattgaagaagttgactttctaacccaaccgatagatctagactcgcaaagcttggacatcatcctaaggatggattggttggcaaatgcacaaatgacagataaattgtgccgaaaagttcatcaccttgcatggacctggaggaaagcaagtccgctttacctctaacactcctaccgtaagtcggtctatcttaaccttgttacaagtcacactcttgtagtcggcgctcctagtctgtgatatcccgacgttttttcataagaattaacg

SEQ ID NO: 41361 - DNA, 487 bp, Oryza sativa
  unsure (1)..(487): unsure at all n locations
tggcacttcagctctgaaagattaaaatcctgttcttggtagcctgagctttatgtttgacagctatagtgtacttgctacttgtagacagctcatctgaaacacatatatattacaaatcatcccttgattttcatgtttttacgtatggtgggatctcaatcatatctatttcaattacattgttattttgatcacgtatatgtaagctccgttttgaatatctgaatttgctggcatgaattgcacgcgaccttgattcagatctgaagtagaaacatactttcttgaccaatgatacattgatgaaccagacaagcaacacccttatcgtgngaaacacaatcgtcagttatctctgaaatgatgctacaacataagacatatgcataatcctgacgcactccagtccatggacggtcaattagcatatgttgtggtgcatgatctttatccgctagacatgggtatatcagatatatatgtc

SEQ ID NO: 41362 - DNA, 328 bp, Oryza sativa
agcttgggttgacaatacaaacttaccatacatagtatggtaattggatggcatccactgacctgttggctccattgaatgttgagttccctaatgccactcagtcctattgaggtagtgctctacatcatgaagagaattgtttaattaggaagaagggaatgaccaatactataacatgtgcttatttctctatgcaaaaagaaaacaaaatattggtgttcaaacagaacattgtggaaaattatatatgttagctattaaaggacaaggtggttgaatcatcaacatcttttcaaaacaataaagtgtgcttgattttgctaat

SEQ ID NO: 41363 - DNA, 477 bp, Oryza sativa
  unsure (1)..(477): unsure at all n locations
tgtactacatatctctgtcaaagctggctctacgatatggtataatttgcacatagccgagacaatgctgcctaaatggagctcggcagttgggcacagggaaagctgttntcttgagaaaatattttatctgcccctttcaaatttagccaatccttgtatatcctcgaagtttacttattccatggtatagcactgaatctcgattgttatcccttttatacttattattatgtcaattgatcgttggttgagcgttaaatagctgcaagatatgtgcattttgcccttattaggatgtgggtcgaactggtcaagcgatcttgaccggtgcacaataaacatggaacgagagtgatgattaactcatgattaattcaaaattaactattactaatttgaaaataattatctgaaattttagaacttcttatatcaacttttcacgtacgcacgttagcagttataactctaaca

SEQ ID NO: 41364 - DNA, 435 bp, Oryza sativa
  unsure (1)..(435): unsure at all n locations
agcttagacatcaaatttgaaacagtggtgttattgtttgaagcattatcaagggttattgtcatgaccttatcctctattttcaattcaaccaagcaatcaaaaatagcctgagctatgacaatagcggtgtgaggaggctccacctcaacaaagtttaggacacggcatagcaaaacccaatgaacatctatgtaatgagccaccaaacacatatactgaaggttttgatttaatgtccacatatatctgtagttaaacttatggtctcagcctccctaagacttttcctgagatgttccttttcagattcatacaatntcatgcattncattttatggccttgcgactagtgaattcatagcgaggattcatccactttatcaaagcattaaaccctttatgctcaacaattctaaatgggtgatcatggtg

SEQ ID NO: 41365 - DNA, 419 bp, Oryza sativa
  unsure (1)..(419): unsure at all n locations
cattatctaaaaaaacacctattattattcggacgagctggttttcacatccggtttcgaactgtccgatcgggaagttatggttcaagagacatgaagagatggaggctgggccaatatctgtgggccgtatttatgccgggccattntatctgggcagctctgtgcctggcgcgggtcaacgtggacccacgcattccaagtggcaaggggcgggttctttgggcccgacgtgcaccaccacatgggtgtggaccgggtcttttgatggtgacagcggcttctggagggaactcccgctctgacgtctgatgtttggaaataaattggacactgacgtcatcatgacgtctatgttcgagttacgtgcangaactacctttaacctgattttctcttatattactattcaatcatga

SEQ ID NO: 41366 - DNA, 405 bp, Oryza sativa
agcttagctgtgtactgaccataaccgaacactcacaataaacgccgcatcaggatcgatcctatcatataggaaaaacaaaaatgagaggaagaccattagtttgcttgctaaatcgcttctgacctagtttcttgctcctcctgttgaacaataatggagatgaggatttttttatggccttacccggaagggagctcactgggaactatgaagtacgccaacgcctgcaaagtgcccttctttggagccaccattgccacctctccccctctcaccctacaaaccaattaggagtggcatataatgaaatctctcttcctacgctgaaggaagggtatagtaatcaagtccatattataagaagtacgataggcaaaagttatgtaatgggcacatgttatt

SEQ ID NO: 41367 - DNA, 298 bp, Oryza sativa
gcttattgagacagcgtcatctccggtcccatccaatgagtccctacttcaacaatgctagtgtggactcatgacgacgaaatcgtcttcccggtatacaccacggtacctatctcggctgggccattaatgacacggaaatagagaacgccaccggcttataatcccccgggcacacttccattgttcgaagtgatgcctctccgcccgtatgctggagtaacgaacctgtctgacatcatacgagccatgcaaaggttcctagtgcggtcaaaccttgtccttccgacatgaacca

SEQ ID NO: 41368 - DNA, 410 bp, Oryza sativa
gcttgccgacgacctgtgctgtttgctgcatctcctgcttgccaagaaggaggagctgaccgcggtcggcaacaacgggtccgatccctgcaagaggctgcggatcggggccgacacggaggcgtgggcgtggggacccggcggcgacgcggacgagatggcgcatagcagaggcatcgtgccgttcccgtgctctgctggcggcgctgccatcggagtcgtgctgggtgccgtccatggacgaggacgactactcttcgctgtccccgtggatgatcctgtcgaccaccaagttcgtctagtacatctacacggtgcacttacgcggtgccgggcggcgcccgcgtggttgagttgttgaccggcatggagactgcgatggtgcaagaggtgagcaccgtgcccgggct

SEQ ID NO: 41369 - DNA, 374 bp, Oryza sativa
gtcagcagaaaaagatgatacagtgtgtgagttatcaagcttgcatgcatgctctttttctggaagacaagataataaagaagcgtgcatgctctcaagtaaggaacctattaaacagatagtgtatgctctgttacgagtaagaacattaaactaaacaaacgtacttacaatgatgaccttcatgcttacaagcacacgttcgtgttctttttgtgacttacttgtgagaatttgttcgatatcaagtgggaacttcgtctcacttgtatcatgcattgcatgttaggtactagatagaacgagcgagtatctaatttgttattctagagcgattgtaggaacacaaagttctcttaaatcgctgtgaaatt

SEQ ID NO: 41370 - DNA, 424 bp, Oryza sativa
  unsure (1)..(424): unsure at all n locations
agctngacacaactacagaaccaggtgtgcactaaataacttgccttctcatctctatatcgnttgtgctgtataccctgaantttgggtgaacagacactacaggttttgatattaggaatgagcaaattttgaaattattgtgcgtgacccaatatttattgccgcctgcattntgtaggttcaattgtttgacagcacgaactatctgaaatcatttggagtaggagatgtatgggttgcagtgggttggagcagtgatgttattcctgctgcgaagcgaatgtctgacgttgcagtggtggttcccaagtcaggcagtagtctatgggctgatctatgggtggtgtatgattttcccatgcataaccgcgaatgccctattggccattgtgttttgtcttgatgtcttgagctcagtctc

SEQ ID NO: 41371 - DNA, 320 bp, Oryza sativa
cttatatagagagtactaaaggcatgcccaatgcaggatgcaccccaccatccacacgagcaaaagtgaccaagcacctagctagagatatgcctcacacagtgcaagctatactcctatgggaattttatgtttcagcacctgtcagtctgtcacattttgcatttaaacccttggattattattatttgcatatacatccaatatttgcagtataccccctaaaaatcacaaagatatatatacatcaacccctcctcaatcctctcatcaccatctgccctcccaatctctgcccgcgtcttcttcctcttcgactc

SEQ ID NO: 41372 - DNA, 423 bp, Oryza sativa
  unsure (1)..(423): unsure at all n locations
agcttggaagagaggcaaggtttttntgcaaatcttttgtttgaagacattttgaaatcactaagtgatttatctcttttaagtttgggtcgaaaagagacttgcgtctcaaatcgacttaagagatgcttttcaacagctcaattggaaatgtaccgacctcctgggtcagatcattacttctcggctcccagagccattccacttgattaatcggctcccagagcctttttcattttctcggactcctagagtcctgctgcccagcagcaaagcaatccgctttcactcgggaagcctagtctatgatgcccacagacatcccgaatcacacagattcgtttctgaccactcaggtcatccatctgccacataggctgattctgtgttcgattcccacaccaaaacaacttttcacaaagc

SEQ ID NO: 41373 - DNA, 314 bp, Oryza sativa
atactcagcttggccaacccgccctttctctcgggcctcgccctatccgtcccgaggaagactatttcccctccctctttcttttcttttcttttcctctctcaaaaaggatttaaataaatccttttcctttagaccaaaaatcgaataaacttataaattccaaatcttcccaacccgtagtcctgttgactccgttcaactttcaaaaactgctcaaaatctcgagatctatctaatgacacgcctagaggtcaataatatggctctattttcgcccgttgttgagttgtcccatttcgcgtgtaatttcc

SEQ ID NO: 41374 - DNA, 330 bp, Oryza sativa
cgtatcacataccagcgtgaattgattcccttacatctgtttgttttagatggaccgttatcggttagcccgcaaacgaatcccagcccaatacaaagttgattacgctccagatcgggcgttacgcgttaccgatacggaagcggagcggagcgaacatgacctatccttgagcgccgccaccttgcagcgcaccgtcgccggcgccgctccccctgcccggcgtgcgtcgtcgacaccgctgccccctgcctcgacgccgctgtccctctcctcgcacgcttcatgaccgtccggagaatgtccggctcgacaatgccgacaacccac

SEQ ID NO: 41375 - DNA, 397 bp, Oryza sativa
agcttatctcaccacttcggtatatgcggctatccgaggtggtggtcgtggtggacgctgcagcagcactggaaacagaggtggcagacgcggcggcttcggtcgtggcggtcgcggccgctgcgcccctagcggcgcaagtcatggacgcgggcgaggcaatgatactcgccccgtgtgccaagtgtgtcacaagcgagggcatgttgcaagcgactgctggcatcgttatgatgactcatatgttcctgatgagaaagctggcggtgctgcaacatacgcctacggtgttgataccaactggtatgttgacacttgtgcgacggatcacattaccgggcagctagacaaattgtacaccaaggagagatacaagggaacagatcacattcacact

SEQ ID NO: 41376 - DNA, 391 bp, Oryza sativa
  unsure (1)..(391): unsure at all n locations
ttctaagngggggagaaccctgcagcagtagctctcgatcgagctantgctccggcttcaagaaacttgttgccgcctatacgttgcatcgtggagaggagaagaagagtgttcttgagagggcacgtcgctctcttgacatgatggaagagctagatnttattcttctatatacgcactagctaattgcaattaatcatgtacattagacatttgtacaacacatttcctgccaattgaatacgtccatgtgctacgatactttcagtgtagatacgtagagaaggatgccttaatttgtgacgcatctgatggggtcagatactaagattattgtttaagcatacacacncaccacaaagggagagatttgttgagagagagatgctcc

SEQ ID NO: 41377 - DNA, 303 bp, Oryza sativa
  unsure (1)..(303): unsure at all n locations
agctttcagtatatatgtgtaagggagcaatatattatggcgntaattttaaaattctgtatgtacagtttattatatggcatgcatattactgcatcaattgaaaatccagaagatgcatgtgtgtcttaaaaatttagaccccgaccaactgaagttaaagattgagctaccatattttctagtgtaaaaaattggtacttctaggtctgaattttctacattttggttcctttataaaacttattttataaatagacccctaaaaaaacttaatgcaagaatggttcttttgagtgcgcc

SEQ ID NO: 41378 - DNA, 413 bp, Oryza sativa
tgaattccgataactcaaaggaacttcctatttacctcgacgtggtatgttatgtgactaaatctgtacaatacaacggtattgtgccacgtgggtgggttcccgttgtgtccgccaccacggcgttatatttaaggcgtgggcccgccacttaacggttctaggtcatatttccagtatgactaggatggaggaacacttatcgtgctggtgaaggctaaaatatgaatattggaagatctttgttgcgggttataaatcgaggacttatgtatcgagtgccatgctcttgcatgataatatgtcgatcatgtggtaaagtgacatactctgcatagtataactaattattaatcgtgctcgggtcatagccgcgtgagatatgtactgagatagaactgtgcttattctct

SEQ ID NO: 41379 - DNA, 358 bp, Oryza sativa
ctgacagcgatgatcgtgcctttgtcaagcttgtcccgtttatcagatctggcgatgcaacgggagcttgctctgccgcgacggcgaccgcgcccgtcagctcaaggacggctgcctctccatggccctgtcaaagatgctcaaccgtacgttcgccggatgttacaagctcgtcgaatccgagctagacatagaccacgactttctctttcgtggcctgctccatgggcataagtacgtggaacgagccttcagggtcatcgaggttgagttagccttcatgcatgactacttctacacaaagtacttcgttatctacatgtatcgccatgacgacacttgtctgtcttgtgccatg

SEQ ID NO: 41380 - DNA, 380 bp, Oryza sativa
tgcactgggcgttaaatccacgagctgccttcacgaaattctgggtcttctttcattaaattagaatactcggtatattgaaacctctctccccttcaaatgatactaatggttgagacattggatatttgggcagcctgataatgcgatttctttctttcccattagtacatcattagacacatgttcaccacctgtagacacatgaatgcatatgcatggttctggggagactatggaggcgtttgaccggcctgtatgagccctatctcttatcaagaaaagaatactgaatgctctattcacttttctttcctctcttctatgggggtaccacatgcctaaaggtgctaattgctaaaacctcgatatctatattc

SEQ ID NO: 41381 - DNA, 216 bp, Oryza sativa
ttcgagttgtgataactactccggctggcgtagatgttattaacaaatgcattatctagtaaaggccacgcctccctacttcatacattatccagaacaattagcatctccttccttctagatatccttgaatgtgttccacaagactaacactatccatggtatcagccccattcataatagtttcaggattgctcatgaagtggactaagatct

SEQ ID NO: 41382 - DNA, 462 bp, Oryza sativa
  unsure (1)..(462): unsure at all n locations
agctcgacgaatcaatgaacaatttgccaatggcgatttgttatacaacaattgacatgtggatgcatgatgcagaaaggggcgatgagctcgtcggaggtgtgccagcggctgggggcgtacgaggagctcaagaaccggaggtggcactgtcagggagcctcatcgctcaccggcgacggcctccacggcggcctcgactggctggcctccaccctccgcgacgtccagacgtggggcacctccgtccgcttctagcaacttgattctttcacgtcttgagattagtntctcaagaatcgatgatcgctagctgcaacccaattccaattttgtgtgcttggtcagaagtataattgagataaatcagtgcctgtggtgaatttgagaggatcctcacatccaatggtagagaactattccattaatttgctgagtgggattttgcaccatgattcgtct

SEQ ID NO: 41383 - DNA, 361 bp, Oryza sativa
tctagacaatcttaatacatgaatcatcagttatttattgacatgactataattgactggtgtttaagcttctcgctgcacaccgttttgatggtgcaatgatgcatattatccataataattgatagtataagtttgtgcttgataccatgaatcctagacgccgagttgggaatgtattactcggaagcaccactgcctgaacatatgatacggagtactacgtactccctctgttaaaaaaaataataactcggcctagaaggggatatgactcctgctaggacaatgaatttggacaggagaggtcacatcccctcctagataagttcttttttgggacggagggagtaccctgtct

SEQ ID NO: 41384 - DNA, 484 bp, Oryza sativa
  unsure (1)..(484): unsure at all n locations
tcttggttctggtgggcgggcccctcccatgggccggtgcctgcgagggtgagcggcacggctgggacactgccggcgagtgtgagcggcgcgatctggactcggccggcgagggcgagcggcgcagctgggacttggccggcgtgggcgaacgcgcggtctcctcctcacccgttgcacaccatgccaagagagaagagagagagacgaggaagggagagaagagggaaagagaaagcttacatggactgtctgatatgtgggtcccacgcgggtcccacgctgactcaaccgccacgtcgggtaaaaccgaggttaaaaccaccgaaggacctagagtgaacgggtttgtaatttgagggatgccacgtaacttgttnntgtggttgggcgacgatttgtatctcgatgcacgttatgggtggctagcgtgcgcgtgcactccccncttcctttagtcttactatatatggtaataatatat

SEQ ID NO: 41385 - DNA, 452 bp, Oryza sativa
agcttatttaatatcccagcaatgatctcatacatgttacatgtgcctacagcacctcatacctagcagcaatatgtgggctgctcaaattactagtgtcatgatcagcagataaattggcagtagaactcccaaggctaacaagtcgaaccttaagcatttcagatagaagttttagtaaaaatggagtagcacaaaaacctacttgtactaccatgtcacatgtgggattagggcatgtgctatcttagccgtccaaagcgccctgatatgcgtgcaaaggctaaggatggtgatctgaaatttgaaagtttgcaactagctcaaggcatatttgatgagcagtgataacatatgtacttgtgttgtgtggtacatgtacaagtgggacagccacttacataaccaacaacagctttgctatttgccaatcacctgatttctttcttctt

SEQ ID NO: 41386 - DNA, 409 bp, Oryza sativa
  unsure (1)..(409): unsure at all n locations
tgcccgcaggcacaccgaacacgcacttgtcggngttcagctttatgcggtcggagcggagactttcgaaagtttccgctagatccgagagtaaggtctcttggttgcgcgtcttcacaaccaagtcatcaacataagcctcaacgttgcgtcctaactggctacccaaagaaattcgagtggtacgttgaaaagtaggtcctgcattctttaacccgaaaggcattgtcgtataacaataagttcctatgggggtgatgaatgtagttttttcctcatcctccctagccatgcgaatctgatgataaccagagtatgcatctagaaaacacacaaggtcgcaccccgcggtggagtcgacaatctgatctatacgtggcaaggggtaagggtccttaagacatgcctt

SEQ ID NO: 41387 - DNA, 494 bp, Oryza sativa
  unsure (1)..(494): unsure at all n locations
ggatgcttaagtcacctgcggcatgcaagcttcggtcaaagatggtgacagtaaagcataaacataatcaatntgaagcagataataagagcctcaagatagaattgggcgcactaaaggaggcgaaggaggctactgcaaaagcatttgatgttgagaaggcaggaatcctaaaggaattggaggatcctaagcggaaggtggaggaaattcaagctaagaaggatttggtggagcgtgaaaatgataaatttcagttggaggtcctgactggagagcagaaacaaagcaagtctaaagcaaaggctaagagtctcaaggtggaactaagtgcattggtggaggcaaaggaggcgactgcaaaggcatttgatgttgagaaagcataaatcatgaaggaagttgaggatcttaagaaaaaggtggaggaaatccacggcaagaatgaattggttgagggtgataaagataagctttggttggagattctaata

SEQ ID NO: 41388 - DNA, 470 bp, Oryza sativa
  unsure (1)..(470): unsure at all n locations
ctcagcttccanagcgaggttgagtccgcgctgaagaggcgcgaatatgacatcctctcaaaggtgctcggaaccaaagaacatcctggccggactaggggaattggcagcgatgtgcgttggaagcatagactcccgcagtacagcttccaatacaggaaacagaaagtctccaaggaagagagggacgctcgtttgaaggccgaacttaaggttgaggtcattgaagaactagaagctagcatgaacgctagggtggaagaaagggttaacaaggtcctcgccgacatgaatataccccgaggcacaacacctgctgtgcatccaactcctcgtgcacaacacgacgcgagtccgtcacagcataggagtagttgtgcattcacagaggtgccggcccctggtctcccggtcgcaccactagctgcagtggacacatagaggtaattgatgtatctaatcatatctaa

SEQ ID NO: 41389 - DNA, 441 bp, Oryza sativa
agcttcttgcttgagtgtgtgatgaagtgtatgaagtgacccctctatacaacctcccaattacggttatggcagttggaattgtcggaaatgccccacaaacatcattgggggtgcatctgaagcatccacgtggagggccgagctgagccggccctgccaggatttgggcgaatccctggttcggccgaacctgggccggcccatcaagcctccagatatggtagaggggctgataggtgggtcctcatggcagttctggcagttatggcgggtttcaggacggttatacctgacctgtggactcctttatccttgagcttgcttaggagtgagtattccttcatttattcttcatttatgtactaatctctgcaaacaaataatactcctagtatgagtgagaatatattattctaatataaatatgtattacaagca

SEQ ID NO: 41390 - DNA, 368 bp, Oryza sativa
aactatcttctttcgatatatacatttggaatgctactctcaacaatagctatatttcttttagctgcatcagcaaacaattgtcctcacattaactggtgcttcatccacaataaaggcaacacccaaacatcagctctgccaccagggtgtccagtagagtggttaccttctctggaaattaatcatcttgatggatatggcgtaaattgaaaagaagaataccgaaaacgcaacgaggacggcaaccgtggcgcctgtcatcccctgttcaaatcccacgttttgctggaggaattcatgcaccgtcccgtcgaaaccagtgcccactattctcgtgtccacgtcacctaatagtgatgtaatga

SEQ ID NO: 41391 - DNA, 445 bp, Oryza sativa
  unsure (1)..(445): unsure at all n locations
agcttgatatgaaataaattaactagtactttatcatatcgatatgtagtactagacgacaagaaggagcttggtatcaaatattaattcataggagattgcgagcgtcctgaagtcgaacgctgctctatgggattaaaattgtgtgcgtttgccactgcaccaacaagcgtaactggtactaaatcatatcgatatcgatatgtagactatacgaccaagaaggagcttggtatcaaatattaatttatatgaaattgcgagcgtcctgtagtcgagcgcagctcgatggggttaaaactgtgcgcgtatgccactgcaccaacaagcgtaactggtactaaatcatatggcactgtgtgcgtttgcactgtaccncaagcacatcttcttcctaatcatatgtgccatataacatatgtattattctcttacgaatactact

SEQ ID NO: 41392 - DNA, 455 bp, Oryza sativa
agctttgtcgaagaacataatagatagagtatgagaaaaatgtggcctcccataaaaagggtttggtgaaggggaatgggtgcataaatcaccaccgtaatcaatggtgttgatgagacttcagaaagtaaaccgcgtttgaacactggattgagaccaattgaaataaaacattaatcttggtggtacggtttgttactaatcatttccacaagcgttggagaatatttgcatgcaggtaattatggatgaaaatgcactcgccaagcaaaggaaagcacctccaacggatcagacacgagtacacggattgaagggtccacaagctgaccaaatcacctcaaaatgggccaaccactttgtattcacaccagggcccaaggaacatcatcctatacaaaggggaggaagaaaggaggcaaaggatgatcagccaaaccatagtatgtctgagt

SEQ ID NO: 41393 - DNA, 358 bp, Oryza sativa
  unsure (1)..(358): unsure at all n locations
ttctttactagatcaatgtccttagcaagaatccgacaactggcggcttgataattctcatcggccgattccaggactctgaagccgatactgactntaggccgatgataactttgggcttaccaaatttcgttgttaacaatacccccatcaaattaatacataatacaattttactccactacctctattatagatacacatagaacaaagaaaaaaagacaaagataaatgaaaaaaaaatagggccagatctgggctcgccgccgccacttactcccgtcggccgcctactcccgccggcagccacctcccgccggtcgccttactcccgccggacgccttcctcccgctggcc

SEQ ID NO: 41394 - DNA, 450 bp, Oryza sativa
  unsure (1)..(450): unsure at all n locations
agcttacataaaataagcttattatattgatgtaatttaaatttaaatagtatgtagaatgatgattcaaatgtaaaagtaatatgatgtgacttaatttatgagagaacaaaataagaaagataatttagaccatacatctaagagctacaaaaattaagatgatatggcttaatgagagaagaaaagaagagagagaatctaaaccatagattaatcatctaataaggactaaaaataattgatgtgatataacttatgagagaaaagtaaaataacatgaactaagcgaggatgaactatattggtataaaggatattataaaaaanatgatggattaatatatttaaatatcatgtgaattatattggatgatttaacatgcttatattntatatctctaaaattaatacattattaaattatagataatatagcatgcttgcatg

SEQ ID NO: 41395 - DNA, 427 bp, Oryza sativa
actcagcttgttgcattggctaaatccaatctatatgcagtccttgtaagcctgatgcaatgtccagataacttatcggctgaaaccccgatgaaacccttataggcaatcgaaaggcaagctagagattatggttctaagcacgactaaggttgatgcaactcagagtatgcaaagaaatataatctctagacaatcaagccttcaactaattctaagggtggtggataccttagctaatctaatctggtaaagcgatttagccgatatcgacataaaccgtaattagagcgaatcttagccgatacaagtaaatcgagctaccaaactatattaactaagatatatgataaaataggtgcttacactcgacagatcagagtgtcaaagccctaacctcaccgatgcaagccgccatgacaagaat

SEQ ID NO: 41396 - DNA, 399 bp, Oryza sativa
  unsure (1)..(399): unsure at all n locations
agcttaggacagntatatatatcactcaattttggtgcttagcggcccacaatataagagtagcttggagacaaacgaaaatttaaccccatccgaggtacagnntggnggcattcatgcaagtataagcttagtccattcctaatcaccaacccggtattaaactgttagtagcttcggttattaggtcactaacctgtcatggcgcgtggctacattgtagactagtttaatttacacaatctacttaccaagtaccaactgggtagctcttgtctcttgttatgaagtacatttcttttgccacattttataaaaaaaataatgatggcggttcatggcataatgatgaggccacactgtttgtagtatgttaagcattgggcattaagcaaaatg

SEQ ID NO: 41397 - DNA, 291 bp, Oryza sativa
tacttctccgagatagctcaactgggaagaacttccgctctggtgtggggaagagagagctagactgagtactacccattgtgctcaagaagtcataccggaagatgacgtatgatgcacgatataacctaatgaggctacaagctcattagtatcaatcatgcttttaacagcagagcatgaaaatagtataacagctcgtattgattaagaacatataacctatcactgctcagcgctacaccacgttgagacatgcccaaaccaccacctgaactaaccagttacatt

SEQ ID NO: 41398 - DNA, 456 bp, Oryza sativa
  unsure (1)..(456): unsure at all n locations
agcttggctttcgctcagggtccttgatatttattgaactcctgaaagcggttattcgcctgaaggtcatcatgctgttngtgcatcatgttgttgatgttggtgaactgagcatcatcagattgttgccatcttgcgtttgtgctatgtgttccgtgaggtcgtactagatctcccccgtctgcatctcaagggtgtccatcctcctagtgatttcacccaagtcccaacgagaggaactcgagcgccattcacttggagctggaggcacaccacttgatctggagggttggttgtcccccctagtggatgtcatgaggcgcatgccaccggtcctcactggcgcttgcccaagttgagactccgatgctatggcgtggagcttgcgtccatctgggtgcatccccagttggtgcccaatctgcctcatacatctgcacaagtgtcgaggatgat

SEQ ID NO: 41399 - DNA, 398 bp, Oryza sativa
  unsure (1)..(398): unsure at all n locations
agcttgtagctctatgatgtaccaaaatatggatgaatatgaaggacggacatggctgtcaccacctgtcgcctacctttgctttgcgtggggcacacaaaataaaggtaaccactaacctagactccacgtttatgttatcaattactactctagcctcagtcaagaactttcgccttatccagactcttagtactagagcaataagcataaatactaagcgatgaacccgtaacgatgagaatctgtctcacttaaataagaaaagtaaataccaaaagaaatcccaaatacttattgatgtagaagaagtatccatcgaggtacaagatcgaaaagagtgccaacatctatgtttgacacttcctctagaactccncatggagtaacaccccccc

SEQ ID NO: 41400 - DNA, 485 bp, Oryza sativa
  unsure (1)..(485): unsure at all n locations
cgcctactatgtggtgattatactaaccttcttttcaatcgttatataaaatataatgaggtgagaagcacgaagaattcagctggacaaaacattatcacataagcaaataagttgagtcgtagcacttctctttcaaggttggtagcaagaacgcctcaagaactcatcaaaatttcaaggtggaaattatgagagccttctcctccacgggagcccagagcccacaagatttcataaccttttcagaaagactagagagaacggtcgtatacagtgggtgaacggtataggtacccttcttcgatagggtgccctcaaccaaaaccacagggctaatgtangtaanaaatccacacanatcaatacangatgctaacaaacaaaaatgacttctcaggatggaagaacatacgtatgtgaatatgtgatgctcatgcggtgcagagatctaaacttagcagtatggaagcacaggcaatata

SEQ ID NO: 41401 - DNA, 396 bp, Oryza sativa
agcttaatacatatgagctggaccagctcatgagctgcataatgacaaatgtattgaacatgctctcttgagaacagaggaatagcttgcatgtgtcaaacatgacgcaacaggtgataaaataggtagtacagcacctttgtcgatcttggatccggccaaatatcggagaagcttgcttcggtatgtgactagaatgtttacaacctctattggcttgtgtctatatgccgcagatcactgcagatttgtccacatgttataatcatacctgagttctaatatacatcacctgctttactgggaataaatctgcacagtatctatacttaccttgaacacatgacatgcttctattagaataattttgctagaattctgcaaattcaagagacg

SEQ ID NO: 41402 - DNA, 362 bp, Oryza sativa
actaagcttgaatgctggaaccaaagagctctgaccatcggtcttatatgcactatctgtatgaggcctgtccctacttcaagctagggcatatgccggcacatggcgctattgccgaggctggccagggagaagacatgagtcatattatcgacttccatatctctcaaggtgctcagtggatctctcttcttaatgcccttgcagacaggcctgtgggaccaccgactgctaggatcactggtcttgatgactcactgtctactcacactctaggcagcggtctaaagctggtccgaaggatgctgtcgcacatcgacagactgtgcaaggtgccctttgaattccagccacttgctatc

SEQ ID NO: 41403 - DNA, 461 bp, Oryza sativa
  unsure (1)..(461): unsure at all n locations
tactaanaacctaggagtatgacttatacgctccacccgatgggtagtctacagacggtctagtaccagataagactctgagtgaaacttgcttgcacaagacttgcaattcaaggcgtagtccattgttcaagttgtgagttagtgtagcttggagttctaggtggatgttcaaccttaatcggtctccatcgaaccgctggtatataaacagtacattggaaaaggcaaatctcagtgggattttgagatttggtgggggattgttggaattaatagatgggctaaggcccattcgaagattaattctttgggaaatcacaaaagcccacctcatgggatggcatgcatgtggagtttagtaccaccttgcttattctagaagagggagacctccttaaaagggaggatgccctcctagccacttgaagcatgtgtggtggagagaagagggggaacac

SEQ ID NO: 41404 - DNA, 414 bp, Oryza sativa
  unsure (1)..(414): unsure at all n locations
agcttgccattatctaanaacgcacgccaccaaatactcttactactacaaaacgaagctacgacacgcaaaggaccgcatggtaaataaaactattcaacctccagggtccttatcacaaaaataatatactccatccgtccactaaaaaaatcattcctagcatcttaaggtggatttaatggagagtgagaatgactaaaataccattaatcattaaaaacagtactaagaatggtatgtaggtaaatgatattgaagggataaaacttcttgttttacgtgttgagagtaggtaggatggtaaaagatattttttttgacaaaattcaaactctagctgtgtttagttcacaccanaattagtagtttgtgtgaaattggaacgacgcgatgaaaagtttggaagtttat

SEQ ID NO: 41405 - DNA, 463 bp, Oryza sativa
  unsure (1)..(463): unsure at all n locations
tgcttatcagagaaggccaacgtggttntgcccctgctcatctagttatcatgttaatctagtcaaaactcactcgtccttgaaccttatctactcaagcaatcacaatacacaaggaccatgtgaaataattctttgaaacattaaccccacctttatatataagaatctagaggtctagaacacgttgaactcatgcaattttgtgagctgtcgtatcactttcataatgagattgtaattgaacaaaacatgtttatcctatctaagatgaaatgtttgcaatctagacatcatttntggtgtctccattactaatcacatcaagagtgacaggcattctaaaatttaccaccccaccattccaatttgacatgtgatgatccacaagaagaattgtcatccctacacgactntacttactaggtaaaaatataagtatantttcaggttaaagactcat

SEQ ID NO: 41406 - DNA, 459 bp, Oryza sativa
  unsure (1)..(459): unsure at all n locations
ctcagagtcacctgcggcatgcaagcttggacaccttgctggcttacctcattctcctgcangagcttcgtctgggcatggtggacatgtccagcaatggagcacggtggtgcgacgccattgcccggttttccccaaagcttcagatcattagcatgccttattgctcactttctggtccgatttgtcggtccttctctgccttgaaatcacttgttgtgatagagctgcactacaattatttgtccggtccgattcccgaattcttggccgatctgtccaaccttagtgttcttcagctttcaaacaacaacttcgaaggatggatccctccaatcatctttcagcacaagaaattaagaggtattgacctcagtaagaattttgggatctctggaaatctgcctaatttctctgcagatagtaacatacagagtatatctgtgagcaacaccaact

SEQ ID NO: 41407 - DNA, 384 bp, Oryza sativa
  unsure (1)..(384): unsure at all n locations
tggaacaccatgaggttaatgttntggattctantggctgatgatatgatggcaaatcatggcaactagaatggatggagctcatggaatggataccaagttcaccgctatgtattatgcttcagagatccaatgttagtcctcntgcaattcctcccgaaatggagttggtgcttgatccggactttggagtggcagcctctcttcgtttatcaaattggaagtatctatggttgcttgaccggacttagaatacacagtagatctcaccataccaccttggaagcagtaattcatggactaggctagatgactcaagtctcgccttacaggctgatcaagtttgtaggcacggaggtggggaagctttacaccgtcgctcta

SEQ ID NO: 41408 - DNA, 452 bp, Oryza sativa
  unsure (1)..(452): unsure at all n locations
agctngccattgctttagggctcattcgcacagcccctggcacatcaatccagataaagaagaacctccgagtttgtaatgactgccataatgcaaccaagctaatatctttagtgacaggacgggaaataatcatgagagatattcagcgattccaccattttaaggatggcaaatgctcatgtggagactactggtagtgaagtgttgagacagtttgaatctgcacccggagatgagggagcttcagaaagatcagagtatcagatctgacaattaggtgaaactaattggcaaagttcttaaggtaattgcttagttttatacgtggtacatgctatgcgataataggattctacatatatggttttctattgccaacgcccttgccaatgaagtntaccttgttttattgtagggctgtgcagctgcctcttatatcaacacttaat

SEQ ID NO: 41409 - DNA, 269 bp, Oryza sativa
atcatggcttccacattccgtgccacttctaccggtggcctcatgggtgcgcccaccggaattgtatcagacaagaagccatcttctctatcttccgtggcatctggttctggtgccagccgaccacgcaatgcacgcctttagaggaagtgcaacttcacggtaaaagctgcccaggagttggacttcaacaaggatggctcggctatcaagaagcttcggtgagctccaaggtcttggacacatcttatcaaattttggtcactatg

SEQ ID NO: 41410 - DNA, 447 bp, Oryza sativa
agcttcttctacttgaggaatctcatggtattattataacacgaacctacaaaaaaacatagtgttagtgcttcgctttcgtctcttacataaaaagtgccattagctacacataaaagaccaacacgtaggttaattaattaacaaggtagacaacgcacagcagaaacttgttgctcaatgctcttcctaagaggctaagagttgaaccgtcagtgtcatccagaaacgaataaagtgcgccattgatcgatgctaatatactactactactactatccctttgtttctttaaactttattaatgcgatgtagtatgatcttgcggtggtgcactggcagattcatccgagcaaaggagctgtcgatcacactatcataaacgataaaaatatgacaagaccggcaagattgatgaggaagactgattgagaagaggacgaatcg

SEQ ID NO: 41411 - DNA, 488 bp, Oryza sativa
  unsure (1)..(488): unsure at all n locations
tattacgtgacctatgatactcagcttaatattanactattaaccattaaccatataccatatattgctnttctgacatgttcttccttttaggctgctaagttcaatgtggaagccacagagcgcgggattgtttacatcgacgaagttgataaactcataaagaaggtcattgaacaaattagttttgaactacttccgtgcctagcgaatgtttctgcacttgcaataattggatacattcccacatccaggttgaatgcaatgaggacaggagggatgtctctggagagggtgtccagcatgctttgttaaaaatatttgaaggaacagtaagtgcatatattaatcttttgctctcgtaagaaatttatctttgtatttttcatacttggtaattacactagcccttctgaagagagtgagatctgattaacaacacatgtaagtatatgtcaattaatgcatgtgtgactgatgctgaccat

SEQ ID NO: 41412 - DNA, 274 bp, Oryza sativa
gacgcatgagctaaagactatatgagcagaacttctccacacgaatgtacgcgatgcgccagcgtcaaactcagccgcggacagacaaagaggcagcaacgagaccacaccgaacgaatatgaaacacggcgcatagaccgcacatctcgagctcccgcacggaagggcgtgctgcgcagcgacaatactccgagcaacgcgcgctcgaacacaggacaatccacatggaccgtctactattggcttgcacccaacccagcggaagcgagcgaa

SEQ ID NO: 41413 - DNA, 353 bp, Oryza sativa
atggcctgacaggcatagacgccatgctcctgtatcaccagacaagtcatgtccagttcgttgatagacacaacatacaagcctgacatgaaacggcactgaacgccacagtgacctccatgagcttgccctacctaactggtgggactttagaatcttcactatgcgtgcatacaccttctgaatgaggaaaagactgaatgctatcttctcaatctacttaccaataacttcaagagtgaactctgtaactatctctttcaaatcacacctggaagcctgaatggccatgatgccaatcgtgatgcgacgaatatgggcacattgcaatcgcagacagcaaatataacatg

SEQ ID NO: 41414 - DNA, 455 bp, Oryza sativa
  unsure (1)..(455): unsure at all n locations
agcttaagataccaatgcgagttcatacttttggangtggcatgaccacaactcaccactgcccatctgtgatagttgaaattcaagggttgatttttccagccaacctcattcttctcgaatccaaggatctagatgttattctgggaatggattggctgacaaggcacagaggagtgattgattgcgctagccgcactatcaagttgaccaatgcgaaaggagaagttgtaaccttccaatctctagtgtcgcagaagccagggatcagtttaaaccagactgctggtgaagaacaagaggtagcagtggagaaaaccactaagaagttggaggatattcccatagtcagagagtatccaaaggtttttccggatgatcccacaacaatgccaccaaaaagggatatcgagttccggattgacttggtaccttggactgcaccgatccacaag

SEQ ID NO: 41415 - DNA, 475 bp, Oryza sativa
taacctcttgcctacctttactatcagcaattctatacttttcagtcatcttttcaatggtgagcttgggtgactcatgcattttcaaaataaattcagcgcgtgccttagcatcattatgaaccctctcactagtaggtaaaggcaaaatatcaataggagcattaaggttgaaaccatacactacctgaaaaggacttaacttggtagtagaatgtgttgcccgactctatgcaagctccacatgaggcaaacattcttcccacatcatcaatttattcttcaaaatagccctcaacatggtacccacagtgcggttgattacctccgtttgtccatctcgttgtcggtgacatgttgtagaaaacaatagctttgtacccaacttggtccatagcgtgcaccacaaatgacttaagaagtttgcatcacgatctgaaacatagtagaaggctatcatgcaagcgacaatctc

SEQ ID NO: 41416 - DNA, 448 bp, Oryza sativa
  unsure (1)..(448): unsure at all n locations
agcttagtgggcaacttcatcttctcaagtattggtgtcacttgacgaattactggaagaggaactcttggaagaagactatcgaagtagtactacaccaagaaaagacaaacagcaggttaatcaattataagaaagagcatcggaaatagttgctagtcaaaatttgcagtcagaggattcaattcatttctgataaatggataatgaaaatcagcaagcaacaaagcttaaagcaaatttatggagtactaccaatctggggggaagtaaggagaataaaaactactaacaagctatgttgtggaactatgacttgcctggccaagaatgtccagttagttggcaaagtttctgaacatacaccaaatagaattagatntaaaatatgttcacaaacattngaacaaatgaaatgaacttatgtgaatcaccataacatggagat

SEQ ID NO: 41417 - DNA, 385 bp, Oryza sativa
  unsure (1)..(385): unsure at all n locations
tcttcctgaaataatagtggtcaccatatgcatatacagtatgtctctgtggattggtggattctgtcatcaccttgaggaatacttgtctcacaggacttgatgatnacagccatgaatcaataaatgagacctgaaccatagattttttttccctttcagttgcagccatgtgtaatgtacataaatttcctcagcaatatcaaaagttctaaatttaaaattgccaagtattagcatggtcggcttgtcgtggtattccatcacaaattacaatattagtacagggttccttttgtgtgacagttaacacgaattaattgtatagtgtaaacatgggcatagatcgaatatttgaattgcataaaaaatgaactcggaatac

SEQ ID NO: 41418 - DNA, 437 bp, Oryza sativa
agcttgctcgcattattaatttgattccttacagcaatccatattttatgttcttcagaagtatgaagttgtattgatatatggtaaatggtgcaatttctcgttcactgaatgaataagctttatcttttttttctgaaataaggttagggtcgtcttgctggcttgatcacactagaggcagaagacagcaatgctcctctcgatgctcttcagagagtcgggaaatctattgcaatgcacatcgttgcgacaaagccgttgtttttatcaaaagaactggtctctgcttcagctgttgaaaatgagagggacatactccggactcaggtacgttattctgataaatgttacttcctttgcaccggagaaatttagcatcactgtaattctatatgactagcttacaatcgaagaaatgggcgtgtgctttacat

SEQ ID NO: 41419 - DNA, 314 bp, Oryza sativa
ttatgagaagcttagggacattctctaaccgcgccggccttttgagctggttaaccaaggaaggaatccgttgcaacagacgaatatgtgttaggtgagcgatcgccaatccaaaggacctgccaatgcaggtactaatacaattgcaacttgatactgtccaagagctttagtctttatgatagagggccaatctaacagcctttttatctcttcagacacccattggactgatcggactcaaaagacagtctgtgacaaaagacatttgtctgttactttcgacctgttaacacattggaaactccctaatg

SEQ ID NO: 41420 - DNA, 488 bp, Oryza sativa
  unsure (1)..(488): unsure at all n locations
tctcacagtcacctgcggcatgcaagctntctcaagtttggcttggctgtcttatcatagcccacacactcaaacacacgcaggtgttcgacagtgggtcggcgaccataccacgcttcatacggcgtcaccccatcaagactcttcattggtgatttgctcaagacatagacggctgcaaccaccgcctctccccagaaatatgccagcatgtttgccgccttcagcatggacctagctgctgccaccacagtctgattgcgccgctccacgacactgttctgctgccgtgagtagggtgcagtgatttaacgtttcacccctgtgtccgcgtagtactccatgaactctatagaggtgaattcacccccgcgatcagtgcgcagcgccatgagcttccgattgctatccttctccacgccggcttaatcgctgccgatgcttcgtgtttggcagagaggagtcgtatccacatgtgatgactcatg

SEQ ID NO: 41421 - DNA, 488 bp, Oryza sativa
  unsure (1)..(488): unsure at all n locations
agcttgctctcttcaattcagtagcaaagacatggagattaattatgccacaatatcagttcaccaaagaagcccacatccgtgaggttacagtgttacacaacaaaacagcatttgtggagcaaaaaatttgcattttgttttccttcaaatagccattgtcaaaacataaatgaccaactgtccaactctaactgctataccaaaccaaccatcacaagctataatttgcacatcttgacccttgtccacacctggaagattgtacagatgccattgtcgaaatgatggaagagaaatatgaggttaacttaatgacaccacaacttgctacatcgaattaaccaaatacacatggagggtaactatntcagttatcaaactagaaattaaaaattngcacgaagtggtccatatgttatacctaattagttgatagttccaaccccattgggtaagggaaatccctctgtacctntatataaagg

SEQ ID NO: 41422 - DNA, 460 bp, Oryza sativa
agcttagcctcacttttgtctaaaacgacatgtattatcttctcggagagagtattatttagcagttcgaaaagtgtgcgcgaagaaacaagggaggaggggatgggaactctcagttccaaacgtagcctaaggtcctatttgaatcgcagggttaaaaatggaggaataggaaaaaacgtatgactctaataggaatgcaaacgtaaaacaaatgattgtaaaacatagggaaaaaatgaccgtttgattagatcgcagaaaaaacacaggaaacggaagagagatggactcaaaagataaattctccaagagattacagatcttgctaagttttctctaaaatttatatgcaataatccattccaaagaaatttcataggatttagcatacttcaatcctttgaatcaaatggtgatataggaagaattaaatcctataaaattactacataaaatc

SEQ ID NO: 41423 - DNA, 451 bp, Oryza sativa
  unsure (1)..(451): unsure at all n locations
agcttcactccctctatagcatttgaaacaatcatcaattattttcggncaatgaaaccccactctcctaagcaactaatttatcttacgggccgattgatgaatctcacaaatcccttcatgcactactctcctagcaactttagatatctaagtaatactccatctatttttcggcgatataatatttgagcgcttgccgccgaatcttccgatcaatcttaagtgtagtatctttcaaatatctaatcaaaggaattctccaagctatttctaactcatgggcacaaatatccgaattcacaattaattcggcattataatcaattgtaacgtgcacccaactctctgcccgggatcggtcagaccggccatgcaatgccggacagaccgccctgtctacctggtcagaccggccaagcagagccggtcagaccactagtccaccact

SEQ ID NO: 41424 - DNA, 285 bp, Oryza sativa
  unsure (1)..(285): unsure at all n locations
agagaaaaggaaagctactagagccatacccgaactcttccgaatgcttccggactcctgatttctattctaattctattccaccagctagatactactaaactaaacttgagaggaatgatagagctcttgcttgaggtgtgtgttgaagtgaagagagtaagctctntatatagaggtaggtatgacggttatggaaggggaattgtccgaagtaccctccaaccgtcattggggtgaaatcttggacgtccatgccaaaccctggcctcaacggtggagatg

SEQ ID NO: 41425 - DNA, 461 bp, Oryza sativa
  unsure (1)..(461): unsure at all n locations
agctngcaccatgtgttgaactttgccattgaaaatgctactactattcaccattcagcaacagtctcgtcgtttacatgccccatcatggcctgtgctattttcattctaaaataaacaaacttagggcctgtttagattgtagccaaaataaaccaaaaatttggtaagatgataatattgtcaaaattttggcaggatttcttatgcattgaccaaatttgacaacaaactaaatgtaaatattttttttgacaactttactaaaaaatgatatatttgaaaatggcattaaagtgaacatacacttaatatacgacataacatatcctatctcctgttcaaattcgtatctaggatgtattatatttcgtattagatttgtttattctgaagaaagtgagtatgaacatgcaacagtccatggacagatgtgcagcgatctttatctgatgatgtga

SEQ ID NO: 41426 - DNA, 456 bp, Oryza sativa
  unsure (1)..(456): unsure at all n locations
attttatgagggtntccttgatcgtgttggttggaatacttgatcatgagaaaaggagggctattggttttggaccacgcttggaggacagagagttcgttcgaacagattgtgagtcagtatcaagaagttaagaagctggagtaaactggtaggatctgcgaagttgctcgttccaaagttgattttgtttcggcccggcgatagacgttcattttggtttgagatgggcacccaagaaacactttgtttttgttcggagtgtgattactgtttgatttactgtagagctgagctgcatgaagttgaaacaagttcagttcatgttntacttgaaaagaaaaggttcatattcttatatgaagatcagtttcattatcactccaagtggagttgttcttcgatttatcttatcacctttgtccnctgctgagaaaagaaagttcgcttttttag

SEQ ID NO: 41427 - DNA, 477 bp, Oryza sativa
  unsure (1)..(477): unsure at all n locations
cacctgcngcatgcaagctttgtatggtttgaaacaagctcctatggcatgatatgataagcttaataaccttttgcttgcgaaaggttntataatgggaaaggttgacaaaacgctntttgttcttaagcatggtgataatcaactgttcgttcagatttatgtggatgatatcatctttggntgtttgactcacgctttggttgtagattttgctgagactatgcgcacggaatttgagatgagcatgatggatgagttatcgtactttttgggattgcaaattaagcaaacacctcaaggtacttttgtgcatcaaacgaagtatacgaatgatcntttgagacggttcaagatggagaattgcaagcaaatttctacacctattggntctacagctgtgttggatcctgatgaagatgaagctggtgatcaaaaggagtattgaagtatgactggatctttgttgatctaact

SEQ ID NO: 41428 - DNA, 356 bp, Oryza sativa
  unsure (1)..(356): unsure at all n locations
gcgacatctacgaggaggagaggaggactcgagctcaccggaaagagtgaggagaaagagtggggcgactgcggcggggtgccttgccaccagcccggctgagtaccgtcgtcacctccctagaagcggtgtagccggcattgccgcgccgctcggggccttaaccgagcgcttgccccaccgcaccggcgccgaggatgtctccttgcttgaggacgccatgcgacgactatgaacagcgcctcgttgaaggccggtgcaccagcttgatcatcccgggcgcgttcttcacgcggatctaggcgcagcatccatctctgncacgggagcaagccggcattcacaatcggtgatat

SEQ ID NO: 41429 - DNA, 443 bp, Oryza sativa
  unsure (1)..(443): unsure at all n locations
agcttgctcacttaccgatctttgtggttgtagttcgatttgtgaacgcctaanaaggcctatgtttatgtgaggatttgatccttctatgtggcatgaggtaaccctgtgtcggcttgtgaaaggctttgttgcgaacctccgataccgacgggtgttcggaataagttcgtatcttgtgggtaaagtgtacccctctgcagaggataactaactgttcgaacagccgtgcccacggtcatgggcggatgtgaggtggttcccgttgcgtagatttgttcgcctgtgctctgtgaaaagttgttgtggtgtgggaatcgcaaccagaatcagcctatgtgacagatggatgacctgagtggtcagatacgaatctgtgtgatccgggatgtctgacggcatcatagactatgctttcctagtagaagcggattgctgtgctg

SEQ ID NO: 41430 - DNA, 238 bp, Oryza sativa
atgggctcgagctggctcgcgggcctggcaatcaagaaatctcaagcagggctaagagaaatggagcaacattttactacatagaatggataataaagtgatatatttctttaatacgtcatcacaacacataaatagataatatgggaatcaaaattatcattttcaacaactaaattgtctgaaaaggttgtaaacttttgcatatgacactattgtactgagccaagcgagctca

SEQ ID NO: 41431 - DNA, 458 bp, Oryza sativa
  unsure (1)..(458): unsure at all n locations
agcttgtgcatttgaattcctcattccaaagatcattccanatgaggacagttgagcctgactgtattgtgcacttggctatacccctgaagacatctgtcagaacaataatatccctccaccaaaaagatcctttattcatgattaaatgtgggacttttgaagtataatatgattctgaaatcaatttaacccatggcaaatctgcagctttgtaaaactttacaaggtgcttcaagaggagggcagtgttttgcactctcaagtttcttataaaaattgataaccaaagtttaaagtttgacaacttgcaaataacattattaccattcgccttatttaaaaacaattatgtaactattttntaaatatataacaccgttgactttntatatacgtttagccattcgccttatttaanaacaattatgtaactataatttattntattatgacat

SEQ ID NO: 41432 - DNA, 441 bp, Oryza sativa
gctaggatctcgccgacccacttctgcttgtcatggccttcttttatactctaaggggataccacatgtgctgcgagtgctacctagagagaagggaaaatattctctataataattacatgtcttgtgccttagcccagaagctatctacacatcggttgctgcgcggggcccatcaaatcatgcagggcatccttgtcattcgctatttaatggatgaggacttctgggttctcgttcacaccaaataaggggaactcgggtcagttcagagtggttggaccagctctaaccggggtaagaggctgtgaagcccctcatcattatgatgggacgggacagagcacgccactcgccgcctgacacactgatagggcgcgggtacacagtcgccgtcccatctgtcattcaaccgtcacagacctgtcagatgcgcagcac

SEQ ID NO: 41433 - DNA, 435 bp, Oryza sativa
  unsure (1)..(435): unsure at all n locations
agcttgaaagtgtgtgtgagagtgaatgatgtgatgtccttatataggtaggtatgacggttatcctctatgcgaattgtctgaattgccccataaccgtcatcagggagtaatctgggacgtccatgccaaaccccagcctgaatggctgagatgctgattcggccgaacctgngctgggccctcctggcttggccttcggcctgtggactccctctgttctgccttatccatttctgtgaattttgggctgattctctggtattttgatgaagttcacaacccattcttgtatggatacatgtttctccctcactttggtctaattttcctcccaactcctaggtttattacctgcatcaaataaacaccaacacttgtggaatatgtgagaattaatacctatcactatgttggatgtnttattatctagac

SEQ ID NO: 41434 - DNA, 423 bp, Oryza sativa
  unsure (1)..(423): unsure at all n locations
tggtcatggccctgaactgcttcatcctgctgataactgttatgtcaagtggcttgcctggggcttctccatcctctctaatccatgggtggactgtatatttaaagtattatgcgcattaactatatttgcaaacagtaaaaatgataactcggtttatatagaaacaagagcagaaattatctattaaaaagacccgaatactctntaaaaaaaaatgggacagtataagtgagcgtcttcgctctgagatactacagtaactactagctacaggtcaaggcttttgcatgaaaaagtacaatacgaagaaaccagaagaattgtttgatctcaatttgctactgaactactagacaagcgtgcatttttctgttgataagaatgccattaaagagctatggtggacttactcaaaatttc

SEQ ID NO: 41435 - DNA, 451 bp, Oryza sativa
agcttggctccaataaagaccacaagatatgccgatagctccccaccacttgtcaagggccagaagcgtgaacgaggcaaggggaatgtctgggagttggcgccggagccaaaaaggggcaaggctgcgacgtcgatgccggtgagcaaatcggggaaggtcgtgagggcgccagcgcaatttgagctatgcatgccattggtggaggacaatgtgttagctgtgatgggtattgcttgccgagagctacataagcaatacatggagctaagcaatgccaagcggaaaatgagggagtcatccatagttggacatcacgaccaccagccgttcctatcgtcgcctgcctatataactataggctttgatgacctcttcgatcttttcacgatccggagagtggacactggtcttctaaaatgctactccttgtaagtgcataccttctata

SEQ ID NO: 41436 - DNA, 418 bp, Oryza sativa
  unsure (1)..(418): unsure at all n locations
ttataaattagtgagtataactntgtactaagagagttgtatgggtaagctattaaagtgattgtatatggcgtgtcaatctttcagctagtaactgattatactattaaacttgctctaaggatgtgttctaagtctatgtttccaacatcacctctcttgttttctgtctctcccgccgaccacctctcccctcctttccaagcttgggaagataaagaaagaagaggatgctaacacgtgggccctacttttttcttctcacttacatgtggaccccatattttntttaaattntntgttgactangatgccacgtcagcgaaactagatattcatactactacgagacctaattgcacggttttatataggttagaggtgaagaattatagttatggagagaagctcgacatat

SEQ ID NO: 41437 - DNA, 443 bp, Oryza sativa
  unsure (1)..(443): unsure at all n locations
agctttgagagttagattgtttcctttatctttgtcaggatcagcattcacatggttttcttccttgccatacaattctgtcaacagttgagctgatttggagaagcagtttcatagttatttttacagtggaattcatgagatgaaactatccgatttaataacaattaaacaaaggcatgatgagtctgtgcaagattacattcaaaggtttagggagatgagaaacaggtgttacagtttgtctttgacagattctcagttagccgatttagcttttcaggggttgatagcaccaatcaaagaaaagttttcggctcaagattntgagagtttatctcatcttgcacaaaaggtgactctacatgagcaaaggtttgctgaggcaaagaagaacttcaagaaaatcaatcatgtatatccttacatgtatgaatctgatg

SEQ ID NO: 41438 - DNA, 345 bp, Oryza sativa
gatcgatcgaagttctggtactatgctcacggtggaacgctcaacccagttgatggctccttggtcttcagcgatcagatacgcgaggctgcgaatcgactaacggacgcagtggaagcctcttctcagggcacgttccgacccgacagagagaaggacgagctgtcactcgccctacagactcccgagcattcaggacgaacacgagggaaaggcgtgattccctggaagatgggattcaaggaggacatccacacgtataggagtcggatgaggagcaagagagataccatggcgaagattgcagatcttgagtacagggtatcgagctacgagctcagcatg

SEQ ID NO: 41439 - DNA, 434 bp, Oryza sativa
  unsure (1)..(434): unsure at all n locations
agcttgtgcagttgggtaaggttcttgagatcctccagaatgccatcctcgccgcacgcttggatgttaacaacacccagcgtgtgcaagctggaaagcttcccaatccctctaggtaccttgacgccactatgagagccatgcctgcagtgtaagcccaagcccaactttgagaagcgggatcctggagtagcaatacatggtctgctcatcatcgcaggtgctgctgccatagaagggttctctgctgcttcactagcttgctgatgctntgcggtaccagcacgaacgtactgcagcttctctagcttgatgatgctctttggtagctagattacagatgtatgcctgatatccagagtatggagctgctttagatctcccaaggaatccggcaggcgagtgatttgttgcaccttctcatgagaggaact

SEQ ID NO: 41440 - DNA, 425 bp, Oryza sativa
  unsure (1)..(425): unsure at all n locations
agctngaataagaaaattcagctagagaactaatggggaaaattcacaaagaggaaaaatggggattgaaaagagtcgatttgagttgaatcaggtatcaccaacataagagagggaggcacacggctgggaggcctagctgctgagtctatccccttccaatggcggcaacactagaggactcacagagcagcgacaaagatggaggctcagtgtcggcggaaggcttgaccaccgtggctcgacggggtggcatcgccagcggagccctggaccactgaggcaccgattgcagggcgacgacggagctgcgacgctggtgggagtatgcacaaccagtgcgagacggngtagcggcactggtggaaaccctggaccaccaagatactgattgcggtgacgacngcggcggaagtgcggatgat

SEQ ID NO: 41441 - DNA, 480 bp, Oryza sativa
  unsure (1)..(480): unsure at all n locations
actaagcttggatccagcaggagtgctctgcccatatgcatggtcttctacaacgttctaatgagtggcgatntgacttacttggtgaaggtcattntccttggtaagcagtgcatatatcctgatttaacaatgctgtcactcaagttaaactggccaccgaatacaagcaagcgcactagtttcctcaattcgagactccataagctgcacttagttaaacatgtactacctccgtcccaaaataattgcagccgtggaaatacgtgtccaacgtttgaccgtccgtcttatttgaaaaatttataattntttttaaaaaaattagccacacataaagtactattcataatttatcatctaataataataaaaataataattataananaatttcaaataagacgaacagtcaaacgttggagatgaatagtgcanaactgcacttantttgcgacggangggagtatatattatcat

SEQ ID NO: 41442 - DNA, 463 bp, Oryza sativa
agcttccattgcacacaaagacaagatagcttgtgggatttcttgtgaagtaatgggttcaatccttagccacgcaagtttttccatctaagtacaagcatcttttgatgttctatttaaaaatctcacatgtttttcaaattcattttatttttaaatatggatgtttctttaaatttattttatttttaaacatggaaggaacaaaattatgtatgcagtatttatagcttagttgtttaaatttattttattcttaaatatggaaggaacaaaattatgtatgtggtatttatagattaatagtcggtataaatttacatatttcagttttttttcaccctctatttcgctacataattatgtatgcagtattgttcctcaaaagataacaaaagaaatatgggaagttactggattcgaactcctgtcttatgagatgcagcccttcaccaccaggata

SEQ ID NO: 41443 - DNA, 364 bp, Oryza sativa
  unsure (1)..(364): unsure at all n locations
gtcttaacatgggaaactttntgngaaccatctaactgatgttagtatatggtcgaggctaatttctagaacagaagctagggttaacgcaaattccagaaatatagtgaggatgtgcgtaacggatgcggtggaagcagcatgaagaacgctcgctcgcgctatggatgaagatcggcgcatgcgcatgcggcggcggcggaagatgtgctcaccagtgaccaagatggatgctggcggaagcagcatgaggaacgactgcgcccgccctgctcgctggagggatggatggggatcggcgcaagcggcggtggcggatgatgtgactgctcacctggatggatgcggtggaagcatgcaggac

SEQ ID NO: 41444 - DNA, 462 bp, Oryza sativa
  unsure (1)..(462): unsure at all n locations
agcttgctggagcaatagntgaagctggaatagaggctgcttaatctaacaaagagctgcccgataacctgtatgagagtgtgcatagcattccaaggtttgaagatacatatcttgctcattatcatgcacatctagttgacaatcctccaactgcaagggtgtntgttacccttgaatttgctcacaaggtcacttgggttgcaagatatattgccaccacttttaatgggtgaactgtgctgtgatggttgtgtgatgctgttggtagttgccctgtgttcaaccttcttttgcatactcagacaatgaactatgagtattgagtgtgatggtagctgttatatggtagtaggcatgcattcaacctttctttgcatactcagacattaaactatgagtattaagtgtgatggtatntggtagatggtaataagcttgtgttagcctacttttgcccta

SEQ ID NO: 41445 - DNA, 450 bp, Oryza sativa
tccttctgattgctggttgaagcggatgacggtcttctgcttggtatcgccctccggaggttgattgcccttggctcggcctggagtacgtcggtgagagacacaacttcttccatctacgacaattctttgctgaggctgtcgatgcagagaatggttgctaagatttattgccgagtcatgtgcagcaggaggagcattggtgcattgattctgctatgggttctgattaacacgaggccttacgggtactgcgtttgctccagtgaccacaatacgattggaatgtctgcttcgtgtaaatcggcggcaatgtggaggtcgattttgccttgtgtggagacagttattggagtattgcccttcctcactgcagttgtaactaacaataactttcttccactcggttcttcatctagtacttgagtactcagctgctgtattgaactt

SEQ ID NO: 41446 - DNA, 407 bp, Oryza sativa
agcttagatatcgctcatgggcgataagatgcatgacacttattcttgcacttgagcgaccaaaagatgccatactgatgctagcatatggtgtgaatgataaatgcctaagcataagcttaatggaaccgtcatgcatcagatatctgtgtaactgctcattgtactaaaagaacaacagatgtgaaaaaaaggagtacctactcctagggaacagacttgacgaccatgacgaataccatgagagccaaataatgggagccgaatgctcgccaactagattgacgacgagaacgtaccccgaatagttgatagagaagaacttagcaacaaggcttcaatggaacttgacaaattctatatgatcgttttgagctcaagctaacttgagacataatgatgcatgc

SEQ ID NO: 41447 - DNA, 446 bp, Oryza sativa
agcttcatgcccggtagacaagcgttgaatgttttcacttagggtattaatagctccaagtaccgggttgaagtactcgtttggttgcattccaaagtacgcatactgaggatgaaagaaggcatttggattatacccaggaggaggaggaggtgctgagcttgagctatctccaggatgagaggagggcgccgccctatgagcatggggagctccaagctgaaggcggcgcttgtactgcttgtgcttcttcaaattctgcccagtagcccccagcttgtcttgaatcaacctcatgatgtaaggggcataatagattccctgagtgaaggtccccttggagatggcaatctcttgcgtatgagagtcacaatgtccaattgaccggcctgaatgatggcatctatgacgtgccaagccaccctcctaatgtcatcattgttgcc

SEQ ID NO: 41448 - DNA, 429 bp, Oryza sativa
actctgacacttggcatgccgttcgctagtagacacgccagtgtacacactgactatccggatggtagagatcagagcataatgacgtcttgtcaggtcgatccacctctattttgacgtacgtgagacgcgagccgttccgagccatggtaactacctgaacgtatccggacttgcgctctgtcaatacagcaagatggagcaaagactctccatcgggaccctgctcatcatccacagcctctagtgaaaagaggtaaacatctgctagcaagatgtagacgagtctggcatctctatctgtgccgagatagacagctaaatgtgtgatctttgacatgcatatgatcgaagtcatccttgtagacgtcacactagatgctgaacttatttaaccctatttccttgaggcggcggacaacatgattt

SEQ ID NO: 41449 - DNA, 423 bp, Oryza sativa
  unsure (1)..(423): unsure at all n locations
agcttcggcatgtacccagactgtataacttggntgctgacgaactctcacggctcgcgttctcgcgagcccagaccccaccgggcgcctttgaagaaaggcttacccagccgtctgcgcgacccgaccccttatgggagacggatgcgcctgatcggcccccgaggcccgtcggagtccaggcctctggacccgaagggagcgctccaagctcccttagattgattgcatggatctctgagatccaagcatacctcacagataagactctacctgaggaccgcgaagggagtgaacgcgttcaacgcattttcaaacgctatgtgctggtagaatggaccctctatcggcgcgcggataacggaatccttctgaaatgcattcctcaggaacaaggcgttgagcttcttgccgatatccatg

SEQ ID NO: 41450 - DNA, 453 bp, Oryza sativa
  unsure (1)..(453): unsure at all n locations
ggccaactgctactgggttcgccttctttcttangacgagatgaccaggcatgagctccgtgggtcgaacttttttgttgtaagttgccgaagtgcttgcggcgtacttgtgcatgtgctcgagcgctttgactcttacttgcttccaagagttcgagcgatacttcgcgtccttcgcccccgagaaacatcacccttggtgagttagcccctagctctgctggggttattgcctcatcgccataaagaagcataaacgggctaaacttggttggtcttgtggtggtcgtctgaagggcccagagaaccgatagcaattcctctggccatttgcctttcgccgccccctcaagtcttttcttcagcgcttctaggatcttgccatttgtgcgttcaggcgccccatttgactgcgggtgtgcgaccgactcgagcttgaattccaggtcaaac

SEQ ID NO: 41451 - DNA, 425 bp, Oryza sativa
  unsure (1)..(425): unsure at all n locations
agcttgctcacttaccgagcaacgaggttgtagttagatttgttaacgcctaanacggcctatggttatgtgaggatttgatccttctatgcggcatgaggtaaccctgagtcggcttgcgaaaggctttgctgcgaacctccgataccgacgggtgttcggaataagttcgtatcttgtgggtaaagtgtacccctgtgcagaggttaactaactgtacgaacagccgtgcccacggtcatgggcggatgtgaggtggttcccgttgcgtagattggtctgcctgtgctttgtgaaaagttgttgtggtgtgggaatcgtaaccagaatcagcctatgtgacagatggatgacctgagtggtcagaaacgaatctgtgtgaatcaggatgtctgacggcatcatatactacgcttccctagtag

SEQ ID NO: 41452 - DNA, 295 bp, Oryza sativa
ctcgctacatataacgagctaaaactgcagcttggctcggttcagttatgggctctagctggctcttgggcctggcatcaagtatatctcaagccggtctaagagaaatggtgccactatctactacatagaatggataatatagtgatatttatctttgatacgtcatcacaacacataaatagattatatgcgaatcaaaattatcatcttcaacaaatatattgtttgatgaggtgtcaaacttttgcatatgacactattgtactgagccaagcgagcttacgagcggctc

SEQ ID NO: 41453 - DNA, 362 bp, Oryza sativa
  unsure (1)..(362): unsure at all n locations
agcttgagcagacgctagcgtgacgatgatttctagctgtaaacacggtgatcgctgcgtgcttgagtaacaagctatcgcgctaaagtctcacactacataactaacggcttcatatgcactccagccggaggcgagcgatgaaggatctagatcgaactaactgagccttgctggatgttcgctcttcactcagcagagaatggcatgcccgtttaataatgaatgggtcaactggaacgacgagcagacgatcggatacccaatcacgcataatgtttgacagtcaacgcttctacgactatcggtcgtacggcttgaatagctccacaaagctcacctgcctgaccattaangactcc

SEQ ID NO: 41454 - DNA, 450 bp, Oryza sativa
  unsure (1)..(450): unsure at all n locations
agcttaaggctgggtttgacacattgagtttgtgctaancctttatgcatacaaaatggggtgactcattagcacatgattaattaagtattatctattttataaaaaattaatggattaataggattcttaaaagcaacttccctattttttttgaaaaaaatgcacggtttagatttggtaagcatgcgaccagaaaactaagtagtgaagttggaaaagtacacattctcaacacaacctaaggtgagctcccaaaattactaaagtcacaacacttagtgcttattggctcacttattggtatatttttggtgtctataactctatacagagaaatctcttataagataatacatctatatgtacgagttacaatagataatatttaattaataatatgtattgacttacatatcatttttttctacatctaactagctaatccta

SEQ ID NO: 41455 - DNA, 432 bp, Oryza sativa
  unsure (1)..(432): unsure at all n locations
tcagtctcaattgtattctcctgcaacatgtataatatgccttatgaaggtgaatctgtacacaagcgatatgttggtctgcatgcccagtactgcgatgtttaaagcctgaccatgcatgatcaggctgattgaaacatctgagttggtggcacacggaattttactttctttccatctttgtgtgcccgtgtatctattggatagaagcacaatacctctgtgcatgcgctatcgtatttattggacaataccattgtgcattcgctatctggaagattgtgcaagagctctgttctccatatggnctataaatatggtatttgtgtaatggtgatcaccatattgaacatataatctctgttagtctacctttaatgacaggataaggctacttancctgtgaacaaatatttgatagttatgagctat

SEQ ID NO: 41456 - DNA, 444 bp, Oryza sativa
  unsure (1)..(444): unsure at all n locations
agctgtattattgaaccagacttaacaacttgcgataaaaccatagacagataaagcgcctaaactataagacaagtaagcttctccagaccatacaaatgcacggcgagcccatgcgaagggtttggttaagatatgccaaattccgccaaatacacaaatgaaacccaaccatacatgtcccccaattatatcttctaaatcatccacactaacaatccaaccctctcccccaaaaggggattttagtaaataaccaaatataacaccggggctaagggtcaaattggtaatttttcttacatctcctcccncaggagcccaggtatcatatataccgccaaaataaagagctttgagtactagaagaaaagcacctatacctaacaaaattaggtgaatacccaaaattgtagtcattttatttctatctctccacacata

SEQ ID NO: 41457 - DNA, 250 bp, Oryza sativa
agcttcactactcttgatcatcatcaacatttctatcctagctcaaagttgaaactcatcgggagccccagaagagatctaaaacaacggccattgtcctggctaagaatggtgtaagctttcagcatatcgtcgccgccagccatgtcctgtatgctgtatcccttcaatcgccatgaaaatctctccaggaccaggacgatcttcggctcagcggtgtcgcttgttcgcggctcgccggtggcgacgg

SEQ ID NO: 41458 - DNA, 409 bp, Oryza sativa
gaccttagatactcaccttctctactgaagatgtgaatgattgagcatgaatgattctaccaccgtactcatcatgccacacctgcggatgcatatataatgcaagggaggtacaagggaataataatatagggattaagttttgtatttaacagcatttataatgcacttatttgcccaatagcattttgtaaagacgaacctacagctactcagtattattaaacaaggtcgtgaaccatcactaacctgccttaatccaatgcctactatgatttgtaccgatctggctaccttacctgtgtcccagcttgttccaagccatcctagtccaaccattccatattatagtcgttgagcaaactataagatataaaacactgacttggtacattgaaggcttgccata

SEQ ID NO: 41459 - DNA, 480 bp, Oryza sativa
  unsure (1)..(480): unsure at all n locations
ttacagtcacctgcggcatcaagctttaggtatcggtgagccattgagcatcaatatgtccatattngagtttccattgaggaagctcaccttctctgacctacatcaggccaccaatggctnttgtgcggagacactcattgggtcaggagggtttggtgaggtttacaaggccaaactcaaggatggtaacattgtggctgtcaagaagctgatgcatttcacaggccanggtgaccgggagttcaccgcagagatggagaccattggcaagatcaagcatcgcaaccttgttccattgctatgttactgcaagattggtgatgagcggctccttgtttacgagtatatgaagaatggcagcttagatttcgtcctacatgacaagggtgaggctaatatggatctcaattgggcaacaaggaaaaagatcgcaatacgctcggccagggggctagcattcctccaccacagctgtgt

SEQ ID NO: 41460 - DNA, 464 bp, Oryza sativa
  unsure (1)..(464): unsure at all n locations
tatagatcggtggagaggaagaagtgagaaagcaagactcatagtgaatctcatatcaacacatgataagcaatggagccaactagcttgaggttggagggtaaggacggcaattntacccacgggtctgggtatccacgggtatctgtggatacatggcccgatgggcacgggcatgggtgtaatattttgcccgtggccacgcccactcgagacctgagaacgtagcagacagttgtcgagtattattttttacccgtaggtaactcatgcccgacccggtacctatgtattagctaatttttgcctacctagccatctcttaattctcacaccctntctcttggctcatttggctcgttaactagggacacatatatactcaactaataaaccctaacctaattcctcattcccctctcctacccgcatacccacagcggaggccggcagtggcactgatg

SEQ ID NO: 41461 - DNA, 433 bp, Oryza sativa
agcttggggagtttgttgatggtcgttagctatcagtttcttctgtcaatattaccaaaatagagaactagttatgcttgcattgcttatttgtgttagaaataataatattccactagtattaggtttactaacctattgcagagaataaccacaaagtggaggagaagcgacatcaaaccatacgataaatcaatcggacgacgttgagaatcagacttatgcatgaatgggccaagaactcataattgacacaatgaactgggccaaaattcacaaagtctacatatgagagcagtagaggagtccacctgttgattttgggccaggccagcccagcccatggttcgcccgaactattgtgtttagccgaacccaccgcggcaccacttgatccaaggttctcctggacggctgagattgactccctatg

SEQ ID NO: 41462 - DNA, 414 bp, Oryza sativa
  unsure (1)..(414): unsure at all n locations
tgtgaatggctgataacagaatgtagatggaggtatgtttttgggacaaaattngaatactagaagctgtatattctgggatagagggagtagttatttggctttttattggtcccagtataacaggagtaacacaaggactcaagcctcttaacccttgtacggttttaccactgtcttactaaacatttcaatcaattgatgtctttagattattaagaatgtttctaatgcaaaattgatggtgtattaagctagatatatgttggctttctgaattctgttttgtaagtcttgtgcagtcaacatatgctttaacaatttcttcagaaggtggacagcacaaattctgttgtttctagcaatatgctcatcagatctgatattacttctaatgaacttaaccagccccct

SEQ ID NO: 41463 - DNA, 98 bp, Oryza sativa
ctgccgcatgcaagcttctcaccgtggaagccaaggcaggcttattccagtctgctgacgcgtttatcacgccaccctcatctctctctctatctctc

SEQ ID NO: 41464 - DNA, 445 bp, Oryza sativa
  unsure (1)..(445): unsure at all n locations
tagactcatcacaagtctacaagctagataaacatatctactcttcnacaacttcaattagatacaacagggggacatgaacgaatatggaggatattggattttatcacctcgagcaccagcttcttactggacatttcgcaaacatgtggcttgccctacattcccatcttccttggcccttgcatcaagagttggcaagaaaaattcaaaaaaaaacaaacaaatagaaagctgatacggtgctgaacggtgttggctgcagctgaaataagcaggaggtgctggtgttgatgcacagtggcggcacaagtcatggacgccggacagcctggcggacagatcatggctgagcctacttgcctgcatcgcggagtcaagctgaaccattggggctgacacaatagacacatactcctcttctacgccgttggtgaggagtttt

SEQ ID NO: 41465 - DNA, 467 bp, Oryza sativa
  unsure (1)..(467): unsure at all n locations
cccagcttctcttgccacccacagtcccacaccgtccgtcctcttttatctcatggccaaggtggcgccatctccaccccatcatggccaccaccagcccaccgtagcgccggccaaccctctatctggtggtgctaccaccttttttcgtcgtcggagaagacgctagtattagacagtgctggaatatattgatagaatagggaaagaaaaaaaaacgattttgctagatatttgtcattaaatttcttctcccgatatttgtcgttttttttggtagtccgatatactttaagatgcgtgcacggtttggtttggatcaggacgcgtgggagtcaaaacctggtctcctcggtctcgtggcgctgttaaatttcgaattccacgccatgtccgtagccgtttnttttttcttacttatcgctttctccctcgtgtctccgcgcgcgctctctctttcgttcact

SEQ ID NO: 41466 - DNA, 490 bp, Oryza sativa
  unsure (1)..(490): unsure at all n locations
ctaagcttccagcaagctcaagctcaacatattngaaatctgagcttgtgtganagcttgttaatgagataatatctgtatccaatagaaataaaatccatgataaaaaggaggaaaaccacaatttaaatnttaaaattagcaaacaagaaaaatgctatgaaagatattttacactcctacatactatnttattatgcagataaatactagttntgtacctaatcttatagtttatttgcatcacacaaccaagctcatgaacttttgcatatatatgctcatcctagctcatttggagccttagccacgcccacatgagctaagctcgaggacatcacgactcacgagccttaaactattatacatgtaacaagcaaaccgacgactaatctagatatatcataagaatccagcttgtccaacttatatataaaaataagccgaccaagagtaaacataatgtttccataaacctcacgccagccac

SEQ ID NO: 41467 - DNA, 446 bp, Oryza sativa
  unsure (1)..(446): unsure at all n locations
atgaatctgaaattcatatttctcgacaaatatataaccaaatatgggttgctgcagaactaacctgcgtgtgccttggtgtgtcaagggcagctgataacctgcactttcgctgaagatagctgcggngactgattgcgcaactgtttatctgtctaccgctctttgagccagccaatggaagtggactataaggagaagatgttaaggcagtcaaaccaagaaaccagcattcagcttgatctctgtctctgcagatctgggccaacgaaatnttcataacatgtggtatgagtagggaaaacatatactataagattgcagctctaactgatttaagatctagtaagaggagtaccaagtctattgagcactcgcccgttttgtatacgagtgacaaggatctgtgattcttctctggcagcgatgacgcagaaaattcatct

SEQ ID NO: 41468 - DNA, 428 bp, Oryza sativa
agcttctgtctgtactcacgaggcataattattactgcaacaagaatcaacaaggttggagtgcaatggttaaatgaaacagtagcaaaatcaatgatactggctggctggacagagaccggaagttccgggccaagaacaccggaatttccggtctgcaaaactgaagaatagaggatttaaccaggccagtgcatgtgacaatcctatagatcgacaatctacaaggtagcatgaacaattctatccaaaatgttttctccctaggctcacatatttagagatcggggcaaaaacatgatgaaccaaaagagaagatcaaaagtgctaccttgagaggggaaatctcatatcgatcgcaggatgaacctcctagccaccaatgtggtaggaatcagatttccacggagaggaatcatatctccacg

SEQ ID NO: 41469 - DNA, 461 bp, Oryza sativa
ttggatacactacttaggcagaggctatatatataacaatattatttgaattataccaccaccttcccaacttattcaggaatcacgaacattccatgtaattctcacacgaatgaaacataacattacaatattaattccatgctgaagattgcagcatactgtcacgattattgtcatcatacccataccacccacatggctggaataaaagcacatctatgtctccaggtgtcacgtttgtcaataccatctcttcacgagaatcaacccaagtacgcccaaatattaagttgttgaccttcgtgagtggtggtaccatattcaccttgacaccggacttcctatgtgacactctagtcctgtgatgcagaaacatacaaccatttaggatatacagagcttgtttattctaatcctcgaacatcacagttgacaaattacctccaagtggtaacttc

SEQ ID NO: 41470 - DNA, 434 bp, Oryza sativa
  unsure (1)..(434): unsure at all n locations
agctngcaccaagataaggaaccttcaatatcaatgtagcatttagctcanactaactatgaaaacttcaatatggaaaaaaacagcaatacagcattgatcagttgcatacccatggcgtccatgctatgctatatatgaatgcctgcagcagcatgcacaagatgacatcaaattattcttgcagaaaattaacaaaaagcacttaacatgagtatgaaagcaagcaatgttagttcttacatgaacgcagccccccaaaagtgctataatcagtagcttctgctcacccaactntggtgctaggataggcatcataactagctgtaccataagtcataatctgctttaggtaccttaggtacaacctaagcaatgtaatgatcataacaggaaaggcactgtagaaattattatgaaacaaacctatacct

SEQ ID NO: 41471 - DNA, 383 bp, Oryza sativa
  unsure (1)..(383): unsure at all n locations
tgaatcgaagtgcgaaggaccgtacctcatcatgcacaagtccaggacggtctcctttcgcctggcgacactggaaggtgaagagttcgaccattcctggaacactgcctctctcaagcgtttctatgtgtagaatgggtggcacccaaatcgccaacttgtaaaaatgtacatattgttatgtaagcctttcggcactatgtaagcccttcggcacaaaaatgcataaaaaacaggaaaatgaaaaaagacaaaaaaaaactggatgtgggctattatccatcccggaggcccgaaccagtataaaatctttgtgtcttttgccttcttattngtatgattgataatttgtggaaaaaccctaaggcatacgcctgatcagc

SEQ ID NO: 41472 - DNA, 433 bp, Oryza sativa
  unsure (1)..(433): unsure at all n locations
agcttatcagcgttgtcattgtgtggatttatcaaaaaacgttggttctgcagtgcataaggacatgctacttgccaggcgtatcggtgggcggaggccatggtgaaaatttgtttgcgagccatgcagcatgatggacaaggagcaacatgtgtcgttgattaacattttagaaagtagtgtagatgtatcttcacatatggatcaacttacccttcgttcccattctaattcagttgatgttagtatttaccttttgctccatttggattggtcgaattcacgatttcatcaaacagtcgattgtgaaatgtgaaccacgaattgttgtgttgattgcaataatgggttcctctcacctgcttcttgcatcagatatttgaacagctgtgttcaagaaccctgtgctcaatgaacacaagcagntgttgag

SEQ ID NO: 41473 - DNA, 363 bp, Oryza sativa
  unsure (1)..(363): unsure at all n locations
acacgcacttatagggttcatctttaagcgggcggagcggagactttctaaagtttccgctagatccgagagtaaggtattntggttgcgcgacttcacaaccaagtcatcaacattggcctctacattgcgtactatctggcttctctaagaaattcgagtagtacgatgaaaagtacgacctgcattctgtaacccgaaaggcattgacttataacaataagttcctatggaggtaatgaatgcagcatattcctcattctccctagccttgcgactctgatgataaccagagtatgcatctagaaaacacaaaaggtcgcaccccgcagtggagttgacaatctgatctattgcgtgcag

SEQ ID NO: 41474 - DNA, 402 bp, Oryza sativa
  unsure (1)..(402): unsure at all n locations
catgcaaccttagctgtcacgtagtatacttttcttattacaaanntataaaatgaacagttcagagcacctatcacgagagcttatctggagccttgaaagaatcttctttaaagggtgttctctaactaattgctacctttaattagtgagcgcccaactatgacataattactcgcaactattctggtgtcttcagatgccaaacaagctccctgtggctgcaatgccttttgtgcatggtcctaaccatgattcctctcattcaaagccagcattcttggctttgcttccttttcttagattctgtgatgaagctaaaggtctgattcatgtgtgttcctaatctgattgatgcaacagggtgcaagccaagggacaagcaagaagtttacgccgttc

SEQ ID NO: 41475 - DNA, 403 bp, Oryza sativa
  unsure (1)..(403): unsure at all n locations
ttgagccgtcaagactgatgacagggtctttctanagctactgtgctgtactnttgcgggcacttcaatccttgatactggtgtgcagtcgatgttctcatacctttccacgcttttggcaatgccaactctctcggcagacaatgaacttcttactggaggagatggagtcttgaacttggcactcaagtataactcccggttgatgacaggtgacttctcgtccagttctctcactgacaatggagagcggaaccttctctgctttccatatgatgagcttctgatctgcaaatggaacaatgtagacatatgttcaaattagatatcttttgaatactgtaatgtaacctgcaagaaactgcttctagtatgtggtacctcgcttgacaaatgtctacac

SEQ ID NO: 41476 - DNA, 387 bp, Oryza sativa
  unsure (1)..(387): unsure at all n locations
agcttggaggagtcaaatagctcatacagtcttgctcaatacttgatatgggcctggtctaccaaagcagtttttctggatgtctctcttgggaagatacatcattntgttcccccacgaaaggctacaacaccctgattaacacaagcaaaagtttcacccaaatacatcctacagaatcattcctcaactcccagagagcaaaaggtataaaagaaccgtttcggtatagtcaagcaagctatctaagcagaatcaatggaacaatgcgaaattccgagcatcataaccaacagtgcgtatggatggctgtcatcagaacctgcggagcccacgatcaaacattcttgcagatgggcactcatatgacatatgaccccttccacc

SEQ ID NO: 41477 - DNA, 348 bp, Oryza sativa
  unsure (1)..(348): unsure at all n locations
ctatatgtgctgagctcctaccctccaatgcgcgccatctttatgttcctctcgccgacgncgacgtgcacctcgcatcgtcgccgtcaccgtcgccgacgaccaaaccagcaacagtgccagcgacagcggctgcttgccaacttcaacaactaaactgttcaacttcttcagctactacttcacttgggttaatttgtacattgctctctgccatggcggcgccggcagccgttcttgccgtgctccggtggcggcagcggcggaggctggttgagctggtcgctcttctgcttcttcttgctcgaggtggcgctgccgcggttaccaattcttgtttccggcttc

SEQ ID NO: 41478 - DNA, 463 bp, Oryza sativa
  unsure (1)..(463): unsure at all n locations
tcacgaatagntcgagaagaaggatttggagcattttggtaaggcaatctggtgacaattgtgcatcgtttaccttattctgccatcagctnttattcatatgagcgctacaaaaaagtaagcagttcgttagcacttaatgcatgaattatgatgaggttctgcattntattatcattagctaaatgatgtgaaatatcattgcagtttctccaaagggttcctggccttgatgaagactcaaattatgttggtgttgctcgtttacttagtggcggtttggcaggaattactgctgcatctgtaacttatcccttggatgttgtccgtactcgtttggcaacacaggtaatgctatcctttntccaaataaaacattgcttattgatgagattaaacatcatctctaatatctccaaaatattaatatttgtatgatgcaggctttcggcttagtgaattt

SEQ ID NO: 41479 - DNA, 385 bp, Oryza sativa
agcttcgtgttggatgtttcggagcccctctcgttgcctcatccggtccccccgtgccgtggtcgtcgtcgcctcacaagatctgccgcagccgccgtggttgtcgtcgctgctccccgccgccgccagatccgccgtcgccgcttcgccgtcttcgctgctccctgccgacggatccgccaccgccgccgccgctttcctgccgtcggttccggcgagcccgcgcctggatccggcaagctcgccgtcgccaagcttgtgtccacgccatcgtgggtggaggaggacggcaacgtcgaggaatcaccgccgcgttgtggtcaccgccgctagatccggtgagcccacgcccggatccggcgagcgcgccgtcttggggggagga

SEQ ID NO: 41480 - DNA, 449 bp, Oryza sativa
  unsure (1)..(449): unsure at all n locations
agctngngtggtcactgctactatagtgagtatagaggttcatgagttgcattaggacaaaactgaataatatctatctggcgtgccctttgagcctcatgcggtctatccttaacctgcaaaatggtggaaaagagcatatcagtttacttgaaggttaccaatagaactgagatgttctcttggaactaaatacccgagacattcagtaagcaaatcatcaaatgaaccaagtaaaataattaagatcgaaagtgaaattaagctcgcatgaatcttagggcctgtttggtacagctccaactcctaaatataactccaggagttgagtctggagtggagttattgagttgccganacccatctccacaactctagtacattttgtgagagagctccacccaacttcactcctagttttggtggagctgaaactgtttggctgagct

SEQ ID NO: 41481 - DNA, 475 bp, Oryza sativa
tacttagcactgcgacgatcgatacgatggatgaagctagtacacatgcacatcagtacacatgtatatatgctagtaattccattaatttgtgcctaaccctgcgtatatatatacaagcaaagctaagctttgcttatgaaacgtacggccaagtgaccactatctgtaagaactctataatgagttgataattcatctaagaagccgcacgtcatcactttactgaccgtggccagtcaaaacacgcacgcccgcatgcatgctgaattgctgatagatcgatactaactatgactctctgagatatcagatatgcttgctgcctcgagcattcacatgaatatacgaattagaaatagactagaccaaaatatgatagaaagataaaagacaggcttatagctcatctattgtactcgtggtatatcagctatgaactatctagagacaaaagtaagaaaaataattatgt

SEQ ID NO: 41482 - DNA, 459 bp, Oryza sativa
  unsure (1)..(459): unsure at all n locations
agctntcattntttaacatattaattgtaattaatatgtttattcgaaatcttaactaaatcaatgataataaaagttgatggctcaaaccaattattggccggctcgtctggtctatatgcatacgctttaatcagaatgtggcacattgtgatttgttttccgccggtaggatatatatataagtatatctgaattgcagcttggactatgattgattntctgaatgccacctgtatccaaatttgctggttgcagattagtgattattgcttccattatcagtttcttgcagaagaaatgatgccgtggatggcgattgacaacttgggcatgtcatctttgtgcctcgcaataattatcagctcgtatatattagtggttgtttactgtcgattgtttcaaatatttgggtagctccttccagatctcatgtttaaatcaccatatggtatttga

SEQ ID NO: 41483 - DNA, 490 bp, Oryza sativa
cttaccaaccgcagtggcattcatatgaacgtgatggcgatggataccatgacttcactatgctccagcaatgactagggaggagaagacagctacaactactcgaagactcatgttcagtggcagcaaataatacagcagcagtgctggtgttcgttcacccgacacagtggtgatgtatacgactgtgtagcatcacggcagctagacgaggtgtctgggcgtgcacgaataaaaaaaaagatagaagaggggcagtgctgctggtcaaggaagtcagagtatagagcatctcagcatgcacaaactaaagataaggatgacagtggcgctggtatatataaagaggatgaaatgggagatgaacagccagtctggagatggagagatggtgaaaacagaactaaccgatgaatggtgatggtgatctagtttttgatattcaatgaagcacaatgttgttgacgtgaaagtgcttactaacatgtca

SEQ ID NO: 41484 - DNA, 491 bp, Oryza sativa
  unsure (1)..(491): unsure at all n locations
atcctcacagtcacctgcngcatgcaagcttgcaataatttcttctctaaacagttgagtggacaaatatcatcacaatgaatataacccaagtatttaaagaagatagcaatttaagctcttcattctcgctagcaatgtgaataacatgtttaaactcaacacatagtggctctactatagaactaacatgctcattcactagttgtggcatggatataagtgaagcatcgcacaactcttctttatcacatgtaacatcaagcaaattgttttgtgacaaaggtatttcaacaatcggttccactatgggttgctctaacgtagcataagtagtggacatagttggcacattataaatatgcataccttgagtagctgtagcaccattatcattaccttttttctcatcttcagaaattatcagcgcttggtcaattgaacattcttcaagcatgcatggagctatagataagactatttcctcttcg

SEQ ID NO: 41485 - DNA, 428 bp, Oryza sativa
tgtgcttcttgtattgccacgcgtattgtggaaacccattcttccatggaacattggagcaaatgccccttgttcgtccacggtgttcttcatttcccaatgctttcgtgaggatgtcattctcgcgttttggtgagcatacctcttgagaggcctgtctctcagcattcagttcgacctgcggtacaattacgacgcgttacacgaacaacaagatatagcataatgaaacttattctatgtgttcaactcactgatttctggtacaccgcttgatcttcgggatttgggaacgaaagagtttcgcctctatatcttctcaccctttgccttgcgcaattcctagcccgcttgaccgggatatcaccaagcactggctgtgtgttagattccgctgcagctacatccttcttgtccattctgcctgt

SEQ ID NO: 41486 - DNA, 463 bp, Oryza sativa
  unsure (1)..(463): unsure at all n locations
agcttcttccaaagcatacggctntctagatgtatatgtttatctctagacagatggatcttatatgaatcgtatgatgaagtaccacatgagtggatatataggaaaggaatccaaatctgccgaatcgctcatgttatgatcttctacatcctaggtctccgcgttccgtcatctggcttatgttcttcatgtagcattcagatcgaatgactctatgaaattacgtcgatacttctacatattatgggtaacgtaggagacatccctattttcccccgggggtcttaattaccactgcttagctttcaattcgcctctgaccatcaaattaaatgtgaataacccgtcctcctctctttgaaacaaggggcgcttccggttctgtgcgtgcttcanacaattntgtcttctccatattaccatatctctagagtcaataattttctatgacgaactactg

SEQ ID NO: 41487 - DNA, 266 bp, Oryza sativa
tttgagagaaaagaagaatctacttcaaccgatatgcccttaggcacggccatacataacatagaaatcacacgtggaaggggtgggctattatctatagcagcaggtgctgtagcgaaactgattgcaaaagaaggtaaatcggccactttaagattaccatctggggaggtccgcttggtattccaaaactgcttatcaacagtccgacaagtgggtaatgttggggtgaaccaaaaaagtttgggtagagtcgggtctaagtg

SEQ ID NO: 41488 - DNA, 431 bp, Oryza sativa
  unsure (1)..(431): unsure at all n locations
agcttagcatcctagtaggagaataccatctaatcatctttttgtctnctctcgatatgtaagtgatatctgcacacgaacgaccacgaacggatttggatgcaggtgaacaacgttgggacgtcgtacctgaagccggcggtggagctgacgctggaggagacgtcgagtttgatggcgaccaacttcgagtcatgctttcacatgagccagctggcgtaccctctcctcaatgcctctgggagggggaacatcatcaacatctcttctgcggctacctccctcgcgttgtcttcccttcccgtatactcgtgagccaaaggttgattgaggacacccggcccactatactattctttctttagcaatgaaagatattatgatcttactcatagagaggtccatacacatatagataggctgtgttgtaa

SEQ ID NO: 41489 - DNA, 296 bp, Oryza sativa
cacgccagaggatcaagaagtcagaacaacaagatgctgtgacgacaacaatagagcataacaaacccagtgcgtgagacaggtgtcatatacccctcgataaaagagcacaacaacggggagaagtgcaaagataccaacaaggacaacaaagtcaccaccaagaaggtcaaccacagcgcagcaagaagccgaagaagccgaagaatctacagcacgaggaacagtcacaaaacccaggcaatgagaacaggcaaacgacagaaaccggatcggtcaccacaaagcaccaagaa

SEQ ID NO: 41490 - DNA, 443 bp, Oryza sativa
  unsure (1)..(443): unsure at all n locations
agcttacgacatgcaacaattaggaaatctccatcttcatcacatttttataactgtgcccatagacgaagcaaatatgttgccttgaaaatgacctacatataagtaactgtaggtgatttgtcaaaaccctatcattcctactcaaccataaagcccaacacaaggcaaaagctccaacaagtatcagtttgctctttttatttacgactctctgacgccaatcataaaaaatatgagatatgctagtaggaatatataaaccaaaagaaaactgaaatactctccaaataaactttgcaaaatgacaatcaatgaacaaatattggatagactcatttttcgtacaaaagcaacatcttaaattaccattccaattccgtcttgctaaattatccttggntagcacaactccattaagcaaataccacataaagatcttg

SEQ ID NO: 41491 - DNA, 503 bp, Oryza sativa
acgcgatactatagaccactcaagccttttcgccgatcagtgcaatgggttccatctccggcatctacgacctcgtcttcccacccgggcagacgtttcggttcggcagcctcgacttcatcaccaacaacttcggcaagatttctctcctcgactcggaatcagaccagtcgggagagaaccggctttcggtcccgtttggattcccgaacgcggctgaaagctatttcaagaccacctcaaccgagtcggcttcaaaccactcggccgagatcgcatcttctccaacgataccagatcaggatgatggggcttacccaccggtcctgatgaagctccccgacgatttagcggccgtcttcaccacgacagcgccttcatcccgtaggcctaggcggaagtcggcttcaacaccgatttcgcctagcttcagggaagtcggcgtcatcctccaaccactccgcacggtttcgacggatcagctggatgactacaacagctct

SEQ ID NO: 41492 - DNA, 372 bp, Oryza sativa
  unsure (1)..(372): unsure at all n locations
aagtcacctgcggcatgcaagcttgcagataccgactattgggtttatttgattcgngaaaactaaaatggcctatatttatatgaggatttgatccttctacgtggcatgaggtaaccctgggtccgcttatgaaaggctctgttgcgaacctccgataccgacgggtgttcagaataagttcttatcttgtgggtaaagtgtacccctctgtcgaggttaactaactgttcaaacagccgtgcccactgacatgggcggatgtgaggtggttcctgttgcgtagatttgtttgcctgtgccttgtgacaagctgttgtgggatgggaatcgtaacccgaatcacctatgtggcagatggatgacctgagt

SEQ ID NO: 41493 - DNA, 392 bp, Oryza sativa
actcaacttgccagaactatgtgcccaaggacttaccagagatttgttgcatcatctgtaaagataatggtgtacatgtggcctctcagaatagagacattatatacttttgataatgactcaaaagaatcgcaaattgaaacccacagaaatgtcatgttattggataagaatagaaaaatggggaaaaatctaacccaagtaactactgctattacatacgatattaaaacaagaatccttatttgctcgctaagtccactacctaagcatgtctaaaaaactatgtttgaaaatacgagaacaaaagggtcatgtggttttttggcgatattagacatggggggttggtcaaagaaactatgaaatcccacatagagttcataaagtga

SEQ ID NO: 41494 - DNA, 453 bp, Oryza sativa
agcttcggcaagagcatggctagcattattttgaaaccggttgaggagttcttgcatccgtcatccgatatataggcgctgtcacgagcatgtccaacaagatcgccgccgagataagccttgcaggcatccagaatgtgcggcgcgcaacaagtgaagtgctccttgacaaaattctcgaaatgctagatcaaggaaaagaaagaactatcagtatacacatcttatttcttaaaggggtgactcttacagctgacttggttatatataagattaaacatactaaactcttgtgagatccagtaattcacatgaagcattacaaactaaagctatagcattcttaattctgaacagcgtttagattttggtttcacaagattccaaacttctttgaactataccaatcattctgaaacatggatgtgtaaaaatgtattttcaaaaattatc

SEQ ID NO: 41495 - DNA, 411 bp, Oryza sativa
  unsure (1)..(411): unsure at all n locations
tcacnnggtagccgcttatgcacccttatgctctagctcatcagctcagctcacgtgttcctctcntcctctcatgcctcaatccaaacccaaaccaaacttgcttagcttgctgcctagagtagcatgatgcacgcagccaattatagttcagtgaaatcacatgaaatgcatgatcccatgtgcatttactctgactcctccgggcaaccatgaacttgcatcgcttggatcaatcatcatccttgggccatggttgattgcgcccgtcagtgaatcctatcctttgctcgccggtccctccctcttcaaaccacttttataactgagctcttactccgtctgctcgctaaaataccaaccgtgacctataataggagggccaattggccatctcgccgaaaagctact

SEQ ID NO: 41496 - DNA, 419 bp, Oryza sativa
  unsure (1)..(419): unsure at all n locations
agcttgtctctggctctctctctctctctctctctctggatgtctacatatataaataaatcagacttaattaagctagcttcatgagacagctagctcaacagctgctagcttttaagcctttaagtaccaacagtgtcattatgcgtgtaatatattttgctagcatgcatttaaatatgaagaagtaattaatcaaagtgcattcataccatgtcaaaagaacaagagaatagagcaagtaataaggtattgaccaaagcatacttgaaaaagtagtatattgctttaggttttgcttttcctgttgtactcaatgtggacaacatgaatgctcttccccttgagtactaattcttgcttcaaggacattntatgagataatagctattttatttgatgtagacacacggagtgga

SEQ ID NO: 41497 - DNA, 385 bp, Oryza sativa
ggtcaagttggcatggtgttaccaaatgacccacgccagtgttcacactgatattcaagtcctcaagaagagaacattgtgacagcacgtctggaagatcccacactatttttacatactgtagcgcgagccttttgagcatggtaaaaccagaaatatttggatgtacctctattcatacaacagctaggaacaaagactctatagcaggggcatgcttagcatcccaagcatcaagtgagaaatggtgaacatcttctagcagatgtgtccgcgttggccatctgtttatgtgcccagaatgggagttaacatctataacactttgcagcgatatgcttgaattcatccttgttgaggagacagttgatgctgaacttattta

SEQ ID NO: 41498 - DNA, 438 bp, Oryza sativa
  unsure (1)..(438): unsure at all n locations
agcttatctagtagtgttcgagttaaaggatgatgtggcatggcaacttatctattaattaggaatagtttgttagtttccttttatctttaggaaagtgtgttcagtgtcctataaggactttatgttttctttttatctttaggaaagtttctttcttgtcctacaaggactaatatctccctatgggtataaatatatacacccggggtcattgtaaaatatctctcgatcaatacaactactctcggcgcatcaacaccctctttaccgaggttgttacttatcaaccggcggaatttggcacgtgacgcggngctgcatcgattcggttcgatctccagcgaaggagtaagtcctacgttctaccagcctaggcaattgtatcgtctatgtcagcgtcgttcagggctgcatcagtacattcgacctcttgga

SEQ ID NO: 41499 - DNA, 466 bp, Oryza sativa
  unsure (1)..(466): unsure at all n locations
tataggagggacttgaatcgatccatgacaagccatcttataagaccataacgcttcggctaaacgagcatgtcattgccgaggataatcagaaatctttcttttaatcaatntgatcaaactcttgttagatgcctcggcctgcccattagcttgtgcataatatggtgaagaattcaacaatttgatacccatgctatcggcaaactgaacaaactcatcagatacaaaaattgaatcttgatcggctgtaatggtttgaggaataccaaatcgatagattatatgctcttgaacaaactgtatagcatccctagaatcaaccttcttcaaaggaatcgcctctacccacttggaaaataatcggtcgccaccaatataaacttatgccctttactcgatggtggattaatcatgccgatcatatcaattccccaacctctaaatggccatggcttaatgatag

SEQ ID NO: 41500 - DNA, 355 bp, Oryza sativa
agcttgatgttggaatatataacccgccatttaagaaatgagaaaataccacgacctcatgtgtgtcaagggttgggaatgcttcgccgcatgctggacgccacccaatgatctcttttgccggaagaacactgtgcgccaccatctccttcaagttctccttcgttacatcggagggcgcccactgactctcaaagctctctctctctctctctctcttccgccatggatgcgatctggatgatatgatttggtttggagtgtggctgggactaaatgggagattgatgcggcggttgcatgggagattttcgtggagttttggaggatggatcggagtgaatcggtgaaccct

SEQ ID NO: 41501 - DNA, 378 bp, Oryza sativa
  unsure (1)..(378): unsure at all n locations
gacctataaaactcaacttcagtctcaattatttctactgcaacatgganaatatgccttatgaaggtgaatctgccacaagcgaaatgtagttttgcatgcccagtactgtgatgtttaaagcctgaccatgcatgatcaggctgatgtaaacatctgagttggtggcacacggaattatactttctgtccatttttgtgtgcccgtgtatctattggatagaagcacaatacccctgtgcatgcgctatcgaatttattggacaataccattgtgcatccgatatctggaagattgtgcaagagctctgttcttcatttggcccatatatatggtatttgtgtaatgttgatcaccaaattgaacatataaactct

SEQ ID NO: 41502 - DNA, 461 bp, Oryza sativa
  unsure (1)..(461): unsure at all n locations
ggatcttaagtcacctgcggcatgcaagcttagcttggtgttgggatatgcatgatgtgtttgaataggaagtaacagtaaggtaagggcattatgatgggctggatggaaattgttcagaaatgtttgatggttgatgttagggagatatatggatggatcgataacagttgggcaggagaaagaaagcggtgataagctagagtgggttggtactacatgctcccgtatccgattcctgttgggcctccagccttattactgtgtttatatatacatacatcaacaaggaaggaaggaagcctcaacggaacaaacttcaacgtggaaggaagaaaggaaggaaaagtgtcagcttgcgatgaagcggcggaaaatccccaacccacagcagcagcttgngcagatttacgtgttaccacgacgacgacaaccacaccgcggactccacgctgcgccgt

SEQ ID NO: 41503 - DNA, 405 bp, Oryza sativa
  unsure (1)..(405): unsure at all n locations
atctaatcaactgtgatgctatccatggtgtcatgccaaanaatcctaaatataaattatatttcgaggaatagttcgaggtacgtattttcttcgatccatcatccatggatgcaaattaattaattaattaattttgacctcaccagcatatatatatatatatatatatatatatatatatatatatatttatttatttatttcattgaatgatgcaatcgatcgatggatcaatgtatcataaatattattgctattgtaggagaagttaagtaagtacgttcgtgttgtattgccgaaactgcgtccagcaattcagaatgatagcgtgaagcaattctatcaagtctataattgtgggtctggtttcaatctccgcacaagttaaaattttacattact

SEQ ID NO: 41504 - DNA, 451 bp, Oryza sativa
agcttggacagggaggatacaaatacagagtttcaactatcatggcgaggcatcgaaacagatcaggcattggcggcttcggccacggcggcggcggcgtcctggttccgggctggaatcttggcgatctcttcccatcctcttctacctccagcttctctctctcctttccagaaacttctagacacttgtatcagctagctagtttgcttctctcttttcccccaaaatacttgtgagagttgtattcaagcttgttgttactaattgggagaagagggctcctaacaatctggtatcagagctcaccaatccccaccaagctcaccaagctagctgccatggaaagtgaggacaagtttgacatgctcttgaggatgctcgaggagttcgagcgaatgcgggaggaggcatatcagagaatgagagctgattccagtctctcaggcgg

SEQ ID NO: 41505 - DNA, 371 bp, Oryza sativa
  unsure (1)..(371): unsure at all n locations
ctcagcttagccaanaacgattagatgtaccagtatgcctgtaatgcggttggtgctctgagatgccttatatattcggtgaatgctccatctcaaaacaaaaggcaataatatccatgccactaggtgcttgtgaaagggaagaggtaagcactgataacgagaaagagcttccttatttatgtctcttgttcacaaaataaacggaaactcttctgtgagtttgttgtacttatatcacccaatcacaatggtgtacctatcaatatctagcaatgttcctatattccctacatctatcattccagttactgatcaccgagagctcatggttaagtgagaagatatgccgtgctgaacagatatgaatc

SEQ ID NO: 41506 - DNA, 461 bp, Oryza sativa
  unsure (1)..(461): unsure at all n locations
agcttgttgctgctgcctttnttgtattaatctcatagacatgattgggcctttgtaagcgtagcagctgaattggcccacgtacagcccacggatcctaacaatcccctctccttgaaattcgacttgtccgcaagtcgatatcaaataaacttttgaacttgcaaagctccactcttgatttatattgcacacttgtactgtcccaaaagctttataaatttgtccttcgctttcagctagatcccatggcatgatcaatgcaatcttagctatcaatcttaaggaagtgagatgtttcagaagcagcaatacaaaatcattgtcctcaatcttgttgctgacaagcatagcaaaggactagagttcagcgntcaatagctcctttgtttcagggttaacagtaactacctcagctctgctatgcacttgagtataagctgaatgtttctgaacatgtg

SEQ ID NO: 41507 - DNA, 479 bp, Oryza sativa
acacgttattatattagcaggggatccagcctgaaacataacaaggaattcttaatttgggaataatctcgaagagaagttctttccgatcagaagaattgggcaagtaaacatatatggaaatgcacatatatctaaacctaataattccactgcaaatttgttcaaggtgctatattcctccaaaattaagtggaatattagcatgaacatatctatctaaaaatatagaattccattcctgcatatcattcaaaaggtcgatgaatagacactgaatattccacatttccactgaaagaaacaaggcttcaggatttggggatatcatgccattctattgaaaattcccagtagcaataatgtataatatattcttgacgcgtcacgtatctttgtgagctattatggaaccagtgagaactgttcttgacctaactaacatcaagtaccaaaaggtcatcctgtttgttattttc

SEQ ID NO: 41508 - DNA, 353 bp, Oryza sativa
  unsure (1)..(353): unsure at all n locations
atgcctccatcttctncccacttcgcatagagacgctatagtcgtctgacctcaagtggcgatggcactacttctaggcggaattttctttgtatctatccatcatcgcctgaccttgatgacctgtgcagtatgcaacaaactcttcccaacgatcccttagcttctagaatacgtctaagtttgttgtctgccccttcaagatgtatttacggtacatatctcccttgaaagactggaactgntctgccactttcttaagagtccagcgttttactatgttctctgtacccgcagggagcgtgaacgcctcgatcattgtggccacaacatcattttctctgataccggac

SEQ ID NO: 41509 - DNA, 484 bp, Oryza sativa
aagtcacctgaggcatgcaagctcgccgctgctgccgcaaatcaactcatgctccttgttctatcatgaaagagtaaagccccataatgggtacacagctaaacatgagagcaagcagactattatacgtgtaactaagccttcaaaatgggggtgtgcatgtaacttatccgccatagagcgggttcgcttgttaatatgcccagaccaacgcctctttgttctacatggcatctcgattcttcactacacccaatctgtatcgactcccattaattacacctcttctaggttacgagtgcggaaagagacttctttcttttcatattatatagaatagtcttctcttcgtgcgtttctggctttttgccttcaacacgccatggaagccgggcctctaaaagaaccgagttgaggagtcattccctaaccctaaagcttaattgctcaaagactaggatcagggttcctctactataactca

SEQ ID NO: 41510 - DNA, 432 bp, Oryza sativa
  unsure (1)..(432): unsure at all n locations
agcttaggcgtttattaactcgtttattaatctattattnggcatcccaagtaatgagtggagtcttatgtattcttaattgtggattgggctgtgtacacctttctaaggtgtagagaccgggttaatataatccattatctaaaaaaaaatattcacatcaaaattcctccgttaatatgtagcgcttcttttacaactagtcaactacactgtgtgacaaacaagcactggtctgtcctagtaggtttattcatactatctatgtcctaaaatactaaatgaaacacataccagtactatgaatcttaatagtactttcttcgttccaaaatataataagttntatggttagacacagttattaagaaaaagtatatagaagtgagtggtgaatggttgtgattggatgataagtggaggtatgtggga

SEQ ID NO: 41511 - DNA, 353 bp, Oryza sativa
  unsure (1)..(353): unsure at all n locations
cgtgacacatagaaactcaaccttcagcggcgctagatcgncccactctgataccatgattaatagtataagaagagaggaatactatagtaaattagcattgaattcagtctcatgagggatatatatatagagagtagaaaagatgaggaaggggatttacatcatatggaagactttatacaaatcaatcttatcctaataatccttgagcatttgataaatatcaaaactggaaacacaaacaagataaatttatagcgcgcaattacctggaattcgatcaattgttttctgtcgctgtcgctgtggttgccaagaagcagaacaatttggaaggttatttgctgggt

SEQ ID NO: 41512 - DNA, 452 bp, Oryza sativa
  unsure (1)..(452): unsure at all n locations
agctntaaacacgtatgcatatatcttttattacatatgtcctaaatttttctatcccttattatcatcacgatgtctatatgagtcagcaagcaaaatacgtgtaaagagattatctttttacatatacgctcattaacattatcgtgtgatctgaaattttccatccttaattaatatcacaatgtccgcggggatataaaagtttgatcacatcaaagaagctttgaaaattacgtattagataatatggcaataagctttctacaagcgtgcatatctctagttacattgattccttaatcttccataaccttttaggtaacaccatgacgtttaaaaaaaaaacatatttcatcaacacaaagggttcttatacaatttctgaaatggagtggcaatcttccagttacgcccacgtttagatttacgtccgacgtatagggtctttt

SEQ ID NO: 41513 - DNA, 368 bp, Oryza sativa
tgctcatggcacgcgtggggatgcgagtatgatgagacactcattgcagcgctcttctagagagcgagagagcagcgagcaacaagccaaattaaaacgtggcagctggctggctcatcagcttgactcctactgagggtgtcagtttatttaaaaaaccggcatcaatgtccttcatatgagtgtaatttttaattcagtgaaatataaaatgaatattttcaaaagcatctcatgtttatgtcatcatttcttaattgaactgtgcatacagttgcacacatatctcttgtgctaagagatgttaatgaaatatgcaaagtgaacctacgctaacttgataagtttctgggagtggaatctactca

SEQ ID NO: 41514 - DNA, 455 bp, Oryza sativa
agcttataccgacaataacggtcaaactgttatatgtaccttatactatcattcacaataacggaatagtcattaagtattcagaatgactttttttttaaaaaaacaaacacttagtgtataagtagaatgagaaaaatatttcctttggtttcttttttccttcttaaaacatgtgacgattttcttgttccataaaagaggaaagtttggcaaatatttacccttgaggacatggacaacaaacctatcaagaaagttcataatgcaattgagcctcaatctaccatttttgtataacttttgagttctatatatatatatgcaacaaagctgaaccatcggtttctagctccacaatcataccccccacccctgcccattggggttcacggagcagatgcatatatataaatcacatgttattgcaaacgactgcctagtactattctcat

SEQ ID NO: 41515 - DNA, 445 bp, Oryza sativa
  unsure (1)..(445): unsure at all n locations
taacataatctaatgtgatgatatagcactaaatagtgcaatactaggtgaacgaactcacccattcagtgaggaactgctggccctttggcctgttaatatcaacagccttgcgtccagtgacaagttccactaacacaaccccaaatgagtacacatcggccttctcggntatntgcccactctgcgcatattcaggtgccagataactgcacatggccgaaaatggtctcagatatgcctttttcacaagttacacctcacaaaggacaggattgatggattgtatggctgagcacttacccaaatgtgccaattactcttgtttcgacacccatgtctccatcaggctgccatctagccaacccaaaatctccgacctgcacacgatatgacgatacttcaccctcattatgtggaaggaagttgaggctaaagaccactg

SEQ ID NO: 41516 - DNA, 445 bp, Oryza sativa
  unsure (1)..(445): unsure at all n locations
aagctgcaattgacatttggaatgcaacgttctttggcttttactcaagagcggaanaagtatactttgactcccttaactatgacccgagtatgattcataaccttcaaccataaaaccggatatatcaactcctccaactatcgaaaccagtgcaaaatatatccctgagtggttttggaagccggttcggctgatgtggcacctacgtggcattgttgacccggtcttcatcccacgtggcgttgatgtgtcgcttatgtgtcattttataataaaaacaaataaacaaaaatatgtgggactgacctgtcattcacataaaaaatagtgggacccaccgacatgtgggccccacatgtcatccccttcctactccttactcatccctcttctgtctacttactctttctacctactactcatgcgccatggaaatgctgtc

SEQ ID NO: 41517 - DNA, 474 bp, Oryza sativa
cggacctataaaactcagcttctgtcttacccatacatacatgttcctgcgagccatgaccgctacaccgatagaaatcgagagtgaatgagatctttgaacagattggaatcgacaacacgatgcatccacaggaaagaattgagccccctgatagatacacccactccttgcattgtgggagcaggtagattaaaatctaaaagctaagctataccagtagtcgtagcttggctccaatcaggcatgctgatctaacagatgaaagcaaccctggtaaaggctgaaccacatagaggcttgatagtgatcagatggatggattagtagtagtagccatgctaagctctgaacctggctcttgcaattgcagatgagagacaaaagggcaaaaaaagaagagtatgtgtccagcatatacaggtactacggaggagtatgtgcaatgtgagaatggctctggctatgaatgat

SEQ ID NO: 41518 - DNA, 405 bp, Oryza sativa
agcttgtgggtggctgttctgagaggtttttataacaggctcagccaaagacacgaagatggtcataagtgggctggttaccaaataggacagagtgtggtgtggaggattgaagggttttggtgggtaggatgttgagaacatgtgtagcaacgtgtaaagcttcaacccaatacgaagggggcatgcaagcctggaagagcagagagcgaaccacattgttaatggtgcggatcatgcgctcagcccgcccattctgagatgaggtatatgggcaagacatgtggggatgtatgccgttggtgaggaagaacgagcgggaggtatagttatcaaactcccgaccattgtcgcactggatagcttttacagcagtgccaactgactgcaacatatgcaaaaaat

SEQ ID NO: 41519 - DNA, 413 bp, Oryza sativa
  unsure (1)..(413): unsure at all n locations
taatgaccccggccagtctgataaactgctggagctcatgatagctgaaacaattgtaccgtntatttctttggaagcataatttgatagctgtgttatgctactgtcaatctgctactaatgctgcaattagacatatttgatctattaaccaactacttattttagctatgtgctatgtatatcaatgcattaggccagaagttntgctaatcaactactagatgtgttttttaagttactcactctgtctcaaaatatgttacttctaagattcaaagttgctttaaaaatatagctattttctatgaaccatcccatctccaatcacaaaattcccgatataagttttttttcacctactttgttttccaccaatcacaattatttcacaccctaatattaatctctta

SEQ ID NO: 41520 - DNA, 438 bp, Oryza sativa
  unsure (1)..(438): unsure at all n locations
agctngtgaggcttgctgaaatttatgctgtagattttttggttggtgatcttatgctactacgaactcaacttggaaatattattagcaatgttaggagaagtaaagaatttcttggatgtaaagatcttgcaaaagttgctgaattaatggttcagaccggaaagaatagaacttatcacttggtgtataggctcattgagttatgattgatacttccggtggcaacggcttcagttgagagggtcttctcagctatgtctcttataaagacagatttgcgaaacaaaatgggggatgaatggctcaatgacttgatgatttgctacactgagaagcagatttttagaagtattagtgatgaanaaatcatccaacacttttgagagatgaanaagcgtccaatgctagtgcctcaacagaaattagtggtatgct

SEQ ID NO: 41521 - DNA, 465 bp, Oryza sativa
  unsure (1)..(465): unsure at all n locations
tgtgtgcaattngtgggtacaataagggttgcattttgtctatgtcaaagaagtttacttgcacttgcacatacgcggcgcatttggctgcaaaaatgcctttgtacggtggacgggtggagtgtgacgacgtgtggtggggccctgacgcttggaaattggagctgggccccatgtctctgtgggtgcatcatcacgtaggggagttggcagacagggcacaaagtggaggggcctgattgagtagtaatcccattattttcctttttctatttttttttctgaaagcagaattattgtttcgctttagttcacaatattgtactcttatagtcctatttctttactttcattttgctccatgggtgggtagcatacaacatagggcatactttanggttcaaatctgcaatgttctcatagtacaggaaacaaaaacggtataagagctcattttgaagaatg

SEQ ID NO: 41522 - DNA, 420 bp, Oryza sativa
agcttgtcccaagcaatgtcattgtcatctttcaggatcactccatgcaacaaaggtggcgcttgaacttattgtgggtaattgcagtgtggatcaacctcattctaggcagtaatggtgtggttcgaccacatcttggcagcggtggcaacgttcaagcctatcctagtgtctacggtgtggatcaagctcctcttgggtagcatcttcgatggcgcttgagctcatccttcaacggcggtgcggaccaaccttcgacctcgagaaacctgtctagggacttctttgttcggtgtagacaagggaagacgataagggtaattgtagaattagcacatttttttcataaggaatagggaaactttgtgggatagattggaagttttgatgttgctatagtaaactcttgtggctatttat

SEQ ID NO: 41523 - DNA, 335 bp, Oryza sativa
atacttattgctctctattagacatggatattgccacggtaaccaattccaatcatagctttttggttgtccagtccagtagtgtgcatttttgtaagacatgggtgttgtgtcttaaagaggttctcatatgcctcttacaaagctaaaatgcagtgctgaaaaatgcgttaatgctagaattgaatagttgatgacttggtagtactgaaaaatgactgactgcttgatcaattgaagatatcttttctcatgttgtcactggtatgcaatctgcaagctatcaccggttactagagaagttatctgctaatagattactactactgactgtg

SEQ ID NO: 41524 - DNA, 463 bp, Oryza sativa
  unsure (1)..(463): unsure at all n locations
agctntaatntatttccaactcatcaaagttatcagtatagcctctgtatacattagctagctatactgctgggtccatctatttcactttgcattagaataatctacccctctctcgtaatgttctctctttctccgttgattggctagctatccatcatcaatgcttcttatctcgatagatgtgtgcagctcggcgatagatttgtcgtcggctcacgttctctctctcccctctctcctccagctaatcacgacagttgatgtggcattcctatcgtcagtccacggtggattattgtactcgctctaagacgttctgagtttgatcaaagtcaaactacttcanatttgactaagtntatagacaaatatagtaatatttataataccaaattatgtgtcattaaatcaataattaaatatattctcactaaaaaatgttttgggttgaaaatgttat

SEQ ID NO: 41525 - DNA, 442 bp, Oryza sativa
tcagcttgcccgcaggtacaccaaacacacacttagtcgggttcagttttatgcgggctgagcggatattctcataagttttcgctagatctgaaagtaaggtcttttggttgcgcgttcttacaaccaagtcatcgacatacgcctcaacattacgtcctatttgactacccaaagagattcgagtagtacgctgaaaagtatgacctgcatcttttaacccgaaaggcattgatgtataacaataggttcctactggggtaatgaacgcagttttttccttatccttcctagccatgcgaatctgatggtaaccagagtatgcatctaaaaaacacataatgtcccaccccgcagtggagtcgacgatctgatctatgcgaagcatggggtaaggatccttaggacatgctctgttaacgtcggtgtaatcgatgcacat

SEQ ID NO: 41526 - DNA, 460 bp, Oryza sativa
  unsure (1)..(460): unsure at all n locations
agcttctagcatataatatccattagactgtatcatttctgataagcantttggtcagcttatgtcatagcctctgttgcacaatacctatctgtttcagacgggtcaatatatgctaacctatgctgattgtgccaggtgtacgaaatggcatccccataggaccgcaggtaactccatactttgtcctccacacaaaataaattaatagtaaatagttaaggtgagatattgaattttgtaaaatggcatgtatgtaggctgcttcaccttggctttacgtctaccctcaaggcttccgtgacttgctactttatgttaaggagaactatggcaatcctaccgtctacatcactgaaaatggtaagtctccgatactacggtaacacattctaatttntaaattaagtcagcaatgaactcctatggcataaatattcttcttctcctagcttcttga

SEQ ID NO: 41527 - DNA, 434 bp, Oryza sativa
ttatatacacgcacgcgcgcgcgcacgggctgtatgagagacataataaagcacaacacgattgattgatcgatctttacttgcaagctgcaacacagagcgcacgctaaggaacacagggaaaccggacggtgtcactcatggaaaggctaaaccgcgaaaggcttatatggatgagtggtggtcggggacagagaggagcactcgcgcaaagctagctgaaaaggggtatccatccatcaatcgatggacgaacgatggctacaccctacacgagccgataacagcagctacctaagctatgtaaatcagctcgacattcccaatactccaagctgatgatctccatctccctagtacgcttgcacgcatttcgtttacaatcttccagccatgaaccggggtatgtactagcatcatatcatataaagaaa

SEQ ID NO: 41528 - DNA, 263 bp, Oryza sativa
agcttgacgttccggggcctgccggcgcactttctgccggaccggctctgcgcccggccgcacggcgagacggtgctcaatcacctccctggggaccccgggcatatccgccggtctccatgcgaagacgtcagcgtttgctcgcatgaaggagacgagcgcgttttcctatttgccatccagaagaccaccgattcgtgtggtcttggacgggccgtcgcccagggcaaccttcttgaccgggacctcgttgcacgtgacta

SEQ ID NO: 41529 - DNA, 451 bp, Oryza sativa
agcttaacttcgtccgctgtgacgatgatgagaaggcgatctacgccgcctactaccttcagggcgctgcagctgcctggtgggagacttacaagtctacactcccccagggcaccgtcatcacctggaacgtgttcaagcagggcttccgcactgctcacgtcccagaagggcttatgaaggccaagaggaaggagttcctcaatctcacccagggggacttgcctttcatggagttccttagtcgcttcaactaccttgcacggtatgcgactgatgagctaggcactactgaggcgaggaaggtgcaactttgccttgatcgccttagccctgagttgaagcacggtctctctacccatgagatcgacagtatgaagacccttgttgacaaggccctccgctgggaggcaagtgagaaggaagtatctgtggaccgcaagcgcaagtt

SEQ ID NO: 41530 - DNA, 368 bp, Oryza sativa
actaagcttatatcatccatccatctgagactaagatagttatctatatttattgtaaaagaacgaacgagatatttttcaagtacatattcacgttagcgggtttcaacaaccgttgattatcgtggtgctatcattcatgtgtatatgtaacatattattatgtcattatcagttaggagtatgttgagatttctcttgacaaactgagaaaaaaaactatattagatgaatatgtactttgagtcaacgaatgtgaatttatgaaaaaataatcatatataaaaatgaaaatgagattttaaaaaaatatgtttttaaaaatttgtctgaaaatgggtccttgataatatacataactaaggtta

SEQ ID NO: 41531 - DNA, 388 bp, Oryza sativa
agcttagagtctcacccatggtccccggccgaaccggcaaaggggggccagcgcggtctcccggtgaggagccccacgctccgtcatctggcgcgccaggtagggggctctgcgagtgatcttctgagctcttgcactctttcgtgtgcgccaagcttttcctattcagcctcatggctgagcaagcaaaggcgcacgacctctctccgagtgtgagtggcgacgacggggagccgaacccacgccgtcgagctcgtactccaccgccccctccacgccaaagtcctaagcggtgggaggcgctcgagagggccgaaggatccgcgacttcgacatccacaggaggtggaaaagagcggcgagatggggagcgtcgtcttctcctcta

SEQ ID NO: 41532 - DNA, 225 bp, Oryza sativa
cactgatatccaagtggatgagatgagagcataatgacagctcgtcaagaagatccacctctatttttacgtacgtgagcgtgagccttttgagcctggtaactcctgaaggaactggacgtgcctccattcatacagcgagataggagcaaagactcaacatcggggccacgctcatcatccacagcatccagtgagaagaggtaaacatcttctagcagatgt

SEQ ID NO: 41533 - DNA, 405 bp, Oryza sativa
tctctctctggaaagctcaacgtggtgggcccaatcactgatgacaaattgatattgctccgatacattcatgcgcatggataattattcttgggcataccacttagccatgagaatgagcaaagaggaaaagaattgagaagatgaataataccccacaagaaacaatatgctgtgtgcaaagtagtttcactaccatatgagagtgtaagactatagatcagaccggctggcccagccatgtctctattactcctagctttcttctgattaccgtacatctcttgcgtaaggatacggaaagaatgcttgcttaatgcatcatttgtatattcattactgctggtgtgcctctgattgatttggatactgatgctgactcgtgcactagactaataaaccgta

SEQ ID NO: 41534 - DNA, 278 bp, Oryza sativa
  unsure (1)..(278): unsure at all n locations
ttgctgcatatatgccactctcagagaaggatattaacaatcccgactccattttcaatcggagataatctatgcaggcctttctaaatcaataacttaccctattaaacagagactttactcatcacataatccaatctgatattccctgctaaaaatattngcactcacgacttaaagagatactcgagccactgtaactaatatgctacatgacgaactaggcactgcaatcgcaatcacactttatgcaaacgatccaccggacaccaactgac

SEQ ID NO: 41535 - DNA, 463 bp, Oryza sativa
actcagcttgcgtcattgtctgaaagaatatagtggctagtgctagctgtaattaattagactgcccatctgctatcctcatttttaattaccatagttgggagttaaatcaggtcttttcaggcgtcctggggagaaaatttgggtgagaattctctatcgatctcaaggttaagataatgtcgcccagaaatattcattttgtagatgaaattaatctaaccaaaactcaaagaaatttgaattgatccaaaatattttgaccagttcaagaaaattctgagtcgcagccgagatagtgatcgtggtatcacattacaatctcaccgagaatattagtttttaacaaactagcatccgagtgtgccatttcattaaatatatgaagaaaaactatatagagtgtaagggtgtattttctttagaaaaggaaagctcgtcttatgaggcttgcctgacaacg

SEQ ID NO: 41536 - DNA, 424 bp, Oryza sativa
  unsure (1)..(424): unsure at all n locations
agcttccctctaaggtctggttgactnggtggtgacaatctagctcgaggccctctgtctctctctttctcaggctgtaagccaagtctgtcaaacgttgtttccgctggaagtcttattctaccacgcaatcgagagcttgagacgccgtcattggaagcttgctcttcaccacgctgacgatgacggtcatggcgttcatcctcaggatagacattatgtctatcagagacctgccctgatctgggattattgagccttctttgcttcaatagcctttgccgcaaatctgaactgtctgcagtcaaaggcataggttctctctgagaaaacctactctctgacaacaatttctcagctgaacctctgtgtgacctttcaaatccataactatcatgagtttgcctaagcactccaatgtgct

SEQ ID NO: 41537 - DNA, 395 bp, Oryza sativa
taatgaccatcatatgtatatataagttatcagttgcatttgcacggtattagtattatttggaaaattggatatgcaatgtaaagcacgggcatgcattcaaatgttgtgaaagcaaaacgaaaaaaaggaaaaacttggaggacctttttgtaactgtggttggaatattggaagcgcgggtaataaaaggaggacacttgagagcctactccgcagccgccactctctctctctcgttttgccccaatatcaataccatcgccgcaccgccatggcggcggatgaggtggatgcggcggcgatcgactgatccggcgaggaggcgaagcggaagagtggtaagcataggggatcgggcgccaaggggaggcgccggaacggcgaccgggctt

SEQ ID NO: 41538 - DNA, 454 bp, Oryza sativa
agcttgcatctttaaaataatcatgaaatttatgctccatttgcgaccatgtagaaatcgaattgtgagcaagtaaactataccatgtagatgcaaagtttgacaaagaaagaggaaacaactttaacttaagcaaatcatcactatcggccttaccacattgttcaataaattgaccgatatgctccattgttatcctagcatcctcacctgtgaattttgtgaagttgggcacttcaaattcttgcgggtacgggaccgaatctatatgttcaggatacggcctttgatatgtatgtatagctactttggattctatttcaccactatcctgcaagacattgtcatcatctcttccaacatccacatgaccgatttgtgactacgtcttaagtgacaatgctatttcactttctgttgtgagataatccgaacagtcacttagttctggtat

SEQ ID NO: 41539 - DNA, 275 bp, Oryza sativa
aaagactgctaaaatgcgcggaatacactccaacacgcataggcgataaaactccaccgttctccaaacgccctggatccaactgcgagcaacaatggatcggcgaacctacgctaagccatgtaacctctaccctacgatgggctatctctgataatcatgaagttaagggcacatttggatagaaaaagaatacctcactgaaggctggatttcatcccaactattgtcgtctattacctgcatccacatatacaccatcacttatggaatat

SEQ ID NO: 41540 - DNA, 398 bp, Oryza sativa
  unsure (1)..(398): unsure at all n locations
agcttgagcatttccatatgcttcctgaataatagttgaagggcaatatgtgagggagaaatgatgcaagtgcaatatgtgagagaaatgacgcacaatttcaaaacagatgtatatgtaaagaagcatatgaagctatcggcaaataatttcctttcgaatattctgctcagaatgtttcattaaatgttacatagctcatgacaagcgtatctcatgctgaaattatatatttgttgatgccacattaacaaaataacttatcattntactgttttaaagacaatattagaaatatagacattaatagttgttgcaatctctattaccggcatatattgaatacagctttaaaggaagatgtgtggagctattatacaggaagatccgaagatgta

SEQ ID NO: 41541 - DNA, 297 bp, Oryza sativa
tctcgtcctccagcttcacccgcttcaagaatcgcttggcctttagcggcgacaccgtctccttgccttggggctttgtcgctgccgcaacgggaatgtgatcggcggggaactcgatcttgtactccggacggacgaaggtgttgaactccgcgatgaggtccgggtggtcgccgaggagcaccgccgcgccgttcaccaccaaggaggtggacgcgttcgcgtacttgccgtactcggtgaggatggtctcgagccccttgtagacgcacggcttcaaccagaagcggcttctca

SEQ ID NO: 41542 - DNA, 437 bp, Oryza sativa
  unsure (1)..(437): unsure at all n locations
agcttgaacctttgctcgtctcgagtaaattacgaaaggaagcatagacatggttgttgatcaggagttgctactatgttgtatatctcaaatgtacaggtgcaaggtatgtatactctctcttgaattaaataatatttggcacggtggcttacccttacccatgattcccacgagacactgcctttccttgtcttgagtggttgagagacagaacagcaattagagcactaatcacccaatatttatttaacttttattctagaagttttcaaatgattttgcaaaagaaatccaagttcctcaaatgattcactcgatctctccaagtgtatcaatatgaattcctcaccaatttgcctttntgattcctactctaaggttgatatgtggagcttggtgggatcaacatggatacttggatcacattattacta

SEQ ID NO: 41543 - DNA, 327 bp, Oryza sativa
  unsure (1)..(327): unsure at all n locations
tcttcgctgcacctcgttgtccgcgtgctcatttctgctattggagggatactaccactagcactcttcatctggttccactacacatccctttacacgtgcccctgctggtatcacttcgcatccctatacacgttccctatctcgtcaagaactgtgatggatcctcgttcccatcttcttcattacagtactggctgctaccctccgcgatagtatcgtacaatatactgtcctcatcgcggactgcatccgttgatacaagaaacatttgcttagtcactaaacatttatgtnttaacaatctaattcatgtatgctaagtgt

SEQ ID NO: 41544 - DNA, 448 bp, Oryza sativa
  unsure (1)..(448): unsure at all n locations
agcttgtgggactcaagtgcaaaagcacttaacatgttagactttacaaaacttctattgattgngaaattagtaaatatagctttagattatcccaccgaaccagctttgttgaggtggcagcaagcccttatccaaccggcatgcgagctggtgagtcacttagctttcattaaaaattcacacatatattagcctcggtttggtcgtgcagatcaacacaggcagcaagcagttgcagtagtagtagcaacagcaagagcacagccatggcgcagaagcctcagccgcaacagcagtagcagcaagcagttcgtccggaaaaccacctcaaaagagagaaatggcagagcagtagctagtagtccggcaccacagtcacaccatatctcaatagtagcagccatagaaaaacaaccaggctgagagagtagactgaaaaaaaaag

SEQ ID NO: 41545 - DNA, 243 bp, Oryza sativa
  unsure (1)..(243): unsure at all n locations
tacctcgccgacatctcgatctcgtcgtcggccgtattccgacgctgtctgtcatcacgtcgtaagtgctggtaagaatcgccgcctccttctctacctctcagggccctccgcatgcattgtagtgtcgtggttcgccggtaaccgncgctcctatgacgctcaccggtgcagcttatccctagggtcttaagtcaatatatatctaatccgtgatagggactaccgttgtcatctccgtgt

SEQ ID NO: 41546 - DNA, 368 bp, Oryza sativa
tagtgttagagtggcttatggctttaaaaaagcccaacggaaaagctgcttgtttgtttaagcctaaacttttcgactataagttggcttataagcctataaacaaagggggccttatagtgatgtccgctgtctctgcctttttgagcttgtgttagaggacgttttcacggataggtgaatatggtgtccacaaatacgtcttccgtgtaacgggaaaaaaagagtaaaacttaaataaagaactgatgatgggtgtcactgtcgcctttcattgacactgacattttaccactaataacaagcgggatggtgtgaatatgatagcttttgcggttctcaatatatgattggcaacgatgcaatct

SEQ ID NO: 41547 - DNA, 381 bp, Oryza sativa
tttggtctttttgctgaggttgggagtatggatagtattggagtgctgagcttgtaatttctgataatctccaaccattagcagaagcagaacacctttttctaatataaatctcttggctattgcagctatgaacaatgggtactacaattgcagtgcacccgttgctaatgtgtgtttcccacttaattggatgattcaggcattagtatatctatatcctgtgctgcaactgatattcagtgtggacatgtgcatatgggtgtgcactcgtgcttatattttctttgacgagtgcacaaacgtttaatcgatagatgattgtgcacatttgccctgaacgaaatggaatttatgggttctgatatttgttatgtagct

SEQ ID NO: 41548 - DNA, 453 bp, Oryza sativa
  unsure (1)..(453): unsure at all n locations
agcttctaatacgaagtaaactagcatttgcttggtttctttctcttgcactaatgctgcacttactgtccctggtgtcgctgctacatacgttagtaaaggttgactttctgtggacttgctaaagttggcatattctgtaactacatcttcaaatcatcaaaagccttctggtactcggccgtccactcaaatgtgtttgctcctcttagggttttgaaaaatggcaaaccctgctcttcagatttagaaaggaatctgctcaaagaagccattcttcctgtcagcctttgcatttcccttgtgttttttggtggctccatttggtgaatcgctgcgatcttgtcaggaattgcttctatgcctctcttagatactaagaaaccaagcaactttcctgctcttaccccgaaaacacactttntcgggttaagcttgactgaatatttctta

SEQ ID NO: 41549 - DNA, 465 bp, Oryza sativa
  unsure (1)..(465): unsure at all n locations
tgccacagcaagagcagtgttagacttattccaatatttgtcaaacttagcaagcatagcagttgccatccttctaatagtaatatcagaatccttgcccttactccaatcagtaagtataatcttaatgtcacagaatcctttgtaaaacaagtttgctgtaggatataaagtaccagagaaaagctcagtaagatcaaagaatcttttcaagaatgcgcgaattttcattgctttctcccactctgcagctgaagggcacattttctcatacctgcgccgatcataggatgtaagcctgtcaaaagcagccctataatagatagcatctgccaacatgagataggttgagttccaccttgtagaaacatcatttaatagtcctttggttgtgtncaacccactttcagaagcacacttcattaactccttccactgcaacggagagccctttacagcattgac

SEQ ID NO: 41550 - DNA, 390 bp, Oryza sativa
  unsure (1)..(390): unsure at all n locations
agcttgcaatgcatgatgacatggtcgacttttcgtattggatcgnntagtatatgctttactagcaagaaactgaaatagtaagatccacacgcttccccctcttaatagagaaagaagaaccctaggagtgcgggaatcttggcttctgatgacaaaagaaagcttagccaagtctcccatccggttaccatgcacttaattcccctttctgcttttagttcatttcccacagttgtcaaaaccaaatattaatttaattgttgctatcatttttttcatagttattgttatcttattattctcaacctcgacatcaccttggatgtcaatgaaaataaaaatggttgcttggcttttatcgatggaccgactgaacaccaaagatat

SEQ ID NO: 41551 - DNA, 459 bp, Oryza sativa
  unsure (1)..(459): unsure at all n locations
gcctttanaatgaacttcgacagtaccatcatttttctacgtcaaagggtgatactagcattagaaggagtgccacctgaacaatggaacaaagaggctataacagagttgctagacaactgctgcaaaatcgaagaactgtatgaagagcaccatatccaggatctttcggtgtttagattggcggcatggacatcaaactgtgatcttatccccaaaatcatagagtggaacattggcacaaatcagccagggcaacaatctactgatctgaattggaaaccaaatggngatctatctatcgtactaattcacatcgaaaagctgtttgactacagtgatccaaccaatggaaacgaagacaatccagaggctctcatagagtatgaanacaaagtgcatcatctcccaattatcaaaagattccagtggctgcccggcaggatcgactctgattat

SEQ ID NO: 41552 - DNA, 386 bp, Oryza sativa
attgtaacactattcttcagttgatgctatgtgaacccaagtgattcatatatgaattgcacatcaaattggcataatactggagtttcattaattgctctgtctgaattgaattatgcagtgggtgaacaaatctttagtcaccaaggtgattaatgttctatgtggcaggaagtatgtacttaccaaggaaggttggacacaacatacttttagttgcccattacttggtggcaaaatataaatagtcaccaaacaaccttggttattagatatttttagttaccaaagaccacttggttctaaaaaatatatagttaccaacattttcttggggactgttgcttttacatattggtaccaactattggttgtaagtaatgata

SEQ ID NO: 41553 - DNA, 442 bp, Oryza sativa
  unsure (1)..(442): unsure at all n locations
tccttgtatcgattccctctgatgagaatagagtacttttctgggactgtaattntggagaatgatatcaggctccaaattattttatccatctcggaacgctgattatttctagaaacattttgtaggttaggcatagagttactatccacctcctcaaatgtagtgtttccttcgtaccggcttgattgcaaaataaaagtgtatccttcaacagctcttgccttttccagttgtggtgtagatagaacatgaccatcttctgaaactaccctgtttccactgatgctgtacatgttaatgctacctttttcctttaccaccatcagaatattatctgtccaccaactgatgtccttaacatcactcagttgtgtaccattcctgtgaggatgaagtgaagcagagcgtttgtcattagcaagtacaaagatggtgacag

SEQ ID NO: 41554 - DNA, 372 bp, Oryza sativa
cctgaagcatcaagcttataataagagaagcttatattgttttatgtggcatgggaaatctagagcgaaggattatctgttgcagtcaatatgtaaaagttaaatttagtcatcttgcttatcatagtacatattttagcattggcttgaaactgctaacaatataaatataaaagtttatgcatcaatgattgtagatgctatcgtattttttacgatatcagtctagctcgaactacgatgagcagtccgatatagaaccagctggctgctgcatggctaaagcgtgtaatataggacttctgtcttgacccatgaccaaggcattgtttggtaggatggatttgacgagttgggttacggtcatcttat

SEQ ID NO: 41555 - DNA, 444 bp, Oryza sativa
  unsure (1)..(444): unsure at all n locations
atcgatatcagacaattacatcgagatgatacaattaatctattaaaccatgtagtaccttgcaagccgtaacgttggttttctcgtctctccagcaaccgccgttcctgtgcaggcactcgttcgtctcgatatctacagttgaagaaatgaaaacagagatttcattagaatttcattccaatttttcagaattccacgaaacaaaacaatatgtttctctgcgttttctacgcaccattgctcaagcagacgcgaggttcagtgccctccttgaagccggcacagacagctttcagcacgggcgtcctctccagtttcccttcatttttcacaaccattttggtttttttaataatggaatgtaacatctatgtctntactcaaagagctacagttaattattacagaaagctattnttattgttgtaggaatctctaatc

SEQ ID NO: 41556 - DNA, 395 bp, Oryza sativa
  unsure (1)..(395): unsure at all n locations
agcttctgctgtcgcttccggctccgctttatgtccagactntgagcatgctctctctcttctgtcaatcgattcagtgggtgctgcaaaccttcagccagttctcagattcaccctggtgtcaccgccattgccggcacctccaaccctgtcatgatgccatctccagcaatctggcaaggaggcttgtcccttgatcagcaggcgcagtttcaggctttcgaccgccttggcaacgacgacgacgaagatcatctccagctcccaaagccttcctatgacaactcccactatgatcagatgaactgacgatgtttcagatgtcgcgcaatcgacatggcttctgctcttatctgaaatttctgaaatctggaactgcattcttggtggtctga

SEQ ID NO: 41557 - DNA, 481 bp, Oryza sativa
  unsure (1)..(481): unsure at all n locations
ggaacaagctagcttaactggaatcataaactgttgacaattccctctgaattntntacttctcctccctctattcttaagatataaaaaagatattagggtcgtctgagtcaaactattctaagcgcaactaaatttttattagaaaaaataacatatatctcatcaaagaaatagactgtaaatatatatttcatagtggaccaaatgataacaattgatatcgtaaatattattgtttttttataaatttaatttaatttaaaataatttggcttacgacaaacatacgatctgtaggacggataataatgcagccaattgtttactgtatagatatttatagcctatctctcagctcactcatataatggttaactctntaatataatagtccacatgtctgtttcacatgtctgtttcacagaatttcttgggttctatgtctaagccgggtctaaacttacagcctgcttctcat

SEQ ID NO: 41558 - DNA, 437 bp, Oryza sativa
  unsure (1)..(437): unsure at all n locations
agcttggtcgatggcgccggcgatgctgcttatgaccggatgggcagccggcggcggtctcctctcttttctcttccatcccaaggagcagcagcgaactggagagagaaaaaggacaaaatgggccaagaaatctgctctgcaataccgcctggtgagtagtgacaaggcccatagaagcacacttcacggcccatttcatagaccaacagacaagtcaggcatgcactcacaggcaaatccctatttgctctgctgggagaatacaaaatctgatgattttgtccccagctgagctcaccaagtttatctttacccatactttggcaaanaaagacgttccctgacctatttccagtttatcacaactctagctcacagctattgcattagctatctgatatacaacaacagacnaaacctaaacagtgtgatca

SEQ ID NO: 41559 - DNA, 372 bp, Oryza sativa
  unsure (1)..(372): unsure at all n locations
ataaaactaagcttggcaaaacaggctttggctcggctcggcttgttttatgttcgagcaanaagcgtagctcggcttggctcgtataatagctcgagccggctcgtgacgtaagcagcaagtatggtcggcggcgcagggggcgattagctctagcggcaccggggagggatgtcggaggcagcgcaagggatggaggctgctctgcagctggacatagcgtcgagccgtcgaacatcatacgtcactggtgagggaggccggagcctgctcatccgcacaggggagggatgcggcgggccggtggtgcatgggaggcatgctgtggtacttctgttcctacggactactaatgactggcgacgtagacat

SEQ ID NO: 41560 - DNA, 391 bp, Oryza sativa
agcttgcatggagatgcagatggagttgcttctctccatcaaacaagaagtctctgctgctctgaaccgctcactagccgttcctgcaggtcagaagttatctcttcaacctgtttctgctatctcactgtacatatctgacaaagctgagatgataacttgatattcttaacaggcgaagaagggatgttagaggatggatcaaagtggaagctagcgaggaaaggaacatgctgcatctgctgtgacaggcaaattgactcgcttctttacaggtactctttcagaaactaacagtagaatgatcaatgatgttattcatgactgacaaattaaatgaacacctatgtgtacttgcatacgatgatcagatgtgggcatatgtgcacct

SEQ ID NO: 41561 - DNA, 474 bp, Oryza sativa
  unsure (1)..(474): unsure at all n locations
ntatccaaaacacaaactttatcattagcttgaactcttttagtttcataatattggatttttatnttatgtatttctaaaaaaaatccaatgttatgaaacttgaagagttcattaaaaacaagtttcacttgaaatgatgaacttgtaatcacatcaatgaaatttgagctgaatatcatttcacgacagcttaccgcagtagtcattttctgagcgactacccttgaagattcatagagtggccgaagcacctcatgaacactccatgcctganagattaaaccatattgtattattagtttgacaggatacaaaaatggtcctacatcaaaggacaaaaaacatggttcaactgtacaaaagtgtgaaaaatacctcaagatccagatggtccactatgtgcacaattgatcccccaccttcacatgggcgaaccaggtatccacttggaagcatttncgctctcacata

SEQ ID NO: 41562 - DNA, 439 bp, Oryza sativa
  unsure (1)..(439): unsure at all n locations
agctctntggttacggtaggttctttcgtatgcccttcgnggngtacctccaacacgtatagagcgtcgaaacatcaaattttattttgttgcactggtgagaaaccatctttggtcggttgaccaaatttcacaatagtcccggttgtaataaaaaccggactaaaaattatttttagtcccagttcaaaaggttagagctacttttttatctttagtcccggttcaaagaacaacaggagatgttagacccctctattatctttagtcccggttggtgttaccaaccgagactaaagatctatttttagtcccggttggtaataccaacccggcaaaagatcagcatgcgcggcggagagaatgatgcttgcgatagatcgatgaggtggaggcgacatcaattaataaggtctatctccttctctctcaccttatc

SEQ ID NO: 41563 - DNA, 480 bp, Oryza sativa
taccggcccgtatagtactatcgcaataaggtaggatattattatgtgggtgccaattcaagctgtgacaactcacacgagaaatggctagttatgagtgacatgaaagaatatatttttctttctagaaaataagataaacccggcctctaaattcaaccgaatgtgcacagccaaacatgaagattatgtatatcaatactttctccgtgtcaacaagtgtgagagggttccactcacacgtcgtcttaacttatttttttcaacatcttttctatagcgatcatgtatgctcttgcattagcggcttagcaaaccagtttatgctagggttgagaggcaccaagagagaagctcccttcccaatagtgggatgaggatcttccttgtggactttaactcctggtccgaatgcatggttcaactctccaaattgcaccagtactggctagcataaaagttactggttactgggcaatt

SEQ ID NO: 41564 - DNA, 385 bp, Oryza sativa
  unsure (1)..(385): unsure at all n locations
agcttatcgaatatatatattttttttttgaaanacaccatggcgcacatataatttggcaaggatcattcaaagctttccctaattcatgctcacaaattagtatatgaaaccaaagaaactggtaaccctgaaaattactgtattaagttctatataaaatacatgactcaccagatatatatcaacttttagttataatgtatgctacttaaaaaaactccatctcataatataaggcacaacatatttcatgaaaatttttaattttatttatgctaatataaattaaatttcatttgaagaaaataaaaattgtgaattggcatttgaatttatattaactaaatgttaaagattagtggtagacaccatgacggagcgt

SEQ ID NO: 41565 - DNA, 481 bp, Oryza sativa
  unsure (1)..(481): unsure at all n locations
tggtcgatgntctaatcttggcaactgcatgcattgaagattaacaatatattagaaccataaatctgtgaagctgtctagtacatagtatagagacttacatcctccgtgttagtcctgtacctcccattaactctaaggaattcgcacgcgtaatacccgcaaaggaccgttcctcgcggttgcttgtgacactaggtacgtactatcagcttctcctttgttcgggtctattctccacccttgaacttgtagtactggtgcgcactgtacggatgtcgtaccgtttcacattaagaaggatatttatttataatacattcatattagaatgcaagagtcataatcacttactactataagattgttagaaattctttgtctgactggtcactgtaatcgagagggtacagactaccacggttccgtctttatggtggatgaagtaanacatataatgatcgcttcatattaacaacac

SEQ ID NO: 41566 - DNA, 393 bp, Oryza sativa
  unsure (1)..(393): unsure at all n locations
agccatgggtctgactacgtcactgcatgtctgccattgtccttgggattctcagagagcatgaacatctaatctaggagaagggaaatgtttgccaagttctacgaaaaggttgattgatactataagatactccggctatgtagattttcttactacttcctctgtgtaaaaattgtaactatttctaacacggtaacttatctcagaataacgttattttttcaactacctcctcttaaccaatcacagtcattctacatttaattatctcacttattttctcttttaaccaatcacaatatttcttcaactatgtctaccaactttcttaatatctgtgcccacctcaaaaattcctataatttangacaaaggcgagagtatattaca

SEQ ID NO: 41567 - DNA, 471 bp, Oryza sativa
  unsure (1)..(471): unsure at all n locations
tgacctcctnctnctccaatttcacttgatccagtggcgtttgttgtcgangngctaagaggcatgatggagaaatgggattgggaggaagaatgtctcggttcaatatataaggagcacacagacgccttgtcaatcaaggtccgaatggtggtggtagggaaccataggtggagaagagatagatggagagagggtggtccaaagtgcaaaacgggataaatataccatggttaagaaaatggggacaaatatacatggctttcaatgaaaatattaaatatgggtagtcttagtgaaagtttggtaaaaatcttactcccaaaccacaatttactccatttcttttgatcgctctattcccattccattttgtgactatgagctgattgttagatatttttcttacgttgactacattgtacttgttggtcataagtaagtgcttgcttaaaaagcatatatgtcatg

SEQ ID NO: 41568 - DNA, 311 bp, Oryza sativa
  unsure (1)..(311): unsure at all n locations
agcttaccatgtaacttccatgctaagatattaagcaagtcactaaaatggaagaaatttaagccaactattttgtgctcatatcagcaaaaaaaaaaaagtaatacgaccttcaattgtaaggttgtatgcaagaggggaatcagcattccttctttcactaagaggcagcactggaaacagctntgcaaccaggacttctcatttctatgcagagtaaaaccaagggaatcatgcatccaggccttcaaagcacaatatgctagggactgcaatacaaaatataggcaatacatttataaaactgggga

SEQ ID NO: 41569 - DNA, 441 bp, Oryza sativa
  unsure (1)..(441): unsure at all n locations
tgatctgatggcaaatctnttatgttgacctagctatatttcgctatntgtgttatttcatctagttattgctgctgtttctgctgtagntggttggaacccttgngacaagaaggcaaaagctatgcaagattttggagatggagaatacaaacacatgctttgtgtggagcctgcagctgttgagaagcctattactctgaagccaggtgaagagtggaaaggaagacttgcactctcagctgttccttccagttactgtagtgggcagttagatccattgaaggtccttcaaggttgagaattctcatttctgcgtcttgtacaggtgatgttttgctctagtttgcaacgttacctggatgagtcctaaggctaattntgctcttggggatccatngcattacttgtgaaattnntgtggtggctagatgctatata

SEQ ID NO: 41570 - DNA, 276 bp, Oryza sativa
aacatcccgagtgtacatctggctgctgccacccacataccacagcgggaactgctcggactcaccatcagaggtgcctgtgcctgctcgccaatcaggttcttttgacaggcgcaaacaagttacgcgaatacagaaaagcgcaacataacttcactcgaggagataacttaaagcatggcctaccatgaggacagagagctgctctgaactactggaatttgcatctcctattgggatggaaagagggccactaaaacttgattatttcaaaat

SEQ ID NO: 41571 - DNA, 166 bp, Oryza sativa
aactacatatccgaagaaaaaaccctttttttaacaaccaaactcacttaactgaaaaagagaataaataatactatattaagtaaaattaccataatacataaacacgcatttataatgtaacccataattaaacataaaagcaaaccctaaataaaagtcaata

SEQ ID NO: 41572 - DNA, 377 bp, Oryza sativa
agctttgatttgacagatcgatcgatgttcttctgtgtttattcctgccgctggatatatattcattactagtatttgatgatcatgggcctgcttaattattacactaacatgcatatataattgttgggggctgctttgaacgcatgaaaactagtcactcgaatggaacatatatagggaagaaaatgtgtagggataatgcatgcagttgtaaaacaaactatatattggaaaaagaaaacatactgatccctctgtttgtataagctactagaaatattcaaagcttttcttgcataattaatatttatccatctattgtcttagtttaaccaatccaagctatatttatcatttaatctcttcacttaatt

SEQ ID NO: 41573 - DNA, 480 bp, Oryza sativa
tcagctgaaattaatcatctagagctacccgacgtgcatatatcattgtatcacatgtgctacctagctagagctagatcgatggagatatatatatatgtgtgtagttagccccttcatatcacggtccatacctggaacctgtccctacctagttataatttcaagttcagtatactgattgcaggctctgtaaataatttatggtaccagtacaaagttaacggaaaagagttgttatattatgagagtgaattaactggcgagatttcctgttaactgttacttccttcgtttcacaatataagttattttagcatttcccacattcatatattgatgttaatgaatcaaaacatctatatatgtctagattcattaatgttaatatgaatgtgggaaatactagaatgacttacattgtgaaacggagagagtatatgacctaatgtgtatgtagaattaatttagtacctcaca

SEQ ID NO: 41574 - DNA, 422 bp, Oryza sativa
  unsure (1)..(422): unsure at all n locations
agnctggcattaaaattctcatctaagagtatattgcctggcttaatatctctgggcaggatatatggcttgcagtcgtgatgtaagtagaataaaacccagccaaattcttggctattttgtacctgatcatcgatcggatataattaattagctagatatattgaaaatagtaacatatttgtcaatagaatctcactacgttgctctctacagttattaaaaagcaatcagaacccgttatctcatttgattgaattagtaatgaattgtcaataatgtggtgcatacctcgtaggccatgatcatactggtgctacctcgctctcgtgcaagtactcgtagaggttgccatttttcatcaattcgtagacaagaaaaagcatcttgttcttcatgttacagcaccagccgcacatgaa

SEQ ID NO: 41575 - DNA, 460 bp, Oryza sativa
  unsure (1)..(460): unsure at all n locations
tcggatgtgcatcgactacaccgaccttaacaaggcatgttctttgacccttaccccctgtcacgcatagatcagattgtcgactccaccgcggggtgcgaccttttgtgttttctaaatgcatactctggntatcatcagattcgcatggctagggaagatgaggaaaaaactgcgttcattacccccataggaacttattggtatacgacaatgcctttcgggttaaagaatgcaggtcctacttttcaacgtactactcgaatttctttgggtagccaaatatgacgtaatgttgaggcctatgttgatgacttggttgtgaagacgcgcaaccaagagaccttactctcggatctagcggaaactttcgaaagtctccgctccgcccgcataaagctgaaccccgacaaatgcgtgttcggcgtgcctancgggcaagcttctcggttcttggtct

SEQ ID NO: 41576 - DNA, 325 bp, Oryza sativa
cagcttagaagagaagagctaaacgtaacgttgttaatcttcttattaaagcgggctacataaaatcttgctaaatactcctctcggtactataggtcccagatattccgcgactcacttgagccaaggaagtatttttaataaatggaattgcatttcatgaataatctaaatggaaaaaggtttttaaaagtcccttttggttttgggccgaaagccggcccaaaccactctctctctcccttggcccagtcatccagccgcgcgcgcgcgatcgcccgctgacaggaggagcccacctgtcaagctctgcgtcttcctcacg

SEQ ID NO: 41577 - DNA, 472 bp, Oryza sativa
tcttcttgaacactcacttgcaccccacaggtttacacccatatggtctctctgtcacctcccaagtcccgttagcgataatggaatccatttcactacggacagcctccttacattagtctacatcaagagatgcatatgcttctgaaattgacttaggagtgtcatccacgaggtacacagtgaaatcatcaccaaaagacttagccgtcctttgtctcttactccttcgaggagcttcactgacatcctcctcagagacaagttcatgtgtatgttcagtttgttctggtggtgtgattgaactgggaattatttcagatgggtggttcgaaccactatgtgtatccttcattgtgaaaaagctctcaaagaagatagcatcacgagactccataattgtaccaacatgcatgtccggtacctcggatttaactattaaaaatctataggcaatgctatgatgagcata

SEQ ID NO: 41578 - DNA, 429 bp, Oryza sativa
  unsure (1)..(429): unsure at all n locations
agctggctgagtgtgaatgtgctgtanatttttagggccatcctttctttagtggagttatgctggttctaaagatacgctgaacctccctcttaacctgacctaggcctaagagcaaagttaatagtatagccaactactagctacaattcatctataactaatctaatagttaattcatacaataggtgcttactatactattagtatatagtcccactgtcatatacacattatgtcttggagtccgcgctgcaacggactacataagctggtcttctctctcatcttttatcttattaaaatatgattgtagctggctaatagtatgctattgtacctgctctaagagcacccgcaatggttaagtaaggtgctctctataaacatgttttcttagtatagattagattatagtaacccctcata

SEQ ID NO: 41579 - DNA, 487 bp, Oryza sativa
  unsure (1)..(487): unsure at all n locations
nttcgccgatcaagtgcaatagggtgtccgtctccggcatcttctacctcgtcttcctacccgggcagacgtttcggttcggcagcctcgacttcgtcaccaacaacttctgcaagatctctctccttgactcggtgtcggcccagtcgggagagaaccggctttcagtcccgtttggactctcaaacgcggctgaaagttacttcaagaccatctcaatcgagtcggcttcaaaccactcgggcgagatcgcatcttctccaacgacaccagatcaagatgatggggcttacccaccgatcctaatgaagctcctcgacgatttaacggccgtctccatcacgacagcgtcttcatcccgtaggcctatgcggaagtcgggttctacaccgatttcgcctagcttcaggggagtcggcgtcatccttcaaccactcggcacggattcgacggatcagctggacggctactacagctctcccaccgt

SEQ ID NO: 41580 - DNA, 445 bp, Oryza sativa
agcttttcctatactcaaacggacctggcttatatatatatatatatagatccatttaatttacagttttgcacctataaatatatctagtgggtgcatgtttatacatacaaacatacaaattaagatcacttaacctactaccttgcagccatggcgtccaaggcagcttaatttgctagtgttcactctcctgctcgccgctgctttcatcgacgtcgcctccgccgaggactctcgtgagcagctgcatcattactgcatatagtttacctatccgctcagatctgttgtatcgatctatctatctatctatctatctatctatctatctatctatctatctatcttctattatctattatatattaaaagtccattaaactttctacaaacgctcctaagccgccacgtggcaatctacaaatgcttctaagtcgtcaca

SEQ ID NO: 41581 - DNA, 456 bp, Oryza sativa
  unsure (1)..(456): unsure at all n locations
tgaatctgttggatcaanggtcctcgtagcatatagggcatgatgtctgctntgaggggactcccttntgtgcagatcctatccccattgccacccaacagttacccatgctagctggaaagctgacttgtttggagaggctgggtaaactctgtggacggaatgcatcatctgggctccaagctcttgtactactcttgattggttcttgccttgttgctgcattaacgggcactggacaagatgcaggtacaactggtggatctgccggcactggatcctggtgattatgggtgtcatccactgagagtgcatcggcaacagcttcccaatcatccaaaactccatcatcatcattctcggggctaccaccagtgtcatcgtcagaatcagtcacactccgagagctggccaagcactgctgccgctgctgaactacagcaccacattgccgac

SEQ ID NO: 41582 - DNA, 409 bp, Oryza sativa
  unsure (1)..(409): unsure at all n locations
agcttacggaatgggctaactttctcttttctcgatgaccgattcatcgttgacaagtgtntattacagtagaaaagagacaagttcttcaacgtgatcacggttagtactcccatttatgacctcaagccagtcgcatctaagttcgataggcgtgcagacactgaagttaaccttaattgtagtcaagagtcagctctgcaaatataagagcgatgggttaacgccagtaattccggcgagaatgcagttggtcggcaggtaattatgaagccggcgtcgntgccgagcctatctcacataacttaactgaagctaccaacgaccatgataacgatatcttggactgatagtataccagaatgctggggatttgtatcatttgggttcaatcagcgcagtgatcacc

SEQ ID NO: 41583 - DNA, 414 bp, Oryza sativa
  unsure (1)..(414): unsure at all n locations
tacaacatgttctataatntatataattctacatatcatttgtttgcatatccaatcatcacccctcatatcatttgcataatatattaacaaatctatctatcacttttacaatatttaacatatacttatcaatatgtttcacactaaagcacgggtattatttgactgataaaccctgatgcttcattatttttgttctttttactcctaacttgattgccaaaaaagatattgaaaattgtttagtaattcccgtagccaagcgcggagaatcacctagtaattcaattaagctgatgccagaaaaatacatgtactgacagtagctctagctcagtgtgagatgtgcaaatagtataacaaaagcattacttatgcaacaaaaactacagctcatcaaccatggagtgc

SEQ ID NO: 41584 - DNA, 438 bp, Oryza sativa
  unsure (1)..(438): unsure at all n locations
agctcggtactcctcgcagaggctacaattttatgtttttatagnatatatatcatgattttctggactgttgtaggattaactattcccagacagaaacattattattgatcaaagtttaggttccaaatctattgggcaagaagaacaatgttgaaaatactcgatacttccctattatatatgggtatcacagatggaagtctcaagaacaccattanttttaaaaaaacaaacaggaataatggtcaataaacataatagatgaatctatatatataaactttaggtaaataaacagtgattaattcaagaatttttggatcatactattattacctgagaatgtgaaccccagtcatataatattgtgaatgaaaatcagatgagacagtgaccttaaaaaacgtaactttccattattatcgttatataaga

SEQ ID NO: 41585 - DNA, 472 bp, Oryza sativa
  unsure (1)..(472): unsure at all n locations
tctcattgcagggagttgcgtggactgacgggccgttatttatgtttctcggntttgggcacttgtcggcgaaatgacccattccttgacaattgaagcaacagatatatttccggactcagcattatcttctcattttgattcctctgtcctggcactggagttaggctgaaactgtaatcttggcgaggatttgtggtgccttgatgctcctctccgttggaactggcgggttggttggccatcttcttcctcagcagaaaactgaattgacaatcttttagtacatgatcagctccttcacaaaagaaacaagtgatcctgctcgttggacacctgtcgggtggatggtcttcctcacaatgaacgcatgtagtggcacacgagcaggcaacatgaccgatttctcacaacgagagcatgccttacgttccattacatcttcatcatctgatgagacttgatctgaatc

SEQ ID NO: 41586 - DNA, 280 bp, Oryza sativa
tcattttacctataagtagagaggcccttgtattacccacattcttactcctcacgtcattgcaagataattttggccgattttcatgggatgatgactaccaatcacgtgcaacagaatactctgaattgggactaatcaagtgatgggtatacagcaaaacacatcatttcctattagaatgttcattcaatgaatcaaactacagcctatggagctaactacatattatgcctgtgtggaatgtacaatgcttggcgataaccagatgctaacacct

SEQ ID NO: 41587 - DNA, 481 bp, Oryza sativa
  unsure (1)..(481): unsure at all n locations
tacggaccttgaaactcagcttcttcccctgttgctccaaagtgagatctaattgtttcgctaaagaaagtacatgaaagaaaaaaaggcttcgaatttagcagcagaaagggagaaggcgaatgctaacctgatcgactaaaacccttgctaatgaggcagttggattagttgcaggatcctccatcgagtcttcccgaacaacatccagcacccttcagacaagttcatgtcaaagcatcgttaatatatatactaatgagcacacttggcatcaggacaatacatcatgaaatcaagaatcaatagctaataattgaattatcagatggcacggaagttacataaatatattatgtagcttggaaaataccaactcanaagtttcttgtggcaatttagtattgcagaaaagaatcgattaaatatgttctgtagaagctcttntaacacaacataatgcatgggcatctatctactt

SEQ ID NO: 41588 - DNA, 403 bp, Oryza sativa
  unsure (1)..(403): unsure at all n locations
agctttaatatgcattctcatgaattattttgagtagnagtacaaactaaaacatttgcacgcatgctctgtgttcctctctggagtcagctggaaacacaaaatgggtgaccaaagcatctctgtcctttgcacgatgaaggccaacaaagctttggattgatgtcgcaatccatgcgcatgtgagactagctacacgcatgaattcgatcggtatgtcaagaactggcatgagagctacgtgtgacttgaccattgctttcctgagcgttattctcttcggccagcttcatgcttaattggaccattagccaagtaacatcaacattcacatgcccacagatgatggaaaagatagtgctctcntgtgcctttaatgccttgtcctctggtcaagaaaaca

SEQ ID NO: 41589 - DNA, 398 bp, Oryza sativa
ggattcatcacccccatcaaagtgcttggccgtgcttcaaccatcttgctatctttgtgggctaccgctatgtgatcatttaagaaggaagtttggtatttcaaggggatggttcataccgctcatcaagttgtcatgtatgtgggaaagaacgcatacctgtcaaaggaaagttacacatgcatttattaaataatgaaagaaaggtgaaagcttataacgaggaagaatgcaaatgacatcttgatataccagggcatgaaactgctaattatggacgctatataagtgacttagagaatagtccttcctgctgacaagttggcagtgatgaacatatttccacaagacagagaaagagagagaagaagagaagggagagtgggaacatatccaac

SEQ ID NO: 41590 - DNA, 102 bp, Oryza sativa
  unsure (1)..(102): unsure at all n locations
tctaatcacctgcggcatcaagcaaacccctaattatatcccctnggtgttcttgcagaagtatgcatctccggcgtggcttgctgagtactgcggctgcac

SEQ ID NO: 41591 - DNA, 457 bp, Oryza sativa
actgtttgacaccttataagatgcattgtacctactcttttataggcgaggaactgcggtataaaaggattataaggtattgggcacttgattacgcgcactttggactaagcgaaaagtgcctaagtccctaaaagaacgtgacaggccacacctgaaaatatgggctgcagacatattatgcctatgccaaaaaatatgccttcgacaccatttaaaggatgacgcatgtaacatgctcccgagtaataaatcttccgggtaatatagaccaagtgtagctcatatgaatagcttctgatctgaatgattatcccttatgggatactccaaaataaatataataattgaattccgactggcgcaagtattcggttgatagcccttacggggaataataattgggccagtctttgagcatagaaaatagactcatgactatgaattcatgtggaat

SEQ ID NO: 41592 - DNA, 453 bp, Oryza sativa
  unsure (1)..(453): unsure at all n locations
agcttacctaaatgagcttatcagattattataagctgagctccagattataataagctacttcaataagttgtctgtttctttcagcttactcctaataatctggttataataatcccaagctgaaagaaacagggccttataggattttatatgattactttcgcggtctgtttagtaatttgtacaatcaacctagctaatataataggtaaaataacaggattttgtagataagagtattggcatcatgtataaaattgatagttatagctaaaacacgtagtatgtgaggaaaggatgaattgatgagtgctagcataataacgcttgataaaatgaagccgatgataagaagattagaggatctatatccctcatccctcgggtatgatgcactcgggaccaaccacctncacaaacagctctattagagcaaagttaatagtatag

SEQ ID NO: 41593 - DNA, 457 bp, Oryza sativa
ctaagcttgtttagtctagcagtagagacatgctgaattagtgaaatgcttatagtttgctattggctgaaaagagagttatcatctgtggaacagaagatatcactgcaaccctgttgatgttacaaatgacacagatctgatatattatgtatatactgcctccgtttggaaaaggatgaagttctggcctcaacgcctgaagacaaagacatctctttacagctaataaattgacagctttgccccttactaaagtaattaatgttccaatcattgaaatgccaagagaccaagcaggcccagtgtagcacaaatttcaatctacctcaatcaatgcaagtagtgctgccacgtggaaacattcatatgcaattacggatagctaggaacagcagagttgagtttgagtaatggattgctctctctctctctctctcaaacgggcaggagagcc

SEQ ID NO: 41594 - DNA, 384 bp, Oryza sativa
acatacaaatcggaggtgcctaaatagtttgcaactttccctccaatgtgtctttggcacattacatttgcagctatgttttgcacacttttttgcctccaaaattcatttgtcagtagatgatggataaaatttgtgtcgggaagaaacaatatatacaaatttagttgatttgcttatagaaggtttattcaatagttgagaatgaaaactattgcaaacgttaatcttgaatactagaaaatcaactcaaatgaaaataaacgacgttaaacacattaaaactacgtataaactgtacaaatagctaatcagaattatttggtgtgatattttatgattgtcgtatgaataatgatatgtcattatcgttgactgttgaac

SEQ ID NO: 41595 - DNA, 441 bp, Oryza sativa
acaccggtctttttcctcacaagtgtcctcgtcggctcgtgtttcttgtcggaaagacaagaactaaccgcgttagaatacttctcgggcgtagacgttgccgatgttctgttctccgcttctgcaagaggatctttcgacatggagtcgaccagggtcataaccacgttgttctcgctcccggtgattactgggccagtcgagatcggcatcgtggtgtagatcgggaagacaatctcaccgacttgagtccacaccagcattgttgaagatgaagctccttggttgaagctggagttgacgccgtcgtcgacgaggcttgaagtcatagtaggataaccttgagcatcaaagtcccctacctggtgcaccactgacgacggggaatacccgtagaccggatatagagggtattggtgtacgcttgtaccaagatctaca

SEQ ID NO: 41596 - DNA, 423 bp, Oryza sativa
agcttcacctcattcacaaactgtatcagtttggctctttaattacaaataccttcacgttcaatgccatccatgaggtgactgtatcttctttattatttcacatcgattgttccgaaatcaagtaactgttggattttcagctagctgaccaattttggacttatgaaacaggagtgtcgacatattatggaccatgcagtaatctaagaagttgaaatctggaaatgggtgtgcattatcatacttagaaatcttcccttaacaattgccagatgcgggattcctctgcgcaggcggtatatattgttttggttttttaagttaagatcgaactataatatgtgtgcttttctcaatgaaatggattattgtgctcttctttttcctactaaaaattattaagggctattgcatttttac

SEQ ID NO: 41597 - DNA, 415 bp, Oryza sativa
  unsure (1)..(415): unsure at all n locations
atgcgacgcgccctttgttgaattctaattattggacggaattcgaccgatatttgaatcctcgagtgaatcttgaccaatagtttgaaacgccctttgttgaattcgaattaatggacggaattcgaccgatntttgaatcctcgagtgaatctcgaccaaaagtttgaaaaattttcgatgagatatcctcacgcttttgttgaattcaaaactttagacgaaattcaatcaaattatgaatcctcgagtgaatttcgaccccccccaaataaggtatcttgaaattcgcaacgagattggaccgaaaaatcgaactctcgagcantgtttcatcaaaggacactgaataattatcatgatcgttcgatttcaaaattagacgaaatccgaccaaattattgatcctcgagtg

SEQ ID NO: 41598 - DNA, 297 bp, Oryza sativa
aaaatattacattcagttcttatacctatattgtgagcggcaaaaaattaccgcaggttacgtgagcttgcggtgcttgccatcggagctagctggatcatgcaaagactatgtatgtgtggatcgtggatacaataccgatcgtctggcttattagtaaagccaatgctatatctcaaaataaataaatttaaaaatttaaaatttgactttttctttagcttattagaccatgggagcctacatgcatatatgtcgtacgtagctaattaatgcaacgcactacgtacagtcgtc

SEQ ID NO: 41599 - DNA, 480 bp, Oryza sativa
  unsure (1)..(480): unsure at all n locations
tgcactgcactcttgtgctcccatctccgagacgagacaaagattatggcgactcccaaaccctaaatcccgctctcactggagagcagaagcaagtaagaggtggagcaatggcgcggcggagcaaaggtaggcaaagcgccgccctttccccccgaagaatttgcctgcttcactgtttggatctggatttggtttggtttggtttggtgcctctcaagcggcggcgcggagggggacggcatgcggatgcatgtggtgtggcggaagggcgcggtgcggctggtgctcgtctccgccatcgcctgggcgctgctcgtcatcctcgccctcgccttccacctctggtcctgcaactccgacgtcccctttctctcaggtgctccctccntcctccccgcccgtttcatccatcacccatggaagcgacagttccatcaatttgctcgctgtgtctctacaaactagcagtagctcata

SEQ ID NO: 41600 - DNA, 361 bp, Oryza sativa
aagcacctgaggctgcagctagctagctgagtagctagagcttactttttgttggggctggccggctgcaaattacaatgtgtgctattatgtggggtgagttcattgcagcatgcaaagggtactttcgagacaacagggggtcacagtggccgtcacagtggaaaaacctcgaaagtcaacacctttctctccgtgacaatgcacactcattatatgcaccaattgcttatcgtatgatcgttcaaaaaagcccaaggattgatggacaaaaaaatgtttatacacacatgtgttgcatactattggaaccgcgcataaccatatacagtaaaatttacagggatcgaaaaatatatgt

SEQ ID NO: 41601 - DNA, 492 bp, Oryza sativa
  unsure (1)..(492): unsure at all n locations
actaagcttgaacgcgcgcacacgaacacatagcaaagtgtgtggctggtctatatttgcnagatacaacaaagatccaatcatacttctatactccttttgatcaacagcttcaccatatttattaagatccaacgcagctatagaaccaaatggtgtcgaaattggctagcaattctgcatcttgaaccgtcttggaagatctatcgtatacttagtttgatgcacaaatgcaccttgaagcgtttgcttaattttcaatcccaaagagtacgataactcacccatcatgctcatctcagattccatgcgcatagtctcaggagactctacaaccaaagcgtgagttgaacaaccaaagatgatgtcatccacataaatctgaacgaacagttgattatcaccaagcttattaacaataagcggtgtgtcaacctttcccatggtaatacacttcgcaagcaaaaagttttaatgctatcatactatgct

SEQ ID NO: 41602 - DNA, 421 bp, Oryza sativa
  unsure (1)..(421): unsure at all n locations
caagcttgattatgcatatggtatttcttgtttatgctancaatactttgaagtttatttgtctctagcatagctcgtatgtattctagtcttttcatgaatttacactttgcttttaagggagatgatgcctgacacttaaattctatacttgaattaagtaaatatgcaatgttgatactagcatatggtttgatttataaatgctctatatatatgctttattgacttgttattcctcaaatagctttacttgctcattatgaaaagagaataaaaagaatgaaaaaaatgaatatcatatccttggaaacagtctgacgacaaggacatattctatgtgagcaaaataatgggtgccgaatctctggaaacagtcttgacgacagggacgtaccctgaattaataatagaaaaatat

SEQ ID NO: 41603 - DNA, 448 bp, Oryza sativa
tgcaagggctaaagctcaaagtacactgaactattcttattttgatggtctatgatcgtccatcctagcgaggatgatcatgaacacgctaaactctctattgctcatattataactcaacatgattacttgtttataggatggttgagcatatagggtttagtgctttgatgaaatggatgaacaataactatgaattcattggctagaagtccataaataatgaaagaatgaaattttatggatctgaacaggaccaactcataaaacgtcttatggaggctgagtccataacgttaactatagatatgtggacatccaatcaaaaccggcagcatatgttcttggaggctcattacataaaagctgtttggggtctgcaatatcgtgtcctaaactatgttgaagtggatcctccttccacccatattgcgatagcccatgctat

SEQ ID NO: 41604 - DNA, 352 bp, Oryza sativa
  unsure (1)..(352): unsure at all n locations
agcttcgccgaaaagagaaaccgtgacaatttatcttgtctctctccgtctcaggtgacaaatcaaaaaccaaaaactaaaaataaaaatgtttttcgagttttttttttttgccgattcaacaagagagcccacccttttttccccatttcggataaggctcacctcgccgttctatggtggggcgccnnagacncgcacgcgtgcgcacactttaccaaccaaccaaccatcacccaatctcatgtgacctgggacgcaccctgcccttgtagcaagtctagcaacggtaatggaagtgcaagtaccaccctacctaatcaacccttattatggacctaattaattatta

SEQ ID NO: 41605 - DNA, 469 bp, Oryza sativa
  unsure (1)..(469): unsure at all n locations
gaccataaaactaagcttntctccccatgacagcttctgcgtgtgaagaattttcttcattccatagccngtcctcctcaattgaggaactcctcctccaccgaagatagcccacatatcatcatcgaggatactgcaacagcaatttggttatgaaaatctccacttgtctcattgaatggcaaaaaagattggaagtttagacaggaaagcaaggaatgcatcataataaaccttttaatcctgaactcttctggtagtaaggcatcttcccaacctcaagcaccttggatacatcgaatgcggactttgcggcatgctcgaattgtgatctgatcttctccaccacctcgacatctgcattgttaaccttcctggggatctggggatgccccgcggcatccgaatgccgcagctgttcttcaatcacactcttctgaactacattgagatcactgatcatgctgct

SEQ ID NO: 41606 - DNA, 460 bp, Oryza sativa
  unsure (1)..(460): unsure at all n locations
ggacacannaaaaacggctctgagagtaggaaggtctcttttggctngcagccacagtataccacgtctaataagtactccatccatcttataatatactctctccgatatgttatatttgacaccgttgactttttaacacatgtttgaccgctcgacttattcaaaaaatttaaataattattaattcttttcctatcattcgattcattgctaaatatacgtttatgcatacgtatagatttacatattttacaaaagtttttgaataagacgaacggtcaaacgtgtgataaaaagtcaacgacgtcaaataaaacgaaacggagggagtagtaacctaataccagataaaacgtatcataatactataaatctatataaggagcatgtccagattcataagaatagattgattattactataccgatggagtatgcaaatttcttctctttaact

SEQ ID NO: 41607 - DNA, 467 bp, Oryza sativa
ctccgaccggaccttaagcacctgagctgcagctatctatagatacaatgtgttatttttttattagaccgagatgctctttcgatcactctcggagtctaactaaaagtaaaatattgattggacacgttttgccgacttgccgttgtaattagtagtagtattttgccgcataatcacgatcagtccattaataggagtttgaatttatttacagaaaatacgaaataaatagcttaagccaacggtgttccgaacactactgcttcactccatttgcttttctcactttgatggcccgtgttcatcacgtagagcatcttacaggtcgcacggcggcgcatggggaatttccttttatatgtcaagtttcttcaaaataactggatgagcttctatatatggtgagaccaccacccagcacgcctcatggctttcttttattaacaaacataccgattggacag

SEQ ID NO: 41608 - DNA, 440 bp, Oryza sativa
  unsure (1)..(440): unsure at all n locations
tgtggccagtgatagnccatttgttcctctcacggtggttctgttatgagaacaacaaacagcgggttctctccctgctgtgcgcctctggttgggcgacatgtggcggtctgtgagttggcagctgcgtgtctcggtggctttgacgtgtccaaaaagcgagcgggtgggggccccctcctccgctgcgcttgtcttttctttctatccatccaaacagggacagtcctgtctcctgtgcctagatttgcatgtcgccagatacgtctcctgtactcccttcgactacctccgtccaaaaatataataactttttactataaatctggacacacatgtgtccaaatttatagctaaaaatgcttacatttttttatggagggagtattncaattgcagccatgattttacgtgtctaactttaaccgtctgtttattta

SEQ ID NO: 41609 - DNA, 390 bp, Oryza sativa
  unsure (1)..(390): unsure at all n locations
agctntacctcttcgtcgaagatcaaacctggtgcagcacaactcanaagcaaaatctcgtcgaaataatgaanatagaaaagggtggcgatgcgccgaatattattgaactgtcgtcccttgattacaaggtgtcgggtcatatttatacccgaagtacataatatgtcctttctggacatgagtcttatctctaacacaacttaaaatacaaataagttctctaacacaacttaaaatacaaataagttctttggtggactcttaccaaacatatccctaaggaaactgaanatgtcctaattaacatatacaatngccctttttaggactccaatccttgtgcggcaatggctgtgtagtgcttngacaaatcttgacgacagtcgt

SEQ ID NO: 41610 - DNA, 442 bp, Oryza sativa
  unsure (1)..(442): unsure at all n locations
ttacaaataanaggtttcgataggttagtcctactatggttgtgggagggagagctattcaagtgacaaatagtatgagttgtgagagggcgaccctttggatgaaaaatagcaaagcaagggatgcaaggacgacaacatttatagggacttcaaacatgatcacgatcatgataagtttcaatattattaggcgtcgacaacaataaagaagagatgcggtgtaagctaacaaggggataagtgataaaggagcgggaagcagtggttgccatgggagagcgagctgaggagcaaaaaaaaatagaagtaatgtggcagcgatgacttctaaaaataataaaaaggaactccaactaggataagagttttgattntataaggtgctgatgacaacacaatgagagatggcgggacaggttgacaactagacaggtggaaa

SEQ ID NO: 41611 - DNA, 387 bp, Oryza sativa
  unsure (1)..(387): unsure at all n locations
caagatatcatgtagcaatccattgtcctgtcataaaaattataacgccagtctgaatataaagcagaaatataagtaatagaaaagaaattaatatgcataatttcaccgatactaacttgtgcatgcttcagaaatcctcgcccaaggaaccgcctcaaatagttcaactaaccaaagatacacaaattagcaaatttataaatgtgcaagcacaaaagttcagataatcattgaaataaaacaaacacctgtattgattcacgccatgatgtaactcttanaataccatgctngcctgcattctaagtgattcttaaggcactcaccagtctgcaaaaaggtaatagatgatcgaaaaaaaagctttaaaacattcatgataca

SEQ ID NO: 41612 - DNA, 403 bp, Oryza sativa
  unsure (1)..(403): unsure at all n locations
tcaccgctntgagtgatccacgatgtcggacttatggggtaagaacggngaaaatggaaatgaagatggagcgagcagcaagggaactccactacctaagggagctactataccttttgattacagcaaacttaccattccctctcacaacttcgtctccgtgccttccgggcgtgctcctcaatttgatgggacacattacgccgcttggaagcacaagatgaagttgcatctaatctctttgcatccaagtatttggaaagttgtttgtacaggtcttgatgtaccccatgatgacatggagctcacttcggagcaagtgcaactcatccaccgcaatgctcaagcttccaatgcaattctctccgccttgagtccggaggagttcaacaaggttgatgga

SEQ ID NO: 41613 - DNA, 388 bp, Oryza sativa
  unsure (1)..(388): unsure at all n locations
agncttttcttaattctctcttctataagtttccaatacttattagaaagcttcctaaaatgcatcggaattccaaggtatttaaaaggaaaggtcctaacttacaacaaaaatatcagaatattgttcataacattcctttgcctgactaaagcaaaataattcactcttgtgaaaatttatttttaggccagataacttttcaaataccgataaaatcagtttcaaattctttgcttgttgcaagtcatgctccaaaaagatgatagtatcatctgcgtattgcaagatagacaaactatcatcaacaagatgatgaataaccccactcaagagtcccgcctctttagccctcttaatcaatagagtaagcatgtcagctactata

SEQ ID NO: 41614 - DNA, 463 bp, Oryza sativa
  unsure (1)..(463): unsure at all n locations
attacggacctataaaactcaagcttgtggaacccggagatacctatagtacgttccattcattcagatcacacatcctgttgtacctttaatttgacctgaaactgaaaacattgttggataatcgttaatggtcacgaagatgatggccttcactgtgaagtattcccttcggtactcgtcctacactntcaatccttcttttcataaatcagccatatcttccaacaatggttcaagaaatatgtcaatatcaatacaaggctgacggtgtccctgtatgaggatacagagtagtacgtattttcgcttttgacaaagccaggtaggaagattatacatggtgagaagcactggccaagtactatgtgagctgctcatgtctccaaaagggttaactccatcagtactcanggcaaatctaatgttccatgggtggttagcaaactctctatactgagca

SEQ ID NO: 41615 - DNA, 430 bp, Oryza sativa
  unsure (1)..(430): unsure at all n locations
agcttataaggaggaacttgaatcgaaccatgacaagctatccgataggaccacaatgcttcggccaatcgagtatgccactgccgaggataatctgaaattttcctttaatcagcttaattaaactcttattagatgcctcggcttgcccattagcttgtgcataatatggtgaagaattcaacaacttgatacccatgctatcggcaaactgagcaaactcatcggacacaaagattgaaccttgatcggtcgtaattgtttgaggaataccaaatcggtagacaatatgttcttgaacaaattggatagcatccncagagtcaactttcttcaaaggaatcacctctatccaccttgtaaaataatctgctgccccaatatgaacttgtgacccttactccgaggtggattaatcatgccgatcata

SEQ ID NO: 41616 - DNA, 481 bp, Oryza sativa
  unsure (1)..(481): unsure at all n locations
cggagatcactntntgtgaaagaaattcttctacatatgtcccttaaaacacattgtttctgattggataaaaactttatagtctttgtgtggtttctttcctctgtaattttgaaaacattttttgagttctataaaactacactgctgggcaaagtcctggcagtatttctagtcaaaaaaaaagttgtcttacctagcataataaagtctaacctatttttttggtattttctattttgcaattnttatgttgtttttagtttataagatgcaatgaaaataaaacatgcatttggaaagggaaacatgcaatgtgatacaagttacctcagcggggggagagacgtctcccaccaagcttgcctttcgctcagggtccttgataaggattgaacccctggaagcgaaagtacgcttgaaggtcgtcatgctgttgctgcatcangttgcgttgtggttgtggtgaactgacatcaac

SEQ ID NO: 41617 - DNA, 319 bp, Oryza sativa
gttactttcacgggcggggggtcatacaagcttccccgcggcgcctctccgccgattaacgccttcccgcttgccacggcgacgcggggaccggcatgttcttggtgcgtgaccaggtcgtggcgaccggcgacccctggctgtcggagtcgtccgcggatttaggacgagtggttatttgcggcgaccaggcatggcgtctcgcgctaccgcagctgggattaattcgcgttcagttgctaaaaaaaatgccggtgctcggcggcgatgatggcgagactgcggtcacggggagcacagatggagcatatgagcgcgg

SEQ ID NO: 41618 - DNA, 488 bp, Oryza sativa
  unsure (1)..(488): unsure at all n locations
tactcaagcttagctgattttcttgccgagtggaccgagtgccaagaatacatttcttatgaaaagatggaatattggactatgcatttcgatgggtcgaagaggcttacaggcactggagctggggtcgtcttgatttccccgactggagaaagattgagctacgtattgtggatacatttttctgcgtcccataacgtggcggaatacgaggcgctactccatggattaaggattgcaatctctttaggcattcgccgattaatcgtccgtggagactctcagttagttgttaatcaagtcatgaaagagtggtcatgtctagatgataatatgactgcttatcgacaagaggtacgcaagttggaaaataaattcgatggactcgagctcacccatgttctccgacataacaatgaggcagccgacagactggccaattttngttcaatacgggaagcagctccttcagatgtgttcgtcgaaca

SEQ ID NO: 41619 - DNA, 268 bp, Oryza sativa
catggatccttgatccgatttaggggtggctgctgctacccgcggttggagagacagtcccgcacaaaggggatttcttgagggaagtggtagcggcagatttccttcctgttctatgccctcttcacatgaatgtttggaagtctccagcgcttaatatttgaagatatgcagtctgagaaactaattgatcaatgaatgtgaggggaaataggaagatatcgggatgtgctgctactagaccatttcctgacccatgtggcatggg

SEQ ID NO: 41620 - DNA, 487 bp, Oryza sativa
actaagccttaatttaaatttaatggtaattatgttttcagatggttatattaactctgtactcatctctgtgcatagctaataagtaaatactctaaaatggtcactttgattcgtatgaaaaacattgaaacttagaggatccggatcctagaggaaaaattcctacaaatgtccaagaaacgatggattaaatcatatccattcatttgaaattcatatagaattgttaacgaccaacattggtaagatatgaaccaagttcagcattgaaatcaaagaggattctacagagagttagattcgaagaacaaagtgtgcatcggctgcgaagacatcggctggagtctgcatcgactgagatgaatctgacagagaacaaccgatacagccgacatagccgatacagccgattctgatgaagatggttgtaaaaactgttctagaatcgatcaacgtgcttcacacagattgcaacgactgagat

SEQ ID NO: 41621 - DNA, 441 bp, Oryza sativa
  unsure (1)..(441): unsure at all n locations
agcttctctaaacctactagaacagggaatatagcgactcangatcacctctcctataaatataaatataaatataaatatagggaccaaggtcaattgagacgacaccaatcaatatattacccctatcctctgtattatacatctttctccttgatgctacctgttcccaagtctattatccttcaatccctcaattgctcatcgttactcgtctctacggcgttgaggacgtcctatctggcctgtcgagcctaggacaaaccgacgtgtgttcaccctgatggggtcccttctgggtgttcgttcagtggcatctaccttttccagcagcggcatgtctccggctggtgctatgggttgcacataatgtgctgaaagtgtgtggcgtgaattgatgatgatactangtcccgatctaccgataagtattgataactc

SEQ ID NO: 41622 - DNA, 432 bp, Oryza sativa
tgatatataattcactatttaataaaatatatttataaatattaaataattaatatcaagatgatgcataatagttaacttaaaaatgtgctaataaataaaattgatattgtactgtaaagtagatgtcaaataattgtccttaacacgctttctcactgtaaaacctatgtaaactaattaggagcattgtttcaaattaattaaagcataggaaatactagtgccatttattaatatatgtcaatatataattatactcatgacatccaaattgtataaataatgtttagcctcatactttgtgactaaaagttgaacacacgtagatgagtctttaacttgtttatgagagataataacagagctagtgtgactaaaatcacccgcacgaaattaattaacggcatttcctatacagtagtatatatt

SEQ ID NO: 41623 - DNA, 358 bp, Oryza sativa
  unsure (1)..(358): unsure at all n locations
ctttgagtcctccttagcacaattattgcacagaaatctctccataagcttcgtcaggtaggccgagacagcacattcaagacaatntcatgctaaacaagaaatcaaaccagagtaaacaagatgagtaaccttcactaaaccatngngctgtcttcaattagataggtttacaaagtgactattggaaactattcaagtaaaatggagattttaagtttttacctttattattgtctacctttattcttaccacaaggaaagtactacgtatcagcaagttctttcaggcagtacgtttgctattaatgtctagtgtggggaatattacctgtacaacactgactcaatttctatg

SEQ ID NO: 41624 - DNA, 492 bp, Oryza sativa
  unsure (1)..(492): unsure at all n locations
actcagcttgaccaggcgtgagtcactggaggccacagatggagtctgtctgcgaacttcaccaacaactggatcttgtcaacaagttgaaccaaacttcttcaacgacgtcttcccctctagttccgttgacagacgaggaaaggaaggcgccgttgctgcctacgccgccgattccatctcaagcggctgctgcggctgaaggcggaagcaagatggccagtggccgcctacaagttcatgaacaccggggaagggcactgggagtggcaaccaccctgggcccgactccggtcaagggtacgtatgaatctccttccacatctctgaaaaattatgagcaatntgagttcgggaatggtgattgtgatggggatcagtttgggcgccagtataaccatagggttcctaaattagatttccctaagattgatggttcagatcctgtggattggagaatgagatgtgagcattattntgatgtgaataaca

SEQ ID NO: 41625 - DNA, 191 bp, Oryza sativa
ccaatgacaaaataaagacttcttgacaagggagattcccaaccaacattgtagcaggacaatcctagaccgccacgaacaaacaacacagaacatcgcatcgcccatgatgagggagtctatgtcgtgcgcaaatccaggttggaagaccgccgcacgacgtcacgaaactctctgacgcagcgagaaca

SEQ ID NO: 41626 - DNA, 482 bp, Oryza sativa
  unsure (1)..(482): unsure at all n locations
tgttgggatngacaaggcaagggatgagtctaatgtttatattgtctgcggcggatgaagcgctcaagaagctcaagatggtctctgttgtcagaattggaggattgggcaagacaactctttccaaagtagtgtttgacatgcttaaattgcaatttgattgtgctgcttttgttcctgtcggtcaaagccctgaaatcaagaaagtcctaaaggacattctagttgaacttaacaagcaaaagtacatgtcatttgatgttaccgcagttagtgaaaggcatatgattaatgagcttcgagaatacgttgacaataagaggtaagtgtgtagtacctaacattttcttattttgctttccatgatgaacttaagctcatgggagttctataagctactaaaagagtgctctattagtttatggttgcgatagctgtagacctttatctatactactggtatatagaactctgtctatatt

SEQ ID NO: 41627 - DNA, 433 bp, Oryza sativa
  unsure (1)..(433): unsure at all n locations
agcttttcttggcgcacggaccttactggttcttatttagggcgnggaatcaccttctcttacgcctcgctaatattatattatctcacgacccagatagtttaaatggaatctaaccactgatgggagaatctcggttaaatctctttatcttgcgttggtgcagaccgatgttcccaatataaaccaaagaatcaggaagatcaaagcccctctaaagattaagatcttcttatggtacttacgtcatggagtagtcttaacaaaaaataatcttattaaaaggaattggagaggaaacaagtcttgttctttctgccacaaagatgaaactattaatcatttgttgttgattgtcgtttgcccgccagtttgtctttaatcagtttgcttcaatattagttactaatagacaactatatngttggcattg

SEQ ID NO: 41628 - DNA, 464 bp, Oryza sativa
  unsure (1)..(464): unsure at all n locations
tgatcatgatccttttccggtgaatacaattaatttaatgatttatggtgttgattcggccggagcaagccgaatctactaagggaaaggaagtggtcattggtgaaccgaggtccatgatgatagtgccaaagaagccggaggttggcgtttggaaggagaataagagtggagcttcaacttctaaagcccctaggaagaccaaggtgacttttgatatgcttttggagaaatatgagaagcaaggtggtgagaaaattcgcaacaaagggaaaagaccaagatcacctcctagggagcgatttggtcattcaccaagatggtcgcattcaccttcgtatcattatccacaagacatgttatggggttcctatccaatgccgccgctgggttatccttatccttgctnntatgccttgggggcgacgccgccaatgttcaatcatatgcctccaatgcgattc

SEQ ID NO: 41629 - DNA, 440 bp, Oryza sativa
  unsure (1)..(440): unsure at all n locations
agcttccagcaatggagagactctactggtgtggccagcannatgcctggcccacatttctgtggcgtgcggatatctggcgctgcgttgaagagtctctgagtctagaatgcgttactactttgaggtgcgagaatcggtcgcacgacatttttttaggtggtcgtccgatctgatctgatcaatagaagggctgcctgtttgacaaatctggaacgaggaaaaactcaacatgtggaacgttttctgaatgtctgtgtttggaattgcttttgtgatttctttgtttaataaggtgcataccacttgaccaatctctaaaccactggataacgtcaacaaaagcaacatgtgaaagtatcatgtgtccagtcatgaccgctgaaaattttactggctcacggaagaataatgtatatctatacatatcatatgttaca

SEQ ID NO: 41630 - DNA, 475 bp, Oryza sativa
  unsure (1)..(475): unsure at all n locations
ntacagngtattggnntttccaagcattagtctacattattatacaccatatatagaccccaaaaacacactcttcccatataaacaaaatatcaatttcttcttctgcaatatcattgtaatctggaatagaaatcaaatataattactaccatgttgggaattgcttactatgctttacattatgaaaattaagaagtgtgcacacagtacgtgaattgcattgttatcatgacgtccagatgggcaagacacaccattcactgcatgtgcagaccaacataaccactacatcctcgccatacttatgtattaccattgaccagtaacacctttgaatacatattcatggatgtatttgcctggaaaaattgtagaatgcctaaaacagcatggtgttactcctctaaacgatagacaattgatatgttccataatagtaagagcaatctatgtcactcgttcacaactttgt

SEQ ID NO: 41631 - DNA, 418 bp, Oryza sativa
  unsure (1)..(418): unsure at all n locations
agctnttcatttactcgcaaaatccgtactattatgtcccttaatggggcatttagtagtcatttcatgacttgcatgtcaactgatgcaaaacaataggctaaccaaatgattgattctaatttctcgttcctttttagccatattttcataaatatcattaactataactgcgtgcaaatatttttcatagcaattctactgatatcaatttattatataaaaacataagccagtgagttaaagagtactttaaggtacgttttgacttttatttatgaacacagagagtaataatcatcattaatctgatccttaattgtgcattttaagcatatcatgacttacatgttaactgatgcaaacaacatttgctaccaagtgtgactgattctgatgtgtcttgcaaaataccact

SEQ ID NO: 41632 - DNA, 472 bp, Oryza sativa
  unsure (1)..(472): unsure at all n locations
tgtccttatttctctagatttagcagtgccaagtgaactattgttgcaattntgntcaacctatttcaactgagattaatggtttcataattcctacatcctagctagtctatatcctttcatatcatatgcacaattagaactaaattctacctcggttttttcatcttcctcttgtgagagccattgatgtacttgctcatcatatcctcgtcaaatatattatctaatgagtctttggaatagtcttcagcgacataaactgcagaatccaatttcttaacagtagtgcccctatagatagtagatgaaaatggtattagcattcttcacatcaaacaaaagatccagatattttatctgtgtgacaagcaacaaaaagaatactaccttttcacatatcataccagttaggatagccaccttcgatgacnagcatcatattccgttgccaaacaacaaaagggtcact

SEQ ID NO: 41633 - DNA, 253 bp, Oryza sativa
  unsure (1)..(253): unsure at all n locations
tatgccatttttttttcatttgagggcctgttcagattatagcccaaattaaccttgccaaaaatttagcaagatangcagcctatcttgctataaattttggaggaattcttatgtatttatcaaatttggcaacaaactaaacgcagatattttttttggtactctgaaaaaaaaatggtatgttgaaaatggcataaacctgaaccgcccctgagacttatgtgcatggttcaaattgtgatgtgagtag

SEQ ID NO: 41634 - DNA, 423 bp, Oryza sativa
cttgcaactattaaacatgtgtgagcgctagcctggatatatttgttagctgcgccgttgacatgcggaccccacatgtctacaaaaaggaccgcggctgaccgaatacatttataccgtccacgggtctatggaagcggatcccgggtgtcaaccgaggcgagtggtcgacatacagagtccactagacaccacacgggctgcacacgtggaaaccacgccgctaccgagcgggcacactaacacggtcaccacgcgcacaagcgaacgactaccgacactcggtcacgggtaccggtgtcgacaaccgcacaacgagcactggcgacaacgtaaggacgaggacggtgcagcatgagtggagaccttaccaccacgcgacgaagcgtgggaacgacaactacgaacgggctcggcggagac

SEQ ID NO: 41635 - DNA, 436 bp, Oryza sativa
  unsure (1)..(436): unsure at all n locations
agcttaggcaaaattgtcagctactatcttattcctttagccttcacctaanaatggcttactattattttcctggagttggcctcaattttctcacatcactcatattctagacgcgttagttacaacaaataatgtgattactgagcaggaagttcaagaatatcggcatatttgtaggaaaatgatgtcttcagtccaaactgagaaaatattatgggagtcttctcttaattgctgccccaggcagcaaggcatatggatatgccattaaccaactcaagaattgcactgtaaaatgtcaaaaactaaatggaaagtatttgtgttcttatcaaagtctttctgttgagttntaaggttcagagttatgatcccttgatggtccatttgtgttggtttggatcaacaacaatccatgggctgctgataatat

SEQ ID NO: 41636 - DNA, 474 bp, Oryza sativa
  unsure (1)..(474): unsure at all n locations
tgctgaattaccgatcgaggtggatggagtttgatttngttaatactaaaanggcctatatttatgtgaggatttgatccttctatgtggcatgaggtaaccctgagttggcttggaaaaggctatgtcgcgaacctctgacaccggccagtgtctggagtaagttcgtgtcttgtgggtaaagtgtacccctctgcagaggttaactaactgttcgaatagccgtacccacggtcatgggcggatgtgaggtggttcccgttgcgtagatttgtttgcctgtgctctgtgaaaagttgttgtggtgtgggaatcgtaaccagaatcagcctatgtggtagatggatgacctgagtggtcagaaacgaatctgtgtgattcgggatgtctactggcatcatagactatgctttccgagtggaagcggattgttttgctgctgggcagctggactcttggagtccgcaaaacgaa

SEQ ID NO: 41637 - DNA, 417 bp, Oryza sativa
  unsure (1)..(417): unsure at all n locations
agcttgggggagagatgtctctcccttctctattgaactnggatcatattgcatatttccctttcaaattacactgtttaaattttgcattgcattataaacctgaaaacaacataaaaanttgcaaaactaaaaataccaaaaagatagggtagatttaatatgctaggtaagacatgcttagttcttcatgttgaaatgatgaataggtgctctgttttatatctctcatatatgggttcatgggtaagaactctcttaaaattagaatataggtagcctacaattatccaagaacctgaggtaaggagctgcactttgctgatctgagtctagggtgttgcgagaaatgaaaaatcaataagagttgtataaataatcatgttcttagnttgacttgaattccgatgtttattt

SEQ ID NO: 41638 - DNA, 445 bp, Oryza sativa
tattccccacaggatgcgcaccaagaagatgcattttctgttcttttattactagcagccttaatatttgagcatttgaaatatcatactcatcagatcgtctttatacttatatctcccaattaatgtttgcagcggaatcatactttccatcatagactggtgacttacatgcaacatgtgcaaaattatagtcatgtaccttatatgcatcacgtgaagaatgtgttatatctcttctaaggtgtagatgttgacgttgagcatgaccatcttgtttccccttgcgcaatcctgccatggttagcagctaacaagaaacatacacaagaatatacacgctcctatcaactattatgttctggcagcttatatgttacacacactctagcttttaccaagctttacaagacttaccatgcaagtgaatgggatgacaccactc

SEQ ID NO: 41639 - DNA, 452 bp, Oryza sativa
  unsure (1)..(452): unsure at all n locations
agcttctctcttcttgtattctagtgtcgatatcgatgattctcaagntcgaaattatttttaggttacataacagaatagctttcgtacttgaatttggagtggtagcattaggagcatggttaggcatgttagtattatcaaggattggtctagcttcttaggtcaagcgtggtaaattgcatagtttctttaacaaaatatgggtgatccatgtttgacttgtgggtttaacaatgttcattgggaaagtagggaggcatctacctattgaatatagcttttctacatttaataactaaaataatccaaagagttagtttgggtcagagttgacttggtctagaaagaaaccgtgtttcaaaaatgtatggttaactaattataattaggaagatgtttatgcctgcccaaccgatcacagctgctgttactggtntgatctctactct

SEQ ID NO: 41640 - DNA, 475 bp, Oryza sativa
  unsure (1)..(475): unsure at all n locations
ctctttctcggcttctgtgaccttgccgatatctctatggaggatccttaagttctcacatgccgccagcccgcagcagttagaccatcttccaatgagtcctgggcgccgtgggcctaccactagcgtcaatctctcttataactggcactgtggtcggccatatattntgtgaccggggatttctactcgacctacttgcacttgtcttgcccgacattgatgtatgttgttcttgcggcaattctgcagcacaaacagaaggcaacatttgctaaggggtgctagctaaaatttatgtggtcatgtggtgaaaatttgtcctataaattaccatgaatttcgggttgttcgaccgccgttgtcgagggatgaccttctgcaactgtctccgtggctgggttggcttattcctggatcctcgcangtgttggggagggcgggttngcgccggacgttgtcatgggtctaattt

SEQ ID NO: 41641 - DNA, 427 bp, Oryza sativa
  unsure (1)..(427): unsure at all n locations
agcttgctctaattcttgtgtgctaccatgataagagtcctcatatattctagaagcgcgctccaagatatctttgatatcagccttattcaaaccaccggcacttgaaaaaattngagaccattccggttgtatggaagatgacttgctgtgaaaggcagaagtttgtttggttaaaaatagagagaattaaacagttgtttctacataattaggcatttcaaaagaagaatgactgaacatgtggaaaaacaagaaagggaaaactttgttctagtgactacaaatgtgtgccatactggntctaccacagaatgtgtctcgattttgccacgatcgaaactggttcatgtttgaaagttactacgatattacacgtngcccctcgtaagaattttttccacctatgtcttctttcctcttcctc

SEQ ID NO: 41642 - DNA, 484 bp, Oryza sativa
  unsure (1)..(484): unsure at all n locations
gctgcagcgatgcgtacagtanaactctcaagaaatggcactgattgctggcgagttcaagcttttccgtagcaatctttacctaaatattttgccttcaaaattaagttacatcttgtgttgcactctcactgtccagtaatcatcaatgatgcaactgcaacaaccaaaaaatataatgtttaagccctaattaacctacaattactagcatctatagggagcacactgtctccaatataacattaacagattgctctattactgtctgcaatatgcaactgttgctgttagattgaacctcttaattaccagcactgcagtactagattgactgagagagatattgaaggacctttcctttgatatatcagtaccataattgtttctcaattcatgtagaaatgattagttcttcatgcccaagagtttcaagtgaacatgattagtcttctttccatgggcacagattgtaactagtatg

SEQ ID NO: 41643 - DNA, 300 bp, Oryza sativa
catgcaagcttgcttgagaggggtatcgaaccggccatctctttatggtctgatcgatcgaagttctggtactatgctcactgtggaacgctcaacccagttgatggcttctggtcttcagcgatcagatacgcgaggctgcgaatcgactaacggatgcagaggaagcctcttctaaggcacattccgacccgacagatagaaggacgagctgtcactcgccctacagactaccgatcatccaatacgaacacgaaggataagcgtgattacctataagaagtggttcagtgaagacat

SEQ ID NO: 41644 - DNA, 451 bp, Oryza sativa
  unsure (1)..(451): unsure at all n locations
tgcaatgtggcgcttgcagaacgacagcagccggaggccttttatgtaatggttgncaaggtattggaaggtgcaatgagcgtggataactgcctacattacagttttttcaatacatattcagtaatatctgctcaaggcaacccatctacatattcggctccacctcaagaatcaatactatctgtgccaagatgaaatgggtggctaatgattacaggacaatcacgttcatgtactttaccttttattactacttttatattttatctgtttcgctctttgagaagtatatttcagaaagcatcaaaagaatactttctggctattttggattttcggagatgttctgagtatgtcgctaaaaacattagcaccactagtacatgttctgaaagcaatgtgggctttgatttctaatattactttgaagaatgttgattcatgaact

SEQ ID NO: 41645 - DNA, 398 bp, Oryza sativa
  unsure (1)..(398): unsure at all n locations
taacgcacttgcgaaaatcttcatgttcattacagtgtcgcaagacatatcgatgtgcttgtactaaaaattgggtatcaaatcgggctacggtgataccttgccgattgattcaccagcactctcaaacatatacaagtcctttgtattatctgaaggatcaaggtttctgggtggtcttgtaaagcgtgtggtttcatctaaaaatctcgaacagtatggtaggcactcgtctgcaatataaccttcaacaattgaaccttctgggtaagctcggtttcgcacaagtgcctttattcgaacanatgatctatacatatttaaaaatatatgttatttccagcgaatagtggatattagagaggaaaaacaatatcaatacctctctagaggataca

SEQ ID NO: 41646 - DNA, 481 bp, Oryza sativa
  unsure (1)..(481): unsure at all n locations
ntgtgtgcatacgatatgttcccgtctagtactatctcgttattattctataggttgaatttattcgaaaaaatcttcaagaatacattttgagtattgacttctcataaactatagtcttaatagctgtaagtgaaacgttatatgaaagtacttttaaacatggatctattaatatatttttaatgaactaaatatatttataatttgactaattgcttggtcaaaatccaccaagattgacctttcaaatgaaaatacaccctataaaatctgcaaagggatgaatttacaaaatatgaggtaccaatttctaacattaataatcattaagcagatgtatgagtctgcttatcatccccatttaaatactgttctattaggctcagtttggctctgtgtaatttgaagaaatgctaacatctttattaattgttaccttcgattataaattataattgatagcacacaacatgatatt

SEQ ID NO: 41647 - DNA, 333 bp, Oryza sativa
  unsure (1)..(333): unsure at all n locations
agctntatatagctgcctactggctgtttatatgttcttgcgctattngggtttatcaagcaattgatcggatactatattattgctttttgccacgtaagtggcatttttattgactaatattatggcttacgctgattatatattgtggtcattttccaagcggttggtaaatcctttatgagtttatttactcggattttacaccatatatgctatatatttccaggtgtggtgaaaccatgtgtgttttacagacttaagcacatttgttaaagcagtgtgcgcatggtgtatgcccaatactttggaaatttctttatttaaagcata

SEQ ID NO: 41648 - DNA, 461 bp, Oryza sativa
  unsure (1)..(461): unsure at all n locations
ttattctangtcatggatcggacatggatgtacaacacgttattttcttatccaacgttcttgaaggaagcaaccaaatttgttgaggtcgcaaagacacatgctgtgagggataatttgagaagcattttttgcccatgcaaagtgtgtaagaacgaaattatgttgcacgatccgaatgaaatattgtcgcacatcgtagagcgaggattttagaagggctacgagatatggacttttcatggggaagtcggcggtcgtaacgaagtgacggatgatttctgctttgatgatgcagaaaattttataatcgaagacatgtcacagggaaacatcccagaatgcggtggctttggtatagagaatgaaggtattgattntgatccggaagatatgttgtggcacgttgaaccaaatgtcctaactggtagaacacgatgggtggacaattctgaagcgtt

SEQ ID NO: 41649 - DNA, 441 bp, Oryza sativa
  unsure (1)..(441): unsure at all n locations
agcntataaagagtaataagatttgttattattcttcaacacaaatttatgcgcatattgtctattaaaactacgccatttgagaaagtactaattatcaagcttcaaattttaaatcaaatcttaatcatctaatgtttatgactagctaataacatgagttctttcacacagtacctacaagtcccaacaattggcaccatcgagtactagtacccaaggattaataaaccgttttagatggggttacgaccaccccgcggtttggcggttatcattggcaccatcaagaactataacacagggcttaataaaccgttttggatacggttaccgtcacctcacggtttgacggttatcacggtaaccgcgaataccacactgttatcgngaaatataccgtggctttaataactgaaagattatcacatttataaccac

SEQ ID NO: 41650 - DNA, 237 bp, Oryza sativa
aaatacttttgaaagaaaaagagggtttataaaagaagatgcctgtgccacgcacggcccagagcccaggccccagcagggatggacgaaaggacatgccacttggagaacggactcaaaaacaagacgtatagcacggggcacgtctcaagcaagagtggacacctccatccggatcgacaaaaagcacgcaacacagacgccggacccgtactccgccataccttgtacaaacgc

SEQ ID NO: 41651 - DNA, 443 bp, Oryza sativa
  unsure (1)..(443): unsure at all n locations
ttaagtcacctgcggcatcaagctttattaattagacgattacattttttgttataaccatactaagaaaactacttagagaatggataatctatacacaacaatttcagatattagattatcagtttcttgtgtttntttactcaatttctttactggctgtttttgttcttcacgaagtgcactcacatgactcaatttcttgttgagttaacacatgactgttcttaattgagaagtgtactcaaatattgcctattttgcttatagcagtcactctgcgatatggcccacatgtacctactttagcaactacctgatgttgcaccattgctcatgtaaagtccctttctgcagtaagctgacaaagacaacataatgttcatttcagccatatgcataaagaattggactaattgtgccaacaatgtttgcaaaaaaaa

SEQ ID NO: 41652 - DNA, 313 bp, Oryza sativa
gacgtcactgagtgtgaactatactcgacggctactcctgatagcaagactatcggtgtgtcaggatactaacggagcgctctttgataactctgcatggacaaatatcccgtgacacaatccttctataaggatcaaaaactagcttggtgtccacaacgtgcaacagcgtaccatacacacacggatcaacatactgactgaggcttattacccgtaccagagtctcatcaagagttcactgtgcgctgacacgcttcaccctaggattgcggtgctatctaattctcgatgtgtggacgcgatgctatcc

SEQ ID NO: 41653 - DNA, 435 bp, Oryza sativa
  unsure (1)..(435): unsure at all n locations
agctttattgaaactcaatcaattaaactattatgataaaaccaaactgagcctactcccggtctatgtatgtaatgcacacagtcnaagaaccaaaatctcatcccaatcacaaacataaaacagtaacataaaaattagtggatatcaatctgtatatactagatccccacccaccatgctgggcaaaacactttcgtgccacatgatccaaccgtcgaaataccatcgtaataaataaccggtcccttaaatgtaaagaacaattaggacttgtttggtttaaaggggattgaagaggattggcgtggaatataaccccttcaatccctcccctctctcagagggattaaccgaacaaggtcttaagtagataattcttcgaataattcaaaaataatctgtttaacaggggcatgtggtagagttatacta

SEQ ID NO: 41654 - DNA, 443 bp, Oryza sativa
tgttgagttgcatccaacgggctagagaagcttatctgttttgtcgagctctctggcttgcagtcgacctctttgccatgatcctcgcaccctcacagtccgcattatactacttgaaagacagagatggatggcattgtcagtgtgcctgtcaatgctgatcccaatggatgtgtttgggccctaccctaggttgcccgcagtagtgaccatggacgtctccatggcactatgacaaatgatgaaagaagatacaatggcgctagggtggatgtgccatgatggatggagaggcatcgccatagataaagtgggggagtggagaaatccggcggatgtaacgggagagttgtgagatgcggtgggattctgttgataagcgcattgatgcagcaagcacatggaggcaacaagtgacgctagtctagttatatgggcatgat

SEQ ID NO: 41655 - DNA, 429 bp, Oryza sativa
  unsure (1)..(429): unsure at all n locations
agcttctgataaaaaacaggtggttctatttatgattgtaanatgagtacctttacgctctgccgagatgtaaggggccattttaggattccatttattataccatgaccaaaatgaactcccgcttctatcatctctttcaaattgatggtccaatatcttcttgtcattttttccacacttccttttgattttttcttttttttcatactacctttccattacgaaatttctttcttttcgaagaataagaaagagcccaaatagcttgaaataaataataatttgtccgatggaaccttctacatggtataagccataccttaatgaattaactaaacttcttttttaattaaataaaaatgaaaatctaccttctaacgttctagggtcaaaaattaagttaaagtaaaaaactgtttatgattc

SEQ ID NO: 41656 - DNA, 421 bp, Oryza sativa
  unsure (1)..(421): unsure at all n locations
gatgcaaaaatagtgcttcaggatccattacgcgttcaaggcctctagttcttcttcgcatacgttattatggcacaagtttctttggttctcaaaaagaaacagtttgaaaaggttcaattgtacgaaatgaatttctatgtcccgggatttcttaccatacaagtggtaaaaagccgcgatttattggcgattgctagaattctctatgatccattttggaaatcttctttgtgtttagactattttttgtttgcgagatgtcttgtctgcaattccttatttctatcatctcatgcaaaacgaggagaatgcaaggcatgggcgagaacaataaaaggaacaaatccttttaggagggattgctggtcttcttaatcctctattgngcacaagaaaaaagctttttgccttttcttgt

SEQ ID NO: 41657 - DNA, 446 bp, Oryza sativa
  unsure (1)..(446): unsure at all n locations
agctngccattagtatcaggtcacgagatatgatcagactactacaagcaacaactattctgaaacctttgatgggaagatcccacccagtagctggtcagtttcatacagagagtgccatactagcgtggcatgcatgatcacttcaaatttcagatacaacagccatcatgaagaaaaatctgttaaatagtctcacattgattgtgtaatggtaaagaacctaatatataagtggggaagcccctcacctcattagctagcttttgaggtggaaaagaccatttangatactataattggtatcagagtctagctagttcagcatatctggtcagaacgacaaagtgtacaaaggcctgatgtaccgaggatacttgtggggtctgtatactttagggaccatcggggtacattgaagggatagtgaacggctaagagacacc

SEQ ID NO: 41658 - DNA, 391 bp, Oryza sativa
  unsure (1)..(391): unsure at all n locations
ctattccatttatgacgaactcatgtcactcatatgtcttttttttaagngcccacgccgacttccggtgcttgggggctatgactaatcggacagagtgtttaaacataatgagtcatcagctcggggaaatcaaaattgaccagaggagaaatatatatttataaacattttaaaatacttgaaatatatcttcgagtattatatttacatcagatactactcattccatatgtttgttctgcaggatccaaatccagatatgcataaaaaggaatcatggctttaagcttatctcttacgctctaggaatggatcaggtagaacatcaccaccggcttgcctttcgcgccgccgactggtgtctccgcctgcacagctggcatattat

SEQ ID NO: 41659 - DNA, 418 bp, Oryza sativa
  unsure (1)..(418): unsure at all n locations
agcttggtngcactcagtaatgtataattttttcattttttcttcagcttttgatggtacttaatctccttctattaatataacgccaagcaactgtttggccgttcgaaaaaaataaataacttactagaaaaataaaaagaaaaagaaaaagaaaaagaaaaggtaatagaacaaacaccaaactctctccaataaaatattaaatgatacttcctctatcccaaaatataaggcataaccttttatataaatatatattatgcttgggtaacgcccttggcgcgggattggagggttttgctcaatcccatgaggcaaagttttggcttcgctcgcaaccttcccctcatcggaagcgcctgcaagtctccttcgcttctcgtatttcatacttcggtggtcatgctcacgtctc

SEQ ID NO: 41660 - DNA, 476 bp, Oryza sativa
  unsure (1)..(476): unsure at all n locations
ggaccaagctcatagaagaatatagtaatagttttaacatttaacaaacatattatcaaaatatttaatgaaactaatttgatattttagatgttgctaaatttttctataaacttaatcgaacttaacaaagtttggctaggaaaaaaagtcaaacgaattataatatgaaatggacggaatagtacaataaagctgaatatgtttacgtcttggaattttttggacgcagagagtacactatatagctaggcagtgtgtccaggttcacgctgaacctggctggaaaggtattaggatattgcagcattggaaacctttgtccagcagctggacaaactatcctatccacttgaacataatgcaacactttcctagtttgagagaggaaaacaatgagttgaaacttgatagaacagtgtggcagcaaagctcgcacgttcctcggctganattaatattggttcgtcagtcgt

SEQ ID NO: 41661 - DNA, 395 bp, Oryza sativa
  unsure (1)..(395): unsure at all n locations
tagttggtttaattgaatagtccaagagactattgttggttccagtggntttctatctttgttggtcaagatgattggttgattcatgatacaagaagaatatttctcaaggtggagtttgttggagttgttccaaattcacttcaagatattggccgggcttctgacgaagcggagcggaggcccaagccggaggcttgggcctgctagggtttcgcggagacttgattctcttgtaagccgtcatatgcgtgtaacccataactcttgagatagtgagattgttgctggctggtgcccgaggtttttcccctttccattaaggggtttccacgataatcgcgtgctccgctgtgatgttttcgattctttgtattctatacgccgtcatacaa

SEQ ID NO: 41662 - DNA, 385 bp, Oryza sativa
  unsure (1)..(385): unsure at all n locations
agcttgaactgcacaatactattccggtattatgttctatttaatgacttgtgtaatctaatagtgtacatctagcaatttaatccccttccattctctccttcttctcgaacagataaggcagcagcagcagtaattcctccgcttcttcttccttgctgctgttcctaaggcacttctcccttccccaactaaatcatccaagccatggctaccgatctaccattgctagtgtggatcagctctgctgctgctactgctagggcggaggtggatgctgcaactactgctgccgctgcgggtgctctctctctctccttctctcatctctctggctctaacacttgtgcagtgatgggtgcaatntaatgatggccctaatggt

SEQ ID NO: 41663 - DNA, 458 bp, Oryza sativa
ctaggatctatcaagcaagcggcagtgacgagtaatgaatcactatgcttatttgtgcactccggcggcatcaaaagctgactgctccaatcatgcctatataaatataatatagaagtcaaacacaattatgttcatttcatcatggatcatggatggtaagagaatgctaattcaacaattgccacacatctttgatatctttttcctttactgacacaacaaacagaagttacattaaggataactgggaatttcccaagtgagagtgcaaatttgcaatgcaatgttccactaatagaagttcattgaattgaacttgtatctccagatagaagtgtctcattaagtgacactcatcatgtgtaccaggttctaccatagaaactttttaatgcaagcaatagaataacataagtgagttatattcacccgaccattaaataaaatatgcatta

SEQ ID NO: 41664 - DNA, 324 bp, Oryza sativa
agcttagcttaattagctagcagactagctacacatgttgtctagtggatacctggaactgatactttgctagcttagcttagagggcccaattaagcagctcactatatctgcttagcataattaacctagcttaactattaccaccaatttactaatgctactgtcctgtatattaatagggttggattcttgggttggtctcgctgatgcctcaaatactctcactaaacatatttttatgctgctgctgtagaaaagccaaaaatcaatccaacaattaatatattgggcatcgctggttcctcccaatctgatagaaaa

SEQ ID NO: 41665 - DNA, 457 bp, Oryza sativa
  unsure (1)..(457): unsure at all n locations
ctaagcttagcccagnttcnctgagctgacaacgatgaagactcctttctttatgatcaccccttgggtcatcatcgagctgccaccctgccacctcctaataggactctctaagtgaaaacctagtccaaatggaccgacaatgatggcatctaagatggcatgacctcccctgatgtgttgcctaagaagtctttgttcctcgccttcgtagtcttttctcaacttgtcctatgtggcttataggatgtccgtatctgggtggtgcgagggatgagttaggattcttctttcttgctctctccctcatcaaccactctacttaaggatgatcgggaactcatctattatttttttggtggaatctatgtccgtggggtgtttgagacccccttgcaagtctagccctgattctatgggtggccggcttggtgcaactgccttatcttggattttg

SEQ ID NO: 41666 - DNA, 436 bp, Oryza sativa
agctgtgctctgataccagctcttgactttcttcgtactattactgaccggaactagcccgcgacgctccaaattaacctgttaatcgataccaatcccatgatcagtgctggtatcacaggaagacaaattatcacatcaacagaggtctctttattatatagtaaaggtacagtcatgttgggctgcggacagatccctagctcacaactgtattacaaaagggaaacggaagtccttactatgaccaaacaacacacgcgcgacttgggaactaggccgaaaccctataactcatcataaccggcttgctcctggaagaactcctcatcatcaggatcctgctcatcttcttcaacactgggaggggattatttatatagagcatgggtgagtacgggagtgctcatcacgccaagggaaataagtgttaatg

SEQ ID NO: 41667 - DNA, 476 bp, Oryza sativa
  unsure (1)..(476): unsure at all n locations
ctcagctttntatcttctttttttcttgactcatgagccgcgcgcttattggcagaaaccggagatgtaaatcatgttcattatgtagaaaaaatacttagttgtacgtaaaatgagatgattaattagtgtatactacctccataccaaaataaagttattattcacccatctaacacataccaataaaaagttaaaaagaattagaatacccatactttatcaaatcccaatacaactaatcctcactgtatctaatcccaatacaattactccctccggtttcattataatagacgttntggacaatgatacggtctacgagatatatctttgaccttattgtttttattataatatatataataaataaatgcatgtgtactcttattatagtgccttaaaagaaaatctatatatgttggtctaattccttcaaactaaatatttataaagttattgatggtcaaagttat

SEQ ID NO: 41668 - DNA, 375 bp, Oryza sativa
  unsure (1)..(375): unsure at all n locations
agcttcaccgctgacatctgggtggtggttaatgggtctcttcttatcggagcanatcactgtagtgcaacccagtgtgtcaacacttggcaacttcctcacaagtgattcttttgtgccatcttcctggtgccgagcgccaagcatgtggtgataacagcaggcaggccctctggaattgctgcaacagccagtgccactgcaatctcaaagtaatacgtgcacttctcaaatgagaacttaaaattgctgggccacccatccacatactctcaggtgaggaaatacttaacgttgataagccaaaccaaggcacagatcaccccaattatggctgtcagggcctcccaaactcattgagcctttttttcagtg

SEQ ID NO: 41669 - DNA, 481 bp, Oryza sativa
  unsure (1)..(481): unsure at all n locations
tgttatttacaacccanaactagtacggattgaaacaagtggatacattntgttaccacatgtatgaatatgatggaaacaattcttgaaaagaatattaccacgtgtttatgaaacgactagtacagataaaatgtatcaaacattaatattactagagagtgtggattaatacacaagttcatcgaaattagttggtctctttaaatttgttactcgtcactattttttatgatttttgcatacatcatttgcaacatatgattgttagatagtcgactataacaccttatcgacctaaaatcctagctccaccatgcaatcaagtactaatcataagccttcagaacattctagctacctgctggccggttccgtcgtaatcgtgaacttaaactacatagctaggacanaaaagaaagtatagtttaataaatagaatagtgatcctccgaactaacagatttgtttcgtagttacc

SEQ ID NO: 41670 - DNA, 406 bp, Oryza sativa
  unsure (1)..(406): unsure at all n locations
agctntagcttgatgatgcaggaaatcaaatatagagtcttttgtgcctattaaccacgggatgtcgagcctaatgtgcaattaacaccagtaacggctcgctctggacgagcttgcttacgccgaggccaaggggcgcgtccgccgcggccaccgtgtctggcagatcggcttctgctcaggcttcaagtgcaacagcgccgtctggcgcgcactccgcgacgtgccgcccgtgtccaccttcatcacggcggcgtcgcccatggccttgctcggcagctcgttcgccgccggcgtcgcccgacgctgtcgccgttcgccacgctgccttctcatccacccgacgccgtcaggccgtcttcatgccgcgcgcattgcctcagcccgcgccgctgcggacggtcgc

SEQ ID NO: 41671 - DNA, 431 bp, Oryza sativa
  unsure (1)..(431): unsure at all n locations
tggcgcacaccanagaggacgaggactttgaaagacacttgcttcttctatctggcgcgccagatgacggagcatggggcttctcaccgggagaccgcgcatgcccccctgtgtttgtttctccgggggcgctaaatgaggttcttcaccctcgatctgtggaaagttcgccagagaacaaatgcgcaaaacactggcgacgtacacaggttccggccgctgagaagcgtaataccctactcctgtgttctggtggatctgcgtgtgaaggagttacacagagctggagagcaagagtcgtctgagagtcccctcctcgtgccccctttattcggtgggcaaggtccgtcttctatatctcaaggggataccacatgcaccacttctcctactcttcttttggtggggacccccctatcttaacaaaactt

SEQ ID NO: 41672 - DNA, 200 bp, Oryza sativa
tgcaagctgccgtcagttagcagatatgcgtatccataatagtcatatcccggcgttatccgtgaacttgtcagcgctgcactttcgcagtaatcaactgcctatcaggtgtctgatgcaatgcacgcctgggtaatgaccggcaacaactgaccgtagaaatcaccggaagcatgatgatggaacacgataccgaaatc

SEQ ID NO: 41673 - DNA, 119 bp, Oryza sativa
  unsure (1)..(119): unsure at all n locations
agcttcatcgtcatcacacacattgcaanggtttgtcttgtaatgctatctcaacctgctcaagcttcatcgacatcactcgcctggatttatcacatttggtcctcttcaaaaactta

SEQ ID NO: 41674 - DNA, 479 bp, Oryza sativa
  unsure (1)..(479): unsure at all n locations
tatcttggtctccactaaggcgacacaaacttctatattttcttcacatcctggaccaagaagaagacattcttttggggaagaggaggtatggttatgatgtcaaacacatgttacactttgaccttagtttgcttttgttttttcgataatgtagttcgcttttgttactgagatacttttggcaataaatcggcagactctgttttagtgtgtttgcagaaaatttgagttactactctatttttttcctcattatagttagtatgggtaacttcctgtatgataaagtttgcttgttcaaattgcagcttgcgtacctaccttacaaaagacgtgatatcgtgttggataatgaaagcaatgaattactttctcctgttgaaggacttggcatgacacttgaagattcgaatgaggagaaatagaatcggaaaggaattcttaattggtttaaacttcnggtatagttaaattgg

SEQ ID NO: 41675 - DNA, 444 bp, Oryza sativa
  unsure (1)..(444): unsure at all n locations
agcttcacctagcgcagatatatctatgttgtttagcacacgcatntggcaatagttgtgcaagtcagtacagacccacattatctccaaaacattgatccatatggaagtacagagcaaaaacgaataaaaacagaagctctatgtgagaacatatcgaaacttcactgtgtaccttatttcaatgaatcaaaccacacatgtctttctcctcactgcaactgtgcttgttggtgtgcgaggcgatagaacacggacaacttccagtgtgcacgacagtaggcgccgctctcagacttatgggcggagtgctcgtcgaacaccttgaggcttgagggcgacaaaatatctgctgggataggtcctgcaaaaactatatgttctgggtaaatataagccgactagtgacacacttgcttatatgaaatggtatactctatataa

SEQ ID NO: 41676 - DNA, 446 bp, Oryza sativa
  unsure (1)..(446): unsure at all n locations
tgatcagctgnctgagggctcgagcagagtcagatctttattggcttgaagcncanaagattgacctcatggcacaacttctagaatgcaacgccgagctggatatggaattattaatgttgccgatctcccgaagtctatcgaagatctaatagcctgactctaatcggctatcaaaaatgttgtggattagaccaagtctctgagagttattcctggaacggatgctcaacatgccctatctattgaggaagtattacaaattatgcaaagggctatttctgctatccagcgatacttgtctcaatgacttgctttgtaatatactttagagatagtcatttgtgccgaataatataactattgcctcaaaattcccattatatgcgttagactgccccgctatttatcatgtcgaaaagcattgtttaattatttaaagaact

SEQ ID NO: 41677 - DNA, 303 bp, Oryza sativa
aaaagacacgacgaaattctgtaatgtgtattgtaccttgatgaatattattaaacaacccaaatctcatgagcagtttggagatgagcaacacgatcattattcggacaagaaatccctctctaaataatattgcgagctttgcaattcaggtcaaaagcaattgtttcagcagcagtattaataacttcaggaatcacataacgaagagaaacttgtctcccaatatcttaattcttaagcataaatgtaagatggcatcctactacaccaatgagaaaaattcgttccatcgaaaacatg

SEQ ID NO: 41678 - DNA, 419 bp, Oryza sativa
  unsure (1)..(419): unsure at all n locations
tctccgaagattctggcttgcggattggcagtgtccttgccatgttctggttactattactggttttatacgtactattcgacgaagatgctgcttgttcgtaatgatattctgtaactgttacgtaccttgttacggtcattgaatttggatatgcatttatgttgactttgtagtctacagtcattgaagattgatgagagagattgtgcgtcctggttgtgagatattcgataaattgcgatatttgtgctgctaatttcgacctcaagttgctgcgcaaattgcagttaactgattaactcattgcctaagctgtattatagaacagtttattctgtaggactactgatttggacttcgtacagattagtcaaagttgcgagaatgagctgttatctccactgtnattattctca

SEQ ID NO: 41679 - DNA, 424 bp, Oryza sativa
  unsure (1)..(424): unsure at all n locations
agcttaccagggatgataacaattgctttattctctaatgctgaatgctagttataggccattgcatgcgcaatgcagctcccatattatggcattgggagagcagttttgcttctcttattcagaaacacttctctttgagcaaaatagaagctgagaaagtttatgtcttgcagataggtatatatctcccctatttatgttgatatgacgtaagcattttaaggtttcttggggagtgaaatggtgataagatccaaggcagcgtcatatgcttgttatggactctgattcatgggtaggataatgctttgtacacacaagcatgcacttagctgctgctaaaacatactcctttcgtccctatatatctgatgccgttgacntttttnacatgttngatcatcttaattaactgatattt

SEQ ID NO: 41680 - DNA, 476 bp, Oryza sativa
  unsure (1)..(476): unsure at all n locations
tgactcattggtntagaatagggcagaatcctggtgtttttcgctactngnctcgctgttggtattacattatgcatcacttttcctttgtgtacatgaaatggagaataatatctgcacctagtttcaaaacaactcatctaatttgcctcattggacagtgctacagcaaaaatgcaaaggggaattcagaatctcaggcacaatcatcattcaacatagcaagcagcagatcagtggcccatgcaattggatcatgccatgatgctcaacctacgcatgcaaagtagtatctcccaaacttttgagcatctatgtcgatcttgctggtgttgtcatctctgcatcattcaactgtgtggccactgtcgtgtggaaccacatcagcttgacctgacctgaccacattcatggtgactttcagatgtgttagcatgagtgccatctcatatttgacatattatgcctcgtatgaa

SEQ ID NO: 41681 - DNA, 382 bp, Oryza sativa
  unsure (1)..(382): unsure at all n locations
cccattattgagaaaggaagactaccatcaacctggcccctcctaacaaaaaaatcatcaagcaggccatcttgtcaaggtctcaaggataattattcaaccatgaaatctagaaaatctcaccacttgttgaagtatgtcatatgcaccaagtcctcttttgctagcctccaattaccataactagttactacttgtatactagctagtaactgaagaccccatcaccttccaactcaatgattaaaacttagattaccacttgttctanagtgactgttttttttttttaaacacgtttaagttcatcctactctgtatgagtatatgaccagagcgatgatcacagtgtgaatcgcaccctcttagaatattctgctct

SEQ ID NO: 41682 - DNA, 404 bp, Oryza sativa
  unsure (1)..(404): unsure at all n locations
ccttatatgtatatcgaccctatttggtatgtttcactccaattgtatcantctggctggttctccagccaatcatgatcttgcaacttctgatgcaattaagattattattttaagttgaccccaaaggtatgcctttgttgtaagccatatggataaaggatggcactcatgttttttgagatgtggtttgtcttgtaatgttcacgtgaaatgacgtttggtgtgcttacaaaaattgatctaatggacaagggcaccgatgctgttgatgtaagttctttcccagctaaaatcaattgctataaactctattatcgaatcattttgtccccggagatgtcaacattgattattgttcccttgcttttgtgaccttataaatctcctatgttgatattctt

SEQ ID NO: 41683 - DNA, 417 bp, Oryza sativa
  unsure (1)..(417): unsure at all n locations
agctntccaattntcaagccaggaaggatgataagaatcactctatccacccccctgtaaagtagctgtctctctccaaaatccaataggaatcctgcatcttcagatcatctcatcttgtcgatgttgatctcaacttgtgcatgcagatttcacttgggtagatgctgcaggaaggatcagcagcttatgacaatccattcacagaagagagcaatatgacaactatctgtatcttgcaatactccatgggaatgaccccattcatgttactggactcatttctattgtccatattgctactagctagcggtaacaagataaacaaaacttattaatcccatcatggcgcaatcagaacccaggactgagtaaatgatctataaaaaaagaagacattatgtcaaaaaaagaaag

SEQ ID NO: 41684 - DNA, 454 bp, Oryza sativa
  unsure (1)..(454): unsure at all n locations
ttctttctcttccgccattgatattccccgaatacgttgattttgttctagggatggctngggagagatgaggatatgaggcggttgatcacgggaaggattntgatcactttttgaaggtggatttgagtggaatggtgaaccctagtttgccggcgtagctctgtactgtatcaaggagtggggaaaatggcgagagttccggcggggaagacgaagtgtcgcttggatctccggttttcttgttaacggtatccgaggtgcgaatgggcctaggcctgaatagtatctcagcccaatacttttaacagcgtggcccattgtgttccttatggacttacgcattatttgctttggcaatatatgtacacaataatgttgcccaatgctgataaaatcctctctacgccgtcatataattctcttgaatattgccatgcaaataaaaggtgcc

SEQ ID NO: 41685 - DNA, 362 bp, Oryza sativa
  unsure (1)..(362): unsure at all n locations
ctcaaagagaactgagttacaagataatttaacaatcgatgagtattataaccttatgctgatgaaagggaagacttggttcaatctagattaaaagcccttgccaaggttaccaaggataaagaacgaattgctcggcattacaacaagaaagtagtacttaaagatttttcggaaggtgaacttgtatggaaattgattttgctaattgggactcgggatagcaaattcngcaagtgatcgccgaattggaaaggaccgttccaaatccacaaagttgtatctaatggtgcttacatgttgcaaggacttgatggaggagtttattgaaaacactaaatggcaagtatttgaagaaatat

SEQ ID NO: 41686 - DNA, 466 bp, Oryza sativa
  unsure (1)..(466): unsure at all n locations
tgctacaactccatgttcactggcgaggaaaatctggcaagtttcttgnggcaatcgaatatgcagagagatgagacagcggtgacagtggtcaattgtgtcatcttcacatcatgatggtatggaacccaaaaccctttttttgcaattgtcagctctgtaaggcttggaggtagtggaggcaactctttgagcttttggcagtccttaatcacaatattgcggagattcatcatttcctggcctgtccatgaccactcatttagttcttgcatgtcatcaagaactagctcctctaatgactggaaagccacatgtgaacttctattgccatatacctctaggcctatttgcctcactggtttcaaacgctgcaaccaaatagtcctgacagatggaagctgaccaagtggtggaagcttgctccaagcattgcaaccactgangaagatgagctcaagattga

SEQ ID NO: 41687 - DNA, 399 bp, Oryza sativa
  unsure (1)..(399): unsure at all n locations
cctgaggcatcaagcttgcanggccgggtaagctgatttatcttattttcacaacgctcagattttgccttttgacagacctcacaaccctgcacatatgtctgaacataatctttaacctagaccaagagaaaagagtcttaactctgttatatgtggctgtgattcctgaatgtcctcccacaccgctgctatgcagagccagaaaaaccgcctgcttagcctcctcatgttgcccaagccagattttgccattgtgtctgattatgccttgcataagctgaaaatccccttgcttatcagaatgaacactcagctgggttaataattgtttaggggcctcatccctttcatatccttcttgaattatttccatccaccttggcacacttattgaca

SEQ ID NO: 41688 - DNA, 501 bp, Oryza sativa
  unsure (1)..(501): unsure at all n locations
gacactatcnnnaaactcaagcttctcgggatctcctcttccggttgacacgtggccgagctctctcgtgccccgnancgtcgccgacgcgtgcacnaagatcgccgccgccgccggccatcttcggacgcgtcattaccgtcgctccgccgcgcgctttggtcgccgccaccgccataaggtgcgccgaggtgtggagaaactcggacgccccttcgatttcgccgccgaccaccggagcaccctcgacgtcgtcgacccgagcctgcggcgccttcttatttgtcgccggccgcgcgcgtgcatctttccgggtagtggcgagtaccaacgggttcgcctccgtgccctctacgccgtgatgccctccaaccccgccgccgatggtcctagcgccggcgagctcgtcgacccgagccggccgtcgtgctgacggtatgccgacgtcaaccctaaggctgacgtcatcttttgcagggcttgacgtcatctctctctctt

SEQ ID NO: 41689 - DNA, 404 bp, Oryza sativa
catgcaagcttgagaagacagggggcatcagttattgtttatatggaacccactcccatcattttcattaattggcttagagattaagtccaactcaaaagctttatcattactctctgtaacagctcagctccacggacaaaaagaagtggtgataggggatcaccttgtcttacacccctcctacatttaaaagaatttcctggaacaccatttaacagaacagtataagaagctgaagagaaaaccatttgcacccattgcatccatttttcaggaaaatccatatgttgcaggacagaaagaatagcagagtgttcaatagtatcaaaagctttttcaaagtccaatttcaaagaaaccaattccctcttcgattgctgacactgatggatgtactcaaa

SEQ ID NO: 41690 - DNA, 421 bp, Oryza sativa
  unsure (1)..(421): unsure at all n locations
gcttggctagattctatgctgcgctgcgttttttctttttggagaggactaaangcctcttatgatcgcttgtattgttttaaacattcagatggatcggcatatcacatgtcagtgtgtgtgccttcgctgatacctgaacactggtcttaatgtcaaattagagcggaaactactcgttaatttctgggcgtgacaaactttcttagtgataatacacgtgtgccttccatgtatagacacactggatatatagccgctcacttgattcttaacactctgcataacctatccgttgttttttaagacaaagtnaagaataatacgacactaattaattacttaaatagaacgacctgcctcctccatatcaggacacttacatgctgcagcttttataggtcatagagagggggcacat

SEQ ID NO: 41691 - DNA, 349 bp, Oryza sativa
atacgaactcgtactttatacgaacggaaattatttaggttaagtagtgaactaccagttcctgatagacgactgcatcacttttgttctcaaatgtgacataaccgtccggggtgaccttaccccttgcccgcgcccaaatgcgagctctttgttcaaggatgtttgaaaacggggcaaggacattcgatgctgcatcggctgcatcttcttgggcccatattgccttcttgtcgatggaccctgcggtgcccacccgatgcgggtgctcattccgctgttgcagtacgcgatgagcctctcttgattccataaactgttgggtggtcctgagagacaaaactccttc

SEQ ID NO: 41692 - DNA, 391 bp, Oryza sativa
  unsure (1)..(391): unsure at all n locations
agcttccaggcaatctagctgtttgcaacttttttttgtgtnaggaaccctgagagcttaacgacctccttctcatcagtgaggtcccgcaatagattgtacggtaaacaatgtcccttcaagatagcagtcttagctcttaaaacacatacaaccggcagttcttaagataccatgaaaagtttttctattttctgaaatgagttagtagtgctgccaaccaattgccaacctgacctgaagtattgtttatataaaaggcttaatgtgtggttttgattaaaatcctttaaccaatatcattctcatgtcttgcctcgtctattgatcaattctaactatttgttggtcttgtagagataaatatgccagtggcctgtgagttttacct

SEQ ID NO: 41693 - DNA, 435 bp, Oryza sativa
  unsure (1)..(435): unsure at all n locations
ctgggggcttgcattctaggagagatgacaaagcattcatgttatgtcacgaccagcgggacgatggcgtatgtgagccagtctgcgtggatacatagtggtcagaaacaagacaacatactgtctggcaagcagatggataatgaaaagtatgacagggtcctccagtcatgctcgctgaagaaagactaggagatattgccgcttggtgaccagaccgtcattggagagagaggcatcaaccttagtggtggtcagaagcaaaggattcagatagcccgagctctgtatcaggatgcagacatctatntgtttgatgatcctttcagtgcagtcgatgctcatacaggatcccacttgttcaacgtatgaaatgatcttctattttcaatagcatgtcatgatttattccctacaatatcggacagtgcataa

SEQ ID NO: 41694 - DNA, 440 bp, Oryza sativa
  unsure (1)..(440): unsure at all n locations
caagcttttttactagagtgtgctactcatttcatttaaaacatcttacttttgtagatattgttggttaaagtagcatctcaaagactgtgtcgagttaaaaatgcttatagtttgagacggaaggagtatatatgaggatatctccggcctataattgtgtttgtcaattttctcgtcacggcaactaaggcaacagccagccattntgtgtttttggcaaaaaatttggatccgctagcacacgggtgctagctggaggccgaactcgagctggccagccttgtcgtggtcgtgcatttgccccggccgctcctagagaagtgcccgcagtcgtacgaattctgaatttgttcaccgtcttgagaaaaatatcaagttcacgcgcgcgccgtcaggccggcgcgccaaccttggagacaaatcccaaaggaaaaaat

SEQ ID NO: 41695 - DNA, 422 bp, Oryza sativa
  unsure (1)..(422): unsure at all n locations
taacatttatattacagacctttctgtagacattttttctattggaacgaagtctaccacgacggccatttccaattcatggatgagaagaccttctcagccaggggatatattgaacgcgccaactgatcgactttgcttgccaataactgccaacaaccgaacccatcatgcaggaacccgaggttcatttgtggatgatgatctcggatgcangcgataatgtgacccccggcgtagcggctggcacgacaacactcctcctttaggcagttgtcgattcgttgcccaacgccctctagttgggcacacgcacccctcatccaaaataagtagcccacagtcgtctcctcaagctctgcacgctcgatcttgagttggcggcagatttccatcatagcgcttcagcagctcttcaagta

SEQ ID NO: 41696 - DNA, 312 bp, Oryza sativa
gaagtcctcgtttgtggaagaatgctcatgcccagatcctctagtacacttggctactatcaattgttgcatggcctttacgaagtgggagttctaaataacatgcactatagcttttattgcaccgtaaaaatctattggtgcaacacgatggatagctcttacttccaccacatgttcgcgagaaaacttatatattatgtcaaaaacaaatgtgcctctgatgatgagacggataattttccatctcatacaacacgcaaatgctcgcatgagcaataactactcctttcattacaccttcatgccctg

SEQ ID NO: 41697 - DNA, 447 bp, Oryza sativa
  unsure (1)..(447): unsure at all n locations
agcttcanaatttcttcaaaaaagatgtgttgtcatgccaaaatttctagtgaatttattttggtgattacatacaaatcggaggtgcctaaaaggttgcatcttcatcctccaatgtttttttttgtcatattacatttgcagctatgtttggcatacttttttgtctccaaaatttagttgtaagttgatgagggagaaaatttgtgtggggaagaaagaatatatagaaatttagttgatttgctaaagaaggttttataaaatagttgagaaggaaaactatagtgagagttaatcttgaatactagaaaacaaactaanatgaaaattaaaagaagtaaaacacattaaaattatgttaaaactctagaaatagtaaataagaattatttggtgtaatattttatgatctttgtatgaataaagatatgtcattattatatg

SEQ ID NO: 41698 - DNA, 461 bp, Oryza sativa
taggcttgcaatcaacgatcctttgggccagtgaatccgtctaaaagccagcaaatacaacctgagaaatttttgcagtatgcattaaatcataaggattaaccaatataaccacgagagctttttagctgtggccattaccgagtgaacagcaccaatgcgggcacaagcaagcatggcaatgggaagctccagcaacattggtaagtagatgatcacagcatcacccttgccgacaccaacactcttcaagtaattggcaagctacgaaaaggataacgcaacacgttatattacggcattttccacaaacattcaatgacacacattgacagttaaacacctattgttcaatacgttctcaggtatgagtgtgcatttacctggcaaaccctgtccaagagctctgaataggtgagcttcccatcctgaccaggctcattgccctcccaatacatcgc

SEQ ID NO: 41699 - DNA, 442 bp, Oryza sativa
  unsure (1)..(442): unsure at all n locations
agcttacanaagagaagagaaaagctactttagtcatacccgaactcttccgaaggcttcgaactcctgatttctgctctattcctattccaacactagatactactaaactaaacttgagagaaatgagacaactattgcttgaggtgtgtgagtgaagtgagaagaggagctccttttatatgcaagtaatgatggttgtgacagttggaatggtcggtaataccctctaaccgtcattggggatcaaatccagccgtccatccaaaccctgcatccattggcgtcacgggaggttcggccgaacccatgggctatcccaacccagcccatcttcggctggtggccttctttgttgttctccttcgtagacttgtgaattttggcccaatgtgtcgtcttattactgagatcttggcccattcatacataagtctggttc

SEQ ID NO: 41700 - DNA, 466 bp, Oryza sativa
tcttgacaaaatcataactcaccaagttgttgcagctacctccatcaatgatcacacgtgcacgacggttgttgatgacgaaaaaaatctgaaacaaattatggcgttgcaacctgtcatgctgctgtacctgcgtgctgagcacccgctgcacaatgatggttctgtagtccgttgtgtcatcacgaccaaagatttcgccatcctcatcctcaacttcttcttcctcctcttcctcttccatgtcagaggtggtgatgtagccatcttctgtagcaacataggcccgttgactagggcaatctttctgcacatgcccaaacccttggcaacggtggcactgaatgcgtcctgtcgaggcgacatatgaggcactcttggcgggtacctgcgtggaacctttacctgactctgctggtcgtggtggtggaaatggttttggtgccgcagaagctccggatgcagc

SEQ ID NO: 41701 - DNA, 421 bp, Oryza sativa
  unsure (1)..(421): unsure at all n locations
agcttgcagacaaaacggaatatgtttgttcttatccaacacacgattttcctagcgctgacgaggtcanttgtttttttttaacgccgtgcacggaacaaaatgtccatttttgcgtgcactgcctggtcaagattcggtaaatttttttaataaaaaatattgtttttatgtaggataaaaacaagagaatggatgggttcttgtgagaagtagtagtacttaaattattgatgttgcgacagagtgctgaacagtttatgtaaaagcgtcctgatgacctataattgtcgtgtctagatatgatgtgatcatgcgaagattgttgcatatatgctcactttggattgtcatttngcgagcatggncattttgcatattattgtgnagttgtgttttggttttggtattaaaaagaaag

SEQ ID NO: 41702 - DNA, 391 bp, Oryza sativa
agctaaatatatccacctgcaaccacattatttctttttagtttaggtataccatggaggtacaacaaatatgtgggtttcacgacaactattttgtaagttttctatgattggcccgaaaagggggaggaatatgtgtattatgcaaattaatttcacaataattgcaataaaaaaatataacacaatttggatatgtggcaggccaattggcgtgttataagtccaatgctaaaagaaaaagtagcccaaactattagcgaatcttatttgggataattatgaattattgtcacataacgaagtgtgttatttattggccattgaaaggtgcatattcatcaatgaagtatgacattgcgcataactatttgaaagctattggtttact

SEQ ID NO: 41703 - DNA, 465 bp, Oryza sativa
  unsure (1)..(465): unsure at all n locations
taactaagctaaatgacgactccagtcgaggcgttgtctcattgtcagtgttgnggaatgacaaccgcgtcacgtcgaatatataggatccatcactcgggcctccaaagactgtatgacttctattcggagccctatccaaattaagctcatattggatctccatccaatccccttattccggcctattaagcgtgcgatcctgtaggttcatgtaccctcggctgtaacccgaaaacttcttttcggtccacgcgttaacagcggccactagcagaacgtattgacccaccgggtacacataaagatcatatcggctgaacctctagtgtatacttatatgaacccctttgcctcatgatatccattaagcataaggctagatatgtgccattctctaatagctcaatcattcactcgaacctgttgatagagtatatagcttcactcgaacctcgttgatag

SEQ ID NO: 41704 - DNA, 436 bp, Oryza sativa
ctatcctagtgaatgtgatgttgtataaatgaaccaactcccctttcaactgaaccgctatatattaatgatgtgggtaaagatgagaatttacaaatttgagaagtttagcagatctatctatgatgcttgtcaaaacaaacaaggtttctcgctagaccttgtttacagacttctcaaattggtgttagttctccctgttgcaactgctggtgttgagagggttttctcttcaatgaactatatcaaaaacaagttaagaagcaagatgggacaagaatatttgaatgattgcttggttacattcatttgaagggaattcttcttgcaagtcaaggataaacacattatccatcattttcaaaagggataagtccattttacacccttgaactcttattttgtctaaatacacccaaaactctaaaccggatat

SEQ ID NO: 41705 - DNA, 374 bp, Oryza sativa
tgtcgcatcttacacaaagggaactttgcatgagcagatgtttgttgaagctaagaggaattctaaaaagggtaatcctatcttgccttatatgtgggatcggatgatgatgattattattttgtaatagccacagcccgattggggtatgagcaacaaaggttgtaccatgccaattggtgaagaattctaaaaaagaggagaagtatgactttacatcccaaggtgaaagattttgacttttactacgagagaagcagattcacttcctgctagcacacaattccgtcagttgaagaattggcatgaaaggtattgcaagtggataattctgggtttatactactaatgattgcaggtcttcaggaacagat

SEQ ID NO: 41706 - DNA, 442 bp, Oryza sativa
  unsure (1)..(442): unsure at all n locations
agcttgagaatatgatattgacaggaggtcttatcaatttgttttcatatnnnatngcacgacagcaaaagctgctggagtttgagaaaagggcttcaaaaactgatcctttcattttacaaccaagaaatgctattatgattgggtgcatatcaaggatgtccatgatatgtctattgctgatccttttgaatgtacctgttgagactgatgagtaaaattattgtatgatggttcaactgggaaagacgactttggagagttgctcgttttgaatataagactgatggatactgtcactgagctgaaaatctatattgatcatgttgcagatttgccttaattgctgtacatacactttgatgttgtggaaacaagggttgatgtattgaacttgtgtttcattcaaataccttgaatattgttgaaaaagatgatgtat

SEQ ID NO: 41707 - DNA, 416 bp, Oryza sativa
  unsure (1)..(416): unsure at all n locations
agcttgctganatcaagctcgagcctgctctttatgtttttattgcactatgggtcactcgtttcttccttaattattacaattgtctatcactctttattatggtactcacagattgcgcggcaaacagtattatattgtctctcgtataatagcaaatatgcgttctctatatattatacaaatatgtttataatgacatcaaaaatttaaattttgcaataactttacgaaactacaaatagcgaatattcatattgtattttatatacgtgtaagctataattatttttaatatcaaattttagttatttgtagattatatatattcctatatgtactctagacttgtcttttttttgtaagtctgaaatttctataaatcgaatatctatatagactctacgctcttcttt

SEQ ID NO: 41708 - DNA, 380 bp, Oryza sativa
  unsure (1)..(380): unsure at all n locations
gacacttaaatactcagcttcacgtctgaccgcagttaagtggacgggtggcgcactgtttttctnaatactcctctaggctaacaaggaacgttgcttctccatacagagctcgcgggtttatatatatatttctcttatatgccgctcggaagaatagttaattctccgttgttaccataaactcctgggtgctcagcgtatgctactgtggaatctggccagatgcttttttagcgatactatttacgcacgaacctatcggagaatcctatctcacatgggaagcaacggtcatgcttcggggtgaacaaactctcatcctgcctatgatacaaactcgctggatggacttgttcagaactacagatttgacgcgc

SEQ ID NO: 41709 - DNA, 377 bp, Oryza sativa
gggcggatttacatgcactgagcatatgatcgatatggtaaatatataaatcgctgtaactcgatctaccctaatcggcacccagaggacatgcttgagatcgatattctaagcacgacttaatagatcatactcaactgatgcagcattaagtatgagaaagaagaacaatatctagacaatcaagccggtggatgtttcataaagtggtagatatcttatataatctaggacaacgtcgctatttaacctaatccgctgtcttctattaacagatgttagccgattgtaggttagatgacgaatttgccaaagattatgtaagatatatgataactcgatgaattatatagacaagattagagtgtcataaagat

SEQ ID NO: 41710 - DNA, 457 bp, Oryza sativa
tgtgtatcagatacaaactgggatactctggaccatatcttctccggtcgagaggatagctatgtaggagtaactccaaaatcaagatgcaatagtctacataatatatagtccaacgaaggattacaatctttttctttaacaattggcattatctagtgctctgagctgtatcttctatgcgttattgcatttcctgttggccatgaacaaaagcaacaacactcaaaagtacaaaaaaaaaaaaaagagtttagtgataacacacacgagaacatggccatacataacaagacaggaaaacaatgttacttctcaatgaaaataaccaagcacttgcccgcccacattctgcttaattgcttcctcatgatccagcacaccatttggatgtgtgatcacgacatagccccactgcatgacaaacagcgcactgagtcagcaataatacactatg

SEQ ID NO: 41711 - DNA, 385 bp, Oryza sativa
  unsure (1)..(385): unsure at all n locations
agcctcatacggcgtcatgccattgaggcttttggttggcgcacgaatgaggaggaagacagccgtgctgacagcctccccccaaactccgcaggcatcccctctgtttgagaagggcgcgcgccatggacaccactgtctgattccgccgctcgaccacgccattttgttgtggggcgtanggcgcggagaaatgacgttggataccctcatcagtgcagtatgtggcgaactcaagcgacgtgaactcgcctgccgtgtccgtgcgaaatacacacagcgtgcgcccacaaagagtctccgctgccatctgaattatcttgatggcgtcaggtgcattgctcttggctgctangagcgccacccacatgtatcgtgtggcatc

SEQ ID NO: 41712 - DNA, 250 bp, Oryza sativa
acgggctaattctaagggtatccaaggaatgtactctatatggtgtctgaaacaaaccgtagatatataaccacatgttgcactaactattagaaaggtaccgtataacacccatgcggaagcgcctccattgccctcttctgtacacctagatttacttacattagactaattaagaatattcgtattgaactgacattctatatgtattaactgaacgacccgcaaaaaacaaccacaactcatagga

SEQ ID NO: 41713 - DNA, 439 bp, Oryza sativa
agcttagaatctcgcccagggtccccggcttaaccggcaaaggggggcctgcgcggtctcccggtgaggagccccacgctccgtcagcatgcaaaggaagggacgtggcgtggagtggtgtgctggcggtagaataaaggagatgccagggaggcacaagtgcatgtcatataggtcactttcgtagtcgccaacgtggaggacatggcggtaggctacgcaacagatggtggatcagaagaagcaacagcatagtggctcgtggagaaaggggatggactgttcaccgaatgaagcaagcactgccaaattgctcaggagaggaataatagaagcggatgacgctgcccaccggagctagcgcccgccatcaaaggcagacgtaagaatttgatggtggttattcaatatttattacactataatatgtcattggatg

SEQ ID NO: 41714 - DNA, 477 bp, Oryza sativa
  unsure (1)..(477): unsure at all n locations
tgactggagtatttgtatttgctgcaacaaggttagctcttanagcataagaagatgtagttggtgcagcatgccaatcaattttaaatggactgcaatgaccagtcgcaaaacatcaagaattagtcagcatggaatgaaatgctatgaagactgaaattttactgatgagaataagattggaactaaaatagcttgattgttttcctttaattnttaatggtttcatctttttccttatgtgcagtaagccacaatcaattgatgctgcactcttgcggcccggaagatttgaccgtttgatcttatgtgattttcctggatggcatgagcgtttggaaattctgaaagttcactctaaagaggtgagttctcattngccattttgtcttttggtgatatttttaatcacgggttttgccatctgtgaactccttnaaatattgatatcttaacattctcattgntattgatgat

SEQ ID NO: 41715 - DNA, 439 bp, Oryza sativa
agcttgtcgtacgaattggcaccattgtattttggtcgatgctatctttactagcccatatagtcaacatatgatcatcaaaagcaaccggaataaatatatatgaatcgatcaatgggacagggacaccttgatccataccatccatcgattcgatcatatttttctcgagatcatgagatgattgaaattaacatcatcttgatttctcaggtgatgtttggatacatggactaaatgtcacatcggatgtttgacactaattagaagtattaaacatagactactaataaaactaattgcataaatttgcgagagtaattttttaagcctaattaatttataactagcacatgtttaatgtagcatcacatatactaatcatggattatttaggctaaatagattccgctcttgaattaatctagaagtatggaat

SEQ ID NO: 41716 - DNA, 427 bp, Oryza sativa
  unsure (1)..(427): unsure at all n locations
cttgccgtgacgcgtctcatgtgtagggacgaggcgtgttgtacagtcacggagggcgggtaaagtgtacatccactgcagtgtgagtaaaccaaatctatccgaatatatatatcttacggctaatgaggaccggaacatgtattacacttggctagactttaaattactaacttgtgtgggatgggatattgcatgatgatatctatgctgatggagccactacctgagaggcgggaatatggacgtcctcagaaaatcatgacgactcaatggcgggaagctatccttgggattacaatggatggtggacagaaccatcgttgttaatgtgaacactggtattaaaacttgatcagcctacgctaggtcttatgcttgtgaaaagaattataaaacttgatntgcgcacaagaaccatagccat

SEQ ID NO: 41717 - DNA, 329 bp, Oryza sativa
cttggaagacctatcgatataaattttttttttgtgcatccacatcccatggtgtgatggtccaaaaacatcgttgccctccaataataaactcacgatgactaaaccagatatatgaatgtggctcttggtcattcaaccaagagagaactttttgcttcactcgaaattgtatattttttttgtgctcaataaagaaccccacgtacaaaaacatgagtgggggtgatcttgtacatccacgccgtaaccaaagcaagatctctctatgaatgatcaacctgactaaccaccaatgggaattgatggcaacttaaccaagatgggac

SEQ ID NO: 41718 - DNA, 474 bp, Oryza sativa
  unsure (1)..(474): unsure at all n locations
tcacaaatcaccgaancacaagtgtcgaagtgcaactgttctattctgaaccatccctggatggctggattcaaatcctataatataaatgttcaaccatgaaccattatttattactggcttcaaataacctaaatcctatatcctaaaccaaaggaaccatgctagatttaactgtgaacaacttctaatccaaaatggttctaacctaagtaaccatctctggatttaggcaatacatagctatgggcaggggaagaattaccttcctctggagctccgggcggcgtctcggtccggggaagcgcctatgcggtgcggcgcatctcggataccgcgcgacaggcaacagccgactgtgcgatgggcgatggcgatgctctgccaccgactactggcgaacgtcgatggcgagttgacagcggcgcatctgacgtcggccggccctctactgtcctgctgtgtaactggata

SEQ ID NO: 41719 - DNA, 371 bp, Oryza sativa
  unsure (1)..(371): unsure at all n locations
agcttcttcaatcaagctcttagtttataattaggtagngagtgaatcgaagagaaattaatttatcacgagagaggctaaattggatcgcggttcttaccgatgggatgagatgatagggtaagctatatctaggcagcagacgaacgaacgggggagcgcaatttgcatgactccatgttccgttgtcgatcgatcatgtcggcggtggccctcaccaccacccagcagctagcaatcgagctagtgcgcatgcacgcacagtcacgcacggcacagtgccttacaacccatgcgtagtatacatgcttcgatcgggtgctgattatccccggcaggcggtgcgacgcgccgcacgcgttacgcccaca

SEQ ID NO: 41720 - DNA, 391 bp, Oryza sativa
  unsure (1)..(391): unsure at all n locations
tagggatgtgcaaagcgtcactggctgtatggctctttctattgttgnccatatcgaggctgggagagaaggcgctacccctaattaaactcgtcaaacgctacataatcgtttatcttgacggaggaggctgaacgggccctcactcagttgaaggcgtacctcagatcttccccagacctggtcgcacctgagccagatgagccgttgctactctacctggcgggaacccctcaggtggtcagcgccgcgttggtcatggagcgcgacgaggacaaccctctcttctcacatccccaccctgtgtcgactcgaccctggagagagcacggaggagaggccctcgagccgaacggtggtccaatgcccccgacagccggagctggccctc

SEQ ID NO: 41721 - DNA, 442 bp, Oryza sativa
  unsure (1)..(442): unsure at all n locations
agctttcaatctttcatcactaacctcatctatttccgccatcattaagctgtgataatctactgccgacaaattattntgtctggccaatctaaggcgtccagattcacctcaacatgcaaaatggcctcttgcccatatactaattcaaatggtgttacctttgttgcaccatgcttagatatacgatgagcccacagtgcctcagacaaaacctcgtgccatcttttaggatgttcctctattttcttttttatcagcctaattaaagttttattgcttgacttggtctgtccattggcctgagcatagtatggtgatgaacaaagcaacttaattttaaaagaattcccgtaattcacgaacttgatgtgacatanatgatgatccttgatcagttgtcaaggtttgtggtatgccgaatctatgaataatatgctct

SEQ ID NO: 41722 - DNA, 463 bp, Oryza sativa
  unsure (1)..(463): unsure at all n locations
tactaaagaccttggagtatgacttatacgctccacctattgggtagnctacagacggtctagtaccagataagactctgagtgaaacttgcttgcacaagactagcaattcaaggcgtagtccattgttcaagttgtgagtaagtgtagcttggagttctaagtggatgttcaaccttaatcggtctccatcgaaccgctggtatataaacagtacattgaaaaaggcaaatcttagtgggattttgagatttggtgggggattgttggaatgaataaatgggctaaggcccattcgaagattaattctttagaaaatcacaaaagcccacctcatgggatggcatgcatgtggagtttagtaccaccttgttattctatgagaggcggaccttctctaaagggaggatgccctactacccatttgaagcatgtgtggtggagagaagaggagatacacaca

SEQ ID NO: 41723 - DNA, 451 bp, Oryza sativa
ctttattaaataattactttaggaagaacagagctttgttttccatgttgattcaatgtactattatgaactgtggtttctaagagctaattgggaggctgctgattattaattgtttaggtttggatatcatgaaagatcccatattggagattatttggatatagcatacatgaaacttatcagacaaacttgcaggttattaaaaaaaagaatagagttatttttttaaactttctggaaattcaaaaaagaatgcatctgaatcttctattatttcatattcagatcgtaaagataaacgtggcaacaattataaatcgttatctcttgtatgcgtcagtctgcatatgtcacgtcagaatgactcttgtttgctgcctgaattcatgagatgactcatcatatgtgttttcacatgtgcagaacaacggcaattgatatctcaagt

SEQ ID NO: 41724 - DNA, 458 bp, Oryza sativa
  unsure (1)..(458): unsure at all n locations
tatttagagatatcttatctatatggagcgatatattatggactgctagacggaactttttaattgccccttgcgagccttaaaaggggagcaattatgtttcaccaatacctgtaggctttatatgctatcacaccttccatcatgctgaattccacttcatggttttgtgccataggctatagttagntagttaccatctgcaatctgtggtgttgatgaactcccttgaggtattggagtatcatgtgtttaaacctttactgatgggcggcaatttgtaaacatgctcatctttaagtgaatccttgaatttgtaggatgaacgtgtcagtttgtttccaaatttagaaatgttatgtgattgcccaacctccgttttgaactatccttcaactagtagtggatactactctgtacagggaaattgagggatgcaacttttccataattatgga

SEQ ID NO: 41725 - DNA, 462 bp, Oryza sativa
  unsure (1)..(462): unsure at all n locations
cagctggcccggctggtataactggcggtaataggtggaaatcattatgtggatttntttctagcgtcattagacatagcctttttcatttagaaactaagaaaggacgacagcagtcggaactcggaacttttcccgagattttctcgctaagttcgcgaactagacttccccgcggagatgaaggggacgaggtcgggagagaggaagcgaacggtggactgaccgagaaagtgggcgaggccctcgagcccctccgggtcgctgaacgagcccacgccgacctccatacacgccgtcgcctgcaacgccgaggaattatgggttagttaaacacacacgcacgcatacgcaccacaccaccaaatcacgcgagagtcgccgatgaaccgacgagcattctgcatgcgagagcgatcggtgagggagatcgagaccttgtcggtgtccgagtcgctgatg

SEQ ID NO: 41726 - DNA, 452 bp, Oryza sativa
  unsure (1)..(452): unsure at all n locations
atgctgaaatcgggcttggtgtagcgcatgcgactaatgttgttcgcatgcctacctggaagagctgtagcatctcccactatgtggagcaaagaccacctgaagataaagtacatcactctataatatggacgcaaccctcgagtagtccccaaacaatccttgggagcatccttctcatacataaaggtagtgctggtcggtaacagcatcctctacaaagatatgtggacgactcaggtcatcatcatctaaccccaaagctgcagcaaactgtgccatagagaccctatactgctgcccctgaatggtccacttcacaaaatcaagccccttcttggtggtgccaaagaaagcagtggagtagaactttccaatcacttnctcattccaggaatactgcaaggccaataaatctggcacgtgcttgcgctcacacaccttgcatacct

SEQ ID NO: 41727 - DNA, 385 bp, Oryza sativa
  unsure (1)..(385): unsure at all n locations
ggatcttaagcacctgatgctgcagcttcagtctaagctctaaaaactatgttacttgaatgccnnggataattgaaagcaggtggtggaagctctcataaagaatagaccagatcacctctaggagcattggtcttcccaaacgtcgaatacctaatatcatcgtctcagaatgtatggggcctacacaagtcgcgcgggtatcttttcttctaatgccatgggggaacaccccatgttaatatatgcctccagcattcaccaagatgggaggaccaacagccactgtgagcgtttttttacaatatggcggtttatttaaacaggccatgggaaaaaggagaagccataaggaaattgatttgagtatactacaaggggccat

SEQ ID NO: 41728 - DNA, 509 bp, Oryza sativa
  unsure (1)..(509): unsure at all n locations
acctntaattcaggtgtacatgcatttacctcatttgttctatatnatgnnaagggaggctggagtcatagtgtgccattcagatctccagtgtctgacacttgtgtcacacatcatcgagcagcagcagcaattctgaatttggtgctatatatcaaacctccggttcgaaatttgctagctgaattctgatcaggagacgccgctctgtatttgaaattactgaatccgtttctgctggaaagacaatttcctttcgcttcagatttatatatgaatactgacctaatacaatctcagaatttctctaccggtgatcggattttgctgaagaacatatcatttattcaccagctcgtcaaaacgtatcacaacaccgacatcagcagacgtctgtgcttggagccaacttaattttcttcctttcccttgtaaggaaaataccagtgaaccataacagccgtagatacaaatgcttgtgattngagagaagcgctgattaatcatac

SEQ ID NO: 41729 - DNA, 451 bp, Oryza sativa
  unsure (1)..(451): unsure at all n locations
agcttcccaaacatagccattagcatatattgttctggactacagngactcaagctagcttaagacgcgtctagcactaaaactatattatgatccaaaagctcgaaaggtttagttccaccatcctatagctaccctcgtaacaacgctctaaaattctccctagaatggtccaaagcccattgccactgacggcgacgacgatcgatcgatcgacgaccgtcccattaacgactccctcgcacttaccgtgccggccggtaagactgcctctcgccctcacgctgcacccatatccgtcaaagttagccagcatgattggctgcactactacaagagatatctccctgcaaacacacagaccggaggtggactggtcgctctcttctgcctcaagtggctttggcagtaggcatggcatggcagcatctgactaacagcgacttatgcc

SEQ ID NO: 41730 - DNA, 170 bp, Oryza sativa
tttgacgctccgatcctccagctttcgcctttcctcagcgcggctatacggatattatacctaccagccaccacaccacccttcttccacacttcttcactgactcctcgagatggatcccgcgccggcgacccctcactggaacctggagcgcggcgacctcaccggcc

SEQ ID NO: 41731 - DNA, 492 bp, Oryza sativa
  unsure (1)..(492): unsure at all n locations
ctgagcattttctcaagtttcaaatgtttcttgcatatctttgccatgggtaaatgcttgtttactctttaccacaatgtcatctacgtatgcctcgacattccgtcctaactgcttagccaagacttttcctatgagcctggcaaaagtcgctcctgcattcttcaaaccaaatggcattctgatgaaacaataagttccaaatggtgttataaatgatgtcttttcctcatcctccttcaccataaaaacttggtgatagccagagtatgcgtctaagaaactcattagttcgcatccagctgtggcatctaccaactggtctatccgtggcaaaggaaaatcatcttttgggcatgccttcgtgaggtctgtaaagtcaatgcacattctccacttgccattngccttctttactaacactggatttgcagccattctgggtgcatcacttctcttatgactttcgccttcaacaacttttcaagttca

SEQ ID NO: 41732 - DNA, 462 bp, Oryza sativa
aacttggcgaaacaagcaatatcttaatcttatttaaataaaataaaaccaaagatatttattttgagatgttaatgttgaaaaggctaaaaacaaagatgctccaatcttattgtactcacacaagaaccggatataaaaacttgcacaaaagatcttctctaatattttaacaatttaaaattgaaatgggtgaatatgaagggaaagaaatacacatgattaaaatatatgggggaataacaaataggactctagccccaaaatatttagcatggatttttgatggctcgataatatgctaaaggagatttggatttttgaataaaggaattgaaaatgggtttcttatctcaagagcaatcactcaagtatttgtgataatattggtcttcgtgccacagatgtgatcaagccatatagattatataagcggcgtgatcaaatagaaacttgaccaca

SEQ ID NO: 41733 - DNA, 510 bp, Oryza sativa
  unsure (1)..(510): unsure at all n locations
ctattatctatgcttggcacccttgtgagaatggttaattataatacggaggcgattacaataatcctttctaaagtatgagttgttttgcggtatataatacacacaatttgtttatattgtaaatcaatattactcaaatttcaataatacatatacaatattcttatttgaaagtgagtgaggttatcatgttagtagagtgtatgacatacatccatcaactatgcccgacacatcggaattcctgaagtataagaaaatatattatgggtgttactggattgtttacttgttgccaaaactatatgacaaacaaaaaacctacatatatgaccatagttctcatgatggattaaggggttgtagtatagccatatcactcgctagaagtatttntaataaagattatcatgtctatgtatcatgtgtgctgctcacttctcagatacccatcaaataggtgttgaaaactccacacaaatatttgaaaaccgaatatctcacata

SEQ ID NO: 41734 - DNA, 362 bp, Oryza sativa
caaccgcgactacaaatcgatcgatggcctccacacgctggtagtcgatttttattttactacttcgtatttacaactagcagcctctaccaatccccggaaacaagaataataaaaaaatgtttgtttattttgatctggagataaactgccaaagattttccttttctttaccgctgattctggcgtctcaagatcatctgcaaaattcacccagatcgcccggaatggcactcatgcatttcttctgctctgccgcatcagatccatcagtgctgctcacttggggggcaatgccttaagaactcgtacagtcctacaccgtgcaatatggcgaaatgccatttatcttcttttcttat

SEQ ID NO: 41735 - DNA, 411 bp, Oryza sativa
  unsure (1)..(411): unsure at all n locations
agcnncacttcataggactgtctcatctactatacatanacacnnggggaatgggccctattgggctgaaatacacacacccacacttatcagtgagtattaatgaatcaacatgagcaaaccacatggctgcacaggaagatcagtaatatttcacccaactcagataagacgatgactagtttaaatcaaccggataaaaagatttgtggtgcaaagaaatgcacattgttctgctaatactacttgtaaagttgtaacaatgataattcaagatcatctagtggtagatagttgccccaacattggtgatttgttgttaaatatgtgtcaccacccaattctacattatccctcgaggaaaataatcttcatccaaccacaagactatagttcacgtagaataaaaat

SEQ ID NO: 41736 - DNA, 435 bp, Oryza sativa
  unsure (1)..(435): unsure at all n locations
taagacaatagaggagagaacaatgctgtgttctttcgagagagttaccaactcattnttcacgtgcacgattttcaaattactaaacgatgtatttttttaaaaaaagtttctatacgtaagttgcttacattaattcatatttcaaaacaataacaaatacttaattaatcatgttattttaaaaataagttaatatgatttttaaagcaacttacacgctcactatacttcaaattaaaactaattaaagttaaatggtcatgtcttaacatgtccagattntaacatgttttactgccttacacgtccactgtacttcaaattattaaaaccaataaaagttaaacacgggtattgatctcacgagcatcatttacaaaacaatgcgaatctgaacctgtcaaattactacagctntgcaaaaaacaaaac

SEQ ID NO: 41737 - DNA, 254 bp, Oryza sativa
ctcccttgccaatattaagcgctcataatcatgagtttaccacttaccataatgatcccaagacccgagtcaacggcgttggatgcaagaagggggggctcctgcacatgctaacaagcttaacaattaaaattgctaagaacaaaaaaaaaagcggacgagtggcacaaacttaccttaaactccgcaccgctgatatgacgaccgacactggcaaacatcccatactacgcaagcgcctaggcagagcggca

SEQ ID NO: 41738 - DNA, 404 bp, Oryza sativa
  unsure (1)..(404): unsure at all n locations
taagccnannanangatatgaccagagattatactatcttcgcaccgaatacattcgtagcacttcaccttcaggtgacccccaaacgaaatccaactcacgaatgtgtctaatctgcctaaagattagaccatctaaggacaacaattataggtaggctggctacgctacagagaactttctatgcgatactattatctacaactaaggaaggtaattagctatcagctgctttggacacccacctctgatggtctgacaacgcggatacggctataactatatgatttatctgaacgcggacgattactacgactggattcatggctgtcaccaactgtcgtatatctccgacaaatccgngggatgcacaacaaacaaacgcacattctaacctagacact

SEQ ID NO: 41739 - DNA, 448 bp, Oryza sativa
gagcaccttgttctgatatctattgaacgcgcagagatatagcctagaggggggtgaatatgctttcctgaaattttctcgacaatcgcaatggttataataacagggcccggaacctcctggtgaagaacaccggaacttctggcagtgatgagcagcccggaactttccgagatcttgagccagaaacttccgggcaacagaaaaaatcgatatttggggaagcaaaacaggtcctagccagagatgatcagccacagagttgcacaagatgtaaatcacaagataccagctgattcaaacacagaacatgcacaagagagacaaagggcgatttttcccgaagttcggatcacacggatcctactctccgttgaggtgctcaaagagccgggtctcgattaaccccttgcctcacttgtggaaagatcccagaaggagtccacag

SEQ ID NO: 41740 - DNA, 384 bp, Oryza sativa
  unsure (1)..(384): unsure at all n locations
acactatanaatactcacagctatcaagnctacnctcaaatggatacagtctcatgtccatatctgcncnggagccgccgcaattgtcattttactcccgactattctctgtccatggtgctgcgtcacctcttttggcccaatgggctgtgtattcatgttgggcccattatgggcgcgtcctaaggttggagcacgaccctatggtcgttcttcccctcttttatacctctagtacgcgccaagaacacgcgggtattgatgatagagatatacttttgctaccggctcgcaacgcgcgtgttggctaaaccgccacgctgcctgtgatcagaaccccaccatattgtgtttgatagagaaagattcatccttatctagcaa

SEQ ID NO: 41741 - DNA, 428 bp, Oryza sativa
agcttatacattatattcgatgacgaaagtaatcctgagggcgctttccaagtgcgtactgtggatcggcaaactaataaacaatccctagctggattaacaatttcaacaggcgatctacgaatgtctcactcaaatgtgcgcagaccaatctaatgcgctgcgccgacaccaagaacatgaatagtagtgcctgtctcacacaaaacaaacctgggttacagaagaaaggaattagttgcacagacagggccaatgtctgtcgtcgccacaagctaatatctgctaaataagcacttgagatggcgctcctaccaagagtgaaacctgcagccagtacatgtaaataagataacattgctagaatatacatctgatctggaattaccagaattcaacaccaattatctacaccacaacttccatac

SEQ ID NO: 41742 - DNA, 436 bp, Oryza sativa
  unsure (1)..(436): unsure at all n locations
ccccgaacacatgaagtcgtggtgttgctcacttctttatggcggattcgctcttacgactgtgaagatgttgcgtgggatctagaacttctatggaatcaatatgcatcattcgaatccaaactctatagtccacattgccaagtacgaccacttctgtgaagctttctagggcattaggactcattatgctctgttgcgacgaattttcttcctcatgccccaaccaaacaagagcaaaccatgccgagttggaggggctggattccaactgagaggaaccttgagccagaagtatttttctatgcccttcaagacctcanacatatgatggcacgccaactggttctatgtacacaatcctgagcctgctcattccgagtactgctgcctctccacagtataccaagacactcggaactcactgcctatggga

SEQ ID NO: 41743 - DNA, 459 bp, Oryza sativa
agcttatccagaagagaccgagttcaaagagaatgctatttaccaagtcatctattaattaggaataatctgccaaatcccttttatctctctgaaagagtgtttaatgccctataaagactttatctcttgcttttaattgcagctacattcttgcccaacaaggactaccatctccccatgggtataaatatggacacccgacgtcattgtagtccataaatctctcgatcaatactactctcggcgcatcggcaccctctttaccgaggattttacttatcatcctacggaactcggcacctagttgcattgtgcttagagacacatcaatatagctggagtgtctccgctaggcgcgatcttcttgtctaccaatatatctctacaatcacaaaggtggtctgaatagaattggtatatccatcacactacacagaactatcggctcatctagta

SEQ ID NO: 41744 - DNA, 451 bp, Oryza sativa
  unsure (1)..(451): unsure at all n locations
aatggctagctaaataatctggatatctttctaacttctcttgggaaatgtagtctttgatctatacgcattcttcttaaataaattggtactaccatgcttttcgccttttcctctaaaaatatctcacactgtctctcctaaaggtgtgcttatattacttgtaggtaggcagttgcttgtcactatcttttcaattagatggaaatgattgggcaacgtaaagttcagttaaaaatcttcttttccgtcaagaaaaagtaaaaaaaatgttttccgagacaaaatatataaagcattggtaaactttggccctttcaacatgaacagagatgaaactttctgttggctaaacacgtttggctgcacctcttgttcggaaggtctctatgataatacagtaatactcacccatntgttgagtacgcactacaacagctaccatatcatc

SEQ ID NO: 41745 - DNA, 397 bp, Oryza sativa
  unsure (1)..(397): unsure at all n locations
tcacacancaggaccggnccgnaggagtgcaagtagcagtcttattgattcgnacgccgcatacatacttcctcctgcataaaacaaaaaagacaaactctagcttacgtgttcatcgattgatctgccgacttatctaaaaaaattataatataaatcagaaagacaagccacgtataaaatattaattactgtttatcatctatcaacaatagaaatacgaattatataataaagtatataagacggccagctaaagttggacacggagaccacgttctgccttttcttatttttttcttgacagagggagtatgcatgctccgcgtaggattatcctatgcggatcgttagtacttgcccgcgtgtaataaacatcaccggacagcaaaaagga

SEQ ID NO: 41746 - DNA, 408 bp, Oryza sativa
  unsure (1)..(408): unsure at all n locations
agcttgcaagtctctgagcagtctcatacctattttcttaacacatctctcgaaagaggaagtangtaaggatttagtgaagagatctgctagattatcataagactttgtctgtaagatgtttatttctccactttgctgaagctcatggggataaaacaacttataagcaatatgtttggtgctattgctcttgatgtagcctgtttgcatctgtgtaatacaagcagcattgtcttcatagataatggtaggtgattctgtggaaccaataccacaagattgctcaatgtggtttatcatcctacggagccacacacattcacgtgatgcctcaaacaatgcgatgatttcagaatgatttgtggaggtagccactaatgtttgtttagatgacttccatgatat

SEQ ID NO: 41747 - DNA, 506 bp, Oryza sativa
gtatcacaagtgtgcagcgtgatctatgccacttcatccacatgagtgttgtcatgtcaaaggagatttcttcgacccagagggtgccctagcggcaagtgacgaattcaaggatcttcgggagtggaacactgctatgccataatgtaactagatgacgttatttgaagtgacaatgtaaaacaatattgtaatatatatattttggcaacacttttgatttatgcaatataagtagatttctcagtaccaaatgcttgatactcttccaatatatgtacctgcaagaatttctaataaataatttaaaagtaatttacggccaaattataattaaatttcaatattttctacctatcttcgcagggcggaagttttttttttgcatgcggacggttcctattttcgcaggcggaccggactagccaacgtccgcctgcgaaaattatctgcgaagatcggcgatcttcacagtcgttggttacaggcggacggggcgcccgcta

SEQ ID NO: 41748 - DNA, 420 bp, Oryza sativa
acctgaggcatgcaagcttcggtgctcatcagactcatccaagagaccttctcactccccaacttcaaaaacatcaagcaacagtacaacacgggtacggaagccaagaacacgaggggaaaaaagatcactgccaggtaaaatcttaacaaatttcggactccgaaacgccttataattcgagaagagaacgaggcgcggtgctacttgaccaagacgtaatgaagacgagcggattgcttcatgaacagcctaaataataagaacacaccataacagaactgaaaaaattaaataaaaatcagagaagagacgaattcatggcgtctaacttctcgcgcacgcactggtcgcgccaggaactgtcaacatcaacatgctccgatgggagagaggcgaacggagtccgagaccaccatg

SEQ ID NO: 41749 - DNA, 388 bp, Oryza sativa
  unsure (1)..(388): unsure at all n locations
tactcagcttatgngtggtctccgntcgcctctctcccatcggagctcttttatcttgacggntcctggcgcgaccaatgcgtgcgcgagaagttagacgccatgaattcgtntctcttctctgctttgtnttttttttggctcctgttctgcagttggtgtgttgcggaggtgtcagtttctgaatttgtataaaccaaatgccctcttcttattctttttgctgttcctgatgcaatctgcccgtcttccttacgtattgatcaagtagaacggcgcctcgttctcttctcgaattttaaggcgtttcggaatccgaaatttgctaagattttacctggccgtgatcattttgtttctcctgttcttggcttccctttcccgtgtt

SEQ ID NO: 41750 - DNA, 356 bp, Oryza sativa
  unsure (1)..(356): unsure at all n locations
ctgcactgggaggactcctctttgggtatgacattggcgcaacctctggagcatgcatatctctgcaagctagtccctattttggttggctatgcaatctgttatagttgtcatgtatcgattcactctaatggtgtgtattcctccagtctgctgaactcagtggaaccacttgggtcagcctgtcatctatacagctaaggctcgtggtaattttctagatattttcatgcttaccaaactttgtgntttcccaatcaagaacactactgtctttaatgtgatcttntgtcatccaatttaagcaagcaggtcactctatggtgctcttggtggttcgttcctagcatatcgcg

SEQ ID NO: 41751 - DNA, 450 bp, Oryza sativa
  unsure (1)..(450): unsure at all n locations
actcagcttcaagggaaagggatttgctagtaataactctgatgccgattntatatcattntagattatgaaacaagatgttgaacaccaagatttggtctttaaataagttggttgcaacatcatggctggagggaggatccttgagcttcaaagcacctggttggaaacatttgctaccaagggacccagcttcaacctccaaatggccaatcagttgccatgagtttatcattgaaaacaatgtgcagagcctttgttcatgttggttgcagacaagcatactgcctacactttgaacaggttcagacttgttcagatttgcagctgaagcagtgcaatgaatcagtgcaaatgtgcaatgcatcagtgctaacaggcactgtgctgcaacaggggaacacaacaagatccagtacagttcatgtcattnggctggatggagatcca

SEQ ID NO: 41752 - DNA, 306 bp, Oryza sativa
agcttatgacataacggtgacgttatgttttatgtgcccgcacctatgagtcttctgattgcgtacaggtatgcgagatgacacccggaacggccggtgtcatgacccatcccccgtgggacaacccggtgtggtaaggaatcccgactatgaaaaaatttgtgttcggttaagaccggtcagatatttcgaccgcgattcccctctcccctgatattcttctcctagggaacctcgctcgcgctgtgctgttgcttcagcaagggcagaggtgaacgatgaacttgtgaggcaattatcggtgcc

SEQ ID NO: 41753 - DNA, 108 bp, Oryza sativa
attatacatgggtcaggccatcgtgacactgtggatgccttatcctcttggtacgggatctctatgaagcagtcacagatttcaatgggattgacggtcctcgttggt

SEQ ID NO: 41754 - DNA, 487 bp, Oryza sativa
  unsure (1)..(487): unsure at all n locations
cacctgcngcatgcaagcttgtgcacgatcagtcggaggtcttcttctttggggactgtggaagtggccagctctccatcgcaagcacaggagctgtctcagagatggagaacacaggatggtttgtagccaatgagtggattttcaccaaaccatgagggaaaacagagaagccaactaggtgcatagcaaatatcaacatgccactcttaactttgtggcaaacgagcaattttttctaataattctctcactggatttccattctagtgtaaggataaaccatcagttcaaggaagtaaaacgaaaaaacacaaaagttatacagggcaattccagctagcaaattatgtgctaccaaattgatgaggagggaaatattgttcaacacaaacatattcagagagaatagtatctcgtactcaaatttaatccgtaaataataagggcttactgaagtgtcangccttgatgctgnggcatttgc

SEQ ID NO: 41755 - DNA, 429 bp, Oryza sativa
  unsure (1)..(429): unsure at all n locations
cttcggcggcatgtaaaataagataagattagcatatattttattatgtgttaattattacaaactntactaaaggttcgtttgattntttttaaaacaatattttatagaaaaaattttaatgaatacaccatttaacagtttaaaaatatgataacggaaaacgacaaaatctctgtgcaaatgcaaatggtaagaatgatactactagctttcataatccccttccttccaaaaaaaataaaaagaaaactttcataatccccattccacacatgccaaagtgcgtgtcgttcggctgtgcaaagtgagtttccgttagttaaaaaatgtatatcgcatatggcatcatggttcttttgatagatcagtagcattctgcanaanaagggaaaaaaagaaaaagataaggaatccccataacatgga

SEQ ID NO: 41756 - DNA, 407 bp, Oryza sativa
  unsure (1)..(407): unsure at all n locations
tcatctcggatctgagagtcaacatctctagtctgggttatgataatcttgctctgatggtgtaggctcatgttgaatttcagtaccatctatgaaaagctaagtgttgtcatatttctaaataccagataggaacaagcaatctattctgatttcctttgaactcaaaagcacactcagctgtgttagaatagctacgcttatgggtgaaaaagagtgaagttagttctgatatattcttgactgcattagcttttgttctgcagtagtttgtgtttaatagtgccgcaatccatgactaatttgaactgtactttntcttaggtcacggaatcaactgatttcacagagctcgtcaaccaagagccatggctctcgtctatgaagttggttgtgaaacccgacat

SEQ ID NO: 41757 - DNA, 426 bp, Oryza sativa
agcttggaagttgaagatggagcttgttagtttatcctatccatgctgcttacggtggcggtggcggcctactccttattattgttctgcttctggatgcacgcatcaaccgcgacaactttggactctggtccgtttcggttctgtggagtaacgatgaataaattgtggagcgtgaggttgatgcaacgcaaccatttggattctgggaagcggctgtccatgatcagattcacaaacctcctagagagggccattatctgagtgaacttcaagataaaaaataaactacatgaaaagcatttgttaccaagatgaacgatgaaatcatcataatcaaattaaacaggagagattcttttaccaatggagggggaagaaacatgcctaccttatgtccaggtacagttgctatcgtgagggaat

SEQ ID NO: 41758 - DNA, 424 bp, Oryza sativa
  unsure (1)..(424): unsure at all n locations
ntaggcttatcttgagagtagaaacatgtaatagaccattcatgtatcgnnaaatgacactggcctcacactaatttccatgccaggctgaaaaaagaaatcggtgcatgtacttaagttntcttcactaaacaaatcaacataagtcttttattgcacatggaaagacatcagcccccctttggagtgtgcgcataatgaatcaagcaccttgttgttccatcggtaaaagttaagtaatgattattttgtacgtataccagagctagaaaactttcctcacaagcaaaggcagttaaacagcagctcttgaagaacgatactgcaggggcatgagaaccagatcagaattgtgtgtaccttcaaactaatcgatcacttgccatttccttaacgacaatntcactacaactgtatgacgccc

SEQ ID NO: 41759 - DNA, 462 bp, Oryza sativa
  unsure (1)..(462): unsure at all n locations
agcttgctgccttgctccctcttggcaggttgttgctgtgtcgaggctgcaataaggcgtggagcttgattgcggttgttgttgccagcattgttgttgaagaactgacgctgcggacgaacaacagacgaagaacctccatgtggcatagactggtgtcctaaaataagacgcggcttctgattattcccctgttgtatcttgaattgagcaatccggcgtttcttctgctccatgcgattatacttgtcctcctgacgaatagccttatccactaatttctggaaatcagaataatctccagtcatgagtgggtaagaaagctcatcattaagtccttccaagaacttctcctgacgctcttcatcattgcgcacatcttctggagcataacgagccagacgattgaactcgtgcagatactccgtaacagagcgagatccctgngtgagcgacctgaac

SEQ ID NO: 41760 - DNA, 476 bp, Oryza sativa
  unsure (1)..(476): unsure at all n locations
tatagtaacctagtgtcaccaaaactcatatataaagtgttatatcataatggntcctaaggttaggaatgaggaatatggatatatgtggagttaaggtgataatgcaaataataggagtttatctaacaagtttaacaaaattttaatttattagtgtacaatcaacatgcaagattngcaaacattttgaataacctccaaaagataggttcaaagtgatcaaagagagggaggtgggacttgccttgaatcatgaaaatgtcagcacctaaatcacttcttcaccgattaagcaatcatctatacaaagtacacgttatgcaataaaacaaccgaaatatgcgaaaatccaaaatgttctaaaatgcatgatttgtgcacagagaatatgtacttatataaaatgaatctacgtgaaagaatttctatttttatctcatttatntgggagttatgaatcntataagtttcgt

SEQ ID NO: 41761 - DNA, 506 bp, Oryza sativa
  unsure (1)..(506): unsure at all n locations
taccgccatggccgacgaggagatcgatcgatcgatcagtcgatttatcagctagccgncgaggaggaggggatgggtatgtatgcctcgtttcttcctccttggaaggcaggggctaagctagctagctatagctatagctaagcttagcttgtcgccaatggagtccttcttctctcctctctctcaagccggctggcttgcagctgcagcctgggattataaactccacgaaagggacccataaggcccagccaagtcgcttctttgctatgtaccctctcatttctctgatcttgcttaatagtcctcgtaattaatgtcacttcaagtcttccctagtctctcttgatgatgattaatatttaatccgtgcaatctttcagcggttatggaagatggcaacacctactccctctggtatataattgacaagtttaaatatgatacggctctgatatatattttaccatgtcttctatataaatatgatcacaagtttgtta

SEQ ID NO: 41762 - DNA, 491 bp, Oryza sativa
  unsure (1)..(491): unsure at all n locations
aactcaactgggggggggggggaggacgtatcgatcaattcgttctctatattaccaaaacagaggagaactagtgatgctcgcaatgcataaatatgttagaataattatattccactaatattggctctactaaccttttgcacagaatgacaataaaatgaaggagaatcgacatcaacttaaacgataaatcaatcagatgatgtcgaagaccagacttatgtatgaatgggccaagaactcataattgacacgacgaatcaggccacaattcacaagtctacgaagtgaagcagcagaggaggccaccagccaaaatgtgggctggttgggccggccctacgtttggtcgatggatgcagggttttgagggaacggtggagatcacaaccaatggcggttggagggtattaccgaccttntcaaccgccataaccgntattacctgcctatttaagaagctcactctcttcactttaacacgcacc

SEQ ID NO: 41763 - DNA, 405 bp, Oryza sativa
agcttgttccacatggagctccaaacttgtcttgctaaggcacaatccatgagtaggtgattagccgtttctggttcaatgccgcagaggggacagatctcactgttatcccagccccttagttgaagtttatcagcagtgaagatttttctgtgaatcatcagccagccaaagaatttgcatttattttccgttttggccttccaaacgaaagttgatctgttgtcctgtatacttcctagaaactggatcctgtaagccgagctagccgaatagcatccatttggggtccatctccatgatatggaatcctcaatgccatcctgcaaatgaatttgctgcagagagtgccaaagaatgatgaactccctgacttggaccgtgctgttcattctccgcatctga

SEQ ID NO: 41764 - DNA, 497 bp, Oryza sativa
ccttgtgcttggctggtatagttactctgtgtgttatgctttgcagtcttgttggattgaacttatgtgtttgttcggtcttttgtgtttgttgtaccacctatgtaataatggggagcctatatgcttatgtatgaattttataggctgtgtacgtacatctttccgatgtagaaaccgggttttcaatccattattttttttaaaaaaaaacgctatgatacacgagtcatatccagatcatcaatcgggcctgcacaggaaggagtttgcacctgatacggtaccctacacgtacggtaccctataacgagccaaacacggataatgtcaacgtaccggactctaattaaacacatgcatgctatccggccggtccttatatatcgctataaaagaactatcgatctgatatcattggaccctcgcatcgctcctgggaatattgttcgtcgggcggcggcggcaatctcatcatcattcagcatcgcgacatg

SEQ ID NO: 41765 - DNA, 322 bp, Oryza sativa
atagtatcaccatgtcactcataagatgctgagctccaactactaaaagctctagtgtaaaggtcagtttcttcagtattacctggcttagtatgttggtcaaccatgaagatatctaccattagaacctggattgcaaagcaggctgcttatcagatagatgctcttaacaatatgtgataagaatactcatgagggctttagtcttctccctatagaatggcgaaaatattatattgcgcatgacacgccatgaacagtattcgtctagcggtagaatatgtcatatggacataaatatacacctgttgacagctggaac

SEQ ID NO: 41766 - DNA, 497 bp, Oryza sativa
  unsure (1)..(497): unsure at all n locations
ctcatcgcatcacgccatcgngcacttgtagttgattttcatttctattccccaccaagaattgaggtggttgttttgtgtgatgccctgcctacaaagtgttcgttgttnttcctacaagcatggtgatgtggcgatcttaaagctatcagttacgcctgcatgacctgtaatgtaagcccgaatgatttgttaggatctagatttggatcctactttccacttaatttctctaaacatttgaaactaccttaatattagcagctagatcgatattcataatacaagggaagagtctaaaatgctaatgaaatgcatcattgaaaatattcatttgtagttagttctatagatgtatgcatttcatatataatgattgctgacaactgctnttntggctagaatatntatgtgactatctacctcaatagctaaagaacttctcgaattgcaatacgcgtcgctcgccctgtgatcataaatcagtatgggccatg

SEQ ID NO: 41767 - DNA, 389 bp, Oryza sativa
  unsure (1)..(389): unsure at all n locations
cagcagacaataaagctgagcaattctctttctctagctcattttctggatgcattaggtacatagttacttcactgcaaccgncagggtccgaaggacaattagtgtcgtgtcgcacggcgaccttgtttcttgagaatgcgccaacgtaatatccggttgatgatggcatcgtcgcctgaagatagtaactcgtagacaaaatgtttgtcgcaatatttgcattgagcatgaagtatacttttaccatcaaccatctctgtgaatacttcgaagtgccggcaacactccgctcttctggtatacggctggntgtcggaatatggtgtgggcatcatcgtggcgtctgcgtcgatggagaagtaggtctcgacacgagatggctgatc

SEQ ID NO: 41768 - DNA, 386 bp, Oryza sativa
tatctataactctatcgctatgaccaagagtcaaaaaactctcttgatggacagtttctcatgactaacactacactatttctggaacaatctgtggcacaaaacatctctccccatatgctgtctgaggaatatacaccgacaccctctgaagcgctctaaataaatgaaaaatttgcccatatagatatttgcacgacatccattaccatctaatcttcggatctttggtacactcttcatttgggagttagaaacacgaaactccatgtgaacaaaccaagatgatactaatagaatatatatttaacgaactaggcctcatcctttcatgtttcgcctactacattcgtgtgattaagcacttcaaaaccactggagacctc

SEQ ID NO: 41769 - DNA, 410 bp, Oryza sativa
tactcagcttctgtttattagactcttctctccttggcaacatgaatattcctctgcctgaggaggtagatgccataccattcatggcattgaccttgtcacatggtacttgatcgagcaagcggattctcttcaagttcacagctcgctccataataagcctggtataatttatcatcttatcatccatcgcgaatactgtaatctctaatagattcaagtggcgatgtttgaaatcagatgacatctgatcccataacaaattgaccttctcagcgctgtcctcgcatctgttcctttcacatggatgctgacataacttcgagcaacaaagaccagatagattaatagtgctcaacagccaacataggcatacatcatcaagctcaagaatttggaatatcttgaat

SEQ ID NO: 41770 - DNA, 397 bp, Oryza sativa
  unsure (1)..(397): unsure at all n locations
agcttaccatgtggatgccacatctcatatgttaaccttactgatgggggactattcggataattctgggggaaggtcattattgcattgaagtagcctccatcactgcagaaacagaagttcacacattaaatcttaccaaggtccagtgaaatatataaagatattggtttaaagcaaaaaaattaagcttttaaagtaagaacaaagaagttttaaaaatgtacaatcacttaagcacagaagaaacacagataatagtcaaatcaatcgacagataaatgtacagaaagcaaatcatgaggcacagcttaatcactagaagctattaacagtactggcacagatngagaatgactcaatgatactctatgaatcacccgatacaacagctaag

SEQ ID NO: 41771 - DNA, 311 bp, Oryza sativa
  unsure (1)..(311): unsure at all n locations
ctggctggtcgatcgagacgagcatttttatttttctgcgattcggncagtcttgagttgctgtccaagtatcgccctcctctcgatcttcagattgatgagtagtgcagagtgctccagtcacgtttctcatcatcattctcagtcgggaaaactactcgcgaccggccggccggcgaaacatggatggttacacttacaaacctcatttgcgacttgcgagcatgatcaggttcgagacggaatgatataattaactttattgtgctctattgcagctcttggcgaacgggtgtacgtctctgacagtt

SEQ ID NO: 41772 - DNA, 402 bp, Oryza sativa
  unsure (1)..(402): unsure at all n locations
tacccggaccttaagtcacctgcggcatgcaacttaatctatacagaggagtatattatttcntcggcctttatgtctgtcatagggagatgtcactaaccaaggtggatgatattatctcgaaaatagcaaaaaatgtgggattcgttcgttatgccacatataaaatacctagcatgattatgaatgttgaatatcgttacaacaggaagaatccaaaacgaaagcgaatacttgaggcttctcaagaaagcttcacatcatgtttctcatcctgtggaccaagccctactgcaactccttattttgcaaacgttgattgtcagcaaaaaatacttgagcctcatatctgaagagactaaaagtccagttgatactgatgaaagatttgcatctttgtca

SEQ ID NO: 41773 - DNA, 268 bp, Oryza sativa
tgaaccttgaaagtgcctgtcctttagagttgactggctggtcccgaccactgactgatctcatcttgcgaagaaagatcatgttcacatctcgcgtaccatcactactttgcatgagaccctcaatagatggcctatgtataattgcctgtgtcaacaaaaatctcatttcttaaactcgcatgttaaggctgtgataaaaacctgtcaataatttgaacaggcaatcgttttgatagaatagatgtacatgtttcaaaagcctgac

SEQ ID NO: 41774 - DNA, 335 bp, Oryza sativa
tacataccttaccggactggcttatcatacgcggctccctttacattacaacgcaatcaagcgtgattatactcatctggcccaagctgcaactgtaagctaacactaaaatgaggcagacagagaggagcttccgtgccgctcccgatctgagtcgaggagccctagctatctcatgcgtaactaagccgtgacttaatcattttttctctatctaccagcactaccactagttcccgtataccggggcgaatgcaaaaaggccacacttcggtgaagaaagaaaaagactatccatttcattgtgcgcagcgcgcgagcgactcgacacaccc

SEQ ID NO: 41775 - DNA, 446 bp, Oryza sativa
ctgagatgaagcattcatcctcccacagcatccatgtgaggaatgcaagctctgcaagcgtaagaacatggccaattctgcttggagtgcagcttcaggaagggcctaagtagccccaaccatatgcacagaggtggtccaaagatatgcactctcccataccctaacaacataacagaaactgaactatctctacagattcggtaccgacgatgatctcgtcgcaattgcgatcacatgactgacgatactgcgaaaatgacacataacaatagcagaaagcgattgcgaaatcgcctcgagaactatcatatcgccataacacggtctttcactacaacagaatggtaacatcgagtaccagacagattgattgctggcgagtgagataaatgtgcaaagaagagctttgcatggtggcgtagatcatcaagaacttgagtagc

SEQ ID NO: 41776 - DNA, 404 bp, Oryza sativa
  unsure (1)..(404): unsure at all n locations
tcctagaaacaatgaaacatgcttacagaaagctatctatatgtttgttcacgagaaagcatctcacaaaaaaaggagcttccgcaacaaagtgaagaagcaagcattacataaatctacagcattattatctcgatattgggatattctctttttctatgaaggacaagttaatatatagtttattgagttcgacccattagacttagttttctcccttctatttctggtggaaaatagtttgtatctttatgagataaatctgggttaccacaaattgaacaagcaaaagatgtatggaaattttgaccctatatatntgttttgtactgctagggtgctagtccagtttacactcttgttatcgaatctaattatcatcttggtctactgacatatcttaa

SEQ ID NO: 41777 - DNA, 533 bp, Oryza sativa
  unsure (1)..(533): unsure at all n locations
gacactatanaaaactcacgcctatactagcatgaatgccaccaaactgtatctcttatgtttgttaaatcntcgcncggctccaagcaaatattatatcttgggccactaatcaccaaagttgagtgatatatatagctgtcctaagcctggatttcatcctaatctaatgccctacctttattaattaattgtcggattgttgaaacggattatttactcaagctctataaatacattttctataaaaactttcttctgtaattatattgctaagaacatctattttatattatttattaagtgtatttattatgatatttaatttatctctacaattaaataaataatgatagcaacaattcgctcaaccatgtctcgatttgggtagaaatgcggtgcggtttcattctgcttaatgccctttgcggcacatttaatgctgtgtttagatctaaaagttggatctaaagttcagtcctttttcatcacatcaacgctgcatacacacacaagctttcagtcacatcatc

SEQ ID NO: 41778 - DNA, 424 bp, Oryza sativa
  unsure (1)..(424): unsure at all n locations
agctnggcgtatcccacgggagtgcctgtanacttttgaaccagatcaaagtgtcctctcaattntttttatgaaaaaacaaagttgttttgctctctgttaaacaataaggctacattactcacgtatcataagctttgccatgttttgcctactagacgagctatgaggtggagatggttgccgttggctgagcgcaacgccgcctgtagagagttgctgcacatggggtgcctgctgcaaccgaggtggctgcgcccaagctccggtcgtagaaagctgctgctgctgctgttgcaacaagggaggttgctggcgccaagcaccatatacaaagggctgtagcaactgaggttgctgctgcacaacgggcggctggcaccaagcaccgtaggtacagggtagaatgccactcttgttgggg

SEQ ID NO: 41779 - DNA, 228 bp, Oryza sativa
  unsure (1)..(228): unsure at all n locations
gacctataaaaactcaagcttccttcaccgctatatcttagaccgatccctttctctctcacccttatntcctgcaactttacccaacacgtaccaccaactcaccgcgtaccaagccaccggctcagcagcagcagctgccatntcacagaggcattggttgctgctctctcttcttggcgtttggttcctatggagaggagggcggcgcccaaagtgacggctgtg

SEQ ID NO: 41780 - DNA, 461 bp, Oryza sativa
  unsure (1)..(461): unsure at all n locations
agcttcccagatggccaattcctgtcctagattgttggtatttngnctactgaggattctgtactggaaaacatgtcagggcagtgtggcgttgtgctgtctgtgaatacatgtttctttgagagggaggagcatgagagagaacgccagatttttttggcattctcaactagaatgagaaatatgaatacactgttcgaattttggaagatgtgaatctgccaagatgtttgccaagctctacatacaccatttgtttgctaaggtgttttcagtaaaattcctttgggcaactgtgacaatggtaaatcaagaaaatgatggtaatttaccaagtgcttttctaccacattacatcaaacattgtatatatattcatgggccatattggaaatgttgttctatggctaatattancattcttattttttagatccgataaatttcacggtggcacttac

SEQ ID NO: 41781 - DNA, 521 bp, Oryza sativa
  unsure (1)..(521): unsure at all n locations
tatgtggagganagaagaattgaaaaatagagagggttggctctcatgctagagctagctattcacatattntaagatagatacattaaatacataggtaagagatagagagaggaggagaaaaaaaagaggtaaccttatagtccatttactatacatgttaactctaagataagctataagttcattgttggctctattattaaacttgctctaatattaccctttctagttttttggatcgcatgtttagttaaaaagtttttttatgtactactttcgttaaaaaagacttcattttcatcgtttagattttgttaaaaagagtggatttctccctcttacctaacgcaattcactaatcgtgaagntntatcactccaataacctgtatctacttcttaccttgttatttntntaaaanaatgacttcttacctccacttagaaatatggagtattactttcttgtgaatgaaggacactcctcatcccctaattatcaaccaaagactataaatt

SEQ ID NO: 41782 - DNA, 391 bp, Oryza sativa
  unsure (1)..(391): unsure at all n locations
ccatccgcaccaccctagttcgagaagattttggaggtgtcagcggagctgttggcggtcggcagtctgatgacgtcngagctggtcaacgctcagctgcttcctggtggcgccgagcaagccttgtccgtgcagcttggtgacctcagccacctcgcctactcccatgccaaccaagccctctttagcccaatggcccaacatactaaatcatgctttcactctgaataaagctttaattgtggctgaaattactcgagctgtgctgttctttggcatccgatttgcatgatcttaccaagagcagaacatagtagctctaattgctattgctcgtnttttctcaacgttgctttgctgtattcttcctgagacgagtcatttactctac

SEQ ID NO: 41783 - DNA, 464 bp, Oryza sativa
  unsure (1)..(464): unsure at all n locations
acccaanacactgagcatcagcttgtatacagatccatatacactttagtccagactcatcaatnaggcactccaactagtaatgaaagatgtatgatgggttacctaactatctatcttaaaatattgatttaagtaggcgagaggtcccacttgatggaacagttaggctcttggaagtctttgatggctactaatatgaggttgacatttactgggatggaagacagcagttgtgcataatgtacagcgtacagttggtgaaggaggcaagctatatacaagtgatcaaccatgtatatggggatggcttacttaccataaacgcatgtatagaggatgatgatacatactttaactagctaatacttctatatggacaaagtcctagctactatttactcttgccaatctcataacgagctagctagctacattatattatagcaggactatcatgaata

SEQ ID NO: 41784 - DNA, 449 bp, Oryza sativa
  unsure (1)..(449): unsure at all n locations
agcttaagcagcgatgagcgtgagagtggttttttctacgaggagaacttgccggagagattcatgatagtctcggcggcgagcagctggcttctcgggtaatccgagttcttgaggcactggatgaggctgtccactgctttctccctgtacatgctgatcttcctcggctccacctgacaaaccatttgcgcattgatctcgccatcaaacatgagattntttttgacaaatctgaagaaatgttgcgagaaaaagttgtttttactaagagatctagctgaagaagtagccctgcaacgacagggctctgctccggtgtcgtggattgcaggtacacgagaagcgtgtgcatcatgctgaaggagctcgcctccttgatcgttcgaagaagacaatcagcagctgatcgcctgaaaaataagttgagatattgttttaaatgggat

SEQ ID NO: 41785 - DNA, 457 bp, Oryza sativa
  unsure (1)..(457): unsure at all n locations
ttcatgtgggctgtatgttaagcgatggctcacatgttgtatacatgatttatgagggcctctaccacctataaaacatgttccatcagtaagacatctcaaactgtacaggtgcgactntgtaattaagattgtattgaaaacatgagttttcacatcatatgtccccaagaatgtttgttagaagttcaaaggataccgcaaacttgttgtatgcgtccctgttnaccaacttccagcacatgagcatatactacccaggccttatctggtgagcctttcatgcatgcctggaatgaaatattctcgttggaactttgaatcattggaaaaagtgggataaaaggtgcatataccttttatgaataggtactagtattaattaaaatgtgcttcacagcaatagcatctttatcaaaggagattacagactatggtgagaaaanaaacacgaata

SEQ ID NO: 41786 - DNA, 387 bp, Oryza sativa
gcaagcttgagtgaagccatcaccagggcgtaagctagcttttccatttcaatggatcttgtcttcgctccttgcaatgcttccgagacgaaataaaccggtttttggcctgaatccgtttcttggacgagagcagcactgactggcactggcgaagctgccaggtatagtagcagttcgctttctgatgctgggctgatcagagctggcgggctttgcaggtattgctttagctcgtcaaacactgcttggcattcgggagtccacgtgaattttcccgcgcccccgaggggtttgaagaaaggcaaacctctttcggctgcctttgagaggaatcgactgagtaccgcaattcggcccgtgagcttttgtacttcacgtacgctc

SEQ ID NO: 41787 - DNA, 485 bp, Oryza sativa
  unsure (1)..(485): unsure at all n locations
tatgctgctgcngctgctgctgctttccacccagcgcctcttgcgcagcaagagcttctcgcatcacctgacaacctggctaagcttgggtttgtatatctgcatgcgttgcagcacggtgacaggctctgctctgacgatgtcaccttgatttccttgttgtttcgcaagcgtcacttcgagttgcgacatcaacagcagccagagcctanaaggttatgcaatgatgcctacattgcgctntgtcaccggcgtttcaagttttggctacatcatgacctagtctgcaagaacgtggaagttgcattggccacattcaaccttgacaaggtttggtttcttcaagttgaccnccctctanttttgttgatatgcttagcctcaaatgtccaattaactctcttcgatctgtctttagttgaaggtcacaaatataaggcttcatttatctgtggtgtcaatgagtgcgtatctggcctggagta

SEQ ID NO: 41788 - DNA, 377 bp, Oryza sativa
  unsure (1)..(377): unsure at all n locations
agcctctgtctaggtaattctttttcttcttttctctcactcactccatcagctgctagctatgctagctaggagtagctagctgcttgtcctctngctgtcgagaggaggaagaaagaatcgaggcggttggctgtcatgtggtgcatggctgcattcatagccccgaccgtgatgtcatcgactgcgtgccgctgcacctacaaccggcgttcgaccacccgaagctcattcatttttgtttcgatttgcagtgatcgtttctatctcccgcgacgtttcttgatcgtgtttgtgactgtgtgcgcgtgcaagttgagccggcaccagatgagatgcccaaggtccgtgccgtggcaacggcccatggggaggcg

SEQ ID NO: 41789 - DNA, 482 bp, Oryza sativa
  unsure (1)..(482): unsure at all n locations
tgctgaccatcttgctgtgtccgcagcaatccatatctttctgcaggacggcgacagccggcgaggactccgacgtctaggcgccgttgccgctaccgccggcacccccggctacggccgcgttctcggcggcggcatcgtccagcttctccttcacggaggagaccgacggcggtggccaccgccgaccagcagccgcgcatgtggtgtctgatcagtgatcactctcgtgcattgagctagagaagtacgggtggaattattttttccactcttcaatacatttcatgcttatgtacgggcttcgcanaatcgagagacgtctcgttntagtgccaacgaatgacgccatcagatgttggctgaatatgtgttaatatatagtacttggctatcaagtaagtataaaatacgttactactacctatgcttcaaataaaatcttctcttaacttactcatccgatctacgatccgagtaca

SEQ ID NO: 41790 - DNA, 390 bp, Oryza sativa
  unsure (1)..(390): unsure at all n locations
agcttccatcaagatgagaagnttatcttgtctcttcatattgcgtagtacatctgaggactatcttgtgtgaaactttatagttcgcgtagtacttgttaatcagcgtntccaacctctgtttagaacaggtcctctgttttatatacatgttatctgaattgttgagagcatgctaccccatatccagatgtgttattttcatgtgtttctgttgtttttgccgctgtgcgtgtgggttgtcctagattgtacacacaatatgcgatggattgcggatcttgtgcgtattcctctgttcttcctcgccgtcagatcttgcatcatatcctgatgctgatgcatcggttagcatagctgcattgtgactgcttggtcaccatgcctctc

SEQ ID NO: 41791 - DNA, 484 bp, Oryza sativa
  unsure (1)..(484): unsure at all n locations
tacggaccttaaaactcagctaatnaacccatctacaaatcttgtacanactctttcttcaacttatctctaagaatgaggataaaggtaacacatttaaacttcatctttaaacaatgctgagtcttccgtgttctagacgttgctgcacgtgctctgtccattgttgcacgcgctctgtcctgtgttcatgccccgccgttcggctccatcacaatgcctgtggaacagaatcccgcacatgagaatatttttcaaatgcaggaatgtccttgtaataaattatttgtcaaaataattagggagaatacaggaaattggatgccaaagccttgcctagctattgtttccccagttgtggataaaggccatatggagaagaggctggaacctggaggatagtacgacgtggccagcaaggaaagcgacctcgggaacatcctgtagatcttagcactgatctacatctaacaatgggttatag

SEQ ID NO: 41792 - DNA, 464 bp, Oryza sativa
  unsure (1)..(464): unsure at all n locations
agcttatatgctgagaataaagaatttctttagtattgcgcacacaccatgcgcacactggtttaacagatgtgcttaagtccctaatagacacatggtttcaccacacctggaaatatatggtatatgtggtatgaaatccgagtaaataaactcaaaaatgatgtaccaacccgcttggaaaatgaccacaatatataatcagcctaagccataatattagtaaataaaaatgcacacttacgtggaaaaagcaacgatatttgatccaatcaattgcttataaactcaaacatcaccttgacttatataaaaaagtcagcggtgcagctatataaagctatactgtctgacaccttttaagatgcattgtaccaactcctaacaagttgagtaattgccgataaaaggatttaatgtattgngcctggatcaacgcactctggcctagcaaaagtgcctaa

SEQ ID NO: 41793 - DNA, 407 bp, Oryza sativa
  unsure (1)..(407): unsure at all n locations
ggcttcagatagagagtatcaagaatatcctaaatccaatgcatgtggcctcccaaaatctatcacaaacagacagaggggatacggcattgcaaacctgcccatttctagcgattcgtatcatagaaatggcatcacgctacaatntagctgcagntatgatgggctaactagtgaccagaataaaatcatcactaacatgccacggataacctgaccgaggtgaacccaacccatcaaaaccctaatattctccgcccatggatctctccctcgccttataacaaaatgcccctagttagtgacaaagagaaatggcaccactcaccgcaaatgcatgagacgccaagaagcatggcacggccaccatcggcaccgctaggatgggtgtcttcgcgccaacacca

SEQ ID NO: 41794 - DNA, 459 bp, Oryza sativa
agcttaaagccatgaagcccttgttgcatttctgtatctggatcctgcagaataaacatacaggatgagtagtatctgatataaatataatactcgagaaaaattcaagtattttaaaatatttataaatatgtatttcttctcttgtcaattttgatttccccgagcagatgactcattacgtttaaacactctgccctactagtcatagccaccaagcaccgggagtcggcctaagcacttcccaaacatgcatatgagtgacatgagttcgtcattaatggaacaaagtttcacgggtcggagtttactactccggtacttttgcaattattaagagcagaaaataaattatcttatttctatacttttgattattccgaataatacttagcaccttgcgttattcggtccatccaacaagcccccgggtgctatgaatctgtccaaaggcaacta

SEQ ID NO: 41795 - DNA, 492 bp, Oryza sativa
tcttactgttcgaagcttactgatctagactatgtaagttaaatccttcttggcagcactttaactatcattattcaagatccatacttttgaactgtctttttttcatggaatggttcttgatgttggaatatgttgcaggtcaaagcagaagttgtacagaaccgaagtccaatccagtgcaaagatcacgaagtggttctaatcctcatttgggttttccgcatccgttagggcgtccactatatagaggcacttcatgagatacaaagagtttgtctcgtcataatagagatgatactgtagttgtaaggttggtacgctctgcattggttgggaaatcacaaactgaagatgcatgccatcatggccttgttgaacccactataaacactaaagaggcaatggatgctatcagtagcatcgttttggagccattggaaccagaaactaagctcaagatgcgctcaaatcgtgataaaccaagtttaa

SEQ ID NO: 41796 - DNA, 432 bp, Oryza sativa
  unsure (1)..(432): unsure at all n locations
agcttgcaccggctgtttatacttatcatttctttactataaaacangnggaaccacgaagtgctggtatgaacaatttggaagaaaacattgtttgcataaataaaggaattgatttgattattttgggagtacgcatatgcacagcacgtggacaatcatttataaattggaattacatgaatatttgatactaataacaatcatgagtcctgtatgaatgcaatctagttaaccatagttgtttctaaaatacattgattattctgatactcctactggcttatatataccagcacatgtcacactataatttagagtactgacacatcatataaagagaccagtggcaacaatggagcgtgtggtcaataaccccataccctagaaaatagaattcttgacatagttgatcatacctctgttcgacac

SEQ ID NO: 41797 - DNA, 449 bp, Oryza sativa
  unsure (1)..(449): unsure at all n locations
agcttccccatcatacagtgctaatgatattgatttgngctaaagattcgccatgttgtccaggttatctacagcgattcatccagctctcatcatgcatttgtcgtcgccactcgcaacggtcaagccgtcaactcattttaggagtgaagaacgaagcgttcctctcttctttcttatccagtgatatacacatgcactagaacaggatctgaagtacccctccgtctcataatataattgatattggagggatgtaaacatcgtagtactacaaatctagatgtatcacatccctataaaatttttttatattatggaacaaagagagtaatatggaatggaggaccacgtcaattttctaagagatggtatgggatgggatgcctgcattataagtctataatagacttgtgcggtgccactaccaagcccgacgttaactatgt

SEQ ID NO: 41798 - DNA, 512 bp, Oryza sativa
  unsure (1)..(512): unsure at all n locations
ttagagcttcttatgcctgtggcactgggtatgattgtcttcatcactctctcacaaacatatgtgcgcatgtttgtggaaatattggttagacgtctgagtgatggccctgttgttgataaccccaaaagggcacatatttcttctgttatagctgaggtactgcgatacatggtgcttgcagtgcctgatacgtctgtttctttggattgctttcctcttccatctttagtggttcctgatgtttacagtagaggtgctatactgaagataactgctggtgggggtattgctggttcaaagaggcacgatggttatcgttacttgtcctgtggntatgctgttagttcaattcagaaacgatcatatgatcttgcagacagtgccaaccctaactntcaggcacgtggtgcagccaaagtggtgcaagctttggacaaagctctttgtacangaaatatgacaatggcatatttgtcgcttgttaatgatttatctgatgcattaatgga

SEQ ID NO: 41799 - DNA, 459 bp, Oryza sativa
  unsure (1)..(459): unsure at all n locations
agctngatgaagggttacgtataaataaaattttgttgaaggncagataaaacgtggaaggaacaaattaaggatacgctgagctgtattgatttaatcttaaccgtacgtgataaattgtggctgagattggtccaaatccactggatggtgttgaagccaactctatgcgatccgacccgtcctggtgcttcctgatcactgaatgcccacatcggcgtgactcacgctctgcacgggagcggtgcaagcctccggactgcgttcaaagttttttttgtcattgattgcactcgggactaccggcatccaggagaaaacacatgcattagttgattcaattaatcaacatgcatgatttacctaattaatgcatgcatcacgccatttaaaaggattaatttcctaatcctcaccacatttactatctgttgcatgcatgtatcgctggagctaccg

SEQ ID NO: 41800 - DNA, 445 bp, Oryza sativa
  unsure (1)..(445): unsure at all n locations
tacggacctataaaactaagcttaacggtgcggccgatctgtgttgagaagcacctctggatcatacgtngataagatgctcctgcattttttagtccgaacggcatggtgacataacaataagctccaaagggcgtgatgaatgaagtcttcaagcagtcggattccttcagtcggatctgatgataccccgagtagcaatccaaaaaactgagaagctcacagccggcggtcgagtcgactacctggtcaatgcgaggcaacccagaaggatctttatggcaggatttgttgaggtcagtataatcaacgcacatgcgccattgccctgatttcttccgaactagaaccgggtttgccagccagtcgggatgaaagacttctttgatgaagcctgctgctaacaagcttggtaatatctgcttgatcgcgtctttcctgtctt

SEQ ID NO: 41801 - DNA, 467 bp, Oryza sativa
tagcttgatgaggagaacaacccactgcagtgtgataagatgtattgtaccagcattctgccaagggcagccatttgttccacttagttgatgttgcttgagtaatacaacgtaagtacatttcaagatattgattaacacgctcggtctggccgtccgtttgaggatgataagcggagctcatactcagagtagtgtcccacactttgaacaaatcactccaaaatcggctggtgaaaattttatcccgatctgagacgatagaatgagggatgccatgtgtcttgaaaactgttttgtcaactgcattggccacttgggaagcagtaaatggatgacgcatgggaataaaatgggcaaacttagtgaatctatccactaccacaagaatgacagtgaatccatcagacttgggaagaccttcgataaaatccattgatatgtccacccacgctttcttatgaatt

SEQ ID NO: 41802 - DNA, 233 bp, Oryza sativa
gaccgccagaggacatgctatacgacatggatactgccctcgctctctgggtaccactggaagatgtatcagtgtgtccacttgtcaccacctatgctctccaagcgtttgcggaactgggctattatcatatcgtgctggcgcactttacatacgacacctgcagataccgctatcttgaatgcaagacttcgagcatctcacagtgcgctgtctcaccgtctactttctgc

SEQ ID NO: 41803 - DNA, 469 bp, Oryza sativa
agcttgtcttcttagagttcacatgaagaagttataagttattttttaatataaagattttagaccgtcctgtttaggtaccggggtgacacaactgaacaagttggaggaactaaactagtaatctacaagtttagggaccgggatgatacagtcgaacaagcttgaggacctgaacggtcgatttgcgagtttagggaccgtgatgacacaacggtacaagtttagggaccgatgatggactttactctatagtttaaacaattaaatgtgacgatttattaagcatataatactatgtttagaaaaaagtcaacatcgtcgaactagaaaaactgagttcgcaccctataaagaaaaaaaaaactgagttctgttccgtgtcgaactcggtctctttccgcaatagcgccgacccacctgatcggactccgatcgcccccgcccacccataaccctaaacctcgcg

SEQ ID NO: 41804 - DNA, 433 bp, Oryza sativa
  unsure (1)..(433): unsure at all n locations
agcggagctagatcgtctgctctgataccatattgtatattgcanggagagagatactacgaattttaaacatgttgtattgagcctcggggaccaatatatatatgagtatatgaggaggaggtaagaaaggattgcagatatgaaagaagtccacataattcaatcatatcctaatataactctaactaccatatactctaacacggtcatggggggagagagagagagctcgagaggctcggcttgtgtggagaaaaggggagggctcgtctgctatttatatgcggtgagaagcggtggatcaagtcggttgcggacgaggagagcaaggtgtacactacgacagtggcgtggaggagatggtgtcagcaccggcttctgtctcccattggatgacaatagcggcgcgcgtacgtggcggctgcaatat

SEQ ID NO: 41805 - DNA, 379 bp, Oryza sativa
  unsure (1)..(379): unsure at all n locations
ccatcctccacagcgagcatgtctaggncttctaccttgaggccaacaacaggggaagaagctgcccgaacagaacgctattctcgggagcggcggcttgtggccaaaacatgccatggggccgtgagctaaccaacgatgatgacggctaacggcgagccacttccatcttgccataaacgagacgacgactccccacctccatcctttatgcccctctaccacccatatgtactcctctcctctgaggctgaggcccccttcgtgctagccacccaccacgtggtgagccttcccttcctatggatgggctggcgagctcaagctcatcaagacatataggctcccacttgagcgccaccttagtgaacgcacagac

SEQ ID NO: 41806 - DNA, 371 bp, Oryza sativa
  unsure (1)..(371): unsure at all n locations
tttccatcctgccattctccaatatttggctctgcttttgttcctgtgcggtacttgcattatcaactgcatctttggtcttcttcatctcaaccttgccttctaaagatgaatcatcagcacgggtgacttcagaacttgctttgtcctctatcatttcatgattacttgtttccatggcatttcctgtgacaaaccctcgagaagttatcataccacattgatttgtaatattcagaggagtaactgaatctttactgcgagctatacctcttttgttgtcggacacactcttatccacagaaacatgatcatttgactccttaccattattgcgtttaggatccactgatgngtcctcatcacattca

SEQ ID NO: 41807 - DNA, 360 bp, Oryza sativa
atgtggcttcatgagagaatagaagatatcattaactactttatatataggattaatctagctcggttttcctaacgtaaaacagatggcctattgagaggatacgtctaaacggctgctctactattttatgttatgccctgaaagttaatatattttgatgcaatatacaatcacatagatatattctcctgaaatgtatgtcacaggattgttactaatccccctcatatcaacatgaaaaatcgagaaaataagatattaaataaactagcttgccagctttttcttctccatgttaagtgagagaaattttctgcttgcgtgcaatagttatttaattcaacttacatataaagc

SEQ ID NO: 41808 - DNA, 454 bp, Oryza sativa
  unsure (1)..(454): unsure at all n locations
agcttaagcacagcctattacaccttttatctnttacgcaagctcgggtcgagctcgacctcactcatttataatataacatatatattaatgatcaattatctataagtataactatttctatttgatcgcactaataaaaagagcagaaaatgactaagataaatatattaccctaacacatgctaaattgctgagtaaatagatactaatatatatgatatattaggctattaaatcaataaagcgaataaacatttcgaactatacacatctgcttattagaggttcgagctcgggtctgtaaagctcgcgagtatttgcttaggctctggtgcggctcatattgagctcgagtcgagctctaatcgaactgtgacaagacaagcttgagctgcttgcagcctcaactgttttacctctcaaaccatcatcaaaattgaattggtttctc

SEQ ID NO: 41809 - DNA, 509 bp, Oryza sativa
  unsure (1)..(509): unsure at all n locations
tatttacgttccattactatgttcgtgtcattgttgcatttctgnctatcccggaacagcgccgtctatccatctgagctgctgataaatgtgcgcgaagctcaaacgactgtagcacaaccaagcctggacgaagttatgtcttctttaagggaccttcagtcaggacgcttgatgatcctaacgctttgccgaatgggctctcagctaatccatgaattgccaagctgagcctgttttccttctacaaagtagagcaaatgatgaatagtgtgggcaatattaccgccatgtaatatcgtaatgcttgtttccgtatgtatgcaatgcttagtagccttaaatcggcagttcttcctaggggactttcaatcaatccattgagagacgttgtatatacctctaggaatcatttaatttgttgcatttgcaagtagttgtgtcttttaccagtggnttgttactacaactgtaatgatgatcatgtgccgtttttntgtaatataatt

SEQ ID NO: 41810 - DNA, 429 bp, Oryza sativa
  unsure (1)..(429): unsure at all n locations
agcttgttggtgcgaaggagaccggtcctgtctttcggngcgtgtatcatcaccattccatcgaatccatgttatgatgtgaagncaacttatgcaaaaaaatatggtcatttggacatgcttatgtttgatgagatgtcttgttgcaaagtaggccaccttcatgtcaagatatatatttacagtgtaaatggcaagattcccactattatggtagaggaagtttgcctcagatgaacttgaatgttacaatgattttcgaagaaattgttggtttcccttttcgccgcgtttggaacgagggaatttcttctgtgttntattgcgggaatatgaaccttttttctatgaaatctattcaatactttcaccaagcattactctaccagagagatgcaatcaaatatatggtagtacatattaacaagc

SEQ ID NO: 41811 - DNA, 371 bp, Oryza sativa
  unsure (1)..(371): unsure at all n locations
nttcctgaccacgagtcatattggatgtggaaactgagtattctaataaaaaaacagactggctagagaggcaaatttgagccgaacttgcggaccaaattcgacgagaaaccaaaaagaaaaacattntaatactattctttacttattatgctttactcgtcctgtcatttttttagctgtaccagccagatgctcccccgaccacggnggcagcagatctgcagactgcagcacacacaccacatgggccagggcacgagtaaattcccgttcggcgagtgctcttggattntgtccgctacgggcacgaagaatcttttggtgcactgncgtgccgtgcagtgcttgggcccatggacccggtccac

SEQ ID NO: 41812 - DNA, 421 bp, Oryza sativa
  unsure (1)..(421): unsure at all n locations
agctacagtgtccgaacgttgtagactatcttctaacatatcacctgattcatactgggaatagcttccacgaacaaacagcgcagattcacttactttatgttcaatttactttccgctattatcttcatggtgtcatcatttatcattcaacgtattcctttacacctataaccttgatgtgttctttcccattggatcatcttccacgtcatggcattgcctggtaaccggtacttgcacttttcactccgtggagcatctgataccgagtggaagatttcactctttgccttcatagaaacacttttacctaggtcatcttgcttacttaatgacaaagtgactgttgcggggcaattactattcatgggtcttacgtgagcgatgcagaacatgtntctggatatcaatcaccttc

SEQ ID NO: 41813 - DNA, 407 bp, Oryza sativa
taatgatggataataagtatgcataaatttgttgaactttatataccatttagtatggacgcaagcaaagttcacagccacaagttgtgatttatggagagaaataactagtacaagattaattatgggagagagaaaactatggagttcaatagaaatccatcatctcatgccagattaattatgggattttaccctgtaatataatccaatggcatcgaattttttccagccataccaggggtatttacattaatggctcgggtaaattcacatgcttatattattcattgcagatgttaatcaaggtgttcatggcaatggctatgatcaagtttattgcaacggatatgacggcggctacattaatggatatagtcattcctacagtaatggctattccaatg

SEQ ID NO: 41814 - DNA, 343 bp, Oryza sativa
actccagctaggagtagtctggagcgaaacatgcctccttatgttaatacctatggcatagagctggacagccggacccatacatgcattataattgatcatggtttcacacaaatagtatataaggcaactaaagggatctgatgcgaatttggtcacagggaatgcacacatgaaatgctaaagtagtaaaatagcaaatgcttacaattaatgacctcaaaatataagatgtaatacaacatgcacatgtgtatagggaattaccagcaagcagtttcaggacgtactccctcctgagagatactggaagagcaagaagcatactcatttgagccggcac

SEQ ID NO: 41815 - DNA, 494 bp, Oryza sativa
  unsure (1)..(494): unsure at all n locations
atcctctaagtcacctgangctgcagcttcctgaaagattggaacctcgttggttataagctcttctactccataacaactctttcacgggaattcttccgtcatcngtgggcaggcttaaaaatctgcaagttttatatatagacaataataaaataagtggatcaatcccattagccatagggaatcttacagaactaaattatttccgccttgatgtgaatgccttcactggtaggataccaagtgcacttggaaacctgacaaacctagtggaactaggtctttcaagcaataatttcacaggttctattcctgttgaaatatttaagattcacacgttgtcgttaactttggatatatccaataacaacttggaaggatcaataccacaagaaatcggnggcttgaataatcttgttcaattctatgcagaattcaacaagttatcaggtgaaatccctagcacccttggtgaatgccaacttctccaa

SEQ ID NO: 41816 - DNA, 460 bp, Oryza sativa
tcagcacatcataacggaagtggaagaagatggtcgtcctattgccccggccgaagccgccaagaactatgtacgtcacagcggttgggttgtgcgggataacgtgcctgtcagtacggtgtactggtgaagaacaagggcacgcggagatcatgagagctttgtcccagattcggagaaagagatgctgtggaccacaatgctcgagacattcacccttcctgcgggtacagaggacaaagtgaaaaggtggactctgaagaaaatggcagaacagtttcagagcttcaagggagatctgtaccggaagtatatactgaaggggcagacaccgaacttcgacacattcccaaagctaagggatcactgcgacgagttcgttgcatataagacaggtgaacaatggcacgcgatgatggaatatacatagaaaatgccgcaagaagaagtacatcaccac

SEQ ID NO: 41817 - DNA, 463 bp, Oryza sativa
  unsure (1)..(463): unsure at all n locations
gtcacctgcggcatcaagctatgaaangagagagagtttgctagatttgtattcctgnnttgctggtcaaaatgatcgaggatgcataaaaaaaagggctgatttctcctggtgtcacaactctagtcgagccgacgagtggcaatctgggtttaagaatggtgcttgatgctcttcgcataggttacaggttccgtgcagttatgccgggccagtattcgtttgataagcagatcttgctgaaatacatgggagctgaattgtatctatcaggtaaaaaaataagaagcaggaagttgtagcatcaatctgtttgcttccttgcttcatggagaaaaaaaaacaactctcttgctttcttcagcataatgtcagtgaatgaaaaattcagtggaactgttctgttaccttttttctttggtgtaccatatggcagatccaacacatcgtgtttaggcttatt

SEQ ID NO: 41818 - DNA, 492 bp, Oryza sativa
  unsure (1)..(492): unsure at all n locations
aaacaatttatatttcagcanaagattgtatatattccaaacccccaaagcatcagcatgctagattgattctaggacttgagcattgcacagttccatcagcatatatcaatnggaaggagcaactaggtaagaaattctcattaatcataaacacagataagcttacgtacaggttttcacttaacgaatgacggacaggttaacatctaaacatctataataaactaaattataacagaagtctaattgtatcacagtaaaaactcctaattgtaaatgcattcactgaacaactaacaattcgacaggtatttgtctgtgtgtgtgagagagtgtgagagagagagtgtgtgcatgtcctgtatcaatactctaatattaatcaaagtatcatgcttaaactctgcattccaaaaaattactaaataagcacgacatactgttgataacaggaaatacacgcaaccacgcaattacatatatataata

SEQ ID NO: 41819 - DNA, 382 bp, Oryza sativa
tcagccgaatgacgttatcttgaatacaacatgcgccaacctctaattcatcaagtatagctttctcttcgttgatagaagccctgctaacttggatggtcacctcaaggtgccttctctcacggcgatcgacaatcctttgtttggctttctctaatttgagcccatgttgctcaatgtatccgcttgggtataatcgcatctgctaattcgtctgggattttatcatggactacatgaaacctatctataatggatccactgctggataccagagtttccacagaacctactaatcaatttgagatgtacagcaaggttgatttacaatatcggctaggggcaccaagaatgtgcttgaggttcttctttgtatccataa

SEQ ID NO: 41820 - DNA, 433 bp, Oryza sativa
  unsure (1)..(433): unsure at all n locations
tanagccatgaatccctntgngcatatctggatctggatcctgctnaacaaacatataggatgagtaatatctgatataaatataatactcgagaaaaaaatcaagtatnttaaaatatttataaatatgtatttctcctcttgtcaattttgatttccccgagcagatgactctgtacgtttaaacactctgtccgactagtcatagccnccaagcatcgggagtcggcctaggcatttcccaaacatgcatatgactgacatgagttcgtcattaatggaacaaagtttcgcggatcagaatttactactcaggtacttttgcaattattaagagcagaaaataaatntatctcatctctatgcttttgacttattccgaataatacttagcaccttgcgttactcggtccatccaacgagcccccgggtg

SEQ ID NO: 41821 - DNA, 364 bp, Oryza sativa
  unsure (1)..(364): unsure at all n locations
agcttccatggctggcggcggcggcggcgttcttttctttcgaccagagattcgntgcggaaatcggtgaggcagcaaccgcgctgcatgcccatcaaaggcccaccaatgcctgcaacgcgtgtatgttaacaaccctttttctttttttttaaacacgccatatatagaaagaagcagagttattcttgcacgatgtaatcggccagaggatcattgctcccaaatattcgaaaaacaaaggactgttcagaaaaaacgctactcttatataaagggaaagatacgacaaaaaaaaccaccctcctcttctatactatggaatctcgagaacaacaaagttcgatacaatccttaaagataa

SEQ ID NO: 41822 - DNA, 358 bp, Oryza sativa
  unsure (1)..(358): unsure at all n locations
gagctnacgaactaagggtagatggagggactctattactcattggatttatcacaagctagatgaggcaagttctggacctaaacctctctagacatgaacctatacaatactatacacctatatcacgctataactcttaagatacatagaggaatctcatttactcctaaacttatgaaaccaaatgtgtgggtcttataaaacacatatatttaccccagcaaacataaacttaataagaatcaccttacaacagtatgttacaataagacctaagtaaattgtatactaatccgagcaaactattgatattcattactccctacataaaagagataaaatagacattctttca

SEQ ID NO: 41823 - DNA, 316 bp, Oryza sativa
tacaccgactcaaccaagcacccctatgaaggatggatgcatcgatgccttggcaaacacttgaggtactgctggaaacaaatatgtggagcaccgggtatgcctaaatatgtagcataggaatagccaatgctcacatcagataatgcaaagttgaataaattgatcaaagtctagtaccgtgctggacctaagctagaacgtactatagacgcgagcctagacacaaacgataccacaagatagcactaggaacaactcatgcacaactctgaaatataaagttcagctcaaacataacaagcatttccatttc

SEQ ID NO: 41824 - DNA, 412 bp, Oryza sativa
acgcacacaacatttaatatcagccctcttttacacgaataatattatacaacgatcttaattaattaaagaattaacgtcaaatatgtatgttcctaagatggtggcaccatggtattaaatacataaattcactcaaaatcttcaaaaatttcaaatggtgagtatatacctacgtataagaattcaatccatacctatatcaatcaacaaaacaaagccccggttgtgagtatatacctaatatatttgaaagttatgatggaatttcaatagctccggttgagtggctcggttgacatacgaaacggattatggttgagtgaaactatggtgttgagaatttatatgtcaattttaaatgcgctctgtgcgtctatattattacaatgagatatttaaccgccagcac

SEQ ID NO: 41825 - DNA, 480 bp, Oryza sativa
  unsure (1)..(480): unsure at all n locations
acacataaaactcagcttagagttatgtcactcgggtagagactacagtctctctgttagncancacaggagctgggcactttgaccaaattgagaacccttggattggattggcgcatatgtgatttccacaaagaaaaacttacatacgcggataattctgtttcatcacttggaaaactcggtagatctaacctacagtatttgactctcatcagtccatggtcccttgatattttattggattcttggtccccacctactcatctccttcagaggttaggaatcacaggttggtatctcagtacgattccagtgtggatggcctcactggccgacctcacgtacctagatatcgaggttaaagtcagacaagaaaccctccagatccttgggaatnttncagctctgcagtttctggaattatactcacatgcagcagactacggtgataggtggctcactgtcagcaactgtgga

SEQ ID NO: 41826 - DNA, 417 bp, Oryza sativa
  unsure (1)..(417): unsure at all n locations
agctngatgcggttgtgtcatgcgttggattatttattagcacatcttcatttggcgaggtgcctacatggtgaataaatgggctacagncataacaaaaaagagagaagtatacccatatgtaatgtctttacaaaaaatagaaatgaccgtgaaatacccttgttgagggctcactgtcaggccctttctctatttcctccttgccctctctcatcacatcttcctttacttttgggttttggccaatcattgaaaaatatagtttcttcctcttgtttgaacaaccattataaaaatattctctttacttacttcagtaataacatctcatttactgaaacaaatataactttattttcaataccactattaaatatattatattctgataatgaaattaaatccatattattt

SEQ ID NO: 41827 - DNA, 508 bp, Oryza sativa
  unsure (1)..(508): unsure at all n locations
ctcttnnctgcaccncgaagaacgcgagccctcttttgttctactgaaggnngactaccactagcctgctccttctggtacccctccacatacctcttcacgtgcccctgctggttcccctccgcattcctctccacgttcccttcctcgttcaagtactggtttggatcctcgttcccctcttcttcattccagtactggctgctaccctacgcgattgtatcgtacaatatctgttcctcatctgcggtcagccatctgttgatacaagaaacatctgctaagtcacgagacatttatgttttaacaatctaagccatgtatgctaagtgtaaatgtcgtacattataaccctacacaaccttacgtgctaagtctaactacatatcgcgatataagctaagtctaggtgacgtatatcatacaaccctatgctagtaactaatatatactaaatcnaattacagataacataatctcatactcaaactcacataatagtacatgc

SEQ ID NO: 41828 - DNA, 345 bp, Oryza sativa
  unsure (1)..(345): unsure at all n locations
cgctcggacatggaggcgaaggattctatgtatattattccatangacaagatgcagacagcttgcttggataatatatatagctgacgagctcaacgattgttacctgtgtggatgcctgtattttactcgagatatactcaagtagtctcactgtcaaagagttcatgacatctcaaactcctacttttatattagaatcacacgatttactaacagacttgtagcttactttaattacctgtctgaaatttaagcactactgagactagccatataggacggaagagtaatggctgtccttggatttgttagtgcatacaatttttgctttttgtttactct

SEQ ID NO: 41829 - DNA, 499 bp, Oryza sativa
  unsure (1)..(499): unsure at all n locations
ggcatcacttccgcatcatattgagtagtagtagtagtatcatctgaattcacatatttggcgtgtattggaaacaaaccaaaccgatttggcggtcgacatggaactatcgtctatccaagtgatgagcagaaaagatgctcatgtggacctggttttttggaactgcagataagactcatttactgtcacgtagtattactgtcatttcaggtccttgttgcaacggtcgagatcaactgaaacaaaacacattgccaagtagcagtactggtaatctgataggcttatattgacttggaacacaataggaagctctctgttagaacgttcacccttcaggaacaggcagcacagtactggtaagttagctgccactgatctgcagccaataaattgcgatgaatntatggtctcattgaaagatcaccattctcaccataaggcctatacctgcataacccgcttgcttgctttcgtgcccatcttggagtacatg

SEQ ID NO: 41830 - DNA, 463 bp, Oryza sativa
  unsure (1)..(463): unsure at all n locations
agacttcagcatgcagagctgctatcttgttacatganagtgcatactagtctaagcatagctgtgtacatgtgtatgctcgacgcacatgcgccacttcccgtcgctttagcatatgcatcatatttacgttagctaggcgtatgcttacgtagaactattttactcctcaaacgtaatatgcaaatagttgtgaagaactataaaaacgttactggaagtacgtttcaggataaacatgaattacttagaaaacaaaagatagatataatttatattagtgcaagtactatgttcaagcaaatatttcttttgtactaattggagtctctcctactacaagtcctcatattaatcctgacaagctagagagatttacattaatcagaaaagctagaagtcctcatgagtccagataataaaatcatatgtcgcatatctggcaaaactatggataccattc

SEQ ID NO: 41831 - DNA, 514 bp, Oryza sativa
  unsure (1)..(514): unsure at all n locations
ngcaccatgtcctatctcggacaatgtgtccattctagtatggcctggggcacctctttcgtttctctatccttagttttccctccgtggctaggttctgacaccacttgctataaaatcggccttaatatatacctgaaatgccgaacacagaagaatgtcttataagatccaaagtgataacgacatgaagatatgatatttattaacgaggttgtaatgacctagaataattgaaggaaacaaaggactagagaaatgcaaaagcagcagctggttggcccaaccgacaagagcaagtagcagcggtagtggtgatgcagcgctgcaggctttatcgtagcaaacaaaagcagcagcaggtaccacctctccaattcgtgaagaaaggtagtaatntataanggtggttgtccttcaccgattactctcgttcggactttttacgggcaacgagaacgaagaacctataatagtaanacgttggtaacntgattatggntaatctatctat

SEQ ID NO: 41832 - DNA, 416 bp, Oryza sativa
  unsure (1)..(416): unsure at all n locations
agcttgatcaatatacgatatatcttattcttattactttaaattcagcctatataattagagacaacaaatttatcagtgaatttttatgttctgttcaaagtcaaatttgctattttgcttctacatatataaattgaatttgaacaatgatatatcaacaatctatttattcttaagaaacacagtacaaatacaggcgctcacaacgtgcacacactcacgtctatgaacacacatgcgaatcctaccactatgagcacctccgatctattttattaatatttattttggtgattatcacgaatctattctgttaatatttttctgatgaatnttaggctataagtaaaaatgaagagacgcaattgtggacacaagaacaactattgttgggtgtgcccgcacatgtcaat

SEQ ID NO: 41833 - DNA, 219 bp, Oryza sativa
accggacacatctaaaccgtcaatatatcttataagtatcgggagaccccctcgggcacctcaatctcaatgtgagtctgaatggagaaacaccactcaccattgataggatatagactcgcatgatgcacatatggatagataagaacctgaccacaccattaagaggagagatttaatatatgtgcatactcttcacccgaatgagaatccacacag

SEQ ID NO: 41834 - DNA, 463 bp, Oryza sativa
  unsure (1)..(463): unsure at all n locations
ttaagtcacctgcggcatgcaagcttaatntggctgccatgctggtgacacttgatcatgaccatgcttgtacatatattaatgttttgtttcgattatgatggtcgaattaatcatcaagatgaacagtcctgttctagcgcccaattggtccttcaggttgttccaaggccattagtttacaaagaaagctaaataaactaggctacattttggtttacataaaaaaataacagttaattcctgaggaatcgaaataaagagaattccacttttgattcaaacacggccatatgagttattggcttatttgcccatgcatcttggatttcgatactatctgctgaaaaagaaatatgttccgttccctctccattgtgtttacaacgatcaatgttcaagtgtcatagtacatgttaatctcccagaacagttagtaatcctggactgatatgccttacat

SEQ ID NO: 41835 - DNA, 344 bp, Oryza sativa
  unsure (1)..(344): unsure at all n locations
gggaagctcccgaatcgaacagatctattgctgttaccgagntgacagagaacatacccatcacaacgtctggagcatcctgagcggtttctgcttgaatgtgattcacacggcctcgaccaaagttgttggaagcacgtgaaccttgtccacttgcctgagagctatgacgagactgagctgccgctggagtacgagttctggcagtgctaccattagcatgccctgagtaggtgttggtaggattctgaggacactgtctagcatagtgacccatctggttgcaccggaaacactgaactgctgacggtccctgcggtgacttgaaagatgtaacactgtta

SEQ ID NO: 41836 - DNA, 424 bp, Oryza sativa
agcttgcctgccatgcccatggagacgaggtgactttctccttcctgcctgcggtacatactaactaagcacgaggcatgcctcatatacacgctttgcgaaaacaaacaacaccgctcgctgaacgagaatatgaacaggaagaagatattgagcatgtgggtgaggccggcaccggcggtgggcttgacaacctgcgcgcgctggtgggcattctacaatggtggggctttaacgtcaccgtcatcatcaataacaggtggatcttgcaggtccaaatttcctctctctccctggatccctccactttcttcctttctctctccgaatcaagactccattctaccctcttcaatggatatactgccaacaaataaactcgtatcaatttctgctagataactcctctagcaaccgaaacatg

SEQ ID NO: 41837 - DNA, 310 bp, Oryza sativa
  unsure (1)..(310): unsure at all n locations
gaatccgggctccataagtcgcgccacctcctcgcggatgaatgctttacgttccggngcctgccgccgcactttctgccggacacggcttgcgcccggccgcaccgaaagactgagctcaatcaaccccctggggaccccgggcatatccgccggtgtccatgagaagacgtcagcgtttgtccgcatgaaggagacgagcgcgtcttcctatgtgccgtccagaagaccaccgatccgcgtggtgatggacgggccgtcgcccactgaaacctccttgaccgggacctcttcgcctgtgatcatacgc

SEQ ID NO: 41838 - DNA, 236 bp, Oryza sativa
ctagaaataggagcccataatccatgtctcctaatagcaaaacgcgcaaatttaggtgcaaagagtaaaacattatgtaattaacaaggaaggctaacggcttgaggaagaactggggaatgaagctcattatccgcatacttgatggggattaatcaaaaaaacatactcaccaacagaatagaaaaagtgagaattttccccatactaacaccacaaccacagtccttagtaaa

SEQ ID NO: 41839 - DNA, 443 bp, Oryza sativa
  unsure (1)..(443): unsure at all n locations
ttngngtatatncgcgtaggaataagaacggtgagcagtaggttttacttttttctttcaagaggctcgaaaactttggctcacanctcatgctgaccattacataccttctcaattcttcttcaatatattgngtcatagagcttagcaatctttggagaatattctcaataaacccgacggtagtagccagctagaccaacaaaactccggatgtcggatggatttttgggttgtccccaatctaataccntttgaacattacttggatctacagcaactccaccttcagataaaacatgaccaagagatccaacttctttcaaccaaaactcacatttgctaaattcggcatatatgcggtgctcacgtaatttntccaatacaagatagaggttcttttcatgttcttcttcagatttggagtagatgaggatgtcatc

SEQ ID NO: 41840 - DNA, 453 bp, Oryza sativa
  unsure (1)..(453): unsure at all n locations
agcttggcagacatcaaccagctatgtgccaacatgatacaaattaaaaaaaagggggggactggatgtcgatgtccacacaattgtaaatgtcttcatttttatttgtcaatgattttgcttgtattaaagcatctaacagtagtatccaagaaaaaaaaatgtgaatggcatcatgtgactggatgatggaaatgctaaaatagacatacaaaatctactggtctgcatatataactggtgaaacttaaaactgattaatgccaaattagatattggatgcttattttgtggcataacttacactcaggtgtgcatctttttccaccaaacttctgcagaccgacataagtccctttaacagcactgttattgtacacaagtatagtagggacatttcgatcttgggtagtgggaatgcagtctgtagagatgattntaacaaacttaatt

SEQ ID NO: 41841 - DNA, 479 bp, Oryza sativa
  unsure (1)..(479): unsure at all n locations
ctaagcttcatataatgattactataaaattaaatgtattgtgggacaatatgatagtagtacanatgatggaatggaggaagtactaagcaacaaacgtacgctactgtgacaacacactgtaccacctgcccttacgggctcaatctcgactacacccatctccgaaacacacgctgatccaaccgtcagggatccaccttaattaacaaaataaaaaaaaaatccataaaattagggacgaaaacaatccaatttttacgaaaatgattcttggtcagnttataatgtatacatttactattaatttaactacttagtggcgattataataattaataactatttagtggtgattataatacgacgcatgatagaaattagaataaccaaacttctataatgttagataatggaaatggtatatcttttacgaaacgatccttgatcaatcagaagaatttcactatcccatttca

SEQ ID NO: 41842 - DNA, 491 bp, Oryza sativa
  unsure (1)..(491): unsure at all n locations
actaagctttcggcgcgtgnggatctacctgtgacggacggaggcgtgttgcttgttcttttcgaagtatatttttggcaagtgttatgatgattgtggttgagttttgtcgtggcgattctgggaagtgttttctacatccgattctgagagctattgagatttgggggctgcgataccgccctgccgacgggcgaaggcgcgttcgtccgtgttgtgacgaccggaaaaatattaatcttttaattacttaagattaagattaagatgtcacaacaaatagtgttaaagtgttatgcacaccaacttcgactcatctgagtgctattggtttggcgatttcgtcgtatcatattacagccgatcgaaagcattacatattactcctacttgttattacgggctgaatagttcgaccaatcaatatcggcaatgcatacaacttgcttgctcaactaacataggaattaaacactttgacgttgcgataa

SEQ ID NO: 41843 - DNA, 447 bp, Oryza sativa
agcttagcaaaaacttttaagagatcaaattcttctcaagaatcatcaagcacagcataaatacaccagtattgtacaaattgagcctccatgtattacattcaaactcagtcagaatcagtcctttcatcatcagagttatcatcgctcggctgaagatcattgttgcggaattgttctacaacatcacttgcaatcttgtcagccgcactctgagcattgctgataagatcaagggcagcctcttcacttgtcccgtctgcaaatccatcaatggtatcgacttcaatactcgggtacaaggattttgtcatctgcaagggccatgccagctcccatacttcagctttcttgatattcttgaaatatacttccggagcaacactcagcttgtcaaatatttcggttgcgtcgagtgcactcggaccaccattattgaagaacatg

SEQ ID NO: 41844 - DNA, 390 bp, Oryza sativa
  unsure (1)..(390): unsure at all n locations
tanatattgatgggtaattacttcattgtggtccccaacaataaatgtatacgaagtttttctttttttggtttttgatcatgcagggttgtgatgcgtccatccttcttgatcccacgaaggcaaacggctcgccggagaagacagcgatcccgctccgcgggtacgacgccgtgaacaagatcaaggcggccgtcgaggccgtctgccccggcaaggtctcctgcgccgacatcctcgccttcgccgcccgcgactcggtggccaagtccggcggcttcgtctacccggtccccgccggcagccgcgacggcaacgtgtcgtccgccttcttcgtcttctccagcatcccgtcgccgttcttcgacgccggagagctcgtccagagct

SEQ ID NO: 41845 - DNA, 320 bp, Oryza sativa
  unsure (1)..(320): unsure at all n locations
tctatacatacaaaataacagagacaattgtcacacataactatgaacaacaatatgtgttgnaaactaatggtgctatgtaagacagcacacctctctacgttgcaaggatgaatagaaattatgtctcacatctgatatgcatcggtgcatagataaatacactcttcaagtttaagtccggaacgccaaatatgatcctggaacctgagagacttgaactgcacattgcatgatctaagtctacgttgatgagagatatgatatgtgtaaatagagctaccataatattgttcgtaagatgactggagttgtggacg

SEQ ID NO: 41846 - DNA, 492 bp, Oryza sativa
  unsure (1)..(492): unsure at all n locations
actcaagcttaanggattcacaaaggtcatggcaaacagaattgctctatttcacagaaagncataagaccttcgcaaactgctnttntaaaaggtagaaatattatggaaggggccataattctccatgagacattgcatgagatgcataagaaaaagtcaaatggagttattctgaaactcgatttcgagaaagcttgtgataaggtaaattggaattttcttcaacaagcgttgagaatgaaaggtttctcggacatttggtgcaagtggattgatcaagttgtgtcggcgggtagtgtagctgtgaaggttaacgatgagataggccactctttctagacgaataagaggttgagacagggagatcccctctcaccaattttatttaatttggtagcggatatgctcgccattctcatcaatagggttcgagaccttgagactctcaatggagtaattgctcactcggtagacaatgggctctcaatc

SEQ ID NO: 41847 - DNA, 345 bp, Oryza sativa
  unsure (1)..(345): unsure at all n locations
agcttatacaccatatatttatactctatgtatgtataagcactacacaaagactaagccgatatatattgagaatgagaaaatcgccggcgcatacgttgagattggcaaagacaccacaagtatatttgctagtgatgngctactaccgaaagcataataagctgtaattatatatgtatacccacttattacacaacttaaaaatcaatttattggattgaatcaggataaacatttgacatttgttcagatatatgcttagaaacttgcatgttcagatatgtgtttacgctctccttggagagtatgtgtgactatttctttgtactaagctgagtacct

SEQ ID NO: 41848 - DNA, 450 bp, Oryza sativa
  unsure (1)..(450): unsure at all n locations
aaaactcagctatatacttggcgttagacaaggtgttgncaactttataatccncgactatgaatcatttttaaaatatttgtcttctaaatatgatgattacatgtatagagtctttaaaagtactttaataaaatcatatatatgtgaacactattatacatattataatataaaataattgtcaaaattctcttttagagatcgtgctcttgtctaaaatgacgagcattatcaacccggatggagtatagtttgaaccgtgcaattttttaaacagtataaataattaacccctaaataaagtatcttacatatatgctacatggactggaatatctcaaccaacttattatatcgccattatgatataagattacttaatacactagtcacattattcctttgtgtctatgtctctttgtatctacatatctattctatttatta

SEQ ID NO: 41849 - DNA, 373 bp, Oryza sativa
gctttgatctaagacatgttcggtcattttgtttctttcacaatcctaaagagcaactagcttcactgtgctcaccacagctaatgatgctccgagtgttggatctatagattagtctatgtcttgtaacacagaacgacattcgttacatatgatcattttgccacttaaggtatctatctgtgaagaaaggttcatatatttaccatattccaagatccatcaagaaattgcaaggattgcatactctaaacctgaaaagatcattaattactatagtgcccgcagaagtcactgaactttgtagtttccgcagtctccggcgtagcaccctttggagttacagtcactttgaatttactacccgtgagcc

SEQ ID NO: 41850 - DNA, 448 bp, Oryza sativa
ctggtagccacttcacccctgcgttgcaagatcctgtatgtgttccacacaaggtggggccaacttgcctttcatctggaagcgatgtactcccctgagcggagtgacacgaatgtacacataatcccctgcttcaaaagtgagttctcttcggcggttgtctgcatagcttttctgacgagactgtgcaattctcagcctttctctgacagatctgactttttcctctgcctcggttagcacttctgtcccgaacagttggcgttctccaggttgatcccacaagagcggagtgcggcacttccgtccgtacaacgcttcaaacagtgccatttgcaaactggcctgatagctgctggtgtaagagaattctgcataaagcagacttttatcccaagctccgtcaaagtcaagtgcacaggctctcaacatatcttccaatatttga

SEQ ID NO: 41851 - DNA, 278 bp, Oryza sativa
cactgagtattcctctctggttatattatggaagtttgacaagatcattgccaggaaattccttctaatgttgtctatgacgatgaaaaagtgctggcatttaaagatattaatccacaaacccctgcgcatgttctaatcatcccaaagataaaagatgggttgactggactagacaaggaatggaatgttggtcactattgtttgcgagaagaattctcaatctctaaaactgtgtagcatggcaagatccatgaactctcgcatgtgcttatctt

SEQ ID NO: 41852 - DNA, 442 bp, Oryza sativa
  unsure (1)..(442): unsure at all n locations
ctcaagctggccgctggatatagtagcgattattcctcttctttctctccttcgccaccagcctcagttgggccttacaacgattgttacacggcccattcggcccctctgtattttctattctccatccggatacgcctgcctctcttgacaacgccttcttgcttcccaccttcctcctgtacttcgtccttcgccttgtcgcctccttgatcatcttctgggtcctcctcctcctcaacagcttgatgatgagatgcttggtgcgctctgacactggcataggtaccttgcgtgataaaatgctttctaagtcaaggtagtagtttgcaattacctatcaagattacaacagtgacatcacggggaaaatgaaaggacgagcaaaagccaagcattctgtacgtatgggaaaatgaatgtggactncttgatcacattc

SEQ ID NO: 41853 - DNA, 463 bp, Oryza sativa
  unsure (1)..(463): unsure at all n locations
gcttgatatatgcatgctggaccagcactatatatatctattgngagctcctttntaggtcagagccatacatatatattgcatttgcatccatccatctattcgatgtgcttgctacacatgcatatatatggtcctcttccatcctcctttttcacccaccaacgtagtcctacattcacctttgcacaagccatgcctaccatgtaattccctctcattatggactacttcctcatacagtacaacggtttcagtctaattttcgcaagaattagtaaaattctcgtgctctttgatgaccttgtgataaaacggcgcggtcacagaagcttcatctggtattaccttctatgatgaccttgcaacgaaaataattcgtcatagatatttcctgttcgttataaggaatctgtgaaaaaacccagatctattgcagtgacaacgcatcagctgattgtgc

SEQ ID NO: 41854 - DNA, 515 bp, Oryza sativa
  unsure (1)..(515): unsure at all n locations
tgccatagtgtacaacaattcacttgtatgagtgtgactcttttatgtgagttgnggctagatttatttttacggacattgtatcaagctgaccttatgcaagttgcagttttggttatgattattaggctcatgtttgacagtcctgttttaaattcttctatttgatagcatctctggaactaatgtttagcattttatgatgtgtcataatgactctaacctgtcgcgtacaggtaaaagaggaaaatgttaaaatcttggtagaattagcataacttatagaagaatatctgatgttgaaagggtaagccgcttcagtgcttcntttgtcactggtacttaaccccatgatgttgatccataatagtacacattcttataactgtgatatcctntttgctgatacagaaattcaacaccaaaggatggtcatggngctgtcgataatatgaaaatcattcctgcacatgatcgacaagggatgtntanaactatcatgaatagaacatctc

SEQ ID NO: 41855 - DNA, 423 bp, Oryza sativa
  unsure (1)..(423): unsure at all n locations
agctttggaactatgggtgttcaatggataatattttctcaantaactatggccatgcaacacatactgaattaactttgaggtaactgatgtcctacaagctaagtagctatcaaatattcacatcgccgcagagggtttttgtgattcatgcgctcttatgacagggtttagacctggtttggcatttaaatgaggattgctaagaatcccattactccctccgggctgataatatcacgcggtttgaacaagggtacagtccaactttaaaatctttgactataaataagttctaaaatatttgtcctaaaaatatgagaaccacatgtgtagatcaggcttaaacaatacttcaataaaatcatatatattgtaatatttatatatatattagaatagacaatatgtggcaaagctact

SEQ ID NO: 41856 - DNA, 448 bp, Oryza sativa
  unsure (1)..(448): unsure at all n locations
gaccttaaaactaacttatttatgttgtgcaagctctacagtgtgttctgtttcttgctgtcgngctgagcccaatgggttagtcccttcattgtttatgggttgtccaatggttcacaaagggttatggttcaacaagcactaagaaagttacaggttggggatggtctgtgctaaatatgcatgttagtgggttatggtggggtttgggtgcaatatataaatagaaatgggcaggggtggtgttcggngtgggccactacccattaccatgcctacatactggcagagggaatgcaatangcggngaatgcaataagtcgcctccctcttcctctctttgtccgaatccgagcaatgaatttgataatttaacactttttatgttgcgcaattgtattaattgacttgggtcagctcgtggattgtcagatccggtcacttggat

SEQ ID NO: 41857 - DNA, 464 bp, Oryza sativa
  unsure (1)..(464): unsure at all n locations
agctntaggcatttcatttagattgttccttaatttaaatagattgggtccacaggtcagtctcaagccaatatgcagaaaggcccttagtgtttcaggaaatcaacccgcagtcctgtgactgttctgtgtgtgaggtangttttacaaagtagtacctagagttttgattcttctcaatcgaggtccttagattgagctgacacagagctagccatggccgagctcattctcgagctcgctggcggcaaacggcggcagatctcggtgtgcaacctaaggagaaaatgtaaaggggttcaaggtgaggctatatgtggtattcttgcaagcattggtcatcgaaattaatggcgacngcggtgcgagcggcggtggttctctggtgacagtgcatgtggagctagggcattgatctaaatgtttatctacatgcatgtgcctctatgggatcctangatgct

SEQ ID NO: 41858 - DNA, 431 bp, Oryza sativa
  unsure (1)..(431): unsure at all n locations
gtgttgagccgaaaacttctccttaatcggagctatcataccctgganagcgagatcggcaaactgagaatcggttaaagccaaactatagcatctattcctcatatctctgatcctctgaatgtaattctgtatagtttcatcatgcctctgtctaactgctgccaaatcagaaagcttcatctcatgattcccactatagaaataactatgaaactgtttatctaaatcggcccagctataaacagaattataaggcagtgaagaaaaccattgaaatgtcgatccagactaggtcaaaggaaacaatctgacccataaagcatcaacagccgatgcctcaccacattgagccaaanatcggctgacatgctcataagttgatacattgtcctgccctgagaatnnttgaaagtctangactttgtatc

SEQ ID NO: 41859 - DNA, 371 bp, Oryza sativa
  unsure (1)..(371): unsure at all n locations
agctctactctataggacttgtattaatcatcaatcatcttcggccgatagaaccccgctctcctaagcaatcaattcatcttatgagccgattgatgagttccacgaatccctttaagtactcccatagcaactttagaaaaagtacttcgtctatatttcggcgagataactctccattaagcaaagtgtttttgaatgcttgccgccgaattnttgatcaaccctaaaactagaatcttctaatatttcatcaaagggattctctagttttcttctgactcttgggcacaaatgtctgaatttacaattaatttggccttcgaaccaaatgtaacatgccccccagctctcttgccgggatcggtcag

SEQ ID NO: 41860 - DNA, 453 bp, Oryza sativa
agcttctcctctcctgtactgcttcttcatttttcgaacctcgctcgtcagtctctcgatatctcgaaccttcctatttgacgttgacgcccctcagaaaaatccactcccatattaaatccccaccaccatatatcccttgaattcatcgtgttcctcagctcaacataatccccagtcccgcgcaacctttagctctcggtctgcgttagctcctgaagaatcgaagcaatggcggaccttttcttcggtggccccttccggcgaattctatactggcggcccttcccgccggattgggcgtctgcgactgcgacagctgcgatggactgggtcaagacgccgaccttccacgtgctcatgatcaacgtcccgggactgagcaaggacgacttcaagggtgatggtggaggacggcaacgtgctcaccgtgaggggcgcggcgctctacgc

SEQ ID NO: 41861 - DNA, 463 bp, Oryza sativa
  unsure (1)..(463): unsure at all n locations
tataaccctctggtgccataacagcatcaagaattgtactataagagangangaactcgatgcacctgtccttcagctgtgtacagctatgctgctctgcgaaagccaaagttgtcgcaacagtctccacattgatgtcatcgtggagcctatcttggcagatcacgttgagcctgtccaatccatacctgtctgcagcaacaagcaaatgctgtgtcattgttgtgatgtcctgctccgagtcactgacgacatgctgctgatcaagctccggtgatgtaccagtgtaaatgaaatgaagcatggccttgaagactgatgcctctatgttcttgatcttcacacactgtgagctactctccttcatgggtccaaagaactcagccatgaagacaggggatctatcatcgaggatgatcttgtgtgcctagaaagattcacctgcaacaacatacgtgacatc

SEQ ID NO: 41862 - DNA, 341 bp, Oryza sativa
  unsure (1)..(341): unsure at all n locations
agctntgacgactgcgcgccagccatcactcttttgtggaaaggaaagactctacttgtttaatctgaccacgggttacgtttcgctctacttttatatataccgcctttctttaattacctcgccctaattccgcctaattctgacggaaaggtaagggatgagatgagcaaagctatcaaaagataagtgtgccctggcccctccctggcgtcagcatttatcggtgacctcgaggtggtggtcagctttgattgcgggtattacagatttttccagtgcaacgtcagtggtttcattgcgaggctctaatgggccaatgttgttctatttgtcacact

SEQ ID NO: 41863 - DNA, 499 bp, Oryza sativa
  unsure (1)..(499): unsure at all n locations
taacgtcggaagcgaattagttttgggttaggtgtttgatgcttcatttcgncagcttgcagatgttcgcgcggggctgcgcagcgcanggggagtatggtcatttttctcctgttttctggcgatctctagtttattttgtcccatgatgatgatttattgatttggacccacaagccactactaccaccacagaaatcaccggccatttcatcacagtatcacacaactcaagccgctaatctgaccagtgactaccttgtaatcctcggcttccacctctaaaaaactcacatcttccatgatattttcctcgcaaacacattggctcanatatgttagactagactaggtgatgctcttttctcctaaaaatgacgaagattaagtattttacacaaaacaagatggtattaacatatgatntaatgagttntaattattataaacttgaagaacatattaatttaatattntagagtgaaatacaccgttagca

SEQ ID NO: 41864 - DNA, 463 bp, Oryza sativa
agcttgagtggagtaacagatgttatcttttacagctctgcctgacaacactgtagtggatggagtctcaactgtattattcctaaacacgatgccctcgacaattgccactgtcaaggatatttgcctaaagaccagatgtgtcctgtccttcatgctgtatgcatcattggagatgccacggcattgtgagcagtaatcgcttcctccagattgtgggcgctgccaccagtttatgtctaggtttaaatggtttatggcgaaattgttaggtacgcagggcacagtttctgagtttctaatccaagtcacttatctctcatattattcttttaaaaacactatattgggtgaatcatgtttggcaaatgacccttatttcatagtgacacgtaattaataaacagtttgaggtttgcttgatccattcttgcatgaattattctacaaaacacatactgta

SEQ ID NO: 41865 - DNA, 289 bp, Oryza sativa
gggtcttcgtctcgtttgtaaggcaaactcccttgatggaggtttctcttccaatgacaggggatgaccatcatatccttgggagttgcgtctactgggcctttttcttgcggcatttaagtaaactgaattttttcatagcactcaactccttgaaatcctgtggggttgggagactactcttatgacctattacatcgcacgtcgtttatctggcacgtctaagaaatatatcggtgatgcttcatttttgaacttctatatctagattaagtattgcatttaggcg

SEQ ID NO: 41866 - DNA, 364 bp, Oryza sativa
ttcaccaatgggggagggttcgtatcgagtggtctttttctctctgccgggctccatacagctggccacgggcgacggcactgagctgcctaacccgtggaacatctaacaccttcgtcgcttctacccctgagggggggtcgggtgtcacgtttctggctcgggccaaccccgcaccctcctctggcgtgcagggttggccgggggctacaacatatgcatatatctatttctcttatatctgaattactataaaagcagtttcaatttcctaaaggcttgatctgtgctgattttgccttttgaagaaacctgacttgaaataggtcactcgtgctcaatcctgcccttgggggctcgggtc

SEQ ID NO: 41867 - DNA, 370 bp, Oryza sativa
agcttctgccaggcactttgtcatgtattttctattataatatatggctatgtacgtaactgaaaaacttccagacaggataagtgctgatcttactgtgaatgcagttagggatggtccatcctgatcgcctaaactctgaagaaattaaagatctgtggagtgaagctgaccatgacggggatgatattgctgactacaaagaatttcagggaattccttgtgtaatattttgctggagattctgccttgaactgaacaataatatggtgcccataattagataagaaaggaggtcaacaagatctaaggacaggtggaacataggaaatgtaaatcaattaataactcataggagtatatgctgcgc

SEQ ID NO: 41868 - DNA, 482 bp, Oryza sativa
gctacatattcatattccacttcatgttcaagttcacgacgttattcatgtttcattcttccggaagtttttgtttacattattcaagcaccatgtgtcatgggagtgcaatttgaatctttttgtttacattattcaagtaccgtgcgtagtcatgggagtgcaatttggatctttattcatgatccttgagaagcgctgatcactcttactcggcttatcggtaatgctaagaggatattcatacctgcccgggagggaactactatcttttgacttctttggtttaaaataaagtaaatccaacccttgatattggtttcttattgcttaaatcctgtgtatgctttactcgttcaatattgtacttgctgagtactatttactcactcttgtgtttaacttggttattaggtacctaatgacatcgatcgggatggtgcgggagtagcaccctttgactacacattattattgtacac

SEQ ID NO: 41869 - DNA, 315 bp, Oryza sativa
  unsure (1)..(315): unsure at all n locations
actcagcttctacaccaaaggcgggtagggtgtcgcttcttttcacanccacctcgaggcatgtggcgacgttagtcacgctgcattcttacggaaggatctgtctacattattcccgcaccatgtgtcatgcgagcgcaatgtgaaccttcatgattacattattcaagtaccgtgcgtggtcctaggagtgcacttgtggattttatatcatgatcctagagaatcgctgatcagtctgactcggctcatcggttgtgctctgaggatattcctacatgtccgggaaggaactactatatttcgacttctgtg

SEQ ID NO: 41870 - DNA, 415 bp, Oryza sativa
  unsure (1)..(415): unsure at all n locations
agctntccgtttcagccatggtgcangatgagatgangttgaggttgatgagaagtacaaatcctataagatcagcatacattgcagctgataataaggaatgctacaactgtgggcaagtgggtcatgtgagttacaattgtcccacttctagaaacattggtggtaggggatcgattcaaggagggcatggtggatttggtggaactcgtggtggatttaccaaaactcgtggtggtcgaggaggtgatcgtggaggtcatggtggaggtcatggtaggggcatatgtgctcctcaagccaatgcagctatggaggatagtaaagctattatactctaactggtgaacaagtgacataatgggaggaatggcagaaaaacaagaccagtgagagctccaacaccattactcac

SEQ ID NO: 41871 - DNA, 282 bp, Oryza sativa
  unsure (1)..(282): unsure at all n locations
tcatttatcaccatgttaagctcttggcgaagacaacacttaatttataccaagtgattcttgcgntntgctgcgagaattattaagtaactttcaatacattctcttaataaccgagctaggagtaagaaggatattagctatttacaacaaataacatcgatttgctaagccatgtttgaacaaaaataaacctacaacacaaatgacaatctaactcttgggcgcgtgatactccctccgactcattttaatcgaacttgcggatatctgtgtccaaca

SEQ ID NO: 41872 - DNA, 393 bp, Oryza sativa
catacctaaaaccaaagaatgctgcttccaaaaacagagagagaagggatgagaagagacagcacaccatagatttccagtggacgccaaaatgaccgttctgccctcacaacaaacactgtgcttttcgctttcatgttcttgccaaccacgcacaccggaacacattccttcctaaccgcttcctgtgtctcaatgttatccttgtataaaactaaataaaaagctatgcactatgtcatcatatgtaaataaatttctaagttctggtgagaaacatcaacacaacattcctcattataactgtatcactatacaaaacaaaaaacaaattggtcttcgcatgtaattcaagctaaaattattattattttcttcagcaagctttttggc

SEQ ID NO: 41873 - DNA, 439 bp, Oryza sativa
cacctgaggcatgcaagcttcatttcctcaagatccaatatgagatattctccatgttgcctcatgagagtgtgaatgacatgtatgggaggctcaatgtcattgtaaatgatctcaagggacttggggcaaactataccgatcttgaggttgcccaaaagatgcttaaggctctaccagagaagtatgagacccttgtcaccatgctcatcaactctgacatgtcaaggatgacacccgcaagcctcttggggaagatcaacaccaatgacatgtacaagttgaagaagaaggagatggaggaagtctcacattccaagaagtgcattgttctacaagccgaagttaaagacaagggcaagggcaaggtgaatgaagccaatgaggacttggaggaagagattgcccttcttgctagaagggtcaatgatctcttgtg

SEQ ID NO: 41874 - DNA, 341 bp, Oryza sativa
  unsure (1)..(341): unsure at all n locations
gcttatgagtctgaagtcctccacccttgttgcttcaccctttctcggaattagacaaatgttngctaaatttaggtcttcccatctatctgagtttcagagagctganaatggttaaatggcgctgtatgcaaatctgatttaatcaccacccaagctttcttgaaaaaagccctatatagccatcaaggccaggtgtttttatgggggaaggtatgatattgcttcttttaaatcttcttctgtgaaatctatctccagttccgacagatcaagggaagggagacttaattctgaccaattaataagtaaggagcatgcgacatactgccctaatcttt

SEQ ID NO: 41875 - DNA, 350 bp, Oryza sativa
  unsure (1)..(350): unsure at all n locations
cggatatggaatttctcaagacatcccttaatgagtttggtgatgatgaaacagctattatctttttattaaagaggttagatacagatacctccttgccattgatttcttctacagatggttcaaaacaattctcaggagttttatatggtccattctgtatacaccccccgttggtgtaaagcctagttttataattcccattatctggaataaataagaactggaccagttttcagtcctttatgcacacataacatttggatagagttttgatctatcatgttaaaagaaagtgcatgtcattacattcctcctgngaactcgtctcacgtatttgatcattgata

SEQ ID NO: 41876 - DNA, 290 bp, Oryza sativa
  unsure (1)..(290): unsure at all n locations
acaagaccattctgtggattcatgacaaaatttcttcttgagtcatcaaacatgaatgtgttttgttcattgcactgcatatgaaagaaacacaagcaatgagctaataattcaatgagaatcagtcacaaattcacagtaccacgccactactaacctcggtgaactgagcccaaatgacaccaagaggctngcaatcaaaagttttcttttttgacagggtatcagagtgcacagttatcatcgccaagtgatccataagagcagtaattttgtagttggggttgcca

SEQ ID NO: 41877 - DNA, 175 bp, Oryza sativa
caaaagcgaccgggtgagatgaagaaaacttggagaacgcccttggtcgcgcctcaatcaactcctgcaatcatcaatgcacgacttacgcacggactctattttttcgcccaagcaagtacctctgccaacaaaaacacacgaaactcattgtggagcaacgttcggtcaaaga

SEQ ID NO: 41878 - DNA, 385 bp, Oryza sativa
tgagaagactcttttttcattcccaagggttgaatccaagggaggaagaacatcgtgaatctcaagaacgtgtttgataaagtctactccgcgtttgaaccactaagcgatgtatatggtgagagtggcgatgaacatacaggaaagaacatcttctgtgattgcttcatggcgcatggcgaatcggattcagagtgtgaagacaatgacgtacgtactattgaggaagctattcttattttaagtgagaagattaacaagcgtgagaagatgtatatgaatcatgagcttatcatttgatctcttaattctgaacttgtagattaaaatctcttatttctaatgatgatgagtgcacaagtgtgacgtttattgatgagattct

SEQ ID NO: 41879 - DNA, 420 bp, Oryza sativa
agctttctagaagattcacccaaaatctctatagactgcgaccaacagtcaagcttacaaatgtgagttctttcaagaatgctctacaggacagcatcttcgctaattaaagccaacagaactcattaaggcatagccaacctgccttgcagctcacgagagtacatgcatcttcatttagagagggtatagatcggtactctcctctagtttactaatggtttgttcttcccaagttctaattcataggatctccgatcacatagactgggataccaccatagtataactcacatgtgtctcaaacccatctccttcgatgcattatctatcacatttcgtgatagtcccttcgtgaagggatctgcaggtttctagctgtttggatgtaatccaacgttataactccagagtttctta

SEQ ID NO: 41880 - DNA, 414 bp, Oryza sativa
  unsure (1)..(414): unsure at all n locations
tcagaaagtgaaagattagagctgagccgacaactagatgaccgctcttttaatgaagaacgtccatatgacaaagttagtgatatccagtttgataatatttctcatgcagtcccattacaatttttgacatatcgactactgaactactgcagctaagacttggattgccaggatggaagtcccggttctacagggaatatttcggtatcgaaacttctaatgaaattggaaatcttcacaacgacatggttatgttttccctttgtttatttacttatcctaatgaatccctttttccctttccttccccttccctccgtccaacaaagattgtcgttctacttgatttagtaaaagttaaggttcanaatgaaaatactattcgtgatgagtactccctccgtctaaaaa

SEQ ID NO: 41881 - DNA, 336 bp, Oryza sativa
  unsure (1)..(336): unsure at all n locations
actactacaccttaccccttattatcctttcacttggctaaaacgctatgcttgtttaagttatgaatgaatttattcttacatcatctttaaaatgtttcacaaaaaacatataatagggacaactatatgaatggtgatgcttagactcactactggtgcaggaccatggacgctatgctccgtcacgtcttgagaaggggctacaggtgactgcccgactcacccagtgccgcccatcggcacctgccaataattacgacacagtatgcgngactactagctaatacaccatccttcttcactccttttatcctctatttacaaaagtattac

SEQ ID NO: 41882 - DNA, 418 bp, Oryza sativa
  unsure (1)..(418): unsure at all n locations
agcttgtcgcgcggtacccctcctcgatgtctctggccaccttggctgttaaggtcaagaagaaggattggaagttggtgaccgtcgcggtccacggaggggactaatgaagagggagtatgctgccggcggtggctgcggctgcgacgtgatgtancagctattaaaggagttggagcaagcaccactagtgccgtcgtttgaggagatgatgacatatggggagctgcgccgacggtggacgtcgaggtggtggtagtgctgctgctactgtcattgctcgagtcagtcttgctcggcctcagagcagtcgcctcccctcccctctccctaccaaagcaagccactaaatttggtcgtgcgggcgagccctctacgacggtgacaaagtatgtgacgccgtggtggtggatgtggt

SEQ ID NO: 41883 - DNA, 454 bp, Oryza sativa
  unsure (1)..(454): unsure at all n locations
actaagcttcttccgaccgcaggccggagacgtgcttcgtatttaacttaccgacagaaaaaccagtcgtaccagcgctaccgaccttcatgactatggccagcaagactcttcgcgagttcgctgctctccttgctgacaatgagggcatatggccacaggtcaacatatgtgacgcggatttctacttggaatccagtcacatcacgatggcgcangctagccctgtctgtggcaagcctaatgaggatgccaatgctcatctacaacagttcctagagatctgtagcacgtacaccattaatggcgtcagtcccgacgtcgtcaagctacgactgtttccgttctcccttctcgggagagcgaagcaatggttatatgccaaccgtactgctgncaacacctgtgacaaatgctctactgattcctctcaaaatctttctatgggtaagca

SEQ ID NO: 41884 - DNA, 425 bp, Oryza sativa
agctctaccagaatgttcacagtgtttatttttatcgatctgaactggcacttgatccatccactacactggatcaggtcatcagtggcgggctcaaaccgtcatctctaacaggtaggatgctggttagagatgattggtcagcgatgactaaactcatctctaacgggtgaaggctcatcattagtatggggcacctttgactggctgcaaacggtaacctgtcagaggtgatgttaatccctttcactagtggcattgcaacccgtcaaagatgtaaagtactgtgaaaaaaaacaaaatttattccattctagctcattgcagttgcattcatcttacaaattcacaaatcacaaaaatcatcacaatcacacatctgggcatatccaaacacacatctgggcatcacaaaatcaatatga

SEQ ID NO: 41885 - DNA, 351 bp, Oryza sativa
  unsure (1)..(351): unsure at all n locations
aatgagagctgcgaaaagtatgaatgcattttcactctgaggtgaaaaatgagagagaataaattatggacaactcactgttggcatgcatntttttaactactcacaccatattgacagagaataaaaaatataatatttccatcctgggagatcattaccaggaaaagaagaaaaattgccaccacccacacaccaatagcttcaacacacagtcccgagagaaggctagcacccgaccggtcgttactaatcgtgaccggccgccgctaggccaacaaaggagtacaagtgagatcgcccataacccaactcttaacaactgacaccaaacttcactctaaccacatc

SEQ ID NO: 41886 - DNA, 420 bp, Oryza sativa
  unsure (1)..(420): unsure at all n locations
agcttctattgacatagctaacttcttctactctctcctncaaagaagaaacaagcacaggcactccagcttctcccattaccaccctcttgctggcgtcctggctcgtcgacgtgaccttcatcagtcgcccacaccctctatcgctccgtctcaatatgttgtccggggcaacaaaaaagccaaccccgagtcccctatccctaaagaaaggggaaatcctctacacaaatagcatttttttcagtgccaaccaactaactccatccaagctctcttgccggtgcatccttcgatggccctccctcttcccgtggcccgacctctcgtggcatctacgagcttgccgaccagatttccctaacttgcgtttcccaaatcccacaaccgggtgccgctccttccctctgaccattgggc

SEQ ID NO: 41887 - DNA, 381 bp, Oryza sativa
ctagaatagaagatagtcttttataccaacttgtactttatacaaacggaaattagttattgtaaagtattgaactcaccacttcctgatagacgacggcatcactattgttctcaaatgtgatagagccgtcctggttgaccttaccccttgcccgcgcccagttgcgagctctatgttcacggatgtctgataacggggcagggacattctctgctgcagcggctgcatcttcttgggcccatattgtctccttgccgatgtaacctgcggtgcccagccgatgcgggtgctcattccgctgttgagtacgcgatggcctcctggattcctaactcttgggggcttgaagagcaaattctccccaccgcttcgtatttg

SEQ ID NO: 41888 - DNA, 428 bp, Oryza sativa
  unsure (1)..(428): unsure at all n locations
agcttcgcgcgccttaagatatcgagctttcttttggttgtcgtgctgggttattntggatttcgaatgcttttctagcgaaatcgttgagggtgccttcactgctcggatcattttgagcagtgtagatggaaatttactgaaatttcgattcggacttctgcttcatttggggtcagaatcattgatcctgtgcctctgccgatggaaaatttgaagacttagggtgatatttttgtactattgcagtatatatattcggaatttttttgtcgaaatatgtcgatcactgatccttgagtttttttttgttttttttacatgttacgttaacttatttggggatttattgagaaatttctggcctatgagggatgatcgttttgatgatgcgtgaaaaggagcatgtgttgttgttgttgttgttg

SEQ ID NO: 41889 - DNA, 433 bp, Oryza sativa
  unsure (1)..(433): unsure at all n locations
ttcacacacagcattctcatccaacacattagaattttagtgttgctagctgaagttgttaatacatctgttccattgttattatcagtatcaatgttggaagacttctttgttgattatggcttccactcctttgacggctgtgtgactgcagaggagagagagaacatgtataacaatgtgaatttcactgatgtggcccatacaccccatgtcagacctcataattgatgttatcagagaatataaaacatgaatagtaagctacacatgaactacttagccatccacacggaatttctgataaaaatgtgtaaataggtgattggaacatgcgacacgttgacaatgaagacagtcaattgaatatatatgaataatccttagtgattcagaacanatcgacattacttacttcattctcgattcatgc

SEQ ID NO: 41890 - DNA, 435 bp, Oryza sativa
agctttaatagtagaaatcgtactactcctatcttgtacacgcggacacggacatggacacgtacgtaactgaccggcggcaaaaccgcagctgcgaaggttgtcggtatccacgattcgtatcttagtattgtacgatactatgatcatactaagccgaaacgatactgatcccatctagtatcttaattttcatagaatctcgatcctactattcattactacacgatcatacaaaatcttacgtgatatcccgattctacgatccctacgatactacaaaatattattgtaaataacatagtttaaaaataatgtaactaaatatgctcagatttatataaaaatcagcttaatatatcaaaaccaacgtggtttctcttgataaatgtctctaattacatgatatatatcattactacatttttcttatac

SEQ ID NO: 41891 - DNA, 324 bp, Oryza sativa
cattagatcttgctcgagtcatcgtccctcgtattgaggactttctgcctgtgaaaggtaactacgtactactactactatcgatcaccgaaaagaaaaggaaggaaaaaaacattgctgcccatcaaacatcggcaaaatgtttagaggttgcttggataccaacatccctcttggggtcatagaaatggtttaaagattctgtctctgccaacaatcaaacggttaatgagtcacgaaaagataaataactaatgttattatggggcaggcacgtgcggtgcctgccgatggtgctcgcatacgccagtcgttggtgcttgc

SEQ ID NO: 41892 - DNA, 287 bp, Oryza sativa
tctcgccacctcctcgcggatgaaggcttgacattcctgggcctgccgccgtactttttgcctaacctgccttgcgcccgaccttacggcgagacggtgctcaatcaccttcctgtggaccccgggcatattcgccggtcttcatgcgaagacgtcagcgtttgcccgcacgaaggagacgagcgcgtctttctatttgccattcataagaccaccgattctcgtggtcttggatgggccgtccaccaatgcaatctccatgaccgggaccttgtcgcatgtgacta

SEQ ID NO: 41893 - DNA, 212 bp, Oryza sativa
gaacagcgaatatggaattacattccggagccagtatccagctgggggagaagaatagccgcataaatcgaaaaggcataagatgaaaggggcggattggaaatgctatcaaaataaaatttaagatcggaaatatactatcaaaaacattgaggagaagcataataacaagggcgaaatcacgcctgataatataaactccaaccaccccc

SEQ ID NO: 41894 - DNA, 411 bp, Oryza sativa
  unsure (1)..(411): unsure at all n locations
tctncactanatcaactatataacacgagcgtacgacgtttgatctttattcacttacgagcgccatctcgacggtgccgacgtcttatctaccactcactcgatatcagatctgcacatcatgaggaaacaaaaatccaaaaaaatttataatataattcgcaaaatctacagtacgcaacaatggcgcacgcacactagttagttgtagcgaatcggggagatcttactgtggcggaggcgaggcgagcagtggagggagcatcaatactaaccctagtggaagaagtagcatcggcagctaaaacagtggagggattctacgcagccgattctacttacgatctcgcctatggttgcgcgcgggtgatctctgccgtcctatgagtaagccttgcgacagatcggacg

SEQ ID NO: 41895 - DNA, 429 bp, Oryza sativa
agcttagacttctattcatgcacaagttgtctattggcttggatagtggcctcaatgtccttgcgttctctccgttcggccagtcttaacttggctttctctagtttgaattggtgttgctcaaggtaaacggctggggtaaggatattggctagttcatatgggattagagcctgaatctcatgtagccgagccctgattgaaccacaatcaaccaccaagctctctagtgatgatgcttctagccgatcagagatactttccagagttttcttcacatcatcagataaaggggctaaggctttgcttgtggtatcttcttctccttcatcaagatagtctctgatgtcaaaagagaagagatcggctaatacctgcagcaacaatttataagcagttagaggacaaacaagcatagccgatctgaat

SEQ ID NO: 41896 - DNA, 237 bp, Oryza sativa
  unsure (1)..(237): unsure at all n locations
tatattattattaagccaatttgtacaaaagtgctatataaatatatttgatctaacttattatagaagttctatatataatatagtcgaaacgacttataatatgaaatgaaagagattatgtacgtaggtgtgatatangttattgtataagcttgcaatatgtatactcatgcactacagtaacagcagtataatatcaggaattcagtattacgcgctaatgcagagaatttg

SEQ ID NO: 41897 - DNA, 432 bp, Oryza sativa
cctgcaagcttgcaaaatagagcggctggattgtcttcttaagctgtggagggacaatgtccgcgagatggcgtatgacattgacgactgcattgatgtgttcatgtatcaacctggtgaaggccataacaaggatggtgtgcttccgaagactgcccgaaagatcacgaaactgcgcgttcggatcatatcgcaacaagatccaagaactcaacgcccgtgtcatggaggtggctcaacgccctaacaagtatatctgtctaggtgaagctaccacctcttgtcctaagggggtggaaaacaaacctcggctggctgcgctcgatgaagcggctaaaaatcttgtatgcattgatggtccacgggaaaaaatatcctcgtggctcacagaagaatgacagagtggtccaacccacaactcatagttgtatc

SEQ ID NO: 41898 - DNA, 354 bp, Oryza sativa
tctctccacccggcaacgtttgttcgaactcacttctcaccacaaactcgaagatctcttccttgattcgtgtcaaccatccggaagaacggattcagtcccgtgtggactcccaaacgcggctaaaaggtaccccaagaccatctcattcgagtcggcttcaaaccactcgggcgagatcgcatcttcttcaacgacaccagatcaagatgatggggcttacccaccggtcttgatgaagctccccgatgatttggcggccatctccatcacgacagccgtctcatcccgtaagcctatgcggaagatggttcacacccatctccctacttcagggaacgcgggaatactcca

SEQ ID NO: 41899 - DNA, 430 bp, Oryza sativa
agcttcagcggaaatgtaaaactctcacttggagacccattgcaagtgaagagattaagcatgatccatccaaaggttgtctgttatgctcgtgccgagctgccatccgttatgccaaatcttgagactcttgccatttactccaatgatgaggtatcgatctctaaaacattaggcgttttattatgcatattaagagtagctgtatattataggattattaattctaattaatttgagacatgacatacattgtgcaggtggtcaatacaccaatgctgcctacaaaattcctctaccttaaacacctcaccatttccgttagctcagcagcctcctttaacacgtcgtatgaatattgttctcttgtgtctttccttgacgcgtctcctatcttggagacattgatcttgaatgtaacgcactcttc

SEQ ID NO: 41900 - DNA, 414 bp, Oryza sativa
tgtctatgagtgctgcggcatacttaacacggtgcaattgtttgtgcacttgactcttcgacgctgatgtgggactcctccttgagacccattacaatcttaacctgcaccaatccaacaattgagttgtactacttgccattgaacatgtgatcctttactctaacaaaagaagatacatgcttctaccaacttataactgaattagactaaacatctaaacaaagcacatgtgcctgaacttcatagattaaacatcttgtttgatcattttcacacctgatgcgacagttattacacttcatgtggcaacatgagaattcacatgcatctgatattctagtcttaacagtactgaagagatttggaaacatgacctacatgaagagcgagccctaccaataatcactatgg

SEQ ID NO: 41901 - DNA, 433 bp, Oryza sativa
  unsure (1)..(433): unsure at all n locations
agcttngccaagttcctgttaattctctttcttgtgtctcacattagtctgcaaggttcctttaatttacgtttgtcaaacctttaattatcaaaattcgtcaaatctaagacaaattaatttgtcaaacctttgtcaaaatcgggtaaataaataaaaacttctgataaagtagggtcaaatgagcaagggcataaacgatatttttattacaggttaacaccattatgttgccttctcgtaatagggtcaagtgtgatcttcatttttaaaaaagagggtcaaatgagcaaacttaataaaacagggttaaattgggagttaggctttaaaacagggtcaaaaacgcaattgccccaaaattttatgcataatgaaggtatattttgacaatgttggctatgatattattgtctagcactctacatactta

SEQ ID NO: 41902 - DNA, 427 bp, Oryza sativa
agcttataaggaggaactgggattgatcctttactagccactccgaaagaccacaacgcttcatctaaacgagtatgccactgccgaagataatcagaaactttccttttaattaacttgatcaaacttttgttagatgcctcagcttgcccattagcttgtgcataatacggtgaagaattcaataatttgatacccatactattggcaaactaaacaaactcatcagacacaaagattgaaccttgatcagttgtaatagtctgaggaataccaaatcggtagattatatgttctttgacaaactgtattgcaccttcagaatcagcctttttaaaggaatcgcctctacccatatggtgaaataatcagttgccaccaatataaacttatgtcctttactcgatggtggattaatcatgccgat

SEQ ID NO: 41903 - DNA, 249 bp, Oryza sativa
ccttggtcttcatcgatcagatacgccaggcttccacgcgactaacggacgcattggaagccatttctcatggcacgtgtccgacccgacagagaataacgactaagctgtcacttggcctacagactcccgagcattcaagacgaacacgagggaaaggggtgattccttggaagaatggattcaatgaggacatccacacgtacaggagtcggatgatgagcaagagagataccgaggcgaaaattg

SEQ ID NO: 41904 - DNA, 431 bp, Oryza sativa
agcttgctgattgtggtttgtcaagatttgttatcccggacaacaatgcaatgttgcaaacaactatggtaggcaatgcagaagagtatgtaggtgtacagacaattgccgtaggcacggaagggtacatatatccacagtgcaagaaagatggcacggtcaggttcaactgcccctcagatgtgtacagcttctgcattgttctgctagagatcacgtgcacaggcaagttcagggagcagatctgcggcttgtactgaagcaaaggtgatgtcgttgaggcagcaaacacaaagctagagattggtggtgactttgaaaggagggagatggagcgtgtcatcatcttaaggctctggtgctctgcctttgagactaaagatcggtcgaccatgcatcaagcaatggatgtcctggagcgtaatgcaccg

SEQ ID NO: 41905 - DNA, 407 bp, Oryza sativa
agcttggacggagatccaccttcaacggtcatggccttgatgttatttttttgaacgaatgccatggccttgatgttgaccatgcggcatggctggtgatccatatgtcccacttcccacagtgcctgaggtgtactcctgttacaataacattgacaggctcataaaaaacactattcagaactaaaaacaaaagaagacatactcatccatttttgcctcttctagaaaaattgaacctatgaaaattaattcattggataagtcataagaaagtttccttacttacatgaaacttacaggtacagaagaacatcccagctaactaatttgtgcagcaaagctctattgtcaagttgtttggtcttgtcatggcaactaaatagcagggacacccttaatatact

SEQ ID NO: 41906 - DNA, 391 bp, Oryza sativa
  unsure (1)..(391): unsure at all n locations
tataactaaacttgctctaagagaatgcacatagtaacatgttcataaaangntgcatcacccacaattgatgacagatttaaacaatctatgccgatgcacttatctgtacaatatcacgcttatacgatattgaaggggggagttgttattctgctatcactcctttcacactaacatgcgatccttcactaagtttcagcttgatttgatcacaagttcaatttacatacacctgtgaccactaatgattgtgaccagaaaaactgaagatcacactaactgctttcccaatgacacgtaagtataatataatacaagaatgtctaaatacattaagcacatataatttatatcggtggccctccgcacccttaaaaacgcctgatca

SEQ ID NO: 41907 - DNA, 426 bp, Oryza sativa
agcttgaagacagcgccctgtccatgttcttagctgaatacaatatttggatgatccatgtaagaaacaacactacatatttgacatatacttcatatacggataacagatttgcattttcattgacttttcgtttacctcaacccctgagagagacttgaagaaagcgttgttcacgtcacaaataatgaacagtgacgcttggctgctttcggtacccatacctatctgcagttagaaaaaatatacgttcacgagtcatgaaaataaatggaactgaaacagttaccgatactacatgactagtgcccagttcataaaccataatgttcatcatgtaccttgtgagacagcaatacaatgcaattccatcattgatctgctcaatctctgtagctgacaataaactacctatgcccatgtaca

SEQ ID NO: 41908 - DNA, 418 bp, Oryza sativa
agcttcaatgaagctctgactagcgtgactttttatggaaacatgcatacagaataactaagcatgtgttcagaaagcagtcactacttgatatttatgaaattatctaaattctcttcctcttttcctcaaggatacatattaatgccactccccattggcaatggcacagcatacagatctctgagatatatttactttgacataaactaatgcaaagaaatacaccccaatggcctggtggtgaagctatttaataactccatccacttgggtggttgggtccaaatcctaggattgcttgggtgcacatcaccgctcctagtgaatgtcggaaatactactcaattttcaatagaaattaatgcaaagaaattctcactgatacctcttgcagtacacaaatacatctctatgt

SEQ ID NO: 41909 - DNA, 424 bp, Oryza sativa
  unsure (1)..(424): unsure at all n locations
agctggctggggggggcgcatgcgctctatatcttttatcttctcgggggtggcctcgatgcctctggcagagaccaaaaactcgagaagcttgcccgcaggtacaccgaacacgcacctattggggttcagttttatgcgggcggagcggagactctcaaaagttttcgctagatccgagagtaatgtctcttgggtgcgcgtctttacaaccaagtcatcgacataagcctcaacattacgtcctatttggctacccaaagaaattcagtaggacgttgaaaagtaggacctgcattctttaacccgaagggcattgtcgtataacaataagttcctatgggggtaatgaatgcagnttttccccatcctccctagccatgggaatctgatggcgaccagaatatgcatctagaaaaacaaa

SEQ ID NO: 41910 - DNA, 423 bp, Oryza sativa
agcttgacaccatatgtactcgttagcatgatcctttaagcacaaggagttccatcgacatctgttacgtaggattgatttgattccctactgtaccaaaatttgatgtggtcaaaattttagcaagagaaactactaaaccaaaacatatggtgcacgcatgagcgcatgcatggctctgaggagctccgtcgtcagtgtcaagttttgcactgtccttagcgcaaatgagcctacagctcgatctacagccatgctgatatcgttgatcggaacatcgaaactacacttcacctaccgttccaacaattgatggccaccaactccttcagagctctaatcaacgtgacgatgtccggatgcgtagcgcgtcgtctcgagaagttaatgcacttcaactccgtgatgctcgtgggcatcaag

SEQ ID NO: 41911 - DNA, 214 bp, Oryza sativa
acgtggaacagatggtggctgttgccttgcaggtccaactttcaccgaattgaccgctccagcaccctggtggcgtacaccagcgcaccagctaagcacaacgcccccatgagcgtgctgtatcccgaggtgagcagcgactcctggcgcgcctcgtacacgagcatcttgtgcgcgagaggaacgagtactgacatgcccatgcactccaacg

SEQ ID NO: 41912 - DNA, 432 bp, Oryza sativa
  unsure (1)..(432): unsure at all n locations
agcttcgcagatccctcatcgatggtggctttgctctcaacatccttttcaccaaaaccctggacgacatgcagatccctcgcacggaattaaagccgagtaatgcgccctttcacggagtcattccagggctatccgctacaccactcggccagatcactcttncggttacttttggcactcgggagaacttccgcacagaaaatgtttgcttcaaagttgctgatttcaagacagcgtatcatgccatactcagacgcccggcgttagccaagtttatggctgtcccgcactatacctacatgatgatgaagatgcctggtcctcgaggagtcatatcccttcgaagtgacatcaaacaagccgtcacatgcgacaaggaaagctgtgagatggcctatacccgcgagatcaccatcgcccgagaagaaa

SEQ ID NO: 41913 - DNA, 413 bp, Oryza sativa
gcttctgatgtgcatcgactacaccgacctcaacatggcatgttttattgattcttaccccctgcctcgcatagatcagatcgtcgactccactgcggggtgcgaccttttgtgtattctagatgcatactctggttaccatcatattctcatggctagggaggatgaggaaaaaactgcgttcattacccccgtacgaacctattgtatacatcaatgcccttcgggttaaagaatgcaggtcctacttttcaacgtactactcgaatttctttgggtagccaaatacgacgtaatgttgaggcttatgtccatgacttggttcgtaaaacgcgcaaccaagaaactatacttttagatctagcggaaacttttgagaatcttcgctcgcgccgcataaaactgaaccccga

SEQ ID NO: 41914 - DNA, 403 bp, Oryza sativa
tgagagcactgccgagacacacctatttataggtcactaagcgcggagcgagtataaaattccgtagactgaaagtaagatcttggtgccgcgttttacaaccaagtcatcaacataagcctcaacattacgtcctatttggctaccccaagaaattctagtagtacgttgaaaagtaggacctgcattctttaaccccgaaggcactgatgtataacaataggttcctacgggggtaatgaacgcagatttctcctcatcctccctagccatgcgaatctgatggtaaccagagtatgcatctagaaaacacaaaaggtcgcaccccgcagtggagtcgacgatctgatctatgcgaggcacgaggtaaggaatccttaggcatgcctctgtaaagtccgtg

SEQ ID NO: 41915 - DNA, 431 bp, Oryza sativa
  unsure (1)..(431): unsure at all n locations
agcttctgcaggtaggacgatgtttggcctttcattcagccgtacgtgctccatccaccatcaccatgcatcgatatatatcttccatctcgctcactggtaagtgctctccatttcctataactctatcccagactcggttggatgtgtacatatgcaccgagaccaagcgatcaacttatgtgtagtgccagttgatgttgttccatggntgtgtttgagtaccagtgaattgtctcatggccttccgtcatcttcgtcttggtagactaatttctggtggttaagttcttggttgcttggagtttgaaaaaggttcagaaactcagcgtattggtgttcccagtgtatatacattaattgggaagatgttcacccgttaaggaattaatgaagcttcactaaatagtctatccgatccctcattattt

SEQ ID NO: 41916 - DNA, 446 bp, Oryza sativa
  unsure (1)..(446): unsure at all n locations
tactcagcttggcacagcccctgtntagctgtacccaactttaacatgtcctttgtcgttgaaaccgatgcaagtgatgttggcatatgtgcagtattatctcaggataagcaccccattgcatatgtgagtaaagcattatgtcccagaaccaaaggggtgtctacgtatgagaaggaatgcttagcaattatgttggccgtggaacattggcgatcttatcttcaatatgccgagtttctgatattaacagaccacaagagttcgatgaatttaactgatcaacgattgcacacctattggcaacagaaggcttatacaaaattgttggggttgcaatttaagatctgttacaagaagggaattcataatggtgcagcggatgctttatccangtgtgaccatactgatcaaatttgcagcccacatggttggaagaagtttct

SEQ ID NO: 41917 - DNA, 426 bp, Oryza sativa
agctttgaataagcagagaataactgtttattacatatctatatgcaagataaaatggaaacacaggggcagatgcatgttgagcaaggaattcatcacaggacatgatgagggttttaagctcagaaaaggttctgaagatgcaggagacacacaatgtcacaggacatggtgagggttttaagctcaaaaaaggttctgaagatgcacgagacacacaatataaatattgaggttgctgactctgttgcgaataaggaagacagagagaaggtagattttgggggagagtaatgagtttctagagaaggtagattttgggggagagtaatgagtttcttattcaaaagtgtctgaagatgattttgtaaacgagtgtagtgatagtagataattttgtaaataagtgaagtggatgtagtaata

SEQ ID NO: 41918 - DNA, 357 bp, Oryza sativa
cttgggtcgccataagtgatctgcaacattgtgggatccaaagttaagttctagacactataaaagaacagcatgcttgtgtaaacaaataatatagtttctttaccagaatataaactcccttgtccttgagaattctgtagatagaagaaagaaatagaagctatagtaagttaaacggagatttcacaaacaaataaagtgcgtgatttacctattgaccttctctagcatctgagacgcattctcttgtgaattttggccacactgcaatacaagaaatgcgaatctgagtaccatgaaggaagaaaatatgagtatgttgacacttgcaaaatgggctaccattataaatct

SEQ ID NO: 41919 - DNA, 418 bp, Oryza sativa
  unsure (1)..(418): unsure at all n locations
agctnggccctccgcgggtgccttggttgttctctataacttgcaaaagttgagtttgggtggtcataactccggccaaagtggcttaatcgggtgtctgagtttcgtcattgctggttgttgcccgacgtctgcttgccatctgtgcaggttgattgattgagtaagtatcctaattctctagctatcttttacggctttatcccattaggggagattgttttgatgtgaacttttgttttgcaagcatggtggaataaactcatttattacacagcaacaatatatatcataaataacatcacagagtttcacaaatggcacataaatcatgatgcaatcgactgcatacatacgcagtccaaataaggttcatccaaaagatacatcaaactaatcatcaatctactcgtcaatc

SEQ ID NO: 41920 - DNA, 326 bp, Oryza sativa
ccttggatgtatgcagattcctcgctccgagctaaaaccaagcaatgcgcctcttcacggagtaattccatgagtatccgcaactccactcgtgcagatcaccctcccggtcacttttggcactcgggaaaacttccgcatagagaatatcagctttgaagtcgcctgattctagacagcataccatgccatactcggacgcccggcgttagccaagtttatggccgtgccgcactacacttacatgatgatgaagatgcctggtccccgaggagtcctattcctacggagcgacatcatgcaagccgtcacatgcgacaaggaga

SEQ ID NO: 41921 - DNA, 419 bp, Oryza sativa
  unsure (1)..(419): unsure at all n locations
agcttactgcttatcagaagttcataactgtttgatngaagcttacagcgatacaagatttgtaagattgccaagctccttggggataggtccagacaacgcattgatgcccacagtactgttgattttcaaggaaaaagaatgtaggattggtgttgaaagcaagacaagaaaattgaaatgtaaagagcaaataattatactatgagctgtaactcttacatgtacttgagagcagtcagttctccgatgaacgctggtaatggcccggtgaaataattcttcctgaagtccctgaaatcacaataccagataccagcgacgttagttacacacatcagtcacatcttatacatcctacaagctttggttttcccaagctgttcacaaactcagctagctagtagctactgatatgc

SEQ ID NO: 41922 - DNA, 360 bp, Oryza sativa
  unsure (1)..(360): unsure at all n locations
tctctatgtcggtggtaaatcagaggcgatcatatattatataagtcggcatccgtatatgtncatcaaatatcagaatatcgtagcaaaattgcacccttgatccatgtgtgatagatgtgcaagatcccgaaagcacatacacgctagtataagctccatgagaatgtgtttctcttgtgaaatgcgtaatcactgtactccaaactttaccggtgctgatatttatgcgttatgcgcagacgcatgggatcatgctgctaaaaacttggtgagtagcaggcagttccttctacttcactgaacttttcttgtatttgctctgttggacttacacctggtatttcaagccaaaacact

SEQ ID NO: 41923 - DNA, 420 bp, Oryza sativa
agcttgaaagtgagtctatacctctaggcttataacaagtaaacaaaccaagagttagaaccaagagtcattaagagagaaatgaagtcataaccaaggagatgaaggtcacatgagctcctcttcaacaatgacaccagaaaactcaatgcaccagttatatttgataatatccatcaagtaattatgtttctgctttaaatggaaaagtaacgatgtttctatagccgcggatgggaatttaagcctaccaaatcagatttacttgaatcatcatcggtacgcgtacagccttgttacagtctgcagattcttatcttgtcgaattgtcaattctacgaaacatatttggtccaagaaaagctgtaagaatgtaggccacgttgtcttctgcacatacttcagatagcagcaacatgt

SEQ ID NO: 41924 - DNA, 407 bp, Oryza sativa
  unsure (1)..(407): unsure at all n locations
atacatctaggatttacacattttttataggtcaaaagcttatatactgattcaaatttgaatttgaattcaaatgcatttaaagatgaatttgaatatgttctacgtctacaaactttatgtgtacaaacttgtataaactttatatgtgcaaacttgatatgtataaacttagtaaaatatgagagtaaaacggtataccgtgtggngcagggaaccgatcgccccaagcgatggatcgcgccatatgagtttcgtatccatcaagggattctagcaacctttgcggtcttccaaatggttatctcatctctaatgtcgttcaatatgaataaattggagaggcgttcgagcacgctgattcagcaaaagtgaaaaacactctacactactttgtctgaacatgg

SEQ ID NO: 41925 - DNA, 432 bp, Oryza sativa
agcttttaacacttccccaagtcctcttagcactctcgttcatttcaattcttagctttttgaggcttactttgtgacttgcatgtcccatcgtaaataagtactcacggaggtctataccgatatttgctgacaactatctagaaaaggatccaggtcctccacatgcagagggccactgttgttgtgaggagaactgtaaataaatatagtgaatagtaccacttcaccattactacaaaattcttcttttgcatagtggtcatcgggatcgaagaagatgccatctttatggtagcagttgcggtggatgaagtggcacatatccaattgtatgttttcaatgcttttaccatctatgtggcgggcattttcaattctaggcctccgcatcagcagcatgagaagaaaatacttgttaatattattagt

SEQ ID NO: 41926 - DNA, 394 bp, Oryza sativa
gaattaacctgaggatgtgagagatgacagtctgatgaagctgtgcgctgcacataaagctgacattattgtgagcggctcgtataaaccttaagatgtgcctcgagtatattgtctacttgactcaagtacggcgaatcatcctcgcggagtggcactgagtttggtgtgctggacgaagaggcattgctataagatcaccgagtctatctttttgtttctgactacagagggttggtcaactcttaatgcaatagacttgaccactgagatccaccatggcatattcatggaatgcaagtgtgaggtctaaggctcatgcctctatttgacagccgtatctacgagaactcctaccttggaagaatgtctatcacggaatgcccgcataact

SEQ ID NO: 41927 - DNA, 372 bp, Oryza sativa
attgccgaaccagccccctgatattaacaaatgttctatgaatgcaacgctctttgatggaggcggtttgagaataaggaattataacatccagcttcgtcgctagtcggtgtggcataatcttcgcagccagcttaaagaaactatgcaccaagctaatccggctgtagtctttgagtagagttggcgattccttcttgggaattgagcgtgactattgccgtgctcaatttttctagattctgactattgccggtgcaaaactttgccagtgcgctgaggagctcgggtctgatgatgtcccaacacttttgatagaacaatcctgtttaaccgtctggccgggcgatttttcgttcggaagcagcggat

SEQ ID NO: 41928 - DNA, 437 bp, Oryza sativa
ccatatatattacgttgccctacataactgcgtattggcacagatttgttatcatgtaccagaagactgatgaattcttcttatattctgcaccatcttcataagatttgtgtcacctcaattactttcaagaatttgcagacatgcatatatgtttaaagaaaactcaacacaagcttacaatgcatagtgtatcttaaaagagagagaaagtggatactctctccgtgatacatgctaatacaattaatttggactgtatatctagaattattgtagtagaatgtgtcacgtccacttcaaattctttatattatgagaccgagggagtatattgcatcatctattacaccatctactttagagatacgctaaagcttgaatcatttattattatttaattcttttgtaaggtattctaatacaaatccttaaac

SEQ ID NO: 41929 - DNA, 442 bp, Oryza sativa
  unsure (1)..(442): unsure at all n locations
tgcagcatgcaagctnnttggttccactatatacgtacatttatataatcctacattcagcggcatgttacaattacgtagagaaatcccattatataatagatattatcatttcatcttatcttatgtataactttatcgcttgactatacaacttcactatttattcttcagcttataagtcataactaaaattttaattttaaaacttaattttgagagttgaatttaaatttttatcatagtttattttacaatattaaattttaagccgtcaatcagcgctacgacttgtatgaatcaactgttgacagaacgatgagatactcaacttaatgtatttgaagtggtgtacatctgacattacaaaacacatttacttggacaaaatttagattcaaactatacggtgaccatgagaactactgataacaagcgttgc

SEQ ID NO: 41930 - DNA, 431 bp, Oryza sativa
agcttaagagaatgttcctaagcactggattatgtcttattctctcataagccaaccttccatgaacatagctgcacagaaaatgaagcaactaagaacctgattactggcaaaaacatgtattttggtgagaagccaatacctgtggaagtcgttataatcaaactggtacccaacagcctgcatcatcataagattgaaaggaacaatacttaagagggttacagaacagcaaggaagatatgaacaagcacccaaaaaggggggcaactttgctggggaatagagtaaagcatacagaccctcaaaccggccatggtagttccatactgcttgtagaggaggacgcatagctccaaactgatgctctcttccacaccaagctttttgatcatataagctgaaacatccaaacaacaccacatacctca

SEQ ID NO: 41931 - DNA, 431 bp, Oryza sativa
  unsure (1)..(431): unsure at all n locations
tggctagcgaaagtacgtacgtacgtgtgccaaacctgcctgcctgcctatatatctgaacagagtttcaacaaatgtactcctccaaatgatgcactacggacgtagtattattctatagcagtacagaactttacatgtgttggaaaaaaatctaaacaagataataatatttacttgttccgtaacatttcgatcaaaactcaagagctgctagttgttattatgggcggcacacaagcgaaaatgagctggttgtgggctccaatgtggttgacgatgatatataccagcccatgggcttacttttgggccttcttatanggagtgtacaagaacaatttatgcccttattagttctcaaaagtctaggcttaattnagtcacctggcgttgtctcttctatcttcgtcttagctgtgaagtaaagt

SEQ ID NO: 41932 - DNA, 433 bp, Oryza sativa
agcttcactccctctataacatttgaaacattcatcaattattttcggccaatgaaaccccactctcttaagcaaccaatttatcttacgggccgattgatgaatttaacgaatcccttcatgtactactctcctagcaactttagattgatcattatctaagtaatactccatctatttttcggcgatataatatttgaacgcttgccgtcgaatcttccgatcaaccttaagtgtaggatctttcaaatatataatcaaaggaattctccaagctatttctaactcatgggcacaaatgtccgaattcacaattaattcggccttttaatcaattgtaacgtgccccccaacctcctgtctaggatcggtcagaccggccatgcaatgccggtcagaccgccctgtctgcccagtcagaccggccatgcaa

SEQ ID NO: 41933 - DNA, 316 bp, Oryza sativa
  unsure (1)..(316): unsure at all n locations
ggaatttactcaatcaaatctattggtttttgaaaagttgtatttagacatttatggttggtcatttcacacatacttttagttcagagctatttgcaaagaccaaccattcatatgttgcagccttacaaagttcatcaaatatcttgatttaccatatttggccaaacttgatatgatgggttgacaatttgnccaaaattctttgcaataatggatgaatantatctctaccaatctaacgcgtccanatgtagacttcataaaatcttattgatgtgattgacacttggtgagattattgcttgatggctac

SEQ ID NO: 41934 - DNA, 427 bp, Oryza sativa
ttgctgccgacgcgtacagtgtctttctgctaagagatgttgagcactcggacgacagtgccgctgtctgtggccatgaacagcttgggcggcgttaggtggtggtgcgcctcctcgtcccatgtgagggtgaaaccatggtatgagcaccctgcgcccatgccgaaagggtacggcacttgtatgccaccgcagtttttctggcaaccaggcaaggctatcggggtcgtggctgctgctgacagtgttgtcgtcgtcacctgaatctgaaacacgactgcttcaatcgtcgcttaagacggggtgcaagttatctctatactacagtactactactaggctagtagagcaaccttctctattcagtccgttaccagagctgatgatgaatatttattacaaaggtttttatcctgatctcatattg

SEQ ID NO: 41935 - DNA, 302 bp, Oryza sativa
gcacaagtgcgcgtgagatgaacctgaggcgtacatgggcgacttgtgtgagctgtgaagccgacggcataatcaacacaccgattgttatgacgcaagaatgggacgtgtgttgtttcaagacgccgtcgtcgtcgtcgctttactgatgaaatcatttttctggggcgtatacatatgaccggcacagcacgcgtgcatacgggccgtgcattacttggattacgtactcaccgtctcaccgatcgacggcgggtgatgcggaccgatcggttgtttacttgttttgatcggcgcgcgcg

SEQ ID NO: 41936 - DNA, 426 bp, Oryza sativa
agcttaattataataattcgcagatcttcataaatatctctaaacttcggatgatcatatcttggtcatacgaactccgaatcgacccgttcaagtctcttaatgtttgttataacctaaagaaccctgtgctttctttttatgtattgttattgcttctttataggcttgtagctttgcttgtgtgcttcgcgtagtcttcgtcgttccggaggttcccgaagcgtggttttcggtcgtcgccgaaggttctgaaggccgttctctctgagcaaggcaagtcacatcatccttgaacatattgaatcccagtttataaaattattttgatttatattattgcattatcgctttatttaaattcccgcgttatcactgttttatttagccatgcctatctacctttggtatgaccttattattatt

SEQ ID NO: 41937 - DNA, 288 bp, Oryza sativa
aaacaagatcctttaaggagggctggttagagaagataccgctattgttacctccttgataatatgagcgtggttggttccacccctgacctccttgtggacggtaccacgtgttgttgcccatgtacatcgcctcctcacgggtttccgggcaatcattcccagaatgacccgtgccgccgcagacttcacacgtgtgttaacaaccaaatttggtaatatctgcatcgggaaagaagattatatcgaagcatagttggaggcggagatcgaaatacgaaacagagc

SEQ ID NO: 41938 - DNA, 400 bp, Oryza sativa
ccatgcatattatccttcacaagtttaccttagtactcctcatatagtcgtgttaggcttttagctacacacttacaccaactgacaacactatcatcaagctgatcaagcacaattaacttcacaatgcccatctggagttcaaatcaacatcaatcttgctccgattagcgccaatgtgtcataatgaatttgaatggagctcatagaagtccatcactattcacacaaaaccactttgactctgactatccaccttagttcttagctcaatacctctcatcacacaaatcagaagcatcttcaatcgcccaagctataccagcaaatctacacctgcttacaagaaattctctccatagcactcacaatgcgttctagcacacaattcttttatttt

SEQ ID NO: 41939 - DNA, 308 bp, Oryza sativa
accgtgggggggcactgggtttggggctaactgtgttgtgtgtgggcgcgcgcaccgtgcgacatttaacgtctgcagaggtgccgcgcttgccgtgggccgccgccgcgtgctggctaactgggctcgcaacggagcctgtctgatctaatggcagacgatgaccgccgatgaaacgaagcgagaacaagttcactttgattccttctaatatgagtccaccgataggatagtcccttaaaagccatcttaactatagatctatgagtatttaaaggatctctcaactgccattacacatcaactat

SEQ ID NO: 41940 - DNA, 432 bp, Oryza sativa
agcttcttctacatctctcttctccgtgtgtctctgtacccaaagagaatctcatatagccaagtgttcattaaatatcaggcattatgtaaaccgtaaataagtatgatttatacataagaaaatagaacaagcgaacctgctaaaagatacgactagggagtaaaatccaacctataggtctcactttctttgatagtcattcgtacctacacattcaccggggcagtaagaaccacaggaatcccagacatgctggtaaggaagtcgatttagttctgcccccagcattaaactgtaatcggcctaacaccggaaatactcgcacaacagatattgtatacagaagagggaaaaaaacttttagacaaatattcagctctcctcaagggaaaagaaaagcaattgtgaaccgtatctattgttaatagt

SEQ ID NO: 41941 - DNA, 260 bp, Oryza sativa
ttgtttgggagcaacactgttgggtttgggtctggaactggcagcgatactccattctctccggtttggagtctatctatttattgggtaacgagtggacttgattggtggtgtaccaaaagagatatgaacaccgggataatgcgcctgcccaatcttgtaacatttgaaatcgtgaatcatttgggggaaatgtgatcagggtaatactatatggagaaaagttcaaaatatactataatgtgtcttattatataacc

SEQ ID NO: 41942 - DNA, 425 bp, Oryza sativa
agcttatgaacaaaatcatatcaatctaaatgtggttaactcgaccataattctaggaaatacatcagacatacaacaattcctaatatataacttgtatatgtagcggttgccaacgttgtgatcggaggcggtatataataataatcatagtttgagaactttctaaaatctccaaaactttataatttgtcagccccgggcatgaaaatatttcacttgaaaatgccttttagaaaaatgtaaaattgtattcaaagttcaaacaactttagaccagaaatttcgcaatttctgatttattggtgaccgatatttttttagctttccaaaattgttaaccctgcatatagtctattataccacttttggtttcagtttggttgttgttttcctccatttgcattagttatcccattggctac

SEQ ID NO: 41943 - DNA, 207 bp, Oryza sativa
cccgcgcgaggtgcctctaggatgacttgatggtcttttcaagctcctccgcgagatgttcgagaacccacgccatcctgttgaggtgcggagcgaggcctttcaaataggtggggggcaccgtcatctggtcttttcagaggacaccttgcctacccgcgcgctttatgcgggagaccgcattccatagcatgtctagcccaatct

SEQ ID NO: 41944 - DNA, 423 bp, Oryza sativa
  unsure (1)..(423): unsure at all n locations
agctntaggcatttcatttagattttctatatattaaatagattgngtccacaggtcagtctcaagccaatatgcgaaaaggcccctagtgtttcaagaaatcaacccgcagtcctgtgactgttctgtgtgtgaggtagttttttacaaactagtacctagagttttgattcttctcaacagaggtccttggattgagctgacacagaactagccatggccgagctcgttctcgagctcgccggtggcaaacggcagtagatctcggcgtgaaacctatggagaaaatgtaaaggggtttaaggcgaggctataggtggtattcttgcaagcattgttcatcggaattaatggcgacggctgtgcgagcggcggtggttctcgggtgacggtgcatgtggagctagagcattgatctagatg

SEQ ID NO: 41945 - DNA, 148 bp, Oryza sativa
aacctctattccggacaatgaaccatcttatgttactgcgcaatactcagaacctgttactctatggaacgtgcgacacttgtcaactaagaaccaaattagcctaaatatttacaagccagatgaaatacacacatgattatgtaca

SEQ ID NO: 41946 - DNA, 434 bp, Oryza sativa
  unsure (1)..(434): unsure at all n locations
agcttaacccccattaggaaaaattctagctactctcactttaatattatgcttcattctgattccacggttacaccgtctaacacaattagtctaccaactaaataaaccataaacaacacttaaattgcagggacctgttctaaacggagatttgcccttatccagctctgaataatcagccacaanaccactgaagagaaacctggcaaataccttttctttttattctgtccttttcactttgatacttacccgcacatgtttaatttgagagttgtcatgcttcagcgtcttctcacgcgttttttaaagataattttagctttcccgataccttcagatacaatattttccagtataaaccttaataccttcaagttctaggtaccaaaaatttgttactttctcaacgattataaaaaatgggttga

SEQ ID NO: 41947 - DNA, 374 bp, Oryza sativa
atggacccacatttcgcctactaaagacgatgttaaatactctcttcttgcgcagcacctttgaatctgtcttaaggcttcgacaccaaacccttgccatacctcagggtgtatccaatgccattgtagagaatccatcccttatctcgggatttttacaaggatgcgaataaaaccaaatttgaaagagtaaatataaactaccttgaacatccaaaattctgaaaataaaaatgactgaaatactgtaaattaatggaataagaaaaatgtacatgtcattaactgcaaacaatgactccataaacatgataacttaaacacaaaagtgctgctgtcacacattactactaattacttcaaccttgaccata

SEQ ID NO: 41948 - DNA, 349 bp, Oryza sativa
agaccggaacaggggatcgctactgggtgagagggcagagaattgccgcaccctaactttaattagtccaaacataccccttctaaaataacgggtaaataagagtgggacctcatggtacctcgtacttcaagggacctcatggtacatctctcaaagataggaaagatgcccgagagttaaagtgaacctaacagaagtgaaaagagctaaggagttcagcagctacccaacattggacgaacaaacagtgcatggttgggggtgggatttgaggagcggcaaaccatcaatgattgggagaatgggaaatactacgtaatagggacgtatgaacaccgaaacagaa

SEQ ID NO: 41949 - DNA, 410 bp, Oryza sativa
  unsure (1)..(410): unsure at all n locations
cttatatgtgaattgggtaattaacaatggatggacatcatgtctctctcttaatatatatcaggactaaacaaatatatttagtttagacctgctccttattaatcccttggttgctggccaacatgggaagtatggtgattctgcatgaaaggtcatacaaanatatcctatgcccctcaacatcataatatatttacaccccatggccctcgttcatttgctgtgttatngtgtcttatcgtgtaaacctgtcttcaactattgagacacaatactgtttatgtttcacaatttctgtacggtgaaacgaaacgttatctgattccgatgagttctatactctctacaagtgagtatcattccttgtgtaaaggcacatggtcatggtactaatactacatacttta

SEQ ID NO: 41950 - DNA, 431 bp, Oryza sativa
agcttcacattaaggcgtgtgtataccaaattattcttcttcggctgatttgacataattttttccaagcagctcggtatttatcttctccttcctacaggctccaaaattgcttgggactaagtgccaggttaaagcaataaactataaacgtcaaggataaaaaaaataacactcgcctgcagtcgaactaccgcttgccgagccctcttcttaaaatcaggatcatcgtcaaatcttttcttggatgccttgtagaagctctagaacaggtatgaagatataaccaactttatatctgagtcgtgcaaaataacagaaagatactctttctttatatatataatgaacaggaagatactctagagaagtatgtcattcagtacaaatgttatggcggcaatttcttattgccgctaaaaataattcac

SEQ ID NO: 41951 - DNA, 325 bp, Oryza sativa
tattgttctaactccacccccatggtttgtcgtctcgccaaaaccactccatctacgtgctgacccaagctgatttgttgttttactacacatattttctcttttttttgagaaaaatagaggaggttacttcataacggcatataaaaaaaagtttatagaaccattggtcttttttgatttattaagacaactcactgacaaaactatgtacctgccccttggctttgcacgaattactgaccgactatacttgttaactaagagcttgatttatccgaattgtattcagttgatgttctgtgagaaacaactctgatgacca

SEQ ID NO: 41952 - DNA, 426 bp, Oryza sativa
  unsure (1)..(426): unsure at all n locations
agctnaaggatcactgagatgcagttgtggcatatatgactggatcgcaagggcaagcacagatagaaaagaacaaagccaatgcagcttagaagaaataccatcaccgacttgggtcaggtggatatggaaaggcaatccctaagtgggacaagttggaagctgacttgatagcaaggggtatcgagccggccacggctaattggcctgagcgatcgacgaactagttctatgcacatggtggatcgctcaatccaggtgatggctccctcatattcggcgatgagattcgagatgcagcacgccgacttgcggatgcaattgaagcctctacgcaggggactttctggcccgacagagagaaggacgagctcaccctcgcactacagaatcctgagcatccatggcgaacgtgaagaaaaggcg

SEQ ID NO: 41953 - DNA, 478 bp, Oryza sativa
  unsure (1)..(478): unsure at all n locations
ctaagcttcacctattctanggtgatggaattaagatgaacggtggtgttattctctcaacgaaatgtgacactgctgaaaattcacatgatgatatgtgctatctttngatatgcaaacaagccttggtttctttatgtgataatgctagtttgataactcttgttgtactaaccttttgcacgagtatgaggatgtctttccagctaagataccctcatgattgccacccatgagagggatatagcatcatattgaatcgatgtcatgagcatcattgtctaaccgtgctgcttatcgaaccaacccagaggagactaatgaaattcatcggctagttcaagaccttttggaccgcgggatgtacgtaaagccttagccctgtgcaggtttgaatttcgaacctacaaagaatggtcttgcgaatgtgtgttgatcgagagccattattatattactattcgaatcatcatactat

SEQ ID NO: 41954 - DNA, 382 bp, Oryza sativa
gatagatgtggcgaagatgaggccaccggcatgatggattgactcacaagcggatgagggtgcaaagaagagcctccaagtgatagtgtatatatatcaatatagtgccttcccaaatatgcaaagagtactgacaagataaaccatgctgactactgacaaaaatggctaattaatatgctgagcttcaaactctctttgcattggaagagaaaagggagtatgtgcaaccagtatgtatcagtaataaaggagtgggtacaaaattaaatatcactttcattagctgcttaagcaatattttaccttgcaaaagaacagatcatataattgcgatgtttcaatgtgcttacaaagtaataatagactgcaataccaaata

SEQ ID NO: 41955 - DNA, 319 bp, Oryza sativa
caccggaagccctacctatctggctttttagaagccacctaaaaagatattcccagtcacacttgttctaactaagaggataatcgtgcccccaggcagttccaccataagggaacacttctctaccgataccgattctccagacgcctatgcaagatgccgacttaaaacgagaacaaaccagagaggtttctcctataggggccttagcataaacacttggttagaacaaacgtgcaggaatacttaaagaaaattactttatattaaacagataagctaaatacggttttccttttgggaaacccgaaagggagta

SEQ ID NO: 41956 - DNA, 386 bp, Oryza sativa
tctatgtttctcaacatatcttcttctaagataattatcagttgatggaaattcattgaaatctcctagttaaggagcaccaaagactatatgaagtatctctgtcgaatcagcattcctcttatgacgatggaatggactacataaacagaaattgctaagtacccatacggagtgatatgagctaacatatatattaaccacatatatttctgcaaatgagtacagctgctcctgagtatatatgcagaccacattaagatcattctacggttaaagtaacttgacataatatctcgaactatgatgcagagcaaaatcatgccatggtcagctgtttaacacatatctatgatacatgaacaatgttcatcttttatcatctc

SEQ ID NO: 41957 - DNA, 350 bp, Oryza sativa
  unsure (1)..(350): unsure at all n locations
agctttgnaagtagcagaggaggtattaatttattttttattacacacncaaagatagagttgggtgactgcttgtctgaaacttctatgtagaatttttttctctaaaaacacgccgctcgctgagattaaatctcagtaaaaggctcatagatatttgttttctatggaccatctatctaggaatcttttcattatctggactttatcaattcatctgatttgccctaccttggcgctccggcttgctctttaagaaatttggtggattaatcaacaccaagtctgaaagccattatggtggcagacattaagctatctctgggaacagcacatgtatatatattatc

SEQ ID NO: 41958 - DNA, 145 bp, Oryza sativa
gggactgaatacaaattgttcatattgtcgggtttcgagtatatatacacacaacgatgtgtcctatctgaggtgcgttctaaaaaagccaataaagccgccgggcagatacctgttaaatttgccagacttgcgtctctgactt

SEQ ID NO: 41959 - DNA, 362 bp, Oryza sativa
tttttttccataacacctcatgtcatgggtactaaggccccacgaaaaaaaacagggagcctcttttaaaaaagagaaactggtgaatgaataaccaccttaccaaatttaacgggcataaaaatatgacgcctaaacataagatagaaactccaattttatacacgaatggaatcgaaaaacaagaccatgacgtctcaccgcttatacacaaatgacgctcgagctaatcagaaatttccggactgccttcataaataaaaagctagcaattggcgaacaaccacccgcgcggaaatgggagaatgagacaacaaccccgaccgcagagtgttgcggtggtgaaaccgacatgaaaaatc

SEQ ID NO: 41960 - DNA, 385 bp, Oryza sativa
tttcaaaattagaccctatccaaatttaactccacttttcatacgcccaccatccctctgcatatcgaatcatcaccaccacatgcgttactttttagcctaagtatcccgtatgatctcctaatcgtttgatcatcaacttctcccaaggtgacttccgatccatcaccggcaacactctcccgaggcattaagacacaactgcacatgaataaacaagaaacatatctgagcacaagtcctttcccaacttaactcaacattagcatataacaggatagcataaattagaattcataaacatgaaataatcacgagtgttcaaagaaacaacccgaaactaactccaatcaggagccagtcgatcagatcgatgggctagccg

SEQ ID NO: 41961 - DNA, 168 bp, Oryza sativa
  unsure (1)..(168): unsure at all n locations
acgtgtggcctcttgctctggcgagctaccgtgttacgncacccatggaattgatttctctaagcaatccctgacactctcggacttatcgtattgagctataataaccatcagggtctgggagcgctgttgtcagcgccacaactctgatctgatcttgctaaattt

SEQ ID NO: 41962 - DNA, 435 bp, Oryza sativa
  unsure (1)..(435): unsure at all n locations
agcttcatgacagtcatgccaagctccgctaactcattgaacatganggggtcaagggcaaagtacagagccctcatatagatcgtcccataagttgtatcatggcgcactttggtacgaagaaacgtggtcattacgaggaacgcggtaagagttaactgcgatgatgtaaaattcagattggtgtcaggtaatcttcatctcaatattaaaaagaagaccaagccataggtctgaacttacattggcagctttaaagatgtacacaaacgagttcctcttcatgagtagaagctctctatcaatattggctctgagcaacgccatccagctaactccaaacttggaggtagcaagagaagcagggtggctcctgctcctatcaaatggctccgaaagttcattctgaatacactgttccacgtggaaggaacc

SEQ ID NO: 41963 - DNA, 199 bp, Oryza sativa
cgataccggcagaaaccctaaagcgagagacaactgatagaagctaatcgagatagttaagcttgattaactaagacatatgatatcaatggtcatgatacaacgactaatatatctaaagcgatataatagccctaatagcacacgccatctagacagattacctcttgtggatagaactcaccgaaacaagaaaagt

SEQ ID NO: 41964 - DNA, 334 bp, Oryza sativa
tgggaagtaatactctcattctgatgcccccatgttaagtaatactcaaaaccagttgccatcataagccaacttgcttgatgcgaggtaataccctaatccacttgtgtcgatgaatccactgtcttgcagggaaggaataccctaaaccccgtgtatgtgtatcggatctatgatccgcatggagtggaaaataagtaagcacttagtgtggaaataaatcaacctccccctataggacctctgcctcttccttaacgataacggggctacatagaaagtattaattgatagaactaaagaccctctctactaaaagatatctatgacaccc

SEQ ID NO: 41965 - DNA, 431 bp, Oryza sativa
agctttgcggtcatccacttctcttggtgttgtctgtcattattgatcagtttcgaccgtcaatattaccaaaatagaagagaactagtgatgcttgcaatgcatatatctgttagaataataatattccactagtattaggtataataaccttttgcagagaatgacaataaagtggaggagaatcgacattaacttagacgataaatcaatcggacgatatcaaaaaccagacttatgtatgaatgggccaagaactcaaaattgacacgacacactgggccaaaattcacaagtctatggagaggaacaccagaggaggtcactagccaacttgtgggctggttgggccagcccaaggttcgggttcgaccgaaccaatgccaacgctgatggatgcagggtttcgagggaacggtagagattaactc

SEQ ID NO: 41966 - DNA, 305 bp, Oryza sativa
tatcagtggcatgaaatatttctttccccctttagtcaacacgccattcatttctcacaaatcggaatgaacaagttctattggtgccaaatatttcgcctcatatgccttgtgaggcttgcgaggttgtttctattgaactcaagtatgtcacttacagcctttgactaaagtgaattttggaattaaactcatgttggctaagcatgtcatacaaccacaattcacatgaccaagttgcgaatgccacacattggactcatcatcatcatcgcttacatggttcacaactttattacacatat

SEQ ID NO: 41967 - DNA, 333 bp, Oryza sativa
gcacgaccacactccgagtgtgagaggcgacgacggagagccgaacccaccccggcgagctagaacaccaccgccccctccacgccaaagaactaagcggagggaggcgctcgagaggggcgaaagatccgcgacaccaccgaacgcggatgatggaaaagaacggcgagatggggagcagcgacttctcgtctacggcgaaggcagcacgccccaaggcgcgctccaagctgcgggcgcgctcttacgccaccacgctgtcagccctgacccggagactccaacccaacgagggcgggacgacgaggccaaaatggtcatgacggcgcggca

SEQ ID NO: 41968 - DNA, 392 bp, Oryza sativa
  unsure (1)..(392): unsure at all n locations
actttcttcttggggtgcggattcctgccgcgaaaaaagggctcgctttgtgtgtgtgtcagtggcacaagcacactgctacccgggcacgcatgaaagatattgggccctgtacgtatgcctcgatttacacaacccaccgcaacagccgcattcgctgccgccgcaaataagcagcagaattgctgtctatcagatgcggccaaacaggcctataattcaacttctggtntctaaaaacgctctttaccgctataaaccgtacacacgcacaatctcttcatgagtagcaacacccggctgattttaattggtgttcgggacttaactttagtctcatatttaaacactaaattagagtatcggtgtttgcggcacgaccatcctacggc

SEQ ID NO: 41969 - DNA, 424 bp, Oryza sativa
  unsure (1)..(424): unsure at all n locations
ncaagctgntggattgtgcgtgttagttcttgattattgctgaacattcgagtgatacttgagaagcttacgggagagataagtgtttttctatcaaaatttggtacctcctcgatcgttaaaatattgtttcccctaaaaagcaaggagcagttggtgcacttggttatttcgataaattatatattggtaaagaccgcatttgtatttttttcacatttctcttgtctagacaatcttgtgttaagttttgggtgcatatttgttgatacatgttacttgcaatgttctataaaacagtactctccctctttccgtagataattgttggacgtgtttaaaaaggaacttattaagacaagactttgcctattgatattgcgtataatctattgaatagtattaaaaaagctgccaaaaatct

SEQ ID NO: 41970 - DNA, 376 bp, Oryza sativa
acgggatcaacatattaatgttcataaattgacaaaactactaattatgtcatagactgacaaaagaacttattctattacaatgatccatacatcattcatatgccataacagtgacccatacaacgacatactgagtagatagtttgaacacaagatctgttttgataaaatcggtggattactgaggattatgtaataagtagcttctcttgctgaagcactgtcaaaacaagcagccaaaatgagcatcttcgatacctgcgtcatgaattggtcataaaaaacaggagcatgattattatattaaaattgcagcacataaactggaagtaaacaactaagatgcagctagatgaagctatactatcaaagc

SEQ ID NO: 41971 - DNA, 427 bp, Oryza sativa
agcttccactaaacctgcctaccggcgtcacaaattcagtttggcaagtacaaaatcttggatcaagcaacgcggccaaccaagataaggcaaaaacccgactgctcttcccaaaatatggtgatcgtgcagccactgccccgtgtagagggagcttctatcggtgacaccattgttgtcacctttcgttagcatctgcctcgcgccgccgtcgtgtcgctcgtggagctcgatgacacgatgaacgatggggacggggtggagttccgtgctgaagaagacgatgtccccggcgcggatgttgtcgtcgccgtcgccgtcgttgcgccgctcccgtacgatgagcatgtcgccccgcccgatccctggctccatgctgccggagacgaccaccgtcgccgtggtccccgtcgccttccccaatagc

SEQ ID NO: 41972 - DNA, 399 bp, Oryza sativa
gtagccagctgcagcacgaactccaaaacgttatgtgtgtataacatgtggcaccaaatattaataatatacttcctccgtttcatattataagactttctagcattgtatgtattcgtatatatgttaatgaatctagatatatacgtatgcctagattcattaacatctatatgaatgtgggcaatgctagaaaatcttataacctgaaatagagatagtagtatatatttgtaaataactatggtataaattagctactttctccgtctcatattataagagattctagcattgtccatatatatatatatatgtatatgtatctactcatccatacgtcgctatatatatgtacatatatatatatatctgcatctatatgtgctgctgatattg

SEQ ID NO: 41973 - DNA, 340 bp, Oryza sativa
atatatgaccagcgtccccaacaagtagcaacatatattgatcaagtttaggcaaccctatactcccaactaatattgcggctcgtaacaacatggattgataacattttaactccgaccaattttgttgccaaaagttcgaacacacatacactgaacaacgtgaagtttcgacctcgcttggatggaaaagtaggactcaacttctgcagcgactgaccctgcctctttagtatcaatcagagatgcttctaccacgatcgacctccgttagagccatctcagacctcttcggcgcgggcacaaaggcgcttacaccagctaggactccttccccatg

SEQ ID NO: 41974 - DNA, 422 bp, Oryza sativa
  unsure (1)..(422): unsure at all n locations
agcatgcagcttatgacaccaattttaaatattgtgaatttgatncataacgtgatggagataattgtggttccttgcagatcattagatattccttctttggcatgaaggacgcattctgatttgctccttcctggctcttatggctgaggttatgaaaaaagatatatcattatttaagacaaatttagagggaacgaatttctttctctttcataactttttttcttaaacctggtgctgattttgtacaggtatatcacctttatggtattgtatcctactggtatcagcagtgaggtcggtttaatctacattgccttgccttacatgaaggtaacaagaatgaacttcagaaatgaagaactccacgttgttcattgcataatgcataatgcgtaattcaactgctcctttcttgt

SEQ ID NO: 41975 - DNA, 385 bp, Oryza sativa
  unsure (1)..(385): unsure at all n locations
tgcttcatgaattgcacactagaattngacagaatatatgtatactgccactttttcaatgcagtttgccatctggacccataaacgcacgtgatgtactctgcttgcatatagatgttttacgaaaccaatacaattttggaatatgctaagcaataatcgactgatttgtatagaacatctgagttctgaaagagtaatgtggattagatgataaaagttggcatattgtggaaccatgatatgctgaactaaattattntttctatggaatataaatatttgtatgccaatggttgattaaggaaaaacaaatgcactactgtaagatcttattatcaaatgtttggttataaattataagatatgggggtttatttctagc

SEQ ID NO: 41976 - DNA, 424 bp, Oryza sativa
gcttgtcgggggcatacacatggctgcgcctatctttgctagtgattgcacgattgattagtttgttcctttggctgagtttgtgatttaattcctctcttgaattatgatggatttgaagaattgcactattgcagtgtttgattcaactcaattctctgatgattgtggaaagggaatctctccttttattttctctccctcattctctctctctctgctatttcttcagcaagcctgatgaagagggagagcgccggctccggcacggtaaggcacgggccggtgcgacgccttcgctgggagcacattcttgagcaggggccaaggcaggcacaacgagtcaccgctccgctgccccatctggaaagagagagggagagaggggcttacatgtggggcttcgcgacgtggacggcagcca

SEQ ID NO: 41977 - DNA, 287 bp, Oryza sativa
tctatacgtcccctatcctaatcaagcgggaaattccggctaacaattaaccatctatttattgaacttttactagtaataattgcatatttattaaatggataaacataaataatattttatgagtaatttattattttttaaacttttcataaattttttaaataaaaacagaagatccaacgttagatataaaaactcacaactggatgaaacggtgaggttaaactcgctacctgttcggaagactgacctggcagagggaaataacggataccccccgtttt

SEQ ID NO: 41978 - DNA, 421 bp, Oryza sativa
  unsure (1)..(421): unsure at all n locations
actacactcctcacaagacttcaaatgtgacaacaccagctagcgactacacagactaccttccgagtggatggatttccgaaacactggtgaagctttccaaaagtagaatcattatatgaaagcttataatgaacctatgcagatctataaccaacaatatagtttttgaagtatatttgtgcgtacatttgattcgtttatattaaacccgcttggctaaaataatatcttctttaaaagaacgtagtacctctcatttcaggtcaccaagtgtgcacggagcaaacgaaatgttgttcatgtaaaactaacatggtggtccgcgcagatacacggctagcatcattatattttctcttatataaangacaatatgctctcttattatattattcaaatatattaaaatgacatcata

SEQ ID NO: 41979 - DNA, 429 bp, Oryza sativa
agcttatcctattatcggctttatgcttcatcttttttacaagaaggtactcacgaagtcgaactcaatattctttcaaatttatatccgctaggaacgttttgtttgacactccgtcttacatgtgacatgtggtaccctataaagtatgaacggtcatgatatcagagctggtatctggtacttacagatatcagttctagtatttgggttttaaatttggcactcacatgtaccatatcttatacatacatatataaaaatggtttgctgcatggtaccggattgatgggtgggtgggcaacaaaagcagcatatatgcaggttcgttgtggttacaaccattgtggagaaaaatcgggatggatggagatagattggttatatagatggaggactccttaatgtaattctaacaaagcttatcta

SEQ ID NO: 41980 - DNA, 51 bp, Oryza sativa
  unsure (1)..(51): unsure at all n locations
ctaagcttagcatntatgcagacctactanaagacgtgttttggtgttttt

SEQ ID NO: 41981 - DNA, 54 bp, Oryza sativa
ttataataactgcagctgctgagtaactatatcgaaggtaagaagattgttgtt

SEQ ID NO: 41982 - DNA, 331 bp, Oryza sativa
ctttgtaatttataaataaatttctctgcgaaatcataactacataataacagaataaccactgggaaaatgtttgttgaactagtattataataatctgtgctaaagagccttggaggataatgtgtcttggatcttatatgcagatgataagttcatctttcacttgtaaatagtgtttgaagtctaatccatcatgttcatccatggaaaagaaatcaccatatattacttcctccgacattattgactttattgtgtcaaacttttaaaacttcgactatcaatagctctcaagatatttagttcgacaacgtaaaaatcatatggg

SEQ ID NO: 41983 - DNA, 421 bp, Oryza sativa
agcttgctcgggctggaggaggaataatttgtggtgggactctagtcccgggtggtgttatgaaccggggctaaagatcgccgggatctttagtcccggttggtaacactcaccgggacttaagtccttccctttttttttctttttcagtccgagctagttttaataatttcttgtttatttctaaagtatctttggtttcttttctctctattttctattatatattgtatctactgatttcataatatttatacttttatcttattactttagtgctggaattatctttccttaccttgctcttttaaattttcttatcatataaatttattcttttgaatatcttatcttttgtctgtcatcaaacagtctttaccttattttctaattacatttcttacctcttgaatactctttc

SEQ ID NO: 41984 - DNA, 333 bp, Oryza sativa
  unsure (1)..(333): unsure at all n locations
cggtatactaaactggcagttgtggtttgacacaataagttataacttttatttttaagcaaaatcacgcttctaatgaattatcatttggccatcattttctgagatatgcgccacataaactgatattcatgtagcttctattccaaagccatatctaaaattgatgtgctgtttactaagtttttttatatcgatatactttacaagatggattttactgaaatccataaaaattcgcatggttgagttgacattaattctaattcgactactgcgacaggntaaactgaataaatcggataacatgagtgcactagtcatcccgaactg

SEQ ID NO: 41985 - DNA, 422 bp, Oryza sativa
cagcagcaagccctatgacccaaaattgctatagttactcacggagccacatgctggtaaggacacagcaggttgccaaataatttttcttatttgggcaagtagatgacacgacactcccaaaagatgaaaaagaagcaatagacaacagccgagagagctggtaactaatccctcgttaatgcctcagataaacctcgttagtaagagatattcatattgaaatcaaataaagaagaaaatagttaacacatttctgaaatagagactattcgtatgccacttgaccaaaaatggtcctgctgctcagaaactttaatgaaaccacagtgagtccattaaaaataacctttaagcaagctccccaaccgtgtacaagagggcttaggtgaaatagatcaccttttattttccatcccttc

SEQ ID NO: 41986 - DNA, 420 bp, Oryza sativa
  unsure (1)..(420): unsure at all n locations
agctntaattgcgttgggtcatattatttgtttggtcatgattatggggtgtgaccttaaagatgctgctgtatgaactagatctgtcaaacagaagtgtagggactttctatactgttgtcacagctccgttgtttggaaaaatctatgttgagtagtgctcttcctgttttatcttttgctattcgatcatatggctctattcatgattgacctgcatgatttgccaggataaacaagtggtacactggtgcatgcatcgnattttctcttacgtatttgtattttatgttaattgagaatatctagctagttcctatgctatgcacttctgcatatcacttggctcattggctgtgcagagcaattgttcatcttttgtcttttaccattgctcactgttgaagtgttccctccatc

SEQ ID NO: 41987 - DNA, 252 bp, Oryza sativa
actaactcgtggactctgctttcacctcttgcatgtgagtggtctgttacattaaacctcatgtcttctgttgtaacgttgcaagtttgctttgatagtctccacaactatcacatttggatgtgatctatcagaagatcttgtcaaactcatcgatgatgagccgtgcttggtgattctccatcctctccaatatttggtcttgcttctggaatgtaacacctttttattgtaatatctcacgatgaacat

SEQ ID NO: 41988 - DNA, 427 bp, Oryza sativa
cctgcggcatggcagcatggcttgaagacgcgtacctatgcattaaatcagagagcatatgtttgcaactgtatgtggatgggcaattaccatatgttggcccacttcagttccaatcccaactatgtgagcgacggatccgatttggatgaaattaagcaaccgttattaggcagccaatgcgatggcaccgctacaaggtgtcatttatggtggacccagcaaataagaaaattttgcaacgtttgctaacactactttgatccattattggtcatccctccacccatcgaatgaccttcacttcttacaccaccgtcggtgcattcgtcctaatgtcacttcggcaataatacgtggtcttagcgtcagaatcccttatcgtatattcacgaacacaactttaaaaacatatgatgtgaaaatg

SEQ ID NO: 41989 - DNA, 417 bp, Oryza sativa
cgctcaaatccttgctgataaaatgttctttgaaaacataccaactagctctggaagaagccgagaagaaattattctcttcgaaaaaggattttgatcctgccgtttataaaagcctcaaagaaaagctagatgagaccaatttggagatttcatctatgcagaaaaagattgaagatgctcgagctcaagatttggagtctattgctactgtcaccacagagttggatgatgctaatgaaatgttactgaaagtggcagaggaggaaagttcttttcggaggttagtagaatcacttaaacaaaagttagaagctgtttacgaggagcatgatcaattgaaacagaacgatacagatactgaatccatagttggagacctacatgtgaagcttcagaaatgcacatctgagcttg

SEQ ID NO: 41990 - DNA, 319 bp, Oryza sativa
  unsure (1)..(319): unsure at all n locations
tttttgtatatacccacatccaaattggtggtagttgttgtggaaaaatacatttctcgaacccatctcgttcaaatcttgaagcaccacaattcttctacctggcgcgccactgtcgacgtttgatatcgcgattccgggattttgatataanggggagtcgtggtacccaggtatatgcgagatcaaggtacaagagatggatacagggattttgatacaggttcgggcccctgaattatcaggtaataaccctactcctgttggccgaagcccggccgtgctcttatataccataatcacaccagtacaatatttt

SEQ ID NO: 41991 - DNA, 430 bp, Oryza sativa
cgctagcttctacattggaccatgtcctacctacttttcgagttctccatgaaggaccttggctcacttcaccacttcttgagcggtacagttgacatgcttccctcaagcctacttttccaccagtggcagtacagatctgacatactcgaccgtgtaggcatggccgactgtcaaccgtgtagcacgcctgttgacacctcttccaagatgtcagccacagatggagcaccaattgctgacccaactgacttcccgagcttaacatgtgccctacagtacctcacctttcagccaccagatattgcttatgccgttcaacacgtgtctcttcacatgcacgatcctcttgagcctcatcttactgggcttcagaggattttgcggatgtttggggcacgttggatttatgattgcacattcagaagtc

SEQ ID NO: 41992 - DNA, 398 bp, Oryza sativa
  unsure (1)..(398): unsure at all n locations
gttattcgagactcattacatgcatatngttcttatatattccagagctcatctcctaaatttatacccactnttattgctttcacgcaatctccttcgtaacaatggtctatttcttcatttgtctttattttggtctcattcattacgaaatgttgataatcattcttntaaagatngttttccatactttaccataccatgaagaataaaaacccattggttgttcaatatgttgcaagagatcatgtatgctccatagctctacaattgcacattctaagtccaaactacatatggatctatcctacangcgatctgacacctgccctatgtcctacaaggcggtcaccacccagtggagagtaatatacttttgatgcctgaatgtgcaacat

SEQ ID NO: 41993 - DNA, 431 bp, Oryza sativa
  unsure (1)..(431): unsure at all n locations
gcaagctntctaccttcatgctgacaactttgatcttatatcgttagntaattttcctcatatatatcttttctacctctatgctgacaaccccttgtatggccagcatgatcatttgcctcaatcaaaacatatctgggatgtggagctggagctgtctcctatacctgcgagcattaggccacaagtcaagaactggtatgaccggaatttccttcacgcagaacctactgtgaacggggagtctggtatcagcaacaaagaacctgctagccttatggcacaagtcgaggagaagaaaatcgagctgttccatctgctatcgcagctggaaatagaggtgagaactccaacctgaagaccaaaggatactctagcagtttccgcataccgtgaacttaagcacctagttcatggttacgggtaagtaa

SEQ ID NO: 41994 - DNA, 159 bp, Oryza sativa
tatttggttacacgtttacacataaatatgtgtgtgtgtatgtgtatgtaagggcccggcaatatggatgtgagttctctgctcgttggggcttctgacctacgtgtcaacttattagttaatcattacgacgaatcttgggcgagtggctgactcatc

SEQ ID NO: 41995 - DNA, 427 bp, Oryza sativa
  unsure (1)..(427): unsure at all n locations
agctcgaaacttgagatgaatgcagaatactgattagaaaaaggtcnnnncnnccatactatagacgtgctctccttgagaaatgggaacatctatacaaggtgaaaaactgttacggagttctttcatgattataaaatttgtatcacttatagtgcgttacgagaatctaatgagaacacaatgactagatttttcagagggcttaatttcaatattcaggctgggcttgttaatgtgacatataatcatataggccaatagttcatgcttgcttgcattgttgagcgcacaattttggagaatccatcggagcaacaagatatgcttgtgcctcctatcactgatgatctgcacgaagatcacaaaagtctcctaaatgagaagaacgatatgtttgagatgtcacttccatcactcgcgaatg

SEQ ID NO: 41996 - DNA, 279 bp, Oryza sativa
actttctcctaggcgccaagctggtatctgtctccatgcatacagaaagaaaggaacacggtgcgactcggttgggcatacacgctccatcttaagcgcgcctgcgtttgcgccgagcatgatgtaattaggccggcctcacttgcacatcctcgcgcctgacctcgtcaccgctttcggctggggaagctaagccgtaggagaacttaatgcgcttgtcttctgagactcacgaactgtacaacgcatactaatcggtactcctgcgttcagtgatct

SEQ ID NO: 41997 - DNA, 426 bp, Oryza sativa
ctgcaagcttcagaaaagatggtggatctggatggtcttatgattttctctagcagcgatcgtgccgaaagcacgaatcctgccaacattctcgcttcccttgtgaaagaagcacaggagcttctggagaagaagaggcaggcacaaactacacccgctccatcaatggagaccagctgattgagtaaacagactatcaacacgatcgtatgctgatctgcagactgttggcagtaatacctggaaactgacaccgtacaatccctgaaaactgtctctgtaatctgtatgtgtgctgaaacttatctatcttggcaattgtcccatctatttcaaaaactttcaagttgaactttacaacaaactgttgagctttattggcagtgcggataataaccttttggaacacgagataatacctatctg

SEQ ID NO: 41998 - DNA, 273 bp, Oryza sativa
  unsure (1)..(273): unsure at all n locations
cttgaaatatggtttaatttttgcatatacattaccaactttaacttgctgtatgttggttcaatttggtttttttttggatctgagagaatacaccgtataggacattangctggttcggtttgatgcctaaaagagtctcaccagattttggccatagacacaaattttggtatggccatagtttggaaatgttaaattgtgtttggttagtagccaaattttggctaaaccaaatttggttgtgtgccttcagatggctacgccattctt

SEQ ID NO: 41999 - DNA, 406 bp, Oryza sativa
  unsure (1)..(406): unsure at all n locations
agctntntatcaactcaataccttggtgttctgcccaccagtacctgcacaaagtcataacaaacagattagaaagtaaaagcgctttgaataaatggagacaactgaatctaggatcttatgggatacaaactcgaataggctaccgatcccaatcataactgtcgcgtaacctctggctttacaagatgaaaacaattcagctttcgagatgacgggtgaatcttctgaaaaaatgttcagaacggctaccaatcccaatcataaccgtgaaccgtcactcaacctccggctatacaagaaggaaacaaatgatcttcaccgttgaccggtgcatatacgtgttcggaacagctatcaattcacaaatcccaatcataacccttgcttagcccccggctttaca

SEQ ID NO: 42000 - DNA, 402 bp, Oryza sativa
acctataaactcagctctgactactctccgtcaaaaaagacaaacttgtttcgaacaacattgacgtcgtttattaaaaaatttgatacaattaaaagacagccgcataaatataatcagtttatatctaacacaccatatacaattataaaaatttcatttagacggacagcaaggtagacacgaaacccagtgttgactttttttagacgggggagatgtgcctttcttttcttggttaaagctataaaataattaacaccttagttgctggcaattgcaaaccgcatgatatggtagcttttggctacgccacctacagaggccgatcttgtaggggataactttcttcttgacagattcatacacatctctgtgtttaacataccctgcactgatact

SEQ ID NO: 42001 - DNA, 379 bp, Oryza sativa
cagctatccagaagagagcgaggtcatatataattccgcatggcacagtatctattaatatggaatagaccgttagttcccctacatctttatgagagcgtgcttagtgtcctataaagaccttaatcttctcctttcatctttaggaaagatctttttgccgacaggactgttcaactaaggctataaaatatgacactctgggtgtatgcaatccatctctacgaccaatacaattcggagccatcgccaccttctaccttttctactttattttatcggacggcgggaactggaacttgatgcggtgctgcatccgggctcgatctccggctaacgggtaagtccaaagctccaccagcccaggcaattgtctcgt

SEQ ID NO: 42002 - DNA, 407 bp, Oryza sativa
  unsure (1)..(407): unsure at all n locations
agcttctcaatggagagagcctcgtttattctctngcaatataatnttatcagtaagatatatgagtctttgctgtgactatggagaacggcaacctagctgctgtctataataggaagatgtgggggcagaatgcttgtgcttacttgcattcctgatgatctcgattatgcttacattttggtcgctcggtgcagctagtagtctcgcttctactctcttgccttatattttcccaactgggtagagcaatcacaatcgaaaagatgctgcaacggtaatgacagactctagctaatatgctttcgtataaatgctgcatgctttccgcatttcattgagcagtctattgatcatggctcttaccataactagaccgttctgggtgcgggaattttaagacatca

SEQ ID NO: 42003 - DNA, 359 bp, Oryza sativa
  unsure (1)..(359): unsure at all n locations
tntcctcctcttcttcagacagcatcgcttcntcttctttatcgacatcatcgncacgtggaacaggtggacacctgacactctctctcctgctaccgtcgacgccgcctctcctgtgtttccctccgcacgccttcctcctgaatacgggcactgtaggtgacagcggtggccgctgggtcatgtaaagtgagcaccaagcgtgtgccctctgcctccctcctggccacaggcacccggcgtcttctgtgaatgccacaaccgctgggttggcgaggacgaacacaatgctctggaagaacctgaatctggactgcaatgcaacgcgtcgcccgaaatcgtgtcaatgcaagtggagc

SEQ ID NO: 42004 - DNA, 419 bp, Oryza sativa
agcttatgcggatgatgtagtcgtcaatactatgcataaagatgatttgatcaccgacctagaagaaacctttggagcatccgcgctttcaggatgaaattaaaccctgaaaagagcatcttcggagcaccgtcagggaagctgcttggatttatggtgtctcataaaggcatacaagccaacccggagaaaatcaatgccatcctcaacatgaaaccgccaagttctcataaagaacttcaaaagctgattggttgcatggcggcactcagccggttcgtttcgcgactcggcgagcgggggatgcccttcttcaagctattgaagaaaacagacaatatccagtggggacctgaagcccaatatgcctttgaagacttcaaaaaactcctcactactccaccggtcctagcttcacc

SEQ ID NO: 42005 - DNA, 390 bp, Oryza sativa
cggacacttgatactcagctatgggttacgcgcgctgagtgaattgctatataataaccctgactgggacagattaatgctaccaacagcattgttctaatattatcccacacgattgtatgcactatgtatagctaacgtgtgctcaccttaaatgtacatgcgacctgcaattctagctcgtttgcgtagtattcagcttctcgttaggacattaaaccatcaataagatttattcgtcttcaaagaaaatatttcaatcatgtgaaagatataattgcactgcatctgcgcatgcacgtcctttatgatgtgatagagcactatacaaatgtacatctctacaaagcttataagattaattgaagaaatatgtcataataatgtgtg

SEQ ID NO: 42006 - DNA, 381 bp, Oryza sativa
cgatacttctaaccacattccctcttctatgtatacccgaacatggctgctgatatctacagatcctactagaacttgggcttctaatcacataagaaacctaccaaaaaaggaaacaacatcctcatacaattccaaactccattcttaccaaacttttcaatccaattgactacattttccatacgcagacaacaccatgttaatgcagggtttaacttatcgatttgaccgattgatcacaggtcaccgatagaccaaaatttcataaaaattgaaaaagactagttaaattctaacaaaaattaccaaaattcatgaaaaaattaaaaattttggcctaaataatattgtatcggagtggtccgaaatgaccaaaat

SEQ ID NO: 42007 - DNA, 301 bp, Oryza sativa
  unsure (1)..(301): unsure at all n locations
tctccaaatcactcctacactctcatgtactcttcaatctcacaagagaggctctagatatgagtggaggaagcaaagggaccttgtgagaggctataacaacctatgggatgaaagaactgaagtggaatggccaaaaaatgagctgggtgcgatctagatatatataacggctatgtgacgtcatctaaccgttactcacattnttgaactggaggaagtccggaagttcctgaccctctgaactttcggccaacacttatgcaaatttcattcaatgcacggtccggaagtgtcattt

SEQ ID NO: 42008 - DNA, 424 bp, Oryza sativa
  unsure (1)..(424): unsure at all n locations
agctngtcctaaacttaagccttccctgttataagatgctccttgtacagtagctggaacccaattgagattcctgtgcttaaccattttcaggcttcaagattccatggctcacgacatggtagtagatctgaaagcaggtgtacttcaagcatcggccacatcttgttttagagtataacacccatgagccaacttgttgctccctgttctgaacatgcagccaagcagagctcacatgacgagagagagaagaaaaaaaacgcacacttttctcgtgtgagctaaagctttcgctggtgcaggtttcttttgtttgtgggactatgcatcatgtgatgaacaccgaacacaccgtaagtctctctctctctccccttttgagttctctgtacatgtgctagtttctacagtgaattatgtg

SEQ ID NO: 42009 - DNA, 456 bp, Oryza sativa
catggtgtatctatatatatgtgctatttgatgctctgccggctcgaaaactgctagtatatctcatcttgccaaaaaaaataatgttgacattctaaatattcaaacatacaataagtaattcatccatatttctaccccaactaatcacaaaatctcttgttctgatcagaatgtcataattttttcaagatgttataatctactacttataaattattgctttgggacgtgtagatagtactccctccttacaaaaatctaagatctatttcttttctatcaaaaccaagaagctattaactcactcaccatgtggcttaaccaacgaacatgcaaccaattagtactataatagcctttctgtttttgatcaacaacttatattaacacatggtgactgcgaatatgactcaaaatttactgaaaccactaatgaatagtttcagatttttg

SEQ ID NO: 42010 - DNA, 399 bp, Oryza sativa
  unsure (1)..(399): unsure at all n locations
caacctcactgcctactactatctttctttgctnttgncgacatgaagacacataggcaatttatttaagctgagctgcgaacctatggcggcattaacgtgcttaaatagtacttactccgaaattcctccgtttatattaaaaactctgcgcattggccacatttatatatatgttgataaatttagacatatatgggggtctaaactcattaacatatatataaatatggacaattctagaaagtcttataacctgaaaccgagatagtgctcacttaatcactcacttaccccaccctcgacagtaattactagctctctaacttgtcgccggatgacaaccaaaagcctaattaattaattagtaaataactacaccaggattactgattggtt

SEQ ID NO: 42011 - DNA, 394 bp, Oryza sativa
  unsure (1)..(394): unsure at all n locations
ntagattattagatatggatagctgtttattttgtgtgttatgctagngagcaaaaacaaaactaatatgaaacatatggngcatatgtcagatccaaattcaacatctctttttttttacctgtgtttttaataacgatttaaaaaaaatcaattatgtaaaataaacaacggtgcaaacccccctcaaaatcaactccaaaattaagattcaaaattcaatttttggttatggatcatataagccaagaagaaaaagaagaaagaaagaagtacaccaatgttcagagaaagagaaggtgaagatatgcactgacaaaagaaggcaaaggaaaagccatcgaaattgcaatcatgcaggagcaactctaaaaaaggggttgatgctgcaagt

SEQ ID NO: 42012 - DNA, 330 bp, Oryza sativa
  unsure (1)..(330): unsure at all n locations
ntgcttctcaagcacagtacagggcaacatattattaccattaagttaacgggcacaggtgtctctcttccgtttatttctgtttcttggagacctggtatcgatcagtattcagtaccgatgcagttgcgagttcctggtcctcatcctctttaagtgatgaacagtccgtccttgtataagagctatttcctcagagcaggttagtacttcttagctattctgcttgtgagttgtgaatgctagtagtactagcagctttgtgcaccttgcgaattgcgatcttcttgagctcgcagcttgtgggtagtgcagctagatacagaggac

SEQ ID NO: 42013 - DNA, 406 bp, Oryza sativa
  unsure (1)..(406): unsure at all n locations
acaagtgtgtacttttgcactttagctcactgantgattgattgattattctactctagcttaagttctccagtaagttggtaccaccaaatggatcttcaagatttaccaattgttcaggccctttnttttattcgatccctggttaacatcaatattacctggttcatgtcttttggccataactgcccagtagcaatattgtgttaagatcgctccctgatgtgccaatgttaatcttattcctatcccgtacaaatctattttcggaaaattcattcattcattcatctcctaaattcgctctccagtttgccaccattctgagcatcaacttgatgcttctctgtttctttttaanacaaaaaatcttctgaatgaaacagcaggactgctatttggtaca

SEQ ID NO: 42014 - DNA, 418 bp, Oryza sativa
  unsure (1)..(418): unsure at all n locations
acaagctgtcacaatttattcaaaggattgtacttttatatatacnaacgatttgcacaatctatttcatgtgtcatgtaattcattcaaaccatttataatttagatatctttactcttgtgctactgattgtacctttaaacatgtcattgccactatgttgttatgctattatatatactctaaatattgccagtccaattttttgagttctgtaagatttattttcaactttgaataccctctgctgaaatcctggctccgccactgctaataatccagagaaacaaacaactctgaacttattttatgtcagcttattatattccacctaagagtaatctgatttaataatctatatacaataatcttatactgaacaaacaggcctangctaatggacaaaagaaaggccac

SEQ ID NO: 42015 - DNA, 446 bp, Oryza sativa
  unsure (1)..(446): unsure at all n locations
ttcacacaattgctgcatttaatttagacactgtgcatatacaagtttgctttagntcggggcaaggttaatcggcgggtatttgcttaacccccgtccgagtagtcttgtattcttgctctttggtggagctatgaagaaacaactttcgggcatattcaagagacgatcaagctcacggacaagccgacatggtaagccgagtacaccttcttccacggatgcatccatggaggaggcgcacattccaccaaggctgtacgacaactccgatctcgacctcgtgggcgactgtgaaatgcaagtctatcatatggtgaaagaccaaatgtgtgctcagacctgagcatacgactcgaccttctgaaaaggaaaggtatggatgctgagtttcatactatttggcgtgctatangttgggataaattcgcatgtgtagatgagtc

SEQ ID NO: 42016 - DNA, 444 bp, Oryza sativa
  unsure (1)..(444): unsure at all n locations
accctgaaatacaagaagtaagggacgttgcacttntagannaattgtgtcactattaaccagtcagggatataagtaaccctgtatatagaatgaagaatatttatcatgctctcttaatttaaccatctaccttatttccaagaatatacccatcaatcctctacccacacaagaaactttcaagtttctcacatcatctcttatttcattgcgcacccagacagtgagaaatatgccaaccatttgtttgctggcaaccaaacaatacctgaagaggcatagacattttcaaatagttagttntgcatgaccttaagattttttaaaaaaaaaaagatgcggtacattacaaccaacatttaaacatctggtttaaagtacaattgccaatgttcatgacaggagttgtgtaccctgatccattgggttgtcgtcgttagc

SEQ ID NO: 42017 - DNA, 289 bp, Oryza sativa
  unsure (1)..(289): unsure at all n locations
acacacgcgcncccgacctggcgcgccagatgacggagcgcggggctcctcaccaggagaccgcgcgggccctcctttgccagttcggccgggggcgccaagcgaggctctaagccctagatctgggaacggttcggagagagcaaaccgccaagacacgggcgatggagacaggcncgggccgctgagaagcgtacaaccctacccctgaggtctggcggatctgtcctgaaggaggcaccacagccgaaagcaagagccctcgactctaaagacctctccctactat

SEQ ID NO: 42018 - DNA, 306 bp, Oryza sativa
cacttagcatataactgacagggcccacatgtcatccaaataaaggaagctctctgtagtaatcaattagttaacccattgtctcacgatcagttgatctgcatgctccattcaaatgtgttcaaatgctaatggcgcgcgcggctgcttgaaaatggcatggatcctcctctataaatagacggagtgtggcaagcaaggagtacaagagattgctgtggagaggttccaatggagattagcgtatacgctatgtgctgtgcgtatgctttgcagaaacgctgcttgttgctatgcaatataccc

SEQ ID NO: 42019 - DNA, 464 bp, Oryza sativa
  unsure (1)..(464): unsure at all n locations
agcttcatgttntggagctgtatttcttattttttgnggnangnncaaantcattcttatctgttctcttttgctcgcatggatacacttaattattaattttcctaatttgtaggttgatggtctgacggagcctctctgggatgcatcctcagtaccataccaatatactgacaacgctatgtttgtccgagattacacaataaaacttttaggttcatcatttcccaacatgacacctactgaggtatgatccttcttttgcagctatcctgtgcttctgtggccatcatagacctaacaactcttcccgcacaggttacaaaattttgtgatgggcttcttatttcanaacatgaccttccaagcttcaaaaaccatattanggatttcctggtgcaatcaaaggagttctcggctcangtaatttgctctaacccctgacactggcatggacctgattt

SEQ ID NO: 42020 - DNA, 387 bp, Oryza sativa
  unsure (1)..(387): unsure at all n locations
agcttgcttatagcctgacatgtttatatattatcacctgtttactgaagtctgtactagagtaatagctagtaatctatcttatcttaccctatgttatgtcctaccggctctttttacagtatcaacctaaaacatgctgtaaacatgctggacctattacggccgatagggcaaacttagggttctaattattttcacatattaatcgatagctgatatgttcctgctatattggctggcgtctgatcgatacgtcatcggcctgtcggccgatcggctgtccatcacatgatcctaatttcatgtttcttgctggntgtatgaacaaaccagntaacacactctacaggcacactaggcaggccattaacttgcactggaagt

SEQ ID NO: 42021 - DNA, 472 bp, Oryza sativa
  unsure (1)..(472): unsure at all n locations
ntactgtttgacaccttttaagatgcagtgtaccaactcctataaagttgagnaactgcggcaaaaaggatttaaggtattgggcacttgatcacgtgcactttggcctaagcaaaaagtgcctaagtccctaaaagaacgtgacaggccacacctgaaaatatgggctgcagacatattatgcctaggccaaaaaatatgccttcgataccctttaaaggatgacgcatgtaacatgctcccgggtgatatagaccatgtgatctgagtgattatcccttatgggatactccaaaatagatataaaaattgaatcccgactggcgcaagtattcatgtgatcacccttacggcgaataataaatagtccagtctttgagcatataaaatagacccatgatcatgaattcatgttgcatgtgatccgagcatgttcaaattggagatataatcctcacgcttgacgtgatga

SEQ ID NO: 42022 - DNA, 346 bp, Oryza sativa
agcttcaaagaagggcgggtgtgttttctcttacttttgaaaacattcttcagaaggacaattgcttatttgaccccgtcttgaaccgttactaccaatttgaccctactttttgaagattgcttatctgaccctccattttagaaacaaagctcccgtctgaccccctttcgatgactccgttagggttgaatttaaaaagaaaaaagaaaatgcttctaatattcctaatgtgcaaaataccctccaaaccctatcctttcactcttctctggtttaaggcgctctctctcgtgcaactgcaattgtgcggcagcggaagctgacgtggcacaggcgacgcgac

SEQ ID NO: 42023 - DNA, 433 bp, Oryza sativa
  unsure (1)..(433): unsure at all n locations
ngatgcattnttcagatttgcttccatggatcattttggtcangtagtcttgttgcaatgtagagttttagatatgaacggttcatatacttcatatcatagttgtacataggggtttgttctaatcattcccatctgattcttgggaatagccaaatcagtacatggtcagatattaggaaggaagagcagtataatatctatgtgcagtttagttctaatttaccggctattctcacacgttggcttttttattgactgagatatcattnttcttctgttttcactgcagtccaaatgtgctggtcaattcataatcgatcatcaggcctggaatttgtctcaaggtatatacatggaatagcgttccaatatgagtagtgactaaagcagaataatttgaattgtgaactcttttaccaagtgaacagag

SEQ ID NO: 42024 - DNA, 413 bp, Oryza sativa
  unsure (1)..(413): unsure at all n locations
agcttggccagttgttagaagatccctgtatgatgttgcttgaattcttgtgtgattttatcttcagttntgcatggtctaaaaattcgagccacccactgaaccctggaaaaacagaactgcaccctttagctttaaaatttcttgtaggtcttaaaacttgcttaaaaattcctaaaattttgaggggggtagataacctatacagaaacttagttgtgcaaaaatntcctttntagcagccacctaaataggctttttacccctgttgttgctgtggtttgctcctgtccagaacctgaaaactaagtcttcttgttcttccttgatcctccctctcacttaaggtttctaatctaggtaatcttgtnctaatcttgtagatggctcccttggaaccctcttactattcc

SEQ ID NO: 42025 - DNA, 397 bp, Oryza sativa
  unsure (1)..(397): unsure at all n locations
gcccagtgtccattcttgagccttcaactgatgaagacagttgttgttccggatacttcaagtgtaacttacaagacatgcctagtaagtgagacaaactggccccatttggaacactggagtattctgttattcatagaggaatttacttgtttcaaagaggtctgaactgcattaccagctaccctaacaatgtagaagttgatacaaatatttagggacaattgcttatctgaccctatttcgaagaataactaccaatatgaccctnacttttgtagtttgcttatttgaccctgcttcttaaaaatgaatctattatctgaccctattcccattaagggacgttacggtgttaagtaacgggccaatatccctcttgcgcttgctatttgac

SEQ ID NO: 42026 - DNA, 397 bp, Oryza sativa
agcttatgctgatgatgtattcttactgatctatccaatcgatgatgtgatcacggacctataagaaacctttgtgagcctccgggactataggatgaaattaaaccctggaagtgcatcctctgagtatcgtcagggaagctgctgggatttatggtgtctcatacacgcatacaagccaacccggagaaaatcaatgccatcctcaacatgagaccgccaaattctcataaagaactgtcaaagctgattggttgcatggcggcactcatgcggatacgttcacgagtcagcgagcggtggatggccttcttcaagctattgaagaaaacagacgatttccattggggacctgaagcacaatattgcttgtgagacttcaaatacatctactact

SEQ ID NO: 42027 - DNA, 422 bp, Oryza sativa
  unsure (1)..(422): unsure at all n locations
tatgggtttatgctcgctgagtgaattgtcaatataaattatcttgtctgacgacaggtgtaccgcttccagcagcattgtgcttatattagtcccacactattgtcgtcactatgtaaagctgacgtgcgctcatttaaaatgtgcatgcgacctgcaattctagctgctagcatagaatccagtttctacgaacgacatatagccatcaatgagaattatttgtcttcaaagtaaatatttcaattatgcgaagtatcttattgcactgcanctggacatgcagtacctttatgatgcgatagtgctatataccaatgtacatcgtttactagcttaagagattcacttgagaattttgtcatagctatgtgtgttgcttaaaagcatattaagatgtatattctcgtacataaaacata

SEQ ID NO: 42028 - DNA, 444 bp, Oryza sativa
  unsure (1)..(444): unsure at all n locations
tacaagtaaaccagatatggagatggcgactatagttgctgggttccattttatagaatttcaagattacaatggatctacgaaaagatcgtgtatttacaactacaacggaatagtatacaaagtcaacacaaatcattaaatggaatttatggctacacaaaccgttgaagatagttctagacctggaccaagacaaactcgcgtaggtaatttattgaaacccttgaattcggaatatgggaaagtagctccgggttgggggactactccttttatgggggtcgcaatggctttattcgcggtattcctatctattattttagaaatttataattcttccgttttactggacgggaatttaatgaattaggtttctactaacgaanactacgaagtcatagtttttccatccaaaagagcctttctactttaagctctaca

SEQ ID NO: 42029 - DNA, 458 bp, Oryza sativa
  unsure (1)..(458): unsure at all n locations
tgcgagggaagaaaggaggcggcgccctgaaaagaaaactgattagagagagaaggggctttggagtgggagaggggggagagtgaggcgtgtgaacggcaacagcgttgggcagttgggctgaatggcggnttgggccgccagggatgcttttcagctggatgagtggaacaggcccgtataaggctaacgagcagctatatttatgggaataagttcactttaggtctctctacttgttggtcagtccaattttcgtcccttaaccacaaaacttggtacgacccatcccccaacttacgaaaaccggacatatgaggtccctcgacagtatggaggaacgttttggctgacgtgacgtctacgtggctctcttgactacgtctctgtctcacgcactgacatggcgcttacatggcaatttaacccattgcgcccacatgtcatgtacacgcaat

SEQ ID NO: 42030 - DNA, 378 bp, Oryza sativa
  unsure (1)..(378): unsure at all n locations
ttttgagagaaaagaagaatctacttcaaccgatatgcccttaggcacggccatacataacatagaaatcacacgtggaaggggtgggcaattagctagagcagcaggtgctgtagcgaaactgattgcaaaagaaggtaaatcggccactttaagattaccatctggggaggtccgtttggtatcccaaaactgcttagcaacagtcggacaagtgggtaatgttggggtgaaccaaaaaagtttgggtagagccgggtctaagtgttggctangtaaacgccccgtagtaagaggggtagttatgaaccctgtggaccaccctcatggtggcggtgaaagtgaaagccccattggtagaaaaaaacccacaacccc

SEQ ID NO: 42031 - DNA, 472 bp, Oryza sativa
  unsure (1)..(472): unsure at all n locations
tgtagaatactgcacgggacattcttaattggtgagtgcacgtcctatctgaaatgttgatcagcctgattagttcacttgttctccatacatccctgtggactaggggcccatattttacccctttgcgactactcctcctacgatatttgttcctcaaccatatgatgatcaaaagacaaagtaccactacagccttcttcgttagcaagaagtgatgcatatattgttgtcgagtgttctccatctggatgagattacatacgcagcttcaaattacttaaggaaatgtgtcggttcagtgaaaaacaaattaatttactgaataaatattgtgcccagccaacatgtagatttgtcgactaaaaataacattactgaggtgtaaatggacacctgtatanttttttgagcaaagaaatcaacactaagacagtaagaattattcaacctactgttttttattgctact

SEQ ID NO: 42032 - DNA, 358 bp, Oryza sativa
  unsure (1)..(358): unsure at all n locations
agaatcaccttatcactcaattaatactgattatgcntttattaattaatatgacccgtagttcctgagttaacatccccaatatggaatatatcattacggttaaggtggttttacccataaaatctatgcttcatactgatgcaccatgtttgtctaataataaattcaatattcccttgcaaacaaaactcagatattttctaatttttctaataatataaccggctttctcctagttatcccagtgatattggtaggtctttgccaccgtctgcatcagcacgtgttgtcttttcatttctctggttttgaaatatnctgaattcttcactggaactattaatgcttacttcta

SEQ ID NO: 42033 - DNA, 332 bp, Oryza sativa
  unsure (1)..(332): unsure at all n locations
tcgatgccggatcgaccggcttattatcaccgtacttgctatcgagccacgcccagtacgcgagcagcccggcgacgaggacggcgaggacgccggcacacgccatcaccacacgctcgtcttcgacgggaatccccaggacgaaagacgtcgtcacgatagcagcgccaccgacagcgcagagaccgaacatgaagaggtactcgtcggcgaccagcggcgcgcggngcaggtacatgagcgtgtagaagcggatcaccatggtcagcgacaggtaggtgtcgcacaggacgcgcaccggcagctcgcacgggacgcgggcgaggtagaga

SEQ ID NO: 42034 - DNA, 432 bp, Oryza sativa
  unsure (1)..(432): unsure at all n locations
tgggcgcgacgtccccaacaccgacaagcatatgactgtgatctccgtcgacggtgggctctacgagcactacaccatcttcgccgagtgcgtggagagcaccctgagggacatgcttggggaggatgtgtcctccaccattgtcatcaagctcgccaaggacgggtcaggcattggcgctgctctccttgctgcggctcattctcaataccgtgaggctgaggagctctagtggatctcttctcttggcagctgttatgctntagttgtttggattttcctgagattctgaacccccaggagcaattgcattctatagagttgcaccagcaccgtgctggtgtttagaactttagatggaggcaccaacctttagtagcttgcaagtcctgtaaactgtataaacgcagaacacagtattgtccttccaac

SEQ ID NO: 42035 - DNA, 476 bp, Oryza sativa
ggtgaacacatttgcggtcatatggccctaatttttcgtttctcaaatatagcttgccatttccttttcttttgtgatacttggaatgaatttgcagttaacatgtttatgcaattttcaagtaaactgaccgctatgatcatatatctgtaaaactagaaaaacgtacaagaagcctacagggcccaaaatacattaagcccataacagagaaagcccacagacctagacaatagggccttgtactccttaacgggcctataaaatgcaccgggctagcacctaacatagccgatctaactcggcccatttgagcccgcgtcggtgtgaggtcctcatctcattctctcctcctcctcaagaattttctcttctcatcattcgttggcttggtgcccttgcagagctcgcgcgatccatcggaggccgcttcctgtcaattctcactaattaatcgaagttcatatcctctcaag

SEQ ID NO: 42036 - DNA, 425 bp, Oryza sativa
  unsure (1)..(425): unsure at all n locations
ctggtctaaatatcctattacccccgcaggattatgtgatttcaccagcaacactcagctgtattgttggaaaatccaaacatttgtacccaacatgctgctcaccaaggctgaaattggcaacaaaaaataacaacagaaaattacttgccgcaaggtctgcaaaaatagtaccagaatctggtgaagacaagttataacccagaatcatcctgaattgccacagcttattaaaaatcatggaataatcaggccaaaatttcctgagaatcacattctctccagcaattactagcacaagtttaaacaactcacttcttcttggatgtaagtgcagtatcaccttcttttatttccttcaaacaaaaaagagatgcanatcatgaaatgacctagcaacaatgctaaaaatcaaaatcatacct

SEQ ID NO: 42037 - DNA, 497 bp, Oryza sativa
  unsure (1)..(497): unsure at all n locations
ctcagcttctctactgaaggnggaaagattgagcacgaatgagttctatcacagtactcantaagtcacaccggcagatgcatgattaatgcaacgaggtacaaggggttaatactaagggttaagttttgcagtcaacagcatttaaaagtcacttagttgcccaaagccattttaaaaagacgatcctagagctacacagtattattaatcaaggtcgtgaaccctcacgaatctgccttaacccaaggcctacgatgattcagaccgaactggcaacccgaccctgggtcccagctcgtcccaagccaacccaggccaaccattccacattttagttgttaagcaaattntaagaattaaaacactaacttgggtacattgctcggcttgccataaccgagggcgcggctattcgaatagaatatactctgatcagaggtgtacatctttacccacaagacacatacttctcacgtgtaaccacatgccacata

SEQ ID NO: 42038 - DNA, 466 bp, Oryza sativa
  unsure (1)..(466): unsure at all n locations
tatctcttacgctccaggaatggatcagtcagaacatcactcccggctcgcctcgaccgccgncgactggtgtttccgcctgcacggctggcctattatgccgccgttgttgggcgtctacgtcttcaccgaccggcttgccttcgccgccgccgactggtgcctccgcctgcacggctggcctttatgccgccgttgttgggcgtctacgtcttcaccgaccggcttgccttcgccgccgccgactggtgcttccgcctgcacggctggcccttatgccgccgttgttgggcgtctacgtcttcaccgaccggccgcctcgtccgccgncgactggtgcttncgcctgcacggctgacttattatgccgnncgttgtgggcgtctacgtcttcaccgaccggcttgccttctgccgcgccgactggtgcctccgcctgcacggctggcctttatgcnncgcgtgt

SEQ ID NO: 42039 - DNA, 415 bp, Oryza sativa
  unsure (1)..(415): unsure at all n locations
catgcaagcttgatgagagatatagtgctctcgtagttgtgcttatttaactgttagttngatccaacgaaaaaaaaatatgttctttggtttgaaatgtcaatcttgatgtctttgcaggtacaaggatgtggatctgttgtgacagaggagcaaccgcatgcaatgcttatgccgctggagtacttcctcatgggatacggattgtacagaccaagccagataagctgcagccctcgtagccccttgaacccgttttgtatatcgccagaactcctctcgcccgagagcatgggggttaagctaaagccaatcaagacgcgggccaatcttgaagtttatgatcgaaagagaaaaaaaaaaaaggtgaaatgtgagaacttatgctaacccggcagtcgctgtactaatatat

SEQ ID NO: 42040 - DNA, 430 bp, Oryza sativa
  unsure (1)..(430): unsure at all n locations
acaaactaagctanttangtatcatagcgttcgcagtgttttctttgggatgacnataaaacatcgctgtcacctgctgtcttctcgattggttcgtttccttctaatggagcagagtgttctgtatgctacaagaagcacttgagctatcaattgccgttgttctgcacatgtgaaaaacacantttgtgagtcatctcataaattcatgcaccaaactagagtcattctgacctgacatatgcagactgacacatacaagagataacaatttataattgttgtcacgtttatctttacgatctgaatatgaaataatataagattcacatgcattcttttttgaagttccagacagttntaaacaatcactctattcctttttctaataaactgcaagtatggttgataagnttcatgtatgctatat

SEQ ID NO: 42041 - DNA, 480 bp, Oryza sativa
  unsure (1)..(480): unsure at all n locations
tgccaggccggaagctctccagcggctcttcctcaccttctaataacctctcctgatttgacgctctctgccgtcgaccctgcccatctcccccctctagccccatagacccaactacgtacactactgtcacctcgctacatgctcttgtttgccatccaccatgaatccaccgtctccctgcccatccctttaagcctatgggagttgaaccactctcttccaccagccaaaatccccacccccaaaaccttaagtctaatccgtgggtcctctatcatagttaggtgtcactcatgatgcggaagatgaaaagatcgtaaagaagtttgatgttgtcatcgttgttaagccatggctaccatctccctttatctcacctcttttcttgcctccccttattctagatgctgcaggtgactgaaatttctcataaatttgaccacctgaaacaagcaattcactaagtaaatntaccat

SEQ ID NO: 42042 - DNA, 341 bp, Oryza sativa
  unsure (1)..(341): unsure at all n locations
tgaagctgctctcataatgaatgtatttacaaatcttgaaataatgtggtgnttaagaactatcttcacacttaccatcttgtaagctgcaccatatatccctttaggaatgttttcattttacatccctcagcttagcaagaagtctactaaacgcacctcaacttctcaagaaatatatctaacactgacgagtacaaaattgattatcgagcaccaaaaatttagtaaacctggtaaattttcaacccaaagtgttttggaggagccgcaattgctggcatgaatccaactcatggtgttctntctgataaaaaaaactctgttcttttgctatatcc

SEQ ID NO: 42043 - DNA, 449 bp, Oryza sativa
  unsure (1)..(449): unsure at all n locations
atccatggaatcctgcaggtccaggttctatattataagattgaaacatgatagagacattgaaacttcatattccaatttacagaaagctagcaagtaggacaacaaacccatataggcattgttcaatactggataaagagaaagagaagagctggaagagatcttgcaagcaatcaagcaaatactgaataaatagacatctttctctttcagaacattaaatagacagatgataagaagagcacaagcaatttactaaccacaaaattatcactgtagctgatttcatttactgagctcacatttatgttaggacctagcaatcaaaacataaaaataaattatgtttagcaagataaatactacaagtaaatgaacganggcagtcgtgtataccggcagaagctccgaaccaatcttggaggcagataagcgcctcaactgaa

SEQ ID NO: 42044 - DNA, 463 bp, Oryza sativa
gctatgagaatatgagagcctttgctttgttactaaatgactatcatctcttgtggaggaccgctctttcttggagctcttctttggtgcatctctttgatcatctttcgatgggaccttcactttaactttcaagttatctatcttggagatgtcttttggcctatctttcaggttgtctttcttggagacctctctttgcatatctctcatgttgtcctttctacgctcttcccttggcgtatgtctcatttcatccttcttggaaccctcccctggtttatcactattatcctttttggagccctccaagggcatttctctgacatcctttctgcttttggaccctcttcctgattccagatgattggatttaccattactgttctcttcgagcccttccttggttttcttagcttctgaagccggtttcttttcacgacgcgacatgatatcctgaatg

SEQ ID NO: 42045 - DNA, 483 bp, Oryza sativa
  unsure (1)..(483): unsure at all n locations
ggcgttatagattactttgggcgcacatgtgctaccgatggtggctatgtcactctgngaatcatttgccaggtggtgacattttggttaaggagcaatgcattttgataaacccatgttactgttatatacttatgatatatgctgccactaccatataggggatggcagtgtgaagtataaagtaggggttagtgcaaacccatgatgtaatatatggcactactatgtgggtgattacgaagtactactatgtagggatatgtgcaaaccaaaatgctgtaatgcatgatgtgttattgctgcactaattatggagctttgaagtctaatttcagtcatacagtatttcttttatataaacacgcccagctttgttgctgctatatttgatacaaggagggttatttaagagagaaacaaagaatgatgtctaagaaatcaacacagcacacaagaacatttagctgcctttacacatat

SEQ ID NO: 42046 - DNA, 393 bp, Oryza sativa
  unsure (1)..(393): unsure at all n locations
agcttgcctatgttctagatccaccgctgctctgaggtatttattgatggagcctccataccgactacttaagattatagatggtgatatggcctgaggctcacggcccggcccgaagctcacaattttggcccggcccaagaacagcacgggccgactgggatcatgcccgtgccagcccggcccgatcaaagaaaaaaaatatagagatgccaaatagacttaaataattatataaggtgaggcccaagacaagaggtatacaaaatagacttattttccagccatttaaacacagcccaccgagttgaggaatcanaaatanactttttctgtaaagaagcacgatgagccatcgtgccttcagccagctcagcaccggccgagtagtat

SEQ ID NO: 42047 - DNA, 390 bp, Oryza sativa
  unsure (1)..(390): unsure at all n locations
gtgcatnntataaacatgtgtaagcgctagcctcggagatgttttgtatgctgctccgttgacatgcggaccccacatgtcaacctaaaggaccgcggtagaccggatacacagagacggtccacgggtcgacggaagcggaccccgtgtgtcaaccgaggcgagtggccaacaaacggactccactagacaccacacggtctgcacacgtggaaaccacgcggctaccgagcgggcacactaacacggacactacacggtcaccacccgcacacgtgaacgactaccgacaccggtacacgggtaccggtgccgacaaccgcacaacgggcacgggcgacacctaaaggactaagacagggcancgagggagagggaaccttaccacca

SEQ ID NO: 42048 - DNA, 390 bp, Oryza sativa
  unsure (1)..(390): unsure at all n locations
actcagctgaactacatgaattagcctgtttatcatttccaattgaggcaatcagacgatataactactcatctatagtgacacaaggcgcttgctccaaggatatgatggtctaatcttacgagggctctaggcccatgagaatacattctgacggccagtactaaataatgtatcccggactcatggattcaacataataacaggattatgttcttatgattaatatattataccgaatgagtaaagttatccttaccttctcatagaggaagatggctaacatgttgccctaccgaanactgcatagcaccacgtntgctttcacaatactgtgacttcattccacagctcatctgtgatggtacaatgctctctgtgtacatgata

SEQ ID NO: 42049 - DNA, 458 bp, Oryza sativa
  unsure (1)..(458): unsure at all n locations
agcttcaatgtgctacctattatatatgttgtggttacacactgagaaagccatgcatgacgggaacattgcaaatttgcaatatcacttctaagtgaggattacactgaggagtgtattttttggtgaatagtcccacattgattgtggaagagctaaggacctaagatataagtggggaagcccctcacctcaatggttagcttttggggtgggaaagaccctttacgatcctatatttttgctgctcttgccgagtgtttttggcacttggggagaatctcccatatcagaggtgtagcttgggagagccacatatatatgacaatatgcaaatagcttttgtgaaacttttgtccatccatgcaaagaatatatacgagcttagctacattntgggagtaggtgacatcgagaatcaacatgtggcaaggtgatcctctgggtcaacttcttca

SEQ ID NO: 42050 - DNA, 430 bp, Oryza sativa
tatgtcgaacaagaacatttctgaagatgaattgatcaatcctctacaaattaactagtaccatgcttacaactgaatgacaaaaggacaggagccatgcaagttgctttgacacctttattccaaaatgctcactttactgatctttgccctgaaaaatatgctcactttaccgtgaaaaccattcttttcttgcattgggatttgggaggtcaggattatccgtccctattctctgggcatgagggagcatggaatcccactttgcattgtctcaaactttagcatctccctttcggctcttccctgtcagtaaagtaggatctacaaatattttagcaatagctgattagagaacaatttctctgaatctgagggtgtgtggatcaaatcttcaaaatactgaaaacatgttactttgtggacaata

SEQ ID NO: 42051 - DNA, 388 bp, Oryza sativa
  unsure (1)..(388): unsure at all n locations
tataatttattattggatagatcaaatcggactgtctatntcagaggaagaaaaatattcttgatctatgcttaatactccatcaatattggcgtgtggctatgagaaagtgaagacaacttccaaccaccgttttgggagtcgttaatcaagatattatacccaatcatgaaaggcgaagtggacatgataacctaattaatcgagtgggttttgttcgtttgtgcaaaacaatctttgtcaaagtggttatttaacgacctgattgaaccctgatcaattcatagcttatcacaaatctttgagagccatggtattattataggtataaagactgcaccacacaacagtatctcttaattctaacatataatacgtataaacttta

SEQ ID NO: 42052 - DNA, 455 bp, Oryza sativa
  unsure (1)..(455): unsure at all n locations
ctacattcactcgtncaagacggatagatgatgaagcttctggcagcacaagagatgcagcatgtccatctagaaatgcagaaaatgttgctgcaagagctgccattcctgagatgcctagctcttcctctggtggccggcatgcgcgaagaactggtccgatgaagctcactcctgtggccaagcatatcctgatgccgagtgacaccacaggggacggcacctccatgccagtgtactcttgtgtttctttcggaagtaagagtggaaatgcttcagcaactcgcagacatgggagctgggctgcacaagctatagtccaaataatgcttaaacttggacatgtttctcctgagctgttgaggatgagtaagctcgaagttgaacgtatgttaggatctctctgtatgtgctcagcaatcagcacacatttgattatcttgacttgtggtgtt

SEQ ID NO: 42053 - DNA, 423 bp, Oryza sativa
  unsure (1)..(423): unsure at all n locations
agcttcattacagtgaatgatttgtcaagtaatttgatatttntactttcacaaattttgttgatgggacatatggacagcacaaatgataaagtagatcacacacttctagaattagtgctgcattttcaataacatttactatgtctggtttcttatgctaactaacttctgcacttccagttacgaattangagcgcttgttgctgaagattgtgctgaaaccacttatgaagcagaaaagcagaagcattctaagaggtcaagagagtacatcccctctgctaaggctggctcacggcttccacatatgctaatgagagcattgtctacttcacacgaggtttgctcaattcaccacctaattgatgtacacatctttagctaatattctacatgtgtaaatcgtgtactccaatgggc

SEQ ID NO: 42054 - DNA, 426 bp, Oryza sativa
  unsure (1)..(426): unsure at all n locations
ctattacggacctatgaaactcagcttcanaattagagaacatattttcttccatttacttgcaatctcttatggagatggatggtttatatttgttggtactatttgacttccagaattgcttactaaatggtgtctctattctattcttttatttgaagagcttccctgaagagctattttcagtgcttcgaactatacaacttttacgtgggttgactgttgggatgggcctcagattctcatgtgctcagcaatggaagcctattgccgaggaagctttgttgaagtctgggagactaaaaggtaactntacttccagttgtttaatcagtctatatcacatttggcgtcacattatcctatataaatagctaaatgccgtactttcttgtacttttagattactaactgagctttgtaatc

SEQ ID NO: 42055 - DNA, 439 bp, Oryza sativa
  unsure (1)..(439): unsure at all n locations
agcttcgccgccgtctcctattgttcgctgctgcgaggtgaaggccttncacccctccgttgccgacgctcgtcgccggaaagccatcatcatcgtggacagtacctagtcgcccttcggagctcggcgccggccatctacttcgctgtccggcgccgcgtaagtgatggtaagaatcgccgtcgccttctctacctaccggagccctccgcttgctttattgtgccgtggattgccagcaaccgttgctcccatgctgtgcaccggtgagatttgtcctatggccttaatccaatctaactcaatccgttgtctatctagcgacgtcgactacgtgtgttgccgacggagcaccgacgtagcaatccctcttcgatcgatatggtgcggcgagacttgtatccatagtctctcggtcaatgtataacctctcgatatg

SEQ ID NO: 42056 - DNA, 431 bp, Oryza sativa
  unsure (1)..(431): unsure at all n locations
agctngagggcgcatgcgggcatgatgggttcaagagcgggaaggtgccggtgtctacggtcgcgtggtcgacgcttgcaatggccgctgccaccggtttgggtgctctgccattctttttcctggagctagaggcccagtgggcgggactttgcaatggactcgcggcaggggtgatgttagcggcgagctttgatcttgtgcaggaagggcaaatgtatggcagtgggagctgggttgtgtttgggaatttgagcggagggtttttcatctggctttgcaagaaaggacttcctgtttcattctcttcagttntctgtgatatcacttatggagtactatttagtacattagcattttcactaatctacaaatatcanatcatgtacaaatgtatttaaactngacngagctagtcatggatgtcataa

SEQ ID NO: 42057 - DNA, 404 bp, Oryza sativa
  unsure (1)..(404): unsure at all n locations
tgtgggcacatacgacattgttcatgagttggtgcaagttatgnttttggaggttggtcatcagcatagcaaatgttctggttttgtactgctgcatgtccaacatttgctatgatctgtttattttcatttttccaaattgtgatatgactagtacaaagttagcacaatttattcccttccaagtctatgttgagatagaataaaactgggtagcaagatgagagttaagggataagaaagaagacaatgatatgtgatggtgggaccattgcccactggacagtcctgagccaacaaggatcctagtcggtggcacatagtaccaaaagaagggcttgttacttagagaggcttaagttaaattctcttgaagtttaagatgaaacataaactcactcaag

SEQ ID NO: 42058 - DNA, 480 bp, Oryza sativa
  unsure (1)..(480): unsure at all n locations
ntgaggctttntgctagtacagggccaaggtcattgatgtttatgctcccatncctagnnagaggagtagcgtacgagtatagtactagaattgcagatntgatccgtcgatatggcaatgtttggcacgggaattcaatgccaattcattgctctgttttcttctgaaaaaaatcaatgcaagaatttcagtagtagttcacttctcaccgacatatgcatgcatggaccatcaaattcaatatctgtgcatgcattgtgtgcacagagagaaccatctgctcgttgatcttatcactaacaaggggccccgggagatntgtgctggttgatggggcccatgtagcagtgaaaacactgaaacagtgtacaattctgttgagtaaacagcactatccactacagactgttctactttgatctgaagctgacagcttgacagcgatctttgcaatcgagtgtgatcaaacacacacatga

SEQ ID NO: 42059 - DNA, 460 bp, Oryza sativa
agcttagagcatacatacatatatgtattacataccatgtgtataaaacttctggcatgcatctacaatcttgtgaccgtttattattattattatttgaaaggaaatcttgtaaaagtattttacactgggcggggacaggttggattgcataccttattttcaaacatttctttgaaacgaggatcagtcaacaatgccttgttcatttccagcttctttatcttcttcttgatgcctgatttttcatcattctccaaatcagcatccatttcctcttcctctttaagtatattatccataatttgcctgttaacctttggtattttcacaacttgctgcatgaggtaaaaaagggtcgacattcattaatgtgatgatcaggaacctgttcatgttatacagtcaatgaacacactctctatgggcagacataccgttatgcgagacttctctgttc

SEQ ID NO: 42060 - DNA, 378 bp, Oryza sativa
  unsure (1)..(378): unsure at all n locations
aatttattaaagttaaanatttttaaatttaataaaaatttatagaataatgtagnaananttttaatanaatattaaaaganatttagtgtttaaaaaaagaaaaatttagtggtagaataaataaaagtaatttagtattatagatgttntataatattttataaatatggtnagatttaagaaaatgtgatttataaaagttaaaagaatttgtattatgaaatggaaagtactnnntntanaaatgtagatatacatatgttcagatttattgtagtagaatatgttacattcggtaaagatttattgtantagaatatgttatatnnggtaaatatgttcagatttatgttcagaattattgtactagaatat

SEQ ID NO: 42061 - DNA, 470 bp, Oryza sativa
actcagcttcgtaacggataatagtctggagattactgattaactatttatttgttattatgatactctcatcatgtgattgtctacttactaatattggtaacaatcttgtaggaaccttcacaaacacatagatgccatcgacccaatcagcattgacaatattgatgttttagatgaatgggtcagtgaagagcctatccttctttgcagagatgacctgaactgtgagagaatagacgcaccatttgccgagccgacttctgaagactaagaatttgtcgctattgatgacgaggaggcttcaacagcgtcactgttctggccggcagcagcagcagaagactcatatttgccaccacctgatcaagatctctatcagtatgttacccatgaggatgtgattctaactttctgaaactcggaacttctgctctgtagcgaactgaatactgtcattaagacacaca

SEQ ID NO: 42062 - DNA, 456 bp, Oryza sativa
  unsure (1)..(456): unsure at all n locations
agctngagctcacctgagccgacataccaatttaatggctcgggaatgagccgctcaaccttgacctcgcctgcgccaagctgacggagagtgacgcgtacttcgttctgctgcactagagagaaggaagaaaggaaaaatgacacgtggtcctatggtgactggattgcctcctaagaaaaaaccagagcgagatggatgaggggtataaattgcatggttataacagatgaggcgcgtctaatacccgattataaagttaagggtgtattgtagataaatataatagttgaggggtgtaaaatggacttatcccgattcgaacggactattataccatggattgtctacaaattaattatttttataaatagaagtttcagaaatagcttagaacacatgctctatatagtgcagtacaataatgacttcgaggaaatggtacttttctgtgag

SEQ ID NO: 42063 - DNA, 471 bp, Oryza sativa
  unsure (1)..(471): unsure at all n locations
ttatatccattgatcggntctagagcctagccaccttatgtgatgttcatattaatatcactataaatcattacattatttgataaagatgataaatatatggttgcatttagattgttatcaaacattgataatgcatataacatattggcaacaatacatttaaactattctataaaatcttgacaaagctaccaatttaccgaaattttggaattagcaactttagaaaatgttaattatgatagtaatctgaacagatcattagtttaaaaaatgtcctttatacgaaagcactttcttgatgatggctcaatcctcttcatgtgtagacataagtcaatcgcatcagtggtagctccatagaagccagtacttcttgcccctcaagatgtgaggaatgcgcgatcaaagaacactgagtgaataacctctatgcacaacatcgctagcactggataatgatacata

SEQ ID NO: 42064 - DNA, 136 bp, Oryza sativa
gcttatttatgtgctactactactggttggataccgggctgctggctactatgatttgctggtttaattatgttcttagttgccctattttatatatttgctctaggcctcaagctcccagcctccaagtctaatt

SEQ ID NO: 42065 - DNA, 503 bp, Oryza sativa
  unsure (1)..(503): unsure at all n locations
attacggacctatgatactaagcttacaatggctagttntacacggctagtttgcttgtagaatatttttgcctccagctttactaatttgattcagtggttttttttgcatattcaaatgttaggccaatataaagtgtacaaccttgggctagagattcaaaaactacacgatagcacacaagatttgtaggatcgcacaagaccaaacaaacctatcagaggggggttgaatggtagggaaaaccaaaaacccaaaaatcttttgcggaattaaagattaccctcaaacgaagtagacgtcgaagccctgtcgccgccggtcacaccacctgcctgccgccggtcggaccgtcgaagccttgccggtcggaccgcccgaacacctgcggtcagaccgccgctatcccaccggtcagaccgcgcgcacttctgcgtttagaccgtcgggacccagaaacactggtagatgacaaactcgaagatgtagattgaaacttttc

SEQ ID NO: 42066 - DNA, 451 bp, Oryza sativa
  unsure (1)..(451): unsure at all n locations
agctntagagctagtaggctcctacttagatggtactccctctgtcccaaaatataagggagcctatccagattcgtagtactctactaaaatgtgttccatccaaccaaattaccttatattttcggacgaagtgagtatagatatgccatcaagttaactacaataagggattgacttctatgtaatatgtcatcatgttgtagcactgaaacatgcataagtggaaaataatatccaatgtgaggatggtatgtgggcctacgacccacattgtcattctcacattggacataccaatgatatttttcaactccatcatcttatctctatagtgcttatgctactcttttcattcacaacaaaatatcattggttttttcatgcaggtagcaggaatcaaatattgggatgagatatacngatcacaggcgtcaataaatgtctatga

SEQ ID NO: 42067 - DNA, 376 bp, Oryza sativa
  unsure (1)..(376): unsure at all n locations
gaacatgtgtcttgcaataaatgtttacaacgcataacctcacctctggtcggtgacgcttatggtataagtattgctttaaccttcgagaacaaagcccattctcgacaggagtcctaacaggtccagctagctgcattccangctgcgctagtggaggcctcaactgtggctgtcgaggtatgccaacttgagattgttggatctgtgaaaatggttgcaacatctgatgctgctgttgctgctgaatctgtgccagcttatgctgatggatcaaggcttgaatctgagggttctgttgaccctgcagatgaagagaactctggccttgggcacttgctgattaaattgtgttcatgatatcattctgctaata

SEQ ID NO: 42068 - DNA, 462 bp, Oryza sativa
  unsure (1)..(462): unsure at all n locations
agctcgtttaacgtatggatattctactattactatcattcctaatataagacgcctttcatatctaatataagacgcgcatttattttcatccctaatataagacgcgcatgtatnttaagattcaacttgtaaaatattggaccaacatttgaacaacattagcataatacgtagtatgaattaaattttgttgttgaaaataatatatcattgaattgatatttgaatctactttcatgtacctataattttgtcgcaacaatctttataatatttaagaaattataagtcaaaaatttaaatatttgatgaacatgtcttatattatgcgatgaagagagtactatgtataaaacttgttcgaaacataatcatatggaattctgcatgataaatctcttaatatctctttaggggaaggtcggtttttaatctataatccattagacatctgatggg

SEQ ID NO: 42069 - DNA, 467 bp, Oryza sativa
  unsure (1)..(467): unsure at all n locations
agcttgttaacttgcggcattttattgctgttaaggagttacatgcaaaaatagctggcatcggaaagatggtttccctgcaagagctaaaggcatttgatgtcaaaaaggaccatgagttcagcatatcacagctgagaggactgaatcagctaaggggatcaataagcatttctagtctttacaatgcagggcatgaagaggctagccaagcaaggctctgtgacaaggataacctaacttgtttgcacctgtcatggctgactttatctangaaccgtgttgcacggcgtactcttcctatcctggaggatcttaaaccacattctggccttaaaaatctgcaagttgttggatacaggcattctttaccatcatggctttgcagcactgtccatctcacctctttgcggtcacttccacctgatagatgcatacgttggcaaacaattccacatccccagcag

SEQ ID NO: 42070 - DNA, 479 bp, Oryza sativa
  unsure (1)..(479): unsure at all n locations
tagtgttgggttcatgccacaagtgagttatgccacaattttntagcaagctggtctacttgccattgagtgatttttttgccataacttgccacaattgtggccaacaaattcttagctatatattgtatggcatgccacactttgctaattttttttgtagtaaattatggaagtcatccaaaccgccccttagacatgggagagaaaaagttaggatgaagacgatgagagaaggaaaaaaagtagatggagttagctgggtgaataaaatatatgtgggtctctctgaggattcaccttgcagaaattcaatttcgtagaaatgtctttactgaacaaccactactacagaaacgaattttctgtacgaggacccctataggttgcaagcggaccgtaaatgatgacgtctgcaagattcattctcacatgcagctcgttaagaggcccgcatggaataacctattttcgtatgc

SEQ ID NO: 42071 - DNA, 346 bp, Oryza sativa
  unsure (1)..(346): unsure at all n locations
gcttctttgaagatcatcttgcaagttttgtctgggagctgcaatgaccggagaaggcaacttattgtgtgcagcaacttgctgtgctctgttggcaatagctttggcattgactggagcaactggtttattaacaaggcttgttctgttgatcatagnctttatatttaatggaccagctgagtggttgacttggtgagttctgttgggtatagcttctgcagtgactggaaaagccgacagattgacttggcttgatccgctggcaatagcatcagtagtgactggagcaacaagcagatcagcttggtttgttccataagcaatagcttctgtaatgatatca

SEQ ID NO: 42072 - DNA, 466 bp, Oryza sativa
  unsure (1)..(466): unsure at all n locations
tatttaactntgctggtttgatatgcattgaatcagacttgtacatctttctgaagatcgatgaccaaactgatgcggtagatgcagcctcgcatggataatggattgcctgcaagagatcgccggcgtttggtagttgggtgcgcgcgttgggtccggtccggtcggtcgcgccagtaaaaccgtcatcacagcgaacgcgtgagccaccttaactcggtgcgcctcaccctcttcaccgcaataaattggatcgcaaattattcttccaatcattttcgggctaactattacacgtacgtaatattgggcattttgggtgcgagtcccgcgttttcaggggaagtccggatattggcaatcaacaccgttcgctcacgatctgacggtcgtgatggcgtgcttactgagcctcacaatggctacacagaccgtgttggcaagattagcagtttacttgaatttg

SEQ ID NO: 42073 - DNA, 452 bp, Oryza sativa
  unsure (1)..(452): unsure at all n locations
agctngccacagaatgggctagcctgcgccatcatgatgaggctggtcttcaaatcaaagtatgcatctcacaagttgacttgcggcccaacgggcacgttgtcagctgagggggcagtgaactcgcggagtgtcttctcggccatactctacaagctcggtgacgcggggatggttggtttcttggtcaggtgatttttctaactcgcggcttaacattctagaagaaagactctggattgtctttgaaattttccggcaagttgaaaccagatgtgcactaccctattttcacacganaagtgaaaacaaccaaggttagcctacaaaggacagtgatatatacagaggtggtggtgataaattattagcttatagtaatctctttattaatcttccccggcaacggcgccaaaaatgcttattggtatttcttaatgatactactagaa

SEQ ID NO: 42074 - DNA, 472 bp, Oryza sativa
  unsure (1)..(472): unsure at all n locations
taatgttaccacattaaagttcatagttntgtgaacctactgaaatttgaatcatctcanaataagttatatttgattttatatggattttacaagtttaggtgttttgctgttaaaaagtaaaggcttttagtattatcttttacattttcagattttaaactcatggggtccacctgtcggtctcaggccaatatgcgaaaaggcccctaggatttcaggaaatcaaaccgcagtcctatgactgttctgtgtgtcttgagcttttgcagaaaggaccctatattaatctaaattctcgtgaggaggtccctcgttcgagctgaagcagatcaagccatggctgagctcgatctcaagcttgccagcggcaaacggtggctcgtttgagggtgcgaccaaaagacaaaatgaagatcatgctattccgattccattcctctacttttctcggtcagtggacatcggagtg

SEQ ID NO: 42075 - DNA, 428 bp, Oryza sativa
agcttggccattgggccaaagactgtcgattgccacgacgcggccaggcccacgtcgcacgggtggaggaggaagagccggctctgctcctagctcacgcaagcatcgagctacctccagcggcaccggccgcagcggctttcctccaccttgatgagccgaaggtactcgtctccctctgcgacggctccagcaacgacaaggctgatgggtggtacctcgacaccggcgccacccatcacatgaccggccgacgggagttcttcaccgagttcgactccagcgtccgaggctccgtcaagttcggggacgcctccggcgtgaagatcaagggtgttggctccgtgaccttcaccgccaagtccggtgagcacaggctgctcaccgaagtctactacatccccgcgttgaggaaatctatcatcagc

SEQ ID NO: 42076 - DNA, 444 bp, Oryza sativa
  unsure (1)..(444): unsure at all n locations
tatagaatactaagcttcgaattattactccctccgttctctgtagatgactatttatcttatttaaatattnttaaaatatgaaaatatttatgttatgtttaaagaatattcgatgacaaattaagtcataataaaataaataataattacataaaattgtaatatttatgttatgtttaaagaatatttgatgacaaattaagtcataataaaataaatgataattacataaaatttttaaataagatgaatggtcaaacgttaatcaaaatacagaagtcaacgacgttatacattaaaatacggaagtcaacgatgttatatattaaaatttaatacggagtgatacattaaaatacggagggacaatgttatacattaaaatttaatacggagtgatacattaaaatacgtgtcggtgacatgggatcgggaatatta

SEQ ID NO: 42077 - DNA, 384 bp, Oryza sativa
  unsure (1)..(384): unsure at all n locations
agcttaaccaccttattataaatatgnggtaccatcagntatcaaccaaacatgcccaagttcaacgctgtccttttcaccttgttattttagttgccatgcctaatcttgtttcttgatttatttttttttcagaagactagtttgcagatctaanaacggaaattaggtttgttctttgccttgtacgcgctgccaattaacatagcctatcaaaattttgcatactgtattgtctgcatcactgaaatttgcaattttgtgctatacactatctaggagttagatagtattaattctatcagtagtcttttcttatgaccaaataatccacttcaataattaaagtagtaattctgccagatggcacacatgtcattacac

SEQ ID NO: 42078 - DNA, 350 bp, Oryza sativa
  unsure (1)..(350): unsure at all n locations
ngaatcaagagtacctcgctcctataccaattgaacgtgcttagatgtagcctagaggggggtgaattggctntcctgaaattttctcaacaattgcagcggttaaattaacagggcccggaacctcctggtgatgaacaccagaacttccgggcatgatgagtagccaggaacttccggagttcttgagccaggaacttncgggcagctgagataaattaaaactgagatgaaaaatatgtcctagcaagagaagtttaggcacacagaggaataagatgaagatcgcagaatatcagcagattcacacaaagatcatgcacaagagagacaaagacgaatttttcccg

SEQ ID NO: 42079 - DNA, 407 bp, Oryza sativa
  unsure (1)..(407): unsure at all n locations
agctngaacatcgaggtgtgtaaatttaaacatatagtcatgataattttcaaaatacgttagaactttgataatggtgttatctatggctttacaaaattttagcttaaaatatgactcatataaagataaataaaagaagaaaaatgctgttaatcagtaaagtggaacactttaatagttttagaggtaaaatgagtaaaaaataatttaaggggtaagtgaacaaaacaaatagtttgaggaagtaaaataaatttttcatgcctatgctatggaactatttattgatgttggaacccggacaacccaggtacacaaaggcccatcttagcggngatggctagttagcgacccatcgtgcgctccctccccgcatggcgcagccacgtggcgcgcatggagag

SEQ ID NO: 42080 - DNA, 468 bp, Oryza sativa
tcttcatgagcttgtagcctccactcttcttcttggatgacttgtctctatcatcatccttggaagggcacttggaagcaaagtgtcccttctcaccatactcaaaacacctcaagttggagagagtcttattgagtcttctatttcttctcctattggagttggagccccttcctctctcctttctcctttccaagagatcattgaaccttctagcaagaaggatcatctcttcctccaagtcctcattgacttcattcaccttactcttgctcttgtcttcaacttcggcttggagagcaatgcacttcttagagggtgaggcttcctccatctccttcttcttcaacttgtacatgtcattggtgttgatcttccccaagaggcttgcgggtgtcattcttgacatgtcggagttgatgagcatggtgacaaaggtctcatacttctccggtagggctctaagca

SEQ ID NO: 42081 - DNA, 373 bp, Oryza sativa
agcttgtgtctcttcttggcagaggttgccattgccatggactccttctgaagcaatggaggcacgctacgagctgatgcccacaagccatcagggggctttgtactggctgcacgacgagagatgccatgtacctcggtggctgccgcaacacgcaccggcgtcctgtgcctcgacgcagcgccgccaccaccaccggacggcgtcgagctggaagaaggcgtggaagacctcctcctctcagctgactgtgctctgtttgtcgatgctgtgccttcagctgctgaagccctgctcagacttggagacgtgcatcgcctcaccgaggaagcagcagcctgtggcgccggcgtgccgccggacttgaacctgg

SEQ ID NO: 42082 - DNA, 490 bp, Oryza sativa
  unsure (1)..(490): unsure at all n locations
tgaagcgttctaactatcatagataccatcattagagatgtgtcactttttacatagctngacatgggtgatcatggtcatcattgcacgggtggtcatttttaaatatgcagtcatttcaatgtgatagtacggcgcaaatttatatatgattcatttttctggtgttgcagaaaatgctacttccgtgtggtctgcctcctgagagagacgaagattgaggtggccttcaggtctggcgttcagtgttactgtcactactggaacctatggttcagtatcagtttgatatccaaagcaagatcaaactaatctttgcctagccacctactactactatgtaagactctgtccatcttgaacatctgaagcactctgtgtacccttctcgaacatgttcatcagtaatgttcggcgcatgtgtgtaacggatcttttatgtaaggtgaatcgtgatggacagaatgtctctggagcgatcattcatatg

SEQ ID NO: 42083 - DNA, 317 bp, Oryza sativa
  unsure (1)..(317): unsure at all n locations
agcttaacattacaccgtttttttngtataacatctttgaatcatgcgttgataggttgctcctgcattcttcaatccaaagggcatggtgatgtaacagtaggccccaaagggcgtgataaacgaggtcttcaagcagtcggattcttttagtcggatctgatgatatcccgaataacagtccaagaagctgagtaactcgcagccagcccgtgagtcaaccacctggtcaatgcgaggtaacccaaaagggtctttgggacaagatttgttgaggtcggtataatcgacacacatgcgccattgctccgtctttt

SEQ ID NO: 42084 - DNA, 396 bp, Oryza sativa
  unsure (1)..(396): unsure at all n locations
atctgccttcttccataggatncttcaacctctgctgttccctgcagattaccagcttgcatccatggctggtctcccctatttatacaccaactccttcccctgccagcttcgtctcccaaggcaagagcaacgcanagcaaagaacagatacttcttctctccacctgcctcgcaagcttcttctgtttcttggatctcacctcgccacgccattgacgccataaggagcttgtgagaggtggtagccaagaaggaggaggaggagatggggttcgtgctggtgatctcgctgcccttcatcttcttctccatcctgctcggcttcggctgctacttcctcggcaagcacaagggccgcgaggagatgcgcaccggcgtcggcgcccaggtcta

SEQ ID NO: 42085 - DNA, 434 bp, Oryza sativa
  unsure (1)..(434): unsure at all n locations
gagcagcggnctgatcgggtcgcttcctgtgacataactgctattggttctactgctcggtccaaagttgagcatatagtaattctggaattgaaaatataccatatataacgaggctttccacgcctcgatatttcagatgttcataatatatctcgaccacaagtagagacaatgtttcaggttcatcatatctgatcaaagtagtgcccttgccaaattcagttccagagcaacatgcaactcccactaggtgacccaaaaatntcattgtggttccactacaaccaagttaaacacgttaaagtgaatttcttcttcatgttcggacagaagtgcatagctagatcaagataagctagagagcaacccaatagttagatgacttgaacatagccttataaatagcatgcaagcctataggtatatataat

SEQ ID NO: 42086 - DNA, 405 bp, Oryza sativa
  unsure (1)..(405): unsure at all n locations
ntaanatgaaagatattaactctagagagatttatattgtttgtgctctanagatagntgaacgggaattgaaagggtatttgctggaggtgttcgggaatggattcaaaggaaatataatttacagccaaagttaaagattaaataaaataaacagagggtttttttataaaattaaaaaaagagcgataaactttgcaaataaagtttagatccaaattaaacaagagattaaaaacagagattactccaacggaagaatcaagtagtacatgacttaaaatattttgcaaaaacttttccctgaaatttgagtccgttacagggatccacgctcattaagttntcaatccaattcctttatagcatggatgtgaacaactaattttgacgctatgataaaat

SEQ ID NO: 42087 - DNA, 457 bp, Oryza sativa
  unsure (1)..(457): unsure at all n locations
agcttcttccaaagcatacggctttctagatgtatatgacgatctctagacagatggatcttatatgaatcgtatgatgaagtaccacatgagtggatatataagaaaggaatccaaatctgccgaatcgctcatgttatgatcttctacatcctaagtctccgcgttccgtcatctggcttatgttcttcatgtagcattcagatcgaatgactctatgaaattacgtcgatacttctacatattatgggtaacgtaggagacatccctattttcccccgggggtcttaattaccactgcttagctntcaattcgcctctgaaccatcaaataaatgtgaataacccgtcctcctctctntgaaacaaagggcgcttccggttctgtgcgtgcttaaacaattntgtcttctcatataccatatctctagagcaataatttttatgaagactactg

SEQ ID NO: 42088 - DNA, 450 bp, Oryza sativa
  unsure (1)..(450): unsure at all n locations
ntatgttcggcgcagtactaatactggaacttatgagcattatttgctctatcaatcaccatctactttagacatatcttctgaaactnttttcaaatccaaaagtccagtatcttcctacaaattagtgaattaggaggagctctttgtgccgaaaaagaaagagcagggcaatatttcaaacttgcattcgaactgcgaaatatttatacaaaggaggagagatcaagataatgcagcagggttggttatctaattggctagtcaaacatgaggtggttcatagatctttgggcttcgatcatcgaggaatagagactttgcaaataaaagcagaggattgggattccattgctgtcattttatatgtatatggttacaattatttacgttcccaatgtgcttatgacgttgcacccggtggatctttagctagcgtgtatcatctta

SEQ ID NO: 42089 - DNA, 451 bp, Oryza sativa
  unsure (1)..(451): unsure at all n locations
agctngaggaatgtttatcataacaaacatgtatgccctntgccttggtaatgttaaactcggnggaatatgactagggaacttacatatcgaatttttggatcgagagatgatgccgaattagaggagaccaatggcatactccaattgtaccttctcttcaaagattctatgtgtgtctctacaaaacatataggcattattttgtgtgcttatgattggtatcatgctaaatgtgacctatgaaatctgtccaatactgacataaaaaatggtattctcagaaatagacttatcggttacctatattctggagctgctccaatgcagcaagaagattggtatctaacaattcaatcatttccctgatataattcaacaatagcaataagtggcacacatgtcaagatgcagcatattagcattagacagcaaatgtgtaaccactgta

SEQ ID NO: 42090 - DNA, 192 bp, Oryza sativa
atgatatagtacaaacacgatcagtcaatacattccctactaatatggaatgaatacgatacgtgttgctgtgcttatgccaccagttaacgatattgaagccatcatcgtattggctgacagtgtcactggccagataggcaaacaactcagatgcactcacacgagtaccgatctgatgaatacagaaaa

SEQ ID NO: 42091 - DNA, 204 bp, Oryza sativa
aaacacatatatctttcagtagtttaataccggtatttacacgttgtttttatgacgaaatatttcctacagccaatggtggcattataatcatccaagctggaatgctaagataactggaatgctcattgagatgctaagcaatattgatggaccagcttgcaaaatcggcgactaatcttgaccttaaatacatctattgag

SEQ ID NO: 42092 - DNA, 466 bp, Oryza sativa
  unsure (1)..(466): unsure at all n locations
agcttgaaggagcaagagacgaagncgccaatgtctcatatcacttgtccaagctatgttccttaatgacagtggtccgagtgcacttgacgcaaccgaaatttttgacaagctgagagttgcaccggatgtatacttcaaaaatatcaagaaagctggaagcatgggagctagcatggcattggcgatgacaaaatccttgtacccgagaattgaaatcgacaccattgatggatttgcagatgggacaagtgaagaagctgctcttgatcttatcaataatgctcaaagtgcggctgacaagattgcaagtgatgttgtagagcaattccgcaacaacgaccttcagccgagcaataataactctgatgatgaaaggactgattctgactgagtatgatngtaacaaatggaggcataacttgtactatactggtgtatttatgctgtgcttgatagttctagc

SEQ ID NO: 42093 - DNA, 331 bp, Oryza sativa
  unsure (1)..(331): unsure at all n locations
cttactagcaaattcacgactaattccaatggcgagtttgaagtatgatctaccgctcctggaccgagacacaagattctcactgtggcaagtgaagatgngaaccgttcttgcacagtaagacctcgatgatgcgctttctggatttgacaagacgactcatgattggtccaacgatgagaagaatatggatcgtaaggctatgtcatatatncatcttcatctatctaacaatatcttgcaggaagtgcttaaggaggatacagccgctgggctcgggttgaagctggaatanatatgcatgactaatgatctgaccactcagatgcac

SEQ ID NO: 42094 - DNA, 430 bp, Oryza sativa
  unsure (1)..(430): unsure at all n locations
gcttagaaggtagagagacctgcttccgctggctttgctgtgatccgccgattccagtgctcgtgatgtctgaagggccatctcagaatggagccgcaggcagcacatacccatctacaagacaaacatgccaatggaagagtcagatgacactgtaaaatgttattgagtttccagcttgattggtttctctttatacgataaaaagaagtcctgtttttctttacaaattgctgaaaagatctggatcactgaatgagtataatattagactaaaggaatgagaggaaggagtaggttactgaaaactaaagcatatgatgagtgacattagctctttatttttcagattgtgaatcatatcacagtgaaattatccattctntcaaactaanatcaaaggcaatgcagacggaattcgatataacat

SEQ ID NO: 42095 - DNA, 482 bp, Oryza sativa
  unsure (1)..(482): unsure at all n locations
cacatcaaactcagctagcaagggagtctggttgccgaagcaaattctatggcacgttatatttgcaaagagttgctgggatcccgancagtgaccgccgcaccgattgaagcaacccaagacagtacccaagtccgcagtttcttaagtttggcaggatactatcggagattcatcgagaacttctccaaaatcgctcgacccatgacacagttgttgaagaaagaagagaaatttgtgtggagcccgcaatgcgagaaggcgtttcanactctcaaggaaaagctggtttcctcgccagtgttaatcttgccggatacccgcaaggacttcatggtgtattgtgatgcttcgcgccaaggattggggtgcgtgctcatgcaagatggtcatgtggtagcctatgcctcacgtcagctacgacctcatgaaggcaactaccctacacatgacttnggaatagccgcagtagttcatgctct

SEQ ID NO: 42096 - DNA, 441 bp, Oryza sativa
  unsure (1)..(441): unsure at all n locations
agctcggctggctctggctgagacatggtgtctgtgcctctcgtggagancaagaagagtgacgcttgggggagaggacgagtgggccgccgccgtcgcagcctctaggggcagccgccgccgtcataggctcggagcatccgggcgtagccgccgccgtcgcaggctcgtagcctccaagcccagctgccgcctccgggcaaggctgcagccgccgtgacacgcagtcgcagctaccgctgccgtcttcgggttcgggcgcagccgccgctgtcgcctgtataggatgagagggagtgatggactgangaagacatagatggggcgtacggacttatgactacagcttttcatgagaagtagatgggccttggcccgagttaatttagcccaaaacaaagctatattgcgttactgacgccaaattagcggtatcttccg

SEQ ID NO: 42097 - DNA, 380 bp, Oryza sativa
  unsure (1)..(380): unsure at all n locations
ntcacatcattagctgattagagcagttagattagttcatatcagctaatttcttccgntcgattgataaggggtattaagagggcaaactangatagttaaggtcatcattactgattcttgaaaagaaagggtcatcgcttcttagccgttggatgaaacacaacaatccatcagtcaccgggtgagtcttttttgctttaccaaccgttagattcgttataggaaaaccatcgcaaacatattaaacaatgggaaggcaaaaggttgtcccttcattccttntatatttttcaataaaattatacaaaatatagctattttacatgttatttctactaatatcacacaaaactcctgcggccacgcgtggggtatca

SEQ ID NO: 42098 - DNA, 318 bp, Oryza sativa
  unsure (1)..(318): unsure at all n locations
agctntgccgacatgcgggattcttgcacctgctgtcctcgccggccagccgtcgagcgctgaataccgcgccacacccaccggcagttcctcctcacccataggacgcctcctccaccggcggccgcaccactctgctgcaagccggcctcctacatcggacgcgcctcgcgccaatccggtctacaaatatttggcgcacctcccgcgccaagccggcctccatctgcgccgtccgcgcctttcgcgccgagccggcctccgctgtcaccagctgcgctactttgcgccaagccggtctccgaccccaccaccaaa

SEQ ID NO: 42099 - DNA, 431 bp, Oryza sativa
  unsure (1)..(431): unsure at all n locations
ntacttgcagctctctacatcttaataaagatttggctgacgttctgcaccagcctggtgaaagaaaagttgtagcatcccataaaccctcaggaatccagctaaattntatataagagtatccttttatagttatcaatgacactnttattaaccacggtaccttaggcattcagtgtctaaatttagctgcaatgttcggtaaaaaaaaagctagctgcaataattccttaggtgtttggaagcaatcaacactgggattttagtgtattttgtaggttactacttcaatctcttgatgagcaaccgatgggtttgatttggactggtttctagaattgaaatcatcctatttcacagtacattnttatgtcgacattcgaatagtacagatattctattgtagtttttaacatactggggttatatga

SEQ ID NO: 42100 - DNA, 439 bp, Oryza sativa
agcttaagattagtgaacttcattgagcatttattccgttgagatggacggaaacatcttgatcttatatgtagcccatctgctgttgctgatttctcgcgtgtgttaatactagctttacttatgagcaatcatgtcagcatctggtgaaatttgtaaccgccttcgagtgtcaacatatatttttgctcttcactgtcttcaggaagactggacataacctccactgtattttctgttgccaaaacattggtatagagttttttgtataaagattcttatgatgctttcacgattaaggaagacacaaataaagtaactttgctctcagatcaagaactgcccatctgtgtttgattgaagcaagttgtatgggttcacattctgtagtaagggacaagagcaagaaattcatgtgttctttctattgtaattgaaa

SEQ ID NO: 42101 - DNA, 458 bp, Oryza sativa
  unsure (1)..(458): unsure at all n locations
gacacatgatactaagcttccgaccgacgtggctcgacagcactggtgtttatcatgaaagccatcaagttacagctttcaggtgaaatttactgaactaccatcatcgtgatcgaattttctgaacttggtgatgagacagtcctgaattctgactacctgagtgaatcttgtgtaggccggcccaagaatctgcatcgggaaggatttcgcgtacaggcagatgaagatcttcgcggncgtgctgatccgttccttcgtgttcaaacttcgcgacaagaaagacaacgtcagttacaggacagcgattacgcttgccatcgatcaggatctccatctgactgctacggcaagatgagtgtacagtgtacactatacactatacagtgacagtggcacgtanggcagctgactctactcacgctagtgacagctccttgtgaaaacataataataat

SEQ ID NO: 42102 - DNA, 321 bp, Oryza sativa
  unsure (1)..(321): unsure at all n locations
agctagccgctcgcctttggaacgaccactctgttcgccttccactccggatggatgacttcacggatgaatccggcctccagaagtcttgccacctcctcgcggatgaaggcttgacgttccggggcctgccgccgcactttctgccggaccggccttgcgcccggccgcacggcgagacggtgctcaatcacctccctgnggaccccgggcatatccgccggtctccacgcgaagacgtcagcgtttgcccgcaggaatgagacgagcgcgtcttcctatttgccattcagaagaccaccgatccgtgtggtcttggat

SEQ ID NO: 42103 - DNA, 457 bp, Oryza sativa
gtgttatctagtttacctttgtgagatactctaagtagtatttatgttgtagcatcatcttagtagtaacactaataacaggcgacaagcaataaataaatattaatactctcctctctctctctctcggccattctttcttctcaatccagccatttctcttaaatgtgagatacaacttatccacacattatgataacaagaataactattacctggtttcgtagggttcaccctttatattggtgaagatatgtcaatgatgccctttatatcttgctaattattattgattttgaatttcagaagtaaatagatatataaaatactaaattgaaagtgaagataggtacaactgtatatttatttaattcttaattatggaaataaaataaaagtccatgatgttctcaattgtatttttcccgctagaagaattcccatgcaatctataatc

SEQ ID NO: 42104 - DNA, 390 bp, Oryza sativa
agcttccgcgaatgtggcgatatcgcgtccttgctgctgctgactggacacttcacgtcaacggcgtcttcttctggaaggagggatatgagtacttacactagtctaggctaatgagagactgtgttagtgaatacaagtgacgtgttcattgctgggccgctttggaacacgaccgatcatcaagagccagccagctgtgatgcatccagtcgaggacgtcactgccgtacacataacgaaaggatgccgtgtacgagcggagagtacactatgcttggtgttaccgcctgaaaagaaaacgctatgtaactgaaactaatctccttattttcgagctaaagaagaagatacacaatgtgatcatgctcctttcttttttacatggat

SEQ ID NO: 42105 - DNA, 385 bp, Oryza sativa
tacgtgacctatgaaactcagcttattgagtccttacctatttcttatttggcccctgtctattgcgggcattaactcgctgatgagaattaccacattgattaacgctaaattgtgttcagcctgatataaatatatgatactctgtacgttctcgtatggaaaatcgctcatgacaatgtttaactcaatttataactctcaagtcgttgagtctcacgatgtgacaattatatgaatagcattgtcttgaaaaatactgtcataagagtatacatatatcaatctgcatcgatatcttcatacagactcgtagaccacgttgcgttgtgcagaccgtgtctatggcctaaacgtattcttttaccacttctgagggagtatg

SEQ ID NO: 42106 - DNA, 468 bp, Oryza sativa
  unsure (1)..(468): unsure at all n locations
agcttaccggcnagggtttctttggcctactgcagtgtccgacgccgacaaaattgtgcgcacgtgcgaaggttgccaattnttcgccagacaaattcatctaccagctcaagagttgcaaacaatcccgctgtcttggccgtttgcggtttgggggctcgacatggttggcccgtttaaaaaggcagtcggcggttacacgcatctctttgtggccattgataaattttccaagtggattgaagctaaaccggttgtcacaatcacagcagataacgctcgagacttcttcatcaacattgtgcatagatttggagtacccaatcggatcatcactgataatggcacacaattcactggcggagtttttaaagacttttgtgaggaatttggaattaagaattgctacgcctcagtggcacaccccatgagcaatggacaggtggagcgagccaatggcatgatact

SEQ ID NO: 42107 - DNA, 448 bp, Oryza sativa
  unsure (1)..(448): unsure at all n locations
tcaagaaagcctncttaaacaagtcggggtgctcttcattcataagagaatccaccttcccaaggaanaagtaggacgcaatcttctccttgaattgcgtgtcaatgtctgtgtttccttgggctggtgcctccatcttcttcttcttgggctgccgaagagactgaccaacctcttgcggcggcaccttcctcttcccattgaaggcaagcacattcttgttcgcctgaagcgcggtgtccagcagcacatcgtcgtcaccggaatcggactcttggtcgtcatcctcatcatcatcggacggagacgcattcttgttggcctgaagcgctggcagcgtctcgtcgtcactggaatcggactcttggtcgtcatcgccggacgaggacacaatcttgttcgccttcagcgctgactcttggtcgtcatcagaatcagaatcagactc

SEQ ID NO: 42108 - DNA, 453 bp, Oryza sativa
  unsure (1)..(453): unsure at all n locations
ctgcagcttatccaaacaaagttaggacaaattcaactttatctggtaatctaagncatctaagtgagctctacttacaggaaaataatttgagtggaccgattcctagctccttagggagttgcaagaatctagaagctttaaacctgtcttgtaacagctttgatagtagcataccagaggaactcgctactctttcctctctttctgaatggttggacttgtctcacaaccaactcgatggagaaataccatcagagattggtggctcgatcaatcttgatattctaaatatttccaataaccgactgtcaggacaaattccctctgctcttggcgactgtgtccacttaagctctcttcgtatggaagggaaccttcttgatggacgaattcctgattctttcataatattaagaggcattgttgagttatatctttctcagaacaatc

SEQ ID NO: 42109 - DNA, 504 bp, Oryza sativa
  unsure (1)..(504): unsure at all n locations
cacttcaatctcagctntcctngcaataatagcttatgtgggcccattccattatttggatcatttcataatctgaccaaacttgacatggcatacaacatgctagaagcaaatgactggagctttgtctcatcactctcaaattgctccagattgactgaactgatgctggatgggaataatcttcaagggaacctaccaagttcgattggtaacctttcgagtagtcttgagtacttgtggctaagaaataaccaaatttcctggcttataccaccagggatcggcaaccttaagagtttgaatatgttgtacatggattacaattatttaactggtaatataccaccaacaattggatatttacacaacctcgtattcctgtccttttgacaaaacagactgtctgggcaaatcccttggactatangtaaccttgttcagctgaatgaactgaatcttgatgggaataacttgagtggaagtatacctgagagtatacat

SEQ ID NO: 42110 - DNA, 442 bp, Oryza sativa
agcttgaaggggtgcttgctagtcctgtggagtggacaccaagctttagtcgccccggaagttgtccttgtaggctcgtgcttcttgtgggtaggacaagatttggccgcattaggatccttctcgggcttggatattgtcgacgttccgttctccgcttctgcgggaagatctttcgacatggagtcgaccggggtcgtaatcatgctgttctcactaccgataattgctgcgccagtcgagatcggcattgtggtgttgaccgggaagacgatttcacctacttgagtccacatcagcatcgtcgaagttgaaactccttggtcgatgccggtgttgacgttgtcgtcgagaaggcttgaagtcatagtagtagaaccttgagcaccaagtcttcctacttggcgcgccactatcgacagtggatacccgtagatcggat

SEQ ID NO: 42111 - DNA, 490 bp, Oryza sativa
  unsure (1)..(490): unsure at all n locations
ggccacgcctcacgttacctgttcctnctgtgagcagaggatgaggaatatgangangangangangangaanaataagaataagaagaagaagaagaagaagaagaagaagaaagggaaaacgatgctagaggtttgcatgcgggccccatgtgcttgagaaagagatatatatagagagttgcagatctgacatgtgggcccaagggcattttagaactttcacgtgatttctctcttctctttcacatgattattttaatggtgtggtgtccaccagcaaatatccaacttttgcgagtgtctttccccaaaagtcacttcgcgtggtgtcctatagctaaaaccacgaagccacgatgtcttatagcaaaatttgccttaatctaaacaaaaccctgaacgggtatctagctatttatgaaggtgagaggacgaccaaggggtccctaggctcatgctccgcctggttggggtgcacnctacattg

SEQ ID NO: 42112 - DNA, 454 bp, Oryza sativa
  unsure (1)..(454): unsure at all n locations
agctttcctatgaatagggatggcgatagtgtgttctcttaatagtcctaagaaagtatatacccctcaattaatttggtaaatttgcccagcacaaaaaaaatgttgataacttttaaatatatatataaaccacccctgcctacaatatgcatgcatccccatcatacacttatcttaattggttaaacgttaacaaatattaatttatatatttatatccctatcatgcaattaaagttctacatttaattagtgtgcgacagactggcaaattacagcagagaaaatctctgagatttcttggacaacatataaacacttatntttttgtttaaaggatgtgaacattgtcagttagtcaccctatggtggatagctagcgatatagaacctatatgtgataccgtactgataccaaatacccaatatgtactatacatttatcattatg

SEQ ID NO: 42113 - DNA, 473 bp, Oryza sativa
  unsure (1)..(473): unsure at all n locations
tcagaagaagttaccccctcgtgacacagcataagacgcgccgcttgatcttcataagggaggcatgtaggcctctctcgctggccaccgtataatagccgctgcatgcgtctctcttctccatatatattcccctgtcgtcttcgtagcagctacgctcacactgctagttagctgcttttccgaattgtttcatattgtaaggtgttttacatttgtttgtcgttctaaattaaacatttacgatttatgattaagtttattgaaaaaaatatggcaatatttttgacacaaaataaataggatgcaaaaatgtactccctccgtcccataatataagaaatttcgagtttttcctttacaacgttgaccactcgtcttatntaattntttttggtaatataaaacatgaacagtataactaaagtaacgtggataataaagtaagtcacaaataaaataaataataattt

SEQ ID NO: 42114 - DNA, 462 bp, Oryza sativa
agcttaaaggggcaaatgggatccagcaattatcatacatgtacgaccatatatatcagagcaaacatacaaactagctacgaaacaaacgacttgatcacgagtgtatccatatatatatgcatgcttgacaagcaacaatatataatgcatcaagaattcaggattccatgcgaaatttctgatacgaatgcgacgcttgcatacatcaacaaataatgctgctagcacatgcagatgtagcagacgtacaccagatcgatcgatgtgcggtgcggatatatatttaatatttaattttgatcaatcagcgaatagctaatatgcagcaactggcgggccacggaccttcacctcatctcctgcacgacatgtgattaattgcttcaactaatattatccccaatggtatttaatttgttttctctcgtacgatctggtgcatgcaatgcaagcagctac

SEQ ID NO: 42115 - DNA, 436 bp, Oryza sativa
  unsure (1)..(436): unsure at all n locations
tattaggaacatgaaactcaacttacatggagatggatcacccagcaaatatgcagtatacagtatatggatatgctatgaacatgtagtctccctcttctctcacacacacacccagatacgtacacacaaaaatggagctattctcatcacagcaatggctagcacttctacctccgatcatcctctgtatccttctgttctcctatgtgtatatcattctatggctaagaccagagcggttgaggcaaaaactgaggagccaaggagtgaggggtcccaagccttcttttctctttggaaacataccagagatgaggagaatccagcaattggccaagtcagcacatgaacaagaagcagggagtaccgacatgttttcatcaaattatgtggcaactcttttcccttacttcctccactggagcanggttta

SEQ ID NO: 42116 - DNA, 471 bp, Oryza sativa
ctctaagtcacctgcggcatgcagcttgacgcactgatggatatacactttgtcgtatcttatgcactgaggaaggttggtacatgggtcatcgtcaattccttgcagcaaaccacccggtacagaagaaaggcaagcattttgaacatacggtggaccaccgtacgaagcctaaacatcgcagcgggaaaacagtgtttgctatggttaaagatcttatagtagtgtttggaaaggggcctggcagccagcctatagaaagcgaagatggtcacgcggcgatggtggaaaaaaactccatattttgggagttacccaactgggaattcttggacattcgccacgcaatcgacgtgatgcaccttactaagaacctttgcgttaaccttcttggcttcctacgtgtatatggaaaagtcgaagatacactggaagcacgtaataatctgaagcatatggaacaacgcggcg

SEQ ID NO: 42117 - DNA, 407 bp, Oryza sativa
  unsure (1)..(407): unsure at all n locations
ngataaacgcntttaagacatcaacagctgttttgaatcttccagcacagcatanatacaccggtattatacaaattgtgcctccatcattcgtcatncaatacatntacatttaatcagtatcagtcttctcatcatcagagttattgttaccagtcggccgaaggtcggtatcctgaaaccgatctacgacatcacctgcaatcttgtcggctgctttttgagtgtcgttgataagatcaagggcagcctcttcgcttgtcccatccgtaaaaccatcaatggcatcaatatcgatcttcgggtacagggatttggtcattgctagcgctaaaccttgctccatgctttcggcttctttaatattcttgaaatatgtgtccggagcgatctcagcttgtaaatac

SEQ ID NO: 42118 - DNA, 392 bp, Oryza sativa
  unsure (1)..(392): unsure at all n locations
agctngagcagagtctgtgatggagacagtttaatangaggttgagagagagaggtgagtggttggagggagaagaaataaccctcacatgtgggtctcagaccctgtttaaatgggataaaactttctagtcctatcacattggatgtttggacattaattataaatattaaacgtagactattgataaaagccatttataaccttggactaattcgcgagacaaatctattgagcctaattaattcatgattagcctatgtgatgctacagtaaacatgcgctaattatggattaattaggcttaaaaaaaatgtcacacgaattagctcttatttatgtaattagttntataagtagtttatgtttaatacttcaaattcatccgatat

SEQ ID NO: 42119 - DNA, 421 bp, Oryza sativa
  unsure (1)..(421): unsure at all n locations
tcttaattnntgtgaccaagatgtcgaattgagcctgagatttaattntgcaatatgcataaatggttcacatcaatgactgggcacgaagacaagaatggttctggagttttaactacaaataccttcgatgtctttcagagccgagtccctctgtttggtcaattcacccttgtctttttccagagctttgattcgcttttctagctcggtgatcttggcaacttgcactataatattttccattggttaattacatacggatagcagcttggaataagtcaaacaggaaaaaatgttacctttggatgaaccactcagctcgaaattggaatcttggagcttggcgattcggtccctaagatcatgttcagttttcctggcaagctccctggtttcatggagttgggctcttgtctct

SEQ ID NO: 42120 - DNA, 452 bp, Oryza sativa
  unsure (1)..(452): unsure at all n locations
agctngtattaaacacctattcccgngacttgctgagtacgaaagtactcacccttgctctatataaatatatatagntcctctgccctgaagttgaagatgaagtgaagtgaagattatggttttgtcttggttcccagccgtcgcctgtggtgttgggtgttagtccgttggtttcactgctgctgttgttggtgtttcctcgtccgcgtcgncggttgtattctcgggctgtctgagctgcaacctaagttaaggtaaataagtcctctatttattttaaggattgcaatgaatcatatttgtcaccgtgggtaccagcactatgtcctgtgactggtactgtgatcgcggtttcgtaggaagtggttcgcgccgtttatctacgacacgnctctgtcaggagccattgtacggcggtgcctgatcggtgtgtgacataatacaacatg

SEQ ID NO: 42121 - DNA, 459 bp, Oryza sativa
tatgctccactcccacagtcagctcaactgggatctaagtcaaaggtcttctccttctggatcctttttcttcaactgaggttcgatgattattgcaagaatgagcatatgacatactcaacaagccacacagtaaatatgcaagtgcacaaggataccaaaggatggcataatataggctcatttgcaaaagcagcatttagcaaagatactcaacaagccacacagtaaatatgcaagtgcacaaggataccaaaggatggcataatataggctcatttgcaaaagcagcatttagcaaagatactcaacaagccacacagtaaatatgcaagtgcacaaggataccaaaggatggcataatataggctcatttgcaaaagcagcatttagcaaagatttaagagtagtaaaacagtagagtaattaatcatcaatattaatcaacactgaacagca

SEQ ID NO: 42122 - DNA, 430 bp, Oryza sativa
  unsure (1)..(430): unsure at all n locations
agcttggaggcagccagcaccacaagacatgttcatgctcttgcagtgaagatagggttcatatttgacgctcatgttgtcaatgggcttattgattcctattggaagtgcagttgtctcagtgatgcaaacagagtgtttgaagaatgttcttctggtgacattatagcttgtacatccatgatcacagcactctcacagtgtgaccatggtgagggtgcaataaagctgttcatggaaatgctaaggaaggggcttgagccagatcctttcgtgctaagtagcttactgaatgcttgtgctagcttatcagcttatgagcaagggaagcaagtccatgctcatctgatcaagcgacagttcatgtcagatgncgttgcagggaatgctcttgtgtacacttatgctaagtgtggtagcatagaggatg

SEQ ID NO: 42123 - DNA, 233 bp, Oryza sativa
  unsure (1)..(233): unsure at all n locations
agcttcttacgatgaaacatgctgctcatttttattcatacttgatatagatacttgtatttatctatttattttntttggtgggcttcatcgatcgtctatttattttttggggtgggcttcatcgataacgtctacagtgattttgttaatattaagaattgtaaacacccgcgccgtgtgtctaaaaataaaggaataagttcacttcgtgaccctcaaaagtgatcgaa

SEQ ID NO: 42124 - DNA, 482 bp, Oryza sativa
  unsure (1)..(482): unsure at all n locations
caaactaagctggtgaggataggntagcatttcgaggaagtctaaggattcttattcttgtggaatgactcctgaaagctgatttgaagatagatccaaagcttccagctgcttcagcccaccaagttgagatggaattggcccagtgaggaagttatgtgacatatttatcccatgagttaaaacaagttccccaacaatttctgggatgctaccattgaatgcattattggagaaatcaatgaatacaagggttcttagtatttgagcaagtgtggtgtcatgacctttgtatgtgagtgaggctttatatctatatactagtcctacacttggcacagcatgatccatgaccaatgatgtatttgtgtctatatgtagcatcgactccaacttcttaaaccacttgtctttgggcaacggaccagagaagttatttgaggatatgtcaataattattgcattnggaaatgcacatgtgc

SEQ ID NO: 42125 - DNA, 145 bp, Oryza sativa
aatggacatggcaaagccgtccttctttgagctagatagccaggcgaactggtcatggcgaagtcgtccttcttcggtaggtactcatgcgacccttcgcctcgcatcatccttggttcatagccatcgccacgagtttcggcag

SEQ ID NO: 42126 - DNA, 438 bp, Oryza sativa
  unsure (1)..(438): unsure at all n locations
ngcattctcctctgtactaattatattgngtatgtcttgctagtaccattcatattcatcttgttatctttcaggtgaggatgaaagtattgatgtgtgttcttcctgccctacacgggcggtgagggtggtgagtagctgttcaacttggctcttgccccagctggtcgcccgtgtaggatggttgacactccacgggcttctttgtttatttgaatttaagagacttctgctgctattcttttgtgttgtatgacaggtttatgaacccgattatgttggtggtggcggcagtggccaatggaggcaactggtgggctccccagaggtgacggggcgctgatccggtctccctctttctcttcctctncatcggcctcccactagtggcatgtagatctagggagggggggcattgctctgggtggtggtgttcgc

SEQ ID NO: 42127 - DNA, 369 bp, Oryza sativa
  unsure (1)..(369): unsure at all n locations
agcttcgcctcgccaccatgcggcgatcggagtgggaggaccggtggtgcaagcggcacccggagcaccggctgtccaagggcgtgtgcccctactgcctccgcgaccgcctcgcccacctctccgcctnctcctcgggcaccaccacgacgcgcgcctcctcctccgccgaatccagcggctactcctccggctcgcctccctgctacggggccctctcggccgacgtcagctccgtacacgtggtcggcgccgccggctcgtccttcgccaacgtcgccgccttctcgcagccgctgatgccgagctcggttagtcggaaaccagccggaggggggcaagaagaagccggaagggaggcatctggta

SEQ ID NO: 42128 - DNA, 462 bp, Oryza sativa
ggataagcagagtatgatgataggggaaaaacaaagagagagagttttcagaatctcagataccaaagctgcagccgtacggttcggtcttcgaggtacatcgtcttggagaggaaatcgatcccgatcgtcgcctgcacgccgccgccgccgccgcaacaacatgaacaccgtcaaattcatcgaacaaaccttgcccaaaaaagaaaaaaaactggaactctctccagcgcgtaagatcgatcgatcggggacgcgcgcgacatcaacgaacctggtaggtggcgtcgaacttgtcgtacatgaagcgggtgatgatggccgtcttccccaccgcctggtcgccgaggaacaccagcttgtacttggccagcgccgacaccaccggcgccatcacagcacgccgacgcctagcctaccctgcgctgcgctgatcgattccgcgtgtgggaggagagaatt

SEQ ID NO: 42129 - DNA, 417 bp, Oryza sativa
  unsure (1)..(417): unsure at all n locations
agcttctccacttcatcaaaatttttatctgtttcaccaatatcgncgcttgtagaccgatattattgcaccctcttttgtaaccattctaaattagccttcttactcattatacaaatttatatggcttagccgctctacactagccggctttacagagataggtacaaatntgccatcagagatactaataaaatcatagctagaaagatccctccccgataagcattggatattcccataacgccactcaaaagtagcattggccattgcaacctcggccgatgtatccgcttgaacaatttcaacatcatcgccgtcccattgaattaatcattgatgcaagggagaaggcacacaacaatnggcatgaatccaacaacgacccacaataacattgtagttaccttgcacatc

SEQ ID NO: 42130 - DNA, 448 bp, Oryza sativa
actcagcttagctatctattagtccttcaaacattttattttttttatcataagtctttggagaattctactgctaaaaaaaatgaacttactccccttgtcttctattagtgtacacttgtgggtcttgacaatgtatttgttgttgcttgcaggctatcttttctgatgattcagatgatgatatggctgaacctcttgctaatcaaccagtggatccagtaaagaccagtgaagatgccaatatggttctcaatcgtcttgttgctgaggatttcctagaatcattgggtaaagaactggggttggatgttccaccagaaaagcccacaccacccaatgtcttatttagatcagaaacaccttcaacagctaatgcaattggcatatctagaaacagaaaggcaattacttgtcaggaaataaaggagaacgagagtgctcttga

SEQ ID NO: 42131 - DNA, 458 bp, Oryza sativa
  unsure (1)..(458): unsure at all n locations
agcttgttcacacaaaactgtcaattcaatgcatagtccattggtcagttgtggataagtgtagcctctgttcaaggtggatcttcaacttaacactctcctctagaaaatacgggtatatcaaaacagcagtggagctgagagcatttctcgtgcgccgtgaaatattggtggggattgttggatttatttgtgtttggcacatttattttcaattaaatctataatattcaaggcacgcgttaaatgctgaagaattaccggacatgatgtgtgaaagggttttgttcaagaattgataattcaattgacacggaggattgatgactcaattagagaacaatataaatcctgactattactgttgattgatggtgttaattggcaanataacaacgttcattaccaataactgatgttgttcaatgggagtaatggtgtttccgtctcacatcatc

SEQ ID NO: 42132 - DNA, 435 bp, Oryza sativa
  unsure (1)..(435): unsure at all n locations
tactaggctntatatcacctaggaaccaactatggcaggtggatggaacagccatgcatgcttgtagactgtaattaagatgaatgtatataagcaatgtaagctaagatgaacctaagaaacaaatctctctggtagatgcgaaaggcatgccctataggttaaagaaagaccaatgagatattgagagaagtaggagaacatgtgcaaagtctcatgctaactttatgtagtccgaaacagaggaaacacataactggtgtacatgctaatccaacttctgatgtattagtccctatgcctnctgatgtattaatcctgatgcctcctaaacctatcatatctcatgcacccgaaaaggtgcacgactaggtgtaaattcatagctacttgaaataaaattagcacaaatatagtgtgtttgcattgggagca

SEQ ID NO: 42133 - DNA, 398 bp, Oryza sativa
agctcgatgactctgtgtttcaaaatccaattatctgtatgattggcactggcatatctcctctgtcttaaaaaaaaaactaatcctagctgtgaatctgaatatatacgtatctatgttcgtagctaggatttgtttttttctagaacggagtagtagtggcattgaatttgagctggccgaccgactttacaggtggtcaacgctaaatgcaccggtgctgaactcccaaactcatcgccaataagcagtctttgtgagttcgccaatgtctcgtcgatgaatcaccacgaatttgggagttcagtgcacctgaacatttggcattgaccacctgaacccggcggcgccacgttgctgagatgttggagctcaacggcacggtttaggtttgaaat

SEQ ID NO: 42134 - DNA, 341 bp, Oryza sativa
  unsure (1)..(341): unsure at all n locations
acaagcacatgttctccagaaagtccanttcacaaaactgcaggttcttcaatctaactattgtataactacatatttcaggcggtcgatcacaaaatagatgtaacgagaaaattactataaactacaaattcaagatagagtgccaaagaaatagagcatgagctagaaaatgatcataaaactatggatctactacctgtttaatcataaaactacaatgcttatagctctaacataatgatagtgctatggatctaacctataatatgtatgctgtggaacttcatataaatctgcgatcgagataactaccttaatatgacctttatgaagattac

SEQ ID NO: 42135 - DNA, 433 bp, Oryza sativa
  unsure (1)..(433): unsure at all n locations
agctntgaagagctatgatactgccaagatcatgctttttcaaacaaatgagaagtataatgtatgcctcagcatgagattcgtggctagatagaatacagagtttatacttagtatttagagatgaaagtttacggattcatcaacttgaggaattccagagctactatatacagggaagaacatatgagattctgtgttcaaatccaatccctcaaaattatgttccatcctactagtaccaaacaatagattaggtaaagaaactattttctcatagtagaaatttcgaaatgaacatttaacagaacagaaaagaaaattgaaaaagaagtctgctgtgaatacctgagaccaccacagaagcaacctaacaatacgccaatctgagttttctatccacctccggacacatggtaacaggaagagtgct

SEQ ID NO: 42136 - DNA, 454 bp, Oryza sativa
  unsure (1)..(454): unsure at all n locations
tgtaggcgcagcgatgccgttttgcctgcgatgctgccgtgtcttatgtctagtcccccacccagcaaaaactgcaaaagctaccgtcactcgcaactttntccagggtactcccctccctcctccctagggtacacttgctgggctggtggcaagctactccctccgtccaaaaatataacaacctagaactgaatgaaacatttcccaatgctacgaatttggactgtctaagttcatagtactaggaaatatcccatctagtcctacgttcttatattttagaacggaaggagtnagtttttttctttaacgcatcgtaaaaaattacaagattacaatcttaaaaaaatgatcgtaactagaggaaaataggaaagtgttaataaaattatcaagtttttntaggaaaaagacntttcaatgtaactgtagtatagctgtattggtacac

SEQ ID NO: 42137 - DNA, 396 bp, Oryza sativa
gcttgacaatgatccaacgtagatgcaaacaactgtgtttgcactgcggaagggcgtgtattgacaacttctgtaggaccggtagattacatggacccacagttgatgaaatatggccaggtcaagttcaacccctactcaaacgtgttcagcttcggcctcgtcctgttggagatcgcgtgctaagacagatccagggagcagatctgcagtctgtaccgaagcaaaggtgatgtcgtggaggctaccgaccaaagggtaaagattgttggtgactttgaaaggagagagatggagcgtgtcatcattttggggctctggtgctctgcttctgacactcagcgtccgcctaacatgcacgaagcaatgaaactacttctggagcctgatgccccc

SEQ ID NO: 42138 - DNA, 462 bp, Oryza sativa
  unsure (1)..(462): unsure at all n locations
ttctgtgtggccctcttgcattgatgcatgcggatgtcanactttattngcactgncttatacgccctccaatatgttctataatatatgattcggntggtttttatgtgtggcttgactattcttcttattaaagaacaactctataaatgtgatttgttttgttcttacttattttattataaaaaaactattacatatttacacgaaatctttaagtaaaacatatgatcaaatattgcgaaaatgtcaacggcatcgtacataatgaaactgaggtagtatacatgcacgttgatacactgttttatgcacgttgatcaggtacggaacacaaggactgtaaatcgtactggacaaccaacaggctacaagctcatacctggttcaaactgtcttccgttggccctgcctganggcgaaatcctgagaagagctggattcttaaagcataatctttgg

SEQ ID NO: 42139 - DNA, 434 bp, Oryza sativa
agcttaaggagttagtgggagataactttatagtatgatatgattgggaggagcgctcatgatcagagctatggagatatatacttcggctgcactttattaacgaatatttcgtgttcctatatcatcatctggtgtatcttgggtgatcattgactgaaatgatagggaagacacaagtcgtcgttccgctatatcggcaaacttgtacaacgtacggactcaggaaaacggaccatgtgaaaccctagttttacattccacttgttcaacgcatgaggatgaagagggaggtaccaccgtagggattcccttgcctggcagtagaggattgaaggatgttgaatctaccttaatgaatggctctaattacaggtaccaccgtaccaggaggtagcaaaggttctcatgactcatggacggttaaaaagcta

SEQ ID NO: 42140 - DNA, 276 bp, Oryza sativa
  unsure (1)..(276): unsure at all n locations
tgggcatgctggagtgtttctggccanataaattcttgacggaaggctttaccgaccaaaatgcgcgaggccgagtgggccccccattttccctcgcgggcgtcggagataaactctacgccttgttcccgagagatacatttcaagaggaccccattggcgccgctccggtagagggtgccttctacaagcatgcacccgattggagatgtgcgcgagcttttcggattcagcgcgatcctcaagaagagtgtgaatggcgacgtatgcccggat

SEQ ID NO: 42141 - DNA, 416 bp, Oryza sativa
  unsure (1)..(416): unsure at all n locations
agctttgcacagctagctgcactatactacaggaattgttctttgttggctggatctattgtttcaaattcgccaccgagtcgcattcgaattgttgtttgttgtcgaacattacaagttacaactcagtgccaactgtatttctgaattcattggtactgccatctgcatcacaaatttttgtgttatcattttagaaaacgttttttgctcgccagtaggttgtttgaaagcttcattgtactttgttttatctggagtgtttttgcctgtcattaagtggcggaaaaatcgattcgttgatatcataacgtgcctatcggtgtcatagtatgctaattatattataacatatgaataagcagttttgttatatattntgtcgaaagtcgttgatgtagcctgacatcggtcct

SEQ ID NO: 42142 - DNA, 434 bp, Oryza sativa
  unsure (1)..(434): unsure at all n locations
tggcccatctttgaaagacattgatgtatgctatcttataatcattgttaagntaattcgacttatattttccttgtcaaacaagttaatactggcgttttcttatatagctgatcaagccttctgcagcaccaactgatccttctgagcaaaggaaatcgcaagttcgtaactctataatgcatatttttattgtttcttcgcctaaccctgtttataacaattcattattttctgccctttctggcagctccagtttctgttctataccaaatcatataaaataattgatgcctgatccttttactggcctgtagactatgatgcaaaaacagaagatgcttgtgattatgaagatatngatgaagaatatgatggaccttgaagtgaagcagctacagaggatgaccatttgctatccacaaaagaatact

SEQ ID NO: 42143 - DNA, 382 bp, Oryza sativa
  unsure (1)..(382): unsure at all n locations
agctgtacacatgantccgttggatgaatatatcactcttgtcaannaaaatgcggcacagaaattctcgtgaaattgagagctttatatatggtccgtcatcaaatcgcacttagctccatatatcaactctggcgtgaatgactgcgcactttgtgacacgggctcaccccaaacagtgcacatgcatatgacattaaccataaccttcacagcatatattattttgtatgttattcacagaagaaagcacataagtacacctggttttcatcatggttaagcctaccatacaatataatgtagtaacctggtgggctgcaactgtattgctcccataaaattgacaatacgaaagaacgcgtatatgctaccgtatggt

SEQ ID NO: 42144 - DNA, 458 bp, Oryza sativa
  unsure (1)..(458): unsure at all n locations
tnctagaagattcacccagaatcttcatggactgcgaccaacagtctatctcacaaaggtgagttccttcaagaatgctctgcaggacaacatctttgctaattaaagccaacagaactcattaaggcatagccaacctgccttgcagctcacgagagtatatgcatcttcacttagagagggtatatatattgagactctcctctagtttattaatggcttggtcttcccaggatctaattcacgggatctccgatcacatagactgggttaccaccatagtataactcacatgggtctcaaacccatctccttcgatgcattgtctatcacatttcgtgataatcccttcgtgaagggatctgccaggtttctcgcttgttggatgtaatccaacggtataactccggagattcttaattttctgacagacgtcaatcggcttttcacatgtctag

SEQ ID NO: 42145 - DNA, 362 bp, Oryza sativa
gaccggacttaatcactgagctgcacttctgctggaagatgttatgtttttaagttcattctagtggcgtgagaagacctgtagaggcaaaaccaacccctatattatggacaaagccggttcattgtaaacccccgaatacaatctacttgaatccgttttttaccatgttttctattttaccctagttttagtccatccttggcgaattgcgttgtaaatcgtccgccgccgctgcgagagtgccacacctctttgtaagtttgtccttgaaacccttcggtttacccacgagacgggtagttatcctcatatcgatctaaattggcctagaggctgattttgatctctaaattggctct

SEQ ID NO: 42146 - DNA, 437 bp, Oryza sativa
  unsure (1)..(437): unsure at all n locations
agcttctcttacttgaagggggagacagatagagcaacattgtnttcntttacagnactcaccacgccacaccggagatgcacaattaatgcacgggagtacaacgggataataatatacgggttacgttttgcagcaaacagcatttaaaagtcacttagttgccccaagccattttgtaaaaacgattctagagctacacagtattattaaacaaggctgtgaacccttacaaacctgccttaacccaaggcctacgatgatttggaccgaactggcaacccgacctgggtgccagctcgttctaagccaacccaggccaaccattccatgttttagttgttgagcaaattttaagaatcaaaacactgacttgggtacattgctaagcttgcccatattcgagggctcggctattcgaatagatttactctgat

SEQ ID NO: 42147 - DNA, 431 bp, Oryza sativa
agcttcttggaagaaaaacttggacaacatatacataccacgtctcccaagatcatacgatgcaactgatattaccttatcctttgccgcaacaaccatctcataaaatacatcccacatcgtcatctccttgttctcttcatctatctcccagttaaattcgtcttctggaaagtagtcaccattatgaccaaagcccttatgccactcctcgtgatcgcgtttggtcattggcgggacagaaacaggcacccagatgccagtatgttcgtgaagcgggggatcacaatggaagttcatcccttcttccctctttacaagatcctcactcatatcagtgttgcaatcacttgtagtggtagtatcaagatcgtcgaccacgccatttttggcaggagggtcatctgattcttcctcgaacaggttgaatc

SEQ ID NO: 42148 - DNA, 347 bp, Oryza sativa
  unsure (1)..(347): unsure at all n locations
tgtgatattatcgtaagaaccaaaattatagaatttcactattcccttggttcttgggtctatatttaagtaaaattgcacaacatggttgtaattataatcttgtaggctgtgtttgagaagatacttttgttctatatattgttttgaatattgctaactaatttaaacttttatatgtaaaataactttatcccctcaatgaacattatttgatggaataagttcatccaaggncccttancttgncnaccaatcccattttcatccttcaagcataaaaccagatactacggatccctccactgtcaaaaccggtgcaatataagtctcatggcgtttaggac

SEQ ID NO: 42149 - DNA, 435 bp, Oryza sativa
  unsure (1)..(435): unsure at all n locations
tgatcaaccattaacaagtaatcctaatgtgggagggttttgtttggggatgcanaaatagtgcttcaggatccattacgcgttcaaggccttttgttcttcttcgcatccgttattttggcacaagtttttttggttctcaaaaagaaacagtttgaaaaggttcaattgtacgaaatgaatttctaggtcccgggatttcttaccatcaagttggtaaaaagccgcgatttattggcgattgctagaattctctatgatccattttggaaatcttttttttgtttagactattttttgtttgcgagatgtcttgtctgcaattccttatttctatcatctcatgcaaaacgaggagaatgcaaggcaagggcgagaacaataaaaggaacaaatccttttaggagggattgctggtcttcttaatcctctatt

SEQ ID NO: 42150 - DNA, 431 bp, Oryza sativa
  unsure (1)..(431): unsure at all n locations
agcttgggagtntgtgttgaagtgagtganattatgtccttatataagggtaggtatgacggttatacaacgcgaattgtcgaaaatgccccgcaaccgccatcacgagatgatcaggactgtccacgccaaaccccagcctagacggttgagattttggtccctggttcagctgaacctgggctaggcccatctggcctggcccttggcccatcttccccctagacctcctctatctatttcttaggattttgggttgattctcgggtattttgataaagttcacaaccaatccttgcatggatacacatttctcctcactttagtctgattttcctcccaacttcagggtttattatctgcatacaaatatatagcaacacttgtggaatatgcgagattaagcacctatcactatgttggatatttta

SEQ ID NO: 42151 - DNA, 451 bp, Oryza sativa
  unsure (1)..(451): unsure at all n locations
tgcatgcatgcctcaacgaccaatgatattcacgcagtctttcttaccgcacgaacgccaagtagtagcttgtagctctaaccacattatgcatatctatatatctctatatgtgcggttgtcgctttactcgtataacttcttatgtgtgttaattatcccatattaatataatggggcacttctactcactcctcatgtgcatatggattattatgcttgatgtcgcacgctccggcgacgtggtgctggcgcatactgttatatgcgatattagtgatatgtcttaccaaatggagagtgtgtgctgtccanacacaacgcctatcatggattgctgcatcttttgtatacatgtcattgacatggcaattttaaataatctggagtgcctctgcggcttgaacgacgaacgtgcattcttatgataacggttatacttacaggatat

SEQ ID NO: 42152 - DNA, 430 bp, Oryza sativa
agcttcccacgtgtttatcctaaatatcgtatttgtcaccaaaaatattctgaaatggaactttataagttgcagctgcccttttcttttaccaaataactcaagcaacatactccattatgatgagggctctgtttcaaagccaaagtccaaagaaaggaaattatagagaatgaacttatgccttatttcaaggagaacagtcacatctaacaagcacgagcggtatcgagcgagtacttgtgggatacattaaaacagtttcatgagaaagatttaaattaatatcctaaatcctgaatatttacattggctgaaattaacaacattaaagaaatcaagcagagaaacggggcttatagttttattgatcaaagcagaccagtcctacagtaaacaccataatttcagaaaggggcaacatgaacaa

SEQ ID NO: 42153 - DNA, 463 bp, Oryza sativa
tgggagaagcaagaaggaagacaatggtagagtcaatgatgatgaagtggacaagaagaagatgacgaaggagaagaagaagaattgcatgcagatgctaatccaagaactcataagagtttttgatgaatcggaagatgaagatgagagcaaaggtaagcaagttgttgatttagcttttattgcttgtaatgcaaattctgatgttgatgaatctgatagtgatagtgaagaaaagcttagttatgatcaattagaacgtgctgcttacaaatttgctgaaaaactttaaacatgttctattaggcttgatgagaaaaatcacactattgagattctaaatgctgaaattgatagattaaagtcttcgattcctaatgatgatgaatgtaaatcttgtgaagttttattttctgaaattaatgctttacgagatgtcaattctggtaattgcttgaaattg

SEQ ID NO: 42154 - DNA, 353 bp, Oryza sativa
agcttggcaactacaaacagggacatggtcatacccagggttataaacggtgttacctttaccggacctagatgatacactggagctggactccatcggaactttgccaatctgaaattcgcaaatctgaactttgccatgacgcacaccatggcctcagccatgcatacaatcagaatcaacctgatcaggcgaggacgcctgaaagctccccttgtccggaagaagaattggtactctagcctactgttttggctgaacatcctgcagtacaattgaactatatgaactaatctctctctttttatgcttttgacagtaaaacaaaaatggaagttgattgctgaccttgt

SEQ ID NO: 42155 - DNA, 455 bp, Oryza sativa
tggacaaagctcttgtcacaagagaattgacaatggcatatttgtcgctgcttaatgatttatctgatgcattaatggaggagagatggattaaagaagtgagcccttgcttgcagtcttctttgatgtggatcgggactgttgagtcatccctaatctgctcagtattcttcctttgtgaatgggcaacgtgtgattatcgtgattgccgcacatctctcttgcggaacgtaaaatttacaggacgaagagatttatctcaggtacatctggcagtctccatcttgaagaataaaatggatgagataaataacctgtctcgttctaagagtagcagtcgcattgcagtgaataatactgctaaaggttcttcattaaacaacacttctttagcagctacagtgagtgattcctctggattgagaaacaacgcacagagcgtggatgagaaggac

SEQ ID NO: 42156 - DNA, 428 bp, Oryza sativa
  unsure (1)..(428): unsure at all n locations
agctttgatcctaggggcattctcatctttcttaagaatttctctntccaatggagccgaaagtatcctccagcaaattaccaatttttttaaatatctttcagccatgacacgctnttacgatgtttaccagaaaattacataaattttaagtatcctatagcaaattttgccctaagttataatgaaagcaaacaactataacatgagatttaaacccatgcttaattcaacaaagctaagctcattacatgattggcagtacctaattaatgctcctgggaatcggatgcattgggcctgtcggcttttccgttgctcagtggacagcccaaaattaactggtcatgctgaaaatcaagtcccatacgttggttgatcgtctccgcgataaatatgcagcgcagctgggtgatgtacactgaaat

SEQ ID NO: 42157 - DNA, 334 bp, Oryza sativa
  unsure (1)..(334): unsure at all n locations
ttcttgaaagtatatgcaccaactagttcatacaatatattacctctgttttatattataggtcgntttgattntttttactcaaatctcttcaagtatgatcaagtttatagaaaaatttaatatctataatacaaattgagttttattaaacgtaacattaaatatgttttaataatatgtgtcttatgttaaaaatattgctcaactcaaaaaaggttagttaagaaaaagtcaaaatgacttataatacgaaacatatgtagtatatatattttttgtacgcaatcatgcataagatatactccctccgtcccataatataaaggatttt

SEQ ID NO: 42158 - DNA, 431 bp, Oryza sativa
  unsure (1)..(431): unsure at all n locations
agcttttgatntanaagaggatgaagcagtgatggatcctgcatggncacacttgcagattgtctatgagtcgctattgaaatttattcaatctccagaaacagatgccaaattagctaagagatatatcgaccattccttcattttaagactacttgacatctttgactcagaagaccctagggagagggagtacttaaagatgacacttcatcgtatctatggaaagttcatggagtatcggccatttattagaaaagctatcaataatatattctaccagttcatctatgaaactgaaaaacacaatggcatagctgagctcttggaaattttaggaagtatcatcaatggatctgctttaccactcaaagaagagcataagttgttcctggtacggaccttatattcacttcacaagccaaagtgca

SEQ ID NO: 42159 - DNA, 362 bp, Oryza sativa
ttagcatgactatcgtgctcggcttaataaacaacatgagtgatcttacatctgtcgaatctctgtatgaagataattatccacaatcggagatatatcgccactttactgacggacttgacatgattatctgggagatgaaagacacatctattcagcgagccagatgcatgcctacttggaccttggatatacaaaactgaaaacgcgtgagatgaacgttcattctcgtaacgctgactctaaggcaagtgattaggtttcttcttcttcgaatatgcatgatgatgcatgtgcatccaaacactcttttgctggtattgttcatgccacatacgatgaacatgtcctatctatcgctg

SEQ ID NO: 42160 - DNA, 461 bp, Oryza sativa
  unsure (1)..(461): unsure at all n locations
tgcagcatgctacatttgccaatgctagctacagtagcatttatgtcgtataaggcgccacccttggttgccatcggcagcagctgggagtaccagtagcatgaatggaatggcggcatggtgatcagagctagccatggtatggcaacctcggagtggtggagaaacgaggggcagatacaataaacctgtcaataggagatagtgatctccacatctcatattaatgtctagttggatactcttttcgttaaaaaaagaatctagcaataaatttagataaatgattatccagatttatagatagaatttaatatttttttaccgaggatataagagagaaggcgaggcgagagacacgtacttaanaaaaaagtntttggatccaaactgtacgatccatgatcatgataaanatacttccactatttgccaaatataagattaatatgttgtttagt

SEQ ID NO: 42161 - DNA, 427 bp, Oryza sativa
  unsure (1)..(427): unsure at all n locations
gcttcgcggtagttgtgaagagaatcatcaatcccacattctggacattattctaaggggttgctgaagaattgcatgaatggattcctattgtttccaacaataaatataaatgcactcacagtgctctctggctcattattagacagacttgcnataagacagaatcatagtaaatgtgtgaaatggttttacacagacctataactaaataagcgatatatggagaaaattcaataggactggaatcctataaaactcctatgtttttccttcaaatcaaagggggccaaaatagtttaattcctctaaacagaatagaccctaaaaggtttgagtttatggaagttatttttcacaacaaatctaaacataccaattctatgttttgaaactaaataatttaaaaattattgatagtcaaagt

SEQ ID NO: 42162 - DNA, 377 bp, Oryza sativa
aaaaaaaaacctatcttggtacccttgttataaactggtcctgttggctataagctgataatggaagattacagctaagaaatttgctgacatctgaatatatgtcatcaatgtactcttgtacttgagagaaataccatatacatgaacaatgcaataaatatgcccttcccggtgtattgaaattttcaaatacgcatgcccctaacaacatatacggattcgcatccccctcccgcacacacacagaaacacaatcccgacaaatcattcattacaaagataaattaaaattagtttagtgctttccttttttaaaaaaaagggtaaatctgagccatagtagcccttagcgacattgagtagcccgacctatt

SEQ ID NO: 42163 - DNA, 111 bp, Oryza sativa
  unsure (1)..(111): unsure at all n locations
agctntactgggtatgccttatataccgcatttgggcaaccctctcaacaattaagagatccattcgaagaacacggngactaattgaagtaagaagtnnttttttttttt

SEQ ID NO: 42164 - DNA, 346 bp, Oryza sativa
tcaggcttaccggtactaactcagcagtttatgcgtgcacatcttctacaccaagatcatcgcgagacgtatgtaacggtggattccatgttgtgccaacataaggagagggatctgatagtccgatggttgatcaattccttagacgatgattcggaaactcaggttattagtaccaagcatgtctctgttatgtccatagttggtcatactgtgtcacagacagactttatggacctcaagacatgggctatcaagtgggctagcccaaccatggagaagctggttgacaccttggtgcagtataaaggaacacaagtgctatccggaagaggcatcgatgaac

SEQ ID NO: 42165 - DNA, 464 bp, Oryza sativa
  unsure (1)..(464): unsure at all n locations
taattataaaatatactttgaaagcacaaacaaatgaattatttattagaaactttaaattttgatttataaagttttcttagaaataccaatgaaaagttcacttaaaattaatcgtaccgtttagaatattagaaaacgtgtccatgatatatattccgtgttccgttaatcaattaaaaataactgccctaaatatgaaattgtagtggtgatattttcaaacaagaacacatcaaaaaattattgaaaaacctgatctgatggatgatcgtccgacaattgcacccttattaaaaaaaaagaaagaacggccatggcaatatatattattccctccgtttctaaatatatatttgacgtcattgacttttttaaatatgtttgaccgttcgtcttattcaaaaaatntaagtaattattaattattttcatatcacttgattcattggtaaatatacttt

SEQ ID NO: 42166 - DNA, 423 bp, Oryza sativa
agcttgccacctaagatattgagttctgctggttctgccgaacgcccttcgtggtgtacctctaacaagcccctcacgggcaagggtgagtatggagcttctgccgagaccatgtaagtcgtatagtgtaccacgaggtgccccctttcggccgatgttcatgccgaaacctatgttgtgtacctgcaaaggagaagacttgctctcgtgttaacaaaaaaaaatttaaggagaaatttcttcctatgctcgctagtgagtggcgaagtggctaagttgacctttatgccactatgaatagtaatgggccccatgggccttgcctttcttgtctttggcccattactgtttggccttggcccgatgggaatttaaccgtttatctacccctggacacgtgtcatgctctgaatgggtgggaga

SEQ ID NO: 42167 - DNA, 461 bp, Oryza sativa
  unsure (1)..(461): unsure at all n locations
ctagtgtataaagaanactatgacgtttacatctttatgttatctatatagcctttaggatgctgccgtctttgtgcataaactttatgccctctagtatttctatctcttagtaaggtcaagcatcgcatagtatgcaggatgctttcttttttcattgagcaagaaaagaataatgtaaatcctatagtatttcccacttctctaagagcaagtctaataatatagcccgctgcttactgtaatagtctgtgtggcagtgtgatacttccatgtcagctacagatattcatacagccaactactccaacagctagctctagcacaaatccaacatatactttatgggcccacattcaccacgttctccatctttccttccatttctctttntctaccttcattgntacangctcatcggagcagntttggagcacggatcttgatagacaggggacaag

SEQ ID NO: 42168 - DNA, 415 bp, Oryza sativa
  unsure (1)..(415): unsure at all n locations
agcttccttcttgctgtgcataggattgaatggaactggccagattatataaacaatagtaaggtgatcggcaacgcctataagagtgcatgggctatgctaatgaaatcttaccatctctgtttccctatacttgtcaccagaaattactattcttcaaactttgattactcaccttttagtaataaatttgtttataaatatttaaaaacacaacgtattataccaggagagtcaaaattcaaaacctcaggcattaaatacgttgtcacaacacaccatttcgtaaggcccaaagaccacttgaggaaggtgtgtatgtccagctcatctttcctacgtttgcaagctagaattttcttgtatttttcagacatacctgaacagggagctattangaaaaatcatctatatt

SEQ ID NO: 42169 - DNA, 417 bp, Oryza sativa
  unsure (1)..(417): unsure at all n locations
tatatatatatcaagtgatatattatatattactttatcttatcttattctttagaaaaattatataaccacttactccactactagtggagaagtgctcatctctcccggttcgcaacctcctttactctcgagtagcgaactgggagggagaatctagacagactcgtgtccagatttgttggattagaaaacatcccatccaatactaggttagctctttgtgggacgaagggagtatatatatatatgatatgtttatgtctagccgggtggtaaaatgagttgattaatttcccgccggtttccgcggtcggaggcgcatgcatggcgcgcgtgagacgacacaagtcggcaggagtatgtggctnttctggcagccgatctctgtttatctctcgcgcatgcagatcacct

SEQ ID NO: 42170 - DNA, 420 bp, Oryza sativa
agcttggatagccttgtaggaactctgataacctaaagatacgttctttcacttctcattgtatctttttgctttgtgccatccacagtcgaagaatgcactgctatcaactttcctctttctggaccaaattgtatgggctggaaggacaggaatatacaaggtttgattttctcttcacatcattactgatatacataagcaccatacagcatatggttttatcatacctagatgttgacagtagaaattaatggtaggtaatctaattgtttgtacagaacaaggagcgagcagaattcctcagcaagatagcattttattgcttcctgcgttctaacacatgtactagtattattgaggtatgagacttcagactgtagaatctatttaatcctgcccctgatattattacaatca

SEQ ID NO: 42171 - DNA, 451 bp, Oryza sativa
  unsure (1)..(451): unsure at all n locations
tcatcctgatcagactccagagactcagaaaagaatctgttatatatctcatccttggcagcgacgaaatggaaattatgcagccagtgccaacgccaaaaatgcccaaatagttggccttttcagcatgagcagcacgaggtgggctaaagcaatgcaaccaagtcgatgacttaacatgcacctaatcagcagtaggagcacagaagagtagcgtttaaaatgagctgggtttaatcagcatgagaggcaggagggaagttagaatgttaatggttcaaatattaattctgacagtttatgtgttcttgaagatgtcgcttcactttaccaaagggccaagtagttagtgcatgagaagtatataagaaataggatgtangtgataatgacagactaaccttggaattctcaagctatagtgtctaccgtactttgcatgcangcatac

SEQ ID NO: 42172 - DNA, 403 bp, Oryza sativa
agctctgtatgttgcgggtgacactctgtctttagtatcatcctaccagtgagtgactggttatgatcgttcgggttgttctatgagtagtggtgatctgctggtgctctcttgagtcttgactagtggtcattgatgattgggatcacgtgtactcccaactataactgctcgttaggaactgcacaagattttatccattcgattctttaatggaaggtctaaattaaatgctacaataaccttgatataatactttttgttggattatttgaatgaacagtgtcctatccaatttgggcctttggatttgcattctacagttatggtataactgcctaagttgcaggcatagtaaggactgcacatgaaccaaattcggtcattgaatgttgcctggaag

SEQ ID NO: 42173 - DNA, 478 bp, Oryza sativa
  unsure (1)..(478): unsure at all n locations
agaatacctcagcttaagataccaatgcgagttcatactcctggatgtggcatgtctcacttctcactactgcccatctgtgacagttgaaattcaagggttgatttttccagcgaacctcattcttctcgaatccaaggacctagatgtcatacttggaatggattggttgacaagacacagaggagtgattgattgcgccagccgcaccatcaagttgaccaatgcaaaaggagaggtggtaaccttccagtctccagtgccgcagaagccaaggatcagtttaaaccaggctgctggtgaagaacaagaggtagcagtggagaaaaccactaagaagctggaggatattcccatagtcagagagtatccagagggttttccggacgatctgacaacaatgccaccaaacagggatatcgagttccggattgacttggtacctgnaactgcaccgatccacaagaggccttacaga

SEQ ID NO: 42174 - DNA, 247 bp, Oryza sativa
ggggggggggaagaaaaaaaaaaaaaattttaagggaggtgggggggaaggaaaaagaaaaaaatgaaaaagtaaaaaggggtgaaagaaaggggaggggaagaaagaaaagtgagaataaatgataaaagaagggaaaaaggggggaaaaggggggatagatagagagaggaataaaatagggtaaaaaaataaagggaagatatggagagaataaaaaaaaggaaaagaggaaaaagataaaaag

SEQ ID NO: 42175 - DNA, 257 bp, Oryza sativa
  unsure (1)..(257): unsure at all n locations
ctaaccgatggccctaaacttgcaacgccgtccgtgcgaaaccaccgtcgcccgacgtagagccgttcccggagtagaaatcactgtcccagcttaagtaatacccggatgaccatcggtgagtctcattgtgcacattaacaccccatgcattgatgcatgcactgatctggttnaatatatatagccggatatttatatgatcanagtatgttccgacataagcgtaccgcggcggctaggggaaaacacggtca

SEQ ID NO: 42176 - DNA, 453 bp, Oryza sativa
  unsure (1)..(453): unsure at all n locations
attcaaagctacccaaacaagtgtcaagagtgttttattatgaacttnggtccattctcctcacacacccacaaacactatacctcatggctcatgcaatgcaagctttgcatcaaaccaaggacaaacggtataaaaagcaccaaagcaaatcaggcgacataaacagtagtctttttctgcaggggggcatccatgcagcatgtgatcccagccctcccttgcctgcccaaccctaacaaccacatgcagctaaccatcccatgctcctgcagcaaaacagtgaggagagtctccattaaaattgccctgaaaggaccatgcatcagctgccccactacctcaggcgtcccccacacttcatctcattctctttgtcctgagctgagaaataacagcttacacattcatcgnattcatatacgtcacccgttctaaatataacgattttat

SEQ ID NO: 42177 - DNA, 218 bp, Oryza sativa
  unsure (1)..(218): unsure at all n locations
agcttgcanaatagcacaactagagtgcttactcttgtattatatgcacntgaactccattgcagaagctaagtagaatgtgctattatactacggatcaagatcctcaaccttcgaagctaactgattccatcactaatatgtgagcccgatgaaccctacacccacacatgttgggctggtttggcgtctattgatgaactgtgtctcacattttt

SEQ ID NO: 42178 - DNA, 456 bp, Oryza sativa
  unsure (1)..(456): unsure at all n locations
ggatgtcatgttcagttngaggccaaaagagacattaaaattatctgtaattttagtatagncaccaaaattttggcaattatagttactaaaaattgacagcaaactaaatgtagccacttttttgacaactttatcaaaacttggtaagattgaaaataaaattaaagtgaacatgcccttaataaactactcctacatacttcatcctataatataatctatccgtctcgattataagtttaattaaatctgtagaaaaaaaaggatatttttatctcaagtcaaatatattatgaaaatgtatctaattatagatttaataaaactaatttagtggtgcgaatattactatattcatctataaacttaattaaatctgaaagtagttgattctgataaaagctaaaacgactctataattaaaactgattgactattcgcacaattctcagt

SEQ ID NO: 42179 - DNA, 352 bp, Oryza sativa
caccaggaatggtagccgtacaacaggcgaaggcagcaacggcgaaaagcgcactgatggtgtgcatcccaacagcgatctccgcaatgggccgccaccactccccgagaatgcgacccttgcccaagtaatggctcatcagacacagatgatgacagctatgacgcagcaggtgcagcagcagcaccagcagatgtaccacaggatgcagcagcaagccgagcagcagtagcagcagtttggtccccctccccctccgttcaaactgtcggagtttcgacgcattagaccacccaccttctccagcaccaccaaccctatggaggcgaatgactggctgcatgccatatag

SEQ ID NO: 42180 - DNA, 213 bp, Oryza sativa
catccctaggaaagtgcgcttaatactctataaggactttatcctttcctctttacattctttgttgaccgagaaggactaccatatacctatggggataaatacgttcaccccatgtcggcggcctctctcgatctatcgatcaataatactctcggcccatcctcaccctcttacttgaggttcttacttatctgcctggggtacttgggc

SEQ ID NO: 42181 - DNA, 447 bp, Oryza sativa
  unsure (1)..(447): unsure at all n locations
actaagcttatgttaggacgctgcccttgcggacgcgcttacatggttgttgtctctttcatgcgnagcntcacagcgagctgggtcccccacccgagctccttcacctcgaacgccgacgcatttgggggcggcggctcctgagcctcaccctcaccggtagccggagtcggctcctgctatgtggtgccgggggaggactctatggcgcgggccgggacgcggagaggcgacaggagtaggattccgcgcgcggcggaggggaatgaggcagaagcggacgcggagtgtgggtgcttggagttggagggggaaaggaggaacgtggcggtggcggacaggtgtgaactgtggtacggcgccgaccggaggacgagtagcctcgccattgttgtggaatcttctgggagcccgagacctcgtttgccgaccggtgtacgggggaat

SEQ ID NO: 42182 - DNA, 428 bp, Oryza sativa
  unsure (1)..(428): unsure at all n locations
agcttgnctcgcaagtttggcgcaaaacattttataatnggctngnaccaataggcgtgcagtagatcttcctaaatcctcgatagctttcctcagctattctagactgctgccagagtgcgtcaagaagctggtaactacttgcttcatcttggaaaaacaagagcccagctcactaacctcttgctgatcattggccttctccctgagcttgtagtactcatgctcgtcgattgcatcctcgagtttctcgattgcatccctcaggcgccacatattcaaatacccaaagctttccacttgattcgctgtgagggcatcgaacattggntggatcatcaaccaatcctcatgtaacttgttcatcaagggcttcaatttgtcagactcgccgtccttgtccaggtatgctgacgccttgttgatca

SEQ ID NO: 42183 - DNA, 456 bp, Oryza sativa
ctagttatgaatcgggtatagaacccatggaggggcttttttactattcccaatacgctattacatgtttgcgctagtttttgatggttctgatgtggaaacggtctttctctacccttgggcaatgagtttcgacgtattgggtatatccgtttttatcgaagctttcattttcgtgcttatcctagttgttggtttagtttatgcatggcgaaaaggagccttggaatggtcttaactgaatattcagacaaaaaaaaagaaggaaaagattccattaagacagttatgagtttgattgagtttcccctacttgaccaaacaagttccaattccgttatttcaactacactaaaagatctttcgaattggtcaagactctctagtttatggccccttctatatggtacctgttgttattcattgaatttgctcataataggctacgattcgact

SEQ ID NO: 42184 - DNA, 433 bp, Oryza sativa
  unsure (1)..(433): unsure at all n locations
agctntaactcaggctagaagaatattaggaatatactactacttggaaccagcagcaaaagaatatatacaaaaatgcaaaaaagccaaaaataagaaagctccagagaacccatattgttcaaatattaagaatgaaggatcatcccaaaaacctacgtataaggaatgcttgactaagggagtagatcctttggatggcgaatatatcgattggaaaataattgaaaaatttgaagaagcatccccccaaattaaaaaagaattgaaagaagaaatacttaaagaattaaagaaagaaatgaatgataaatttgaagaaatgaaaaaagcatatgatgaaaaatttgaagtctccttttctgatgtagatactatggatttangtagtcatgggcagcctgaccaataaagcaatataatataaattgat

SEQ ID NO: 42185 - DNA, 452 bp, Oryza sativa
agatgggtatcgaaccggccaccgctaaatggcctaatctatcaaagttctggtactatgctcacggtggaacgctcaacccagttgatggctccttggtcttcagcgatcagatacgcgaggctgcgaatcgactaacgggcgcagtggaagcctcttctcagggcacgttccgacccgacagagagaaggacgaactgtcactcaccctacagactcccgagcatccaggacgaacacgagggaaaggcgtgattccctggaagatgggattcaaggaggacatccacacgtacaggagtcggatgaggagcaagagagataccgaggcgaagattgcagatcttgagtacagggtatcgagctacgagctcagcatgcaagaggaggtggcccggaaggtggatgaacgcatggcagcacatcggtcacacgatccctagccgtacata

SEQ ID NO: 42186 - DNA, 434 bp, Oryza sativa
  unsure (1)..(434): unsure at all n locations
agcttggcagagcggacaatgaagtgggatgaggagaggaggcangagcgccgggaaggcaagtccccggcggttccttccggccgtcggcgaagtgaggccaggcagaaggcccccgccgaggacatcgatgatggcgatgatgacctaggtttccaagagcctggggccaccattgccaccgtcgatggaggagcgtgtgctcacgtttctcgccggagcctcaaggctatgaagcgagagcttctggccgcggcccctactcatgaggcgacgcgccgggcgcggtggtcggaagttgccctcacttttgaccagaccgaccacccgccgtgtgttgcctgtggagggcagattgcgatggtggtttctcccaccatttgcaacgtgaagttggggcgtgtcctcattgatggaggagcagcccttaacat

SEQ ID NO: 42187 - DNA, 466 bp, Oryza sativa
tcttggcggcaaccggtgaacgtggagggtgtcatggtctttatttatgaataagaggatgcggaggcgtggagctggtaggaagcagcgaccaagcagtgcaaccgggatgcccattgttgagcatgcttcgagcaaccttgcaggcggcggcagtcgatgatacaggagtcgacagcagccgcagacgatgcgagagtcagcggcggggatgaacaatgcaggaggcggcagcaaacaaaaccctaatcatagccatctccatgatttcgtttaattgtttttcagcaatcgtccaagccttatacgagctaacatgcctttcttagcccacgtgcctaaaacaaggttgtgacggctccacactgcttggctccttactgtgcatagcctgtgctccgactttggaacggctagcatgacactgccaatttgggcctcatcgtcatgggcccattccatgatg

SEQ ID NO: 42188 - DNA, 429 bp, Oryza sativa
  unsure (1)..(429): unsure at all n locations
agcttccgataagaggcatatggcattaaattttctggaacanctccatcaaccaacatctttgacaacggcttcccattgacaaagcccttaatatacaaaggcctaagatgttgatgcttactttcttcaggcttctcaaatattgcttgttgaggtgacaacactaactacgccattgatacttcaacaacctcctcatcggatgtggaaactntatattctgcaggcaaaataaaaaccatgtttatagaggacgaagattctgcattatcaatcttgacaattgtaatcttcacacgccactccttccttggactattcagttgtgactaatttcttccttcacttcttgcatctgctacctatttatcaatctttgaactcttcttttttgatttttactagaaacttcactaggacaccatt

SEQ ID NO: 42189 - DNA, 462 bp, Oryza sativa
  unsure (1)..(462): unsure at all n locations
tttggacaatggcttctagagcaagtaggcccagtttaatatgctttggtgctatcgatgctaggcccagtaaaataatattgagtaactgagtaatgacactagagcatgttttgtatatgccttttgttgttcaatttgattgactgggcttttctgcataggttggtagcaactcttcaagatggagcgatacgtacagcttcatttcacgtgacaacgaagccaatgaaactattgcatttctctttggtgacatgggcacttatataccatataacacctatgtccgcacgcaagatgaaagcttgtcgactgtaaagtggatacttcgtgatattcaagcccttggagataagcctgcatttatttcacacattgnggacatcagctatgctagaggttatgcttgggtatgggatcacttcttcaaccagatagagcctattgctgccaataccc

SEQ ID NO: 42190 - DNA, 377 bp, Oryza sativa
  unsure (1)..(377): unsure at all n locations
agcttgtcaccaacactagagaatgctccaatctgtccgtcancttcattctcttgtgggtttactttctttggcttatttgcagatgatgcctccgtactattattattagtggcaggaccatcattttcttcatcattgtcatcttggacttcctctgttcctaggactgaacttgagtcctttgcatactctcctgttaccatggtgctaccaaatattataagcatctcaccatagtgtgcaagaagtttgttaaaataattcgcatcagccttgtgatccttcagaaacaacagttattgcataagcaaatgccataaaaagttacaaaaatgaaacaaagaacccacaaggtaagacatatactttaatat

SEQ ID NO: 42191 - DNA, 441 bp, Oryza sativa
tgtgggtgtgctcacatatactgaactgattgaattttgttctgctagctacaataactaaaatgtgcatgacaagatttgcgacccttgtatttatgcaattaactgccctttcgactcatcaatggtcaagtgacatactgacatatactagatatttgataaatgaaagcaaatacaataccctcattccattaaaaagtgataaaataaaataaaataaaatcaacaccataccctcacagcccactagtccacagagaacatctcgccagttgcatcattggtcattatcaacatcgattctatttggttgaaaattgttacactagcttgcattacagcattggtgaatcatctttgatggcagtatcgatcatcatttacagaataacatacagcaacttgcagtaataagtaagatcacaacaaagttgacta

SEQ ID NO: 42192 - DNA, 419 bp, Oryza sativa
  unsure (1)..(419): unsure at all n locations
agctttcagcacttcacgtcgacggactattttctagtaatgggctacgccgagcacggtaccagccaagctgatcatatggtgaaaaccacggtagggcagtttcatatgtgtattatatgttttaaatagaaaggattagttattttcattttcttgttaggtgtcttatctattgtccgatcaagacttgtatcaacccaagcgtataaatacgtacacttgtggtctttgtaaatcatctattcatctccacttgtaataccaccactttntattccgacgagttcttagtatcaagtgaggctacatcgtttcgatctccaacaaggaagtagtttcgtcaacttcgcttatatcggtatggctagaactttttcgagttgggctacattatttcgatctccacaaggaagtag

SEQ ID NO: 42193 - DNA, 404 bp, Oryza sativa
tgctttggcgaagacgtctcccttcggcatatactcttcttctctacatccttcccccaagaggcctccggcttggcagagtacccgcacgatccttctcctctcgccgtacttgttccatagacttcgccattggggggggcttcgccccgactaactttgacgactcgggcttggatccccactcctcgcataaccttctgcaggttttggtcgaaaggcctcatgccataccgccaacaacccctaatctaggtatgtctttagatgtattacccctagcgaacaacggcaatacggatagtggtggcgatgcctgatcacaggcggcggggttattgttcatctttgggcccaaggcacagagcactatgtttgcaacatccatctcatagactcgcaca

SEQ ID NO: 42194 - DNA, 432 bp, Oryza sativa
agcttgactccagcggaagtcaagcaattgcacgagctctacatgcaagtagtcaccagatatacgctgctgtctaaagctttaagaaagttatcggtagatgaggatcagctccttaattcagtagatgattgatgaagccatgtaaaaatgctgaccagagatgacatgtcctattaaccacataattgatcgagattgtacacgcacgcaaagatttccattgactgtaggaaagcaaacgagttccaggcatctgcaacatggttccagggattccaggatacactacaggtatggccaaatgatcatcaaagttgagaatggattcttgtgcctttgcattgcaacttgcaagccctctgtaatagcgtgcacttctgtaattattagttcctgtctgccccactccttggagctagcgtagtctct

SEQ ID NO: 42195 - DNA, 465 bp, Oryza sativa
  unsure (1)..(465): unsure at all n locations
ggatgcaattttcagatctgcttccatggatcagtttggttatgtagtcttgttgcaatgcagagctntagatatgaacggttcatatacttcatatcatagctgtacacagtggtttgttctaatcattcccatctgattcttgggagtagccaaatcagtgcatggtcagatattaggaaggaagagcagtataatatctatgtgcagtttagttctaatttaccggctattctcacacgttggcttttttattgactgagatatcatttttcttctgttttcactgcagaccaaatgtgctggtcaattcataattgatcagcaggcctggaatatgtctcaaggtatatacatggaatagtggtccaatatgagtagtgactaaagcagattatattgaattgtgaactctnttaccaagtgaacagagactctgtcaaataatcaggtcagtactaaaat

SEQ ID NO: 42196 - DNA, 434 bp, Oryza sativa
agcttaacctcatcaaatatgagagcatatgtttacttatcaaagaaaaatcatgttgatcttactccgatttcctgcattttgctttaaatttctcctgtatgtgcttaatgagcaagtcatttgcacctaatgctttgtcttctgcctgtccccaattgacaaaattgatgatattgtttaagccaagaagcttgcttatgctattgggttgtttgatttgtgtcgctgaagaatcagcactcattttaatttccttattgacaatttggtcatataatgcactaagataatcttcaagtaagtccttcccatcatcaattccttggctattgcgcatgaaatcagccttagacatctgcacaagaaatcttgcaatataagcgagccattcccagatgacaaaatacgaagatcaccaaagactaacctta

SEQ ID NO: 42197 - DNA, 363 bp, Oryza sativa
  unsure (1)..(363): unsure at all n locations
agcaaaatgatcttgtgagttcaaagttgtccataataaccttgaagnggatttgttccttatcaagtatagcaatatgtctgagggtacgcacataggtcgggtattctcttaaccttgggcatccagaaaatgagagatctctgagagcaggaaacaactggtcgttctctacaatactccattctagtttgggcaagcgttccagcagcagtctctccaatgaggggaatcctttacggcccaagaactcctgatctagtatttttaattcatccattctccgaacttcaagagctttaagcaatggtagatcccctaaaggtggaagtaccttccattttttacaatcacgtaagcaaa

SEQ ID NO: 42198 - DNA, 226 bp, Oryza sativa
  unsure (1)..(226): unsure at all n locations
agcttcgtcgccacaacatcatcatcggtcgtccatgatgttcgctgntgctgctaccggttgtctgcgaggttcttcgccgtcaccggtagtcgccggcgtggtctatgggtaattaattttagagtcaatctcacaaaacttcacgtgttgtagtccaagtttcataaaaccacacacactttgatacttatcacgtaagtacatatattttggtaatacttcc

SEQ ID NO: 42199 - DNA, 368 bp, Oryza sativa
  unsure (1)..(368): unsure at all n locations
tctttggcgtcagctntctttccgggggcgacacatgctatctgattgctattgcggngctaggcagaggacaacaacgctgtcacgggtttcccaagcgtgagcgccgtctcaattccggccgccgcctcggttcagcctgaatcggtctgtcaccccaacagctgctgaaattgctgctgcagctgtgagatgctgctgaaattgctggtgctgctgaaattttgcaagggcagcagctgctgctgtgtgctgtcacggngagggcgattggcggtggggagaggggccagaggaaccggcgctgcttgggtaccgcccaggggaattgcgatcactagtggcgtataaaccaaaaatataaaaaa

SEQ ID NO: 42200 - DNA, 439 bp, Oryza sativa
agcttctaaatcatacaactaatttctgatccgcgtttatctttagattatttataactaaatttaaagcagctgaagactatatttcactacaatttagctctttaaaaaatgccatttttgtttagatttcctgacttttgcgtgccattcaagcaattataaaaacatataaaataatgataataatatagattgtatcctcatacatatcttcataataattaaattaggtctacaatcataaaagtaaaatgaatatactgtgagtaatgtttccaaaatacgttagttagaaagcaaaacttatgcaaaaaataagcaactataacatctaactcacacaactaatatttcatgaactaatgaacttattttacattttgacattattattttacatatccactgtaatatcgactttgagaagaaatatgtc

SEQ ID NO: 42201 - DNA, 465 bp, Oryza sativa
  unsure (1)..(465): unsure at all n locations
taagctcatctnccgcttctgattaaatntatatttgcaagggtgagttcttaccgnactcagcaagccaccacagcaacaatgcatatgaaaggggtatttcaaaggatggctatggctcttttgcgctaagccaagtttgtaattcttatcacaaacctaaaacctatcatagactgatcaagttttaataccagtgttcacattaaacaacgactgttctgtccaccatccattgtgatcccaacgatagcattccgccattgagtcgtcatggttatctgaggacgtacacctttcctcctctcatgaagtggctccatcagcataaaaatcatcatgcaatatcacatccctcacatgttaataaattagagtatagcccagtgttatacatgtcctggtgcttaaaaccgcgacacggctattcaatagatttgcttactacactgcatggatgacact

SEQ ID NO: 42202 - DNA, 407 bp, Oryza sativa
agcttgttctgccttttgtgcaacaatgtttacaaacatactcttccgatccgttcagtgttttgtgctggagtggagcttcagtatgaattacgagtccaagatgacccttgtaaaaccagacaaaactcgatggctcgtttgccaacccagctgctgcaaaagtgatactggacgttgacctgcagtgataaaaacgaaattaaaaagaacgtcatatgttgagatatactgctccctccatcccaaaatatttgacgtcgttgactttttaaaaaatgtttgaccgttcgtcttattcaaaaaatttaagtaattattaatttttttcctattatttgatttattggtaaatatacttttacgtctacaaatggttttacatatttcacaaaagtttttgaata

SEQ ID NO: 42203 - DNA, 468 bp, Oryza sativa
tcttgagggttcgtctcgatcttttcccagatttaattgatcgtcttccatccctaagagtaccatgatccgatcgaacgaaattaaatactcctagtcccatcggagacacggttcgctcctcccaacatgttgacttcgatctcatccatgatccatcatctccgtttcttcttctcacgatgacttttgtgttcttagactgatgaagcagtcaagaaaaacacgatcaagatgacagaaatcctgtgctttctcacctgtttcaacgcgagccttggtcaccgactcattctcgtcaatcctcggcgccctgctagtgacagctgcaggagaaacattcagcaagaagcaagaacagatcagttcatggacaaaatgatgatgaccgacgacgacaacaacagaacagaatgatctttgtgcaaagaaagaagcttcttgcaatggaagagtacgtgatgatgg

SEQ ID NO: 42204 - DNA, 425 bp, Oryza sativa
tgcggcatgcagcttattaagatgaagagctgttttcgtttattcgagaagactagtttattaagagtcactttcttggcatgttatatgcctattttgattatggtaagagttatagtctaggctattaaacttcttaattaccatgagttttatcatatttggtggatcattttaagagtttcatactcggattctagtcaaacatgtatttttgtggaccttttgagtgtttgtcactcgggcctttccataattcttattcttgatatattaaagctgagaagcagtcggctgggtatattactgaataccatgcgtgctttgttatatgacgtttggttgtaaaaccacttgagtcttaactacatgtgtagctttctcaactaaccactatagtgggggctacacctattaggtgcatc

SEQ ID NO: 42205 - DNA, 458 bp, Oryza sativa
  unsure (1)..(458): unsure at all n locations
tactaccaggtataagtattttagactaggatccgtctttttcttttaattggagcatggctcacgtttagagaattntttcaacgagtttcatcttattatccattatacatatgcacatactctctctgtactcgtaaagaaagtcgtttaggataatatttaaatcaaaacttgggaatataaatcataaataactctcaagttgttgagtttgaaaatgtaaaaattatatgaatatatttatcttgaaaaatattttcataaaagtatacatatatcacttttcaataaatatttttataggaacaagaagtcaaaattgtgttttggagaccatgtcgctatntaaaatgacttcctttattagtatggaaggagtattatgatatctctccaaccaatgacctacattgagaatgtctttatggttagtacagctacttgggctgtgggat

SEQ ID NO: 42206 - DNA, 430 bp, Oryza sativa
agcttcttcgtcggagcggttaccttcacgtgttctacacacccaaatgtgcgcaagtgatggacagccggcgtgactccattccagagctcatacggcgtcttgccatcaatgctcttggacgagcacctgttgagcagataaacagcagtattcactgcctccccccagaacatacctgggagccccttagctttcagcatgcttcgcgccgtgctcaccaccgactgattccggcgttcgacgacgccgttctgctgcggcgagtatggagctgtcaactcgcgtcgcagaccgagctccgcgcagtactcggtgaagtgcccgaccgtgaactcgcctccacgatcagtccggagcgcccggagtttgcggccactcttgcgctcggcggctggctgaacacgcttcatggcgttcggcgcggcat

SEQ ID NO: 42207 - DNA, 436 bp, Oryza sativa
agcttgcttttccaaattaaatggaatgttttgttgtccttctttcataaatattgcacgcaaacagatcaaagacggacaccactgcacagtgcttgtgcaccaattaatcttaaataattaccatttcaataaataccaaaaaataatatgcatcactttcccacatgtgagcatgaaacaaagattcccgctacatttaaacttcatataaaattttcccttaaattacttatccgatctacaatccgattgtaccgttgtatttgtttaattaaatctttacagcaagatcttacatgattatattctaatgaagaaaatatatatgttgtaaatatcttttattatatatcaatattacttttctcataaatgtatttacttttaaatttgattaaattacttcttagaaattgataataccgtgaacatg

SEQ ID NO: 42208 - DNA, 447 bp, Oryza sativa
  unsure (1)..(447): unsure at all n locations
ntcaattntctaaagcatccgagcctattctgttcacagtctaaacgctccaccaaagctgcatctacgcaaaatgcacccggngcagaaacatcaggcatgcagtttaccaaattttttttaaagaaaaatatatactctattatcaatctgaatggtcattggttactgtttcctctgatttattttcatcccccttcttcttttttttaaggaggttcangaggtagggtgggcacaactaagcaaagaacagccaagtctgtctcgatatctcctgagcaccaggaggagagcgctcaaaccaagatcaagacaacgtcgccattacccacctcgagtgcgaaccccacagagattgtgagggtagaacccgaccggtctggaaaagacatcgagaaaatcagagcatgcattgtcaacccagacaatgtcacaactcatgtg

SEQ ID NO: 42209 - DNA, 421 bp, Oryza sativa
agcttgcaggtggcagcttacaaaccacatgttttatataggatagagacacgcattgcttttcttagcatgtctctttcatgttggtcaatagcccaaagaatctaaaattcgcaagccttcagttacatgccttacttgaaaagctcacaccctttcgaaatgcatgatgattgagatgccacatgaaatggaacataccaataattatcatatccggctaggggcactactgaaaacgaacaataaatttgaagagttcaccgacaaaaacgaaaatcaagaggagtctttagtttttctttccccctttatacaatgtacagtgtcagtgctttctctatatgtctataatcaccagcgaagcgaaactggtttcgtttcagaacacactaaatggactatcttatcaattgaacac

SEQ ID NO: 42210 - DNA, 459 bp, Oryza sativa
  unsure (1)..(459): unsure at all n locations
aaaactaacttaagcnactacactatatgcctagcatattcttataaaacttatgtaagcatgcatcatcatatataattcattgaattctacgaatcaacatccaatcatcttcctttatattatttttcacaatatttttaacatatatatccatcatttttataatacttaacatctattcatccatataatcaaagtgtgggatatcatatttcatctagagtctcatgcagagtctactaaatctatttctctcttaacatagtgtgacaaatcagttttattttttattaataaataatatatttttttacttttagcttaattattaaaaaaatattaaaatttacttagtaattttcgcagcanagcgcgaagaatcactgcgttgtttagattgaaagccataggcccttgctttactgaaagcaatagagtctgatacacgaaacgtca

SEQ ID NO: 42211 - DNA, 355 bp, Oryza sativa
  unsure (1)..(355): unsure at all n locations
gcaaacggtgctaccgcgttgcactattttcacagattcaagtcatcacggggcacaaagtataaaaaaaatctcagccagaaacgctcccagatcaagaaagatctgcatctaataacctcaactttctacccaactcccaagatctcgggcaaaaccccaaccatccacctccaaactccacattggatatggattagaccatcacaccaacggatactccaacccaagtcgcgaaattgtggccaagattcgtcaaaccctcgacggcggccgcacatggattcagaacagaaacagcacaaagattttnttcgcggacgagcaaaccccccacaataatggcaggaatagc

SEQ ID NO: 42212 - DNA, 233 bp, Oryza sativa
taacttccgggcatatttgagttggccttatattccttccacgggaatggactatcatccgtacacgccaaatttgggtttgtcaaccatttcttttcacaaaagcttgcgatatgaaagaatgagaagcttctgaatcaaacaaaactattgccggtactgggttgacagagaacatacccatcacaacgtctggagccatctgagcggtttcagcttgaatgtgattcaca

SEQ ID NO: 42213 - DNA, 454 bp, Oryza sativa
tcatggggtctggtctcgccatttggcaatttaagccaaactaaatacagtacagaggttataaccaatacacaagcaggcgtgaaccagtcagaaattagaatggagaagtagacacagaagaggaggttgttgggacagtatcgatagccgccttttcacttattgctaggagtgattgtgagagaatacataacataggtgaaagccaaaaggcatatatgaccccccaatggaagtgatttgaaactgacgtttctttagaattcgattaagaataagaacatagaccggcttctagaaaaagagacgtgccctcttctctatctgtagattcaggagcaacatgctggttccttttgtcataatacctaacggctgtgggcagaatgaatgaaaaagcagatgaaagacactatacataccgatagaatgataaatttagaataaagct

SEQ ID NO: 42214 - DNA, 263 bp, Oryza sativa
  unsure (1)..(263): unsure at all n locations
agcttgtactattattagaatactcttctttatacatttacggtattgaaatactttccgagnatatcaatgccaactttaccctatgttcatcacatactgaatatgctgctagcttatctgggagatgctttggtgcgggtataatcgttgcttatgccattactctatgtcatgaccatgatattagcgtattatctggtcgctcacacggactgtctacatcaccggatatcattatttggggttatatgctgcggatg

SEQ ID NO: 42215 - DNA, 452 bp, Oryza sativa
  unsure (1)..(452): unsure at all n locations
tggtgagctcttctcgtatggcttgttttcgatctggtgcaaatctccgcagntnttgctttactggcttggcatcgggtcgcaccatgagtttgtgctcaatcacctcccttggtacccccggcatgtcggacggctaccaagcgaacacgtcagcattgtcgcggaggaaggtgatgagcgcgagttcctatttctctcctagtgatgccccgatcttaacggtcttgttgcggttggcactggagagtggaacgatcttaattgcgccgtctggtttcggcgtcttgtttgtcttgctcactttcttgggtggctctgctgtggcaggtgggctgggcgtgttctcgaccatgtcgaggctccgcttgtcacattgcactgccagcttagcattcacttgaatagtgattgttcccttcggaccccgtatctntacgcgtagtgagatg

SEQ ID NO: 42216 - DNA, 434 bp, Oryza sativa
agcttgatcatgatccttttctggtgaacacaattaattttgatgacaataaggtattgattcggccggagcaagccgaatctactaaggggaaaggagtggtcattggagagcctacgccaaagatgatggtgccaaagaatccggaggttggtatttggaaggagaataggagttaagcttcgagttctaaagctcctaagaagactaaggtgacctttgatatgcttttggataagtatgagaagcaaggtggtgagaaggctcgcaataaaggaaaaagaccaagatcacctcctagggagcgatttggtcattcaccaagacggtcagaatcacctacatatcatcgtcctcaagatatgtcatgggggccttacccaatgtcgccgccgggttatccttttccttactacatgccatggggggcaaca

SEQ ID NO: 42217 - DNA, 451 bp, Oryza sativa
  unsure (1)..(451): unsure at all n locations
ngctagctgcatcctcctctaattctagtgctagtacagccttcttcttcctcctcctcctttacctttctcacccactcttcctctccccttcggagcgacacatccatctacaggtgaggaccgtctcacacccagcggaaagcttcgccgccacctcctccatgagccctccaacttcactcgcggcgtacggaaagtacacgggtgagcagcatggcacgcgtccgcgaaggtggtggcatgctccaatgtaggcggcaatgcgggcagcatgctccaacgaaggcagcgaagccagcgacatgggaaagaagcagctatgaatggagtcgagctcgatgcggacctgccgacctgccttctccactctcggcaaggggttgctggatccgaagaggttcaccgagttatcctcaccgaagccagtcacgtggggaggagctcaaac

SEQ ID NO: 42218 - DNA, 389 bp, Oryza sativa
  unsure (1)..(389): unsure at all n locations
gagctnggacatcatcctaaggagggattggtttgcttatcacaaagggcagatacgatgtgccgatgagtccatcaccttgctaggacctggaggaaagcaagttcgctttacctctaacacccctaccgggagtcggtctattctaacctgttcacaagtcacctccttggagtcggcgcccatagtctgtgaatatcccgacgtatttccagaaaaattaacaagtatgccaccataccgagagattgaagtcgccatataactggcaccaggcaccgcaccaattgcaaaaagaccctaccgaatgtgagctaatgagttagcagacagtaaaagacaaatcgaagaattggagacttaaggttatttgcgacctatctcatccc

SEQ ID NO: 42219 - DNA, 453 bp, Oryza sativa
  unsure (1)..(453): unsure at all n locations
cgtgtaacgcccatagccccttactgtaatctaatgggtaacatcttatttctgcttttgtaatctacatttatattcttgttaatggaaatacgaatgagaaaagaacggcaccaggtacagcgtatcacaattcacaactgcacaagcgaagaagcatcctgtagttattaatggtttgtaataaataccttttgttttataaatcttcttttgcacgtctaaaagcctggtaagctcttttccttgaggctccagacttcaacaaaagggggtgtttagatctagtggtgtaaaattttggcgtgtcacgtcggatattatataagtgtcacatgagggtttcgggtatttatgaaaaanaactaattacaaaatccgtcagtaaaccgcaagacgaatttattaagtctaattaatccgccattagcaaatgtttactgtagcaccaca

SEQ ID NO: 42220 - DNA, 356 bp, Oryza sativa
ggaacaccacatcatcgtgcagcatgttatagaccatagctgggcctcaagagcgctgagaactgactgctgggaacagtggattgcaatcaagaaagattaacgtgccttcctcccttagaatggtaaagatcactgcatgtcctccactggaggagcctctgatatcgatgcttcgccggcagacggacatcgggttctcctactgggaacaaagtcccagcacctctaccaccgacatcgctgatgttggcaagactccatggaaagatactggcagtgactatacctcatgtggatgtggatatctggctgggaccacacgctcctttttaggacacaccatcccatgcatg

SEQ ID NO: 42221 - DNA, 439 bp, Oryza sativa
  unsure (1)..(439): unsure at all n locations
aactaagcttagtcacaggggactcctgaaccttggagcatgcctcaattgttctctgcttcccggagcttcccttcttcagctggaaaaataccttctctctcgacaagttntgtgttcgtcatctcctctgattatgccaacaagagtgctaatgggtttgcattggtaatatctacaaacattggatcacagaacaacttgcaaggtatgtacatgggacttgatccctatgatgatgaaaacttcttngttgctgtcgaattcgataccaaaagagacagtgaattcttcgacatcaacaacaaccatgttgggttagacagcagcagcttgatttcccttcagcctcaacccgcagagtactacacccctgatgatgtgttcaaggagttgacactctgatcatgtaccaatacaggcatgggtggagtatgac

SEQ ID NO: 42222 - DNA, 440 bp, Oryza sativa
  unsure (1)..(440): unsure at all n locations
agcttgctctgccgntggcggactgttgctgctgctttatggagggagttgggatggatgtacgtgtaacgtgcagatggggaaggaaatgaaaaacatgatgcgatggcatagtcccaattttataaaatttgagtgacatggttaggaatagacgaattgtaatgacatttacctaaatatgcacatttgcaatggcacagatcaaattaaccctaaaatttaagtgatgatgtacgactgaatttatctcatcgtacttaaaatgggaattccctcccaatacctacccttacacatgtattgaaaaaggtgggagctgctcttaaactctcaatcccaatccctcataaaactcccacattcatcaaccaaaacaatagactaaacaacctccacccttcaaacttccattccctcttaacaattccaaatgcact

SEQ ID NO: 42223 - DNA, 424 bp, Oryza sativa
  unsure (1)..(424): unsure at all n locations
agcttgaanttgacactgtataccttatacataacttatatttnataaaaggattgtctacatccacaagtagctatagaggccggacttctagccattatcttaaaaagaggtctctaatggaaaccataacaaaatatatatacatatttagaccccaactgtaccatcaagctcaaagccgcagatgtctaatatctccacactacattgacactatgtgtttggccatagtggcgtcaactccatatcaacaaaggtcagcacgaaagcgcttgcaactggtcacctatcacacaacgactaggcttggtacggccccatttttcttatattgtgcttgggtacatattcttgatcaagaataatgtcttcatatgttcttgaaaagaactcccagtgcctctcatttccaagacctatg

SEQ ID NO: 42224 - DNA, 460 bp, Oryza sativa
  unsure (1)..(460): unsure at all n locations
ctaagctgaagctgaatgngaagctgctatgatgaagtatgctacctctttttaacattatctcctatcggntcttatgtgttgttctgatacacctttggacttgtcggcaggtgtcaaaggtattaatgcgtgatcttgcaaagtgtaaggcatttgacaacctgaaaaggttgaagcttggtgagtggtttctgagaaatggatgctatccgctactcttcttgcttcggtactcacctcacatagaaaaacttcgcctgcaacttaccaaggcaagatataacacctccccccttccacattgctgtttttggtcacggcttgagattaatggtttccttctttattcttgctatcagcttggagctgatgagtatgagaaggttcccactgctgcagcagcaatagatcctccatgtcaagaagcagcatgaacgtttcattgtgaataacttac

SEQ ID NO: 42225 - DNA, 394 bp, Oryza sativa
  unsure (1)..(394): unsure at all n locations
agcnnacaacgctgagcgagcgaaactattgttctctacctggacagctattgtagagggcattatgcatacgacaacagtcacacggacaggattcgttaacaatgaccagtggcgccctcgaccattgctcgacccaaggcgccatcttagcaaaaatattacgccgcacgctagcatctgccttcctatttcgcctgcaaaaactcatcattaagctgttgacgcaagcaatataattcggacacacgccaactaatgggaatgcatccacatataacttacaagtgcatcttgggggggaccgcctcaccaagtgggactggcacttcttggtaaaggccaaattgcctcattacatgctgcggactgtacgcctcaactgctatatagt

SEQ ID NO: 42226 - DNA, 263 bp, Oryza sativa
ctgatgccatctaacgggctagtggtttccacctgagattgcatggtgcacatgctcttcgaacctacctgccaccttgaggcacacctggtacaattgactgaatggctcaccattgcacgatgaatggtctgctggggatcatgggacagatgtgcggtcatgcgttcatcaaccttgcttgtcacctcctcttggatgctgagctcgtaacacgagaccctatacttaagaactgctaatcatgcgctaggatctctctc

SEQ ID NO: 42227 - DNA, 431 bp, Oryza sativa
  unsure (1)..(431): unsure at all n locations
agcttgctcaatccagcacgcgtttggacgctgtgtatgacgaggtcgccgacgcagagtgatcgggcccggacgtggcgctgatggtagcgccgcaagctctgctggtagcgcgcggctcggagggccgcgcgccgccttcgctcttccaagtagtcgaggtcatctctgcgaagctgattntgatcagcctcgcaatacatggtagcccgaggagacctcagggtgagctcggatgggagaaccgcttccgcgccgtagacgaggaagaaaggcgtttccccggttgctcggcttggtgtagttcggtttgcccagagcaccgctggcaactcctcgatccatgaatcgccatgcttcttgagtatgttgaaggtcttggttttaaggcctttgaggattttcgcattggcgcgctccacttggccatt

SEQ ID NO: 42228 - DNA, 459 bp, Oryza sativa
  unsure (1)..(459): unsure at all n locations
tataaaactcagcttccaggaaacgtaccaacatacttgatgtaataaataatatacttttatgtngcatgcgttattgcaaaatgcaaaatattagagaaggtaaatacatgctatcataaaaattaaaatgtgtatgaaaatgcaagttaagtaaattcagaaaatgataaggggtttaaatgtgcagtatcattaagatggcggcaaccataagttacaattgtaagaaagggttatcttgcaccgcgaattttctactagtaggaagcggtaagaaaacaaagtggagtaacctaaaacgtgttcgtggaaatgccgacctcacgatacacaagcaaactacgaaggggggcgtctctcaccggttgaatagggcggacttgccaacgttgggtcggccgacgatgatgacagtgggtatgagcgcggcgtccaccttggtgaagtcgaagcggg

SEQ ID NO: 42229 - DNA, 414 bp, Oryza sativa
  unsure (1)..(414): unsure at all n locations
agctnggaaggtgaaacctactgcttttctcttattnggcccacaaattcggtccctttttttttatctgctcatatccatttgtgttcttcctaaacctggctaggtattggtttctttggttattgctcatagctttttttttccttttccaccatggtttttgttcatgggacatgggtacagagccatatcctgcatttgaggagacggctcagttagttttcctgattccatttataaatntgaccatctagatgatttaattcgctatgtacgaaagggattgagcttgttatcttaacagaagagagagagcatttttatttggtcagtcttcgttggtagatatgagcatgaaatgtctggattgagaaaactccgcctttttccttttcggagttgaaaatacct

SEQ ID NO: 42230 - DNA, 302 bp, Oryza sativa
agagaattatatgatccgaaagaaatataaatcgataaacactcatttcaagcacactacaaaagtggacgctcatatatacgcgcgcatactcactcctgcaaatgcatgtgcgtaccctacacctatgatcgaacaaagattaagcaggcgtatctcgatatcgatgaagtcgacatcacctatatatggttagaaaatcttcttctggatttatattcacatatctatacaaaacatctagtgagtttaaaaaataatcgcgggatgacacggccatgatcaacagctcgctggcaagc

SEQ ID NO: 42231 - DNA, 430 bp, Oryza sativa
  unsure (1)..(430): unsure at all n locations
agcttccacgggcatgcctgtgtgatcttttcttttctcccaagcagtggtgggctctctactctcccatgcttctgctgtcattatatccttataccttttacctaacccacttctggcagtttcatagacagtgatgctgcgtataattggtttttgatagcatgcatgcagtacaatatgggtgttatgtgtcttgctctccagtataattcttttctttgaaagaagcttttcagtactagtcgtaaaaaagaccatgagatcagtctaagtctcgtcttttgggttaatgtgtcacaaaatacagtgaatatctgatcatatgccttgaggcgacactgttagggccatatatagtattcctaagacatgctgattcttgttaactcnatttgtaatgtttatcgaatttataggaaaagatagc

SEQ ID NO: 42232 - DNA, 423 bp, Oryza sativa
  unsure (1)..(423): unsure at all n locations
tgcctccatctcctccctcttcggcatcgcgacgctacagttcttcttatctcaagngangatgggacttcttcctggcggcattttctttgtttctttccatcatcgcctgctcttgttgacctgtcttatatgtaacgaactcgtcccagtgatcccttagctttgggaatgtgtcgaatttcggtgtctgccccttcaggatatatttctggtacagatctcccttgaagctctgaaactgttctgccattttctttagagtccaccttttcactttgtcctctttacccgcgggaagggtgaatgtctcgagcattgtggtccacaacatctctttttccgaatctangagaaagctctcatgatctccgcgtgcccttgttctacgccagtacaccgtactgacaggcacgttatcct

SEQ ID NO: 42233 - DNA, 412 bp, Oryza sativa
cgggatactctaagtcacctgccgcatgaagctagactggagcaactggcgatatcttattggaaccgtgtggtcgacagtctcatgacaaagaccatggctcggacactcagacttcgccgaacaataacttcttcagaaggcggtgtgggtgagggcgataaggtgaaagccttggcaggagggcccgggtttcgccagatgccgaacctcaccgaaaagtggctcaacgggccactgtgcccaggaaggtttcgctaagtagatgggccaagccatgtagcccaataagggcccataaatgttaaggacacagcgtgtcctagatagtctctatcacaagaataaccatataaattcccctgtaaaatctaaaccctaaaggagagaatttgtaatggagctataaata

SEQ ID NO: 42234 - DNA, 459 bp, Oryza sativa
  unsure (1)..(459): unsure at all n locations
taatgcgtggagtagcttttttttttgcccttctaattatatatgtcagaataatacgaggacgtactaatcaattctttctctcagnttttttttaattattttttgggatcttagtatggtccagtcaactgtatgttgtactctatgtttgtgtaatgtttcaatggaagtatatattcatgtttggaagtaagaaaagttcagtctcagataacacaatacattaatacaacatcaattgcggttgaaaagggtataaatcatgtgacagttcctttatccctgtgagtcgtctgtaacggctcaagaaccattagagatagcatgatctctgtcggntcacacattatataccagatatgaataatatgcaaaaggaaaatgcagacatggtgcaccatctactcatcgctgccacgctgctcatcactattgttgtgcacgtctttgtgttac

SEQ ID NO: 42235 - DNA, 408 bp, Oryza sativa
  unsure (1)..(408): unsure at all n locations
agctctataaacccagaattaggcccattatgtactggccctgcgtggcatatgcagcgacacgcgttcttatcggntactcctgcccatgtgggctcctcgcaacggacaaccatctnccataccgcgaacagagacaactcgggccaccgaacctggacgaatgcgaattccggcctaatcaagcagagcagagcacccggtatactgggaaaccaacgcgcggcgcctcctgtttcgccccaaccccgtacttctcctctacacaggctcctgccctcctcctctatataacccgcccctctcctttctcctcatcctcaacacagcatacaatagttcactgcaaaccaaaagaagaaacacaaacaatccggtccaattctcagcaagaaagaagagatcgat

SEQ ID NO: 42236 - DNA, 293 bp, Oryza sativa
  unsure (1)..(293): unsure at all n locations
tcatcaccttccttgctcacacgttcttgctgctgccggttattgtggcatatctcccaatgtgtacgtctcaaattatttcaggaaagaagcaatctttcatacatggagtgaggagatatatgggttcgggatctcangatcttacacaacgctgagtgcccaagttttttatattccagatccatctaagttaagggtgaaaaagggtcgacgccaaactagacgcatcagaaatgatatggatgagtcagaaacacgtgggaggactttacgcttgcacaagtgtgatc

SEQ ID NO: 42237 - DNA, 247 bp, Oryza sativa
  unsure (1)..(247): unsure at all n locations
ctcaagctcggcgggggctgcgacgcggatggaggaggggaatttgcgttttgtggtgacngagtggcgacgaacggtgccggcagcgactccatttccagtgggagttcacacggctcgccgggcattgtcaccaccgccgaccatccatggtgggcacagtactgtaccccttgcacaaggatccggcgaggtgcttcggcaaccggaggcggaggaggaggtgcgacagggacgggcggcgggg

SEQ ID NO: 42238 - DNA, 434 bp, Oryza sativa
  unsure (1)..(434): unsure at all n locations
agcttattattcgatggtgcaaacttattgtttgatattttcaaancctcaactcacagattcaaagtttcacattgaaagtgtgaatattaaaattaccaaagttcactaattaattaatttaagagtaaatttcatgtaaccctagatattatggtctaaattgcataaaattactgggttttgactcttatctaccacaatttcaagttctcaaatttataagtctttatccatcatatgaatgtcgcatctatgtaagcaaagcttttttgaattttgatacaggaatatataaaaatgattaatggcgtgatttataaattttaggaccataatacttaaggttatgtgtcacatgccaaagttcttgtaattttgtgtaacatataggtgggtcttatcaaatntaagaaacaaacatttactcctta

SEQ ID NO: 42239 - DNA, 409 bp, Oryza sativa
  unsure (1)..(409): unsure at all n locations
agcttcaccatatatagtagactaagagtgctatattcttacatacaagatgaacattgccagaaaaggaaataacttggacagattctgattcaaccatataattntacacgcactagtcgaatcaaattgaactaaacatccactctacacctaacatgatcgcagcactagctctagcgaatatcaaccaaaagcataaaaaggctcaaagattcacttctgccacagcgcattttcctagcgaacaaccacggataagctacacgcatctactcccaccaggtcagaaatccccgatgggaaacagcgagatccaaacaaaagctcaacttagcagacacaccgagatctataaaagtaacgcgagcgagttcatccagaaagtagtagtagtaacaaggcagtt

SEQ ID NO: 42240 - DNA, 408 bp, Oryza sativa
actcaagctggggctaaccattacagcaaaagccatagaatgaccgaactctgtctgtttgttatagacttaaaccatctaaataatctagacttgaggactaagttaaaagggaactaacttatgtgattgaactcccggcttcgataagaactccaaaaatgactctgaaaaaggggggttgaagcaagggtgagtacaacgtactcagtaagctattatattaatcaataatgaatgcatgaaatggtaatatctgtgtagagctaggtttacttgtggaaagcacaggatatagaggaagaaagcctgtaatgttttaaatgcaacagtatctaataaagattggaattaaagttctaaccaaataccatatgagtcccgatgctcaaatccgggagcacagct

SEQ ID NO: 42241 - DNA, 416 bp, Oryza sativa
agcttgcacatcatactcattgagtgctttgatgtggttttcttgagaatccctaccaaacattatatttgtctggatctcattagaaactcttgccactaccatttccttctctggagtgaccgaagtcgagccattctgcagacttgcttcctgaagaatttcaggctctctatttctttcatcctgtgaggagtaactctcattttcctggtacttaactggaggttttggtcttggtggtctcccaaattttgcagataaaactgcaggccctggctgaagttttgttgttctccattgcattggcgggagaggtggtagtggcggtggtgcatcttcagtatctttggaagaattattttcctgtaaaattccattaggtggtttagcaggaagtacattcaacgacttct

SEQ ID NO: 42242 - DNA, 459 bp, Oryza sativa
  unsure (1)..(459): unsure at all n locations
tctagatatggtggtttcattggcagcgacatgacggtgagccatcatgcttctcgtnggagtttgtgcaggtacgttacatgatatatcgntcgtagcggtacaataggtatcatacatagtaccctaagtaccaggatggcaggattagtacttgcgaggtagcaagtaccaagcatcagcgtctcctctcatattctccttttttctcgacttgacccttgttccttactactgctgtcgcgctggctcaaggcgcgaggacgcaagcacgaggagtaggggcaggatgacgttagcctccataaaagtatctcgttcgaatggtatcatgtgctcgtcttgaaataaagtaggaatcacattnttccctcaagcggactttaatgggcttcatgaatagtgttcactattggcctagcccatctgcctatcntttctaatgttagtctcagattc

SEQ ID NO: 42243 - DNA, 437 bp, Oryza sativa
  unsure (1)..(437): unsure at all n locations
agcttcttcctccttgctgattgcaaaccaatctactgctaattctccattgcctacctcagctaaccttctacaatctagcatatagcacttgtgctgaagatttagtactacgctatctagtagaaacgaaaacctgtgtagcatatgaaattcacatatggattctaaaggagaaaaccccttttatacccctaaaatctctattaaaggcactattactgctgcaggagcttgttgttcttctatggttaacactaccaccactatgcaataaatatttatatgtcgcttgaggcatcacttgtccactatgatgcatggatacgcgatactggtacggcgatacgagattttntaaaaaacatcaatacgtcgatacggcgagtatatataacaatatgtttaaaataaaatatactgaactacacaagggt

SEQ ID NO: 42244 - DNA, 440 bp, Oryza sativa
  unsure (1)..(440): unsure at all n locations
aaaactaagcttggggagctcggctttgatcggtgtacgcaggagcaggcttattttttctangcagaggaagtgatggcataattgtcggcgtttacgttgatgatctcattgtcaccggagaaaatccctctgaattgaaggttttcaaggaacaaatgatgggggagtttgagatgagtgatctcggtttgctcacatattatctcgggatagaggttgatcaagatgagagtgctaccacattgaaacagactgcatatgccaagaaattactgtctcactttgggatgatggagtgcaactcagtttcaattccaatcgatccgagatcgcagctgagcaaggatccagaaggtcacccggtggatgcaactgagtatcggcggatcatcggtagtcttcggtatttgcttcacacgaggcccgatctgtcatat

SEQ ID NO: 42245 - DNA, 421 bp, Oryza sativa
gcttgaggagacagagtgcaacttgttttttattgccatctatcgtgctcaattctttgtcagttattaaggggatgtattggttcaatcaagggtgtactgcgccaccgcggttagacactctagaccatctgaagaaatcccctgctgctcacatttttctttttcctatgagtaaattgcgtaacgtcaacatcttatatctgctcgagaaaaatattgctgccgcaaacttctaaatgtaatgggtacccatattgctgacaacaaaatatgcatgaattacttgcctatgggctatgacagggcaagggcagatgctccactacttatattggaattgggatccacaacaactccatgatgaactctatcaacagcggattgctcggatccattggcatacctacagaccatcttt

SEQ ID NO: 42246 - DNA, 323 bp, Oryza sativa
  unsure (1)..(323): unsure at all n locations
gcggagcggagactctcaaaagtttccgctagatccgagagtaaggtctcttggttgcgcgtctttacaatcaagtcatcgacataagcctcaacattacgtcctatttggctacccaaagaaattcgagtagtacattgaaaagtaggacctgcattctataacccgaagggcattgtcgtataacaataagttcctatgggggtaatgaatgcaggnttttcctcatcctccctaaccatgcgaatctgatggtaactagagtatgcatctagaaaacacaaaaggtcgcaccccgctgtggagtcgacaatctgatctat

SEQ ID NO: 42247 - DNA, 316 bp, Oryza sativa
  unsure (1)..(316): unsure at all n locations
agcttctgaacatagggtggaaaaatcctctttttcttgtctcctttattttgggcaaatgtacatactagagtttatttttgctattatcacccaaggcttgcaaatcacaacatatgatagctactttgtgcacatagttgagactaattgattgaggttttgaattgtgcaaaaccgtattgatttacgtttccatatacaaaactcggttttagccaaaagttttaaaaccgcctattcacccccctctactctgccacggaggacggaggaggcangcgccactggctgcggaggacctcttccttgactt

SEQ ID NO: 42248 - DNA, 454 bp, Oryza sativa
  unsure (1)..(454): unsure at all n locations
tcctacggctaggagtagtagtactagcttgtcgtgttctcttgctcttcgcgaggtaaacaaaaatggcgccgaccggccacgcgcgagtaacgtaccacgggtgccgccacggttagttgcggtccggccatgcatacgcggcctcgactgatgtggctggccggtgcacatgggctaattgccatctagacatctagtactactatcctttcgggcagagttgcatttcatgcgtgtaaaagttcgtagtatctggcggcaatccgcggacggaggcgcatcgtgcgcctggtgcctgcgcccaccgcgacagccgatccctcttctgtcgctttcgatccttttcacctggtcacttggtcacccactcgaatggagtanggttcttgccaacctatatcttcacaagtgggagaggaaacgcgttccattgaacatttggatgcgtgaa

SEQ ID NO: 42249 - DNA, 434 bp, Oryza sativa
agcttgctcgttaagacaactagcctatccttaactagccgagctggctcgttatccacccctagtgctcaagacaagcatgcctttgaaacttcaaatgcttgtgtacctgtacgggtagacgggtgatccagtttttggggagcattctcctacgcgactgctttgcatcggctatatcttctgctgttctgcattggctacatcctctggtacgtctacttcctctgcatgagctatttgcaacgtctacttcctctacatcgcaatgtctttccactggcaccggtgctattggagcagaagataacagttgcgcaccacgaggatgagggaacaacaacgtatgagagaacatcaacatctatagaggcaatactaatgcctcatcatccatccagtggagcgttctctgggtatatctctattattat

SEQ ID NO: 42250 - DNA, 382 bp, Oryza sativa
tggacagagcccgagccagccgtcctttacctgtgtgcatccgtcgcttcctccaccaaatccgccgcatcccgtgatccgtttgcaaaattagttgaggggaaatattcctcttatcctcctctatctcttctcccaagaatcggactctatcccgaagaaatcaacgcggaatcgagctcgattcgtgtttatctctccaactaaccctcggatgttccggcttcgattcctctcgggtggagtccgacctcttcaatccaagcctataaatagcatcccctagtcggtctcttttcgttgcctcatctcccgagctctctcgtgccccgtagtgccgtcgtcgcgccacccaaaccggcgccgtcgccggccggcgaac

SEQ ID NO: 42251 - DNA, 422 bp, Oryza sativa
  unsure (1)..(422): unsure at all n locations
agctcgaattgataattgcaaacatcttgtttctcgaaagcggncaaaactaaaatcaaaataacttgctatcggctggaatgttaaaaggaggaagttcatatgtcgaatcttgaggaacttcaccaagagtcaaagtccagccggatgagagaggccaaattccgagacaaatgaactcttcaactaaatctcgaacgctaaacttggagacaagctcttcaacaaattgacggcaggctctgaaataaccactggatccttgcaagaaaaaacgaaaggacatttctccatagcttttatatcggctggaattttgtggtacaaccatttagattgccattttgatccccactttgttcgcatggtagagacaagtggtcaagggcaaccacggttcgagcgcagcgtgagctaacaca

SEQ ID NO: 42252 - DNA, 458 bp, Oryza sativa
ttgtatgttctctcccacaatcattgtgcatgggtcgtgctttcatacttttgtgagctttgaatgttcttcccccaaattattgggatgcatatttctcagattttatgatccaattacgagagatccagtgggagataaattccagactcgtggaaaccattggtatgctctagctccaaatgtttatgtaaactagaaagatcggcgaaaacgttgaatatatcacttacatgtggcatacgaatttatcataatgttatatatttcaattccaattccacccctctaaaatttctactgcacatactattgggtttgtagtataagtgaaccaaatccattagatctaaatcaacaaacggctcaatcatttagggtaccgtaaaacaccccatgtggctaagctttggcagtcctaagtcagcagcagtacttaattaaatggagaacaccag

SEQ ID NO: 42253 - DNA, 428 bp, Oryza sativa
  unsure (1)..(428): unsure at all n locations
ngcctgccagnccttcattngcgccatcattgattctatttctgtctatgacacgagtagaccagcaactagtggcaagtgacttgggattcttatttancattactatctgtcattggattgtgtaccactcacatatatttagccttcctagctccacatattacttctggacagcacatgttcttgatccctacaatcgctgactacgccttccaggtatccattgcttggtaagggcttggtaaggttcttcatattgctgagagtagttgagaggcaccactgcacctgcctggtagattattatggataaccttcacatttgctgctgttttggtgtttcaatggcaggcgacgatgatgagaggactgcccacgactttgctgactgtgtcagtgttgacggtcgttatcgatcaattttg

SEQ ID NO: 42254 - DNA, 425 bp, Oryza sativa
agcttaacaaggctaagcaacggatcattttctgctatgtttcattaacaaaatgttagaacggctggcaaatcattcctttttctgtttccttgatgggtgttccgggtatcatcaaattcccatccatccagaggaccagagtaagaccacgttcacatgtccatacctatgcttatcgtaggatgtccttcggactgtgcaacactcctaaatcttttcaaaggtgtatgatgtccattttcttggatatgatcgaggacattacggaagtcttcatggacgacttctcggtctatggaaaaaccttcggtcattgtctacagaatttggataaggtcttacaacaatgccaagaaaaggacctggtactcaattgggaaaagtgtcattttatggtccttaaaaggattgtacttggtcat

SEQ ID NO: 42255 - DNA, 442 bp, Oryza sativa
tagatccgcggggatggaatcgtcatcggcgggatctagtctgctagatccgcggagccgtccgcgtcgtcagtggatggccggggagggagggacgccgccgtctgctgattgaaggccgtggttgcggtcgagcatatcgaggcagaggtcggactcgctgcagcactcggctccccctcctccttccatggctccatggcgagagagataggcgcttggcgaggacggcgaccaccgtcggtgcaaacgacatgagcacaaccttgcacgtgcagtccagcgcgtacatcctcgactacggtggcgctcggctccccctcctccgttgccgcgagccagcacgctgtcgctgccgctgacatggttcgcctccgggaaagagaggagcagcgctcggcttcccctcctccgcagccgcgagccggcgtgctgccgggaa

SEQ ID NO: 42256 - DNA, 429 bp, Oryza sativa
  unsure (1)..(429): unsure at all n locations
agcttggaggctactagtagtagtagtatttttgcttnctcctttatctcatgcttacttacaacctaattattagatggctaaaagctgattatatgctaaaacgatttattaacaaataaaaaatattgttttagtagaatatttatatgtgtgtgtttttagcggcttatatggtaatgctgaaaaagaaaccacgttaaaaatactgtagaattataatttcaaaattaagatttaaaatttaagttttgaacagcgactgattctttatatatagagcaaatgatgaggttttgaagcattgacatgtattgttattaagacaccaaaacgcattattttggtattaactcaactgtaacaaaatttgtttgtttgcacaattgcacttaggcttgtacagctaccatgcatgcatggtaccac

SEQ ID NO: 42257 - DNA, 469 bp, Oryza sativa
  unsure (1)..(469): unsure at all n locations
tcaagcttaaagntgtctttttgggtgtgtgcccgtttgtatatctcgatataagatctggagtatatgcactcgtgtaagttttgactgtgggtacacttatgggtatagagaccaaattctatccatcattttaaaaaaataacctactgatgcacaagcgtcattagggaaatcctaacatagaaagtagaaactatcacgtactacctttgtcctaaataaattaatttccacccatcccacacatatcaatacataacgtaaaaaaatagaataccctactttatcaaatctcaatgtaactttttctcactttatctaccccttaatataattatttctaactttcacaaacttcaatgcaataattactttgaaataaacttattttgggacaaatagaagcagctaaaaataaacttaatatgagacgggtgaagtagttatcatacttgccatgttatat

SEQ ID NO: 42258 - DNA, 416 bp, Oryza sativa
ggatccttaagtcacctgaagcatgcagctttcacgtatagatgacgaagatggagaatgttttcctcacgacgtactcggcttacttaggtcttggatgcctcttcaccacctccacgatggcagatgctactgacactcggcgagaaataagtggaccaaattcgaggctctctacttggttggattttgacgtcttgttacgatgacctacatggccgtctttctatggcgtgccgagcgaaagccacgcaagatgggtctacaacaaactccagcgcgcctcatgcaatggactaatccgatgtcctggtcgtgccttggagccgagaggtgacgcccagcggcccggccagcactcccacaatcggtcgatgcccgccggctgtcgttctcacctgtgaggaactccacgt

SEQ ID NO: 42259 - DNA, 185 bp, Oryza sativa
ggattatggcatggataagaaactatgactcacattcaacagtgatgaatgggtatgtatatatctatgcgtcacctgaagaaccagagctaatgccttgctataaacgggactgacaacattttctgtggtgacgaacaagagtatcactaatgctgctgcgaacattggcaatttatttttga

SEQ ID NO: 42260 - DNA, 179 bp, Oryza sativa
ctcctcctctgctgcgcttgctgctctgtcaagcatttgctcgaacagctggcgcgccggatcccctggtgggcgcggatctgcctgggatctgcttcgcgcgggcgggatcgctcgtctccctcgcggggatctcggtcgtatcgtgggggaggtggttaagctgggggggggggggg

SEQ ID NO: 42261 - DNA, 433 bp, Oryza sativa
  unsure (1)..(433): unsure at all n locations
gctttcctctganccaactgttgttggttgagacttattttcttctcttcgtaactagatctgaaaattctaaaacaaattttaattattgaataattaattgaagagaagaatggccactagggaaacttcttttcttactcaatctttatattatttagtggcttagcagccttaacacgcaaaagtcgcccctgaaaacttgagttgtccaattcaagtgccctacaaggcaaaaaaatattatccaagccaaacacataagaatcaaggatagtctcaatattttgtgatacttttttgttctattcaatcatttaaattatgttctgattcctgaagtttgcagaagtgtattnttttttgtgagctaaatcagtgttacactgttccagatttagtccatcacaattaagcattggattataaatgc

SEQ ID NO: 42262 - DNA, 472 bp, Oryza sativa
  unsure (1)..(472): unsure at all n locations
ctaagcttattagtaactaanaaaattcatacataattttgttatatacatgttcttagcaattcaaaagcaaatattgtgaaataaacaaagataaagaaaacaaccaaatcaacttagaataaagttttaaaatttaaattttggctataactataatcataagtaaaacgatggggcaacatttcacttgaagctaatcttcagatcaagattttacatgcaggtaatcttcagattcagacaaaaaatcagtcctggcctgaaaagcctccaatcgaaattattcatgcccattactcattanttcttccaattggtcctataaatacctaagctccaaagaatatttggtgttagttattaattaaaaatgtcatctagttcagaggtcacgtttgttgcaactatatgnttagctttcatgacagcgacttgagacctattgggtacagtatggtgagtcagtgca

SEQ ID NO: 42263 - DNA, 229 bp, Oryza sativa
ccgcaagagaactgtgtgatatgagatctaaaaacctctttcttatctaccataacattcttctttcacgagttgatatattatggcaccctgaccaattctccaaaggctataaacgaatgggatgcatgatgcggcttccgtacggacgatgtgcaatccacacccttgatgaatcatccaacggctcacgaccatgaggcactgtgaacatatgccccttataccc

SEQ ID NO: 42264 - DNA, 434 bp, Oryza sativa
agctttatcaggcgagaatattattctctattgcactccctctcacaagatatcgcttacatgacagacaataaaagggaaagaataatgtaagttaaatttttttctctatctagcagatacagatggtgcacaattccacccactttgattctcttatactagatagaacatattatctacctcagaacatattatcttactgtgtatcactcaagctttcattacatgtcgataaggcaccagcagttaatcatgattttttttcataaagcacaaaacaaaccccaatttcctagataataacaggtcgtacaattttatacacattctctttcgaatgacacgctagtaaagggcattgtctaatacgatttagcacgtcttatctcactatgccttcttttcttttgagcaagggaggagacccctcc

SEQ ID NO: 42265 - DNA, 417 bp, Oryza sativa
  unsure (1)..(417): unsure at all n locations
tgccattctnctcctctccttgtagtagagagtatcactttctgcctgcacatatccagctccctctccagttcctgcttctccctctccctcttggtgaccaactcgttcagcaactgcagcgcctcctggtcgtactccgactgctcctccatcatccgttggtattgcagagcctccatctgcattgctgccttctcttcctgcaacctgttgatcattgccatagtctggatggtcgcgatggcagcggcgctcctctcttcctcaagctcggagtacaatgcgctgagtgcctttcgctccgcttgcagcgccgatntcagctgatcaacggtggaaagctcggacaactcatctcgcttgccacactcccgtccaagatatgatagtgaccgcttcctctaagcaaaactt

SEQ ID NO: 42266 - DNA, 423 bp, Oryza sativa
agcttgctcaatccagcacgcgtatggacgctgtgtatgacgaggtcgtcgacgcagagtgatcgggctcggacgtgacgctgatggtagcgccgcatgctctgctggtagcgcgcggctcggagggccgcgcgccgccttcgctcttccaagtagtcgaggtcatctctgcgaagctgatcttgatcagcctcgcagtacatggtggcccgaggagacctcagggtgagctcggatgggagaaccgcttccgcgccgtagacgaggaagaaaggcgtttccccggttgctcggcttggtgtagttcggtttgcccagagcaccgctggcaactcctcgatccatgaatcgccgtgcttcttgagtatgttgaaggtcttggttttaaggcctttgaggatttccgcattggcgcgctccact

SEQ ID NO: 42267 - DNA, 411 bp, Oryza sativa
agacgtacgtacagcttcacacgaccaattgcgacggcagaactagggtcacccacgtttaatttgttggagtctcctgtccgcttgcgctacgtacggactctccctggctccttacgtaagcccatctggcccaaccacggccttccaacctgcccctagctggctagctagggctgcgtgccaccgtgacctgacctatacggagactgccgggcccgggcgcgcgaggggacggcgaccaagctctcgttgggcgcacatggagattgaggacggctgcgccaaggttctccacgggaagaatgaagaagcgatcacgatcacgccccaagacgaccggtgcccagatggcgtctgcgggcaaaccggcggcgggggtcggcggctgcagcaaggaagcccgagaga

SEQ ID NO: 42268 - DNA, 385 bp, Oryza sativa
  unsure (1)..(385): unsure at all n locations
tatgtgaatttttaataacgncgccaactttaggttacgctcatcatantttacaaagcggccggcatatcactcggatcatgttattcagggatttacaccgcatatgctacatattaatatcaagtcgcttggttaactataattatggaagccactcggttggctggattatttattccttgactatatgcttgcgttgtttacttaaccgcatagtcgagggctacacctattaggtgcatctagtcgatgcacctgactttatttttcagccctccacagtcttctgactaggaaaaagtactcgggagatcatggcgaagatgattgaagcactcggctttggagtaatctacttcgagagaagattatcttttcgact

SEQ ID NO: 42269 - DNA, 459 bp, Oryza sativa
  unsure (1)..(459): unsure at all n locations
ttaatgactcactcaccgaagcaacaggttcaaatgatctatctcatatatgaaacccatttgtgattgattccaaaatagaaacctgaataatagataaactgatcagtcattagcataatctactgtactattctaccttgaattatggcgctggtcaaggaccgctatataggtgtatgctagtactgatcgctgacatttacaaactaagtaaaatgatcaaactcctttctgaacctaagccagcaaaacagacaacgttgatcattttctgttgaatagcgtcctcaacaagcggtgcattttcggtcgagcatcttgagagaacgcaacacaagagagagcgatgtttcatgaccgacaaaatctgctgtggatagcaactgaatntctggagaccgaacgactgccccatctgatcaagggctgtctgaaagaccaagagcctgcttgcta

SEQ ID NO: 42270 - DNA, 360 bp, Oryza sativa
agcttgcaactacgcgttatatattttattttcatctgcgctaataagggcacatccgctttctctgtatgtagattaaaaaaatacataccatattttttcccttgctttgctatttgaatgcttacctcagtgcaagagcagggaagaggtttgattgctaataaaatgagtggaagaaggccgtcatggaagagtttggggtccaaagccacaccttctttctcccatatgaacagaggtcaggagctgccggcagggcgctgcttttaatctgactgatggctcaagataagttggagacgtacttgagatagataatttatgtatttcgctatgtcgaatacctaaactcaagcg

SEQ ID NO: 42271 - DNA, 439 bp, Oryza sativa
  unsure (1)..(439): unsure at all n locations
tccttctgattgctggntgaagcggatgacggtcttctgcttgttatcgccctccggaggtcgattgccctttgcttggcctggagtaggtcggggagagacacaacttcttccatcgacgacaattctttgctggggctgaaagtgagcattgacaccttgtggtaatgcactcgctggagttggagctgttgcaacgcgggccataggactgctttgggatgcatggatgacaattcgctgaggagcaagcttctgattgcagggagctgcgtggactgacgtgctggcagctatgtttctcggttntgggcacttgtcggcgaaatgacccattccttgacaattgaagcaacagatatcttcccggactcggcattttcttttctcattttgattcctctgtcctggcactggagtgaggctganactgtaatct

SEQ ID NO: 42272 - DNA, 454 bp, Oryza sativa
  unsure (1)..(454): unsure at all n locations
ctttgaaggaatagncacactatgtagaatatcctgtctttttattagncatatgcaagtctatataacatagaatagcaggctgcccatgacgggtacgtgtggggtgaaccaaatccccattgaattggatttttccatttgaaggggatcgtacaacgtcggcagtaccccctgtgaataccccaccagtatgaaaagttcttaatgttagttgagtccctggctccccaatagattgacccgcaataacacctacagcttcccccaattcgaccagatcgccatgagtggaactccgaccataacataattgacagatccaagatgtgctccggcaagtaaagggggttctcaatatatattggtgtgctcgaaatggctgtgctcgaaaggtggttatgaatcgattgactaacccaattccaatatcttgatttccagtggcaatgca

SEQ ID NO: 42273 - DNA, 422 bp, Oryza sativa
  unsure (1)..(422): unsure at all n locations
agcttcgcgtgggagcaagatgaaaatattttctctagnagngcnccatgacgtctcactctcgtagcgaattattgacttgtttacatatggtgagtctgaggaggaggacattgagaagattacgaagatatgctaaatgagatgaaccattagcgcatgattaattgagtattaactattttaaattctaaaaaataaattaatatgattttttaaagtaactttcctatagaaaatttttataaaaaatataccgcttagtattttgggaagcgtgcgcgtgaaaatcgaaacaaactcacttactttcttccgctgccgaacgcaaccatattgtgctcgtggttggggaacggagcttctcttccggaaacattcaaacacgagcttgctacaagtattattgagctcgacgtaca

SEQ ID NO: 42274 - DNA, 437 bp, Oryza sativa
  unsure (1)..(437): unsure at all n locations
accctacatatgttgcaattttctttgaacancggaaaaaaggtcatgtttagcaacaaagtaatagcactctaaacaatccaaatgcatgaaggatccttatcaaagcacaaatgtcatgactaatttactgacctggcaaccaagatccccgatacctaaaatgcgctcaccatcagtaacaacaataacctgaatgctcttctctggccagttcctcagtaactacaatattctccccctggtacaaaagcacctcattttagaaaatngaagatgatttacacctcaaacttctgccatcagtttggtcaaaataagtaaaaattaacataaggtgaaggtgcatactaccaacagaaatgagcaacagatacaaatgatggaagaaacatacttctctttaagactgatgtacagaccctgtggtcgtctaa

SEQ ID NO: 42275 - DNA, 305 bp, Oryza sativa
accacaaaaaaggacaacacaatgacgcatcaaaactcaccatccataaccactagcaattgactgagaaccctatcaccaactgagacgctatcattatcacggcctcgagatactgcaagcccatccatatcatcgaaaaaaaatatggccggagcattatctctggctttcgcaaatagagatctcactgccttctcggagtccccaacccatatgctgaaaagttcacgacccttaactgcaaggaagtggagatatgcctcggaagctacagcccgggccatcaatgcctcactgcaacc

SEQ ID NO: 42276 - DNA, 436 bp, Oryza sativa
  unsure (1)..(436): unsure at all n locations
agctngccatacttaatttagctaacatgtctaacatgtggccaataaattcgaagccacatttcagccataggagaacaaacttgccacacttttacgtgccaatgacatgtgggacccacatcatgatgaaggaatcttgccataagtgtggcatgaaccaaacagatgtctaacttagtcgaacttggctaacctaagttgtggcatggtgagacaaactgtggtagtgaaccaaacaacccctaacaccatcactcaactcctggttacaaatttagacatagtgctacatgttcgtagctcggatttgattatgtagtaaaataatcaacatttaaattaggaggattaggtttattaatattctgtggccttagtttgcacagaggcataataagttcgaatagtaaaacgaatattttacaaattcata

SEQ ID NO: 42277 - DNA, 438 bp, Oryza sativa
  unsure (1)..(438): unsure at all n locations
gctctatctgctctaagcttgcctacgtacatggtttgacctgaacagcctcgaaactacatctttatgaatttatgttttgtaacttgaccaatttttatcatttggcgggagttcaaagttttgttccacatgtcaaaaagaatgaacactagcaatcagctccaaggcttgacactgctatacgtgctgaatggttntctttcagtaaaaaacaatcttatttgtgttagagagaataaacagatgatttcaataacctttcaaataattcaggaaatcatctccgatatagaaggaaaatatacaaacttcagtactgaacctcgtatatgtatactgataacaaaagctcagatggaattcgtatttaacaaaccctttgattatctacattagggggttgtcaaatgattggagcagagtttgtgtggagat

SEQ ID NO: 42278 - DNA, 388 bp, Oryza sativa
  unsure (1)..(388): unsure at all n locations
agcttcgctgctggcaaacaattttgtattggatgatatatcagnactgataccacgcaccagattatcattgacaattcgaacctctgtctcatgattctcatatttttcgttgggttttactcttctaaaattgctaacaaattaccaaattgcagggagccgaaggatatcctggtctcagcctggcacttcttcagaattatagagcctgatctttcatttcaagaagtgttcgaggctgcctgcgatggcaagttcttgaccggcgctatctgggatcacattattggctactggaatgcttgcaaggcgaacccacagaaggtcctgtttctggtctatgaggaccttctgcgagatccggcaaacatcgtcaggaagctcg

SEQ ID NO: 42279 - DNA, 410 bp, Oryza sativa
gtagcgcgacttcgtcactgagtggactgagtgccaagaagacatgtgttatgcccagaaactcaccaaccagagattcgaagctgaatgtgcattacatccctgtctaggaccagccagggtacacaaacgacaatttttgacatacagatccacgtcttacaaaaatggagatgattacaaatgcaggagaaaagaaaaacgagctagacttggaaacttgacttctgcagcggggtgactccactccacaggtaatacttgacgacagcgacgaaatcaacttcggtaagacactttccactacgaagatcttcagctctggtgtggtggaaaagagagcaagactgagtactaccaactgtattcagcaggtcataccggaagaggaggtatgatgcacgatatat

SEQ ID NO: 42280 - DNA, 429 bp, Oryza sativa
  unsure (1)..(429): unsure at all n locations
agctntagatttagctctgccatttgagtgaggtggatctctatttggaaggctcctctcattttggtgtttttggcgtgtcatgccggggatgggttctggaatgagatccatttccgttgttctcagttcattagctggatatgtatcaaacacaacaagtctcattattgtaggacaagtacagctttggcgatttctacctgcaattgagggtgcggcgtggatctcttaattacttgagcttgtaagtatctggatggaggcttgatctggtagaaatagaatagaacatagcttcactttggaagtaacttctgttaattggctggctggctgcctttcctggctcctataaatcagctacatgtgcatcctttgaacgcggaatacgccacaactcattagtgtgccgtcaattatattctg

SEQ ID NO: 42281 - DNA, 343 bp, Oryza sativa
cttggacgcgaagagtgaggggagaagaagattattattattacgacgaggggggaggaggaggagcagcatggctgagcacaacgacgaacactccgtgatggagaagctctcccagaagctgcacagcgactcctcctcgtcttcctcggactcggacgacgaccagaagggttcctcctcatcgtccgcggcggcggccatgaaggccaagatctaccgcctcttccgccgcgagaggcccgtccactccgttctcggcggcggcgagcgcaagccccttgcttggtagcttggatccgacagcatcacttctactttgctgtgcaacccatccgatcgc

SEQ ID NO: 42282 - DNA, 425 bp, Oryza sativa
  unsure (1)..(425): unsure at all n locations
agcttcagcaccgatcatgggaggaaattctctttgtggctgngtgcctgtgttttttagttggtggtgggagctatgcacacttaaaacggattatttcattaacgggttatctcattaatatcaatatgaatgaggaaaatgtcagaataacttatatagttatgttttaaaaaataaattaatatgatttctgaaagcaatttttttgtatttttttttaaaatgcaacgtttattagtttgcaaacttgtgtgccaaaaagagaaaaaaaaaagagtctgagaaagtacagggaggaatacaacctatgactctttttctataaaaccgagtatatcgcttcctcgagtattaaaaccggtgtattttcagcggctttaagagccctactttggcttctatcacacattgtacaacaactt

SEQ ID NO: 42283 - DNA, 452 bp, Oryza sativa
  unsure (1)..(452): unsure at all n locations
tgaagatgcattaaacaaatatggttgtcatgtttgaatattaatacatctggattgcttctgaacactgattcgattgaatacatttgcactgtttttttgtcgagattctgtctgtgtcaagttcttttgtgaaagcatgaatgcaatttagtaaccataaatactgtatggatatgattcattgcctaaacttgcgagctctgtattttgtgttttctatgttntagccctggttatttgcttgccctaatttccattaagacctttttttacacctgttttatgggagttgtcttgatgtaattgaaaaaaggaaaaaagaattgagtgacaagctggatactttaaacaagaaaaagcatgatcttgtgcagatgctgaagcangtattgtttgtgctaactcttattctcggttattttaatgccactgttgttcacaacaaatgg

SEQ ID NO: 42284 - DNA, 434 bp, Oryza sativa
  unsure (1)..(434): unsure at all n locations
agctntactagaatctcggtggagcccttagtttatggtgtcactaagaaaactacccttttacaatataagacaagaactgttagctattaatttaccaaaataatattttattatcgttcttttcttaattttatccatccaatgcagtaaattttccttttaaaatgctaagagttgatgttgagctaatatatcgtgcgtatgaatgatgtttctttnttttctcccctttctatcttatgttaccaaaattgcttacacggcaacagaacagagataaccatgaatacagcaagggtaaaatattttcggatgtaacacanagatgtcgacacatttatttatgttctcttatatgtattaatccatccttcttttttttcaccccatgtnagtaattttttttaataaatactaagagttgacattga

SEQ ID NO: 42285 - DNA, 464 bp, Oryza sativa
  unsure (1)..(464): unsure at all n locations
ngaatagccatntgctcaacaaacatctattcatgatatctatatttangacacccagtccaccttgatctttnggccggcatatataatcccattntgttaacctatatttcttttactggctatcactgctccagaaaaagctcgatcggcagtaatccagtctctgaagtacacctcgaggtattgcacgatgttaatgaacatcaagtttttgtcctgaagcaccgtaagcttcctaaatcaacatcttattctcacctcttctgaattagctacatgggaccctgcctaattatgcatgaatgcattcatatgcttcattaggagtttaggactatacattggtctatgtatatgtcgatgtgtccatttcgtcaaaagaaaagagatcccaatacattgatcatgatgtttggaaagctggagctaattaagcaatgcatgtgacactagaattcccc

SEQ ID NO: 42286 - DNA, 397 bp, Oryza sativa
agcttaagcactacttgcaggcgcacatagtcttatttgcgtcacacaggtgcttgggcgaaatactccgaggcaaagaactctctggccacctcatctagtgggcggtcgagctatccccgttcgacttgcatttgattgcacgctctgctatctagtctcaagagctatctgacttcgcaactgaatggacaccaggacttgcccacgagcccgatcccgaagaccacttctgggtgatgtgctctgactgatctgtacgcgtcgccgtactactcttttctccgaatggtgagtcgattaggtacgcggggagactgcagcttgacacatccaacattgcaggcgaatacgaagcctttcttctgcgcctaataaaggcgaaagctctgggagt

SEQ ID NO: 42287 - DNA, 425 bp, Oryza sativa
  unsure (1)..(425): unsure at all n locations
agcttgcacgcagtcggattatacatgttctttccgctatggagcgtaacaccctactcctgtgtttgggattatggatgagttttacaaaggtttcttcactccagagagcgcacttgcttcctcacttctggaattcaggttttctgggcgtcgtccctttatctcagtgggcagggtcctccttttatagctcaaggggataccacatgtactgcctctacctaccctccataggagggggatcccactccactttgggcttccaaccgtgctttctcccggaagctaagcaacaaccggttctcgagtgcaacccggcgccgccccccgcctgacacggnggacagccctgtcattccctcataaatgaacgatgacttgcgacagccctttctctagtgacgctcggatgtgaccggtca

SEQ ID NO: 42288 - DNA, 460 bp, Oryza sativa
tatattcaaacctaaattaatcatcaagagcataacagactttctccaccaaacgtcacagtgaaaagaaggaaaatgtaacggtagggacataaaggaatcaagttaaaattttaggggtatagaagggatcaggtaaatttcaggagtacgaaagggatcgagtgaattttcattggtacacagagaatttactcatagcaaagcgctagtgactgacctgtctctcccccatgtcaggcaatggaaagcaaggagcgatgttgtatgaaatggattgcttcaatgcataggttttttttgaaacaaacccgaaaacataagctagatattgtgatatttactttatattatcctctggagtataggaacagaaacaggtgagaaaaggatcaaactatgtcagcaacctttttttttgtcggaatatcacagtattttaaaagcagggtcgtgctcc

SEQ ID NO: 42289 - DNA, 373 bp, Oryza sativa
agctttgtcccaagctccaccacaatcaatatctcaagctctcaacatatcttccaagattaaattgactcgctcggtctgaccatcattttgcgggtgatatgccgtgctgaaatttaaacgggtcctcaattcttcctgtagcttctgccaaaattttgaggtgaactgactacctcggtcggatactatcttcttgggtaccccatgcaaacacatgatccttgcgaggtacaattctgccaatctctttccgtataggtggtatgcactggtataaagtgagccaccttggtgagtcgatccacgactacccagattgaatcatgacccgatgatgttcggcgcagtcctgttataaagaccatttcca

SEQ ID NO: 42290 - DNA, 480 bp, Oryza sativa
  unsure (1)..(480): unsure at all n locations
ttacggacctataaaactcagctgctgccataataagatcctagagaacattaacgtcatgttttatggctntgcttctgcttttcaaaaccaactgagctttaacaaaatgatagaatcctagctagctcggttggcattcttagtccctgcaaatgaaactgggagaattccagggcaacccgactcctccattgagaatgtcaaggcgatcacaacgaggggaggtaagtccactcgtgatccgccgtatcctaaacttgcaggaactaacgggattgcaaaagaagcgtcatctagtggctcagctgacaaggaagttcagccagaaaagaccgtgccgcaggagtactccgacacacgggtgctgtagtttcctcaacgaagtaggaaaccgtcagtggacaagcaattcactcgttttgttgaagtaatcctaaagatccacatcaacgtgccgcttttggacgctatgcaact

SEQ ID NO: 42291 - DNA, 428 bp, Oryza sativa
  unsure (1)..(428): unsure at all n locations
agcttgccgacatgtgggatccctgcactggcttcccccgccggccagtctttatgcgccgaagaccgcgccacacccaccgacagctnctcctcacacctaggtcgcctcctccaccgccggccgcgccactctgcgccaagccagcctcctccaccagatgcgcctcgcgccaatccggtctccctccatcggccgcgcctcccgcgccaagccagcctccatctccgccgcccgcgcctctcgcgccgagccggtctccaatgtcatcggctgtgcttctctgcgccaagccggtctccgacccctccaccaaacgatgccgcgccggccagatgtagtcgtctcccacgccctcagctagccgtttgaggccgncatgcctncagtgaccgacacggtcaccaccaccgcagccgctattgcct

SEQ ID NO: 42292 - DNA, 456 bp, Oryza sativa
  unsure (1)..(456): unsure at all n locations
gtacanaacaatgatatgcaaatgcttatgttntgtctatgtattttganncagatgaattcatttactcttcaccaacagaaagcaaacactatccacaaaaaaagttacacattgatgtacagaaaaacaagaataattgtaataatcagctgatggcaagtcgacaacatcatcccagtgcttgtataattttttgatgaagacaactttgaaacacatgacatgaaaaaccgaattattatcaagaccatctaccaaatgtaaacactagatcatctgtactttatcgtgcaagttcctgtggacaatccacaaatttatttggaaatgaacatcagcgcatataccactacaagatctcttagcaacaaacctcctgagatctagttgcaaaacaaaaacagggtattctagatggcttcatcccaccagtagcacacctactactgaatg

SEQ ID NO: 42293 - DNA, 427 bp, Oryza sativa
taaagccatgaattccttttatgcatatctggatctggatcctccagaacaaacagataggatgagtagtatctgatgtaaatataatactcgagaaaaattcaagcattttaaaatatttataaatatgtatttctcctctcgtcaattttgatttcctcgagtagatgactcattacgtttaaacactctgcccgactagtcatagccaccaagcaccgggagtcggcctaggcacttcccaaacatgcatatgagtaacatgagttcgtcattaatggaacaaagtttcacggatcagagattactactcgggtacttttgcaattattaagagcagaaaataaattatcttatctctatgcttttgatttattccgaataatacttagcaccttgcgttattcggtccatccaacaagccctc

SEQ ID NO: 42294 - DNA, 428 bp, Oryza sativa
  unsure (1)..(428): unsure at all n locations
tcatggggtctggtctcgccattnggcaatttatgtctatcaaaatacagtacagaggttataaccaatacacaagcaggcgtgaaccagtcagaaattagaatggagaagtagacacagaagaggaggttgttgggacagtatcgatagccgccttttcacttattgctaggagtgattgtgagagaatacataacataggtgaaagccaaaaggcatatatgaccccccaatggaagtgatttgaaactgacgtttctttagaattcgattaagaataagaacatagaccggcttctagaaaaagagacgtgccctcttctctatctgtagattcaggagcaacatgctggttccttttgtcataatacctaacggctgtgggcagaatgaatgaaaaagcagatgaaagacactatacataccga

SEQ ID NO: 42295 - DNA, 462 bp, Oryza sativa
  unsure (1)..(462): unsure at all n locations
agcttgctnggctagagatgagctatcgagctgtattcatgcttgcgtggagaataataattttggctaagtgccagagcggtatatgtagattggtgcccggaacaacatactattctgaactgctataaggaaaggacatttgtactccataaagttataaatatttcgccaaagtgagggaagaaagaaagggagaatggttgtttcttgttaaatgaactaccaggagggtggcccgcgcaattacgccggtagtttctatataaaatattttaatctatttacacataattttctgtgacaactattaaataataatatcactgtctgaggactttataaaagttgaacgccataatcaacgaagttttgttgtcttgccacgttttgtatttataattnttaaaagtccaattaaatgtcgncaccatgctcctctactgtccgcttattgtccct

SEQ ID NO: 42296 - DNA, 432 bp, Oryza sativa
tctccttgtcagtacataggtaacaaatgctttgtttgttaatgccacaggtatcatcctaacattggtatatatttttagccttctgtatggaatgcagacatggtcttctttgcaaccacagcaacagcttgccctacactctgtgctgtcgtcatagctaaccaaataacctgttagtactgatatatatggtcttctttgcaaccacagcaacagcttgccctacatggtcttctgtatgcttgactaaacttgttacttgacatatatgcttgactgaacttgttgcttgactgaattattccttacacatactgtagtacttgcttgactgaactatgtcaggatcttattaaaaaaaatctatgtcagcactgctactatgtcaggatcatcagtatgatgcttaagtaacctgttagtatgtca

SEQ ID NO: 42297 - DNA, 431 bp, Oryza sativa
  unsure (1)..(431): unsure at all n locations
agctntcagcacatcaagattacattatattgtatactctatcatggaagagaaatactcctaattccatatcatataaaccttctaaagaaagattcttaggagaaatgctccaactggtcattccgcttaactaagaaaacatcatgcttaagttccatgaccaaaatccaaaatgaatcatctggagcaacaagttaactttgatgctcaagcattgacctgtaccgccgtgttctacacaagctcgctgctgtcaggcactccttttttccccttgcatccacagatcgttatatgctttacagccttccgttgcacaatcggcccaccctcaaattccacctttctcacattcttctgtccaatatcttcatttctcgcagacgaataaaaaaagaatgacgaaatgaccatctatattatcatct

SEQ ID NO: 42298 - DNA, 446 bp, Oryza sativa
ctaagcttgtttttgcgccatcacctagctcaattgtcgttgctgcctgattcaaccttttatctgtatcatcacagggaatgctcatgccagcccatatggtttgttttcatccttccaactgagccaaagccaacgaagacgaagggctcgcgaaaacctctctaaatccaggatgcccaaaccacccaaaacttttggcttacacaccgtctgccaattaactaaactgctgcctgggttggttttgtcagggtcttctcctttccaaagaaaagatctcctaaagcgatcaattctttttatcacccatttgggcacttgcaacgcggtgaagtgatgaattggcatatagcttatgaccaattggaccaacgttttccttccggccgaagtataagaacctacctttccagccgggaattcacgagccaattttttcgatt

SEQ ID NO: 42299 - DNA, 412 bp, Oryza sativa
  unsure (1)..(412): unsure at all n locations
accctctactgaactcggaatttctctatgggaagacatgcacattacagcgccatgttctcgtagtataggtaatagcataatacatatatttacccattcctagatctgaccacttactacgaatatgtcgtatttttccttactaagcggagtatgtctaaactactagatccatatcgcaatatgtagcccccagatcttgtgctgcctgtcatttttttatctccttgagaaaacctactttgttgattttttttttaagaaaatcagttacgttctcgacttggcttgaaccgcttctatatattgtcaacctatcagctgtttagagtcgcatgtgatatttacattctagatgatgtctgctggatgtacatatttattttcctgactgatanttcatgtttat

SEQ ID NO: 42300 - DNA, 414 bp, Oryza sativa
gatatctatcaaacagtagcaccttatttttcactaatggaacactaacatgggcccacatgtccgtcttgcaacggcaccaacacaccttggggcctcatcactgcgtgtgcaatgagctgtgcatgcacacacagatacactacacagaggagacacacacaggcagagaaagaaggagagagcctgtgagtgagtgatggagacgtttattactgaagactgatgagtataggacgagcagcagcagccagcaaatcaaggaaagcgatggtggagggagggacgaatgaattgaaagctagccgaggtgatgaaaaagcaaacagcgacatgacgaccgatggctgcttctatccttcactgcaatactgcattgtgttttgtgagttctatagtctccagtactatgct

SEQ ID NO: 42301 - DNA, 421 bp, Oryza sativa
  unsure (1)..(421): unsure at all n locations
agctngaaagcgtgcacacaaacacacactaaattgtatgtctggccaagaagcagttagatacaacaaagatccaatcatacttctatactccttttgatcaacagcttcaccatcttcatcaggatccaacacagctgtagaaccaattggtgttgaaattggcttgcaattctccatcttgaacagtctcaatagatccttcatatacttcgtttgatgcacaaaagtaccctgaggtgtttgcttaatttgcaatcccaaaaagtacgataactcacccatcatgctcatctcaaattccctgcgcatagtctcagcaaaatctacaaccaaagcgtgagtcgaacaaccaaagatgatatcatccacatagatatgaacaaaaagttgattatcaccatgcttaagaacaaaaagc

SEQ ID NO: 42302 - DNA, 439 bp, Oryza sativa
  unsure (1)..(439): unsure at all n locations
tcagttcatcaatacgagtcatgtccatattactccatcatcagctcaatgatgcactatcngtggacctcgtgattatacatcacctcactttatccaatggagaattcccgtacatgtttatcttattgaagatatgtaagagtatgatgctggtattctgttcccctcaatgctctagtgcaaacttgatctgctgtctcagcgtccatgtatatcaggaaagctcggtggcctagctaccatgggcaagcgacaactgacaagcctgatctgaacctgttttgtatgaatcacctaagagtaagacgtaaaatatacaacagggatcgatagtccgtttcttcagttttgaaatacatccaggttcaacaaactctggaattagcaattgaaaactagatatccacgttggcattagcattcttgtgctcacaac

SEQ ID NO: 42303 - DNA, 362 bp, Oryza sativa
  unsure (1)..(362): unsure at all n locations
tgctcatgctgtctgtgaagaccacacctagctcnggcatcaacacaaggattgttccagcaacatatgcagcccatctgaaccagaaccaagaatgaatatgcatgacaagttatgatttttatagagtaaaacaaacgatctttcttacttttgggatgggtcctgagagaaatattctttggccttatcataggatattggtttgtcaccatccataaaatcagacaggtccatatcaaaggttggtgcacgattactcaattcagaaccaaatgatacctgtacagacatatttagtaagaagatcccagtcgtccaaatgagctgtgaagcatccaactaaatatatgctacatctt

SEQ ID NO: 42304 - DNA, 421 bp, Oryza sativa
  unsure (1)..(421): unsure at all n locations
nggctgtgtatagnttatattgcatgttcaccttattaatattattaactaatagataaatatatatatttgtatctatttacacaataaattagcatgtgttagcacaatatatttattttaatcattttctactcttttattagtgtgattaactagaaaataattatacttatcaagagattattattaaaatatatattatactacttatggccgagctcggcaccgagctcgagctcgaaccgagcttgcctaaaagctcgaaggtgcaatggctcggctcgagcttgtgtcgagctcgagcttgggcagacgagctcgctcgagctcggctcgttgacagccctaccatgcacccacgatcgagaccgagctgagcaatactatgatagaaggctgaatgaangggtgattacac

SEQ ID NO: 42305 - DNA, 461 bp, Oryza sativa
  unsure (1)..(461): unsure at all n locations
agcttaccaactaacgaacgagaagtattatttatactgccacgtggaagaatgccattccttgaaacaaggccatttttgtttgagtaaattttataaaactacatgtattttgatcaaactatcgtaaagctacatatttaaggcgttgtatcactaaactacagatttagcaccatatttatcataaaactatacattcaaggttaagtatcacaaaactacatatttaatattgaagttatcacaaaaatatagcttctagagtttaaatctctagcaccattattatactggagctataaatattattgttttatgactaaattgtttctaaacccatagttntgtgacaatttagttactaaacatgtagttntataacacttcatcttaaatgtgtaattntgtgataaaattggagtaaaaaatgtatgtttgtaatgaccgagttaatctga

SEQ ID NO: 42306 - DNA, 438 bp, Oryza sativa
  unsure (1)..(438): unsure at all n locations
tcgccttgaagttaaaagtcttaaattgtggtatgactttttttcagaaagttttaaatcttatttggaagtttaaattttacctatagaattttcaaatttgtagtaataaaaaggaaacaatgttcatggaaaaagagaaaaagaatagtcaccgtaattcaaatcgtgattaatcaaaacctgattacgctaatctgatcttatctgctgcccatgtgaacgtgagtatgtccggatgtccccacctccctgcactgcgtagctgtgcaatcgcgtgatgggctgggacggaaccgcgcgcgactttctctggcgcagacgcgcgctatatgtaattcgcactgggggatgcgaatgcgatgcgatgcgatgcgatcgtgtgaggcggnggcaagtataaaggcgacacgtgtcaatcaattagagggaacaaat

SEQ ID NO: 42307 - DNA, 143 bp, Oryza sativa
  unsure (1)..(143): unsure at all n locations
cagatatggcactgttccgtcaattttttttaaaaaagganacggaaaattttgcttggttcaaagtgccacctatcataccctctctttttttttgtatatgataccngatcaccgcatcctgtattgatctggaaagctac

SEQ ID NO: 42308 - DNA, 408 bp, Oryza sativa
taaaactcagcttacatcacttcttacgttaggaactcacatcaggatcttgggctcgatagcttgatatcgagtccaagttcaattgggtatcaagttggatcttttgcgagaagctaccttgtacaggagctcaatattgccgagacccgattggtaccactaaacagcccgtcagattatgcaagagcgctagagttaggatcaggaaatggtggtgttgatgcaataattgatgaacttccatacgtggagatcttcttgtcaaaatactgcaaattcaagacgggtggccaggttttcacgaaaagtgggtggggatttgtaagtgacttggactataattgtatactagagatttcgttccagccttccaggatatcttctgaatatagtttattctgtttc

SEQ ID NO: 42309 - DNA, 450 bp, Oryza sativa
  unsure (1)..(450): unsure at all n locations
agctttggcggctgtagcaattnttcactggtatatttagcatgcacagaacgaaacaaccgatctctctcggctgattnttttttcttgaaccgcgcgcttctgtattagggctgctggctgccgatgcttctgctgcgcctgcgctgctcctctgacgcgtcggcggcaggaaggacgacgtcgactccgagtcgacggcaactttgcttcggattggaatcacgagacgacggtgccgcccgagatcgatttcttcgatccgataaacacgccggtggctgggaactagtagattgatccccaatgctctgataccacttgttatgaaaatagatgcacaacggagacacgaattgttacgtggaaacccttggtggaaaaaaccacgggcgccgaccggcantgatcactatagaggagatattaccaacgtcgaggaataacaat

SEQ ID NO: 42310 - DNA, 435 bp, Oryza sativa
  unsure (1)..(435): unsure at all n locations
gcttgatcaactntatataaaaataaagcaacacttatatctcctaattagtctcattatatttaacattgaatatattttggtttcttttttattttgggttgaacttgatattctttatgaacttgatcaaacctaacaaaatttaactcaggaaaaaaaatcaaaactacttatactataatatactagtaatatggttgtgctaaaccctatggtacaattctatttgtctttaataatttttaaaacttcatgctagcaaaaaaaattctacatgacagggtgtcatagacataatgacggaatccttatatgacaagtgtgttgatgagcacggttttgtggactntgctcgaagtggcgggatgagcaatcaaaagcaatcaaagaaatttctccgcgccttanacgagcagtgtgacttgtagaaaa

SEQ ID NO: 42311 - DNA, 435 bp, Oryza sativa
agcttggatttaggtctttggccttatgcttgcgtgcttcgccacatggctttcgacatatggcttcgccttagtcgaacctgatggtcttggcttggttcctcattggttaggcggcttcggcaggttcggttgaaggtcctcgtggcatgcctccaacattgtgcaaaaacgtccatgaatccaagaggataaaacttatgttctgctggaatttttgaaatgctaaagatttcatttgctttattgagatagtacagaaagatgcagacaacaaaacaaaaacaaaagcttatcagagttatggtgcaagcacagatgaattaactaatatatacaagaatgaataggagctaaatcatgtagtaaatcacaagctaaataaagcctatctgccatgaaagatgcaacttcatggttcacttttactatttt

SEQ ID NO: 42312 - DNA, 441 bp, Oryza sativa
  unsure (1)..(441): unsure at all n locations
tcatctttggtaggttaacaatcaaactaatataagccgctcgtaaagttacatgacaagttaccaaagtatgacaagttttataacctggttatcttgagaaacattgtatgatgagagagttgttgatcctaaagcgattattgacgtgtaccccaacttttcttgggacggggatcaatgcacaagcaattgggaaaaggtagttttctgatcgcgacagcgcacatgtccggtcgcgtggagctcaggaacaccagatctggtcacctggagctcgcataccaccggatctagtggtggtgaccacggtgcggagagggaccctagcagcgacatcggcgtggagagggacccggcggcaggcggtgacctcgcgcagagagggaccctggcagattgacgacaggctggaactanggagttagtgcatctgattgt

SEQ ID NO: 42313 - DNA, 362 bp, Oryza sativa
  unsure (1)..(362): unsure at all n locations
cgagagagagcgagctatagcctggagnttggagaggcaaaaaggagggtgaaggtgaaaccttttgcgaacttatctagcccacagtgaaaaagtcatcttatccctagtccaaactgaaacattggttaagagagatagcccaaagtgcaatttactctaaaaataaaaattatatgtatagatttgtcttgaaaaatactttcataaaagtatacatatatcactttttaataaatatttttatagaaataagaagtgaaatttgtgttttggagaccgtgtcgctgtcctaaacgacttcctttacgagtatggagagagtacgtgcggagtgaatggtcctatatcaaactctggac

SEQ ID NO: 42314 - DNA, 425 bp, Oryza sativa
gtagaggagatatttgcagaaaatccttctcaatcatactttttacttttcaaagcagaatgaagcctggcttctgcaatgtccttgttgcacatctggcacagactggtgacttgcaaacagatcttcaacatccctagggcttcctcaacattcttattcactgaatacaactcaagaagctcatcaagcttcaacagcagggagctagcaacctcttgcaggcgcaggttttcgccggacagcatacccttaagctcatcggcgtcaaccaacacgccgcggagctcatcgactgcaaggatgaactcctcgtagtggaccctacagagctcctcaatctcaacctccttcattttcacgatgctcctgaggccttgcaggagggactcgggcttcccggactcgaacgcgtggcggacgat

SEQ ID NO: 42315 - DNA, 401 bp, Oryza sativa
  unsure (1)..(401): unsure at all n locations
ttcatgaccaggcgttttgaaagccgatcaggtttatcattgccaaccagagggggcccagaccaacaacaagttaggttccagaccatactgtgccaagaagcccaccggtgctccccgacaccaccccggcgaatccacatgtctctcggcatcaaggcgtccctgataagctagttactcaaccaggggtggcccattccacccatgtggcgcgacttatcttatgttnggatgaaattccaaggaaatcggtccttaagtgcgagagcgggaaaccgtacaccctgtacgttccccggtccgcgggtctggaaatacatttactttgcaagcaccgacccaagtgtcgggctttccaaatctttcgtaaaacccaagatttaccctagttgttattc

SEQ ID NO: 42316 - DNA, 314 bp, Oryza sativa
agcttctcgggttcttggtctctgcccgaggcatcgaggccaaccccgagaagatacgagctatagagcggatgcgcccccccagcaagcttagggatgtgcaatgcgtcaccggttgcatggccgccctaagtcggttcatatcgaagctgggagagaaggcgctacccttatttaagctcctcaaatgctccaggccgtttacttggacggaggaagctgaacatgccctcactcagttgaaggcgtatctcagctctcccccagttctggtcgccccggagccagatgaacccttgcttctctacttagcg

SEQ ID NO: 42317 - DNA, 377 bp, Oryza sativa
gatgactggtcataatcgtgaagtcatcgcaactgggggtgtgggtggaattggcaagaccacccttgccagagaaattttcactaacgatatgatccaagggaagtttgacaagagactgtggatcactattagtaaaggtgataatagtattagtctattgcaacaggttatacaaggacttgggtgtgagcatgaaggtattcgtgatagcgcagtattggagcacatcatttccagtgaagtaagaagaaagaaagttttccttgtgatggatgatgtgtgggaagctaaacgggtggtggacatttttaaaaaatcatttgtgggcaacgctcaagcacgcagccgaattctcatcacaacaagatctaaac

SEQ ID NO: 42318 - DNA, 341 bp, Oryza sativa
agcttcctgggagaatgccaatggaactaggtaagattccatgaatcctgttgttatccaaatatattgccaccagtttggtagagtttatttttgaggacaaggatgtccagtctacagattcaaataggttggcaccaaggtccaactgggtcaagttttgcaaagcccacaaagaaggaacaacaccagtgaatgtgttatcacggacctctagcacttgaaggttcaaggcattaactaaagaggttggcagtgtgtcggtgacatgggaccgggagtatcactactaaaggcttggacaggagcaatcacccacgaggcctgacccccttgggggg

SEQ ID NO: 42319 - DNA, 452 bp, Oryza sativa
  unsure (1)..(452): unsure at all n locations
cttcaaactaagctttcaaaaaaaaacatatatgcatcctcaaaagtgcaattgttctacataagtgtggcattccagcctaccagcaaccgctgtagacctcatatgttcctagatattcaattgccaccagnggtgagaaatgtactcacttaagcagctacggtggaaatctgatggcccagcggggtgtggtggcatcccaagatcgtagcacatttctatgtgggtctactggcagatttatgggtgatgaatttttatattattgtgaggactgaagatcacagttttactgtaaacaccatattttgatattttcttcaacgtttgtacattaatcgctagtttcttttcatgcgtgtataatgtatcaacaagcacaaagtgaatgtcatgataatatgcattaattttagatataagtccaataatgatactcgatctgtact

SEQ ID NO: 42320 - DNA, 430 bp, Oryza sativa
agcttgtggatattaaggaagagatccttcgcaagcgtatatctggtaaacttcctggtgatactgcatctatactaaaagcttggtggcaagctcattctaagtggccatacccaactgtacgtggcaccaacattccatttccgtaactttattattatggtatcaattgtgggtcatgacgagcaattctttctacacatattcaggaagacgacaaggcccgcctggtgcaggaaacggggttacaactgaagcaaatcaacaattggttcattaaccaacgcaaacgaaactggcatagcaacccagcatcctctggtgaaaagaccaagaagaaaaggtaacttataggaaaattatgcctcattgttcattggtccgtaacaagctcgcaacattgtgtttatcaattctaccctgttcatgc

SEQ ID NO: 42321 - DNA, 416 bp, Oryza sativa
  unsure (1)..(416): unsure at all n locations
aagcgaactactgaactaggcgatgagagtcttttattatctttaatgagtaaataacctttcacaacatacgaaacaatacgatgggtagaaatagaatcataaccgggtctcagaacaacaaagtcaattgcttcagtataaggacttcgtttggttcaaaccgggtctcacaatcataaatgactgaccagcttgacgggaacatatcctatgcacacaagcttctcgtgcacaccaactagtaaatttcacagaaaattctagaaaaattaaacacatattttcaataatattattaaattgtgcacgagaaacttgtgtgtataggatatgttcccagcttgacatgtcaactttcacgtggnttgcatttgtttccatcggagattcggagttcatctctactttaaaaa

SEQ ID NO: 42322 - DNA, 459 bp, Oryza sativa
agcttaaagaggatgccaacgctcatctgctgctttttctgtagatatgtagcacgtacaccataaagggtgttagtccagacaccgtcaggctatggctcttcccgttttcccttcttgggaaagcgaagcagtggttctatgccaaccgtgctgctgtcaacacctgggacaaatgctctacgacatttctctcgaagttctttccgatgggcaaaaccaatgctctccaaggaaggatttccagtttccagcagacaagggacgagtcctttcctgaagcatgggaacgatttcaggaatatgtggcctcgtatcctcatcatgggatggacgactggctaatcctgcagaacttctacaatggactcactcctatgtcccgccatcaccttgatgcggcggctggaggagcattcttctataagacagttcgtggagcccgtgatctaatagaga

SEQ ID NO: 42323 - DNA, 426 bp, Oryza sativa
agctaagtttgaaatatcaatcacagcatttattcatcagtattgtacaaattgtgcctccatcatcatcatcatcagaatcattgctatgatatgacatcaatcagtatcagttttttcatcatcggagttattagatccagtcggccgaagatcgttgtcctggaatctctcaactacatcaacggcaatcttatcggcggctttctgcgcatcgttgatgaggtcaagggcggcctcttcgctcgttccgtctgcaaagccatcaatggcatcaatgtcgatcttcgggtataaagacttggtcattgctaacgtcaggcttgctcccatacttccagcctctttgatattcttaaagtatgtatccggagcaattctcagcttgtcgaagatttcggaagcatcaaatgtacttggaccatt

SEQ ID NO: 42324 - DNA, 473 bp, Oryza sativa
  unsure (1)..(473): unsure at all n locations
agcttatgttagtgagtagaaagtatcattntatgcggtgcatatacataagactacatatcattctaatccacccccaactccatcttttgataaggatcagcactacaatagtaccatcaacatcagagacatcacaggttaagttgattctgaacatgtgagtaacggtagttcgatctatccactaaatttttagagtactgcacattatatattcagtgatgagtagatttggcagcagaaagatggcttactattccaagtgcaacctactgcattctgcattcagacattcagttaaggggttcaccagtaaactatcccaattcccacagtcatgctaccactagatacgtgacatgttcaagttgaagcctcaactatgggagggtttcgaagcctagaaccttctcgaaatcacgtgaattgccggcctcccgatcgaagcacgcgaacatggccttccactc

SEQ ID NO: 42325 - DNA, 428 bp, Oryza sativa
  unsure (1)..(428): unsure at all n locations
ctcgtncaagaacgcctgctcgacgtcttgcggccctctttattgagcgcgcgcgcggcccacgaaacagccgcggtctcattccactcgcgcagctcctcatcaatggcgtacgaggtggggatgaagatggtgtcttcctccgggcgcgtggccgggtcgccgagctgcgtcatcctggttgcccgcgttctcggcgggggcggcgaaagctggagcggaaaggccgggcgattgcttgtctgcagctcgcgcacgcgatgacggggagacggactcttgcgcaggcgacgcggtgacgacgagcgaggacgcgaccgcgggggcgtgcgagcgcccaaccgcgcgcgccgaagcggggaccgagagaacgcacgcacggcgcgacggtgccggcagtcacgcgcgcgatgtccggaacgacggca

SEQ ID NO: 42326 - DNA, 68 bp, Oryza sativa
agcttcagccaacaagtcacaacaagccttttttattttcttttgccagacattatcgaaattgcaca

SEQ ID NO: 42327 - DNA, 70 bp, Oryza sativa
  unsure (1)..(70): unsure at all n locations
tggtgaaattcgaaaatgtttgggaaaagggtattttgcttatgcttgttttgacttgntggctgaagct

SEQ ID NO: 42328 - DNA, 464 bp, Oryza sativa
  unsure (1)..(464): unsure at all n locations
gacccggatacttaatcaccgccgctgcagcttggccgcatcctaactgtctgtttgtctncanacaagccttgtgatttcgataataatctcacagaatgttgacatagcttactgcaaggtgcaattggactatgagagagacaattcagtggcttggtttgtgatctacatctctccaaatatttggaaggagaagaatacaatattatttcatgaccaaaattctatctccaaaagaagttttcttcaataataagggggattttttgagataaagataaagcagacagagaacttctgtaaactagcccttctttcctgctctccatctcgccaaaaaaataattcagtcaacttgaaatgaaaacacgagtttatttaagtttcagcattgatgtttcaataaatttctaacatttttacgcacagtagcatgactctcttttttntgtatcttcttg

SEQ ID NO: 42329 - DNA, 460 bp, Oryza sativa
  unsure (1)..(460): unsure at all n locations
gatactatagaaaacctcagctntncgacaggctcgagccangctcggctcgagcttgtatctatctctagcttaggctgacgagctcgctcgagctcggctcgttgacagccctaccggaaggtggttccactactagaaatcggatatttcaagacaagccatctcttcttaacaacacatatttgctctttttcttcaaaatgaagatacattgntctttaacaaaacaagatttttttattatttaaatctttttaattgataaattgagtcttttggtcacatcactcatagggtacggatgcggagtcaaaatccgaaccattctatagctgcccaatatgccattcataacactattgaatttaactcctagatntattttaaaaatctggaaaagatagtcccaatttgcatacagcctattattaataccgatgatcaaaccgactcaaga

SEQ ID NO: 42330 - DNA, 388 bp, Oryza sativa
  unsure (1)..(388): unsure at all n locations
agcttttaataccagtgttcatattaaacaatgtcggttctgtccaccatccattgtgatcccaaggatagcttcccgtcattgagtcgttatggttttctgaggacgtccacattcccgcctctcaggaagtggctccatcagcataaaaatcatcatgcaatatctcatcccacacaagttaaagaatttagagtctagccaagtataatacatgtcccggtgctcaataaccgcgagcacggctattcgaatagatttggcttactcacactgcagtggatgtacactttacccgcactccgcgacttgccaacacatgagcctcgntccaacacatgagacgcgtcacggcaaagcttttcgataacctcgcacttgcagtacc

SEQ ID NO: 42331 - DNA, 443 bp, Oryza sativa
  unsure (1)..(443): unsure at all n locations
tgcatcttnttgcaccagaagggaaatgaactccattattaacacgtgaattaatagtaaatttatcagccatgactaaaatcaagatcggcaaagagcgaaaagaataaaaaggctttgataccacttgtaggatctaatatcaagaaataagcctaccagagcatgcacgcgcgcctggggggggattgttccaatggtagaaacactgataaaccaccttgctgtcggtataactggtgtagattagccggtctaaccgccctttttgctgccatcaccggtcactgttgctggtttgatcatcatgcttctgtcagtaaaaccgtcgtaacagagaagaaggcaaatcgaagaactcttgaaagtagagcaaacattaatgcttctattgtatttaaaaaattgacaccgagaggtctcaacccctcgtctatttacgt

SEQ ID NO: 42332 - DNA, 139 bp, Oryza sativa
  unsure (1)..(139): unsure at all n locations
agcttgctntggcgaagtcgtctccctttgacatatactcttcgccctacatccttcgcccaagaggcctccggcttagtaaagtacccgcacgatccttcgcctctcgccgtccttgttccatagtcttcgccatggg

SEQ ID NO: 42333 - DNA, 442 bp, Oryza sativa
ttgcatcgcacatggagtacaagttaatgttgactcgatgtttgttacaattgcggccgcaaaaaggttgtaatagacttgtcggttgtatcagctattccattgcgccaaagaagcactatacggtcacttgctgaagccctatgtgtgtcaaaaagcacattgcatatgttgttcaaagaagggcatctacgacgtcactctaactcactaaagccttatttgaaggaggcaaacaaaaaagaaaggctgcagtggtgtgttggtatgctagatcatcgtacgttaccaaacgaccccaagtttattgaaatggaaaacattgtccacatagatgaaaaatggttcaatgccaccaaaaaggacagaactttctacctgcatccccttgaggaggaaccctatagacctgtccaaaataagaatgcaattgagaaagtat

SEQ ID NO: 42334 - DNA, 464 bp, Oryza sativa
  unsure (1)..(464): unsure at all n locations
agctnttagcccagaaattcttatggttggtggatataatgccaaaaggttgaaagaaattttgtatatatgtttaggctaacaaataaaaatagttgagttggacagtggaaaggactgtgcactgtatcccaatacaatccttataactcagggtgcgtttagttcacgccaaaattgtaagtttggttgaaattgtaacgatgtgacgaaaaagttaaaagtttgtgtgtgtaggaaagttttgatgtgatggaaaagttggaagtttgaaaaaaaaaatttggaactaaacttggcctcagtgtgagccctgatcgaattaatacatgtgcacaaacacatatatattaattaactatggaccgatccctgtcaatgactggatgtccggatgtaatatgcctccttcgtcccacataaaacgtatctataactagatatgacacattctaatagaacaa

SEQ ID NO: 42335 - DNA, 304 bp, Oryza sativa
actaccactagcctacctcttctgtgtcccctccaaatccctctgtacgtgcccctgctggctaccgttcgcattcctctccactatcacttcctagtgcaagaactggatcggaaccttatttccctcttttttattccactactggctgctccccttcgcgattggatcggacaatatctgttctttatcgtggacactcatctgctgaaacaagagacatatgctttgttcagaaacatttatggtctacaatctaattcatgtatgcccagcggaaaagtggtccaataaaaccttcaca

SEQ ID NO: 42336 - DNA, 348 bp, Oryza sativa
  unsure (1)..(348): unsure at all n locations
gtcacctgcggcatgcaagcttcngatgtgcatcgactacattctcctttcaaggcatgtcctaaggatccttaccccctgcctcgcatagatcagattgtcgactctactgcggggtgcgaccttttgtgttttctagatgcatactctggttaccatcagattcgcatggctagggaggatgaggaaaaaactgcgttcattacccccataggaacctattgttatacgacaatgcccttcgggttaaagaatgcaggtcctacttttcaacgtactactcgaatttctttgggtagccaattaggacgtaatgttgaggcttatgtcgatgacttggttgtaaag

SEQ ID NO: 42337 - DNA, 403 bp, Oryza sativa
  unsure (1)..(403): unsure at all n locations
agctttccccattaagtgcacaggcaattcttcttgtcacctctacgacgaaagaaggtgtggctgtgggtgtcacctctacccctccgaaagaaggcgtcactgttggttgctagcatcaagaggtagtagaagcaatgaaggttgggtttttccatccgattcaccttttgctgtacatggttatggttgttctttctctacatccaatctgggattcngttcgtaagcatcggttcgagagttgaggtgtgacctgtgggtgtaatattggtgcgaaatatacctgttatagttgaccgtatgatcttncttttcttccactgctttgtattgattggtcaggcgaattgtanaaattcttccactattcaatattactacacacgtatttttccatctc

SEQ ID NO: 42338 - DNA, 417 bp, Oryza sativa
  unsure (1)..(417): unsure at all n locations
tgctcacttgagttgcatgcatgcagaaacacaataatatttatcatgaaagaaaacaaatcaatccacaaacacaatcaggtcttgcatgaagaaatgggcaaattggcagtcaactagtcatcaagagagtgattaatcaatcattaaggaggaaatcatatgctcatatgattgattagtagtggtttctcaccttcttgtgcatcggcagggcgaggctgtactcgtgcatgacccagcagccaccgccggcggccgccgccgccgccgccggtgccttcctcccttgccgtgggacgaacaccatgcccttcttgacgccgacgaggtggctcccgccgcaccgggccaccaccaccggcttgtcccgcccgcccgccggcttncagcacccaccgctcgccgtcacatgct

SEQ ID NO: 42339 - DNA, 317 bp, Oryza sativa
  unsure (1)..(317): unsure at all n locations
ttatggcttcaaaaaagccaaacggaaaagctgcttggttgtttagacttataaaccaacttataagtcgaaaagtctaagcctaaacaaagatagccttattaatacaaagagcattttcactggttctaacaaaattttgttcactcaaaaaggatttaaaataaattagttatgatttttttgaagtttatatatttttttagttgagagggcatatnggtcatttaccanaaaaactaacgtttgactaacagtcaactaacactgtagtgctgggagtggataaaaggatgganaacttgatcagtggatat

SEQ ID NO: 42340 - DNA, 434 bp, Oryza sativa
ctgactaagaagaaaatcatatgacttgtaatatataacggttggagtacatgtttcaccgatctcactgcggcagcctgcatgtcccggtggttgcctcacgacagcacgaggatcattactggtctgcctatgatgtcgttggtggagctaaacatcctgaaaatagctaagtattccctccatcctataataatataatatagcaatataggataggacgagacatttcatataacaatgaatctggacatgcatacgtccagattcattatcctatgaaatgttttgtccggttctatattgctatattataggacggaaggagtagtgagttaaataagaattaagaaaagttaatattggtaaaaatcgaacataaaattctaaaggtcgctccggttaacagaaactctcataattggatctatatc

SEQ ID NO: 42341 - DNA, 430 bp, Oryza sativa
  unsure (1)..(430): unsure at all n locations
agcttgttcgcaatatgagggcgcagagcgatgcatggttttgtgactacctccttcgagttgggaatggaaccgaggaggtgaacaaggaaggactcataagccttccttcggatatttgcgtgtcgtgcaaagggaatgaaacggacctaaaaaggctcatcgataccgcgttccctaacctaaacgataacctgacggacccaaactacatcacatgtagggccatattgtccactangaatgagttcgtcgatcgaataaacatgaagatgattgagcggtttagaggagatgtgatgacatatcatagttntgaccgagcagatgatgaccctcataactattacccgccggaattcttgaactctctaactccaaatgggctacctccgcatgtgcttaagctgaagataactgtccatcatgc

SEQ ID NO: 42342 - DNA, 444 bp, Oryza sativa
  unsure (1)..(444): unsure at all n locations
ttgcgagtagctcanatgaaggccatggtgatctgcttgagcaacatggcaatagtggctggtacaaagtatatgtctatattggtactgttgcggccctattgcctatggagaggggttgatgatagtgaaatttatacattgatcagttttgtgtttctcccgggtgggttatggcagatagatagaaaagatgatggtgaaaattggtacaaaagctacatgcctacatgttcgacgaaatacttcggtatccccgctgtcctaacaagaagaaattttgagcagccattatggtaaatatggtctgtactcaattttttgtgcactgctgcagccacaagatagatgcacatagataagttgctcaatgaaatgtaccattggccctgtaaaaaattgaatggttagaattctatatgaacctgaattcaatgttatatg

SEQ ID NO: 42343 - DNA, 430 bp, Oryza sativa
  unsure (1)..(430): unsure at all n locations
agcttcagcagactgtagctaggagagcccattcatttctattggtgnggactctangagcgagacaggcctggaagttcctgtcagcatatacagtgttcagggatccaattcaggcactcctgttacaagaactgttagaagggtgaggaggagttcactttcaaagaaaggagcaatcataaattcaacagtttccaagttgctagatctccatgttaactctggggagcaatctgaagacactgataattataactcagagaatcatgaattgcttcagaaggggggctacttttctcattctacatcacccctctttgctgcacctgngtgtctcagctcatcgaacccctctaagtttttgaaagtaccaacaagagaaggatcttctgtttcttgcactccagtctccactagttcttattac

SEQ ID NO: 42344 - DNA, 372 bp, Oryza sativa
atgtgttgcccaaccttttattcttcaaggaggatgcattgagaagaactatttgtggattctgaaatactgtcccgtttctgtaggcaaagaaaggttggaggatctgttagacctgcaagagagaacgttagaataaatcgcggtaatggctctattctaccacaagtgagtacaaagatgtgctcctttctttactaatttcctgtaaataacacttattccttcttaatacaaagatgcgctccttgcgtattccctacaaaaaaaagacgtgagtacaccaaattgttctcgatgatcattgtctatgcagaaactatgattagatgtgctgctctccaattatacatgctcgtgcttgatggaaca

SEQ ID NO: 42345 - DNA, 384 bp, Oryza sativa
  unsure (1)..(384): unsure at all n locations
tggcaggcatgacgactgtgaaaaggggaaatgtcctaactgcccctcaatcgtcattgggacagcatctggagcgtccacgcctaaccccaggatcaacggtgatcatgggggtttggtccaaccagggggttctgccgaaccttggctgggccctcctggtctggccttcattcgtagactctctggactcttctctatccatctatcagagttatagggtgattcactattgctctgataaagatcacaacccctccttgtatggatacataaatctcctcgctttagattaaattttctcccaacatcanggcttatcacctgcatacaaatattaaccaacacttgtggaatatgtgagattaagtacctatcaccatg

SEQ ID NO: 42346 - DNA, 375 bp, Oryza sativa
gactgccattaacacgtcgcagccatcttaaaccacaacaactgtcaaactgtcatatcttatcttgtcgaagaggcattaccaccataggcgtctactgtggaagactctgtcgagctactcatcatagcctatcatgtaagaaagccggcgactccgaccattatagatgacctgctgtaccaggaccacctaccctacccctcttggcaccgctgatgagcaccagcaccaccaccaccaacgatgtgaacttacaacccgttcaccgcatagtcaccacggcttagccccgcataagcaggcactggctctctgcaataactgaagctgacctgaagcataccatgcatggtttaagcattcagatgatgt

SEQ ID NO: 42347 - DNA, 452 bp, Oryza sativa
  unsure (1)..(452): unsure at all n locations
ctgcagctancnggcccggaatatggcgactatgtttttctttggtctgaaagaccagatcatcgccctanttcattgagctggccgtgtcaagcactctctggggcgggtaacgcacattaagccgatgagtccccccggcagagcacggcgccgtatactgtgtcaagaccggccgccccggctgtgccgctggcggagtgcagctgcgtctggttgacattggtgatcacgtttttggcgagctggagcaagatggtcttgtangtgccctctggcatgtgcgtgatggtgttcgcgttgctgcacaacggaagctgtctatctaccaacagactccgggtagagaggagaagcattacgagggaaacgatcagcatctgcatgtctgacgcttcttcttctgcacggagcttgtggaattgagatgcgtatggaacatggcttggatg

SEQ ID NO: 42348 - DNA, 382 bp, Oryza sativa
ttaaaaactcaagcttccatggcacgagtgagccggcggcgcggagcggaacaagtcgtctctttgcgtgacgagcaacgggagcacggcgctgcatgtcgtcgccagccaccgccacaccgagctcgcggcgctcatctgcgaaagggcgccctctctggccgccacgcgcaacaagttcctcggcacgccgctgcactgcgcgtctaaggccgggcaccgtgacgtggcgggctgcctcctgcgggtgatggatcaagcgacaccgcggtcgaggaacctgactggcgccaccgagctgcacgaggctgttctgcacggacatgttgaagtggctgaactgctgatgacgacagatccctggctggccttggtgacaacc

SEQ ID NO: 42349 - DNA, 283 bp, Oryza sativa
tcttggaactctatgatcatggcatttgctgtgcatggcctgtggagggaggcccttgccttgttctataagttgcgggtgaggatttcttgcttgaatagtcttgtgttcttagtagacacactaattcagagcatttacatgacaataggacgccatgacttcacttggcacttggcacgtgaaaaggaaacttgttttagcgtagaattaacacaccatatagccaactataacagttcatgagccatccacacttttttatgttgaagctagaaactga

SEQ ID NO: 42350 - DNA, 302 bp, Oryza sativa
  unsure (1)..(302): unsure at all n locations
agcttcttcaagtcagatttcttacttaacgtttattntaagacgnncgcaagatgatagtaatatatcatgatgcatttttggccaattctattagatatacatgtattgtatatgttggcatagttatatttgtgatgtttaattnttttctatcaatcggaccacccatgcccttctagatacacagctatcgcagggtcatacggagcagcaaataaagagaacaaccatgagaagatggagtgattaaaaatgcatataaatatccgctagtcaattttacctcgtatgtttttaaa

SEQ ID NO: 42351 - DNA, 424 bp, Oryza sativa
  unsure (1)..(424): unsure at all n locations
agcttcccgggttagctcgcttttatctttcttctgcatttgtaatcttttatatttttgtaagacgtggatatgtatgtcaacaattgtcgtttgtgtaccctggctggtcctggacagggatttaatgcacattcagcttagaaattctggttcgtgaatttctgggcgtgacaatgaagccccatccgaggtggacgatttggtgaccagtgatattactgagtctatggagtaatggaaatctttccatgtcaaaaaaaatattaaatttatttttcatagggaaggggctcacaatagtggcttgccattagagcccttgagcgtcacttangcgttgcactaccgncaaagcctggcgcaccccaaccaaaactcaaatttcaaactttgccaaaattcatgtgtttcgggagtttcg

SEQ ID NO: 42352 - DNA, 439 bp, Oryza sativa
  unsure (1)..(439): unsure at all n locations
cttccggccatgggatgtggntagtatatattgatgtgcatattttggtcttgncattggagctaataatttacttcacaagcatgcaaaaagctcatttactgcaagtgacaagtttcttggccaaatggcaatgatttattacctgttttttctattgtcattcaacacatcccaacataacagcagcttgtagacatataactgtttgagaaagtgatcttactgattttggtgcatgcaatgtgttgcaggaccgtgacggttttgttatgggggaaggggcaggtgttcttgtgttggaagaacttgaacacgccaaggtttgttacatgcaatcacctttctcccttttcatatagatctatttgagccccttttccccagttaagtgccttgtagttatgttcaaacagtaaggttttctgatatggatgca

SEQ ID NO: 42353 - DNA, 264 bp, Oryza sativa
cattacgcagcacggagccttgcctgattaaatagacgactatctgtccttcataataaaacgatgatagtgattttctcacagcaacgtttatatgaaatttccttcatggaaggatacatctattggcggttggaaaaccagccgcccgcacaacgaaacaagtgagaacacacgcctaggggagagcgagccttcctttgctttatgaactgccttgtctaccggaagcacactaactaaaccgtctatcgagacatgtgg

SEQ ID NO: 42354 - DNA, 371 bp, Oryza sativa
agcttgccaaccgccactgggttcgtcttctttctttgacgagatgaccaggcatcagctccgtgggtcgaacttttttgttgtaagttgccaaagtgcttgtggcgtacttgtgcatgtgctcgagcgcctcgactcttatcccttccaagagttcgagcgatacttcgcgcccctcttcgcccccagagaacatcacccttggtgagttagcccctagctctgctggggtcattgcctcatcgccataaagaagcataaacgggctaaacttggttggtcttgtgggggtcgtccgaagggcccagaggaccgatagcaattcctctggccatttgcctttcgctggcccctcgagtcttttctttagt

SEQ ID NO: 42355 - DNA, 431 bp, Oryza sativa
  unsure (1)..(431): unsure at all n locations
tcatctncggcctctgattaagtttatatttgcaatggtgtattccaaccgtactcaacaagccaccacagcaacaatgcacatgacaggggtattcaaaggatggctatggttcttttgcgcaaagcaagttttataattctttttcacaaccctaagacctagcacagactgatcaaattttagtaccagtgttcatattaaacaatgacggttctgtccaccatccattgtgatcccaaggatagcttcccgccatcgagtcatcatggttttctgaggacgtccacgttcccgcccctcaggaagtggctccatcagtatagaaatcatcatgcaatatcccatcccacacaagttaagaatttagagtttagccaagtgtaatacatgtcccggtgctcaataaccgcgagcacgactattcgaat

SEQ ID NO: 42356 - DNA, 207 bp, Oryza sativa
ctatagcgaaaaggcaaataaaaagatagttataataatgccaaacaattccagctccggaagaagggaagaacgcggcggtgctcttgctcacaaatcactctcaaggccccggcttaaacgccgtcaaaccatgccgtgacgatctttcccaccggagcgtgggccccgccgcctgcttggcccacacccaatccttcggccaac

SEQ ID NO: 42357 - DNA, 428 bp, Oryza sativa
  unsure (1)..(428): unsure at all n locations
tgctctcccggtgacatcaggatggtgggcaatgttcctgtcttatttgancaatatactgcagtgcaacccactgtctcaacattgggcaactttctcacaaatgcattcctttgtgccatctttctggtgccgagcgcccaccatgtggtgataacagcacgctggccctctggaattgctgcaacagccactgccactgcaatctgaaagtaatacgtgcacttctcaaatgagaacttanaattcctgtgccacccatccacatactcccaggtgaggaaatacttaacgttgataagacaaaccaaggcacagatcactccaattatggctgtgagtgcctccccaaactcattgagcttcttattcagtggcgtgtcatcttcctcttgagacgcttcctggatctgggcatggatcttgcc

SEQ ID NO: 42358 - DNA, 391 bp, Oryza sativa
agcttggagaggtgtgggggtgaaccttctatccagctgagaccacaccatatgaccgaggcaaattagcatgataaactgaagatggtgtcacatgctgtgccgtcgtaggcaaaattggtgctgagggtgatgcagtactggatgaagaaggatcaaaataacggctccaaacatacggcaaattctgacggagcgctgcactgccatgacttgtaagtgatggactccccaacagaacatttccatggtgctgtgagcctgacaagtagctgaaccgatcgtcgtattgcaatcgatctccagataatgcattggccatggggaatgagtggctcaaatctgtgggcagtgacctgaatgtgatgacttggcttgagaattgctgaac

SEQ ID NO: 42359 - DNA, 421 bp, Oryza sativa
  unsure (1)..(421): unsure at all n locations
cggcgtgggtccggnggaagaaagagaaaagaaagatgtgtattgatatgagtaggcgctgacatattggcttcacaattgcttttcttgttacttacatgtgggtttcatgtctacttttaattctcctagtgactggactgcaacatgaatgtcacgttagccaaaatcactccccaatcaatcgagggagtcattatatatgattttaatagttagagggatccatatatccggttttagtgttgagagatacgaatcaagtctatctgagaaagccaagttaaattcaactttttcctcctaaaataggaatgttgatatatgatgggccggaacggtcatactacttacgttgggacggcaatgcgttttgggccggaacaggccagaacctgagtgtgatgtgcgcgccatatgt

SEQ ID NO: 42360 - DNA, 470 bp, Oryza sativa
  unsure (1)..(470): unsure at all n locations
gcttatccgcttcctttcgccggtagtgtgaatcttctcnaaagcgcacagcatagtccagtcagtgtagccagggcatcatgaacggattcctcaagaggaacgtagggccatatctatccaagaagaaagaccacgtaaacaattatgctacttgaccaatggataaagtatagatctcatggctggctactattcaaccctggcattggggatcaggaacggngtcaagtacggactttggctaaggatggggatccggttgtgccgtgccggccccgggaatcggcgaactacgctacacagtcagatacctaagcgaacggataagggaaagcccgctatattatatatagtaatcacctgccaaaaggaaagcctgaccgataataataatatgtctatgcgccgaacaagcaacggtatattagagatagtaaggagttgtatacacggcggtatgcattcat

SEQ ID NO: 42361 - DNA, 485 bp, Oryza sativa
aagtcacctgcggcatgcaagctttccagcaagtactcatgggccccgatatttcttctatatcagcggctaggtccacttgaagttgatgctgtcaggaggcccgaatcctaatccaaaacgtgtagaactttatctcttgtcttatatggaccaaaagtgacgtggtgagatggaagtgaacttggagaaagtcttggtttggtcccaatcaaacattaaatttggcttgatgaagctatgctctgcaacagacaatcacacaggaaccaacatgaggggatggatctaagatctgagtatatttcatatggaaaatcgaaaggggattgacaagcaattcaacaacctgaaacaactcatcttcatgccgatggatgttgttctggacttctggtataaaatctatagcatccaaaacattagtactcctcagcgttaaccaacgcgagaggggaacatgcgacaatagagagaacaccgag

SEQ ID NO: 42362 - DNA, 447 bp, Oryza sativa
  unsure (1)..(447): unsure at all n locations
taagagtagcatcaatcatataaagagtagcgctatcaacctagatttaaagcagcgattctccacaactaaatccttaagatattcaaccatgaaaaatttgtagaggtgcagttattcatggacttagctcacttatgctataagtgaacaaaaagccctcaaaactcagtcaagagattacggaggcaaaagtccactgtaaaggagctctaactattaacaccttgaatcatgagacattaggggaaaaaacctgaagtagaaaagctggctgtgtctgacactccagctgtccgcagttcagtcacacttgctcttaatgggaaaaaataattcttgttaagtcttttttttgggtttatcatataactcttacctttgntaacgctgatcctcattatttgtaattttctggtgctttggcttgtcatcaccacctaatgg

SEQ ID NO: 42363 - DNA, 440 bp, Oryza sativa
agcttgataataagagccttgatcaagtacatacttttgaatgttaactacataagaaaattgatcattatgttgcaatgtagttacatagactggccaagttttgttcttcattaatcatccttgattgtgttcttgcagggcccacaataattttggactgaaatactttggcgctctgaaatttaaaatcctgctcttgatagcttcatgttggacaactagccaacttggaagtgttacaacaaaaggagcagataaaccagcaacagataccaccagttctcccttgaatttcgtgtttttgacgttgtgatctctatctgtttaaattactttcttattaagatcacatatatgatggttttggcaccttctaaatctcagaattagctgggaaggtgtcaaacagcccaccttccatggaagaaaatgcaatc

SEQ ID NO: 42364 - DNA, 334 bp, Oryza sativa
  unsure (1)..(334): unsure at all n locations
gtgctagccttctcctgagcgtgtgtgttggcgatgaccgcatgtgggtggtggtatattttttcctttttctagttaccactctctaagggggtaatcttataatttttttcccgctctatcaatagaacttctcaccgtctagtgcgagtcgttcaaaaaaaacctctctcagaaacctagcgtgtgctctctgctggcatatgtcctcttgtgatggcgacatagtcaaatgcaagctggccatgttggtgagccttgtacgggagagtggttccatcttctctctcatcttctcccctnaaacctcaagggcgtggatagagttgagcac

SEQ ID NO: 42365 - DNA, 459 bp, Oryza sativa
agcttgtgcgtactgacctttatacccttctctttggtcatgtgttctactactcgcttttggatgttggaatgtcaggtcactacgctttacttccttgttccaaaaataaatttattttttatccatttcacgtatatttaatataacaagaaaaaaaaatattcttactttattgaatcacaatataattattcttttttatatgctttcaatacaaactgattacttaaaatgaacttatttttaagagaaatgagaggttaaaaataaacttattatgtaatggagggagtcacttttttctaatcttctgcattttggtttagccgccatttagaaaaattggctctcatgttgaggcctttaaaaaattgaaaattctgaatgaagtaagaaaatgatctacaataggaaaatattttatgtttgtataatttgtgatataaaagttaacac

SEQ ID NO: 42366 - DNA, 427 bp, Oryza sativa
actattttatactcctaaaatataggagttattagttttagttctaattctagaaaaaaaaacttattttattttgagacataggtagtactagattattttatctttggaattgaccaatccattttatctcaaaatatagtttttttttgtttttcaacgaaattaaagaaaagataaaaagtaaatagtcggttggaagtcactgaggttgtggagatatggagtattttgaatattttatgactatatatagaccacccttgatactatagaaataggtatattttgcaataaaatgtgaatagtataagtagctatgttttagatggagggagtataatccaaagctactctaaacatttaaagtgtatttcaagacttaacaattcttggatggtaaactgataatgttctcaagcttgat

SEQ ID NO: 42367 - DNA, 388 bp, Oryza sativa
  unsure (1)..(388): unsure at all n locations
tgccaccttagccgtattggatgcaccatgtttctctctaatcatgggcttaccggttttataaattcaagaggatgaccctgttacgtctgctataaaacaatttataagacttactatatgaaacgaagagagtatggcctaatggcatgtggcagggaagcaaaagtatgcgtacataatacactccttttaaagtttatatacataaattatactacctccgtttaggttacaagacgttttgactttggtaaagncaaaatattttaagtttgaacaagttatatagaaaaactagtaacatttttacccagacaaactattatgaaatatattcattattgatttgcgacacaaatcagcattataatattactatatttat

SEQ ID NO: 42368 - DNA, 418 bp, Oryza sativa
  unsure (1)..(418): unsure at all n locations
ttgtaccctcatacctccttaatcaaaatataagttttcaatacttttgcttgtgagaatccatatggatggtgataacacgagagattcttcatttcatgtactttatcaatgtttagccaacaatgcaaattcaagagtgcttatcagtattccacgcacacaggttattagtaaaacatgataactgttcagctgcaaatctgtaaccatttctttctcaatgtacttttggaatgctctcttttagctatccatcttgccttaagatgcattgatttcngttatgcactcattttcactgttttgtttccctttttggcaagatgggagcttttctgcttagtgctgggacaaaaagcgattgagtgattgtttattgcacgactacatttattctacaacttgactgatctga

SEQ ID NO: 42369 - DNA, 467 bp, Oryza sativa
  unsure (1)..(467): unsure at all n locations
gcttcatccagtacgtgtccgaaggaatctcaccggcgctgcaagggacgctgcggctctaccaacggctgctccagctcggtgttaaaccagtattcctgactgaccgcaccgaggaccaaaggacagtcaccaccaacaacctcctctctcagggttactgcagctgggagaaactgttgttccagccggttgggcttcagaccacaacacaggcgttcaagactgatgagcggcagaagcttgtggacgccggctatgtcatcgtcggcaacatcggcgaccagtggaccgacatcctctgctcgccggagggctgccgtacgtttaagtaccccaaccccatgtactatgtcgcctagctcggctgccggcctgcgccataatgctagcttcgctagctagccatatctcgatgatccataattcgcgtgtgtntcatatatttacttgatttcttctcatga

SEQ ID NO: 42370 - DNA, 442 bp, Oryza sativa
tgttgacgtagtacacatcggattggaaagcttgaatgtgctggctcccgccgccgggccgaggaggtcgctccactggtcaccgatgttaccgacaatggcatagccatcgctcaccagcttatgccgctcaccgctcttgaacgcctcgatggagagaccccccgtcggctgaagcaccagcttctcccacccggagtagccctgttgggaaaggttgcggatggtgacggccctctggttctcggtgcggactgtcaggaacaccggtttaatgccgagctcgagcagccgtcggtaaagtcgtagcgtccctgctagcgccggtgcggtcccctgctccacgtattggaggaagctcctattgtcgtacggctgggctctgtaaaatggataatatatataccggccgtttcaaaaatgtgtaagcatgtagtattag

SEQ ID NO: 42371 - DNA, 465 bp, Oryza sativa
  unsure (1)..(465): unsure at all n locations
agcttcatccagtacgtgtccgagggaagcgcaccgtttctgcangggacgctgcggctctaccaacggctgctccagctcggtgttaagccagtattcctgactgaccgcaccgaggaccaaaggacagtcaccaccaacaacctcctctctcagggttactgcagctgggagaaactgttgttccagccggttgggcttcagaccacaacacaggcgttcaagactgatgagcggcagaagcttgtggacgccggctatgtcatcgtcggcaacatcggcgaccagtggaccgacatcctcggctcgccggagggctgccgtacgtttaagtaccccaaccccatgtactatgtcgcctagctcggctgccggcctgcgccataatgctagcttcgctagctagccatatctcgatgatccataattcgcgtgtgtttcatatatttacttgatttcttctca

SEQ ID NO: 42372 - DNA, 440 bp, Oryza sativa
  unsure (1)..(440): unsure at all n locations
tggtgacgtagtacacatcggattggaaagctngaatgtgcgggctcccgccgccgggccgaggaggtcgctccactggtcaccgatgttaccgacaatggcatagccatcgctcaccagcttatgccgctcaccgctcttgaacgcctcgatggagagaccccccgtcggctgaagcaccagcttctcccacccggagtagccctgttgggaaaggttgcggatggtgacggccctctggttctcggtgcggactgtcaggaacaccggtttaatgccgagctcgagcagccgtcggtaaagtcgtagcgtccctgctagcgccggtgcggtcccctgctccacgtattggaggaagctcctattgtcgtacggctgggctctgtaaaatggataatatatataccggccgtttcaaaaatgtgtaagcatgtagtatt

SEQ ID NO: 42373 - DNA, 393 bp, Oryza sativa
  unsure (1)..(393): unsure at all n locations
agcttggtgggtgtgacagcatagttctagttactatttggcgcgcggngattntacctacatgaggtattttttggtgattgatgtttttatgctacaagaggaaattcgtctcaaggtggagattgttaaatatgtgatccgaattttgggcccacaatatattcggattagttttctagtcatgtctatcctattaggtgtctttctattatcctctatatatactcttgtaagctgtacgggaagggttgacgttctcattgttattcccctacgtttgtaatcatctactctatagtgatcattgccggtcggcgcccatagtttttntccgcaagggttttctacgtaaaattcgtttctccgttgtgcattctatttcataacacg

SEQ ID NO: 42374 - DNA, 351 bp, Oryza sativa
gtcaccccattaaaatccgcacacaccttgatccattccaaatcactgattattcacacaatgggtctgagagccatgccatcatacggccgtacgggactaaattttaaagatgccacgagatctagatggtttggctaaggtaaataccagacgagtgaacttcttttatatataaaaccttttaaaaataatattattttatctatagaccctatcaaacagccacaccatttttgaaaatgaacctttttaactagtgtgaataacactggcatgccatttatgagaacactaatgaaatcctgtcaattacaatcttgggtatctattgtaaccttgtccactgtg

SEQ ID NO: 42375 - DNA, 457 bp, Oryza sativa
  unsure (1)..(457): unsure at all n locations
agcttgtatgtattgtcattaatcttttgtatcactttgaaaggaccatcagctctaggtagcaacttagattttctcaaattagggaacctatcctttctcaaatgcaaccaaaccaaatcaccaggttcaaaagcaacatgtttctttcctttgctcccagcaagtttatactttatattcatgcgctctatgttctccttagtggtctcatgcagttttaacatcaattcagcgtgatattttgcatcaaagttcactctctctgaagttgggaggggcaaaagatcaattggagcacggngtagaaggccataaacaatctcaaaagggcacttcttagtagtagaatgttgtgaacgattataagcaaactcaacatgaggcaaacattcttcccacattntaatattctttttcaaaacagccctaagcattgtagataatgttctattca

SEQ ID NO: 42376 - DNA, 431 bp, Oryza sativa
  unsure (1)..(431): unsure at all n locations
tctgtaccttctgattagtgtagagtcccacattatttgtttaaaccatggatctgcacatgtaggaccaaattcatcttgatcaacggggtcacttgactcatttaaaaagctcaaagtgcggtttatgtactaatatagtttaggggtataaatcatatgtacagacattcataagtaaatcataatatttttctttcagctaccactgtgaagttcatgaccacgatgaccccactagtcgatatcctctgctattgagtcgncctatatcaccaacagattgatgatgaatgaaaaggttcagtgagcggtgtgctaccaagcataccactggtgatggtgcaggttgagctacacatccaaatctatcaatccatttgggaacttccaccacgccctacaagagatccaattggcactatatttct

SEQ ID NO: 42377 - DNA, 328 bp, Oryza sativa
tcatgggattatcttcttctctcgaaagatctggccaaaaaaatgatacaggaggaccccttggctcaaaaaacagaagaataatctcctctcaagcatgagcaagctggaagaacatgttgcatgcccttccacaatcatgccgagaaccatttggaagaaagttagaaaaggatatcatgtttattcaccattccaacaatttacttttcattttcacctaataggacctgatcagagatgatgatctcgtgagtctattttgctttccaatattatgcggttgtacagttatcctaccactccctatatcctatatagaatgaat

SEQ ID NO: 42378 - DNA, 441 bp, Oryza sativa
  unsure (1)..(441): unsure at all n locations
cggagttggtgtcaatttgagcagcctccaattgaccatttttattattggcgaccctaacatcctcatcaaggccttcagcatgctccctcacttggcgctcaaaatgttgtatgatgcccctcgtacgtggtgaatgttgagggtgctcccccgatcctcctgtcatggttaatgggaagaaacaattcacaagaaatatgtcctatcaactattggagctaggtgttgtccatctncacttctaccaaacttgtgcaaacgagttcttacatgttcttactttgttatgtaaaaggcgttggcaaacagcaagaacagcaacaacgattagtagtaccggagccgacaacaagcacgatcctgtgatataatagataaaaatttgtggagctatatgtggctgccagtaatatcaaagtacagctagaaccacattat

SEQ ID NO: 42379 - DNA, 439 bp, Oryza sativa
  unsure (1)..(439): unsure at all n locations
aactaagnctcgtgggtggcacagagtcggaggcacgttaggtttgtatttcttcttctgaacccaggagccataccaaaatttacacactttcaatggagctttgtggcctttgctatctgagtatctgaccacaccaccttgtgttgccagaattgtggtaaagattctatactgtagcaaactaaaatatcctacctttttttaacaggaaaggattatagcccgaagagggactctaatgacctgaatggatgtccacttgttcatcacatatcgattaaatgataataaactaataataaaagtttgatgaaatagactaatatgcaacatatcactttataaatatgcagatgaaaattcgacttctacaagttgtaacaaagataatagattaacatttaactaggatatgtacatatcctacatatctatc

SEQ ID NO: 42380 - DNA, 410 bp, Oryza sativa
  unsure (1)..(410): unsure at all n locations
agcttcagtggcattgcgtccctcaagtacttctgccttatcccagncatttcatacctgaacagaaacatcataaatcatcccctcattcatcatctcataaaactatccatcgatctatgcctttaatttctactggtagtttctataacagtatggttattgctcgggtttccattatgtcttttctgcttttctggtccgatagatctacacatgcgaacaatgacagctaaaaattgtactactagctaacactcagaaacatcatcagtaataaaataatggatcatctcctatatantttacctgtagtttgtgacggtcgtggtgggtttcacatangtctgaaaatgacgttctcgtcctctccgatcangcacaccctcgcgcagatgtcgagcgagcca

SEQ ID NO: 42381 - DNA, 435 bp, Oryza sativa
tgcttctgagacttcaacttgagcaaagatatagattttttcattttgcaccaggccttttcagatctactgtccccatatatatgttctgatatgaggaatggagtgagatatagtcagctatctccagctgacttcgatagaagttgaaatttataacacaccggatactgatgttcttctttgccgggggtatgacctaggcttgtccgggtccaattttggtccatctctttgcctgtagcatatttatggtggcttttatggaaacacaggcaaataggtaagactgagatgcgcatgctgaaaatcttatttgactgaagtggttcaaccattcatcttatttgatagaatttgattttgtcttcattatcatacatgatgaaaagttgaacttacccatagacctgcatgtctgctgtgtaggattta

SEQ ID NO: 42382 - DNA, 418 bp, Oryza sativa
agcttgcccccaagaagcgaagggttcctgcttcgtctgactcctacgccgacgatgaggatgatgccgaagaacgtgacagcgaggaggaaggagatgaaaaggaggaggtggaggctgtggctgataaggccgcgggtgaggcggtcgaagaccgcgccgacacccccgggtacactcctaccccaagtcctggtcacaacgaaaccggggtggagtcgaacagctccccccttcgtcggaaggatttggaaggggcgaaggccctagttgcgttctcttcgggcgcggcggcgaagggaggtcctgtcaaaaacgtgcctaaaaaaaatggctcgtcgatgtcgctcgcgtttttagcgacgacgagtcctccgacgggactccgacttcgcccgctggtcgcagcctggatctt

SEQ ID NO: 42383 - DNA, 449 bp, Oryza sativa
ataagcttcttcacggggccttggtgcccgcgagccctcgatctgccaactgatggtttacttccactagctcctcctcctgattcccctccacatcactttccacgtgaccctgctggttcccctccgcatacctctccacgttcccttcctcgttcaaatactgggttggatcctcgttcccctcttcttcggtccagtactggctgcttccctccgcgattgtatcgtacaatatctgttcctcatcgcgatcagccatttgttcatacaggaaacatctgctaagtcataagacatttatgttttaataatcttatattaaaactcaaataatcttatatgctaagactaaacgaacagtcatgtatgctaagtgtaactagtcgatattacaaccctatacaatcttagaagctaagtctgattacaaatctaataatcttata

SEQ ID NO: 42384 - DNA, 464 bp, Oryza sativa
  unsure (1)..(464): unsure at all n locations
agcttatgtcgatgatgtggttgtcaagaccaagcagttggactatttgattgaggatctagaagaaacctttgcaatcatccgcgccttcaggatgaaattaaaccctgaaaaatgtatcttcggagtaccattagggaagctgcttggctttatggtatcccataggggcatacaagccaacccggagaaaatctacgccatcctcaacatgaaaccgccaagctcccggaaagacgttcaaaagctaaccgagggcatggcggcgctcagccggtttgtctcacgactcggcgagcggnggatgccctttttcaagctgctaaagaaaaccgataattttcagtggggacccaaagcacaaaaagcctttgaagacttcaagaaacttctcactactccaccggtcttagcttcatcacatccgcaagagcacgctgttgtatatgtgttgcaacttccca

SEQ ID NO: 42385 - DNA, 399 bp, Oryza sativa
gggtcagcaaccaagcccaactagaaaagaagatagtcgtttatactaacttgtactttatacgaacggaaattagttaggttaagtagtgaactcaccagttcctgatagacgacggcatcacttttgttctcaaatgtgacaaagccgtccgggttgaccttaccccttgcccgcgcccagttgcgagctctttgttcagggatgtctgaaaatggggcagggacattcgctgctgcagcggctgcatcttcttgggcccatattgcctccttgccgatgtaccctgcggtgcccagccgatgcgggtgctcattccgctgttgcagtacgcgatgtgcctcgctggattccctaaactcttgggtggtcttgagagagcagaattcctcccacacc

SEQ ID NO: 42386 - DNA, 462 bp, Oryza sativa
agcttttccagaggtaattctgagcagcaggatatttattattacacaggttgaagatcttgcattaacatgttgctgttatgacaccgaatatatttttgagatgaaacccatggatgatgagcactcaacaacgttgtttcttcagagattttttggttttgtaagtgattgccctcaacaattcaaagaagtttcaaacaaaattgttcaaatatgtggtggtttgcctttagcaacaatcagcctagctagccttttagcaagtcagcctgtcatcttaatggatctatgtttatacatacgtaattctttaagctctgcttttaggacaaattcttctatagaaggaacgcggcaagtattaaacctcagctacaataatcttcctcattacttgaagacatgcttgctatatcttaatatgtatccagagggttataaaatatgcaaggatgatgt

SEQ ID NO: 42387 - DNA, 430 bp, Oryza sativa
  unsure (1)..(430): unsure at all n locations
cccccactcttcttcttggatgacttggctccaatattattctttgtatggcacttggatgccaagnggcccttctcaccacactcaaagcatcttaagttggagagaatcttaatggggcttctatttcttcttctatttgagttggagccccttcctcttctttcttcttaccaagagatcattgaaccttctagcaagaagggccatctcttcctccaagggttcaatggcttcattcaccttgctcttcccccttgtcttcaacttcggcttggagaagcaatgcactttttggatggtgaggcttcctccatctccttcttcttcaacttgtatatgtcatcggtgttgatctttcccaagagtcttgcgggtgtcatccttgacatgtcggagttgatgagcatggtgactanggtctcatact

SEQ ID NO: 42388 - DNA, 455 bp, Oryza sativa
  unsure (1)..(455): unsure at all n locations
agctngcgttatcctccataatatgatagtggtagatgaataggatttggttaaaatcccattggatttgaatgaaaatccaagtgcaaccattgtcctaccaccggaagtgcaaacaaatgacaatcctaatccatgctttgtcgacgtgcttaacagaaactcggctatccgggctgcctctacacatcgacagctcaagaatgatttagttgagcacatatggcagcgatatgggccaagaggaggttagagccatgtgtccaatgaaatggtgactttattattatatcacatcatatatttctaagatcatttcatatgtaaatatatataattattatatacatgtttattttacaagtcatgcggaatatttaaatgtgttgtgcattgtcttatgtatacaacaaaatgactacaaagatcaattatacactagatcatcatgattt

SEQ ID NO: 42389 - DNA, 428 bp, Oryza sativa
agtgggttataactctatagttagataggataccctcttcatttattcttttttctagcggtagagaagtactacatatgcctcagcctatagtgtgggctgagtgggcaatggggacgtggggtgtagaaaaatgaacagggcattttctactacatatgcctcaacctatagagtattcttttgtccttggttttgtgtagcagaaaatgcccacttcatttttctattgcgcaaaaccaacgagaaatgtacacatatactacctgtcctttcttgatgattccattttgacctacaaatcatgatatataatgaccaaatgttaatatcatgaaagcatttttgaaataaacctaatggcatcatttttataaaacattagatcaaacattatatcagctacaattctgggacttgaaattttt

SEQ ID NO: 42390 - DNA, 352 bp, Oryza sativa
  unsure (1)..(352): unsure at all n locations
agctntgaagggaagtgggagtacacataccttatacttcttcttttattatcctacagtataaaacactgcacaaagccgaccagagtgctagcttttgcatattgcaggtagtacgaaccaatggttttcagatgaaaacaaccactcaatatacatctctacagtgttttgcagcgtttgccacatctcaatcgctttgattgggacaccactccaactggcctgtaggcatagtagcatacacctganagttttacattttaaccctctttaaaaacataattntgttataaacctcaattaaggatacagacccctctggaggctcatctgtgccgaggttaaatgt

SEQ ID NO: 42391 - DNA, 439 bp, Oryza sativa
tattttgctgttctaacatttcacgaagtttgtatctacttaccttgttgacccaaattgttgatcttacagtgtaatttggttttgtgctgtccatgtttctaggatctctcaatctcattctccagtgatggagggtatcaatttgatagccactttggacatgttggagggaaagagagtgacaggatgttgatgacagtgggatcaaaagacagagttcctgaggctagtaatacatctctgcctcgacctttttggttcacacattaattagtggaacataacatttattttggctggtgcttcatgtaggcccccgatgtctggtcccagccaagcagcggaaagttcagacaatgcattatttcgaattctcataaaaagaagttggtcctgattaataccttttggtctcttcaatactcctttattaaca

SEQ ID NO: 42392 - DNA, 465 bp, Oryza sativa
  unsure (1)..(465): unsure at all n locations
agctntctaacagcaggactacagatgtttctctccaccaaactcccaaaagtagacatctaactgaaacccaagcacataaccatcccgacaggatataacaatcatctcttgttacaagaagaaaggcaccaaaaacacatcctttaatagaacatcaggcaggacatccataggcaccaaaacaatctagaattgcaaggctaaataggaacagtatacaactgcaatacttcttcaacttcacaagtattggtaggtcagaattacttcagaaataacagcatgccatcacattaaaatcctaaagctaaaaagactgctagaggacacaagcattttagtctacgatctanagcaaaacatgagattactgaagcaataatcaagagactatatttcttatttgataaatccagagaacaaagggattaatttctcctttcttatttcttcatcaaacat

SEQ ID NO: 42393 - DNA, 439 bp, Oryza sativa
  unsure (1)..(439): unsure at all n locations
tcaggtattcaataaaaaagaagtggaatcaattgctacttagttctgatacacatgacgaccttaacattctgtaagatggtttgaaatatattcaggtggggaacgcccccctccggcgacttggtcagaaaaaaacaattccgtaaatgtaatgccgaaacaatttctaccaaccatggcctaatttcctcatttttggtactcaattgccgattcctcatgattcttcccatcgcgctagcttctgctgcaggcagcacaatcttacccgctaccctaacccatccccacacctcctctccatgtcccgctgccgaggaaaaacctaccggtcgattcaactacgcttcctgtctacgaagtgttcgacgaatcgcaggcacgagaacaaaaggggagaggtgcanggaaggattgagctcacctcgctgcggac

SEQ ID NO: 42394 - DNA, 464 bp, Oryza sativa
  unsure (1)..(464): unsure at all n locations
gctnggatggcttcttcacaggtggatggataatgcttcttgctttatttagagaatcagccaaaacacttatgtgattactgagacaatcagattcaatgtcctacaaacagaaaccagtcagaataaaattgatgtcacaggttaataattaataaaactgaagtcccgaaattgacagcacaagaaccagtactgtctgatatttggcattaaaagcaaacaaactagaacgtattaaaaccaaaagataccaacatcaggcactacatagtcacttgaaaatctaaaaaataaaaaataatataacatagttaaatataatgttgagaatgagaatgcgagttacagctatgtacaattaccagattaccaaaaatgtctacgacagtgacacctatgttaaaatctgaagcagaataatcaagcaagaatttcttcagactnttctttttatacaaata

SEQ ID NO: 42395 - DNA, 366 bp, Oryza sativa
  unsure (1)..(366): unsure at all n locations
atagaagaagtgccccgctgacaacggagagactttgatatactttgttggcnaatcgctagggacgacggctccccccacacgtgtcacacatgcccacggacgccttccctcgcgctagccggtaaggaagagccatgtcccgccaaatgtaacctaagccctaatacgcccacctcgcaccacgtggtgtgcgagctggcggaaacccaactacctccgacaggactctggagctcggggctgtgtgaactgcacgacttgaaggggtccatgaggatcacagtcaaaaagtcacacggcagagataagacaatcgacctgaccgtacaagggtagctatgtaatattgtgagccgcacctta

SEQ ID NO: 42396 - DNA, 361 bp, Oryza sativa
  unsure (1)..(361): unsure at all n locations
agcttnggcntcagccttactcacaatataattcttattggctactgcgggcaccgataaccacttggtactttgggacctcataaatttaagctcgactggtataactctgcctactgttttcttaattaatctgtttgtaaacttgtgatcagggggtgtgttaatttcatactgggtgcctggaaactgaaatatctctgctatgctaatgtaacttaacacttagtttttggaaaataagtctatacatacttagatcttcttattaaattcttactaactctgacgagcgtcatgctatgagtacatctagttatgttataactcccatctagatcaacgacacggntgatatcat

SEQ ID NO: 42397 - DNA, 408 bp, Oryza sativa
gtgatactagcatctatcagctctatttacaaatgcactcatctttttatccagtaaaagaaatacaaggggaacaacaggaatcctttcaacgatacatttgcagttgcacccatcataaatcaaaggaacagcaaccacgctaaatccacaaatcacgcgtaaccacgctaaccgaggacaccacggaaacatcatacaacttaaccaacctaccaagtaccaaccaactaattgatcaatcaaatcaccgaggtgtacatcaatctactccaatccgaactaaaaccaaaatctgaagccaccgctagcgccgcggggagggggaagaggagacagacgctcacctatgtagacagtgcgggtagggttcctcgccatggccgcccggatctgggcgtgaagctc

SEQ ID NO: 42398 - DNA, 466 bp, Oryza sativa
  unsure (1)..(466): unsure at all n locations
agcttggcttgactacacttacacattcacactcttatcatattcagnggntaaacgattccggaagagcaaaggtaacactggtttgtagggtttcgttttccattggctaatatgcagattctgttgattgtgatgtggatcctatgcaagcttgttcacttttgctgggccgtccttggaacatgataatgatgctacacaccatggtaggagtaataaatacacctttgtgcataatgggaagaaaattactttgctacctttgacccctgctgaaattgtagaagctgataaagagcgagctgctagtttgaaacttgatgaatctganaatcagcaagtggctaaatctgtttttccacctaaaaaggataagatttcacctagttctaaggttgagggaattaagttgaagggtggtgttatgcttgcaactaaatgtgacattgctgaaatgtcagat

SEQ ID NO: 42399 - DNA, 439 bp, Oryza sativa
tgggcagatgagaaatatctcatatgtggtgggtgtgtagtatttgtactactgagctcccacctggaagatgtgactctaaactatttactggtttcaatacattatcttgaataagtttaacccattaaaaataataagaatgattggtcagtatatatatatcaaacatgctattatcatttaatactcaggaccgccatgatccaaaaaaaaaagcatcacatccagccaatcatgctccataaacaatttaatgcatgaggcatcattatcaaaaactatataattacacagttaataacatatctctgacattctgagctaatgagctatacctctgaccaactataaataccacctcgctcctcagagtccaaacacaactcacacacagctcgtattgttctagcccagtagcccactagtcggcatggag

SEQ ID NO: 42400 - DNA, 450 bp, Oryza sativa
  unsure (1)..(450): unsure at all n locations
agctntgngatccatctagttgaatctgttcttaaaggctaatcagcaaccagagtgaatgacaaatcacatccaaggtaactacacgggtggattggggatgataattcaaataagcatgtaaatccacgaataccatacactcagaaagacaaaaaagataacacattctgacgaatcacgagctgtaagcagtcaagaagcacttccagtcatccaggcatcacaacaaaatattgagatgtgctaatgcaaacaagacaaccttaaaaatggataaccaattcttatagaagataatatttcaggtgcaatccaacagcatggaactgggttgcacagagccaaactacgcatgataaaacttaagtaccatagtaatctcctttgcccttacagaacagtgaaataggttcaaaactgtagatccagagatacaagaaacattca

SEQ ID NO: 42401 - DNA, 444 bp, Oryza sativa
cggatcatgttcaatcacatatagaaggggaaagattggatgttattgtaacatttttttcattaagaaaagaaaaggaactccatcaaaccccgcctcttgatttgcatcaatctaaccttaacaaactctccactaaaatcttctaagaactttcaagcaactataaaattgatagattcatttaaagacagtgtataaaatttcctgtctttataggacatatttacaaaatagcaaacatgagcactcaactgaacttgaagttcacctattttactagtaatattacaggagtttttattaagaaaagagaaaaaaaacatctagtgaaggagatatgcaatgttaaaaaagaaaaatggccttggtgaataagtagccaagtgttgagcttatcacatgaatgtttgccctatattgtcaactttaaattcataattt

SEQ ID NO: 42402 - DNA, 461 bp, Oryza sativa
  unsure (1)..(461): unsure at all n locations
cagctttaacctcgtcgttttccgttagcacgttcttcaaacgggtaaatgggtaactttctcgtttttcgttagcacttttttcaaatattaaatgatgtgttttttcaaaagaaattatatagaagtttttttaaaaaaaatcaaattaattctttttaaatatgtaaaatttaatatttaattaatcatgtgttatcgagcttcttaattttgcatgcgcagaaaattttcctcgtttttgaagcaactaacagggcctaattaagaagaagatacacatcgagagggcgttctcgagaaggcgatgctcctcaagctcaagcaaccaccgttcatggatatgacgacgtcgctggtaccgagagagaaaatggagctataaacatatacgcttgatacattntgcacggtgatagtctataacaactatantttaaaaacaggtggagtgactatga

SEQ ID NO: 42403 - DNA, 428 bp, Oryza sativa
  unsure (1)..(428): unsure at all n locations
tgtgagacggntgctccagcatggngcaattgtcgacaactcatctcagtaagggcagggaatgcacttctctcatccccatcccattgctttaaactgtccatcctctcgaaatgtagcttcttcagagcttggaaattggcagaactgctaccacaaaatttaaccaatgcatcccatcccttgatgtggagattttccaaaagaggtaatagccaaagggaaggaacaacggtgcagctcttgaaatgatagagtgacaaagtgactagattcgtgtagctttcagaaccaagccagataggacacgatatgccggtataacctgaaatggtaagctcttttattccggagggtggtttcagttgctccaaaattngttcagcttgtttgttgttgcctttccatgagagctccatcttttggag

SEQ ID NO: 42404 - DNA, 452 bp, Oryza sativa
  unsure (1)..(452): unsure at all n locations
agctntggcatcagccttactcagaagaaaattcagattggntactggtggcaccgataaccacttggtactttgggacctcagaaatttaagcttgactggtataattctgcctactgttttcttaattaatctggttgtaaacttgtgatcagggggtgtgttaatttcatagtgggtgcctggaaactgaaatatctctgctatgctaatgtaacttagcacttaatttttggaaaaaaagtctatacgtacttagtttttcttattaaattcttactaactctgacgtgtgtcatgctatgagtacatctagttatgttataacttccatctagataaacgaaacggttgatatcatcgtttgtaagagttntgtaaaaaaaaatccatttctttaattgctaaagtcatgtctctagtactatngctctttgacactttatttctac

SEQ ID NO: 42405 - DNA, 433 bp, Oryza sativa
ctgatactagcatctagcagctctatttccaaatgcactcatcgttttagccacgcaaagaaatacaaggggaacaacaggaatcctttcaacgatacatttgcagttgcacccatcagaaatcagaggaacagcaaccacgctaaatccacaaatcacgcgtaaccacgctaaccgaggacaccacggaaacatcatacaacttaaccaacctaccaagtaccaaccaactaattgatcaatcaaatcaccgaggtgtacatcaatctactccaatccgaactaaaaccaaaatctgaagccaccgcgagcgccgcggggagggggaagaggagacagacgctcacctatgtagacggtgcgggtagggttgctcgccatggccgcccggatctgggcgtgaagctctctcgctcgcagtcgcgccgcaatc

SEQ ID NO: 42406 - DNA, 432 bp, Oryza sativa
  unsure (1)..(432): unsure at all n locations
gcttcgtctagcccgatccagcgtcgactcatcggctttctcaagctcaagctcaagctagctntgccggcaatggccgaccgctgctgcgtttacatgcacgagatggatgacgtccaccggtggctgccgtcggaggtcctcanggacatcgggatcgcagatgccgacgagcgccgccgcctcgccatcgtcgaggatcgacctcgccaggcccagcgccctctcttctcttgtcaccatcgaccacaggtgacgggcggggatggtggtgaaatgcttatggaccatcacgccctcgcgggcgccggccgtccaagggtggccgccacgccgccgctgcaactgcgacttgttgggaatagtcgactgccattgccagcgccggccgcgccgtggcatgtcatgacgggtggcccaaggaacaccatg

SEQ ID NO: 42407 - DNA, 440 bp, Oryza sativa
  unsure (1)..(440): unsure at all n locations
aacctctatgttattaccccttgcacaccccttgcattaatcatgcatccgccggngnggcttgctgagtactgtggttgtactcattcttgctcaatctttcccctcttcagtaagagaagctttggagaagaagtcttatgtggagtcctggcttataccccagatgagcgcctgtgaagatggagccataggcccgctagtccgctgctgtttatttttgattgtcaggccttaagtgcctttgtaataatgtaaatattatcgatataataaagatgtgtcttttatatcatgtttgtgtggtgtaccccggcttttcctgggacggngattaatacactagcgttcgggaaaaggcaattttcccggtcgcgacaagctggtatcagagccatctcgactgtaggataagccaaatggataaaacctaacgacat

SEQ ID NO: 42408 - DNA, 451 bp, Oryza sativa
agcttttccaaaattcatgatttagccttacaccagcttgatacgtgttactccatcctaagccatactcgatatatggcctagaaccgttaagtggtgggcccacgccttaaacttaacgccgtgttgacggacacaacgggaacccaccacgtggcacaataccgttgtattggacacacttagtcacctaaactaccacgtcggggtaaataggaagctcctctgaattatatgaactcatacacaccggcctaccagaatgtaaggctaaaccataaacaacttactaagcttgggctatcccatactagcatatgtggttgtactgtatacggaatgaactgacattgagtgaagtccttaagtcgggttgggcgcacactccccctatcggtacataactaatcaccatatgtgcaccacttgaggcccaaacctaaaattcata

SEQ ID NO: 42409 - DNA, 442 bp, Oryza sativa
  unsure (1)..(442): unsure at all n locations
tttcctgttcagcccaatggctgaacaagcaaaggcgcacaactctctctccgagtgntagcggggacgacggggagccaaacccacgccgtcgagctcgtactccaccgccccctccacgccaaagtcctaggcgggaagaggcgctcgagagggtcgaaggatccgcgacttcgacatccacgggtgatggggaagggcggcgagatggggagcgtcgcctcctcgtctacggcgacggcagcacgccccagggcgcgctccaagctgcgggcgcgctcctacgtcatccgcccattgtccctgacccggagtctccagcccaacgttggctggacgacgtggccaacttggtcatgacggcactgcagcgcctangtgctggtgggtggtcctccgccaccaagacctctggcgctgctaccaccggctccgtgtcgtc

SEQ ID NO: 42410 - DNA, 474 bp, Oryza sativa
  unsure (1)..(474): unsure at all n locations
agcttctctcattcttccaggagacaaaggctgtttatctcctgtgtattttnggactccagattctggaaggcaaaggcaagtatccaagttaagttcccctctcttccccatgtgcatatatgtagtagacgcaaggaagagatagggtgaaataaaaaaaataaaactaaaaaagaaacagccgttccggtgggctgatggggtcatggatagatacataggtttcctgtatattcagatagggttcatggactctggcgccgaaaagtaagccgaagctatcctcaagttccttgctccatcaggtcttctagacaggctggtgataaacacgccatatattattacatagttattacttattaatgtagatagataaagtaaaaacatatttatcatgcaatcacatattgagagaattttgctttataagttagatgcatctacatgtggtagtagtgtgtgaagtat

SEQ ID NO: 42411 - DNA, 441 bp, Oryza sativa
  unsure (1)..(441): unsure at all n locations
tnggtgaaagctcaacacgaatgatgaggacaacgattgagccatatgacaagccaaggcggctagggctgagcaaatatgcccttaactacccattatatattttcagaatctctattgtctttctatagggcctgaattggattgcagagtttggcctaaaatttaagcactaccagtcctaggcatgtcttggcccctgtacgaagattaatcatattatatctaccgtggattttcacccaccactttactctccattatgtataatgatgattcttgccgcatcattgactcctagattctccatttcttacctcctaataaaggccagagctgctcacctttcgccactagattaattgaaatggctacatcgatcctacgtatattagctaactaattgagcactattcaacgttcaaaggcaggtcgtgttct

SEQ ID NO: 42412 - DNA, 446 bp, Oryza sativa
  unsure (1)..(446): unsure at all n locations
ctgcagctagctcccatatccatcaacaaatgttttgcttttgttggatctcaacataactgaggaaaacacaatttattcngatttgacttgcttgctttcatatagagggatttataaaaatttactacctccattctaaaataagttcactcttattctctagcatttatccccaaataagtaatttatatcgcctacgtaccctcgaccataaatctaggagttctatcattacctcttatctatctaccaaccaacagtattctattaatgagggtcaccttgttctttttttctcttcatactcaatttgaatcataatgattagaaattaatttattttggatcacgggtggtagtattgactattgtttggtttcaatttcgctcctactcatgaaataaactnntcagatcatcttctatgtgtttttacaggactt

SEQ ID NO: 42413 - DNA, 432 bp, Oryza sativa
agcttgtgcttgcaataaatgcatcaaggcttttcttcgccttccttctttctaaaattcttccttttccactcatctcatctcttcctttcttccttttccgatgatttctgttcatcattgttctgattgatcagtgagatgagttcatggacaacctcctccatggcaatgagtcaccaagcactcatttgcggaattcagattggtcacaactcacaccacaacctttttgtggggggcagggcagagtaatcgtgtgtttggtgaggtgatggatgcaaaattcgtgtggagcgacagagcagaggcgcaccctgaccggtactactgtgctagcactggtacagtagtagcttggccgcatgcacgattggttggaacttgtgtttttttgcttcttcaactgctacagtacaagggggtcgcaag

SEQ ID NO: 42414 - DNA, 423 bp, Oryza sativa
  unsure (1)..(423): unsure at all n locations
agnncttgggcatcgttttggagattnttgttatcctctttcagcccatgaaaatatggatagctgcccaagtcagcccaagtttagttgggccgagctcactgtgataattggatcatgtccagactgcggggatatgcacaacatgatctatttgtcgggtgatttctttgaaaaaatcacctacattttttctacccttaaatttacatccaacacactacacaagaaaataaaaatacatatttagttacacgatacttttatcataattacaatgcacttacatgtcatatcaactgaatttacaaatgtaattttagttatataggattgtgattatatatattaaagaaaataacaaatagatatttactcacacaacattgttatcgaaatatcagtgcgcttacatgtcatatc

SEQ ID NO: 42415 - DNA, 429 bp, Oryza sativa
  unsure (1)..(429): unsure at all n locations
tgcggatcaaagactgtgatcttgaatattgttttttatgnggaacaatggaagcagctaatgatcccttagctgatacccctgtgagctactactttcttttccactttgactctgatctttatgttccaaattgctcattcgtatactaatttagtacgcaaacagtttgttcccataaaatgtaaaataatgctctgttttacttcttgttaccatcatctgacttgcgtagcactctcgtaataatttccataggcggtaacattctgggagggggagatagtggatgctaaaaattatacatttctcactggcaagtgcgaggcatcgngagtagataactaaatatgctttatccttgatactatcatctacttgtggattaaatgatgccctagctcaaggcaacaggtcaaacttacctca

SEQ ID NO: 42416 - DNA, 462 bp, Oryza sativa
tagaggcgagctgcacgcgtgccagcttaaaaaactcaacgatgttaatggcattatctttccatcaagggacttggaaattctttgatactcagctatggaacgttttaatccaatcgctaatcatttctagtcttaaatggaactttatgtttttaagctgcattctaattctaactagtttgataaactatctgtaatttattaagtaatttctattcccaagtgatacagatatagatatgatctctatgatttatgcagacatggttactctgcaatttaacttttttccccttcataatagatttgaagcatggcctgaaaattcagaaagaaaaaacgtatacatgcaaacatcatactgtagtaattacccacaaaaaacagtgtaaaaatatgatcctatgtctactgcaaacattatcttgcttatttgtgcagcgcagatatggtcattaa

SEQ ID NO: 42417 - DNA, 445 bp, Oryza sativa
  unsure (1)..(445): unsure at all n locations
taagcttcagtaacatgcacgccaacatatatggtccanatttcttgtgtatggactattcttagggcttgtttggcgaacctcaaacctctagattttggagcttataggttaaaatataatgatttatgcatctattcttcgtgatctaaaatatgaacaagatggtgcggtgcatagaattcttgcagctggagctccaccaaaaggcttctatcataataaactggtagcacacatgaaagggtatcaactaattctaactntgaagtactgtcatctaaaaatactaattttaagttctgaagctaattaatatatttcctgttcatatataagaactcataagatgaataatgcagaagaacatttagattaagatgctaattaatctgatctcttcatatatctttatggggcaacaggttcagttaaaaacatacaa

SEQ ID NO: 42418 - DNA, 319 bp, Oryza sativa
agcttatctcttacgctccaggaatggatctgtcataacatcaccaccggctcgcctcggccgccgccgactggtgtttccgcctgcacggctggcctattatgccgccgttgttgggcgcctacgtcttcaccgaccggcttgccttcgccgccgccgactggtgtttccgcctgcacggctggcctattatgccgccgttgttgggcgcctacgtcttcaccgaccggcttgccttcgccgccgccgactggtgtttccgcctgcacggctggcctattatgccgccgttgttgggtgtctacgtcttcaccgaccg

SEQ ID NO: 42419 - DNA, 438 bp, Oryza sativa
  unsure (1)..(438): unsure at all n locations
taagataccaatgcgagttcatactcctggaggtggcatgtcctcttttcactactgcccatctgtgacagttgaaattcaagggttgatttttccagccaacctcattcttctcgaatncaaggacctagacgtcatacttggaatggattggttgacaacgcacacaggagtgattgattgcgccagccgcaccatcaagttgaccaatgcaaaaggagaggtggtaaccttccagtcttcagtgccgcggaagccagggattagtttaaaccacgctgctggtgaagaacaagaggtagcagtggagaaaaccactaagaagctggaggatattcccatagtcagagagtatccagaggttnttccggacgatctgacaacaatgccaccaaanagggatatcgagttccggattgacttggtacctggaactgc

SEQ ID NO: 42420 - DNA, 468 bp, Oryza sativa
agcttcactccctctatagcatgtgttactttatcaattattttcggccaatgaaaccccactctcctaagcaaccaatttatcttacgggccgattgatgaatttcacaaatcccttcatgtactactctcctagcaacttcagattgatcattatctaagtaatactccatctatttttcggtgatataatatttgaacgcttgccgccgaatcttccgatcaaccttaagtgtaggatctttcaaatatctaatcaaaggaattctccaagctatttctaactcatgggcacaaatgttcgaattcacaattaatttggccttttaatcaattgtaacgtgccccccagcctcctgtctgggatcggtcagaccggccacgcaatgccggtcagaccaccctgtctgcccggtcagaccggctatgcagagccggtcagaccgcctgtaccaccggtcagaccgg

SEQ ID NO: 42421 - DNA, 445 bp, Oryza sativa
  unsure (1)..(445): unsure at all n locations
agaaactcagctatgactnttgagatgattgactatccaaccttgttgtttgtttcactccctacataacctcttctgtaaattgtcctgtttggttcatatggattaaatcacatcggatgtttcgactttaatttatagtattcaacatagattaattatataacccattccataactntggactaattcgcgagacgaatctattgagactaattaatccatgattagcctatgtgatgctattgtaaacatttgctaattatggattaattaggtttaaaaaattcgtttcgcggattatctctcatttataaaattaattttttattagtctatgtttaatactctaaattagtgtcaacacatccgatgtgacggactaaaagattttagccccatccaaatacccctagatcggatgagttctataaatagttgtaca

SEQ ID NO: 42422 - DNA, 429 bp, Oryza sativa
atgacacatcataatctactaacaatcaatttagttagacaccatacatacatgctctattatctagtaatatgtcatttatttccatatacagcttttaaagagtcagcatgtttaatcatcgtctaacataatccacataatattggaatagctatccctattattttttataatatgctatgtatatgtatagttcatactcactgactacttagataatgtgattgctcttttctcttactgcatagatgataaatctatgatccacattggctttctcattttcttctctcaatagttcatattatcatatcaattattgttattctttagatgattaatctacggtccaaactatgtcaatactcatcttctttcatgacaggatgtcaccttactcgtatatttgaatcatcggtctacatg

SEQ ID NO: 42423 - DNA, 433 bp, Oryza sativa
acgaaacgccaggatctcttggcatgttgtttctactccaaccaccatcattcccaagatcaaggaggatgcgtagaccaggatcaaggcagtggctgcaaaagctcacagaaattattcccatccggctagtagttgcgtactccctctttttcttgtggtttgttcttttgatataccctataaattcttattgtggaggccttttcctccttctctttcaatacagaagtggcaaagcttttgcttttccttaaaaaaaggaggtacaaccaccaatacagtgggagtagagtgttacacttcgggtcaccccaacctctataatccttgcttgttcatctatttctactttgagtgggaacccgagctgctcctcacacgtgactctcccctgaatgaactcatagaagggggtcccaccgaatccctg

SEQ ID NO: 42424 - DNA, 398 bp, Oryza sativa
  unsure (1)..(398): unsure at all n locations
agcttcgcctgaagaagatgaanaccctgtggtgtgatgacatgagtgaatgtccatatttgagaccatggctagtggtttgcgatggcatgcttctcattgttgaccactacataactttgtcatttggagcaccagtcaactacagaccgtaccgcctggacatgtcagccaagcctgcaaaatgggtggaggtaaagaagctggagaactgggcactctttatcgggggtgatgcgagaagcccgccgtttgctttcaagaacccggagcgctggggagggaggagcaactgcttgtactatgctcactactcccagccatggagccttcatgggttgggtgatgatgcagatgctgtgtgggatcctaccactgatgataaccttgtgttcaaa

SEQ ID NO: 42425 - DNA, 436 bp, Oryza sativa
  unsure (1)..(436): unsure at all n locations
tgttgagacaaagaagcatgatctgtatgagtnggtgtatttgcttcttaaattggtggtgatcctaccggtggcgacggcaagtgtggaaagagtattttctgccatgaatttagtgaagactaaagtgagaaatagtatgagtgacaagctattgaataattgtttggtcaccttcattgagcgtgatatgtacatgagaaagacataattcactctttcatgactatgaagaagcgtaaagcaaaagctcttgagtcttgattagtattgtaatatcctatgtatctaaagaccttgtattatgtttgaacaatttacattcttatttatgtaagattcaaacttatttgttatttttctacttgtattgaaccatttagagttatataccatatcgtactatcgtttaccacattatatatcgaatcatatt

SEQ ID NO: 42426 - DNA, 440 bp, Oryza sativa
  unsure (1)..(440): unsure at all n locations
agcttcagcggtgatgcacgtattgagtggttttaattgaactgcgaggtgtgctttgtggtgtgatgtttccgtttcttgttctctttgttgcattgatccgtgattgattcttctgataactgaaacaaatggaaatgttattggcgatttgtttgtttgttgatcattcgatctaatgttgttactaagcttagttgtatgtaactaaaaagggaaatagctgtgtgttcttgagagctgagaactggtgtggtgtcaacttgtgctacattgctgagttttgagatttatgctttgtaaacaatattgatgacatgcaatccatcttgtaccgtttttacattgtcatggatatggatttctttatagtacatgcnctcatttatacatganattgaatattattgaaatactaaagaatgatgattcatcacctc

SEQ ID NO: 42427 - DNA, 174 bp, Oryza sativa
  unsure (1)..(174): unsure at all n locations
tttactcatactcatcagtgattgacgtgtgactattcttttttgaacaaatctggntttcttcataccaatcaatatatgttatagtacggaatatatatgatctcagatattgagagagagtataaggccatgcacgttatcttggagagaagagagagggggggggggggg

SEQ ID NO: 42428 - DNA, 319 bp, Oryza sativa
gcttgcatctggtatggtttgatggcattttatcgccaaatgcttcatgaattgcacactagaatttgacagaatttatgtatactgccacttttcaaatgcagtttgccatctggacccataaacgcagttgatgtactctgcttgcatatagatgttttaggaaaccaatacaattttggaatatgctaagcaataatcgactgatttgtatagaacatctgagttctgaaagagtaatgtggattagatgataaaagttggcatagtgtggaaccatgataggctgaactaaattattttttctatggaatataaa

SEQ ID NO: 42429 - DNA, 429 bp, Oryza sativa
cgtaggatgcaaatgggttttcaagagaaagcttatgcctgatggtacaattgaaaagtacaaggcaatgcttgtggccaagggttatacccaaaaagaaggtgaggattttttcgacacttattcaccggttgctcgcttgaccacgattcgagtactactcgctctggcagcctctcatggtctactcgtccatcaaatggatgttaagacagctttcctcaatggagagttggaggaggagatctatatggatcaatcagatgggtatgtactataaggtcaggagggaatgatgtgcaagctgttaaagtccttgtatggtctcaaacaagcgcctaagcaatggcatgagaagtttgacaatacacttacatctgctggctttgttgtgaacgaagctgacaaatgtgtgtactatcgctatgg

SEQ ID NO: 42430 - DNA, 355 bp, Oryza sativa
aagaaacactcagcgggacatatttcataacatttgcaattgaagaatttctccttcgaactatagcatataaagacggatacctgtctttactagtatttgacaagccaaaaatcaagggttgtctacagcctacaagtatgagcaaggaaatgaaaattccacttttgcccctcaactatgagttaataaacttcatttgcaccttcaaacacaaaattaggtatggaacttccccaacttataataccaatgcaaatcaagtaccttggcagcattgaggggtattagtttactcagcgtctatgtggcttgttgaccccaatggtgccttaaactagcttgatttgtaccg

SEQ ID NO: 42431 - DNA, 436 bp, Oryza sativa
  unsure (1)..(436): unsure at all n locations
tcagtgatcctaagaaccaacataaaccgcatcatttgatcctatacacaaaaaaaacttccattcaaactacaacaaagctgataaaatagtcctttaagaaaggcagggatcgtgcatgcatatctaggtcttgagacttgaggcaacacagtgatgagtgacacataacctccaccattatctataatttcgacaaaattattcagactgcattaacattaatgtctcattgtaggtgtgaaaagtacagcgacaattggtaggcgaagatttttttcagactcgtgtgaaaatcattaacgaataccggatatatcaagacaggattatctgatgattgcttagccctttgacctcccaccttccaaacctcaccaacgcanacaagaaccgcacaacacagggatagatattggttgtcgaattctacccg

SEQ ID NO: 42432 - DNA, 435 bp, Oryza sativa
  unsure (1)..(435): unsure at all n locations
acacgtatgcatatatcttatattacatatgttctaaacntnnctatcccttattatcatcacgatgtctatatgagtcagcaagcaaaatacgtgtaaagagattatctttttacatatacgctcattaacattatcgtgtgatctgaaattttccatccttaattaatatcacaatgtccgcggggatataaaagtttgatcacatcaaagaagctttgaaaattacgtattagataatatggcaataagctttctacaagcgtgcatatctctagttacattgattccttaatcttccataaccttttaggtaacaccatgacgtttaaaagaaaaacatatttcatcaacacaaaggtttcttatacaatttctgaaatggagtggcaatcttccagttacgcccacgtttagaatttacgtccgcacgta

SEQ ID NO: 42433 - DNA, 369 bp, Oryza sativa
ggggaagatagatgcaactcatggattgcacattattggtatgagtgctactatgcccaatgtcgcatctgcaactgattggcttcaagtaagagaacttctgtaattgtagctcatactattatctgtttttttaagaaatgctgttatctaccataaacatgcttgcagtgtaatatcttacggtcattcaccatcattttgacaagaataatgtgttatctaaccaagctgtctaatgaaatacagtcttaagtagtaacaagttatgtatgctgatgtgctgaacatgaaagtatcacatgtatatcttttgagagttgattttccttttaatgataacaccaccatactttttgatattatgct

SEQ ID NO: 42434 - DNA, 339 bp, Oryza sativa
  unsure (1)..(339): unsure at all n locations
agctttggagaagatgtcttaagtggagtcctgttttataccccagttgagcgcctgtggagatggaaccgtatgcccgctaatccgctgctgtttatttttgattgacaggccttaagtgcctttgtaataatgtaaatattatcgatataataaagatgtgtcttttatatcatgtgtgtatggtgtaccccggcttttcctgagacggngattaatacactagcgttcgggaaaatgcaattttctcggtcgcgacaatgcaccatctgatggaagtcgatacgagccacgtcgtacgcctccaccatgcgcgcctggtgcatgatggtagcgtca

SEQ ID NO: 42435 - DNA, 443 bp, Oryza sativa
  unsure (1)..(443): unsure at all n locations
tgagtggnctcgccggatccaatagttgatggcgatgatttctatcttttgggagacgtactttggccaggttggatctccctgatccgaagtcgtcgagtagcttattgttggagaatccatctcttaaacccatctcgtctaaatcctgaagcaccaaaaaatccccctacctggcgcgccactgtcgacgtttgatgtcgcgattccggtatttgcatagtatggggatcgtcggtactaggacatacgcgagactgaggtaaaagagacagaggcgacgatttttatacaggttcgggcccctgaattgtcacgtaataaccctatatcctgttggccgaagccggtattgctcttattcaccataatcacacgagtacaatatttggggtagcctatctaactgttgtcgacatggcggtctgtatgtctgactcgta

SEQ ID NO: 42436 - DNA, 470 bp, Oryza sativa
agcttctggcccagtaggtccataaaactcactctgatattctgtattattgaaccagacaaaacaacaagcgataaaaccaaagacagataaagcgcctaaactataagacaagtaagcttctccagaccatacggatgcacggcgagcccatgcgaagggtttggttaagatatgccaaattccgccaaatacacagatgaaacccaaccatacatgtcccccaattatatcttctagatcatccacactaacaatccaaccctctcccacaaaaggggattttagtaaataaccaaatataacaccggggctaagggtcaaataggtaatttttcttacatctcctgccccaggagcccaggtatcatatatactcgcaaaataaagagctttgagtactagaagaaaagcacctatacctaacacaataggtgaatacccacaaatgtagtcattatatttctatc

SEQ ID NO: 42437 - DNA, 445 bp, Oryza sativa
  unsure (1)..(445): unsure at all n locations
ntgcaaaattattatgaagctacgcgactagaaattgatccctattatcgaagntatatactctataacataggccttatacacacaagcaatggagagcatacaaaggctttggaatattatttccgggcactagaacgaaaccccttcttaccacaagcttttaataatatggccgcgatctgtcattacgtgcgactatctccactatagaaagaaaaataagaaaggatcaaattttctagtatttactagaaaagggggctttctacatagggatcgtcaaaacaacgattttgccctatcagctgtaggaagaaaggacacttcacgagaatcaaaataggaagaaagaaagtatggcctatactactctatggatagagttctcaaatcgatagagaaagcaccgtaaagatcaattagtgaccgactgggtcgatac

SEQ ID NO: 42438 - DNA, 349 bp, Oryza sativa
  unsure (1)..(349): unsure at all n locations
gcttcacaaagcgaggttgagtctcgtccgtatatgcgcgaanatgacatcctcacaaaggcgctcggaaccaaagaacatcctggccgaactcggggaattggtagcgatgtgccctggaagcatggactccctcagtacagctcccaatacaggaaacggaaagtctcccaggaagagagggacgcttcgttgaaggccgaacttaaggttgaggtcattcaagaactagaagctagcatgaatgcaagggtggaagaaagggttaacaaaggtctcgccgacatgaatataccccgagtcacaacaccttgctgtgaaccaactcctcgtgacaacacgacgcgag

SEQ ID NO: 42439 - DNA, 430 bp, Oryza sativa
tgtctctcccaatgctgcgtgcgtcgcaggggatgagcttttatacgacgaccttgcactctacccagctctactcgatgatcaaagccagcgacgccgcgctcgcgagctctgaccccgccgtcgcgtacgtaccatcctttgaacacgtgaaattttctttctaatttgtgtgagatgatatgagatcgaattgaactgattcgtgtcaaaatcatggcaaaaaaatctgtatggtttttcaggtcgacttgcccaccaggcacgcttgacccggagaaggtgaagaacaagatcgtggtgtgcgtgcgtggcggcgacatcccaagggtgacgaagggcatgaccgtcctcaacgccggcggcaccgggatgatcctcgcgaacggcgagatggacggcgacgacatcgtcgccgacccgcacgtgc

SEQ ID NO: 42440 - DNA, 298 bp, Oryza sativa
  unsure (1)..(298): unsure at all n locations
agcttgatgatcaagtacgccgatggtctttctctttcactcaagggctcgaaggcatacaaggtgttcgatccggtgactggccacgttcacgcgtctcgtgacgtggtgttcaacgaagctgccagctgggattggcacagctctgagggtttctctgcaaccccggccattgaattcaccgtcgaatacctggctgaagctacccagccgggctcacaagcttcgggggagtcgccgccacacagtgaaatggtctcgcccatgccggctggcacatttgccgtangcatgcacg

SEQ ID NO: 42441 - DNA, 439 bp, Oryza sativa
tctgaaacaatagaagaactatgatcttgcgtgtcattgctacaattttgattgtccactgaactagattatgcctgattcatacgatcaacatttgtcatttcaccctaatatacaccatgaaatccccatctagattttctatgagttttcatgatttttttgttttttcaacctgtaagcatcgcctatcctatgcaatgctcatagcctcataatatttgttcaatccactaatcctgcctactcatagtgtagagcaaaatttcatcttgtaggagcatattttaacccaaacaatgacacatgcaggtgcatcagaagatgaagtgcactcatacaggtgatctgaaaaaatattgtcaccaatgctgaactaaatgaataactaataatgcatttcagatggtgatttctaaatcaatccttttcaggcact

SEQ ID NO: 42442 - DNA, 466 bp, Oryza sativa
  unsure (1)..(466): unsure at all n locations
gcttcaaaatttcttcaaaaaagatgtgatgtcatgccaaaatttctattgaatttattttggtgattacatacaaatcggaggtgcctaaaaggtttgcaacttcatcctccaatgtttttttttgtcatactacatttgcacctatgttttgcacactttttttgtctccaaaatttagttgtaagttgatgagagagaaaatgtgtgtggggaagaaagaatatatagaaatttagttcatttgctaaacaaggttttataaaatagttgagaaggaaaactctagtgaaagttaatattaaataatagaaaacaaactaaaataaaaattaaaagaagtaaaacacattaaaattagtttaaaactttacaaatagttcttaagacntatttggtgtaatattttatgactctcgtatgaataaagatatcttataattattgtatgactgtcattattgta

SEQ ID NO: 42443 - DNA, 238 bp, Oryza sativa
gggcttctcatccaatcacccctgaatctctcccttgtatcttcctctatctggaagaaacaagcgcctctcctggataagaattaatcgactctacaaactcaccgatgcgagtgacagccgaccgacatatgcatgaagtgcctgtcgacgggagatcaagcgcgtgcctatacttcggactcggcaaagggcgctacagcgagcctccgtggcccgttgccattttgacggagtc

SEQ ID NO: 42444 - DNA, 436 bp, Oryza sativa
tacagctgtcgacacagacagccgaaaaatagagaatttctcttattcaatacacgccaaaaccaactaatcgtgtacacatcacatacgtattagtcttcaaaaaagtatagcattggatacaaatatatatggccatctccatgccaatctgcaataatgtcacaagaaaggagtaatgccttgttctctaacacatcttgatcgatcgtgcatcttttttcttttggtacagctgaaagtagccatagttgcaggctctgctgcctcagtgttcactatgcacctatacagaaacacagagaattaagaagaaattgaaagagatgcatatatatatgttactagcactagtagtaatttggcagtttaagtacacaaacaggggtataaccaaattgttgctaattgaacagtaattaaactaggccctata

SEQ ID NO: 42445 - DNA, 345 bp, Oryza sativa
  unsure (1)..(345): unsure at all n locations
gcttctctccgcgtatgcatcatatattatggggaaggaaaacaatcaagaggacggaatcacatcggacgatcagatatgatcacagactgccttcgtgaagtctgaagtcgacgcctttccgccgagatcagcagtcctgaatttcccctcggagatggtctggaggatggcgttgtggatccggtctgcttggttattgaattgcaagtggcgcaacatcataacagcactcagcataagagcggtcgggtttgcaaggttctggggaaaaaaaacattcagttaaagtgttgtaggaaccaatggctgatcagtaattcacattgataattntcctatgta

SEQ ID NO: 42446 - DNA, 408 bp, Oryza sativa
agcttaacatgcaaaaatgccacattattattctctaagaagttgacacatcatcatccactaacaatcaatacatttaatatcatgcaaacatgctatattatctataatttaaaatttattacattttagagcttttaaaataaaagcatgttaaatcatcatcccacataatttacataatattccaacatatatcttcattattttttataatatcttatgtacctatgtagttctatttaggccatatcacatcaattatttttagtgcttatgtaagtttatattggttaactatcttacacattattttacttattggtatcttatacattattttacttggttatcctagttggtataaaataatccccatgcgtagcacgcatgctgactttacaatca

SEQ ID NO: 42447 - DNA, 425 bp, Oryza sativa
tctggttgggataatctggatggtgtaagatcttatcttatagttggatcagagcattaaccaatacatgccagatctatccgatcggctacgctatgaacatatgtagtcctggcgtgaatatatattccgaactaagtgagttatactggctcggcatggcgaccgatctatcccaatcagttgattcaagtatatatcgacagcccgattatatattggtaatatgtacagccgatcgaacagatttagttctttattatctatttacaaccgccgatcgatttaaacatgacattggctcaaagataaatgatacgtcatcggcatctagccgaacggctatcatttatggatttaactacgggttctttgtccttatttcttggtgattgcatgaccaaaacaactggcatgctagcata

SEQ ID NO: 42448 - DNA, 277 bp, Oryza sativa
  unsure (1)..(277): unsure at all n locations
gctgcgatgccaacaaaatcacatctcttcccgcaaaccactagaccagtgagtttgctcgaacggttcaacgcagaaaacatgctgttaactgtactcagtgctttatctttctcatgttcgctagctacccgcggtttctcagcatcctgccctgcaacagcaagctagcaacaatatagtcacgacttctgcttatcgtattgaatgccnaacgtgcattacaataaataaataataaatgcgacattgccaggtcaagtataaaacaattcta

SEQ ID NO: 42449 - DNA, 435 bp, Oryza sativa
  unsure (1)..(435): unsure at all n locations
gcttgactgtacgttggctgttatccatagagttcatgatgtgttcatggatatacgcgtttcttgcttaacttcgttttttaatctttntttatttactcttaagttgcccaacatttacattgctttctcactcttacggattcattgctttaacaatactccatatgcctaccaatcatgtgcacatactccaaggaatcatcaaggaaagaaaatttaaaactacacattgctctgatttacaacaatagtaatctagtccttgaacacctaagttgttagttattactccctccattccaaattgatcatcatataattgttttgaaaatattcctaaatgatcatcgcatttgtgttcattcattaagtctattcgttatttgtgcattggggtaaatgagcattgattcatgcatccatacacacaag

SEQ ID NO: 42450 - DNA, 456 bp, Oryza sativa
  unsure (1)..(456): unsure at all n locations
agcttaacatgcaaaaatgccacatcattattctctaagaagttgacacatcatcatccactaacaatcaatacatttaatatcatgcaaacatgctatattatctataatttaaaatttattacattttagagcttttaaaataaaagcatgttaaatcatcatcccacataatttacataatattccaacatatatcttcattattttttataatatcttatgtacctatgtagttctatttaggccatatcacatcaattatttttagtgcttatgtaagtttatattgtttaactatcttacacattattttacttattgttatcttatacattattttacttgtttatcctagttggtataaattaatccccatgcgtagcacgcatgctgactntacaatcactttcttcaacccaatgtactggttgtaaccttntaatatcgtgcatg

SEQ ID NO: 42451 - DNA, 444 bp, Oryza sativa
  unsure (1)..(444): unsure at all n locations
tatgtctcacaaaagcaaatgccatgtgtgtgtgttgtttcttttattcttctggctgntggctgcgaaatatgcctgtagtgtctatgcattccatccgtatgataattgctaacattatggatgattttgtatctatgcaagcttacaaagttctgttacattctggcatcaaggaactatgtcacacttgagttttactcttaaacaacttttagtggtgtcaaacaagtgaaaacaatggctatgatacagtttatataacatgaatacatgatatgcaacacttagtaaaaatatgctcttatttagtgattcccccactttgttttgtcacccggactcacgcttttgntaatataaaggtgttttctccgctaactatttgtaggctagtcagttaatttcaaaacaaaggtaactcatggttgttgcatatctttc

SEQ ID NO: 42452 - DNA, 399 bp, Oryza sativa
  unsure (1)..(399): unsure at all n locations
cacctgcggcctgcagcttgacaanagataacaagattggttatgcctttgtaaccatacgcttttctcatgtcatcaaaataattgtcaagttgcataccaagtcttaataattcaaaacttgaaatatcattatggtagaactcaacaagtcgacataccttgtgtgcatcacaagtaaacaatgagtcaatgcttagcaggattcaagaatgtcatactatatacaaatgaaattgacaattatacatttntacataccttctgtgcatcaaaagatgcaaatgagtccgccgtcatatatgaaaacaactccatattaacctcgtcaaagtgattgtcaagctcttggctaatttgattaatgatctcaatatatacttctgttataaagtggca

SEQ ID NO: 42453 - DNA, 442 bp, Oryza sativa
  unsure (1)..(442): unsure at all n locations
ntcaactgttgattccctatcatcacacgcttagccttcttctgtaatgcatatggatttcccactctaccaataagaagcagcaaattcacttatatcacaatataatagtatttaagaattccatttgaagtcctcccgacctaatttcaaagcatggtgccttctgtaaaaaaaaacataagatttgaaaggattataagcgtgttggagattaaatacgggatatcggggttgagaccatataactcttgtgactgcaagataagagtatctcctatgtgaccttcgtgacatgttcagtgtgtgtcctaatcagtaaatgaggaaaaacatttgccagttgattgtttgacatgcctacatgataaatttgttttttcagtagcttagaatttaaccgaccaactttattctgttcactttgacgatagagatacat

SEQ ID NO: 42454 - DNA, 405 bp, Oryza sativa
ctttaataaattaatttccctaaccttttattgtagaatccgactatggcgacttgataactcccatcgactgattccaggactctgaagccgatactgattttaggccgatgacatcctcgaggcttaccaaatttcactgttaacagactgtcatgtcttgctcaacgtgtttcttgccattgcaataagtgccataagaccagaacatttgaaggttgctatcacaaggttgtgctgcttttttaatgcaatctcacagaaggtcattagtcatgatgagttagcaaatcttcgtacattcgcacatgagacacagtgccaacttgagatgtgtttccctccatcattttttgatatgatagagcacctcatcgttcacatagtgccccagatggatgcact

SEQ ID NO: 42455 - DNA, 402 bp, Oryza sativa
gctattttattacaatgtttgggacaagacgtcacactaaaaagaagattgatctctcatgattggtactttggtagggacaagcagctggtggagaaactaaacgcatgatgagatatataagaaaattgctaggtacacacagtaatataacacaaacaagtaaatttacacgtttaaagtaactatattctgggacgaagatcatagtagtatatgcgtatagcaagagaagatcagtaccattgtgaaaccagctagctagcaaattccatcagctgcgaacttgatccttgagttattctaaccttggtcgctcgctaccgtctggagaccccggggcaatgcttaaatagacagtgccaacttgccggctaattaattaatatacttcctctgaat

SEQ ID NO: 42456 - DNA, 436 bp, Oryza sativa
  unsure (1)..(436): unsure at all n locations
actctctgctggtccgattcaatcgtacatatatcggcttgaagcccgcaagattgatctaatagctcaacttgaagaatgcaatgctgagttggatctggagaagcaaaagttagcccatcttccaaatgctgtcgaagaacataaatccatacttaaatcggctataaagaatgtggctgatatgaccaagtccctcaaaatcatccctggaaccgacgcccaagacatccaagccatcgaagaagtagttcaaattagacaacgggttgtatcggctatccagtgttatttgtctggatgattggtcttgtaataggataacttatctttgtaatcggctagcanactataatgctccttgtatcactgtactgctgtgccgattaatataactttcaatntgctcaaaanaattcctcanaaactcanaaat

SEQ ID NO: 42457 - DNA, 438 bp, Oryza sativa
  unsure (1)..(438): unsure at all n locations
tgctcaatggatggtgtcgacgggggatacccgtagaccggatatatatagtattggggtacgccggtataaggatctacgtagtacgacatctagcaatcaaaagacaagaattatactggttcaggccccttgacaggtaatagccctaatccagttgatatgggattatatggtggaaaacacagattacaaaggaaaagacttaactcgggagattcgacgagatcgtagtcgagatgatccgactagctctcgtcgacttggctctttgtaggctctgacttcgtaagctgtgttggttgtctacgctttgagattcgatgagctatggcctccgcggngggtcccttttataccgtaggttgggcgatatctgagtatgactcggatgtaccacacctgatacgatacgtaggtaacccaattcttgttcga

SEQ ID NO: 42458 - DNA, 429 bp, Oryza sativa
  unsure (1)..(429): unsure at all n locations
tcgagactgtctangccacacactagacaacatctttatgtgtgtagatcataaaactatcggttaaactatggtaggcaatgagctaatgcattttttatgtgaccggagttgaaattttctatcccacccaaagctcatatggcttatggttttgaccccattccaaacccctccccctgctctaagtcactcgctaccctataatcatgtcgcctctcctctactagtcaccatcttggatcttgctgagttgcttcgatgacctctcttctacccatggctctacataagtgactacaccgtacctatcaccttgttattaaattntcttaggaagtatacttatatgtgccaaaaaaatacgtataatatggagtattgtacagtatataatatattgtacgaagttacaatatcgtgtactcc

SEQ ID NO: 42459 - DNA, 339 bp, Oryza sativa
  unsure (1)..(339): unsure at all n locations
gcttcagaaatagccatatactctgcttcagtagtatataatgcaacagntgcttgcaaacttgccttccaactaacagcacatcctccaatagtgaaaacataacctgtgagcgatcttctcctatccaaatctccagcaaaatctgaatccacataaccaacaagtccatctctagatctcccaaactacaaacaagcactagatgtaccacgtaggtatctgaaaattcattgaacagctttccaatgctcttttgcaggattagccatgtatctactgacaacactcaatgcatgtgataagtcaggacgagaacataccatggcatacataagt

SEQ ID NO: 42460 - DNA, 461 bp, Oryza sativa
  unsure (1)..(461): unsure at all n locations
cgcgaactataaaactcagcttgtacatgacctcncgggtgcttgttttgagagatgctttttcttgtaaaatgtgaatgcccggcgtttttttactcctcaagatacagggttttcataaatcactctatgaataaaagggtagaaataagagtagacgccgtgtcctgtattttggaagtcgtgtttctaggccagcataaatactggagtactatacaaaatattagtgatcactgatcaggtgtcctgtagtcctgctgttctgaacaagagcgaggttgaatgtcaacactagtccagcagtactaccttggagtagtacctacagccaaagctctgaacttctgaagtctgaactactccacgggtttggagcagcggatccggacgtggccgggcgacccggtgagcggctcaagcgcggcaagcttaaccattgcgtgcgcgaagtcctcgcg

SEQ ID NO: 42461 - DNA, 465 bp, Oryza sativa
  unsure (1)..(465): unsure at all n locations
agctntcgagcgaaaatgtgcagttattcagtcgttttcttatcgctcaccattattcttttagacattcatcctatgaaactgccgcaaagttggtggtgggaactgaagttgcgtagagaagggttcaataattgagtcaaaaaaggaacgcggccgtcagattaaagccgcgggacaaagtccataatttccaagagttgttgaatttcgcagcttttttgaaagcctttgtatcatactaacaagtaaaaaaggtttaaataccaaaattaacctgtatttttgataagtcttaccattgtacgatttacacagtttctgctcctccttgttgatagtggaaagggtgcattgtgcacttgcgtaaacatttatgacgcgttgatgtccatggttcacatttccttgtaaggggatcgacttatttgcggcgaggcatcattcgtaacagagtattatctt

SEQ ID NO: 42462 - DNA, 434 bp, Oryza sativa
ctgtctctaccaatccgggatataaatattcatcatctcctcaatattccacagcactaaatctctccccgccaccccgtacctctgataatggtctaaaatcattgaagccacttgcgacgacgttgctcaataaggaaaatttggcgtgaataatattcaacaccagtgcagcatcatcattacatacttacagccgccgactaccgctttcgatatattgactcaattttccagcctggttaaaaatagcgaccagctcagtcgcaaatatagtgactaccctaactaagcaacaataaggaatacactatgactgttcaaacaagtaaaaatccgcaggtcgatattgctgaagataatgcattcttcccttcagaatattcgcttagccaatataccagtcctgtctctgatcttgatggcgtggacta

SEQ ID NO: 42463 - DNA, 462 bp, Oryza sativa
  unsure (1)..(462): unsure at all n locations
agcttcgaactttaataacttcagatcgatcttcagaaagttcagacttcagagagagaccatgtcaaacaagcaagcaggtaggcattggctggcaagcaagcatacgcagaggtagccacgcgtacgatcgaattctatgcctgattaatgcaaaaagatattcagagatcaagcgtatgccatgctagcttgtttactgagaaaatccaacaaatatcattcatttgcaaattttagaaaatatcataatacgaaccaacttatcttaggccatgtttttttagcttagaattattataatctagattattgagtcagattactataagctaaatggttataatctgtagtagaataagcgattagttggttcttttctagcttattagagcctanattattgggtttgcagttaaacaggaaatggggtgcatggtggtaattttcacccataatctg

SEQ ID NO: 42464 - DNA, 439 bp, Oryza sativa
  unsure (1)..(439): unsure at all n locations
tgatgaagtccttggggctcctccatctctctgtattggtgatgcacaggatgggcgtcaatttccagagatggcgccagcgccgggacaggacacaggtcttcacggcatcctcggccggcaggaaggacagaatgtgctggaggagagcatccgggaggacgtcgatcccgtcctcttcgctggcctcagccattctcttgctcctcaagctcttttgcttaggagacattccgtcgaacaggtggcgggcgacgcgggcactaccgcgcaagaagcgaagagccgactcaccaggtgcaatgcgaggtcctcgcttaatcaatcagacgcgcggcgcccatggcggggaggaggcccagccagccgggtggctggccgtgtcggcggtgccttcgactttgccgtggtcggggccggngcgacgctaggacgatgc

SEQ ID NO: 42465 - DNA, 388 bp, Oryza sativa
  unsure (1)..(388): unsure at all n locations
tctaagtcacctgcngcatgcaagcttgatcaaccattaacaagtaatcctaatgtgtgatgggttggtcacggggatgcacaaatagtgcttcaagatccattacgcgttcaaggccttttgttcttcttcgcatccgttattttggcacaagtttttttggttctcaaaaagaaacagtttgaaaaggttcaattgtacgaaatgaatttctacgtcccgggatttcttaccatcaagttggtaaaaagccgcgatttattggcgattgctagaattctctatgatccattttggaaatcttttttttgtttagactattntttgtttgcgagatgtcttgtctgcaattccttatttctatcatctcatgcaaaacgaggagaat

SEQ ID NO: 42466 - DNA, 410 bp, Oryza sativa
tgatcgattccccctctgaaacaagaagttctggaccgggttgtataagatcaatcacttggcgtccatccgatgcatcgactatggatatttcatatccccccttttctttacgcagtatttttcttactacacctgttgacgttgcattatagaccgtattgttactcttgctaccatcaggatagatctgtccccttcctcggtttccccccacatatatgggatattttaagaaatgaacgtctttcttcatagcagggtcgggggaaagaatgggaaagacgatttcactatatttcttaccgggaacagggcctatcacaagaatattttttttattgggacgataactctgaaaagagagatttcctatcttttctttcaactcaggagaaatacggtcgggc

SEQ ID NO: 42467 - DNA, 211 bp, Oryza sativa
ttttttttttaaaccactggtttgttgggtagcccatcctggaaaagaaccaagaaatgcttttagtcatttccaaatcaatcctcccccccaataatattatttgccaatacctatctcaattataaaggcgtcaggactgtccttaaacaccccactttttctgaaaaagctactaaatgggacaaaacctcacatccgtggttgaaaa

SEQ ID NO: 42468 - DNA, 236 bp, Oryza sativa
gtggacttattccaacttcctctagaaacagtggacccacgagccggccatgttcttgtctatcagcttcatgagctcacacatggattggtccgtatgctgcctgcttgggccgcgaggccacggtgcaacatattgcccgcctggttgggcttctatccaaccccacatgtctgttgctcgaccgcgaaaaacacaacccccccccctcaccccggcttcccctcctaaatcct

SEQ ID NO: 42469 - DNA, 382 bp, Oryza sativa
gatcgcccaccccttacctaaggcatgcgaagcgctttgcttaacaaaagcatgttaatgcgagttcctttatatttgtcagaactgagaaactgatgctgttacttaatacttctcttatatccaaccaccattgacctaaaacgcaccagctacctgtgtgttctgctttcacacaaaaatccagaataagaagagcgcacctttatgccgtgagatggcatatataactctattgatgcctcatcgatgaatgaacacatactctatatactgcaccaacatatgtagactatggctgtgctggtccaagtacaccatgcatgtcacacagaagcgggtcattcatagatgccagtctatcatgatcaacacctgtcgc

SEQ ID NO: 42470 - DNA, 430 bp, Oryza sativa
  unsure (1)..(430): unsure at all n locations
tgtgttggtggcgatttgagatatggattcatggtggtttatgtacgagcggngatattcctgctccctgattttggcttcttgctgctcttgattagagcagcaaatgcttcaaatttttgggggtgccatggagctccttttcgttactgttcacttgttcagggacattgcacaaattatgagcattagattagatgcctatgattttggtcagtaatagctagttcttgcagctcctcgttttgttatggttgcaatgttactcgagccgtaggagcacgaagagaggaaaaacaaaaatacacgcacaaatgtagcatctttgtttgcttttaatggtaattaagaacagaagcccctacgctacagcttccaattagtgcttatcaacgcaatgacaacgagaatctctcttatgtngcttcta

SEQ ID NO: 42471 - DNA, 297 bp, Oryza sativa
gcttcactcacaatctccagaatggttcgtatctggctccttacccttgggccagagttggggctaaacaaaacagacgacttctctttattgatcatctggcccgacgcaacttcatacactcttaggatctgtctcagctcctgtgcggcactggcctgtgctttcatcaaaatgagagaatcatccgcaaagaagagatggttgactcgcggagcattcctgcacaccctaatcccttctatcttcccttcccgttccgctttctggagcaacgagggacacccctctgcacat

SEQ ID NO: 42472 - DNA, 448 bp, Oryza sativa
  unsure (1)..(448): unsure at all n locations
agcttgtgagagaaacgacgcacaagcggatttttatgttntgagtttcagttntggctgggagagtgtttgtggcttgagttaggcttcctgctgccacgtcaagacaccatctggaagactggaaccatctatcccagagcaaaactaacaaagccacagtatgctcacacgtgtacacatctccctctaaattatttcttcgaataggactcggacatcctattaaaggatccaatattctgataaaacactcacaagctactgagtgcaaatcttcaattgcaactactttctgcgaacttctgatcgaccattgcagaatccaactaattgtttcttcagacttcttcagagcattctccaggacacttcgaacgaaacatggtaagcatgataaagctgctcactgcttcagaattcaggttggtggcttgccaactgaatt

SEQ ID NO: 42473 - DNA, 415 bp, Oryza sativa
  unsure (1)..(415): unsure at all n locations
ccgcgatcttaagtcacctgcggcatgcaagcttganaggacgatcagttgagccagccttttctctgtagccagccggcaggactaaagccagccgctacagaagagccagcacaggggtcccgggcttcgacggcacccggagctcaaaactgcaagagtcctcccaagagtgaaccgaggtggcagcaggttcatgggctaaccccgcgcttggcccctgagggccatggggaagacgttcgccatgacccggtaaccacttcccgccgcctctatgatcgccgtgcagatctggagggactcggaggggtcagcgccatcgtcgtacttctcggtgaggcagggctggagctttgggggtcctcagacattccgaagacacgccatatagacctggtagccaagcttacct

SEQ ID NO: 42474 - DNA, 445 bp, Oryza sativa
  unsure (1)..(445): unsure at all n locations
atgcaatctctgctaaatggtcaattaaagaagagatgctccttgtntttccttnggccgccgctgcacagtacacatgatagatcatcatcttgtttggcacagcgtcttctatccaacatatctcttgtattcaatctgtcccagaagaatagccaagcaaagacttttattttcattacacactctggcttccaaatccagatgagaggtctgggtgcttgaatagaagcaatagtgaccttatagaatcttttgggggtaaaacagttgttattccagatgaagcaccataaatctccccttccttgttccagctgaaggtgtgtcagttcatcttgaagatcgatgtattcacaatatgctcgataagatagtggcggcatgaagaatcctccaaaggtctggcacacatagtctggactgaatcatctttgttcagaga

SEQ ID NO: 42475 - DNA, 331 bp, Oryza sativa
ctttcgtatgtgaacgaagcctaccagaatgttcctatccttattaccatgggaaaaaactgagaccagctgccacctgagcaagatcaaacaaccttgtacctacaaaacaagaaaagaaaaatctccaactgagatgcatcaagctctccttcactccaactcagtttctcccgattcgaacgaataagcaaaggaaaggcttcacactcgaattaatcaaattattgtaactctaacaaacagataaccgatatcacaagctccaccgggtgactgaacgaactgtggacataatcacaattcaatatttatctccaacttacatgga

SEQ ID NO: 42476 - DNA, 451 bp, Oryza sativa
  unsure (1)..(451): unsure at all n locations
agcgattcaacgcgcacggtgtcgagatggcctacgttaccgacgaggatcatacacctgttacgctngttgcagcttggacgaggggacagggcaaatggcggattggcgcgctcagcctgtggtaatctgcacgccacaggcaccgagcgaggaatgagacggtattactgcgttttggataaggatatgggtaaggattgacgttgaatgattgttagacaacaatgttatgtcaaatttggagcggattatctttacaaggattttgtgggacatggaattttgctctgaacacttaagtttgcactttgcagactacgacacaacgtatactactgatcctatcaaagagggaagaaatatataagtcgtggtcgctttcttttcgctgaatttatctgccacaacatggttccagccttccaggctttcggctagatttcacttc

SEQ ID NO: 42477 - DNA, 441 bp, Oryza sativa
ctactacactgcaatgccggtacaacacgatcaataatcttaccccaatctctttatttgtcattgcagttatcactgacactgtggtgggacatccttgctcgtcattgcccgataactgctacctgtagctgctaaatgcaccttggaccatcttaatcaccccgtgagataatgcagcattgcagcttgccttctctcctcttcttccttccatacaaacagtaataaaaaaaggtaacttggaagaagatgaagcacgcggctgcatggatgaggagaacatacatacatttacatggagctgggcagcagctcattaatggcggttggaggagtggccgtgaccgcctttatatggcagcatcgccgactgttctagttacaataaatccctatataattgtcattgtaccccatcattctcgtgatctattcttt

SEQ ID NO: 42478 - DNA, 452 bp, Oryza sativa
  unsure (1)..(452): unsure at all n locations
agtcccataactgaagatgttcttatctggcactgcatgnnatactatactatacctgtgtatcacgttcaaactatgatatatcagattataacatcagatacaattgtttgaggaaagcaaaacaaaatagcaaatccaggattcaagggaatcctgatacagtagagcgcaatgatgctatttcatctggctaacaccagcatccatgacttttaacccattaacagaggcagaccagctcatatttacagcatatcccagagtctgattacatattttggatacataaactcctgcttatatcccattcctccaagctcgatttagtgcatgtgtttaataccatgaaaataagtatcaagtcaaataataaccatgaatatatatttcaaacaatcacgaaaggatcttgagtataatacatctatgtaagtgttgttcttgctagc

SEQ ID NO: 42479 - DNA, 389 bp, Oryza sativa
  unsure (1)..(389): unsure at all n locations
atactaagcttannatggaaatacaatcaaaagtgctggtattaccttgttctttnttttttcacagagattcattgttcaacaagccttttgcttatgatacataattttaatgcctgttaagaagacaagctgtctcgacctccttgctttggttgttggaaaaaccatatgctatgtactatatatatgccttcttcataacggtagcacaaaaaatatatgatttggccttgcttgattgcaactttgtcagtatggaagtatcctatgcatcattgttgatcaacatacatccacatatataatttgactgtcatacctgtattagtttagtgctctctggcttattcgttggtgacatgaaacgcttagatttttcgagaaaa

SEQ ID NO: 42480 - DNA, 306 bp, Oryza sativa
  unsure (1)..(306): unsure at all n locations
acaaaccacgcagcagcaacaggcccaaaagaggaaaacttgttcaaaacacacaacaagaccacgggaaaancgggccacgagcaaacaaacagccaacgccccgccggcaaaaacgcaagaagaaaagacgcaaccagggcgaacgagaaaaaaaaacccacgaaaccacacagacaaacaccgagcaccgccggccgcggcaaacaatgcacacagccaaaaaaagaagaaagaaacaaccagaacaccgcccaagcacaaagagggaacagaaacagagaacgcccccgcggagacccaagc

SEQ ID NO: 42481 - DNA, 413 bp, Oryza sativa
agcttcaggggtcggacctgctcaccatcttgatgtccagtccatcaaggacctgctcctcaacgcattccaatggcccccgcccaacatggacttcttgtgctgcccaaatggtgagtcttgtgctcaagccgcccccgaccgttttgctggaatctcaccaaatcatgttcaatttcagaaactcctatacatctcggatcttacgatagatagcgcagccatagagacaaagctatcaaaatgcgtagcgaaagtgcttggtggttgtgaagaacatggacatgtgaactatgatgcctccccgccatgtgagcacatattgtccctgaacatgtgcctcctcgacaccatccattgcttctacatcaaggcacttgccgtgctgtccctgcccgtatcatatgacctca

SEQ ID NO: 42482 - DNA, 278 bp, Oryza sativa
ctcagctgtcatgacgcttgcattctcgggatttgcttcagtttatgattctctaaacttggttatgtaaatcgtcgagttatcatatatgctctataatggttattgatattcgaacttaacccgcgatcggctaatatctatttctaaagagtagctgatagagctaggtttcgtcgtaatttacattatatagaatatctaccatcttttagagcgtttcgtcgttttgttctaatcatgaatttatcttaagcttttgccgattgctatttttt

SEQ ID NO: 42483 - DNA, 454 bp, Oryza sativa
  unsure (1)..(454): unsure at all n locations
agcttccanaccgacaaagatgaattatatttgtttctgnattngngnnctgcctgaatggaggcactgtgagttagaagagttgcaagcaatatacagtggctgattctacaacagaagctgaatacattgccgcttctgaagcagcaaaggaggctgtttggataaagaaattcgtttctcaactaggtgtgatgactagtgcttctagccctatggaccactattgcgataatagtggtgccattgcgcaagccaaggagcctagattgcatcaaaagtccaaacacattttacggcggtatcacctcattcgcgagatagtggatagaggagatgtgaagatatgcaaaatacatacggatttaaatgttgcagattcgttgacaaagccactccctcagcctaagcatgaggcacacactatggtaatgggtataagatgcgttcatga

SEQ ID NO: 42484 - DNA, 471 bp, Oryza sativa
  unsure (1)..(471): unsure at all n locations
taccatacatggagtaactattcactgcagctattgtcattgttctaaccacaacaaanaagggtgtgagctaaggaagaaaggaataaggcctaagaacaagataagaagaaatgtagttgaagccacataacagccttcagtcatgcctcaggttattaaaactctacatttcagattatgttgtgttaatcccttgaactaaccaatgttgtgttacatgaattaatgggaccacaagcaggtggctcatcactattagctgaggtgaatgacaatatgttggatcatatgctgcaggaggtaattttcttgttaaggtttagatcactttattcagatgtaaacacatgtggcatttgtaccataactgtcctcctttataaacctgtttaacattcagtttgctactttgctctgattnttaattcatgtaggcatcacagcccagtcaactaactcatgaacatg

SEQ ID NO: 42485 - DNA, 474 bp, Oryza sativa
  unsure (1)..(474): unsure at all n locations
tatcctctaagncacctgcngcatgcaagctnttctttacaggacagaggtattctcttatacacactattatgtcttcctttctttgtttaagaagttccacctgttaagagcattagtatgatatgtactataagatgattgcatgcatgcttagttgaatcagatggtacaatccgttcatctgcgaggctctggacacaagatgatgactctctctgtttattactgcagaaacatctaaatctagtgcccataagcattcctgtctgtatcctaaggcaacccatgggccatggcagcatgagagagttgctggggagcatgcacatgtgatgtgtgtaagagtttggaaaagatgggtggtaaactcacatctttacacctcctttattatgagaacagactctaatcagtgtttccttaatgatctgaacctgaatcctctgggccatgcatgcacctctatctctc

SEQ ID NO: 42486 - DNA, 376 bp, Oryza sativa
  unsure (1)..(376): unsure at all n locations
ntntgatagaatatgtcagagtaatggacactattcagattttggagcagttagatgatcataattcaaggacaaaaaggccaagcaaactttggtctcattactacattgagtaccaagctgtcaagctgtacaattcaaaaatattcaaaaagttccaagttgaacttaagaggacaacaagattacaattgattgaggtcgagaaattgaagacttatgaagttnttcttgcattgaatcagaaaataaaagtagtaagaagaaggaagtaccttgtaattgttgactctgaaaaggaggaatacacttgtatttgctcataaattgagaaagatggccctctttgctcccacatatttgaaattatgcttca

SEQ ID NO: 42487 - DNA, 136 bp, Oryza sativa
atcttgcggatgttgtgtgagggagtgcgtcgcttaccccggaggcgagctcgtcagcttgtattctccgccggcgagcgatagtaatggggcggcgaggccggttcggtcggtggatgaccagacaatagggttt

SEQ ID NO: 42488 - DNA, 355 bp, Oryza sativa
tattcaaaggaccatccaaaccatgaattatccatccatgtttcacaacttaagtcaaggataaagggctaacacttcaaaggatatccaccggacatacccacaagatgtcactcactcctattggacatgcccacttctctcttagtttaagacgtgagaaaactcatcacacttggttagacaagcccacaaaatgcacctacatgcatatgaactaatatggcacaagatcatccacaagctcgcttcatagacccctcttgatagtacggcgtctatctagcaaatccagtctacaccaaacaccaagaccgggaaaagactaagaaaacattcttagctacattatacc

SEQ ID NO: 42489 - DNA, 424 bp, Oryza sativa
  unsure (1)..(424): unsure at all n locations
acttggcttagctagcaaatgtttgtttgggactattaagttttaaaccattngngtntaaccttggcaagttttcaccattcaaaagactaattagtgcttaattctcaacaacccaactataagttgtctgaacaataataaacagtaatacttatgtaagcctgtcgggggaatgctgatctcaatgacattattaattattagcccttttagtttccatgaaacatatattgcgtaactagtaattctttgtggaattgtgtccccctgtacatcttcccaagtgtgtataaggatatgtatatattcgggaatgctagaaattaacgagcaatttggctctatataagtgcttaattacttacattaatcgtatgcatcatacattgcaatctggcaagcaaatgtcgaatataggcgc

SEQ ID NO: 42490 - DNA, 436 bp, Oryza sativa
  unsure (1)..(436): unsure at all n locations
agcttgagtngaatgcattcattgatgcatgtatgggtacattttccagtgatccggcgtggtttggatgtacggctcggtcggcattttggggtccttttctctgaaccttttctccacctgctactctgctagagatgcctgatcaaagataacaatacctacggctagtacacgcgctcaccataccatccacagccagtagcagctagctaccctcttcaccaatctcagcactatccattcacatgaacggcaccgtgcaactgattaacgctccgtttgggaaacttaaaattcaaagatggagttgatcggtatccggcttcttaaaaaaaatctttaaaataaactactccctttgttgcaaatataacaattcttagttcttaggatttgtcccacaatataacaacttctccaccaatattctctt

SEQ ID NO: 42491 - DNA, 427 bp, Oryza sativa
tggcgcacacgaaggagtgctatagctcagattatcactctcttgagccactacctggcgcgccagatgacggatcgtggtgctcctcaccgggagaccgcgcaggcccccctttgccggttcggccggtgaccctgggtgagactctaagctcccaatctgtatgtggaaggctcgcgagacaggaagcacagaagacgccggcgatgtatacaggttcgggccgcttataagcgtaataccctactcctgtgctttggtggatccgtgtgtgaaagagctacaaagtatgagccagcctgtcccttgttctgggttcctaatctggaaaggctcagtccaagaaaaagaaaaaccccctctctcggtgggccaggtcctccttttatatcttaagatgataccacatgcaccattttcctctttt

SEQ ID NO: 42492 - DNA, 171 bp, Oryza sativa
  unsure (1)..(171): unsure at all n locations
agctntactgttcactgagataggcttcgggtccnttctgcgcaacctaaggggaagggtgaagatggcccctttccgggggggcccgacccatcagggagaaaccactctggaagagctcggatgctaacctcgagtccaacccgcggcccacgggacagctttatgata

SEQ ID NO: 42493 - DNA, 285 bp, Oryza sativa
  unsure (1)..(285): unsure at all n locations
tcgtggatttatgcacggcttcctgtactctttttctattaaccnttgtttggcaagctgctgtaagttttcgatgaaatctntactactctgtctgccaaattgaatcatgtattcattcttacaaaattcgaaaaatggataagagccgagaagtcttaatattatgaaccttcgattcttaaatcatattcctctaccatgaatgtttatctgaacatatcatttgatcacctttattactccttctatacattgatacagtatatattgactgttcatttt

SEQ ID NO: 42494 - DNA, 293 bp, Oryza sativa
acccgaagaagcctgtagttagtatctattttgttgttcgacgagcatctttgatttattgtaaagacgattaaacgtttcggtgagcttttttgtcaactggatatatgcgtcaaattaattgcgtcattgttcaccatgaattcaggtcaagaagccgtatatagtatggaagtgagagatctacgaatagcttatatggctcatggttgtctccaacagtcgcttgcattaacattaacttcaaaatgatctccgtttcctatgacaaatatccttacttctttcacgtt

SEQ ID NO: 42495 - DNA, 456 bp, Oryza sativa
  unsure (1)..(456): unsure at all n locations
agctnttgaagtttcatgcaacctgcagcttttttgatatcggtgtgattacagctgagaataatgttagaagaaaaaacagaggcaacatgtgaaataattttcatgggtttctttcaacatctgatgtaactatatgatgctattagtttacattcattagctgtgattaanataactgcgacgagtactgtgttttttttccccttctcttggcaggctgtcactagtaaagataaaaagaaagtgaaatcaagaaatttcaatggatgatacccagaatatatagaccgttgaatagaccatgaggcaaattaccagaaactccaacggaccaaagagtagtatggttctagagcgagtgatgtacgagtctgagaggaaagctcctaataaagcaaatccagatgtggcaccaatgaagttagtaactgtggttgcagagcttgaaactcc

SEQ ID NO: 42496 - DNA, 303 bp, Oryza sativa
  unsure (1)..(303): unsure at all n locations
gcttgagggtcggcacatcataacggaagtggaagaagatggtctttctagtgttcatctcgaaccgccaagaactatgtacgtcacagcggttgggttgtgcgggataacgtgcctgtcagtacggtgtactatcgaagaacaagggcacgcggagatcatgagagctnttgtccaaattcggagaaagagatgctgtggaccacaatgctcgagacattcacccttcctgcgggtacagaggacaaagtgaaaaggtggactctgaagaaaatggcagaacagcttcagagcttcaatgga

SEQ ID NO: 42497 - DNA, 472 bp, Oryza sativa
  unsure (1)..(472): unsure at all n locations
actaagctagcttgngttgtgtcggtgatcagtgtgtgtgggagtttatggngcgtttctggtgtttatataggaggtttggaagatggttggatggatggtgccgcgaagtgagtgatcttttctctgccatgccatgccgtgccattgccagccgtgtaatgggtgtgagttggcaccatatgggcgagagacagcggcctctgtagcgagcatcagagggggctcggctcggttcggctcgacgacgccatagagggtcacgtagtagtatagtacagatattaaaatcgaccgagacgttcagcgaattctggacgcaacggctcgttggctcatcgctggatttgccatctttggttgtgttctcctcagaaatcagatggccagtataaatttcttgtggttctttggtactccgtcctacggagtagtataatataagaatatttataggtacgtgatattttct

SEQ ID NO: 42498 - DNA, 389 bp, Oryza sativa
  unsure (1)..(389): unsure at all n locations
cgcatgttggccaatggatggaccgagatcgatcgagcgccaagctgaacgcgaggagattaagctcctacccgaggatggatcgacggttgtacgtgccttcaccagtcaagctcgaggggcgcccgcactcgtctcccagtggcaacgccaatgacagagcccattccatcttgcacatcgcgtcagccggtggagcggtcgtcgacggtggcgccatttcatcccacgcagcgggcacagccaatggaacggacgagcggtcatcttcaagagagagggatgcggngaagagctgcagatgacatgccggcggccactcaatgttcgtgcagcctgccaagctgctactgctgcattactggggaagagatgagctctgcccgatc

SEQ ID NO: 42499 - DNA, 420 bp, Oryza sativa
  unsure (1)..(420): unsure at all n locations
cacaagcacaccgacgttgggtttacctctttaagntctcatcctagaagaagcaatcggaacacgcatcactcaaagactaagtctaaacctgtaaacaaaaggttatatcaacagcaagagtcagtacattaaacaagttaatgtactggcaagcacaagtcaatcctactatactacatgtaaggcatatattcaaaggaagacaatatgtagttcaatttcagcataaagcaagttttgtttcgcaattcttttgtaaaggagttgatgcttcaattaacaaaaccaattttaagtttcaatattaagttcatcataattccatcataatcaatctcttggtgcatcctttgaaacaagtcataatatatcacatataacacaactaacactttataatttcaaccatgtacatga

SEQ ID NO: 42500 - DNA, 273 bp, Oryza sativa
  unsure (1)..(273): unsure at all n locations
ctctcgangagctccccctcgagctcggtgacaagggtgcgcaccacttcgcgctcccacaggtgagcagggagcccatcgagcgaaatcttggtgaagaacttcaagtcccgagctgtctgcccaactccggcggctccacagcttgaaggacgtgggaacccccttcacgataatctcattgagagcaatggagaacaaggttccgatcttgcagcatgcggaacaacaccagaaaatcctccgtatgtgtcacgtcgacacggacgttgc

SEQ ID NO: 42501 - DNA, 462 bp, Oryza sativa
  unsure (1)..(462): unsure at all n locations
tgctntgagttccttgcttctcgctcctttcttgttaggttgatggccatngangaatatgagcatctgagaatcnagtgcccgtctgttctcatggagctggttgcgaggttcctccctcaacaagagaaataaccctggctcgtcagtaagtagtttgtgaactctacttctgtttgactagctagcttgatctctgatgacctcatgtttggtctttgaaagattctgatgacccttatgattcgcctttacatgtcttcatcctacctaaggcatacggtctaacgcgctcgaatctcctttaatcccttttaattctttctgtatagtttcactactaccttccgatatatatactctattcactcttctgactccatcgaccttctattgcatctctctatgtcacgtatattattctacgtccattactctgatgcgtgaaatgcaattgtctcc

SEQ ID NO: 42502 - DNA, 420 bp, Oryza sativa
  unsure (1)..(420): unsure at all n locations
tgcatccttcttattatacattnactgnacatttataattaggaattntgttgaatatcagcatacacaactcgcttgggactaaagtataatgttctgttgttgattttcctggacatcataatgtgtaaatccttggaagggaattcttctttcaaatatttgtagagcctttatggagcatactaaaatttgtggagttntcattaaggggtttttgatgatttgccactctttagattggagatttgatgatttaccatcttgacccacatgtcatgaactcagagggtcccaaatgtcattgtcatatggtgacaagtggcaaatctgattattaataggtattgcagcacttatatgagttaatataaaaacttgctcttattttgcgattattcttgtatgtagctattgatt

SEQ ID NO: 42503 - DNA, 422 bp, Oryza sativa
ctggatcattgagtggtcttgtaccaatgtgtataaggcaatttttcttttaacgcatcttattccgtgccacgaggtgaaacattttcctcagacaagagtctgttgatgaacctgtcactgacccattctctggagaaaaggttgctggtatattttctgacgtttacagtgcattttttgttctttgtatattccaccatgttgtcctttcaaagtaatcttggtatttggattatacatctcggttcatttgcgccctgataaatagaactttgttctatgagtgatgaagttattttttatatatcttacttcctgtctagtcatgaagttattatattatgtgttccaactctaagtcttcattctttgtatgataacacaggttgccaaaaatgcactttgtattttctactctg

SEQ ID NO: 42504 - DNA, 435 bp, Oryza sativa
agcttcatacttttattagaatactcttcttatacatttatggtattgaaatacttttcgagtatatgagtacctactttacattatgttcatgttatactgaatatacggctagcttatatgggagatgctttggtgcgggtataatgtttgcttatgcaattactctatgtcatgacgatgatattagagtagtatctggtagtttaggcgtggtgtctagattacgggatatcattatttggggttatatattgcggatgagaggtgggccgctgatggtgacagctcagtacgggtattcctccgcgccggtatataatcctaagataatatcttgggaagggtattcctcagtatttagccccagttgtatggtcatgacgggctgtcgtaaggaacttgacagtcaggggtggcttctcgagtaccagg

SEQ ID NO: 42505 - DNA, 429 bp, Oryza sativa
  unsure (1)..(429): unsure at all n locations
agctnggaacagtaaagaaatgataataacttcgttcgttgttctctaatcaagagaatgatcagtctcctcacagatgaacatggattgtccttttgtttcggggaaaagtataattgtcttattgatagacatgcatgaagtcgttcgcaagcttaagatatcggacaacgatcatggaaacgctgttgggagggggcatggacaactcctgctgcagcttggccacggaagaaattgatccgcttataaatattataccaacgctagatatatgtgtgtgctttgtgggtgccaacctattttggtgtatggtttgcttgtgtttctcggttgtgagcttttttttctcttccataacatgtctaatattaaaacaataactaataagctgcattattaggtaccgctttgttctactgaatgtct

SEQ ID NO: 42506 - DNA, 316 bp, Oryza sativa
  unsure (1)..(316): unsure at all n locations
tgcaccaggggcatatgcagatttgcacttgacattaagccgcacacatccttcttgatgataaacttgttccaaaggtcgcagattttggcctcgctaaattgtacccgacgaacaaaagttttgtatcagacagggcattacgaggaacagtgggttatataactccagagatggtgtcgcgaagctttggcgtcatatctagcaagtgtgatgtttatagctctggaatgctgctactngagatggctggaggaagaagatacgctgatccatatacaaatccaaatgcatgtcagtcatactacccatcatg

SEQ ID NO: 42507 - DNA, 336 bp, Oryza sativa
  unsure (1)..(336): unsure at all n locations
ggatcttaagcaccgcggctgcagcttgcacataggatcttaaaatttcttagcagatgnnaaanattcataaattattatcaagaatattctaattntactattggttcttagctacctgaaattgtcactgattttctatccaaaaaaataaatgcactcactgtcactgggcttgaaatatgcacattattgaacaaagtaatatgaagtgtcggatacttttacacttcatactcttcgtcttgtgttttcccaattataagaaattggcgttacctataactcgagccatccaatgctaagaaaggtttaaactcgaagttaccgctttgt

SEQ ID NO: 42508 - DNA, 377 bp, Oryza sativa
  unsure (1)..(377): unsure at all n locations
tataaattcgatgaataatttattagataatttctaaatcctaaaacgaanatcaggctgtgacagtttcccaagcaagaacgcacccggctgccgccgccaccgtcccggtcgacccagagcaagatgtcgcagctcggtgacccggccacgcgccccgaggaggacacgtgcttcatccccacctcttacgccattgacgaggagctgcgcgagtggagcgagactgcggctgtctcctgtgcggcccacgcgccgtcgaccactacaccgcgcgacgtcgagcatgccttcctagatgagttccagcttcgtagtgcgaggtggtgtctcgctnaccatcacaggcctcctattcagtccacatctcgcattgg

SEQ ID NO: 42509 - DNA, 397 bp, Oryza sativa
  unsure (1)..(397): unsure at all n locations
acgacctcttggntattgaatgtgtgccccctatattggtgtatgtctcttaaggccagcgctgatttatctttacattcccctttggtaaagaaggggaaaaggagagcatttcggtgcttgcattatgaaaatgcgcgtgaggaccatgtccatattcttgatgatacttctactgttgaacatcagtccaggttgctgctgaaagttaagtgcaaatcattaaggtcttatttcttaactattgacaaattaattcaaggtatctatgagacaatccacaacagcattattgcgtcttgggttgatatccttttgtaacttcccttttctgcgtaagatggtgtcatgggtgtacacgtatagcattccaagcccatacgtgaatgtgacatga

SEQ ID NO: 42510 - DNA, 422 bp, Oryza sativa
acagacacagagaagaggagtcactgggacgcgacatacacgtgacgcccaactaataggcccacaggcacaaggaagttggactgtagctattatgtcaaatccatccaaataacattagctgtctcggcataataagattgtacctctttgatggttcgaacagtgtacagtgactcaaatgttatatttctctgctgcattagttccttcagaaatccagttaagttgagggcaccttgccccacatgttcaacacctatctcatgcattaccctaccttgaaatactgtcgaaagaacatgtataagaatggaaacagtgagtcatttggtattttggtacactatgctgatacatccacattgaaaatattcggcaagatatccatgctcagctcttatataagctaaggtagtcta

SEQ ID NO: 42511 - DNA, 467 bp, Oryza sativa
gtcacctgcggcatgcaagcttaggatacctttgacgatggatgaatgagcttctttggctgccaagggaaagaacttcttgggctgattcagttcatattatgtacacaagaaacataatagtgcagatccaactcaaagccttgcagaccatactataaatgccctaaatgccctactgctctttatttatcagtgcttataagcttctccagatgcaggtatccctcccaatgcatatgaagtggaacatatctatgtaagttttgttttgcctcgatacgaatcaattactttttttgaacatcatacgaagtcattgttacctatttagaactggaattttaacaaagattgtcctatgctgcagccatgggactattttttatatacaccaacttgacgaggtgcattattctctgtcgctaatttggtcctcttcttactagaggtaactaagaaaacta

SEQ ID NO: 42512 - DNA, 377 bp, Oryza sativa
ctaagcttgacttcattcttgccaacatgacgatgtacttggactggtgaccactaacccatggtgtcattcattagcctcatcgtagtgggacctattccttgtcacacctcataggagaacatttgtctcaacaaatcggttgtcatccttcacttgatgaccaaccggttgcatatgaaagatatggatatgttcgttgagtattcattaacatcacaagtgtcatatactcgtatgcatgctcaagtgcaaagatccgatataaataatatgtgaacaacatggatctagaacatgcacaattaatgtataggatttgctcccactatatatatgcatacaaataaatatacaatagatgcaagtgtttgcat

SEQ ID NO: 42513 - DNA, 92 bp, Oryza sativa
  unsure (1)..(92): unsure at all n locations
agcttataataagattaatgctgatccctntgtacatcaatatgctacacagttaatcgacattccctcgatagactgtaatgactcgcata

SEQ ID NO: 42514 - DNA, 286 bp, Oryza sativa
aactataccatgtatatgcataagttgacaaagatagaggaaacatacttatactaagcaaatcattactaccggccttaccacattgatcaataaattggccgatattgctccattgttgttctagtatcctcacctgtgaattttatgaagatgggcacctcaaatccttgtgggtatgggaccgaatctacatgttcaagataccgcccttaatatgaatgcatagctacttttgaatctaaatttctactatcccgcaagaaattgtcatcatctttttcat

SEQ ID NO: 42515 - DNA, 378 bp, Oryza sativa
  unsure (1)..(378): unsure at all n locations
tgcaaccttgctactcagctgctctaagctcacttcttctcattaaacgtgcttcagacanacatcaagggccatggagctctctaacctgacgaggcgccatctgccactgctcctgctcttcctgctggcangatcctcctccatggctttgccagagcatcctgcaatggacagagtgagatggcaagtcgacaaggtcaaccggtggggccattccatcgggctcgtcatgtcgtacatcgatgaggccactgctcttgaatcctccggctacttcagaccttggcatgtcctccccttcgttgacctctacggtaactccgggccctccattatcaacccacatgcttgaatggataagtattggcggctttc

SEQ ID NO: 42516 - DNA, 288 bp, Oryza sativa
acatgtgggcgggaaaggagacacgctcacacaatttatgagcttatacatttgagagcaaccatgggtatctagtatgcatttcatcctggaacgatgactgtgtgtataagctaggtcaaaaaaccggcgaaatttatggacgaaccaaccacagagtcaagaaaagtcaaagacttgaatgtacgagatattcatgatcgagctcttactacaaacaatctaaattaggtgacgtcagaaaataataatgcaaatgtcaaacattcaccatttggtcttgtaata

SEQ ID NO: 42517 - DNA, 344 bp, Oryza sativa
cgaatgacacgtgggccacccttcgccaggaaaaccacccaatcacagagcaacacgtacccctgctgattcctagtacctgcataacctctgtagagagagagagagagagagaagaaggacaaagatgtaaggcaagtcataaaaagcaacgacgagctcctgctatacttctcaactgcctctgccttgtgctgtgtgcatcgtgcagctaagcacaagaagcaaacaagcagctagcacaaagtgtgattgatcttttgcagtttgctacgctacgtaacgtaccgagtagatcaaggagaaagaaagatagaaaagcttctttaatttggtcgtggatc

SEQ ID NO: 42518 - DNA, 345 bp, Oryza sativa
  unsure (1)..(345): unsure at all n locations
tcgcaatcaacttgagatggtgaaagctttattggctgctagatagacaggccggctactctagtatcacaaatagccctggaccttggcaaatgagcgatgattgaagataccaaactgatgattttgttctcggtgctttctggattggattacaggtgaattangacggcccagcccactgataaacttgagaatcgatcaggaggcacctgactcattcctttcctttaccactgacatcttgtgtctgcacaaatcaagagctggtctgtaagttagctgaacaaagttcaggctcatttggtcaccatggtttcaaaaaaggatattcataagtatata

SEQ ID NO: 42519 - DNA, 294 bp, Oryza sativa
  unsure (1)..(294): unsure at all n locations
atccttaagcaccgcaggctgcagctatctcttacgctcaggaagtggctgnctatcatcaccaccggctcgcctcgaccgccgccgactggtgtttccgcctgcacggctggcctattatgccgccgttgttgggcgtctacgtcttcaccgaccggcttgccttcgccgccgccgactggtgtcctcgcctgcacggctggcctattatgccgccgttgttgtgcgcctacatcttaaccgaccggcttgccttcgccgacgccgatcgattgctctactctgctacggctg

SEQ ID NO: 42520 - DNA, 408 bp, Oryza sativa
tctcggggttttggtctctgcccgaggttttgaggccatctgcttataagattcgagctatcgagcggatgcgcccccccagcatacttagggatgtgcattgcgtcaccggttgcatggccgccctaagtcgtttcatatcaaggctgtgagagaaggcgctacccttgtttaagctcctcaagcgctcgtggccgttcacttggacggaggaagctgataatgccctcgtccggttgaaggcatatctcagctctcctccggttctagtcgccccggagccaaatgagtccctgctactttacttatcagcgaccccccaagtagttagtgcagcgttggttgtggagcgcgatgaggactaatcttattctgcgcaccctcactctgggccgacttgtcttggta

SEQ ID NO: 42521 - DNA, 415 bp, Oryza sativa
  unsure (1)..(415): unsure at all n locations
caagcttatgaccaaccagtcttgtctttttgggtgagncngacctctactatgaatntgtcctagtaccaaatttggttgtctacaacgctgctaaccgtgtcattgggggactcagggtgttcagccgccaaaacaaatcagacgataaattcttgttcaagaccacgggaggaatcagagtgctcaagctgtcttcaaccctggagctgctgtattttctgaacgcggtgatcgtgatgctgtgcctctccgtcatcctcacggtcgtcctaacccacgtattcccgaaaaaacggtacgtgccgctggtgctggctgccctgctcgtgctgctagccaggttccccatcatctggctcctcaaacgagcgaacagaccatggtcagggcgccgcgtcgtcgcgatagtact

SEQ ID NO: 42522 - DNA, 433 bp, Oryza sativa
tatacttcaattgtgaatggagagagttctccattatatttctaatgcatatgacgagtctcgtaatttaaaagatgcattgttggttaaagagcaattgcattgatattttcgtcacgaacaccatcattcccatcttatagttcggttggctgactaagtcaaacattgcataaatgtcattgttgatgctaatgatgtgtctgacatggcaatggcatcaaccacaatacataatgccaacaaaataaatcaaccctccttgatgatgggcctgataccagatataggtggttgatccctttgcttctctctgcacatagcattgtaatttggcggtggcagatttacaaacttgttagaggctatatgaaaccaacgtgccttgcttgagaatatattatatgcacacaatattgccgtgttcatagcg

SEQ ID NO: 42523 - DNA, 399 bp, Oryza sativa
  unsure (1)..(399): unsure at all n locations
agctntgccatacgtatgccgatagtgccatatgtgctcaactgcctctacaatagctgcaggagacaatgttggttccgctctaacaaatgcctgcaatctgttacctataaacctcgaggttagctgcaagtgcttgccagttgcttccacactagagcgctctttcttgcacgaatctgccattcgtagtaacgatcaaggcaagccacagtgtacttaacagatgcattggactccttaacatggaatgggcggtgcacccggatagagtagctctgcaaccatattttcaactcatccatggatcaaaattctaatcccttcctcggttcctcccccattgcatcgaaggctccatcgcattgtggatcaccatctgcaacagcaaggcttcca

SEQ ID NO: 42524 - DNA, 389 bp, Oryza sativa
  unsure (1)..(389): unsure at all n locations
acttgcatatcttttacaagcctgagacctatcatagactgttctagttttaatactnagggttacattaaacaacgacggttatgtccaccatccattgtgataccaaggatagcttcccgccattgagtcgtcatggttttctgaggacgcccaccttcccgcctctcatgaagtggctccatcagcataaaatcatcatgcaataacccatcccacacaagttaagaatctagagtctagccaagtgtaatacacgtcctagtgctcaataaccgcaatcacggctattcgaatagatttggtttacttacactatagtggatgtacactttacccgcactccgcgactgccgaacacatgagcctcgtcccaacacatgagacgc

SEQ ID NO: 42525 - DNA, 419 bp, Oryza sativa
  unsure (1)..(419): unsure at all n locations
agcttgctccataatgcgagacagccttactcctctcagaattcagatggnggtcatcatctcaacaaacatgccagtctccatcatgtttttgcaaagaacttggtgtcatcactcgtcagcaatcactggatcacatattctgcaactgtagctgaacctcatcatctcatacaaatgtatactgtatcagcaatcacgtttgctgctaaggacttgatgtcttcctctttatcagttatctctatttttctgcgctttgaccgatattagtactgaactgggaacatcatatccaactggatgattatccagagtcacattatagcacaaatcatttgattgatgggcccattgatggctaccggaaaatcattttcctggtcgtactttaagatctaagcttaattacactgaca

SEQ ID NO: 42526 - DNA, 315 bp, Oryza sativa
gcggtctcaaggttgctcactctatcgaactcctcttggctcaaagagctgaacaaagcattcatggcttgagcattgagttggagattgcggtgatcaatctctgtcaatggcgtgccagtgatatctaagcctacatccacaaaactgcaaatatggaagctcatagctctgatgtgagtagacattttaattttccaagtagagtagttagtgctatggagcatgggtgtcttccctacatgattcacctcgttcgacatcttctctctatgcggtgaagcccaaacaagagagaccaagctctgatatcac

SEQ ID NO: 42527 - DNA, 412 bp, Oryza sativa
agctctggtccatcgtctatggtgctagatattgatccaggcggatttgcttttcctttccccatgcatgagaagatgggtttgattgatcctggcggcctatttttcttctcacatggaggtctatgtggattcgagcttgccggtaaactccgcctcccgcgcagccctttccccatactcgctatcgacctactcttgttgcgcggtccctccccaagccagggccctaggtgaacttcgtaatataggacctcacaatgaaatatacttttatttataatatatacttttataaatcatatatcattgaaaatgatgcgactaaacattataaacacctataattattatgtatatttatcaatgagaacaagataatattctagcccaattttcaaactaaatagat

SEQ ID NO: 42528 - DNA, 457 bp, Oryza sativa
ttgttccctccacaacctccagtgtgctagccgctagattatgacactaggggtctgtttggttgatgacctgagttatgtgcctgagttctacctgaccagacatgttgaaaattagttgtttggttgatgatccaagcctgagtaaaatatattaaacataaaaagtacacttgtgtgagttaggatgattaaaagtgttggtagtagtcacatcaatgaataatctatgaagaagaatcatgcatgcaccgtgcctgcatcatgcgtccattttcggtggcctgagtcaggcaagtcttcatggagacaaccaaacaaagttgtgtgttgctcatgcttgctacaggccatgcatatctccatcagggtatcaaccaaacagaccctatgtcattggcctcttcttcactagtcgtcgttctactcgacaacggcgacgatggtgatggtggtc

SEQ ID NO: 42529 - DNA, 364 bp, Oryza sativa
  unsure (1)..(364): unsure at all n locations
agctctatacgcattatagtctcaagagacgtcanttagngcagtccctatcaacnattgatctctacttataagttactccctccatcccaaaatgtttgatgccattgaattntctaaaaatatttgaccgctcgtcttatttaaaaaatttaagtaatttattgttaaatatacctttatgtatacatatagctccacatattccatataagtttttgaataagacgaacggtcaaacatgtttaaaaaagtcaacggcgttaaacatttagggaaggagggagtataacgataccaccgttctcatgcatatgggccacaattttctaagttccccgagttaaacctatccatgtactga

SEQ ID NO: 42530 - DNA, 363 bp, Oryza sativa
atttctataaaattcatatatactaagcccgatatgaagtaaaccaaagttctatgcatgggattcttacagtatttcctagttaacagtttttgtgaatatatttttagtatggtcattcgctgatgtcaagttccataatatttttagtatggtggctgtcgtggaattcgactgcacaaataatcctcgatttttataggcccttagttgcaggaagtttgcataaacgtctgagaaaacgggttatagaccgtctgcacaaatgtaccggtttcagttgcgaggccattatgataaatacttatcgcaccactaaaactgtggtctttgatagcagatagcgttataggttacgatata

SEQ ID NO: 42531 - DNA, 448 bp, Oryza sativa
  unsure (1)..(448): unsure at all n locations
agctnggtttgatgatgacctatangccnctaatgccgaanagcaaggggacatgtccggcagcccanaaagcccatcaccattattcttatcacacggagtcacggacgcgtataaagaaaaggatgtgactaggtaatgcatggtagtgcgttagtcttaaccggagaccactctatcccatatataaatccctcttaagcccatagtgcatgtcttttttaaacctttttaatgacttatatcttttaaatcacatattattttaaagatctatttgcattattgtactctactcaaaatatgtgacaaaatgagatccatgttaaatatattcaaatattctattaatttaaaagtaatttatttaaattgtagaagtaacttagatatacaatagatgtaactctctataacattagaagtgactgagttgaagtaacaaact

SEQ ID NO: 42532 - DNA, 275 bp, Oryza sativa
actcattgctgttgccaggagaatttttgtttctaatcctggaagatactggctgtgtttcacaatgtgttttacatcataattgcatacagactttcgggaaagtttcacttgagatcatggttttgccttacattgatatctgaaccttcgtcagcataaattatctggagggtcaaacaatctgtttctgttcttcactttgaataaacagatggtttcttttgcacatgcaactcattggtagctcccatgttaagttagatatgacgata

SEQ ID NO: 42533 - DNA, 518 bp, Oryza sativa
  unsure (1)..(518): unsure at all n locations
aagcttgtgatgatatataaagtcgttgacaaattgtttcngtttataccttggnnataaacataggcgagagatcaaatgaggcacaaggaggttgattctacgacctcatagctttgatccccaagtatgtgatgtgcgcataggcaaaggttatatatgctagctatagaatggttttctctagtcattcttccccggttcttgtgtgtatagtgtgttagattcggaatattgcttataatagagcggccggtaactattcaatgatggggtgctcatgacagcgagccttgctggatagaatcttgtgaccatattatgttcataatgccatgtaggtcgtattatggtagggctttgtcttagccaaagtgtcggtgatgtttatctcaatagtcctaaacaacagatagaatgtgggcaaactcctatataggttgggtagcctcatgctgttatgtccggaggagtattctttggagtgagagccctttctccctgagaaaagtgtgttc

SEQ ID NO: 42534 - DNA, 339 bp, Oryza sativa
ctaagcttgtgctccaagcgacctactcggtcccaagcttggatgccttccaacttacctccaatgattcttgctctaccaaacatccaccagtatgtagcactaacttcactatgacttctttccttgcggaggcaatgtatcaaccttcacaaacatctacatggcacaatacactccacttggttggtcttgggtttctacttctccttctttattacaacctcagttctcaacttgagcacacaactcccatacttttattcacacttactaacttgaaacactgagagggggagacttatgcggcatctgatttttctttcaacttcctaaacc

SEQ ID NO: 42535 - DNA, 462 bp, Oryza sativa
  unsure (1)..(462): unsure at all n locations
agcttncatgcttacatctgtgcttatgaanataatctatgagcagngntcatcatatctagcttcttcccaggtgaccctaaaaaatatgaacaagtgtacaaaatatgttcttatttatgcatcacaaatcagcaccattcatcacgtgcatccttcacatttgcactattcatcagaaatgaccagttgcaaatagtttgaccaagtttgcatttgtcggtacaaatggatgaacaaggaacaagaataaaacaagtgcagaaggacaatttaactcatgtcattgcagcatggaaaacaagtgcagaaggatgaaatntaacatgaggcagagatcatgcaacaataatatggtgtccactacacattaaccatcacatagccatatgtgcatatataaatttggtgtcccactaccaccttagtcagagagtaaccaatatcctaccaaataaaatc

SEQ ID NO: 42536 - DNA, 457 bp, Oryza sativa
  unsure (1)..(457): unsure at all n locations
atacgaacatgccacataatcatccattagcaatatttcatcttaaagctaatggaagnatccatatcatctatgatttattactttatagagcttaacattcaagcacatcaaatcatcatccgcacatcattgtccctatgttttaacatattcatatagtactgttacaatatctaggatagattcatccatgcattctgcaacatcgtgcgggaatcatctagtagtttataagaaaatgatgtccaacatattgctaagcttataatggttttaaacttgccataaagcaccataaagactctaaaaacatttatattgtatacttatacttttaaacttgtctcatgtactatcacatgtccaaaagcatcgacatcctaccaagaagtgatgtggcatgcctacgcggagatgatgtgatgtgtgagaacacaccatcgtgcattcactt

SEQ ID NO: 42537 - DNA, 457 bp, Oryza sativa
  unsure (1)..(457): unsure at all n locations
agcttcgccaagtcatcgtcactgaggattttgtgacgagggatatttcaactactttggatctgggaagtctaacctgaccagagtacgtgccccgacaagatcggaaccatcatcgtcgtcaacttggtctatcgagatcattcaagcctcaagctctgcgacgtaccaaaagatgtcagatcgcatgatatcgaacgagtacgcagcaaggtaattggtagagtggttttttaaattgatctanctaattcgtagatacatccggcatgtatctacaaagataagcaatattttatatgcaatttactgtacctatttagatcatacagcattgtcatatcaataatttattatgtttacctagagcatgttctttataccatatctattgtacaaatgtccccgatgttaaatcgactacggattaacgctaggggctcgctttgtatttttt

SEQ ID NO: 42538 - DNA, 428 bp, Oryza sativa
gacacttatatactcaagcttgtggagtgtggtggcggatatgttgtgatagcacttgcttttataactctgacgtgtgtatatgaggcgtgtgcaccataaagggagacaaacggtgtgtggtgtgtgaatagtcttgctgggatggcggttaatgagatgggtagcctgcgtggaaggcttccacccaaatgggcggtgggaggctttcctgaaacatgatggagcgaactatgttattgatggaacatagcatgcgctcaaccataccgttttggggggaggtgtgggggcacatctaacggtgagagacaccgttggtgataaataatactttgggcgctagatttgtctaactcacgaccattgtcgcactcgattgcttcaatggttggtgagaactgggtttacacaaatgcacaaaattg

SEQ ID NO: 42539 - DNA, 445 bp, Oryza sativa
agcttcactgaggcgacgaaccgccggttggttgtgcctgcccccacggagataaccgacggcgcctcgttgacgacagtgctcggtcccgggccggtgttgccgccggccgcgctgaccagcacgccatgcatggcagcgctgtatcctccgagcgagaccgggtcgtccgagaagtcgacggtctgctcgtcgccgagcgacagcgacaggatgtcgacgccgtcctcgagggcgtcgtccaccgccgccagtatgtcgtcgcgggcgcagcccttctccacgtagcacacctggtagaaggcgatgtgcgcgcggtgggccatgccgcccgccgtgccgaccgcgtatccggagacgttggcgccgggcacgaacgagccggccgccgcgctggacgtgtgcgttccgtgctgcccctcgttgatcggcaggaccgggtcgc

SEQ ID NO: 42540 - DNA, 418 bp, Oryza sativa
  unsure (1)..(418): unsure at all n locations
tggcgcacacgaaagaggacgagggcngtgattgacactctcgcaccctacctggcgcgccagatgacggagcgtggggctcctcaccgggagaccgcgcatgcctccctttgccggttcggccgggggcgctaagtgagattcttcgccctcgatctaaggaatgtcagcgagaaaggaagcgcacaagacacggtcgacgtatacaggttcgggccgctgagaagcgtatcaccctactcctgtgttctggtggatctgtgtgtgaaggaatacagagtgccggagagccagacagagtttccgctctagcccaccgtcttcctcccttctctcttaagcactggcctcctttttatctggtcaggggtcaccacatgggcctctagctgctaagaaaggaacatgcttttacaat

SEQ ID NO: 42541 - DNA, 393 bp, Oryza sativa
gtcctcaacgcattgcaatggcccccgcccaacatggacttcttgagctgcccaaatggtgagtcttgtgctcaagccgcccccgaccgttttgctggaatctcaccaaatcatgttcaatttcagaaactcctatacatctcggatcttacgatagatagcgcagccatagagacaaagctatcaaaatgcgtatcgaaagtgcttggtggttgtgaagaacatggacatgtgaactatgatgcctccccgccatgtgagcacatattgttcctgaacatgtgcctcctcgacaccaatcattgtttttcatcagggcactttgcgtgctgccccttgccgtatcatatgatctcatgcgccgcggacgcctccttcgcgcaattcttatgt

SEQ ID NO: 42542 - DNA, 167 bp, Oryza sativa
  unsure (1)..(167): unsure at all n locations
atgggaaagaaagaagaatatgtgtatatagnggttntccttaattagtattccctccgtctcataatataagagattctgagtctttgctcgcaacgtttgaccactcgccttattcaacaaatccctaaatattactcagttccagtccgacctaccttatcact

SEQ ID NO: 42543 - DNA, 292 bp, Oryza sativa
aaagcaagccataaacttgagctattaatcggataaaggtcttaaatccctactctcacttgactttagatgccgcgttacaagcctgagtacctgtatggtgtcgacggttctgtccagaagttgacgacgaatgccctttgccataagatttgagactgcccctcttatgcccagattcctcatgatcgccatgaagagaagtgccgagtcaaagtcaccttgaacagtaataggaagatatcccctcagcgacggctgaagctggacgaagaaactacatccatgcatg

SEQ ID NO: 42544 - DNA, 398 bp, Oryza sativa
tcccggaccacgtcttgaacgagtcgtttcgcctgtccctggacatcttccggccgccgcggttcgatgtcgcgcggcgtgccggcttgccgccagggatcggctgcgaccggaacgcggcttgtccggctgcacgaacctgacgttattgtttcttcccttgccctgcgccgccgtccgtcgccgcttgctctgccaccgtcgcggcgggcttgcctgctgccacgcaccatcagctgaaggggaagaagaaggggagagaaagagagagaggagagagagagggaggagaaagaatgaaggagacaggggggcccaacgtcagtgggtccgcattttcttttgtgtgaatgattaatgggtcccacgcatattcttttaattctaatgtcacttaa

SEQ ID NO: 42545 - DNA, 353 bp, Oryza sativa
tcttaatttccttaagagtagcaggttagatagatagagttctcttctttaaggcccaatttgcatttggctaatactgagaacaagacctaccgaagaattagtccaagctggtaattacattcttataaaatggtgatatgcctcaaacgcatcaattgaccatgcttaatatataacagcgaaagtgaacaaggattagctcttgctttcatagataaatatattgatgaatatagtgcatcctaactatctttacattatactgattctggtatactgaattattaatagtgcttgtcgtggagctacccaaacttgcttctgaatcactaatccattgatcataacta

SEQ ID NO: 42546 - DNA, 437 bp, Oryza sativa
  unsure (1)..(437): unsure at all n locations
agcttggactaagtattttatcttgnnaattcttctttgaaaagtggngcatggaaaggagagagttgcacgtgttgagttaatttgcttctttatttgtaaattatgtgttctattgactttgcgatatggtttttcttttgatttatatgctgagtttttgtggtgagaagaaggatgaatagatgaagctttatgctccttttgaatccatctccctcttgagcgcaaaagatgttcttgttgatttgccagtttttcttttcttcatggaaatatttggagggccttggtcagtgacttctacaaagtatgggattttgcttatggagaaacaacacagcattaacggaaggaatccaatataccatcattaatttggaagctgacgggcactggatcaatagcacagtgcgcagttagcttttttttttttt

SEQ ID NO: 42547 - DNA, 463 bp, Oryza sativa
tgttcttgatgagctacgtttcttgtttagtcctcaacttctggtcttctcatctcctttctgtatctggcctacctttgtgctgtagctggttgagagtttggtgggtatctcatcttgctcgtccttagcatgttgatgtctgttaccaccattcatttgatgatctttctcttctttgccttcttgcatcttcacttcagctggtccagtggaagcttcagaagccaatgagtcgtaatctccatcatcgtttgcatggcacttgttttctttccctctgcgcctctcattgctaaatccgctgccatcttctacgttacttccttcactgacaattgctctcacgtcatcactatgtgtggtggatgccaggtacatcgtccacccggattcattactgttgcattcctcaccatcatcctcaatgagccgatgggattccatcacaggagatgcggga

SEQ ID NO: 42548 - DNA, 435 bp, Oryza sativa
  unsure (1)..(435): unsure at all n locations
tagcttgatggagcatagatttatngatacttcatcggncacttgtgaaactatttcggttacatctatccctaagaccggaattgttagtgatcttgtccctgttagttctattgatgttggcaaaaagaaagggaaaagtgttattattggggatcctccgcccaagaataggatcaaaaatgcgaaggccgaagatcataaagttgcaaagaatgagtcatctatttcccaaaagaccaaaaagccgaagctcacttttgagatgcttatggctaagtacaagaaaggattagccggtcaacgatttgataatcaaactagtgattcanaaagaccaagatcatctcgtanggagagaattgatcaaacaccaaagaaatcggagccatcaactataccaactccatacaaacctccggttgtgatgccatg

SEQ ID NO: 42549 - DNA, 268 bp, Oryza sativa
  unsure (1)..(268): unsure at all n locations
tctgagaggacctatgagtattctgggcgtttctaanccgtgccgtcccgagggaaccaaatagaactggaccggcctgtgacggacggcccatggccaccttgcgtgcgggcgagcgctcactcccctcccccatgccgtaacctgggcctgggccgggaaagccgccgccgcgcgctccccacttgggccgctttcggcccggccgccgtccgacgtccgatagatttggtattgacagacagtcgatcactgcacatactggctc

SEQ ID NO: 42550 - DNA, 455 bp, Oryza sativa
  unsure (1)..(455): unsure at all n locations
agcttcctccaacaggtcccaactcacaagattcatcattctgcgtgcacatnttggccaaacatggtagtatggaacacgacaccagtctgaccacgccatcgaacggcttggattgggagcctcaaccacttccgtagctagataggcagcaccgtgcctggaacgcacacgcgatgagctgcttcgcctcgcctccacacccgcgattccatcgatctctgccgcccgcgtcgctacacgttcatcatcgccccagcgatataccaagatatggttaactatgctcctcagggagaggagattagttacggttggtttgatgcagcgctgcacggcgccgtcggcgaaaaactagtaaaaaagacggcgtctttagcgggtgcacacgcctgttaaaagttaataatctcagcgatcggtgatcagctggtcttttgctacgtaccgtccag

SEQ ID NO: 42551 - DNA, 461 bp, Oryza sativa
  unsure (1)..(461): unsure at all n locations
acctgcggcatgctactatatatttcttgggcgcaaaattcttctttattgcacctacgngggccacgtggctcatgcgaactggagtactcgaggcccatgcatcctgttattctgtcacatttctatttctcgctgtgcccagcacactactgcgctgatggttcttctattgctaacacaccaagaccatggttataatttcaacttcttatttcttcaaatttataactttttcggcacatcgaactttgctacctacacaaaatttaaactttttcatcatatcgtcgctatttctttaaactttcaatcttgacgcgaaattaaacacagctcacatcattgaaaccgagactcatcggtgctcttatcatttccttcgctttgttcgcaagctgcccaaagccattccaaagaatatccataataatatccgccccaaatcatttttacaacaa

SEQ ID NO: 42552 - DNA, 334 bp, Oryza sativa
gcttgccattaccatggagtgctcttgtgatcacaatgacaccacccatgctcatatgaaccttatctgcattgaattgaactcgtaaactattctggggctaagttaaatataatttgattagctccgatgtgaagtgattttgttctgctaaacatattgtcaagtaaaacttaagataatttacctggttgatattgcagatttctgtacgaatatgagatgtttttaattggaatatggtttgactgatggggtctgaatattaaatgtgttttattaggtattcttggaagtgtagattgtctgggttcagtaatcattagctcacaat

SEQ ID NO: 42553 - DNA, 433 bp, Oryza sativa
agcttcacacatccggctgtagtatggagcttggtttatacaggacactcatcaaacagagactgcgtggcaatgctcgatggcaacaaaatcgaccaggctctatttggcccaagttactatttctttgaaaaaaaaagcgaccctggctgctcctgagttttagctttcatttcattgaatcaagaacattatagtatgcccttttcagcccttgagctccatcggtatcatataatactgttgaacatcccatggcagcataatagattatgatggtactatactatcggaggatgaatgagctgtcgccagataagacgggcttgcctttgcagaagagtatggatgcctatttcttgagagtagcgcgattacacgagataatggtgataagtgctttgaagaactcgcactaaaggtatgcctaaaa

SEQ ID NO: 42554 - DNA, 366 bp, Oryza sativa
cgctttcctccatttattcattgcctatgttctcttatacaaataataagatttgaattctacacttgatactacatatagtagagcatcttgttctgcaagcatgacctgctgcatgcattttgcaaacatagttctcattcctaaaacattaatcagcacttcctttatcaaaaaataaaattgatcagcaataaatggataactgtatacaaaaagacgcataactctattacttatgtaataaaaaacaatggatactcatatacttgaggacagaccacagccagcctatttttgaaacaagattacagcataatgaaatgtgtggtacttcctccgtttcacaatgtaagacattctagc

SEQ ID NO: 42555 - DNA, 342 bp, Oryza sativa
  unsure (1)..(342): unsure at all n locations
cttagtcctaattaagatactaaatctgcattccaacaaagtgtgatctctnttttgttcttagnagccaggaatggaatcatagcattacaggtttgaattactttctgcaacttagaaaggtgtttactccatattctcaaaccctttctcaaagctttcaatgtagcagaaatatttctagctgcattagaatcatttccatgattgggccaaattaaatctacaagctcaaagaagccctcatggtcaacccaaaaattttcaaatctgaaaatatttgcttgtggaatatcagtaccaatttgcacaacacagggggtataatgagagatatatcta

SEQ ID NO: 42556 - DNA, 391 bp, Oryza sativa
  unsure (1)..(391): unsure at all n locations
agcttatgaaggacccatgttaagagtgactcgttgtgagttgtgcacattntgntgttgattagggagacctatggtctcatttccgtaaacccataatctgttaggaatcaaatagcctagcgattgatggcgaagaaaatcaagtgatcaaccaaagaggcatttgttcggactaagagtttcagatgtgtctcttcggatcaaaggcaacaatcgtcagtctagcttttgacgcactacttcaaggtttctctgaaagaccgcacgcccaagcacctcattgccccagaagcatcctcaacacccggagcgaagagtaccttggtgagaaaggtcgaatggtgattaacggaacagatccgaacagatggttggctactgggaaatt

SEQ ID NO: 42557 - DNA, 446 bp, Oryza sativa
  unsure (1)..(446): unsure at all n locations
ggacatcggtcgctatataattagatgcttggatatatgttatctacattagcaaacttaacaatctgctatatatcatgtagtagtaacaaagtgtgtaaagccattatctaaaaacataatgtaagctcaagcctccctttcagaagcaattcttctgtcccccaattattttatttcttcagacatatcgatcgagctgaatgcgtntgttngcatgcagagtgtacacacaacgatacgacgagattcagtcaaaagtggattcgaacattccatcagatcaagcgtagatgcatgcagttggagagcatgcatgcgtccatggatgccaaccagttggtaggagtactgaactaccaatcaagctatataatatactggctagagctagcttcaacctttgctactggcttgtactaccaaatctaccattactgtatatg

SEQ ID NO: 42558 - DNA, 361 bp, Oryza sativa
aaaagccaaggccggccctgtggctatgtatccgatgcgatcgctggaggcccatgatggtggggggccaacacctaatactagtaatctagtatctgcctatggcctacctagaagcagaaatgcccgaaagacgagaagagtgcaacgtcatatgcaactcgacaaacgacatcgcattgcacagggcacaaccgtacaggcgcacagaagtgcagattcgataaaacagccctcacctatatgtggagacgttgccttcgctttattgcaggtggaggatgcgtaacgcaagaatatgtaaagtgcgtatctaccaagcactcatggcggcgctgctaaatatggcgggtaatataat

SEQ ID NO: 42559 - DNA, 458 bp, Oryza sativa
  unsure (1)..(458): unsure at all n locations
ggtggatgtagtagacgctagtgagcgctgcttggtcactcattctgcaagcgaacagcaccatgcctcgtccttcaatccagactctcgacgcatcaccaaacttgacagtgccgcgcacggtggtgtgaagctcggagaacacatcacggtagcccgtcatgtgatttgaagcgcccgtgtcaaggatccagtctagatcaacgggctttccttcatcctgaagagaaacgtgagcacgttcctccttcagtgtcacctccccgtcagtaatgacaggatcggtagcatgggcaagctcgcacactngcgccatcagcagtgtctgctccccttcgtccgcggcttgagcaggctcggtgatgagaaggtttgcctgagaccagttctcgcggtctcgcttcgccttgcaacagtccttggcccagtgaccaagtttgccacagtaccggcatttg

SEQ ID NO: 42560 - DNA, 443 bp, Oryza sativa
  unsure (1)..(443): unsure at all n locations
atcttaatccatgcataaagttgccttatttggttagtaacttntaagcaataacttgtggaattaaataattgtaattcaagtcacagattatagtttcatgtgatcaagaatgcttacatgcttcaccttcttatctgtgagctagcattacttactctaatgcttactttggcaggcacattgcagcagagtgttcttccaaagatctctgctggaactgcaaagaacctggccacatggctaacagctgcccaaatgaaaggatatgccgcaactgtggcaagtcgggtcacattgcaagagaatgcagtgctccaccaatgctgccaggtgaaatgatgctntgcagcaactgctacaaaccatggcaccttgctgcggaatgcaccaatgagaatgcctgccacaactgtangaagagtggccatcttgctcgtaac

SEQ ID NO: 42561 - DNA, 439 bp, Oryza sativa
  unsure (1)..(439): unsure at all n locations
actaagcttgattataataatttctaaaatatttatcttanaaattttttaaaccatatgtgtagattagtcttaaaaagtacttcaataaaatcatatatttgatgatatttctatatatattataatagaaaatagttatcaaagctatttttttaagaccgtgtccttattcaaaacgataagtattatcaacatggagggagtatcatcagatgccatctcttcttaaacttagccacttctttaattagcagtatacttcctctgagtctacatcaaatagtagctaaaagaagaaataattatattagcatttgatgaagttagggtttcttatatcggttcgtgttgatgattaaaaataaacttatttagatgaaagtataaaattctaccctacgaacagaacccaaactgatttataaatggttctttt

SEQ ID NO: 42562 - DNA, 417 bp, Oryza sativa
agcttcggaggatccctatgcctattaccatgattggccgattatttaagactgtgcctgcgggcttatgatgtaataattcgtactagactctcgtgtatgtgcacttgatatttcagctatgagttcgtgtgtaccagactacttgatccatggaaatggtactgtttacacgatttattcctgttataaaaacggtggtccacaggtctttataccccctaccccctaataaacatttagagcccccataataccccgtataattctaatccatatatttatagatgaggggctaatatagattttgtttgaggttgtacaacgcccaaaatgctaattaagcttaaaataatcctaaccgacccttaaattctcttagattctcgtgggcatgttggctctctacgtcatcat

SEQ ID NO: 42563 - DNA, 378 bp, Oryza sativa
  unsure (1)..(378): unsure at all n locations
tctcacgccaaccttggatgctcagaagttgtgatagtngttctgctctctacatgaactgaaagagctggtacaaatggtaggggagacggtggaacagtacaacgggcgcccctctacccttgtcaaaaacttatggcaacatgaatctcccttgatggtgccccttgctgaaatcaggtggcgagctctagggaaccaaaggggcggcactggctgcagcagcgcgcggatccaggatgaggtggagatatgctcatggtggatgccatcttggtcggtcacggatacacagcttccggcagatcgactgcgaccttgccactggcctacagtgagaccaggtatgcctaactccatggaggcaccgcggaatct

SEQ ID NO: 42564 - DNA, 438 bp, Oryza sativa
agctttatgctatcttgattaagctttttagtaagcaatccaacgcataaatatgcaagattaacattatcaaaaacaaaaatgaacccatgataccatgctaatgcccagttcaagagagtatcaagatggtaataaaacatagaacatgggcttttagctctatcacatttgcattttattccttttcggatttttgaagaaaactatagcacaatcgcgatggtacgcctaatcttatcagtcagcgagtgatgagggcgccaaacagtgtcatcaaatctcaaacaagttttccagttagagctcctgttacaggtagtctcagtgctatcttcagcactacttatgcgtaaacacactcagtagcctgtgacataagcagtggtaaaacacataaagcatagaaagaacataattgatgcacccatgaacaat

SEQ ID NO: 42565 - DNA, 427 bp, Oryza sativa
  unsure (1)..(427): unsure at all n locations
agcttatagaaatattatcganaagctaattataatttattaataaaacttttatatctatattattcacaatttaaaaaccaatactaaaaaatagactataataaaaaaggtaaaatcaacactaaaattgtggatgctgctgataaaccgagaaatcatatctattcaaaattcaccatgccgaacaaaatgggaggaatttcttttgtgtaaaccaatgggggagacttggcgtggcaactaaaaaaagagacatgttgtgggcacttgcatacaccaatatgatccaaatccatcactctctctccaaaagaaatcctggttgcttgtgcatgtgcgttaagtttggtcacctgttgctgcagccttgcaagttgctaactaccacttcatgcaaaccccagcataccatattaactgatct

SEQ ID NO: 42566 - DNA, 444 bp, Oryza sativa
tgaattaatcaatggcgattcaatggtggcaggatggcctgagcgcgcaggagaaggcgatcgacgactggcttcccatcacgtcgtccaggaacgccaagtggtggtactccgccttccacaatgtcaccgccatggtcggcgccggcgtcctcagcctcccctacgccatgtccgagctcggctggtcagtcctactatcttcttcatcttcatctgaacgaagaacacacgaacgaaccaagaaattaatctaactgaattcttgaatttttgcaggggacctggcatcgcggtgctgatcctgtcatggatcatcacgctctacacgctgtggcagatggtggagatgcacgagatggtgcccgggaagcggttcgacaggtaccacgagctctggcagcacgcgttcggcgagaagctgtgcctctggatcgtggtgcc

SEQ ID NO: 42567 - DNA, 227 bp, Oryza sativa
  unsure (1)..(227): unsure at all n locations
cgccttgtgaacgaccaccgggttcgccagccgctctgtatggatgacctcactgatgaacccggactccaaaagtctagccacctcctcgcggatgatagctngacgactcggagcctgccgccgcactttctgccggaccggtcttgcgcccggccgcacggcgagacggtgttcaatcaccttcctgtggaccccggcatatcccgtggactccatgcgaagac

SEQ ID NO: 42568 - DNA, 470 bp, Oryza sativa
  unsure (1)..(470): unsure at all n locations
gatacttnagacacctgctgcatcaagctttccagccaactacttcatgagttttggtatcacaaaagtcatctcatgccaaaggctgcggcgcactacaatttagacaactacaagaccatctattttgccaagcatcatgacaagtgaggtgcttgggatgttgtgactgcgcatgtttgttcagctgtaagcttcatacttgacaggttccatacttttgtaattaagtgtatttgtcgaagctgatacttacactgcagttctcatatggtgaattgctttgcttcattcttacactggtttatgttagtcttgtcagttgatcatagttaatccagtgcactcttcaaatttccctgcactgattattcagacttttgtgcattgaacattgaggtcatagtgctatctgtattactggattccagtatctagtacaataaaatgaaaaaaaggagggcagcttg

SEQ ID NO: 42569 - DNA, 330 bp, Oryza sativa
  unsure (1)..(330): unsure at all n locations
tttcaaccctggaccacagagaataaaattgtaatagtgagtcaccattagttggcattatggtcgcaaaagcaactcggcaaattggtgaaacttattccttgatatgtttataaggactctcttggagatagttacagataaaactgactacacacgactgcatgtgtatatatgaaaagcagaacatcattatggagaagtccaaaggtaactatgctacaatagtgaagtacaggtaaccacttaaccttaacataaagaacctatgaacttgactaacactgnagctacaacatatatccaaaaacgtcataacatgatgaaatt

SEQ ID NO: 42570 - DNA, 475 bp, Oryza sativa
  unsure (1)..(475): unsure at all n locations
cacctgcggcatgctagcttgtgagctaagatatgattccactatttcttttattatanatccaaatccccagtttatctgtatgattgttgctgggaactggcgatcctgctgtcactgggaaatgcttttttcttatagacctcccattttagatgttttcaattttttactctatttgctttgcatgtccaaaacttgttgaaaatcggttcttaaaatcgagaaaataaaatgaaatgtgacaaggactgagcttggtaactgcctcctaccaggccctgtcccaagaaacttgtcctgaaggggccttgctgtcttgaaaacttgttctaggtgaacatcattatatttgttgtaaccgttatgtacgtgcaaaactatatatgtattctcttatgtcttttaaggtaaatgaggtggtgtagaaaggtatgaagtattacttcagttttagctgatgatgataaagtga

SEQ ID NO: 42571 - DNA, 424 bp, Oryza sativa
  unsure (1)..(424): unsure at all n locations
gatactctananagaccaccagcaagcctgcaagcttctctcctctctcataactccggcttgattgtgaggcggcggnggggcgntcgtcgggatatagaccatggccggggggctagggttcggccgttcaaaaaggcggcggctgatgaggaggaggaggatgaggatggggtgaggagagatgtctacgccggcgaggaagcggctgatgccggacttcaagcggctgcagcaggacccgcccgccggaatcagcggcgcgccgcacgacaacaacatcatgctctggaacgccgtcatattcgggtagccacccacgcgccgtatccaccctcatttcaagcgctattgtttgtgtcccaggggatctcgcacagctcgtgattttcctattcgttgtggagttatttttttaattttt

SEQ ID NO: 42572 - DNA, 420 bp, Oryza sativa
caacttgtttctttgttttccttgcatgcatgtccagtaattgttctgtttgctgctcctatattctgcaagttatatatatacgtatgtatatactaatgcatctggggataaagcgagcatacattttctgttggacactatacatgaatgtaggtgacatagaatgatttatatatccactgtccaacaagaaaagtgagttggtttatatatctactttccaagatgatagcaaaaatgcaattagagttttcaaactttgttatagaaaaacaaccaatcacatcctgtgtgattacaccttggtttgctttgcttggaatgaattaaggatatatgtggataaggatacccttgcagtatatgcaacatactcaatgtatacactatgtggattaaggaaatgtatgtttatat

SEQ ID NO: 42573 - DNA, 450 bp, Oryza sativa
  unsure (1)..(450): unsure at all n locations
agcttgggctatcccatactagcacatgtgtttgtactgtatacgaaangaacngacattgagtgaagtccttatgtcggtttgggcacactctccccctatcggtacacaactaatcaccatatgtgcaccacttgaggcccaaacctaaaatccatgttttccatcattttatttatcaaaatcacaagtattaaagttctgtccagattatttcaaaatcaatttttcatatttgtaatgagcccataatgacaaggtagaccattctaagcatggctaagcattatagtaacctagtgactccaaaattcatatataaagtggtatagtcatattgttcctaaggttaggaatgagggatatggatatatgtggggtcaaggtgaatgcaaacaatatgagtttgtctaacaagtctaacaaaattttaatttattattgtacaat

SEQ ID NO: 42574 - DNA, 433 bp, Oryza sativa
  unsure (1)..(433): unsure at all n locations
tgtgaaacaaaacaagctcttgatttgactgtttgtttatctgcgtaaaaaagactgtatatccatttatctgaagacttatgtatgtttgaacaatgtacatcttcatttangtaagatttatacttatttgttattttctactacttgtattgaaccatttagagttatataccatattgtctaaccacatttatatcgaatcatattgtattgcattcggaaatttttttttggctatgcctaccctgtgttcaaatcctgngtccgccactgatcctgtgttcatatgtgcatataattntgtatacgatagatacatattagttgaattggattccttttaagaaataggtcacttggattaagggcataccaatgtatattgtataagtgtccatatagatgggacnacataaagaatctcaactat

SEQ ID NO: 42575 - DNA, 444 bp, Oryza sativa
agcttgtgggacaacatgacagcatgaatacttcataatgtgttcctataaaaagtagtgatgcctactacaggatgtgttccgagtatgttgtgatcctataaagttagtagtgatgtcttaagaaaaaaagaatatgcatacaatagaaagttgggatcctgctcgtgggacgatgtgacaacatgaacccacgaccttgaattcctcgtccccaacccctccccccaatcctccgccttgctcatcccgtcctaaccgcctagtctcatcaggaagcggcaggatcgacaatggcattggttgtgacaaaagagaccttccctaatgaagcgatggcggtggcatgaggaggggcagtcaagagcaatgtttgagctggcgtacacaaacaagatctatgaggttgtggaggaagccgtcatggataagcctaatgagatt

SEQ ID NO: 42576 - DNA, 432 bp, Oryza sativa
  unsure (1)..(432): unsure at all n locations
ntattntcaacctgcaaccacaaccagttgtgntgtaaccttagctacaagcttctcacctcttggagcggctatgatacattgagcaggctaaggaaggagcctacaagtgaacaactccgctgcatgcctgcactgcacctctgagctcaagaagggctcctcctctctaatctttgcacaggtgagcccatcttagcgaagagttgaactctgtaaccactaaaactacactatcagttagagaactaaaaagagcaaatgatgcagggtagagactgcatggaatgtggaagcatctcacctttgcagataaaatcatccaaaggaagtgtgagcctgtgagttgttgctgtggaattgatcacctaataagtctttgacctttgactcttgaacctttttctctctctttctcgagaaaagtgctct

SEQ ID NO: 42577 - DNA, 472 bp, Oryza sativa
  unsure (1)..(472): unsure at all n locations
tccttatagtcacctgangcatgctagcttggagcttatctatgtggcatgttgatactcatgaacaattcgggtgtgtatatatatataatactccctccgcttcatatgttgttcttactattttttgaagtttgatagaatttatagaaaaatatagcaacattcttgatacaaaacaaatatattatcaaaatatattcaatatatttgcttggtttggtattgtatggatgttcctggagatgtggtggatgctacgttgctgctgttactgagggccggtaagcacaaggcaacatgtttgtcgggggttgggaaattgtcactttctgctacaatgccgatgctagcgatgaacgtattagcacgagatgacgcgagcgctttaagataatggaaatttttgaatgaggtgtgacgtaatgtacatgctgtgtgtaatattgatgaatatctctgaatgaagtat

SEQ ID NO: 42578 - DNA, 388 bp, Oryza sativa
  unsure (1)..(388): unsure at all n locations
ngccgtgtagctctgcactatgatcagttctacaaagctctttatctccacaacaattgttgacaaagggctcttgataatttgacctgtttgaacattgaatgaaaccaatttaacctctaatgatgcaattacaaatgagcaatgttatgatctttggtgaggtaccacaatttccggtatgaaataaccatacccttttatactaatatactataaatatacctaaaggagaccaaaatttacactataaatgtcatacgtctcgttacctttttcaaagtaaaaaaagatctcgttataataactatgtgcgttatttatgtttgtgaaaaatgtacaacatgctgtactctctccattcatgaattactagcactattgacta

SEQ ID NO: 42579 - DNA, 198 bp, Oryza sativa
  unsure (1)..(198): unsure at all n locations
acctgctgcatgcaagctnttaggcacctctgattngatataactttcctatatatattcactagaaattgtggcatgacctcccctcttttttgaagaaattttgaagcttgctcgggctggaggaggaagaagacatatatacaggggtgggactttagtcccggttggtgttatgaaccggggctaaagatcgcc

SEQ ID NO: 42580 - DNA, 330 bp, Oryza sativa
  unsure (1)..(330): unsure at all n locations
catgagagnangaaagatatctaacacgagtcacataaatgtgacaaaactcaaaataatgtcaagcaatcatatgcataataaggtttatcaatgatatacttgcatatggccctggaggtataatatgaagtcaaacggaagaatgagcttcgtataacaattttatttttgaaaacaaactcccaagagtcataacagaagttgcaagaattcctttcatctgtaatcatctcaaataaagcaattacttagatgcataaggttccctaaacatggatggttgttcacaagcacaagttcagctgagaataatgaatatacaatatc

SEQ ID NO: 42581 - DNA, 391 bp, Oryza sativa
  unsure (1)..(391): unsure at all n locations
agcttcgagcaaccttgttctttgatccttgttcataagcacaccggagtgaagatacgatgaatatgaacggaagcacccccctancagacctaagagagtgcttggtagccacagccgcatgctcgtgaaacaaaagatggcttatatgctgagatagagggggctaaacctaggctacctatgtacacactaatgtccagactcttaaacggacggagctcacatagccacatctctgaataagacagttgtgtgatataacatatgactgaaagagagggatccttcggataccatgtacaaatatgtaaccgctaaatcgtttgcaccaagagaaggctgaaagcgaggctctgatctgaacaacaacactaacgcgcgacaaaca

SEQ ID NO: 42582 - DNA, 268 bp, Oryza sativa
cacccttgcactatattaacgtggatagcccctccgccttctacacacaatgactcgaagagagaaatatagctacatcctgtctcccatacatctccagaagagataggtgtgactacgctagctacactgctggtgatgtagtgggtgattgctcgatcacatcgaatgaagtatgagcggactgatgtgacctgctatcttagctgtagaatacaacagcctaacccatgtgaccgactgattagacacatacttgtaaccatac

SEQ ID NO: 42583 - DNA, 446 bp, Oryza sativa
  unsure (1)..(446): unsure at all n locations
agcttgacccatccatccattcgaacggttcttatctatacttttcaaactattgtttagaaaacttcctatatcgaaatttctattgaaaatcaaataaatttgtcttgtttatgatagttaatacataatcaattatacattaatcatttgtcttgttttacatgtactctttccattcgtaatataagagattttaggtggatgtgacatatctaataccacaaatctggacagttttcttaacaagattcaagattcgtagtactaggatgtgtcacatccatccaaaatcccttactgcctgtttggtaagagcagggaaggggaatttatatttttgggatggagggagtagctgataagctagacccatccatcaattcgaacgcagcctaaccaggcaaaaggattntagagtgttcctattggatgatttccatcac

SEQ ID NO: 42584 - DNA, 457 bp, Oryza sativa
  unsure (1)..(457): unsure at all n locations
ngatggcataacantagtgattgttcagtttatatcatttatganacgatcatgaataagctcggatacccagcccttgctgatgagtttcagttgcaagttttgagctcgatgacaatagcaattgtgcatgatgcgagatcaaacaatgtgacaaccacaattaagcacaaagagtgcaatggccatggaacatgaatgacggtatgataatagaaagcgagcttgatgatagtaatgtctaaagtggagagcaagctcaaggagatgacaacatgatagctcgaccactgtagcggacagacaagagagcatcagccgacaatagtcttgagtaatgttaaaagatggtaggtcacatgatctcacatgcagctattgttctaatcttgcgcaacaccatgtgacaattaatatatgcttaaagaataaaaacatatagataaatattaaatag

SEQ ID NO: 42585 - DNA, 422 bp, Oryza sativa
  unsure (1)..(422): unsure at all n locations
agcttctctacttatcagaatgctcaaatgtgcatcatatcgnnccttggagaccgatattcttgcaccctcctttgcaaccaatctaaattaacctctttactcattacacaaatttatatgggcctaccgggcctcaattacccgctttaccgaaaataggaccaaattggccatcgaaatactattgaaatcataactagaaagatcccctcccgataagcattgaatattcccatgacgccagtcaaacgttgtatcggccattgcaacctcggccgatgcatccgctttaacaatctcaacatcatcgtcgtcccattgaattaaacattgatgcaaggtagaaggcacacaacaatttgcatggatccaacaacgacccanaataacattgtagttaccttgcacatcggcgatga

SEQ ID NO: 42586 - DNA, 397 bp, Oryza sativa
  unsure (1)..(397): unsure at all n locations
gtaaactttagaattctaatctgtaaacagtgttgtctctcacattacaatttatttttagaaccgtttcacataatgctttataacgatgttacaacgaaacatagtcatgttactacatgatgatcgagacnaaaatactgttataatattgttactgcggaaagtagtcgtgttaccacacattgatcgtcgcgttactacgtcgttccagcgagacgagaactaaaaagagatatatctcaatctgtagagagcaatatctctcacattttgtttttctaatccgtttgcactatgatgttcataaaaaatgctaacgaaactgatccatatgactacttttgacgttgtactgcacaaagttgctattctaacatatatcatcttaactgaa

SEQ ID NO: 42587 - DNA, 250 bp, Oryza sativa
aaacacgcggacggctcaacaagagggcggcagagatatcaccctacgaactacattttgtcactcgcacagacatcaagtcccaagacctagcagactgcgtggccgaatggacaccggcgttcgcccccgaacccgagtccgcagaacagacttgggtaatgcactcagacggatcgtgcgcgcaaaaaggggcggacgccgggggagcactcacttcggcaaggggcgagccgatccaatatgccgc

SEQ ID NO: 42588 - DNA, 465 bp, Oryza sativa
  unsure (1)..(465): unsure at all n locations
acctgatgcatgcaagctntagagtaaaagcacagtgaactcattagttttcctacatattggaaaaatccagtaatccagtgtatagttgttcagttaaaacacatatacttgaaaactagagaatataataagaatatcaccaaatgtgacattgtaagagagctatgggttatgcatggtgatgcagggtacatgatgcatgggatcacagacgatgtgctactgccacgaggcatgtaatgatttctgttgccaccaaaacaaattttgacatgccaaaccattgaacagtggcctcaccgcgtcacgaaagactgtgcaccttatcccaaggcaagctacactatgctgcaacacagagaactgggcacagaatgtcgctgtaatggtctgctacactgtttcagaatgcaatgagcaacatcacactaatgcatacattattgaaccacaccaagatgc

SEQ ID NO: 42589 - DNA, 395 bp, Oryza sativa
gcttcatacttttattagaatactcttctatatacattcatggtattgaaatacttttcaagtatatgagtacctactttacattatgttcatgttatactgaatatacggctagcttatatgggagatgctttggtgcgggtataatgtttgcttatgacattactctatgtcatgacgatgatattaaagtaacatctggtagtttacgcgtggtgtctagattacgggatatcattatttggggttatatattgcggatgagatgtgggccgctgatggtgacagctcagtacgggtattcctccgcgccggtatataatcctaagttaatatcttgggaagggtatttcgtagtatttaaccccagttgtatggccatgacgggctgcgta

SEQ ID NO: 42590 - DNA, 429 bp, Oryza sativa
  unsure (1)..(429): unsure at all n locations
agccttcaacatgtcttacaaaagctgattctcttcttcggncagcccgcctgtccgagggtgataagcactactaaagtgcaacttacaacccatctcttcctgaagattcttccaaaaatttgaagaaaactggctgcctcgatcagacactattttcttagggacgccatgcaaacacacaatcctggccatatacgattccgccaaccgacttccagaataagatgtctctaccggaatgaaacgagccactttgggaaggctgtcgactatcacccaaatagagtcttggcctgatgacgctctgggtagaccagtgatgaaatccatatcgatttcctgccatttccattcacgaatcttcaaaggctgcagcaaatcagcggggttctgatggtctgcctgactcgcagcaaacatcacata

SEQ ID NO: 42591 - DNA, 244 bp, Oryza sativa
  unsure (1)..(244): unsure at all n locations
aaaaagttttttttacaccaaaaaanacgagcgctcaaggaacttggcggggtctctttgaagagcgcaccttggtagaaacgagcaaagcagcgcacaggcggggggggccaaacagcctctcttagatatttactgtctcgccacatggttggcctatttgtctcacaaatatggtctttggttctattattctagccaacttagtcggttattaatctatggattaaattctattctaatt

SEQ ID NO: 42592 - DNA, 237 bp, Oryza sativa
tgtttatgaaaggacgataggcccttggatgatccaaaaggccagttaattcggaggtaaaaggaaatgatggtggtcgaacacaagaaggcagccatgctaatgatccaaacaaaattggtataatgggtcatccaaccataataaaatctccctataatatggagaccaacaacttagtttacaaacatgttggcgggctaaccaacaccataagattgattcagtttctgaata

SEQ ID NO: 42593 - DNA, 450 bp, Oryza sativa
  unsure (1)..(450): unsure at all n locations
agcctttatcctaaagacatagaaagcnctgatcttatgaaactcgagctccaacttgatacatatattagtgatatgagcgaggatgatagattcaaaggcctaaacaacattggtgagctctctattaagcttgttgaaacaaagaagcatgatctttatgatttggtgtatttgcttcttaaattggtgttgatcctaccggtggtgacggcaagtgtgaaaagggtattttctgcaatgaatttagtgaagactaaagtgagaaatagtatgagtgacaagctattgaataattgtttggtcaccttgattgagcgtgatatcttcttcaatgtacgtgaggaagacataattcactctttcatgactatgaagaagcgcaaagcacaagcgtccgagtcttgattaggattggaatatcctatgtatctaacgaccttatattat

SEQ ID NO: 42594 - DNA, 447 bp, Oryza sativa
tactaagcgtaatcctccagatcatccgcttcgctgttatactcctcttctgatgaacgaatattgcaagaatgagcatatgacatactcaacaagccacacagcatatatgctagtgcacaggataacaaaggatggcataatatagctcatttgcataaacagcatttaatattgaagagaatagtaaaacagctaagtaattagtcaatattaaataaacaccatacaacacacccgtgttgtatatgcccaacctcatatgaacaaccaaccccggttgaacataccatacctccaaaccaggaatataccattccaaaccaggagtcacattaattaacacagttaccatttaatgtgtaatatgagactaatcacgaaaaacattgctcaactcacccataaccgcgggtacggctattcgaatagattaaactctgatca

SEQ ID NO: 42595 - DNA, 376 bp, Oryza sativa
  unsure (1)..(376): unsure at all n locations
agcttcttggttgctgcctatagntagaagtccttattctggtttatgaatnngntccgaacaagacgttacatgacttgttacatggtcaagacgggagatgttacatatcacttgcaactcgtttgaggatagctgctgaatcttctcaagcacttggacacttgcattcgttggcacgttctatcctccatggngatgtgaaatctgccaacattctgctaggtgacaatntgattgccaaggtcgccgattntggttgctcaataatcgcacgaatggacgaagaagccctcgtggcaaaaggcacagtcgggtacctagatcctgagtacctgcaatcatgtaagctcactgacaagagtgatgtttatag

SEQ ID NO: 42596 - DNA, 410 bp, Oryza sativa
  unsure (1)..(410): unsure at all n locations
cctataatttcttcttaatgttaaactctctatcaatatagtgtgctgtgacaaccatgtagcctatattttgaattgaagtcaacatatcggaggttagacatatgggcaaatcaagatatgtaattcagcatgcaagtcttccttcattcgctcatacaaagtaaagcatcatcacgaagtgtttgacgcccccacaacttgaaagttggctgcatggactccacccactccatnaaataaggatcctcaattttcttgaatggcacctctgcatgaatgaagaatctgaccattagctcccggcttctcttgtgaacaaacacgaaatcttccccagtctgtttcttaattgttgcaaggaagttgattctagcatcaccatcaataactggacatgattcggctat

SEQ ID NO: 42597 - DNA, 340 bp, Oryza sativa
ccatccaaaatcgatccaaccagcaaccaggcatcatacaggctctttcttgtccagctgctgctgctgctaatacacatactacactgtctctgctgcatgcatgcatgctgctcacctcatctgattgaaagttcaaaactgttgagagcaagcaagatattgagaaacggccaggacagaatggatggatcttaattggcatatatgctgctcgatcgatactgtctgtcagttctcaattcgtcgatcgatcaaagctatatttggatatctgaatctctgcaaatgccaactcgaccactaagcaattcatcaatggacatgatcataataatgg

SEQ ID NO: 42598 - DNA, 473 bp, Oryza sativa
  unsure (1)..(473): unsure at all n locations
atccttatagtcacctgcngcatgcaagcttgagtcgagatcatatacttatgtccttttgattcaaccttgtttataccaaggtatttaccatcatttgtcaagactttcttctcatcacaagcttgatttcattcttgttgacatggcgatgcccttggcttggtgaccatcaacccatggagtcatccattagcttcatcacaattagacctattcctttgcacatctcanagaagaacattaataccaacaaatcggttgtcatcctccacttggtgaccaaccggttgcatatgaaagatatggatatgtttgttgagtattcattaacatcgcaagtgtcatatactcgtatgcaagctcaaatgcaaagatccaatataaataataggtgaacaacgcggatctaaaacatgcacaataaatgtataggatatgctcccgcttaatatatgcatacaaataaatat

SEQ ID NO: 42599 - DNA, 367 bp, Oryza sativa
tgcccttcgcatccactcctttcaaattccttcaatattttattcattataaaggaatattccatccaatttccagaatatgtttttgaagattccatccctatatgctactggactgtattgtcagtcagtcaccatatcactgttatcatagagttaagaatgagttgaatgagacaagatccttttattttgtcagtcattttctcaatacactattaaaaaacaagatatttcctacatatttcatagcattctgtattttgttattcccttatattccaaagcattattagaatcagaacacctaagcccatcattttcttatgtggaattcaattgaatacaatatggtcctagagtcaat

SEQ ID NO: 42600 - DNA, 418 bp, Oryza sativa
agctgtcttcctgctccttctttgtccctttcttctcttagaacagcggagggttgagtgccactaccctcctcctgctggtcgtcctcacatccctctcaagtgcacatcctgagtcccctccgcatccctatccacgtgaccctactaattgcaagactgtggaggatcctcgtccccctctctatataaccagtattggctgcttacctccgcgattgcatcggacaatatctgttcctcatcgcgatcagtcatctgttcatacaggaaacagttgctaactcctgagacattcttgatcaaccatctcatatgctaacaatcatacaagcttagccatacatgctacgtctaactatcagacatgcgcagtcatactcagctatcctcactatcgctatgctaagtatattac

SEQ ID NO: 42601 - DNA, 476 bp, Oryza sativa
  unsure (1)..(476): unsure at all n locations
ctataaaactcagcttcacaaaaaagatcgnactctccttcgatgtttcatcattgaatccgnagagcatcatgtgggtattatgtaattcaccacaacttcacacactaacttcttgaataaggagtgtggcatcaaatttacgacgacacctccaaccaccaacattctagagatcattttccaatcaatgtgccctctgagatgagtggcctcatatgatgngtagactcattagacttctcaaaaaccacatcttgagaaatttcagcctcatccatgacacaaaattccatcggcaatgcaaacaccatgttgacatccatgttctgtcttggcagcgaatcattgctaataaccagtaacccacctccatttttgtcctcaccatcgtcttgatctatcatcggtttctcaatctccattggcttaagcctctactatcgtactggaggcggccactgtatgatcgcaca

SEQ ID NO: 42602 - DNA, 134 bp, Oryza sativa
taaacacgacctaaactacacagtatattaaacaagccgtgaacctaccaacctgccttacccatgcctacgatgattctaccgaactggctaccgactgggtccactcgtccaaccacccaatcaacatccat

SEQ ID NO: 42603 - DNA, 441 bp, Oryza sativa
  unsure (1)..(441): unsure at all n locations
tctgaagactganatggctatgttaagcaagttctttcgttctttcctaatcactggtttccatgcctatccaatgatcaaggactggataaggatgactcgatagaaaacaaaattagggattctggccctatttatatttcaatttttattcttcaaactttcaacttttccatcacatcgaactttcctacacacacaaactttcaatttttccatcacatcgtttcaatttcttcaaacttttaattttggtgtagaactaaacacagcctctgtttgaagtatacaaagcattttgaatttcaggcattaagcactaacatcagttgcacaagcccaaagcccctaaaccatcatcgaagtttcacacaaattgtactgctcacaagcaccatgtgtttcaactaaactgcgactgataattgcgagtattcactc

SEQ ID NO: 42604 - DNA, 441 bp, Oryza sativa
  unsure (1)..(441): unsure at all n locations
agctttgagcaactcttttatgtgatccatattcataatcatatataagtaagtatttttgaatatgaatttaataaatttaattttgacctaatatagtaattgctagccaaagccttatcctaatgaaacaaaatatggcttatattttgagatggaggggtaaaaagcatggctacatatgtacatacaaattttcaaactaaaaagtaatctgtgctcacatagtcacataaatgaataagaaagttgtgttaaataacatatgaaagaaagagaggtatttttcgtcaaatcatagacaaaaatgtcatctttgaatcttntgcacaaagaaaagtctgaaagctatgctctgagctgaccaacaacacgaatgtgcgataaaacacgtgatgttccttgcanatggtccagacatcccaacaaatatggtctcca

SEQ ID NO: 42605 - DNA, 439 bp, Oryza sativa
  unsure (1)..(439): unsure at all n locations
tctttccttctacacgagactttattaagtattaatacacatcgaaagtttagtttagattttattaacgtggaaatcccataattttactacacacactgtctctaggatagtcatttatctatattctctcttttctagatatttagaatatagataaaggactatcctagctatattaagtgagagttagtggttaattggtggataagattngaataaaattgagttgattaatgtggcaacctataatagctgtaaatccgcacagcctagcccggcagacccacttattacacatagcaatctactntatactttgtgctcgtttcatgtaaaagggttaactcagaagttgtattggtagagcgacaaggtntataagtgggtttactcttgctaactataagatagtccaattaagtgacatgacactcat

SEQ ID NO: 42606 - DNA, 465 bp, Oryza sativa
  unsure (1)..(465): unsure at all n locations
cgcgatccttaagcaccgcagctgcagcttatacattgtaggggacaacccctangtcgggatgaaaaaaaaagctggaaaagtggtccgtttggccgaaaagatgaaataaggtcatcgggggaaggcaacggaagccaagaacaatgtacggaacataagcccagctaagaaatatgtgcgttagcatctccaccacaacataggtccagataaccagaatccaagatgtgatcagtaataagtcatctgaggcaagtgaagatttgcctgcaggtcctgcggtggctaaacagagaaagggcaaaatgaaaacatctagcccccgtgcagttcctgtgggcggttcacgcctggtgttccggagtataacctccaccaagaagaaggtcataccagaaccagctgctgcagtgggatctcacaagacttgtgaggcataaagctccaattctcaagctaata

SEQ ID NO: 42607 - DNA, 179 bp, Oryza sativa
aaaaagagaagagaaaaaaaaaagaggaaagaaaggaaaaaagaaaaaagaaggggaaaaaggggaagagagaaaagaagaaaaaaggaaaagaggaaaaaaaagaaaaagaggaggaaaaggggaaaagaagaagggaaaggaaaaagaaaagaaaaagaaagagggaaaaagaaaaa

SEQ ID NO: 42608 - DNA, 483 bp, Oryza sativa
  unsure (1)..(483): unsure at all n locations
gatcttaagtcacctgctgcatgcaagcttagctatactcttgtccatgcatgacttttatgatagcatattgccggcaagggagggcttcttgcatagatggaacacatgnattttggaattaaatactgacactttcccattaccaatgctttccaggcaaaaaaaaactaatcttctagtgaaacttgttaattaagactcgcccactgaaataagggaacccgccatatagggcaattcccaagtgatacttattcatgaacaggatagcaccattaatagtaactctaccatcagaattcaaattctagtttgcataaacattgttgtggtgtgtatttctagttggtgtagaggctggaagtaataatttcatgatgtaaaaaattgacttcgatatcaatggtttgcccaatacctaattaattcatgaaattatgtcattaacaccctattctctatattatacccataaataat

SEQ ID NO: 42609 - DNA, 249 bp, Oryza sativa
  unsure (1)..(249): unsure at all n locations
cactcacgcttanagatgatggtctangtcctttgccttccaagtggaatgtcaaatgtcttatccgccaagcatttggttctaaccaatgcaaccgatagataattgtggctcgatggtatgacaaacatttgaatccagacaatcttatacgtcattacaagtcatctagggatgctgatggacatgtgacacacgttgcgttcacaacggctggtgttctgggccaaacgttaccttccatgggct

SEQ ID NO: 42610 - DNA, 445 bp, Oryza sativa
  unsure (1)..(445): unsure at all n locations
agcttagnttctgagcatctgnttttcttcttttccccgtctgcttttccctccagatggtctacaccaggaatggtagccgcgcgacaggcgagggcagcaacggcgaagagcgcactgatggggcgcatccccacagcgattctggccatggtccgccaccacttcccgagaatccgacgctagcccatgtgatggcacatcagacacagatgatggcagccatgatgcagcagatgcagcagcagcatcagcagatgcaccagcggatgctgcagcacgccgaacagcagcaccagcagtttggtccccctccccctcagtccaagttgccagagtttctacgcgtcatgccacccaccttctccagcaccaccaaccctatggaggcgaatgactggctccatgccatatagaagaagctgaatctcctgcagtgcaatga

SEQ ID NO: 42611 - DNA, 326 bp, Oryza sativa
acggcctggagcggatgaggagcttgaacaggggtagcgccctctctcccagcctcgagatgaagcgacttatggcagccatgcatccggtgacgcactgcacatccctaagttcgctttggggggggcgcatcctctctattgcacatatcttctcgggattagcttctatgcctcgtgatgagactagaaaactgccaaccttggcggtcttggacgggtcaccgccaaggcgtatctccttgacaggcacctcgtcgctcgaggtgatccgcttcttggaggcacatgatgtggaggccttcggggctctgccgtcctcctct

SEQ ID NO: 42612 - DNA, 399 bp, Oryza sativa
  unsure (1)..(399): unsure at all n locations
aagcaattgtctgttcacttcaatccagnttgactggatgtaaatatttcctctgtttccgctctactaataatgaagggaaattatttcttatacttcattctacaaatcgaatagtactacttataagaattatttcttatatattcaaataaattgttttcctgttaacaggataaagcactttataggaaaattttcttggagggtgaatcctccaaatttctatatatgacaatccaccagtcaaattaagattaattcgatccatgcttgcaaatatgtcatttcagataaatgccatcataatttgtctatttgttgctgtgcaactganattgtacaaaattagaaccgngtcgctaccgtcacattntctatcttcttcctctgcacatg

SEQ ID NO: 42613 - DNA, 325 bp, Oryza sativa
tataaattgggaaaaccaacgatcaattcacacaaatttacctgcaaaccatctgatgctttctcaatggatcaccaaaatccaacgtatatgtgtgtgatggtgagggaataccatgatgaacctctgatccatacttcacataagggtttgagtggtttgtgacatcataatcattgaccaccaattcctggttaccagctaactgtctcacaaattttctactattgactccacatctaatgctcctcctatgtatcttgcgaacaaatagaacatattaaatgcagccattcgttgcacatgttgtacttaaaataccact

SEQ ID NO: 42614 - DNA, 445 bp, Oryza sativa
  unsure (1)..(445): unsure at all n locations
agcttcgtgcatattaagaactngagtcnctggatctgactcagaggaatctgaagttggaagctgaactacgttccttagaacccctcaggcaagatgccttacagctacggtccgaggccggaaactacagtcaataaggcaagagatgactgcaaaggtgcagggggtgttaaaagagcttgagcatcagatttctgagaaccagaaaatacctgtcatgatagctgaacgtgatgctcttcggcaggaactagtccgaatgaggtactgaactattctgcatcatatttcgtgtaaaatgattgcttcttattgcttttcttgatggatcaagtgttagttctaagttgctgcttgaaggagcgcatttaggatcctttcctacagtttcaattctaaagaaaaaaagtggggtacttgagtatcatcttcctcttttcac

SEQ ID NO: 42615 - DNA, 424 bp, Oryza sativa
  unsure (1)..(424): unsure at all n locations
ctagttaataacctgctggactaattagggtgacagagaataatggagaattggcttaactaacctaatattccaccatctcattgaccctctcaagccataaaaccttcctttccaaaaccgaacctcagataaccattaaaggaaaccgcttagctagcaccctaataaaattagaagctaacctatagctgacgacaaacacagctgaattaaatcaataatttgcagcattatgatggtgcatactctcatgcacgcgtcngccatcgatacgatgaaggttntgatatggttatcatggcacattaacaaatgaggacgaggtagacgaaagctaaaaaggggataattgantgatcctggaagaccctgcctgcatcgtgcagcctccaaacgcgccctgtacttgtttaactatata

SEQ ID NO: 42616 - DNA, 449 bp, Oryza sativa
  unsure (1)..(449): unsure at all n locations
agctntaccaaccaatgtgcgcgatgcgtagtgttctccacattcgccttcatggatatcggcaagaagcacaacgccttgttcccgatgaatgcacttcaagaggactccattatccgcgcgccgatagagggtcccttctaccagcacgtatcgtttggagatgcgatggacgcgttcactcccttcgcggtcctcgggtagagtcttatctgtgaggtatgcttggatctcggcgatccaagcaatcaatctaagggagctgggagcactcccctcgggtcccgaggcctggactccgacgggcctcgggggccggtcatgcgcatccgtctcccctaaagggtcgggtcgcgccgacggctgggcaagcctttcttcaaatgcgcccggaggggtctgggctcgcgaggacgcgagccgtgagagttcgtcggccatcatgttat

SEQ ID NO: 42617 - DNA, 363 bp, Oryza sativa
  unsure (1)..(363): unsure at all n locations
tcagcgagttcggtttaagattagactgtgttactacatttagtgactgagngaagcanaatccatacagcaaaagtatgtttcatatgtactagctacacagaggtaaaattaatgcatctcacagtttccttgaaaaatgcatcttgaagctaatgctatagcattaaacactcacggttttaatgttcatgcatgatacagcttttctttttatcatatgcagttaatattaaacaagaacatcatataatatctatcaagaacagatagtgtcacacagtattgcaatgcacatttctggagttaacttgtatttctctttttgaaactaaagagtcagtgctatatatttggattaaa

SEQ ID NO: 42618 - DNA, 455 bp, Oryza sativa
  unsure (1)..(455): unsure at all n locations
ttagagtcacctgangcatgcaagcttcagccgtgatattgacgagccttcatgntttacgctataattcccgcaggctagaacacctgtatttatatatatatatatatatatatatataaagaagactcaaacatttatactatcttttatgggtgtttagattcagcggtgtaagtttttaatgtgtcaaattgagtattatatagggtgtcgtattggatgtttgggcactaataaaaaaactaattataaaatccatcagttaacagcgaggcgaattttctaaacttaattaatccatcattagcaaatatttactgtagcaccatattgtaaaatcatagagcaattaagcttacaagattcgtctcgcaaattagtcgcaatctatgcaattagttatttcttagcatatatttaatacttcatatggtgttcaaacgttcgatgtg

SEQ ID NO: 42619 - DNA, 374 bp, Oryza sativa
  unsure (1)..(374): unsure at all n locations
ntgcctccacttatgcctgccaaccggtagtcttaaccacatccacatctgaatcaatagcacacaaccactcatgttggatgatggtgcctgacgacaacaggccttacagagctgtctataagtccacaccaacactgctgagccccaactgaaacggcctatatcatcaaggctggcgaccaaaggaatccatatcgcagaagcaatgtcacccccagcatctggaaacagaacccctcccaacatatgcatgatgtatgcacgggcatagcactcaacacgccaaggctcagcgtcgtcatcaagatatgagaagttctggctctgccaagacaggggtattccattatgcttcttcttgctccttggcc

SEQ ID NO: 42620 - DNA, 438 bp, Oryza sativa
  unsure (1)..(438): unsure at all n locations
agcttccttctttgtctttctggaggcagtttcataaagatgatatactccttttattgtttagattaaatgagagagacaaattagtagtcattagttggatttcctctttgtaattttctttgtattcctgccttcttactaataaagttttattaacagtgggggcctctcctgctatgttccttggattgctttgcttcgtatcggctacattggtgttgtttaaggctgcatcgcttcaatctcttggattgctttgattcggttgatatgtttgcctacctacatatcatatatcttagttaatctagtttggtagctcgatttacttgtatcggntaggatctgctttagggtttttgccggtatcggctaaattgttttgccagattagattagctaatggatccacaactcttataaatcagtcaaggg

SEQ ID NO: 42621 - DNA, 361 bp, Oryza sativa
  unsure (1)..(361): unsure at all n locations
ngcccacgacttggtaagttatgatgaggtatcacaatctatccaacaacaagtagcatctacaatagattcatctatgattgcttttaaagataagttagatgcaactgttgagggtaaatctgataagtttttaagggttaaattcggccctcttatggctgattacatgtcaaaggataaagcctctaccactgctaaccaacctcctatagatcaaacgggtagtaaaaccgatggaacggcgcacactgccggtctgaccgggcctgacgaccggtcagaccatgacttatccgtcggtccgaccggccaaactgccggtcagaccgggtattaccccgggcggtattattttatt

SEQ ID NO: 42622 - DNA, 460 bp, Oryza sativa
  unsure (1)..(460): unsure at all n locations
tacgacatgcaacaattaagaaatctgcatcttcatcacactcttataattgggcccacaaacgaagccaatatgttgccttcgaaatgacctgtatataagtaacagtaggtgatttgtcaaaaaccctatcattcctactcagccacagagcacaacacaaggcagaagctctaacaagtatcagtttgctctttttgtttacgactccctgaagccaatcatcaaaaatatgagatatgctagtaggaatatataaaccaaaagaaaactgaactgctctccaaataaactttacaaaatgacaatcaatgaacaaatgttgcatagactcatttttcgtacaaaagcaacatcttanattaccattccaattccgtctagctaaaatatgccttggtaacacaactcccttaacaaataccacatatagatcttgatcttaagcgacatcttgagt

SEQ ID NO: 42623 - DNA, 398 bp, Oryza sativa
agcttcttcaatcgaagacaacaaggcatgcttatcttactttctccagagacatctcagcacaaacaaatcttctataaaatcctctcggcggggcattctgggagaaatcattagagtacactgctgaatcacatggaaatagctggagataccacttcatcatctgatatgccacttgatataactattgacaagtgcattatacaagaagttttgctgcagtatccttgtgggtttcctacaattttggcctgggatattgctgctggtattcttttcaagactgggcattatttttttcttgttttaatttattataattttgaactatatttttccttgttctagcgcgttgagaccccattttcttgtgaaatttttggactgcatgatgc

SEQ ID NO: 42624 - DNA, 373 bp, Oryza sativa
ctatgaatgtggaaacctatttgtccctggacttctgcaggattcacttcctatcaagagtggggacatacggtacagaccatgtgcccttgcttaacagaaaacattggataaataatatcggaatgaaatgtctcaaggtgctaagaacataagctatagttactgaaaattcctaaattagaccggacaaaagcaaagtcatagactaccgccatcttctatgatgggctttatgttgatacatggaggagatcaagaacaactagatctaaagaagaggagaatacctggatgtgtgaatattggataccaacattgtgtatgacgagagctatcgagctatggtattgatgcaaagagaataccggat

SEQ ID NO: 42625 - DNA, 424 bp, Oryza sativa
cagctttaaatacattttatgagtcctagaaaataatatatttgatgcctttttcttaccgggtgattccgtcctcccgtaagggtacaccacgctatttctagtacagaaaaaatacctcgagggtctacctatagtggttctttcttcctaaaaaaagcctcctatatatttggccaatatttttaatactgaactgtaattaacgcgtagtgttaaatagtgtaactttcggtactaaatcatattcttaagtgctagaagggacacgtacctgcagggccgtgaagaaccccagttgggggaaccacagccaatcatctctgactcattccacgaaccgtgaatcagctcaaggaaaactgcggaaaacgtatcacatattaatgcctatgctatacctgcggttggcacattcacactc

SEQ ID NO: 42626 - DNA, 485 bp, Oryza sativa
ggaccttgaaactcagcttattgaatggagaaattcatgaattctgaaggttatgtcatgcttgtttcaatataaaattattgtaatattgatgagccagatttatgagttgtttgtttatttaaattattgaaaacatatattactgggtttgaaagacatctataatgcccttaactaagacatctataatgcccttaactatttgtttctctgaattattgatgaaggcatagatcattgggtttgaaagattaccctcaactatttgttcagatggatgacagaggtagataattcctttggatgacagatgtagggtatttctttaagtcttcaggaattttttttgaagtctttatgaaaaatcgatcttaatcacccaatattcttaataatcttttgtaaaaacatctttcgagaagataatatggggctctagattatataatctctcacaatatctatcttaattatataatcac

SEQ ID NO: 42627 - DNA, 248 bp, Oryza sativa
accatgtccgaaggttaccaactcacgcagtgggaaacaacctaccttcattcagtgccaaaaggcgaaacatctgcaacattgaactaatttaccccaaataagggcccttgtaacacaccaatttcgttttccttgcggcctggggccttcgcggcgctccccgaaaatacccacaaatgagcgaagcccctttcctcaaaaaacatatcagagggatgtgaattggagcttttataattgatgga

SEQ ID NO: 42628 - DNA, 411 bp, Oryza sativa
  unsure (1)..(411): unsure at all n locations
agctngctacttgatgttttgaccctgtgtgtcttcttttgngaagaaccctactgaaggtgggtaattctgatgcggaagatagtgcgacttctgagctgcaccgcctgcacagatcttaagtgagctactgtttaaattgtggagtttgtaagcatcaggcggtttatcttgtgaagttttgcttcatagactcgacatccaggattcacgaacgataagaattgaacctttccttcctgctttctcagatcgtcttttttcataattagcttcttccaaccaactttggtctgtttgtttgtagaggaactggtgctgntcactggaatctgtgtatgcataaaaagctgtacttttctgtatggctccgttcaaaataaaatgtcaggacatcgagtatttcagagc

SEQ ID NO: 42629 - DNA, 299 bp, Oryza sativa
  unsure (1)..(299): unsure at all n locations
ctactgtcatgatctacccgagttagaccctatcacaaagtntaggcttaatgaccggtccttgatgcatttccccgggctggcctcatcttacaaaaataaaacattaagtggatgttccaactttcagtgacactgccttgacctatcttactttccactgtaaaaattttaagggcttgaatctatgtggttgtgggaaggcagcaaccgacagagctttgcaggtactccctgtttacccattattttgataacatgtttgatgaacttccattgagttctgtgatcttgatgca

SEQ ID NO: 42630 - DNA, 432 bp, Oryza sativa
  unsure (1)..(432): unsure at all n locations
agctngaatcaacaatcaaaaatcatgattttattcaatttataaggcaacatcttaacaagcacatatgttgaagaataaacactaaatacgtctacctattgcatttatcactctttctcaaataacctttagcacaaaataaccaagagaantttttttcaaccttttctttttttgagcctttttgctcatatttttctcttttattccgggtacgtccctgtcgtcaagactgttttcagggattcggcacccattattttgctcacatcgaatacctccttgttatcaagactgttttcaaggattcggtattcattttttcatattttgttattctcttttgcacaataagcaattaaagctatttgtggaataacaagtccatatagcatatatatatagagcattaaaaatcaaaccatatgc

SEQ ID NO: 42631 - DNA, 452 bp, Oryza sativa
tatgttgatgatgtagtcggcaagaccaagtttgaggatgacccgaccgccgatatagaagaaacttttgcaagcattcgtgctttcaggatgaaactaaaccctgaaaagcgcatcttcagagtaccgtcacggaagttgctcggatttatggtatctcatataggcatacaagccaacccggagaatgataacgccatcctcaacatgataccgccaagctcacaaaaagatgtccaaaagctgactggttgcatggtggcactcaatcggttcgtttcgaactcggtgaacgggagatgcccttcttcatgttgctgaagaaaactgacaatttccagtggggacccgaagcacaaaaagcctttgaaaacttctagacacttctcactacttcaccatggtttggctacgcacttccgcatgagccactgcttgtatacgtggcggcg

SEQ ID NO: 42632 - DNA, 366 bp, Oryza sativa
tgcaagcatgcaagcttgctgccaatgacaagagcctagaaattatatatgtcaagcttacaaggctcgagctgctgctgttcaaaaatagccgagctctaacacaatgatagaaacccagccagcttagttgggatccttagtcccaacaaacgaaactgggaggattccggggcaacccgactccttcgttgaaaatgttaaggcgatcaccaccaggggagggaagtccactcctgatctgccgtattctaaccctgcagaagcttaagagagtgccaaacaagcgctatctaatgactctgctgacaaagaaggtcatgcagaaaagacagtgccgcaagagtactgtgacacaccggtgct

SEQ ID NO: 42633 - DNA, 184 bp, Oryza sativa
  unsure (1)..(184): unsure at all n locations
accagcttcccgngccagagaaggcgtttgtctccgtccaaaaacttgcgtaagcttcctccatggcaccgccactgtgacagatccacaatccttatgttgttactgaagttaccgtcgccgactagacgatatgagaatacccctcttggtgccttctgtatagaaagcgagtgaccatata

SEQ ID NO: 42634 - DNA, 390 bp, Oryza sativa
  unsure (1)..(390): unsure at all n locations
agctcttctattgcaagtgccgatgtttttttgttgagtcattaaagagccgatgcatgcgctcggcctgaataactgagtcattattgttcagcttgttcttatgcgtatcgcttattagaaaaaaaaataatttatagctgaaacttttatataaatgttgcaaaataaattatgacttaagaaaaatcataaaattaattttgaaatttaaattttagcttctactaataattaacataagggggaaaaccgtttgtgcttaaaggacaatacaaaatgcaccgacggcagtcaaagtgacgcagcacaccgctagcttgaagctagagggtggaaaaccgatcatcancacataggcacgcatgccatattttttttttttgtggg

SEQ ID NO: 42635 - DNA, 394 bp, Oryza sativa
agctacactgtacaagctttggaaagacaaactcctaacctctccattccaaaggtcgtcctagaaaaaggctgaagaatctatcctgacagaacatattgaaaacctaaattttatcccccaaattaaagtggcccttctgtaaactaacaccagatttttccgttttcctccctctcgcgtgctctcgtggcgctctctccgcgcgtgtcgcgctcctcccggagaaaaatctgacgcgaacgagagattgaggacggcgaaagcgccgtctctctccctccaatgaatagagagcgaatgatgcgaggaatgggtgaattggataggagatttgttggaggcattcttttcatcaaaatattatgattggcgatgaaatatagcgactgtt

SEQ ID NO: 42636 - DNA, 334 bp, Oryza sativa
cttttctttcacctatggttgactttctaaagcgcacgacctctctccgagtgtgagtggcgacgacagagagcctaacccactccgtcgagctcgtactccaccgtcccctccacgccaaagtcctaatcagggggaggcgctctatagggccgaatgatccgcgacttctacatccacaggaggtggaaaggggcggcgagatggggatcatcgcctccttctctatggtgacggcagcacgccccaaggcgcgcttcaagctgcgggcgcgctcctacgtcatccgcccgtcgtccatgacccggagtctccatcccaacggttgctggac

SEQ ID NO: 42637 - DNA, 401 bp, Oryza sativa
atctccgctcctttcgtggatgcacccatccttaaaaaatacttaaaccccgaaccataatgtctgatgtatcagctttggatcttgcatgtgaaattctgatacatgattcagtcttgaactgagatgatattagataaatgcctctcaacaggtttcactttctttactgagaatatcacaattaggaatgtcaacaccttatcttctatttctttcttcaaaagtcctaggtttgctgttttaaatctcaaataagggaaagctgataatgatttgtataatctctctgataacagtatatattgtaatcatgatagtaatacttataactgatattataataattatgactcacttaacagacatcaagggagagaggagaggtcattctatgcatg

SEQ ID NO: 42638 - DNA, 356 bp, Oryza sativa
agcttctcctcttcctcagaggcgtctgctatcttgcgcggcgttcaggtctgttagcgcgttgtgtacgtatcctgggggagccttcttgttctactcgccaggggcgtaagggtgtttccttacattcttctatatataatactatattcatcttagttttatcccacttttaaatgttttatcctattatcttttatattaatatctactatatatatactctaatactctttctagctatattctttcaaatcattaatattttatttttcttactttttttattttttctttaattttacttactaatttatattattatttatatttactttatcttaaatattataatt

SEQ ID NO: 42639 - DNA, 438 bp, Oryza sativa
  unsure (1)..(438): unsure at all n locations
tcatactgtatgtatgtcggatacttcaggttcttctttatatacctgcaatgattctccatatttccttctgtaaactattatctttgcattactgaagtgcagggcacatatctactggatgtgattcaagatatcctgctaaaatcgtaccacacgatcaatcacgtttctgtgtgccttcatgttcttgagcgtctataatagcatgtaaaaaggatatttccatcttattaaggccccctaaacagtttattcatcatcagttaaaaagttgcaatgaggttggctctataagcatgctctttaattctgtgcaatgctagatgatatgcctaccacttaattactacgcatgctagatctacancaccagccacttacaagttacaaccattctgaaatatattcagttgattgaatgcaagtggctgaatg

SEQ ID NO: 42640 - DNA, 448 bp, Oryza sativa
  unsure (1)..(448): unsure at all n locations
tangcctgacgttactattgaaaagtacaaggctcggcttgttgttaagggctatactcagaaagaagacgaagatatctttgacacttactcacctgttactagatttactacaattcgtgtgctactttctctagcagcctcacatggtcttctcgttcatcacatggacgttaagacaacttttcttaatggagagctggatgaggagatctatatggatcaacctgatgggtttgtagttgaaggtctagaaggcaaagtgtgcaaattgttgaagtctctgtatggtctgaaacaagctcctaagcaatggcatgagaaatttgacaaaacattgacatctgcagtctttgcagtcaatgaggcagataaatgtgtgtactatcgccatggtgggggtgatggagctattctgtgcttgtatgttgatgacatactgatattt

SEQ ID NO: 42641 - DNA, 241 bp, Oryza sativa
atattcgcttatttttatacggaacggaacaacccattgcatgaattctccgccacacgtaccaaaatataaaccataccacaatgcgaatacacatgggagggctcctatttaagggacaagacatatatgataacactcgataagacgtataaccacaactatcccctttgctgatttgatctatatattgtatgaactgttggctgattacatttaagttacttgagacgacataata

SEQ ID NO: 42642 - DNA, 375 bp, Oryza sativa
catgcaagcttggcaaatattaaagagtaaaaagtggtgaattgtatttctgtgtccaccgacaaacaaataagaagacccaatgaactcccatggatgcctgcgcgcaatcttgtacatatgcttggacaaatgtcttgggagctatcccgttcttgcgctgggaatcaattaatgcggcacacaccaatttgctgcacgcgtacatatcgacccactgttactagtccaagagacccacatatgtataaatcacagtatccaaaatgctcgaaactgacaggaaccatgtctctttcttctctattcatccatcctccggtcagatacaaaagaacaggtatactactactaccactatggtaaagactaaac

SEQ ID NO: 42643 - DNA, 343 bp, Oryza sativa
ttaagtcacctgcagctgcaagctggccgaaccttgtgtaagcttaatttgtttgttatcttaaattaaaataactggtggtgtgttgctgtaattgggggtttcgctcagtttttcctgaataacggggcactataaagtttggtccttaaaatgggacaccttcttaatataaaactttatcaatgacttgatcgttcgagaaaaaaaaattaaatgcagaaaataaattggttaagcgtaccctgttcgtttcttacgtaaggagaggattaaattttgaataccgggacatgcttttcaaactgctaaacggtacgtttcgtgtgaaaactttttattt

SEQ ID NO: 42644 - DNA, 425 bp, Oryza sativa
agctttatacagccggaagtgccgcacacctctctttttggatcatacaggcgagcgttaactgttctggacaaaagtattaacggaagcggaagagaaagtcagaatcatcagggaaaggttgaggattgcccagtctcgactgaagagctacgcggataaccgccgaagggagctcacttttgaggcaggagattacgtgtatcttcgtgtcactccgctccggggagtacaccgttttcagacgaaaggcaagttggcaccacgcttcgtgggaccctacaaaatcttggaacgaaagggagaagttgcttatcagttagaacttccatccaatatgatcggcatccatgacgtgttccacgtgtcccaattaaagaagtgcttagggtacctgaagaacacgctgattctggacacattga

SEQ ID NO: 42645 - DNA, 318 bp, Oryza sativa
gcacctacctctgtgtttgatcctatctatcaacgataaccgctctgaggatgggctgtggatttcattggtcaaattcatccttcgacatctaaagggcattggtccgagctagttgcaatgcgattacttaactaagtgggccgaagccgagccgctcgagaatattactcgctcggagataatagaacttatttttaagcacattgcacatagattaacgattgctcagacgttagaggagcactttttatgtctaaggaagtgagaaactccgccgaatcatatgaaatgaacgggatgagttcttatccctac

SEQ ID NO: 42646 - DNA, 356 bp, Oryza sativa
catactatcggctaaatggacaaactcctcgatacaaaaatgacctttgtcaggtggtatagttttgaggaatactaaatcgtcatattatatgctctttaacaaaatgtatcgcatttccacgaataacctctcttcaaggaatcgcctctacccatttggtgaaataatcggtcgccaccaaaataaaactatgtcctttactcgaaggtggattaaatatgccgatcatatcaatgccccaaacctttgaacggtcatgggttaatgataggatttatagaccacgcccgcgctcgctggattgctcttaatttctgacaatcttgacaccctttgtaatatttgaaacaatc

SEQ ID NO: 42647 - DNA, 367 bp, Oryza sativa
  unsure (1)..(367): unsure at all n locations
gtataaggggcgcgatgcctccagactgaattgaactatagtagtttgattaaacaggttcctgtcatacntatacctgagatacaatatatgttcctgtctgacaccgactcttatctctaacatactctaagataccataagtctctgcgacagacttctgcccaaacctatctctaatgaaattacatgaaaaatcctacttaatacatacaattgccttctaacgaccctatccgtgcgtggcaattcatatgaagcacattaacttaacctcgcgacatctaccgagtcacattgtcggaattggccccatcagctaccttgtccgactcgacactaatgattctgatcgcaggcgattctt

SEQ ID NO: 42648 - DNA, 394 bp, Oryza sativa
ctacattgacgagaccacctttatgtaatacaacagcatggcggaagcgattacttccgccaaaaagagatgatctatgtgcttatacagaactccactctactttgtttgtgaaataaacaactgctaccatttcttgcgcagagcgcttcatgtctcattcaacatcaacaacaggcatcaagcatgatgaaagaactatccaatctagtgggtaactgctctcccaggggtatagctttcctagtacatgaattttcagaacctgaaggacagttaagaacatagcagcagaatatatctgtcatctgggactctgccaaagaatacgatacgtataacccagggacaactaatccacttattactgtcttgtaaagtctctatttcacat

SEQ ID NO: 42649 - DNA, 380 bp, Oryza sativa
  unsure (1)..(380): unsure at all n locations
agcntatcaagctcttcaagctctgagatctttgcctgcttaatcctatctcctataacaaacaagcccaactgctgtaaacgaatcagttgcccacaacctgctggcaggccacacaatctcctgcatctctctagatcaaaacttcaagcgttttcaaggcgcctatgctctcaagcaaatctctaagctcagtacaacatgaaaggtctacatattgtagatgacccaataaagtgatgcactgtggcaggtgtttaaaagccgtacaaaatgttaaagtgatggtctgaaagtgcgaaccttccatatggtctgacgggaccagtgcgtgcaattcgtgcacacacaaaactatgaacccttaaatttctaaattt

SEQ ID NO: 42650 - DNA, 408 bp, Oryza sativa
agcttataaagtttaatctataggatttatatttttatatttatcatttctatattatattgtttacatcttgttaagctacatggatttttaaaaattaataatcaaatataaatatatttgatttaagataaacaaaaacgagaagtaatttgaacatagccttatctgtcgcatctaattaaagataattaagatcatagacaaagcggacataagaggagcatctgctctgcgcagatcttaagttctcaactagataagtccatatgattccttgccattatctgaaaaaaatatatatatgcatgattgcttgcgtctgctaactgtctacttgatccatgttggtgtgtactgtgcacagcattttcagcgtatattaataatttattaattgacaactca

SEQ ID NO: 42651 - DNA, 436 bp, Oryza sativa
agcttctcgtgctctctcccgtgcccacattattaccgtcaagcctcgacgctagccgggaactcctcttgcctctataaccaccattatcttcgccacatcgtcctgcgccttgtccatgcctcgtcgagcccggagcccacagaaactccgccaccccatccacctcaagacctccattgccaagtcttcaccggtcatcgtccttcgtcgcctcctcttcaccaattcaccatggtgagccacggggcctcgtcgccttctttcaccatcgcgccgttgtttccttgccatggttgtcgcattcaagcacgtcatgtggggcccacacgtggacacccatggtggttcacgagtggggccagcacctttaactcggtcgccattttggtgacccaattcaccatggtctatcaagctgacacgtggaccccac

SEQ ID NO: 42652 - DNA, 443 bp, Oryza sativa
  unsure (1)..(443): unsure at all n locations
acttactttccatacgaagatggtaaggtacatgagtgcagagtacatgacatggtgcttgagctaataaatcagctgtcagcggaagaagattntgttacaacgtatttatcagatggtcaacaagcaggttaatgtacatgtacaacacagaagaagaagaagattcaccgactctctctccataacagcaacaaatcttatgcctcaccagaagcaagagaacaattgtccaaagtaaggtcactcactatcttcggcaaggtcgactcgataccacccttgtcgagctttcatgtcctgcgtgtgttgcagattgaggactgcagtggtatgggcaagaaccattntagtgatcttggcaagctacgcctcctaagaattatgcgtctagggtgctatagtgccaccgagctccctgaaagcattggaaactagaatct

SEQ ID NO: 42653 - DNA, 412 bp, Oryza sativa
gagcttgtggacaaagctatccgccaataatatctacgcaacataatggaccgaaaaagaaaggcagctcatatcagctttcctcaagggaacaatcagaagcctcgcttcatgacgggacagctaggtgggccttccaccctgatcgtctgtcagcaccgtccctatcacccgagtaacttcgacaacgactacaacggtggcagtcacaacaacagtaagcagcacaaccacaactcgactccacccccactaatggcaccagctcagtcagatccgccagctgtgtcagctcagtcagaacaacctcaaaagagggctgtatgaaagccaggaccctgcttcaactgtggcaagcacggccactttgctagcaagtgttcgaagctgaatcgtactggacccaggttca

SEQ ID NO: 42654 - DNA, 312 bp, Oryza sativa
atctagtgagctcaccattttcaaattgattggggacaccaagagtctggataaacttggctttccccttatccgagagatagctactgatttgattctccacttgctccctcccagccttgaaccgttcataatgaatttcaacatgaacaatctgaacacgaccttggcagaattgcatgggatgctaaagactgcggaggaaagcatttatagacattccaaccatgtgatggttatgctaagctgcagcccaacacacgaagagttgttaatagagaaagctaatctctgatgagatcacgagtacta

SEQ ID NO: 42655 - DNA, 288 bp, Oryza sativa
accactcacctccgcgtggtacacaactaacaccgaatgatgttcacaaatcaatcacagcccgaggtaggctggactaagctttcttcttaaggaaccacaagcgcacagccctttggctgccacccagaccaaaattaagcgaacaaaaattgcatggagctgaagaaacaagatataatttgcgaaaaagctgttggcatcccacctggaacacaaaaggataaacgtgtcccacgagaaacccctagaacaaaaagacttttccgacaggactggagaaccggt

SEQ ID NO: 42656 - DNA, 382 bp, Oryza sativa
  unsure (1)..(382): unsure at all n locations
agcttgcacagggctcatcctttcgagaaagtatgctattctgttcacattgttatttaaaaatatgcttaaaatatgaataattggcgcaagtctgggcgtcagttcgttgtaaagaaattaaagtgcagtaaatgccttggttatcctctctccatcccaatataagtgcacttaatatccttatagtgatggtgtatgtcatatgtacttatatttagggtgcgtttagttcacgctaaaattaaatgtttgattgaaattagaacgatttgatgaaaaagttaaaagtttgtttgtgcaggaaagttttaatgtgatagaaaaactanaagtttgaaaaacaaatttgaactacactctggctcagatggagggagta

SEQ ID NO: 42657 - DNA, 281 bp, Oryza sativa
tggtcatttcatcgccaacatatacatggctgctcgccccgcaggacctctgtacatctatgtgctgccactagatcggtcctacagtcgtggtgggacaaatgtaaccactctatatcttgctggtgctgctgtcttacctctgggcgactcctatacaacgctgctgaaaaaataggcggccgaacgaagaccgcgtgagctatagcacgtcatatacaaggcttacacgagaactttgatgccccaaggtgacacacagattataataccagtatttt

SEQ ID NO: 42658 - DNA, 304 bp, Oryza sativa
  unsure (1)..(304): unsure at all n locations
aaatctaacttgggtcaggtctgatggattgggtcacatttatattcttctaagttgncgggatactgctaaacaagccacgtttctcatccacttcgaatctgatgtgtgctttgggccctgtaaatgtgtcgtgggcttaactcaaggtggtgtgcgccctatggcaaccctaggacatccttaatcatattaattcactactccggacncatttaagacggagactgattaaagtatcctgtcaagaactagaaagccgctcgatcagttgcggaaccccacatgccagatgcttaatcat

SEQ ID NO: 42659 - DNA, 198 bp, Oryza sativa
aaataaattaactcaacaaaaaaagggttagagacgagaattctacagggaattttttttaactaccggggggaagcccacgatgcttgcttgagaaagttatactcaaaattgataaaaaaaacttcaattatcaattaataggtattaccctagaatcaatcgggactaacatgagggctctgaaaattctggtca

SEQ ID NO: 42660 - DNA, 434 bp, Oryza sativa
agcttcaacgacctcctcgccttcaccggcgccgttttgttctggaagcacccgtcggccgtcaggtcggccacctcgccgaactcggacacggtgatcgggaacggcagcaggtgccccaacaggtcctccatcgtgtcccgcgtgtacgcgttccacgtgggctccgccgctcgccgcaccgggcgcacgcactccgcgctctccgggttcaggaacacgccgccgccgccgccggcgtggcccatgaggtgctcgtgccacagcgacattcggaacgcgtgcacgagcccgcgcgcgcggtcgctcgggccgccgttcatgtgcgccggctggtagctcccctgcgcgatctcgctgtcccgggtgccgggcagcgaccgctcgttgaggttcgccgagccgaccatgacgtactcgtcgttcactgcgga

SEQ ID NO: 42661 - DNA, 386 bp, Oryza sativa
tgttactagatgttactgtccatcagctgaagtgtcttagagagctctaaaagctggattgcagccctcgcaaattaaagtctatggcctcccagtacgttcatcttttgtcaaacctattcgaccagaggtaaacaatttattcaactatcagcaccttactgccttttggatcttttgtcatctgcacaagttcctgagttttctacatgttcttatcttctttgataggatgaactgcgaagggagttaggtatggatgaatatttgcctgctgttctactaatgggtgggggggaagggatgggtcctattgaagccactgctaaagctctcggtgatgctctatatgtacgaagcctttgggaacccactggtcaaatact

SEQ ID NO: 42662 - DNA, 371 bp, Oryza sativa
  unsure (1)..(371): unsure at all n locations
tttaatggcttaacaaaaacatacttccattcatttactctagctgagtggcggaacatatatagaatgaatcattccaacagaaaattcttagttaacaataagatgaaaaatacgatggcgctgcatgacatgaaaagatccggttctggggcatctccaattcgttgaagttcttcttcaccatttctatgaccttactcatcgaaagacgattcttctggggcagtntgtatgcaccacaagccaactattgtgaacttcctcgcaatcttctctatctcgcatgagacttcatggctttgcaaactttcgctaatgaacataaatccactggggaatatgcaaagaactatcagatttggttaaca

SEQ ID NO: 42663 - DNA, 430 bp, Oryza sativa
  unsure (1)..(430): unsure at all n locations
agcttgctcgagctcgacccggtggcagtccatattactagcatacccttacacccaaatccataacatgactttcactgaagcaatgatatgcgcgtatcaattcgacaaacaccaaagacaacacacaaagggcccggttcgtagagcttttaacttctattaactttaagaattggggtttggaacggagttgtggagcaacctaaacttagttccacatctctaaatcattttgtgagaaggctccacccagctatattcccattntaggtggagttgaaattgttcggctaagctccaactccacaataggtgaagctggagctgaagccgtgccaaactaagccaaaaccacaacgtcgcacaccaactttcgtgagagttttgcaggaaaatagtactaccttccgtttttaatatgcacact

SEQ ID NO: 42664 - DNA, 412 bp, Oryza sativa
  unsure (1)..(412): unsure at all n locations
aacttagctgaggtaaatccactttgacacttgaaatatttaaaagcgtgtatctttacccttaaaccacagatgtttagcgctccattttctgtgcctgtctacatggtaaccccaaacttctttctgtacatcacacggttactgattctgtgtactgtacctaattgaactaaaaggcagaaggatcatgcttatacggtacttatgaccatgaagaaaaatgcagtgcaatcagcgtcagaaatgaagtgtgctcagcatcattgcgttgatatggtggctgacatgttcatgttacaaaacctttttttaggaggatgacatgttactcgtaataataagtgcgcgatggnctcgcctgacatgggccgttgtcaggaccgcgaatctttggatcggaaagagtttg

SEQ ID NO: 42665 - DNA, 425 bp, Oryza sativa
  unsure (1)..(425): unsure at all n locations
agcttgcttatggtaagctaaaatatctattcttctctgctcctggctctggntacaaagcttctatgttgagtaatgtatctccatcgccccaacatcttgagaaactagttctttctggctgctgngttttacatgttcccaagtggattaaagaactccgtgaactttacagcttggtactctcagttgaggacttggacatgagtgatgtccgtgcactaagaggaatgcccaccctagtccacctttttttggaaacccgaaagggtcctatggaaaactccatcaccattactgacaagtcatttcccgctctgaagcattttgaattcaattgtagagcaccatgtctgatcttccatgctggtgcaatgccccatgttgaaaggcttagtttaaattttgctgctgacggatggaat

SEQ ID NO: 42666 - DNA, 327 bp, Oryza sativa
atactatctccttttcaagatataaaaccctctagcactgcctatatacatatagatggtaacgaatctaggcacacatatatgtttaaattcattaacatatatatgaatgtgggctatgctagaaagttttataatatgaaacggaggaagtagctcccaatatccctgcacttttaaaatttctgttcttctgagtgctgacaccatccgttccgagtgtttgcaccgaacacctgtgtgcacatggggaacaacacgccgagcttcatggccccggctcgcccaggtgacctgctgcagatcattactaagccggcgcacccg

SEQ ID NO: 42667 - DNA, 421 bp, Oryza sativa
  unsure (1)..(421): unsure at all n locations
ttaagcgactgcagcatgcacttcgttcaacactgctttgcttcatcatcgcctcaaacacaatcctgcacaggttgcttgcgataaataccacgcctgctcctatcaacacacattatttcataccgatgcacttgtgtgccttgagcaacaactctatgtctccgcgcccttatgattttatcttccatgtactttgtcactaccctgccaaacactatgttgttatcggccatggacagaccacatttcttgtatcgatccctaaagtangcttgcgtgccgtgaaagatgaattcaacaatagcaaccaatggaagtacccgaactcctcgcattacccaattgtacacctctgccagattaggtgtaatatgccataccgagaaccatccgtgtcgaacatataacccacttcttc

SEQ ID NO: 42668 - DNA, 437 bp, Oryza sativa
gcttgccatacttaatttagctaacatgtctaactatgtggtctataagattcgaagccacatttcagccataggagaacaaacttgccacacttttacgtgcccatgacatgtgggacccacatcatgatgaaggaatcttgccataagtgtggcatgaaccaaacagatggctaacttagtcgaacttggctaacctaagctgtggcatggtgagacaaactgtggtagtgaaccaaacaacccctaacaccatcactcaactcctggttacaaatttagacatagtgctacatgttcgtagctcggatttgattatgtagtaaaataatcaacatttaaattaggaggactacgtctattaatattctgaggccttagttagcacagaggcataataaggtcgaatagtaaaacgaatattttacaaattcata

SEQ ID NO: 42669 - DNA, 473 bp, Oryza sativa
  unsure (1)..(473): unsure at all n locations
tanggctcaagctctatctgctctaggctngcctccgttcatggtttgacctgaacagcctgtaaactacatctttatgagattatgttttgtaacttgaccattttttatcatttggcgggagttcaaagttttgttccacatgtcaaaaagaatgaacactagcaatcagctccaaggcttgacactgctatacgtgctgaatggttttctttcagtaaaaaacaatcttatttgtgttagagagaataaacagatgatttcaataacctttcaaataattcacgaaatcatctccgatatagaaggaaaatatacaaacttcagtactgaacctcgtatatgtatactgataacaaaagctcagatggaattcgtatttaacaaaccctctgattatctacattagggggttggcaaatgattggagcagagtttgtgtggagatggtgtctgtaaggatgattatttat

SEQ ID NO: 42670 - DNA, 443 bp, Oryza sativa
  unsure (1)..(443): unsure at all n locations
ctcaagcttgttcctctacggagcacttagggacttgacgaggcactatcctttctgaaccagagagcccacctaaccacgaccagcacatacgctctatcatacagattatctcagatacggaaataagcactccttcatgtgttcttgaataacaaagcacagtgtacttaccacaagccaagctgagaccccacgaatatacctagagtgaaagacatctctcgggaccaatcatgtgtgtttttgaaacgcttaagccagcttagcctggttttatatttcagaagataagcaccggacaaatgcaccccatggtgactcggggaaagacatggggagcacagcacaactacaggaaatatacgatgagaggttaaagcgctattctcgcaagagtatctgcccacatgccgaccaatgcatgatttngtgcattattc

SEQ ID NO: 42671 - DNA, 508 bp, Oryza sativa
  unsure (1)..(508): unsure at all n locations
ccctattccctgtatctctctctcttcttttcttttctctcccccccccaaggccntttgaatctctgtaacgctatctnacaancactgaagctgcagcttggcaactttttaaggcttcatgcctgttaaattatcacaatattcaagaggcacatatgagaatttaaaatatcttaatactacacaaacataaaaaaagggcagctcaagcatgaactgaggaaaagttgcatgaacaggttggaattttattttttgactaactcaccgggggggagaggttccccacctgaatggcattggattaattgaggaagaaacgtcttattacatctgacgaaaagtctgtagactagaagagaaaacacctttcaaacatctattacaatctatcatcaagtgaaaagattcagccattaggaggattcctaaattccccgttgcaacatgaacaattgagagggccttcttcgatacaaaattatgctcgtggtcccaggaccaa

SEQ ID NO: 42672 - DNA, 425 bp, Oryza sativa
  unsure (1)..(425): unsure at all n locations
gctttggagaaaaagtcttaagtggagttcttgtttataccccaancgaacgcctgtgaagatggagccgtaagcccgctagtccgctgttgtttaattttgattatcaagcctgaagtgcctttgtaataatggaaatattattgatataataaaaatgggccttttgtattatagttgtttggtgaccccggcttttcctgggacggggattaatacactaacgttcgggaaaaggcaattttctcggtcgcgacacttgcgggcatcgtcatctgcaatcttgaacgcaccccggtcgcagtgctcgaaccaccgtgtacggtcctttccacttaagcgagaagttgttacgtcctgcctggttntgaactcgtccgaagacgtaatcgccgatggagagtatgctggctctgatacacttt

SEQ ID NO: 42673 - DNA, 247 bp, Oryza sativa
cttatgctgctactgcatgctgagatggcgctcgattctaagtgaatgacatgcatgaatgcaatcctatgggctcaaggatgctcaccgaaccttgaacgaggcgcgggatagtctggacagcggtcagcggcgaagaatatggtccggcgacggtgcatagctccgggaagacggcaacggctcgatccactcatcgaattgacatgcatgtggtttcatggcgttagtgagtgttctagggatg

SEQ ID NO: 42674 - DNA, 434 bp, Oryza sativa
  unsure (1)..(434): unsure at all n locations
agcttcacgattgtgaagaacgtcaccgagtgttatagacgtgaccatagcgaccaagtgactttgaaaataatgtgcttgcttcctgaccgngatcagcactccatacaataacttctagacttgtggataccacattttgcggtcggccaaaacttcaccgatgaaataaataggcctttgagctttttgaatgtctcgctcctattctcgccaatgcataaagtagcaaaggctcctatggatgatgtgagaccagcacgagaaatatattgtgaggaaactattgaaatctaaaatcttcaaaagctcgttgggtgtctggcgtccattagaaatcagttgtcttctctagcaacttgaagaagggcatgcctcgttctccaccttggaaataaatcaactgagaaccgccaagcactccgtgagttttt

SEQ ID NO: 42675 - DNA, 456 bp, Oryza sativa
  unsure (1)..(456): unsure at all n locations
taaccctcttagaancccttgctctagcatgattcatctaaggctgtaaccctttgtaccaggtaactccaccacgtacatttttgcatgctggacaatgccattgcctagtcttttcatttatctgttcaacacttaacttctccagaagttcaaaaatgcttttcaacagcttgtgcctttntcgagtctcaaaatttttctcagatgccttagaatcaaagtcaccactggtatcatcaaccatatcatcatcagaatcatcgtcatatgaatcataatcctcaccattgtccatttcagagccagatgagtgagatctgggtacccactgcaagccatttgcaacaggtgcacttacaactgggtgtgggcaacattgtccgttcatggtctaactatctgaagagcatcatccttgtgctctagagcacaatagcgagacctggccccact

SEQ ID NO: 42676 - DNA, 318 bp, Oryza sativa
ttggaactacaaaagccgacctaatatgaaaataaaggggctttcgctagctcttctttctggataaaggtaataccaatgatctcctagatagaaagcaatgtgttcctgataatgcaactatctattgtacctgctgccctcacaatattagggaaacaagggaacatcctttctttacttgcagctttaatatacaatgttggagtgtgccgggctggaattggagcactttcccaggggtttatcgtatgaattaatcttagagagttctatctctaatccctgtttataaaacctttgcttttgggttcttgg

SEQ ID NO: 42677 - DNA, 459 bp, Oryza sativa
  unsure (1)..(459): unsure at all n locations
ttgagagcagaatggggatctctctctctccttcaatgtgctataatctganggagccttttcctaaccctgcaattttggattgtttggtggattacttctctacccaagaagttgacagcttaattaatattatttcaccagacaaagctcctggcccaaatggttataatgggttttttcttaagaaatgatggcccatcatttctcaggatttttataggttgtcagcacactctcatgtgtgctatactgatctgcaaccgcttaatagctcatttataaccttagtacccaaaaagccctctccagaaactgttaatgatttcaagcctatctctctgatgggtatcagtttgaaagcgctaatctaattaatggcatatcatctgcagggcgtaatgctcattgttgtcaagaaaatcaatatggatttatcaaatgcaaaacaatccacga

SEQ ID NO: 42678 - DNA, 412 bp, Oryza sativa
agcttgcaagcaaagagatataagattttatatgcttgagcctcttgtgaggtgcatgctgtgtcccatacgtggtgttctactactagcaaacacaaacaggagtagtagtagtagtttgcttgtttgagtttctttgggcttgtttctctgcaattgctttgcatggtgtagttcctcttccattccctgcatctgcatttaatcagcacaaatgagggcacactagatttagtactccctccgtctctatgtttgacgccattgactttttaaatatatttgaccattcgtcttattaaaaaattcaagtaattattagttctgttcctatcatttgattcatcgttaaatatacttttatgtatacggatactcccttcatccctaaatgattgacgccgcgggctta

SEQ ID NO: 42679 - DNA, 194 bp, Oryza sativa
tgtgttctaccgatacgaatataatagagttcgcatcttttatttcatcatcacatacttataatgtttcgtttacgctgtctataattagaaccctatcttgttcttcatatttactagaatatctattttgatctttatttgtgcatgatctacttaaatgagatggcgagttgtctataatacatatgcat

SEQ ID NO: 42680 - DNA, 431 bp, Oryza sativa
agcttgcacttgcgaagacaagagattgtgttttttctttcccaaagcatgtcagagatcggactcgagataattcttcttcagatgccacgcattctgtctgtttagcagcatcgacagaaaggtggcgcgcattgctagtattgattccaactcttggatgatcatgcaatgatgtcccgatgaatctctgggccaaagacttgttcagcaaaaactcgtgcatgattccatgagttttgcacgtcttcacttcacaattgttcctcgtgtcaacaagctgaatgatatttcggtcaataagctttctgaaattcttatctgcagtgtactcttcgctacgacgaaggtcatcgctccgtgcatatactgctgctaaccaccagctgattacaaatttctttttgagaggacgactgtttgggaatata

SEQ ID NO: 42681 - DNA, 420 bp, Oryza sativa
agcttggaagtctcccgacgaggctgatctctccgggctgggtgatccgggttagtaatgtcgtgtgggtaaagagtaccccctctgcagaggttaacaaactgttcgaacagccgtgcccacggtcatgggcggatgtgaagtgattcctaacatattttggtttgactactgcttgtgaaattgctgtgtgaaaaggggttcggtgtttgaaaaatctgtagctgatgggatcagctagggccgtttgaaaagttgttggcccgggtggccgtttgaaaagttgttggccccggtggccgttgaaaaagctgttgatcgggtgccaaccttgtttaaattctaaagactgatacattgcacatactccgaccggacgagacgcactgtctcatccgtgtcgtttgagaaacactcact

SEQ ID NO: 42682 - DNA, 391 bp, Oryza sativa
  unsure (1)..(391): unsure at all n locations
caatgaatcatggaatatttgaaagggtgaatcccaccaaaaaacaagccttggatgatggcaccgatggctcatccaggaccaaaagtcggtctttttaaataagaagtagtacctacacgtttgtagcacttctaacatcagtcatgctgtcttttntggaaagcaataaatttctgagcacagtacacaaaatttctatatcccacaaactccttaatttacagattaaactggtaatcctcacgtaaatggagtaaaccgttaaagcttgcgaatactcattcatggaagtaatttaatctggtgcagactccagactccagaaacctgaaatttggtgcctagtacaccactgagctatgtgaaggaagtactactccaagagttt

SEQ ID NO: 42683 - DNA, 407 bp, Oryza sativa
  unsure (1)..(407): unsure at all n locations
agcttctcttccacctgtccagacatgcaataatctttatnagaatagcaggcatgttgaacgcatacacttcaaaagccgcagctagtcaatctgcacttaaatgaatccgatctatcaaaaactaagtcaaaccaagtccaaagcctattaggaaatgggtaacttacaaaaacttcagttaatgctaaggcatcagaattactattagacattttagcatatgcccgtctgccagttttgaaagaacaaagtatcatgctatttatttatcttagctactgatgaaaaggactcatgttcctaaagtgatgatttaggctggtcaatagttcattagtagttcttccttccgttcttttctgtcagcaagtggactctggacgttttaatctttactcttttaa

SEQ ID NO: 42684 - DNA, 117 bp, Oryza sativa
cgtagatttgtcacattttgggggacggactcctgctcatagtttgactttatgttagcaaatgaagctatccaattcacatcgtaactttgccaaaagttcaagctactattacat

SEQ ID NO: 42685 - DNA, 420 bp, Oryza sativa
  unsure (1)..(420): unsure at all n locations
catgcaagcttcgngaagaccttgagcaaggcaaggcaccctttgattctttgctcctataanaggaaaatcattattattttgtttgcaacttgcattattagaatcacacactcaacttgcttggcctcggtatgcgtgccaaaccgacggacctacccagtagtcgcactaattcctgtaggttgtactaccctgatttccttgtcgctccacctttgtggtaccttggtatccgtgctctctgagcgcgtataccaaatatcccacatacaccgttgtttgtcgaaaacttgggaaatgggtttgagaagccttgaaaacccgacatgtggcgtcgatgtgtttgaaaataaaatgggatgtgaaaactctcgatgcggnggttgtgcctgtgtggcactgtcccgtattcgcata

SEQ ID NO: 42686 - DNA, 448 bp, Oryza sativa
  unsure (1)..(448): unsure at all n locations
tgcatcagacagctggaggacgagatcaaagagttcatgccacacagattgtgactagattgtggactgtcccctctgcattccttttttttcttcacctaattttgcttctttaatttggtcagtgatcttttctctcttctcgtaagtttttggcagttgtgcagcagagatgaccaaagaacccaatacaaacatactttagttcagtgagactaccatctaatcagctgttatatgcacgacagaatccataccagaatcaacaattttcttcataccagaattaaacaatgttctcccaggtttttcggcaaggagacgacctaagaaacctgagaattgacacatactactcctcaacatccctgaattattcgcaatatagcatggggacaggtatttnggtgttgatatattaattcaggtccatatatcaactgtaatc

SEQ ID NO: 42687 - DNA, 275 bp, Oryza sativa
acacaataggatcgcctgcttatctgccgcagaacactacatcacatacttgcagacgaaaacacgccgactaacaaacaacatagcgcataaacataagccgtgtcaaacggttacggaatttcatttcgactaattggtctttgccgaaagcagatataatgctcacttttcgacgctacaagctaaacttaaaacccctactcacctaaccgcagaaagcaccggtcgagcatttataatcgatatctctccaaccttcttcggctcgatcg

SEQ ID NO: 42688 - DNA, 369 bp, Oryza sativa
gcttcaaagaaagtggcacaaattacttcatggtgataaaggttcttcttaacttgactaccaatagacattcatggttctattgggcatatgcagatttcttagtgaaacaagttacttttagcttgaacatgatatctgaatttataagcaaacggtgcacgtatgaacaacacatataccagcgagaacagtctggtctttgaatcacttcccctggcaatggagtggctgacgacaaatgccccacaaaaccgatcaacttctttttaagtttgtgctttcattcaactaatacctatcacttcacaaaagtgttccttttttaaatgctagcgcttccacctactaagcctcccgcctctataa

SEQ ID NO: 42689 - DNA, 434 bp, Oryza sativa
  unsure (1)..(434): unsure at all n locations
accataaaactcaacttgggcgtgaactatacagcgatcgagagtatttaactttgccanaagacgcaatgcgggaaactatctgatccctcgggggacgtcccctattggcttaaaaaacagggacaatatgtctaacatgaacatactccgtatcactcctatatatgcaaatcaaattcaacttctacatctcgcactagattttaaagactatcacaatcatattgcttttctcgttgtgagatgtaaactagaattatactccatgtctgggagagattatatgctaatcatattcttagattttttcaactttctataccgattcagaacatgcaacaacaggaagctctcctataggacaaaatcactccgagtatattatctcaaaacccaacgcgtgacgagcttgggcgtcatttgtatcacgc

SEQ ID NO: 42690 - DNA, 343 bp, Oryza sativa
agcttatccgcgttagcagcagataggtagtttctctttgcattatggatgaactgataagtccccccaatcctctcagcggatgaactgctgataggttgcgaaagaaccctttttgcaacctctgccaattctggtgtctcagatccataactgcaccaccactcaattggttccatcgatgctgcatcggcctgcacatattctagtgcaaaaaatcccttcttcataataaagacattgaattgctcgcgaaggactttttcctcttctttattatctgctattctctcaaaagctcttagcacacctgtcatgacctctacatcttgattcggtgctc

SEQ ID NO: 42691 - DNA, 328 bp, Oryza sativa
  unsure (1)..(328): unsure at all n locations
gacacataaaactcagctatnccgcttcactcaagcagagatttttcttgctatgctattgcgcagaatcaatgcactcgtactgcaccaggtcaccgacttctgttaagtctgcttttgcctgtcaagtctaacaaactgaacccgaaagcggttgggatgttcatctaagcttccaatcatataatgtaacattttcagccctgctcttcacacctgtataggaattcactttggtcatatacttccagctgaagagacgcttatctaatccctcgcaactctgctaagactgctatgactttttggacatacactccttaaccat

SEQ ID NO: 42692 - DNA, 457 bp, Oryza sativa
  unsure (1)..(457): unsure at all n locations
aactcagctgagacttagacacagagagcctggtttctcaccttcctatgttcaaaancctgtcagattttgtctgcttattgnttctgactcctactactctatgatattaacatactatcgatgcaaattgtagccatatggccaatacgattctcttgtcctatgataatatagtgccttccgacacatactcttgtctcttagaatattcaatttgaattacaacacagagaagtataccttttaagcgcatcatattgtaacccacatacttcgttttggcttttgatagttaaatggctgacacatatatctgatgctagagttaagttatcttgagtttatcaaatcacacgttttaacacccgtggtctattggcaagctacaaacacacaaattcttggattgtcctcctataactctatgagatttaaaaacgatagacgcaaatcg

SEQ ID NO: 42693 - DNA, 430 bp, Oryza sativa
agctttttatcattctaggcatcgactatattttcgcaagacctcccctacagtatcggcaccgcagtagagattaaccaccaaattccggaaggatcagggtgggtcctctactcctaggacaccagaatatcgaaccatgaacgacgaaaggcatgagagaaatattggctagtaattgtgaaaccccaatccttgactggaagggacaccaaaggcctctgccctccctctctatctatccaagagatagaaaggcacagcctttttttggttttttcattctttcatccaagagttgaacaatgaagatagatgggcaagggctgatcgatatatcacgtcgggtaggaacacagtcaaatccttccttcggtaagatgcctcaactgcatacatcactgcactttcaacctgacaactatttaaa

SEQ ID NO: 42694 - DNA, 295 bp, Oryza sativa
  unsure (1)..(295): unsure at all n locations
cccccaaccgggacacgccaacctcccnnnccccccaaaggntgtaactgaacgcacnaacacgagagcacaaaaaagaacagattgagcaaacaaccacgcgaccacaacccaggacagaggcaaccccgaaacgacaccggacaggaaccccacgagagcaataaccagaccacaaaaggagcgcggagccacggccagccaaaaagagacccccccagaggacccaaaaacaaactacgacaaaaagaacaaccaccgcgccctagccacacaaggcaccgcccggaaacca

SEQ ID NO: 42695 - DNA, 368 bp, Oryza sativa
gctcacacacaaaacaacaggcgtcaggttattgaacacttattattgacgaggaccccgcacgcaaaaacatcatccaccgacatgaaaaatgagttccacgcccaaaaaaatacaacacacggcgactgggataaatatatgaacaccaatcacaatccatacatcaaaatccacgttcgcaaagctcacatagatggaccatctaagttcaggacatacacattctttcaaaccgcatgtgagaatttaccaagggtccatagataagtaaaatggttcatttctatccatcaacacatgtagagaaaatgtcgttcacagccgtcccagttccggggcttcaccctgggcaacggaactaaaag

SEQ ID NO: 42696 - DNA, 286 bp, Oryza sativa
gtgcgagagcttataataacatttttttatcccctacctggcactccagatgaccgagcttggggctcctcacccggagaccgcgcaagccttccttttccggttcggcccgaggcccttggtgaaggtcttaactcctaacctgtggaaaggtcgcaagagtggatacacactagacaccggcgacgtatacaagttctggccgctgagaaaccgtataccctactcctcgtgtttgggggatctgtgtatgaagaagctacaaagtgcgaaccaacccccgatc

SEQ ID NO: 42697 - DNA, 378 bp, Oryza sativa
agcttgacgcctcctcgcgtgcgtatgttttttcgatggccattggggcggacgagcttccttttcatgactggcaagtcgtctacccggcgtcgatggcgtacatccgccaccttgttgagtccctggagcacctgaccttcgatgacgcctgcatgctccagctcgacggcggcgaaaacgcgtcggacctgttcaacctgcaccgcccggtgatcaccggagtcccccacgacgtggcgtcagcgctcaacaccctggaggagatcctctccagagggagcccgacgctggaagcgtaccatcgagaggacatccgggagacgatggtgctccatgaggagaaggtccggaccaccatggccgaggtgcattaca

SEQ ID NO: 42698 - DNA, 434 bp, Oryza sativa
  unsure (1)..(434): unsure at all n locations
tctgaatcatggaacttaccttttgttgtgtaagcggttttctctgaatccggcaggagaatgcacatgaccgcatcaacagtctgcttgtacatcccaaggacatcgtcttgtgcaacatctgatccttgcgaagcaaagaagctcaccctccacaaaagaacctgaaattcaagcaaaacaccacataaattcacttcataattatcccacaaaacaccgctcggcggcagcgggatcatcgcgtcaccggctttcagcacttcgagttggaccttgtagtaantgctcacgtcattgccggagatgttgacgaacggcgtcgaggcggtcttgccgccgccggcgagcttcgcggtggagccgaagaacaacgcgttgttcttccggcgtcgtgtggcgccaggcagtaggagaatgctgtacacccgtct

SEQ ID NO: 42699 - DNA, 451 bp, Oryza sativa
  unsure (1)..(451): unsure at all n locations
ntgaatgagcactttagatcaataaggaatggtgcactttacaaccaaaaactcttctttggagtaactaggcatcctaaatcataggagatagcgccaaacaatgtaacagcagcatgcacagcgaaattcttaccttatcaacaggatgacctgtgtgctctgacaacttgctgtatagataagttcttgatcctaataagtacatttgcttcattttctatatcatcagcctgcaaggaaaagagtgtgcaagataccaattcaattcaaagctgtgttgtcagacactcccaaccttaaccacttagcaaaccatctacgaataaccccgacctgccctcgagctgctccagcaggtgactgaagtgaaatacggccataggcatacccgtacgtgaacccttatcatatataaaggcatgacaatgagtataatgacttagcatac

SEQ ID NO: 42700 - DNA, 138 bp, Oryza sativa
aaccaaaagaagaaattatttttacccctaacgcatgggggaaaaatacgttatatgcacaacatggctaacaaaacggaagaactgccgtacggaaaggccaatgatataaatccgcccgatcaaaacatcaaagaa

SEQ ID NO: 42701 - DNA, 337 bp, Oryza sativa
tgcagcgtgccagccaaagcactacattaagacacaaggactccattctttttagtcaaaagcaactataatagaacttctcgcaagaccacaccgtgcacagcttgctggtatgttcaaaacaaactgcgggcagctggcattataataacagcgataagttactccgattctttccaaggcagacataaactgctgaaatatcatggcgatataaggactggcattaaaattcagtaattgacatgttaggcagtaagagtagcatcatttttactaaaaaatccttctgcaacatggaacgtggatggttctaggagatatatatagggaaact

SEQ ID NO: 42702 - DNA, 425 bp, Oryza sativa
  unsure (1)..(425): unsure at all n locations
cgcagctgcagctaaagggacaccccgggaacgcctttttgtgctacgcctgcaaagagcccggagacaggccgangtaccactgtctcacctgcgaggacctcaacatgcacaagttctgtgcccatgcgccgagcacgctctaccaccatctcttcggccgcacgttcgagcttctcgccaagccaccgcaaggacgaccggagaaaccgcaccccgccgccaccggtggtggcataagcgaaagccgcggcaggtggtgcgacacctgcggcgaccatgtgttcggtctcgtctaccactgctcatgcgccaacctcgacctccacccatgctgtgcgagcctgcaagaactcccggccaaaaccgggagacgttggaccaaccgaaagaaagtcttgctacgcctcaaaagctacgtaaag

SEQ ID NO: 42703 - DNA, 203 bp, Oryza sativa
cacccagccatagcgaaccatgcttgtgctactagtgatacacagggacttatataataaggacgaggttgtacaaagcaaatgcgaaacatacagcctgctggaagggaaagtggcaagagaacacttacatctgcaggaaaccatatctaaagaacaataatacagtgagaacatggtctgctcaagtacagagagaacat

SEQ ID NO: 42704 - DNA, 462 bp, Oryza sativa
  unsure (1)..(462): unsure at all n locations
ntatgtcaagacaattccccttgggcaaaattctccttatctatcattaccaaattttgaacaatgcatcagctaagatagccgtcggttcgatggttggagcaggtgggccatggtggtttctacagacttggctgaacttattagccatgaaagctgtcaatcggccatcagcgatagaagtagagttcccaagactagagccgattacagatgatgatggagaagagcgaacccattgcaggtgcatgtcttatggagaatatgcatccacaccagccgattctggagcagagctatcggctgaactgctcacagactggttctgcagtttctatgaaggctctcagagagatgctcgggtatggttcccatatgaggacttcatgaatntcgatctcccagcagatntcagatttgaggatatcaacttccgaataattgataagtctagagaagtct

SEQ ID NO: 42705 - DNA, 438 bp, Oryza sativa
tcgacccgggacctctaagtcacctgcggcatgcaagcttaaggatgtgcaatgcgtcaccggttgtttggccgccctaagtcggttcatatcgaggctgggagagaaggcgctacccttatttaagctcctcaaacactccgggccgtttacttggacggaggaagctgaacgtgccctcactcagttgaaggcgtatctcagctctcccccagttctggtcgccccggagccaaatgaacccttgctactctacttagcggcgaccccgcaagtggttagtgcggcgttggttgtggagcgcgatgaggacaatcctcattccgcgcacccccaccctgtgctggcttggcccgggagagagcaaggaggagaggcccccaagccgaacggtggtgcaaggcccccgacaatcggagcaggccctcttgccgcttg

SEQ ID NO: 42706 - DNA, 464 bp, Oryza sativa
  unsure (1)..(464): unsure at all n locations
tatatcactccatgtctgaatgtgccgctttcgctagtctttctatgacctatgcatttatgcgtgttcagctggaaccaacctttcgctccaacacactgaatgaaacaattcgctctcacgcgatgaacctttgcaaattcattcactagtaaaattactttggcagcttgctggttttctaaaccttcacaattttctaacctccacactaatatctgtgcatttctacactcatttatgcatctcttgtccatctatctaattggttacactcacttttatgtgaatatcagcattcgcttggccttctatctctgtataatcattctttctcagaattatgtatctttgggtttcggaagttagcaactaagtgatntacccgcagcatgctttacacttcctatatattgccattggcgtttctttgcgtgatgatatgtaagataggctacatcagc

SEQ ID NO: 42707 - DNA, 359 bp, Oryza sativa
accccgagaagatacgagctatagagcggatgcgcccccccaacaagcttatggatgtgcaatgcgtcaccggctgcatgggcgccctaagtcaggtcatatcgaggctgggagagaaggcgctacccctatttaagctccttaaacgctcctggccgtttacctggacagaggaggctgagcgggtcctcactcagttgaaggcgtacctcagttttccccctgtcctggtccctcccgagccaaatgagccgttgctactctacctggcggcaaccccgcaagtggtcatcgccggcgttggtcgtggagcgcgacgaagacaaccctcactccacgcattcccaccctgtgtcgac

SEQ ID NO: 42708 - DNA, 418 bp, Oryza sativa
ctcatctaacgcataacaaaaaagatgaggttagaaatgactaccttgcctgataccacgatttgccttgaaagcaccattagtctgaccattgatattacgagaaacaaagaataattaatgctcgaatacacaagatcgatcaactgatgattaatgccctttcttttgagagcattgtcaatgaaatcccattcaagtctatcaaaagctttagagaaatcaatttttattagaaaagcatgatgaggataataattaataccaaaggaatgaacaatcttttgagctatgataatattgttagctattctcctacctgcaatgaaagcatgctgagaatcacaaatgaaatcaagaaacttacccttaattctgttggcaatacaattggctataatcttgtatggaacattgc

SEQ ID NO: 42709 - DNA, 393 bp, Oryza sativa
agcttgattcctaagcggaggcaacctttctattcatatgcagcatctttgtaagacgcatggggtgacttaaaattggcaaacaaagatacaagtagcatgcatagaggcagagctacccacgtatttccatgggcgttggttgtctcacacaccaaatgtaatgcccaaagctcaaaaacaatattgggccaactcatctaattggaccacacctaccgaaatatcttcatggtcgttggttgtctcataagccaaatgtaatacacaagacccgaaaacattatcgggcctaactcatctacttggaccacacctacactcaacgcactgcactttcattctcgcttcgcgcaaaaagttcaaactctcttggctaagctcaaattctta

SEQ ID NO: 42710 - DNA, 114 bp, Oryza sativa
ggaaaaactactttatctcaacttatttacaatgataaaagaatagacgattattatgatttgcggcctggatatgtggctacatgtctttgttaagccagaatcacccaaaaa

SEQ ID NO: 42711 - DNA, 366 bp, Oryza sativa
  unsure (1)..(366): unsure at all n locations
agcttgaccacacgccacaaacgactgttcttaatgcatttgggcgttgtatttttgcatgcatcggcaaccacacacaaccacaggcgaacaagtccagctatgcagtgcaagcgtgaaactttttttcgtaccaatccaagtgtacagtacacgtacttttctctgtatactgtagtactccgatgtgcgtacgggcgggcactgtttcggctgcagtcgtttgtggccgtcggatggtggatccaacggctcgccgtcgccgtcgggatgcgaggattntcggtcgggcatgagactgtcgtgccgtgtctcagcctgcgagacgacgacgacgaagagaacggtgactgcaactgtgtgtga

SEQ ID NO: 42712 - DNA, 462 bp, Oryza sativa
tctcaaagccggtttcatcagagaggtactccatccatagtggctagccaacccagtcatggtacggaaggccaacgggaagtggagaatgtgtgtcgacttcaccgacctcaacaaggcgtgtcccaaggatcattttcctcttcctcaaatagaccaactggtggactcaacagccggttgcgagttgttgagcttcctcgacgcttactccggttactaccaaataagcatggcaaaagatgacgagtagaagacaacattcatcacgccattcggggtattctgctacgttaagatgccggtcggactaataaccgcaggaaacactttctagcgcacggtccaaggtgcacttagcgaccagctcggaaacaatgtcgaggcctacgtcgatgacatttgtgtcaagaccaagacaagcgactcattgattgacgatctgtgggaaacgttcgacaa

SEQ ID NO: 42713 - DNA, 422 bp, Oryza sativa
  unsure (1)..(422): unsure at all n locations
agcttgacaagatactagttctctatgacttatttgctgngcacaaagacttgacaccgctatgggatgttgatcttaaagggatagtaaatggtgcagttgaaacctgcaaagaaagtttccatcgcttcaacacataccttaatttctcacacccaaagatctcatagaactttgatccacatgcttgtgggtgggcttttgggatgaacatgtctgacctgaaagagtggaagaagcaaaatatcactggaatataccattattggcaagatctggtaagtagtggaacaagaaagctgtgcttgattatattgttcgaatacatntatcccaccatgcattctgtctatgaactgaaggtcatgcaactgcaacaattggtatttatcttttggttgttcatctgataagagaatgtg

SEQ ID NO: 42714 - DNA, 437 bp, Oryza sativa
  unsure (1)..(437): unsure at all n locations
tctgctccaacagcttactgtggcaacatgattatatttattcattgntgaacttttttttaacaatgtgggttttcaatattttttacatttataacctaatgtggtgtctgtacaggttctgggttttctacagggctaatcaagatggtgctgttctcttggtactatgctatttcgatatactccatcttaagttatcttgattcatctatttttaataaatcatactgctttcaaggattgcgtcatccttgggatggtcatgatgaccattctcatgggcatggacacgagcatgaggtattaaatcaaaaccatcttttctttgctggcataataactcatgtttgaactcctttttatcaataagaaacctgtggtgattttgggtgtgtctagttcacgccattattggaagtttggttgaaattgga

SEQ ID NO: 42715 - DNA, 202 bp, Oryza sativa
taatccctcggccacaatattttttttcgcctgtacacgcgcgtgatacttaaagaggccgatcctaaaaaaaattgacctcacgaacgtgcttattatgtacctatctatacgctaatgcctattatgttcgtgcaagcgcaagcatcttttactcaagtctgacgtattcaaacaagcctatataatactcacatggctc

SEQ ID NO: 42716 - DNA, 362 bp, Oryza sativa
  unsure (1)..(362): unsure at all n locations
gaaccgttgggcccagaagacatgtggtgaatcatgagtgccccccctgaggaacaactaggatgcttcagggtacactgcttattgaactagacttctttgcaagtcttcatttcattntgctaaccaaaatatgttgatgtgcgtatgtatgaagctgatatatatcgattacctttgcaagatattaccttaatacatggctagcttgctttggattctgaataggaagcgtactgttgaaccggtgttgcattactgatacccattattttctctgctttgcattcatggactgcccatgctgcaaaagcatcaacaagcgatgaagacattagatctgtggaggctaccggaagttc

SEQ ID NO: 42717 - DNA, 205 bp, Oryza sativa
ccagcctagaaatgcagacacataaacttcaccactcagcattggtacggtcacgcagtgcccagccgacttgcacaacttattggaccccgagccgagcatagcacaaacccatggaattgctattcgaaccagatggctacaaaacaacgagtagccaaacatgaccttttcgtctgcaaactgcacaatctgaagggctcac

SEQ ID NO: 42718 - DNA, 418 bp, Oryza sativa
agcttgccattagaagaagaggaacttctgtttcttgtcagagccttgccagtaaaacctccccctcggactattcattttcttatgaaaataccctggcaaataaaataaacccatatagtacaaaagaatgctggaaaggtaagagttgatcctaatttctctccctcaaaagaaaggtgaccactatgtcaggactcaagccttttctcatcgttctacattccaagagataaatccctctttttcaatttatcaacccccatgatctcttcctcctcttgtcttgcctgtggtgccaaacactaaccacatttgataaaaaatgcttgggtgccacatttagagcctttgattagtgcctccttttcgtctaattaatcctcagataaatcagaaagactagtatatatatagg

SEQ ID NO: 42719 - DNA, 479 bp, Oryza sativa
  unsure (1)..(479): unsure at all n locations
actcagcttgatgcaccggcggcctgacgctgtcgagaagagcatattgtgacgttagagatacaaacaacttgatggtgatgattgaaaaagcccagcatacagacatcatttgctgtgagtatgtaggactaaaatcgagagaagcacggcacaatcataggacgcaataacaaatcatcaattactcccacacgttcatgtcataagacattttaactttaatcaaagtcaaactgttttaagtttgatcaagcttgtaaaagaaatagtaacatttttaacccaagacaaatttatcatgaaaatatatccaattattggattgatgaaactaattgagtattataaaaattactgtatttgactataaacttagtcaaatttacacaagttgattctgaccatagntgaaacgtctataacctgacatggcngaggtataacacatcatatatacgtggctaatgttcctcatg

SEQ ID NO: 42720 - DNA, 167 bp, Oryza sativa
cccccccccccccaaggcctgtatctgcacaccaacacgagcacaccagagcaagagaaaccttaaacacaagacgcgaggcagcgaccagaccaaaaaaaggccaagcgggaggcccccaaaagggcacagaggcccaaccacaaaacaccgaaaaaaggggaaaa

SEQ ID NO: 42721 - DNA, 332 bp, Oryza sativa
atattattcctaaaatctatcaacctttgtttgcacaatataatgtctttgctattctaaaggtaatgcataaatattttgtaagattaaatattaagtcttacgacaccaccctcttatttactttaggattggaataataatcatttttattgttaaactggtcatgcgtaattccatacaaatttgtcagaaaatactactatataacaagctcatgcgaaacggtctttgttaagatatggttaattctgcctaatatactaacggaaaccaatcatttaaaccttcacaagaataacaagtcataccacacatgctctgcttacatt

SEQ ID NO: 42722 - DNA, 424 bp, Oryza sativa
ctgcatatgcacaacatcacattcaagttgtttatggttggagcctatagaaaaaggtgttttaaccaagcgggttaccttcatcttaccacatatattaaaccactgaatatgatacggatgtggatgtggatggtagtcaagccaagcttcttgaccatctcttcacttgctaaattgttgcaactcccgctatcaataatcatattgatggtatggcctttcacaaaaactttgctttggaacaaattgtgatgtaggttctgctcttcacacttctctttagcactaagtgctatcttgacaattatgctaggatactgatctagcgactctggatgcaaatggacttccttgatgacatccgtatcttgtcctcctgcatggtcagtggcaccttaagcatatcattatcacaatcact

SEQ ID NO: 42723 - DNA, 322 bp, Oryza sativa
tggattgaagagatcggactccatacgataggaatcttttctggaaatcaagaactcggttttggagataaactccaaaacgagtttgattcggataaaatacccaacgatttgctccgattcataggggagaagataaaggaggatgagaggatcaatacccctcaaaaatccggaataaacggtgtcggattgggtgggatttgtggcggcaagacagcgaggcgtggccggctcgagctctgcctggcagccggctggagaagatgacactgttccagggaggaaaagtagacttttcccgctgggcttcatttccttc

SEQ ID NO: 42724 - DNA, 346 bp, Oryza sativa
agaaaaggtgacacccattcttcggcgaaaaatgaatccttcggtctacgatgaaaaaaacccctctttcgaggcacggagcttacaacaacccgttgcacacccttcctttctacgaggatttgttcctaactatgagatataatgaattggtgaaggtttacccctttggcctccttgccaacctgtacttttgaagaagcgctacataattgtcaccggaatcaccttatttgtgtaggaatattgctacgttaatcaaatcctatgctttagttgaatctaataacttatttaacaatccaatagttggcatcctgtttctccttcgtcaggaacaggctaa

SEQ ID NO: 42725 - DNA, 460 bp, Oryza sativa
  unsure (1)..(460): unsure at all n locations
atactctcttatcttagcaatttcctatctatctgttctgnnnnncagacgaagaaaatacatctgataccagtacttgtatttacgactaactgttttttcaatgcaaatatatatatatatatatatatatatatatatatatatataaaatctaatattgctctcaagatatgctgctacttaaatctgccgatcataatatgcagtatggttcttatgtaaaaacacaataaatattttatagatgtatgtactttcttagaatgctggcaatcttaaacatccgataagtattatatttcgtttgcaacagccaaatacttctagttacaagtcaattttacttcctgaaacgttatataattccgtcccgaggcatataagacctaagcacatatgaggcaaggatccattcacataattttgttaagagagcactaatgctatactcctgtat

SEQ ID NO: 42726 - DNA, 415 bp, Oryza sativa
  unsure (1)..(415): unsure at all n locations
tggatcacttcctttttggtactgttcagaaacttatttatgatccacatataatnggctgaatgcttactaattagcattattcaccattgttgatagatccaccaagtaaatttattcttgattggccaacaatgttcaagataatcaaaggagtagctagaggacttctttatcttcaccaagattcaaggttaactataattcatagagatctcaaaacaagcaacatcttgttggatgcggatatgagtcctaagatatcggattttggtatggcaagaatctttggcggaaaccaccaagaagcaaatactaaccgagttgttggaacatagtgagtgatntatgtgttaatgtttagaatgaatattatttcctctcctgaaacaatcacttgtacttatttgctaaa

SEQ ID NO: 42727 - DNA, 429 bp, Oryza sativa
  unsure (1)..(429): unsure at all n locations
cttaagtcacctgaggcatgcaagcttttatagctgccccggagactgtgttatatagtcatggcgctgnttgggcttatcaagccatcgattggatacaatattattgttttttgccacgtaagtgtgcatttttattgactaatattatggcttaagctgaatatatattttggttattttctacacggttggtaaatccttatgagtttatttactcagatgttacaccacctatgtcatatatttccaggtgtggtgaaaccatgtgtcttttaaggacttaagcacatctgttaaagtagtgtacgtgtggtgtatgcccaatactttggaaatttctttattcacaacatcaagctcttctgtatagctgtnttgctatgtgaactttcaatgatgtagtcaatcttagatcgcatgcatcat

SEQ ID NO: 42728 - DNA, 294 bp, Oryza sativa
gcatagtacgagatagcccaaaagcattcaattacagcataaggagtgtggggactgaccaaaataattcttgagacaaaaatatgtagcaaaattaaactgagcgaatcatacccaaatgaaaagcgttgcgtataagagcaatatatttgaagagaccactaatggaggggaacaacaactacttaacaaaacaataatggcgaattcaccctttatcttattattggcaaactaaaagagtatccacatataacaaaattacatgctggttgtaaagcgatcatggaaaat

SEQ ID NO: 42729 - DNA, 478 bp, Oryza sativa
  unsure (1)..(478): unsure at all n locations
tatcctatataaattacgaattaactntattttagccatgcactcaagttggggatttgattgaagagtcaatcaacctttaaactgtgggccaagtagagacatgacctaaaaatatcaacatatttagaaatacagtaattactatattataaaagagtaaattccataagaataccgtaaatacgaaaacgattgatataacaaccaaaccatttccatccctagtcacgtccatggttttcataatatagggccagccaattgaagcgtgtttgcaataatatagggataaaaaaaaacacagacacgggtagagaaaacacgtacgtctatgaaagggccatcatcataaatatggtttcataaaaatatgactataatatctatttacagataagggacataccgacgtcactgaatacttctaattcacagacgtttctcttagatggagaacatgctatatatgtaacga

SEQ ID NO: 42730 - DNA, 419 bp, Oryza sativa
ctgcagcttatcaaaggataatatattttcttgattacaacaacaataatttcatttcttcttctatcctttcagccagagatgttggcggcatctcaccattctttgagattctaatctcaatttattttaaatagtggtgttagcgcatttgcgtttcagacaaaaaggtttcttggaagatttattattgctgtctagcatattttgaaacaaagaaatggaaagatttttcggaatgagcgaccttcctttgaaggctggagaattttgttcaagaaagttcttctgcagcatatgtgccaaaagaaagatcctctaaagaacatagtattttattgattataacctttgtaatcttatcagtgctctccttgtcactatattttgtaaatactttctttcttttatgaaaatca

SEQ ID NO: 42731 - DNA, 418 bp, Oryza sativa
  unsure (1)..(418): unsure at all n locations
ncatagagatgaacttgcacactctttctatttttatcatttgagatatgtgaatcttatatacatggcgaaacgacaaaagcacctcttacgggtcaaagtgaaagggcaagtgaactattggcactagtatatactgatgtatgcggaccaatgagctcaactgccagaggtagttttgggtactctattatctttaccgacgactctagtagatatggttatgtctacttaacgacgcataagcctgaatcctttaataacgtcaaggaatctcataatgaggtacacaaattatttgggcaagacaatcaagtatctacgatctgatcgtgtgggagaatacttgagccttgaatttgcagtcatctatacaactgtggaatngttccacaactcactccgccatgaacacctc

SEQ ID NO: 42732 - DNA, 400 bp, Oryza sativa
  unsure (1)..(400): unsure at all n locations
tgatggcatagnagtagaatcttgaatacctagtgntttctacctagcgcgccactggcgacggcggatacccgtcaatcggatatagaggatattgcggtacgctggaataaggatctacgtaatacgacatcgagcaatcaaaagacaagaattatactggttcaggccccttgaaaggtaatatccctaatccagttggtatgggattatacggtggaaaacacagattacaaaggatcggacggaacttatggggtttggcgagattgtagtccagatgattcgactagctctccgcgactngactccttgcaagctccgacttcgtaagctgtgtgggttatgttggctctgagaatcgatgatctatacctctccctgaggggttctctttata

SEQ ID NO: 42733 - DNA, 450 bp, Oryza sativa
  unsure (1)..(450): unsure at all n locations
tgaacggagtatacaacccgcttagagcaggttcaatgttataagccacctataaacacatatcgagaagataaatgatgattgagaagaattttatcagtgaaatagcgaatgacgctctgattatacatgttaaaaaaatatgaattatcaacttcaaattaaaaaaaaagagcattgccgaaacataattaagatgtgagtcaaggatgaaaatgagttggattctgacaactaattgatgtatcatattctattccacagtatcttcatggagatttagacaaggcacagataatatatagtgtgaatgtccgaaacattagttctatatatataagttatgtgaaaaacacattatctaatttcaagtttataataatcaataattaattaatgatacgctaataattngtctccgttcaagtgttggctaagatcaaaccgatg

SEQ ID NO: 42734 - DNA, 416 bp, Oryza sativa
  unsure (1)..(416): unsure at all n locations
agcttgntcgaaattctattcttggctactgtttgcattaaagaaaaacaatatattagtatcataaatatgtgatactgtctagtccatagtctagagacttacatcctctgcgttaaccctgtacctcccattaaccgtgaggaattcgcacgcgtaatacccgcagaggacagcgcctctaggttgcttgtgacactccacgacatatcatacaagaaaatagttaaattctgtaattagcgaaacagtacgaatatattaaatgattggagtattaattaccggccaatatgtatgtactagcagcttctccctagttcgtgtctggttctccacccctgaacttgtagtagttgtacacactgtatggatgtcgtaccgtttctcattaagaaagatatttattataatat

SEQ ID NO: 42735 - DNA, 413 bp, Oryza sativa
  unsure (1)..(413): unsure at all n locations
aagaggaagccggcgactcgagaagatgatatcatcgtacttgtcgatagagactcgacgcacccctacctaacgcgccaactgtcgaaacatgaattctgcaataaataaagggggtagcgcacgagacctaaaagtggatggatgcggagacaaggatctaaacaggtttaggccctctcaatgagaggtaataccctactcctgtttacggatttaaatccgccgggtgtagtatagatgtgacgatcatatgtgctcatgccccctagagggcctcctgtccaccttatataggatgggagccaggattacaagatagaaaccttaaccaatacagcttccggttcctaaaactatnttacaatatggncaaatcaagactttatgtcgctccatactataaaacgaaa

SEQ ID NO: 42736 - DNA, 427 bp, Oryza sativa
agctttccccagccccttttcatcaatggactcctgacgtctacgaaggagtgtggttcgttcgacaaattcctacctctatatctatctctgaggagtgtgggttttgcaaaactccatatatatgcagaagagaaatgctatccccactccgaccaagacagaacttttaccaaaagtttattgtgatctttttgttcaaataacaattaatgtgaagcatggtcaggaacaacgaatctctttatgataaacagatccattttgcaagctcgttattacgggtagttcctacaaagaatcggactaatgacgtatacaatgcttgaattatcgacgtagatgctacatagtgggttctcatccttcacagactactagtgtaatatgagcattcgttgacaaaaagatcaccctaagatgatca

SEQ ID NO: 42737 - DNA, 412 bp, Oryza sativa
  unsure (1)..(412): unsure at all n locations
atttacaacccacaactattatttatggttaacaagggacacatggttgcttccacatgtatgaatatgatgggaacaattcttgaaaagaaaattaccgcaagttgttgatgaagtgactagtacagacaacatgtatcaaacatcaatatcactagagtgtgagttaatacacaagttcatcgaaatcagttggtctacttaactgtgttacttatcactcaattttatgctttctgcatacatcattaaaaacgtacgattgttagagagttgactatgacaccatcgacctaaaatcttagttctgtcgtccctcaatatatttactgtagaaaccttttctacaatattgtttcacaaaaaacctttgtgcaattaacggctctaatntaacgtacgtactcttacc

SEQ ID NO: 42738 - DNA, 382 bp, Oryza sativa
  unsure (1)..(382): unsure at all n locations
cagcttgggcaccaaatcgtgtatatctatatttttcgaatggcgctaatactctntataggtctatccggctctatcacaaagatattgctttcaaaaaacaagatactccattcgttttgtaatatatgacaccattgactattttagatacgtttgaccattcatcttattaaaaaattagtcattattatttattttattataagttaatttatcatcagatgttctttaagcatgagttaatatatcttttatatttgaataacaatttctaataatactaatggtcaaacgtttgtcccataaataatagcgctcatatattaaacaacaaaaaaattatttttaaactaatgcacgcacatatttaccaatgact

SEQ ID NO: 42739 - DNA, 450 bp, Oryza sativa
tatcacggcgaagctccatggctaagacaatgcagctaatacgataaatgatgaagcctcatggcgaagagcgtgcatcctgtgcgaatgtcgaatggcgaagagtatacgccgaatgaggatgacttcgccatatcgaggccagctccgggaaggcccaaggggccatcccaaccgcttcggcccgttggccattgtgccagcgatcgccaatttggcctattaaaggcccatgcaccttaattacactatatacccatgtaaatgtccctttcataagggcaactatataaattcccctgtaaaacctaaacccaaatagaggggcctgtaatagggttataaatagaccccctaggccatgttaaggggggattatggaaaacaattctcagttaatacaatttactgttttcaccactgtgaataccacgtcttcactatgcagtg

SEQ ID NO: 42740 - DNA, 378 bp, Oryza sativa
agccactccagatggatgacggcacagatgaatccgcgccccacaaaactcgccacctcctcgcggatgaaggctagacgttccggggccagccgccgtactttctgccggaccggccttgcgcccggccgcacagcgagacagagctcaatcaccttcctggggaccccgggcatgtgcgctggtctccatgccaaaaacgcaacggttgcccgcacgaaggagacgaacgcgtcttcctatttgccatccagaagaccaccgacccgcgtgggcttggatgggccgatcgccaaagcaacctccctgaccgaggacctccccccatgtagcaatccgctgcctcggggcggggggggggaggagccagcctatcgc

SEQ ID NO: 42741 - DNA, 450 bp, Oryza sativa
tgaggatgtcatcatgctccaattaatgtctctcacatcaagatgtctgaagatgagctgtccctcactgaggagatatagacaagcaagagagcaagtatgaggcgttccgctacggatatgacttctagcatacgtctgacacaacaaagaaaatttgaacaggcaaactactactttcgtatccactccacacatccatacatgttataataatgatcttcaaaataatattccttttaatctacttatccaatctgcgatatgatcataccattatatttgctataattaaatctttataataagatatcacatcattacattccgatgaaagaaaaacatatgtttcaatccgttaagtttaatgtttcagacacggtagcaatatgtttcattgtgagttttcattatgtgtcatagtaactgatttgttttttcaccacgtat

SEQ ID NO: 42742 - DNA, 437 bp, Oryza sativa
  unsure (1)..(437): unsure at all n locations
agctctaaaattgctgagttaaccagagtttttataaataattacattattgattgtgttgcaagtccacattatatataatggtgtagatcaattggatacctactagagcgctaatacacccacatgtaaaataaggttatataattagaaataaatccacaagttgaatatcaaatacacttatgctttcaatagattgtaatatactccctccgtcccactcaacgggcatataaaattttacatgcagtcccaaggaataaggcgtgtgactgcttcctctcctcttttcctagatgtgtccatgcgaatgcagctgtattgcctcgttgcaagccgagaacaactgcaccattaaactcgcgactatcgaccactgcatgcaacggctttgcatattgcgtggaagacccaagtngaattggcatggaatg

SEQ ID NO: 42743 - DNA, 439 bp, Oryza sativa
agcttggcattcttgtactcgcttgagccctcttgtatctccgccaacttgttccaaatctcatatgcggtctcaaggttgctcactctatcaaactcctcttggctcaaagagttgaacaaggcattcatgcttgggcattgagttggaggttgcggtgatcaatctccgtcaagggtgtgccggtgatagcaaagcctacatccacaatactctaaatatggaagctcatagctttgaggtgagtagacattttaattttccaagtagagtagtttgtgccattaaacatgggagccttccctacatggttcacctcgttcgacatcttctctctaggcggtgaagctcaatcaagagagaccaagctctgataccacttgtatgatcgagatgtcgactagagggggggtgaataggcgatttaaaactaaatgac

SEQ ID NO: 42744 - DNA, 447 bp, Oryza sativa
  unsure (1)..(447): unsure at all n locations
agcttaggtgaagcaacaagtggcacactctatctatctgctgaacaccaatcngttgaaccacattgtgatgaaattgaataccttttgtaccaatgtatgagcatgtgggtgttgatgatgaatgtttgtacattgatatgggtccaaaccagccccctcctcctactaatcctcaaaaccaaggtgggactgaagaaagggaaggtgaaagttctggtgatgatgattgcaatgagactgactgattatgaatcatctgatgaggaagtagaagacatagatgatgaaattaaagacaaggagccagagaatatgcctgatgctttttatgataagaatgaccctcctatgacagtatgaactgtttattctgatatggatgctcttaagattgctttaactagccatgctgtcaaacatgagttcaactatgacattgagaag

SEQ ID NO: 42745 - DNA, 274 bp, Oryza sativa
atggccaaggacaggcgagggatcgatgcgcgacatcacgggatagctcttcacgcaaccctcgtacgcggcttccagctgaatggagaaccctagtttagcggcgcaactctgtactcgtcgcacggagtggggacaatgtctatagttcctgcgtggacaatgaagtgcggattggacctcgggatttattgctaaagctaccccaagtgcgaaagggcttatgccagacagtacctcagcccagtactttaacagcgtgcccattgagttc

SEQ ID NO: 42746 - DNA, 438 bp, Oryza sativa
  unsure (1)..(438): unsure at all n locations
acagcgtaagcagactagtgaagataaagctgagcataattcctcctcacgagaacgacttgtctacttacgagaatatgcatttcgaaatgaaaagctatccccagaaaacaaataaaatgaataggggcgtagcgaaggcacgtagcgatgataatgttaaccatcttctagatgagctcattgctcggattcgcatatacttgttctatgctctacatgctaatctgagtaaagaggaggcgcggagagtgagatggaagagagaacacacacgatcggcatatagcctttagagtcgtttttttattggtagacaccgagaagggagccattgatcctagatcagtaagagaaatacgtaatgaatcgggcagagactcccttgctttattcanncattacatggnctacacggtgattgtgcttacattatat

SEQ ID NO: 42747 - DNA, 437 bp, Oryza sativa
caagcttgcaggtgtgcttgctagtcctgtttatgggtcaccaagctcttgtcgcccaggaagttgtcctcgtcggctcgtacttcttgtggaaaagacaagatttggccgcattaggatccttctcaggctcagatgttgtcgatgttgcgttctccgcttccgtgggaggatctttcgacatggggttgtcgaccagggtcgtaaccacaccgttctcgctcctgatgattgctgggttagtcaagatcggcattgtggtgtagaccggggtcgacgattttgctgacttgagtccacaccagcatcgtcgaagctgaagctccttggttaatgccggagttgacgctgtcatcggggaggcttgaaatcatagcagtagaaccttgagcaccaagtccctctacctggcgcgccactgtcgacgggggataccc

SEQ ID NO: 42748 - DNA, 469 bp, Oryza sativa
  unsure (1)..(469): unsure at all n locations
ctaaaacaantcagcgcaaagtgacattactttttattccacaaacatcattcagacataagttaacttgatagttaagcaacgatatctttcaaataatgcagttatttcctaacatgtaagtccatgtggcatttcatctcatgttatttttgaaatcatgcagttgtcgtcccaataaaactggataaacagattcactagttaaactacaatgatctattttcgccaaaatcctaccgttcactacatcatatcacaaaccacagaatcacaattcaaatatctcaattgcaacaaaactggtataccattttagcaaacaacaccgctcactatcctatcatgagggtacatgtctgacaacagcgaactcgctacatctgaatatcaattcatagcaaacccacaaaagatacaacatcntntttcccaattaggacaaccaaacctcacattacaggaacac

SEQ ID NO: 42749 - DNA, 433 bp, Oryza sativa
agctttgtactcttattagaatactctcctagattacttttatggtattgaaatactttccaagtatatgagtacctactttacattatgttcatgttacattgaatatacggctatcttatctgggagatgctttggtgcgggtataatgtttgcttatgcaattactctgtcatgacgaatgatggagtaaagaaatgattctccctttttcccatactttctctccaattggttctcttggcatgattatggaaggggcatggctatattttctttgctcaatgttttgagagcaaactttatttccttcttctcttttttgtttcacagccatgcctttacctccttttctcattttctttttgccgagaacttttctaggagaagaaagcattttttaatgtaggagtctatttaaatggacattttt

SEQ ID NO: 42750 - DNA, 431 bp, Oryza sativa
agcttgcaaatgcccaataaacatgtctttttgtcttagacactcccttgtcatatgttcaaatcaaaggccctacatcgaccagaccaccaggaagtaataacaacagcatgggggaagtgattacttctgccaaatagtgttgatctttgtccttatcacaaactcgcactttactttgtttgtgaattaaacaactgctaccatttattgcgcaaaagcgctcatgtctcattcaacatcaacaacaggcaacaagcaagataaaagaactatcaaatctagtgggtaactgttctcccacgggtatagctttcctagtacatgaattttcataccctgaaggacagttaagaacataacagtagaataaatctgtcatctgggcctttgccaaagaataccgaaggtataactcagagacaactaat

SEQ ID NO: 42751 - DNA, 411 bp, Oryza sativa
agcttatcgatgatggtgagtttgttattgttctcccactgattgcgttaggatttggattaaatatattgcctaacagagccaacccgattccgtcggacaaaaattaccctaaacagcggcggcgtcacaaagatgtccactgtcggccacataattaacccgtgcagtcgtcgtcttctccattactcgtattattaagtagtgacacttcactgtcatggccccaaatagggccactaacgaaatcttgctgcctctctcaccaacgaactgaggccgtcagatgccaaaaccaacggggtagatctcttcaacttgctactgccgctctacagatacgggagaataactccttcagctttcctttctgctgcagtgtttccattcaaaattaggattatcgccttt

SEQ ID NO: 42752 - DNA, 479 bp, Oryza sativa
  unsure (1)..(479): unsure at all n locations
tcacgagacacgacccaatgcaacttgatcattaactgatcatacttcagntagctgcactggcacgtcggcgcttctcgtcgccgcgtggacgccggcgagccgccggccttgcgctccttggccgccgcgaacaccctggcctgccactgcgcgaagtatgccttgtcgtggccgatctggcggttcttgtatcaactgaagatgtccggcgagccggggcacggctcgccgtggggatcccaccacgagccctcgtgccgcatccccgacctgtccgcgccccaccggtacacgaactgcccgcctcccgccctctctcgccaccccttggggtagaactccatgatgctgctgttcctgtccatgaacaccaaaatcgtcatctgcgccccgtgcgacgagatcagcacgtncgttccgctcatcaacttcacctgcgaaanaaaactgagagaaacacgcgtgttacatacact

SEQ ID NO: 42753 - DNA, 370 bp, Oryza sativa
  unsure (1)..(370): unsure at all n locations
agcttatctcttacgctgcaggaatgtattatttataacatcaccaccggcttgccgtcatcgtcgccgactggtgtcttcgcctatacggctgnttggtcacaccaccgttgttgggcgtttacgtcttcaccgaccggccgtctcgttcgccgtcgactggtgtttccgcctgcacggctggcctattatgaccgccgttgttgggcgtctacgtctttaccgaccggccgcctttttcgccgctgactggtgtttccgcctgcacggctggcttattatgccgccgttgttgggcgtctatgtnattaccgaccggccgtctcgtccgtcgtcgactggtgttttctcctgcacggttggcctatta

SEQ ID NO: 42754 - DNA, 444 bp, Oryza sativa
  unsure (1)..(444): unsure at all n locations
agctntactgtttgacaccttttattatgtattgtaccaactcctaaaaagttgagtaactgcggtataaaagggttttaaggtattgggcacttgatcacgcgcactttggcctaagcaaaaagtgcctgagtccctaaaagaacgtgacaggccacacctgaaaatatgggctgcagacatattaggcctatgccaaaaaatatgccttcgacaccctttaaaggatgacgcatgtaacatgctcccgagtaatagatcttccgggtgatatagaccaagtgtagctcatatgaatagcttctgatctgattgattatcccttatgggatactccanaatagatataaaaattgaatcccgactggcacaactattcggttgataacccttacggcgaataataaatagtccagtctttaagtatagaaaatagacccatga

SEQ ID NO: 42755 - DNA, 459 bp, Oryza sativa
taatgcgctatgctataactcgctgctcgatacactctgctctttgaagaacaccgtcacgtagcggaggtgctggagttaatgggaaatcaaggcattgagcccacagttgggacgtacaaaatcctcgtcgatgcttcattggcggctagagatatcatcaaagtacggtggacaaggctcttgcggaaaagatggtcatggtctcatggagaagatgtgcctcgagctggatgtgtataccgtatacatacaatatggtatggcagataggatgcatgaggctgagaacctattgcatatcatgattgagaatggtgtcagaccaaacaatgtaaggtgcactacgttgatcaacatcccgtgcaatgaaagtggcatggtcgaagcaataatgctgttttcagagatggcacgaaatggagcaaaatcaaatctggtacctacaatgtatgattg

SEQ ID NO: 42756 - DNA, 427 bp, Oryza sativa
  unsure (1)..(427): unsure at all n locations
agcttggatcgaggtgaagaatgctagctattgccaccctcttcgataaatctagctcatccaagaatccaccaaagtatccaacgagatcacctcaccgacatcttaggagacatcaacaaggaaatatccactcgttctcatattgcaaatttttgtgagcattactcgtttatgtcttctcttgaacctctaagggtggaagaagctcttaatgatccggattgggtgatggcgatgcaagaggagttgaacaatttcacctggaatgaagtgtggactttggtggagcgacctctgcaaaatgtgattggcacaaagtggatctttcgcaacaagcaagacgaggccggngtcatgataaggaacaaggcgaggttagtggcgcaagggttcacccaaatcgaaggattagatttcggtgaaa

SEQ ID NO: 42757 - DNA, 379 bp, Oryza sativa
  unsure (1)..(379): unsure at all n locations
tcggagaagatgtcttaagtggagtcctggcttataccccatttgagcgcctgtgaagatggagccgtaggcccgctaatccgctgctgtttatttttgattgccaggcctgaagcgcctttgtaataatgtaaatattatcgatataataaagatgtgtcttttatatcatgtttgtgtggagtaccccggctttttctgtgacggngaataatacactagcgttcgggaaaaggcaatttttccggtcgcgacaagctggtatcagagccatctcgactgtatgataagctaagtggataaaacctaacgacatatcttataaatgaaactatttctcgaaagtcgcttttccttctttcccctgtgctatgtgcaa

SEQ ID NO: 42758 - DNA, 440 bp, Oryza sativa
agcttcatgcccatggggcatttctagttaagctatgtatgtaccctatctacattcggcagatagcagaaaatagagtcgcacacgcgacacacgtgctgccgtaaagtatatatgatataacagttgtttgaccaacacatatgcagcttcattattaggaatgtgtttccaactactcagtaattagcatttcatggtgaagtcacacatacctttctccatggacctgacttagatgaactttgaatttgtgctccggtctgcaaaatagtaagaaaggtaagtacaggtgtcataacttcagctttctatacagtttaccaaaatagcatactcgtagttttaggtttcactctcacaagaccagaaataaacatgttaccatggagacgatgtaaaacgtggctaagttgtcatgcatattagaaaatcattat

SEQ ID NO: 42759 - DNA, 441 bp, Oryza sativa
  unsure (1)..(441): unsure at all n locations
agcttgaggtaacaagtttgactcccttgttcatcataaattatctatttttattgcaacttttttaccgtcattttcttccggaccgatatacttcaaaaataaatataatacttccattatctttcttcccacgttactatttccgacatatatactccaatggtacattcaaatatgtagtatacttcttcttttttaccgtccttttcttccggaccgatatacttcaaaaataaatataatacttccattatctttcttcccacgttactatttccgacatatatactccaatggtaccttcaaatatgtagtatacttcttaccgtccttttcttctggaccaatacttcaaaaataaatataatacttccatcattntttcccacgttactatttctaacatatatactccaatggtacattcaaatatatact

SEQ ID NO: 42760 - DNA, 477 bp, Oryza sativa
  unsure (1)..(477): unsure at all n locations
gcttagcgagtctaggactatcggattggcaggaagcaactttcttattctagggtaacttccgggcatattngagtcgcccttatattccttccaggggaatgtactatcattggtacacgcaaatcttgggttttccaaccatttcttttcacaaaagcttgcgatatgaaaaaatgggaagctcccgaatcgaacagaactattgcgggtacggagttgacaaagaacatacccatcacaacgtctggagcatcctgagcggattcagctcgaatgtgattcacacggcctcgaccaaagttggtggaagcacgtgaaccttgtccacttgcctgagagctacgacgagactgagtttgcgctggagtacgagttctggcagtgctgccattagcatgccctgagttggtgatgtaggattctatgacactgtctacatagtgacccatatggttgcccggaaacactgaactg

SEQ ID NO: 42761 - DNA, 417 bp, Oryza sativa
tgccgcatgcaagcttcactcatctaggcaacaactaagtttatatatctgacgaagcacactctaccaatatatatatacaagaccctctttgttctgtcataaaatatatattcaccttccaaaccacagctttatatggaagtaggacaatgtgtgtaaagcataacaaggagagaagtgggagtatcttaagcacatcattttgctgcagatgctgcactagggagatcgaagctgccaattatcaatatataactttggatcgatagctacactcatgcattatttaaatttccatattaattgtgtcttcacgcgtgcatgtgacctttgtgtaggaataacagtcgttatgaaaatacagatcgcgagcgtcttcattggatgagcatagcaattattttctccggctta

SEQ ID NO: 42762 - DNA, 366 bp, Oryza sativa
  unsure (1)..(366): unsure at all n locations
gtcttccgtgacaagaacactattttttactnccgnttgcagcggacgcatgccatgatgtacaagagtacctatatggcatctctcttatatttaaaacaaaccaactttgcatattttgaccaacaattggtcagattaagcatgcaatgtagcattaaggttctatcaagaatgtgctttataagataccaatgcgaagtgtaaccttaaagacattcttctaatcataaaaacatcttatcggacgaaaatgtctattatcgctcaacactacatggaattatcccaatcttttcgagtatcagttcatgatccccgctatatatcatatcttagttgaatacatgactccttctaaacata

SEQ ID NO: 42763 - DNA, 449 bp, Oryza sativa
  unsure (1)..(449): unsure at all n locations
agcttccaattcatcagaataagcaataattatatacttgangaagagcgaacaattctagataataatttttgtattgcatttgccaataatgtataaacatgtttaatgctggggcttactaatcattagcttagttaaacttgagtatatgtaactaatcaaatcacataatgaatttttggttgaaatatgtttcttcttattatatgtaaagtagatctgaaggacgaaatgccaataattaatgcagtgtagtatgaaaacacaaagacgtatgagatttttttaatagagtatctgatagaatgtactgatgatatatcttaaaaatatagtaaattatcttagttcaagacaagtacatgaaaaaaaaacttatgcttgtttcaaaaagaagtacctgatcaatcaagcgaagtgcttcaatataatcagcacaagtatat

SEQ ID NO: 42764 - DNA, 486 bp, Oryza sativa
  unsure (1)..(486): unsure at all n locations
tctcaagtgaacactgaaatatctaagatgatcaagtccatgatgtatatatttgagaagtatttgaagatntcttggttggcactatctctacctgttatcgnggaccctatatttaagcttaagttctcgagttccgtttcaggcctgcatttggtaatgataccgagtctatgattgtcaatgtcaagaatgctcttcgagaggctctcagtgagtgctaatatcaacttcactacggatctaacaggcagtgctgatgttgatattggagtatctacaagtgaccggttggctgattgggatcaacatcttaaccatgacattcagatgacggctganatatgttctgagtatgatggatatatgtataagccctcgaagtgatgctttgacatcctaattcttttttttgaaacggacatcctaaattggtggaagctaacgcttctgagtatctaacctttgctcgcatggcctgatcta

SEQ ID NO: 42765 - DNA, 440 bp, Oryza sativa
  unsure (1)..(440): unsure at all n locations
agcgacctgcngcatgcaagcttctattatcttaaagaaatagattgttttaatatgactacaacgaggataaaaatgagtgtgtttatttcacgtcaaaattggaagtttggttgaaattggaatgatgtgatggaaaatttataagtttatatgtgtaggaaagtttcgatgcgatgaaaaagtctgaagtttgaagaaaaaaaacaaggccctagtgacaaatcaagaacactttggtatgttgtcatggaaatctcacaaaatgaacagcatcagcaattcacattcagagtggtgaacaaaaagaggggaaaaaaaggggtgcaaacctgcttgagagagattgggaaggtgagggtcccggacgccttcggggtgcgcacgatctccctgacgatcccccttcagcttcggcagacgccggcgcacgccaccac

SEQ ID NO: 42766 - DNA, 474 bp, Oryza sativa
tactaagctttgacagtgcattgtgcgctgacatttctaaggtgtatttttatgtttcttttataaaaaaaaatatgggaatgtatggaggtagtatggatcatggctcccgaccggaaaaaccattcatacaatgctgagaggattgtgctattcctcacacagggctttcaaagtcgagtgaaaaagcctcactggagacctgtgtaatggaatcttcaatgcatacttccactacctcgccatcgtcccgtttatgtgatggcggtgatcattggggggatcatcatgtgaatgccgggcatgcaggcatgcctgtaacaccgtcaggatcccatgaaggtgtggatcgacctccttgtgttcacgcatgtgagatgaatacgcctgacaaggatcgtgtgtcagacatgtatgtgtcctgaacgacctttgcaataattacaacttctgtttcttcttaattgctgagtg

SEQ ID NO: 42767 - DNA, 422 bp, Oryza sativa
  unsure (1)..(422): unsure at all n locations
agcttctntagcttaacaatcccattttgtatcttttgtatttccgtntcgttgagatctagcgtcagcaagttagagagcttctctatagaatttgggaggtgcttcacctttgaaccccgtaggccaagatgtcgaaggttaaatagatcaccaatagcatcaggaactttttcaatgggtagtccagttaactcaagtactgacatatacctacatttgtctgctaccaaatgtagcagacatggtgatggtggtgtcgcttcgtccaatgtgatcaaacaccggaggctatgacattcattcaaaatggcttgattaatatgcttgtctaatttatgtattaccacgcggcgttcgtccttccnctcaagaaatttaccatgtttattctcacaatcgtatgaacaaccgaagtgctc

SEQ ID NO: 42768 - DNA, 289 bp, Oryza sativa
gtatgctctccaatgcttgtgtgtataaagcctatgttatagaatatataacttcgatcataaggaacaaattctagtcgcgtagcttcataataattttgcaaagcttacgcataatttccttcggattgagccaacatcccgtacagtcgttcgtctattcaaaaaatcatcgttccaaaacccgacatgaggttttcacctcataccggtcctcccttttgtacatagtactaagcgaaaaaatctagagaataaaaatacaattagttccctctcattatggacc

SEQ ID NO: 42769 - DNA, 432 bp, Oryza sativa
agcttcctttatagttcttctaaatatactcttaccgttctaaaatatactagctacctaatattcgattggacgtatcctatcctagtgctggtactagtggctatattttgagaagtaggaattacgaaataactcttttgtcccaacgtactaagacgtcttccaggattcatttacacaatgcttatcagcaggttggggtctttgcggttctcatataattaacatatatgaaagagaattaatgtagaaaataaacactttgcaggtatatatggaactatggattcaactataaattaaatctcaaccatatatatgatcaataacagtaacagtcaagactagatgcgtatcaaacctgtgttattatataacatctttatatcggtacagatgcatatatttcaggcgcatctattgcattct

SEQ ID NO: 42770 - DNA, 465 bp, Oryza sativa
  unsure (1)..(465): unsure at all n locations
gacctataaaactcagcttaattccacacaggagtanggtattacgcttcctatctgtccgaacctgtataatcccttgtctctcactcgcttgtgagcaatctcgctagccagatccctggcggagatacactcttgatcatcgcgccttatcccccggccgaactcacaaaggggggtctcacaacctcccgctagagaggatcactcctcgacagagtctgataggaatgcaaactctcttgagcaccgttggggtaacattcacgacagagattgaatcgtgacccgatgatgtccggggcagtcctgttataaagtccattccaatctcctcccatttccattccgggattngaagaggttggagtaaacctactggtctttgggctctgccttcactcgttggaaacatcgagagtgcgacaattcactatttctctctcatgctgcccaccnaacttt

SEQ ID NO: 42771 - DNA, 355 bp, Oryza sativa
  unsure (1)..(355): unsure at all n locations
tcttatcaagcaaaatgttgctggccttgatatcacgatgaaccatgcgtggctgtgcttcctcatgaagaaatgcaaggccagaagcagttcccatacaaatagctgctcttttttgccagnttaacggaatacacctactccttggtcctgatcacataggtgaatttaacacaatggctggactttacttgatcaatatgtcagtatcgatttaatgaacctaccaagtaaagcatgtgccaagctattgttctctgcatattcatacactaatagtctgttagtcccttcaacacagcaaccaattagctttacaaggttggggtgcctgacattggatatgacatttatc

SEQ ID NO: 42772 - DNA, 354 bp, Oryza sativa
ccaatcaggcaggaatcttgggcaacaaacgacggcacacgtaggtgtcgtgcccggcagccacccctatacaaggaagaggctccaccactgatgctaagtacaactggacaaggaaccacgttccaagaattacaattatctccctttcagaacaaaagaaatacacctctatggagaaacatgcttatatacaataggagcaatgtgagtacacccgagcaaagaattgtaaactcaacacaagcaaccaaaatggaaaccaggatgatgaccaacaaaagctcagcgctggccatatccttcaaccagaaccaccgcacaagccatcccaacataagaacactataactc

SEQ ID NO: 42773 - DNA, 444 bp, Oryza sativa
agcttcacctttcctccgagaattgttgttaatggtttaaacaccataattgaaggcattggcagccaaaacttaagtatgccatgggttgtaagcatgccattctttggtagtcctcagcctcagccccatatatatgttagtatacacttaatttcttatcaaattttaattcatttatggacaataaattgttgtccatgcttttgtatggcattctacacttttttgataaagtgaggtgtggtgaagttagccaccaactaaacatgtcctaactgtatacatgtattcataatatgccgttcaatcaatatattgcataagttatttctaggggttatctatttgtcaaatgcctgttttttttcttatctaccgataggagaatatatttctttagacagaaactttcttcaaaatctttcaaatatatttacagta

SEQ ID NO: 42774 - DNA, 428 bp, Oryza sativa
agctttgtctgcattacatatgactcatattatgcgtaatatctagaagtaaaattttcaaacattttctcacaccatacagttttcataaaagaatgtgatgtagcccaagtgcccaactgtctagtatcatctttaaaacagtctaatctgaaaataggttgttacgtgtacatcatcttttctaagcccattccagtttagttagtctgtccttttgtcatccatagtggattcatttgttggactgcactgaacaaatgaatttttgatatgctgatttgaggttctaactacactactgcatggcattcaatgtggatgctcctttggattcaacaaatacaggtgcaagcatggaattggtctctatttgtgtatttttacttgattagaaagatatgttcccaccactgtgtattagtgct

SEQ ID NO: 42775 - DNA, 450 bp, Oryza sativa
cgaccggatcttaagcgactgagctgcagctattaatatttaaatttgtattaatctgctgcacaactatccacaaataaatatcaactttattggcggtcaaggcaggtcgaatttaactggacaaaaattatagctttgatacacagttaacaggctgaaggtaaaagcaagaggtcaactgagactcttgtattaatcctgctcgctgaaattaacaaaagcttgatcccatcacttatttgctgcctcttaagacatgaagcatctttacggtttacaactaccattgaactaaaataaatatttgaatcggagttgtgcatttgccatcaagggtttctatacatttgcttgacatacacataccttcttttcctgtactagagtaacagatgcttcttgctgtgcttgtacgctcagcatcattacacatacttgatgcattct

SEQ ID NO: 42776 - DNA, 444 bp, Oryza sativa
agcttcctgcagattggtatatttgatactttctctgttaaaaaggaaaaaaactttatcttttagctatgagcatttgtaaacattcatagtaaaaaataaaagcatttttagaatggagatagtacggacaatgcaagcattggctgatctatgaacttgacaaacccgatgacaattgacaaatatatagcaactacataaaaattcatacacaaagcttagcttatggacgtgactacacagttagtggtagctagtttgtcaaaatcagctaccactctatctataagagacattatccacctatacttcaaatacaattttctcttatactactcatccgatctacgatccgattgcaccattgtgtttataacaattaaatctttataataagatctcacatgattatattctgatgaagaattataaattactttt

SEQ ID NO: 42777 - DNA, 333 bp, Oryza sativa
ctgagctctgacgccttgcgcttatgaaacagcttatggtttgcccggctgcttcacttctatgttgcaccgtttcatgtgcagaaggccaactcaacgccggtcgtcggacgacaacctcgggttcggtgacccgatcgctctatccctaaatacactggcagagtgagcctgcatatgaggtgttctatttctgaggagaaaagaaaacatgttctgtgaaaatagatactaagcaactacacatacgttgtgatatatgtccgtacactcttcatgagatacaatgatggcagacgagccataacctaatcgccattttggcaggggact

SEQ ID NO: 42778 - DNA, 445 bp, Oryza sativa
agcttcctttatagttcttctaaatatactcttaccgttctaaaatatactagctacctaatattcgattggacgtatcctatcctagtgctggtactagtggctatattttgagaagtaggaattacgaaataactcttttgtcccaacgtactaagacgtcttccaggattcatttacacaatgcttatcagcaggttggggtctttgcggttctcatataattaacatatatgaaagagaattaatgtagaaaataaacactttgcaggtatatatggaactatggattcaactataaattaaatctcaaccatatatatgatcaataacagtaacagtcaagactagatgcgtatcaaacctgtgttattatataacatctttatatcggtacagatgcatatatttcaggcgcatctattgcattcttcatattaacaag

SEQ ID NO: 42779 - DNA, 467 bp, Oryza sativa
  unsure (1)..(467): unsure at all n locations
cacaggagtanggtattacgcttcctagcggcccgtatctgtataatcccttggctctcactcgcttgtgagcaatctcgttagccagatccctggcggagatacactcttgatcatcgcgccttatcccccggccgaactcacaaaggggggtctcacaacctcccgctagagaggatcactcctcgacagagtctgataggaatgcaaactctcttgagcaccgttggggtaacattcacgacagagattgaatcgtgacccgatgatgtccggngcagtcctgttataaagtccattccaatctcctcccatttccattccgggatttgaagaggntggagtaaacctactggtctttggtgctctgccttcacttcgtggcanacatcgcagagtgcgacgaattcagctatttctctcctcatgctgacccaccanaacttttctttgaagcttgatacatt

SEQ ID NO: 42780 - DNA, 445 bp, Oryza sativa
  unsure (1)..(445): unsure at all n locations
agcttttctctaatcactgacactgcatttctgtttttgacatgcatgtccttggttttcaaactgaatctgtttagttgatgtaacttgatatgcactaggaatgacaggaaatgtaaacataaatcaaaccgcagaaagaagaacttgccaaagttatagggttacagtacacgaagttagaatctgtcagatcaacagaaccttgatacagtttctaaattattgacctagacgcttccactattgattttctgaactgaactggtagctctgctttgctcgcagaaactgataatggttctagggagcagttccaatgctaagggtgcacataatacaccatcagctctaccaatacaagatcatatgtcctgngactcagtaccaccaatagttcaatcaaaccatcagagctcgcctctgatcgagcagaagatcatgg

SEQ ID NO: 42781 - DNA, 466 bp, Oryza sativa
  unsure (1)..(466): unsure at all n locations
tgcagagntcccatcgagggaatctacgcaggagaagctttttatttgtttctctagatgcaaaacagcacttggattacaagaggatggctttcttgtttcatgctcatcgtctttgtcctcaaaattttacttgacatatctttggagacatggaccatcagcagatattcttccaggaaaagatattttggcatcaccacccttgaaataaaagtgatggtgtgcaatgtatcttcagtgaacaagatgatgcttggcaacttgagcaatgaaggttctgctcataattctagnttttggtctgaaaaggatggatgtgtgtacaagccagtaacttgtcagacttgctcttgcaaaaacgcctgtgtacaaccctcggagcacaagttgtgcaactgattcgtcaataacaattttggataaggacttggcatattttgttgatcttgtattgaatgctatt

SEQ ID NO: 42782 - DNA, 429 bp, Oryza sativa
  unsure (1)..(429): unsure at all n locations
agcttgacattacggaccactgagtctatactctcgggtaccagccctggtggaccactcggacaggatgatccgagccgtcaaacttgatngcaatttctgaccatctaatatactggggtgcgcgaggctgaacagcattgatctcccgttcagtcaacttttgcttccttttatactcataagccagggggccgatgaagatatggctgagctccttgcggagagcctgaaatcctgccggtgtgtcaccgccgtgcttcttcctcgacgtactttgttcttcgtcggagttcttccgtgtagtcttggtgtattgctccgcacactgcttgtagacgaaacaatctttggccacgtggttggagttaagatggtgcgggcattgngagttcatgatcttgtctaacgtgttgacgcgcgaacgct

SEQ ID NO: 42783 - DNA, 356 bp, Oryza sativa
  unsure (1)..(356): unsure at all n locations
tatncgattccttgcggcgatagagagaatctactctgatgcgcacagcatgngccaagcagtgtgtccagtgcgtcatgaaccgattcctcaataggcaaagttggccatatgtctccttgaagaaagaccaagttaacaattgttctacttgaccaatggctgaagtatagatctcatggcttgcttctattctaccatgacatcagggatcaagaacggtgtcaagtacagactttggctaatgatgaggattctggtgtgccttgcctgcccccgcaattgacgtaatactcttcacagtcagattcctaaccgaactggtnaggagagacccactataatatatatagcta

SEQ ID NO: 42784 - DNA, 438 bp, Oryza sativa
  unsure (1)..(438): unsure at all n locations
agcttccataactntcataactggaagatattgataattcaagacgacattattataactggatggagtagtatttgttacctcgcgcatcttccgcatttcaactggactgatacatgctgcagtggatttctcgaataggtcaagtaacctaaaggctcggttcttggcatcaaccaaatctagagcagaggacatctccttgacaactagctcagcccattcagacccattggatgggatgttcatcgctgacaaatcagattcaactgcaacaaccatcagtaaaagagagtttcagatttccgcaaaattaactaattggtctggaagggtaatcatgaatgataggaaaacaaatgttaccatacctttaggagagaccacctcgtttcctgtatcaccggaagccgcctctgtgatctcagtatcagtatg

SEQ ID NO: 42785 - DNA, 348 bp, Oryza sativa
actaacaaaaatagtatgctacaagtgatgcgtctttccattctcaacattggtcaaatttcaattggggattgaccattgacataccactagtttcggtaccattccgagcaaaagtgattcttccattgaattccgcttactcgattccttcaaattacatttatctataaactcatttttctctatcatatttgttccgattaccaccatttgtacatataatatcatgtgaaattttgataaaatattgtataataatactatttggaaatcaatcgaatgggaaaaaagagagaaaaagagttgcggctgaagaagcataccgcaattgccgcgttcacattc

SEQ ID NO: 42786 - DNA, 434 bp, Oryza sativa
agcttaattagctagctagctagtgatcttttttcatcaatacttcaatttcacaaccgtataattaggagtgacaaacgacagtacagatgtgagatgttcatgttatgaatgataatgagtttaagctaattaattgagtccatggccatgctagtgtgacacaagttgtttccggctggggcgtcttaatatgattcgggtgagaggtccacatctccaattctcagtgcatcaattcgcagccaatattggggaaaacacatgtactttctcagctggagagacagtattgtcatcaaagagtctagctagcagttaggcatgtactacgcttttctgatctgaagtggtctcagaattcagaaatatcttcttgcaggtacatataccttgagctctttgacaccgaagttgaagctgcaatgtactat

SEQ ID NO: 42787 - DNA, 260 bp, Oryza sativa
acaatgaaaaatgaaataccacataatcgtgtgagtgacagagaaagccatttagggcatcagcatggcgcggtgttaaacttaaaagcaactatacgcgacgtgatgactcattcttctcacagagtaagaaaaaggcaagggggcaaaaagaaaaaaatttacacatacaatgtcgcattcgccattgatgatcgaacactctggacggcgggcctaatattttatggggatccaaaaaagtgttcgccatgggaatg

SEQ ID NO: 42788 - DNA, 444 bp, Oryza sativa
  unsure (1)..(444): unsure at all n locations
agcttgcttaaggatgagtcttccttatttcttctccattttatttgcttaatccctagaaacaaataatactacaagtacaagtggaagtagattattctaaaataaatatgcattgcaagcatagctaaatctcctttattttagttatatttatggtcgccattggtatataacgaccatcaacaccgtttcaagaggacgtgttgcaatgccttatcaactttgagatgacctttctactgtcattcttcaatgtaatgacgtatcttctatgtcaccttgtgaaagagatcgatattctcggtcctgtgtacctacacaacatgtttcctttagagaggtacatggctgttctaaagaagtacgtatgtaaccgttctcgttcagaagcaagcatctccaaagggtatggaacanaggaggtcattgagttctgtgttg

SEQ ID NO: 42789 - DNA, 491 bp, Oryza sativa
acggaccataaaactcagctggatcacatcagcgcacttcggtattagctgtttatttgtgcgtgctgaatggatctgctcacgaaggcgcctaaagtccagattcaatctcaacttggtaatcatttgatgggcccatctgctgcattccaaacctatatccccgggaatccttaatagactgaaaaaccattattagtcccacattatcttataattaactgcatcttcttataatgtatattatattcaacctcatcactaacaacatctcgttagattctacaacattttcttattgtattccttgcgaaaagggacagtggcgacatatacaaaatcaagtgaagaaatgtgagtctaattagttgctactatatactcgaacattgacactagtaagacggcttgaatggtctaaagatgctagacctaattaacaacggacggtgcagataacaattggtaattaattagctagtactgataac

SEQ ID NO: 42790 - DNA, 423 bp, Oryza sativa
agcttaagccagtgcaagtgtgctgtcctactggtacttgaagctgaagagagtgtgcagatgcaccatgtatatatagtactgtactagtgactgatcgtagggtcgaatgaatatatgcgtgcatccagatctgcgtgcgccgcaactatcgtctatcgaatgatcggtcgcctcgcctcaccaaacgtgctactacctccatatattaatttatatgtatgacgccgttaattcttcaatctatgttcgaccatttattttatttaaaaaatttatataactatgaaaatatttatgtcatgcttaaagaatatttgatgacgaattaagtcgtaataaaataaataataattatataattttttttgaataagataaattatgaaacgttgaaaaaaagtcaacggtgtcatgcattac

SEQ ID NO: 42791 - DNA, 432 bp, Oryza sativa
agcttgttgattgggtcttatgggctttctatctctccggtgagataccagacaagttctgcttcaatagcacggcattggagacattggtgataagctacaacagcttcactggaaacatccctgagtccattaccaggtgtgtgaatctcatttggttatcacttgccggcaacaacctgactgggagtattccctcaggatttggcaacctccaaaatcttgccattttgcagcttaacaagaattcactctctggcaaggctccagcatagcttggcagctgcagcaacctcatctggcttgacctcaacagcaatgagttaaccggtacaataccagcacagctaacatcacaggcggggctcattaccggagcaattgtctctggcaagcagattgcttcctccgtatgaggctggaacatctgcc

SEQ ID NO: 42792 - DNA, 445 bp, Oryza sativa
  unsure (1)..(445): unsure at all n locations
agctnggacatgccaacaacctcatcagtcttattgatcacctcctttccattcactggagtgggctttaggatttcatgatttgtgcctgattcacccacattagcaacatttggaggccaaagagttagtggaacaggtattaatgccgggtagaatgttggcattgtcagaacaaatttagtcttgaaaggtgcagcatggttcatctccaagtctagtgctgctagtgaaggttctgtgaactcagattcctcatgcttccttagctgcaaatccgacaggtgtctagcaaactcaggttccttctgtttcacaagatgtgatattggcaattgatttgagcttgtggcttcgtcttgagtactatggagcataagctgttctacgaccactgcggattcgtncatgggctgcaggttgaagatgaaattcgaacataaga

SEQ ID NO: 42793 - DNA, 320 bp, Oryza sativa
  unsure (1)..(320): unsure at all n locations
ccccccccccccctattacaacctccccccncccagggcctttgactctgccacaacacgcgcgcacacgcacaaacaattttatcccccggaccacgggtcccacaagaacgcacgcaacagcacaaaaacgccccaagagacacaacgcaaaaccataaaaaaggacagagaaagcacgacgcacacaagcaaactgactacatgccattgacgaggcgcacaccccaaaaaaaggatacacagaaaacaaacgggagcagcaaccccagcacaggttcagacgagacacctcaacacaccaaaagagaaacacaccg

SEQ ID NO: 42794 - DNA, 457 bp, Oryza sativa
  unsure (1)..(457): unsure at all n locations
ggagttatgttaattgggcttttctatgtgcttaattatttattttcttaaaaggctgattntgaggaccacataaacatattggaatnttctaccaaatcaagcccctcagtacaagaactgtactgaatggcattatgcttaaacaagcaaatataatatttctcaatcctttcaagaagaacagtaaaacaaaatcttaggattatctctttgatggaagtattataaaattctggggatgctcataggataggatgtacgcatatgatcatagtggcgagtgtgtgtatacacgcgtgtatacgagagcatcatctcatttgttctgcgtttcagagaaagaattattttgggccggtttaattaattgtctatgctcatgcagaacattcgatcagtagtcaactagtcattggttctggatctaccaatctnnttttgcatgacaataccg

SEQ ID NO: 42795 - DNA, 455 bp, Oryza sativa
  unsure (1)..(455): unsure at all n locations
tgcagcatgcagcttgtgattagtntttgatgcagcatgttatgttaaaagcttcttaatagcgggtaccaacaaaagagcagcggatttagtatcatcagctgcaataagggctcgttgtcattatgttaataaaaagcggttcactggtatgttaacgaattggtcgattactaaaactagactgtctcaatttagagacttaagagcagaagaaaagatggaaaaatttcaccatctcccaaaaagagatgtggcaatcttgaagagaaaattatctaccttgcaaagatatctcggcgggatcaaatatatgacgaggttgcctgacattgtgatcgtcctcgatcagcaaagagagtatatagctcttccggaatgtgccattttggggattcctactatttctttagccgatacaaattgtgacccatatctcgcgaatatatcgattc

SEQ ID NO: 42796 - DNA, 436 bp, Oryza sativa
  unsure (1)..(436): unsure at all n locations
actataaanacncaagcttntggataaaacggcgggntctagcgagatgtgaatatgtgttcctttactgcttgccgagatgtaaggagccattttatgattccatttcttaataccatgaccaacatgatactccgcttctatcatctctttcaaattgatgttccaatatcttcttgtcattatttccacacttcctcttgatattttcttttttttcatcctacctctccattaccaaagttctttcttttcgaagattaagatagagccgaaatagcttgaaataaataataattgttccgatggaaccttctacatggtataagcataaccttaatgaattaactaaacttctttttaaattaaaatatatatagaaaatctaacctcttaccgttctaaggtcaagaatttagtttaaagtaaaaaatct

SEQ ID NO: 42797 - DNA, 451 bp, Oryza sativa
agcttgtttcgatttgtgtttctttcttttttgtgaacgcgtaaaaaaatacgcgtcagtatattagaaaaagatataatttttagttccacaacgtaacataacagaccaaacataagtcattgttgagttacatgaaaaaagaccgcaagaggtaaaaaaaagaaagaaagaaaagcgaaagctgctgttcctatatagagggagagagatggtggggaacccctatgcttccaacaagttctcaaacaaagtggcactagctaaagaccagaaacgacccttctaaaggatggactctagaatcaccgagatcaacgaaaggaatgaatcgaaaaccctgatgtttcgttccttctacagctaccaggataccaggactagagagtcgaaggccctagcagatggccaccagacctgaagagagcaaccacgggaggggcgaacccaa

SEQ ID NO: 42798 - DNA, 445 bp, Oryza sativa
  unsure (1)..(445): unsure at all n locations
agcttccaattaaccctagcaataacactcacacacttcacttcatgtgcagacagccaanagtcgctttggttcgccactaaccatttctattgtttctatatgttatctgcttgtgaataacaactgacgcgtacggttgatggagattgatcagctagagctatgcgcagatcgatatatccgggatatgtatagatgtttttcagttagttatatatctagcttgacctgattcccggtgtttcatgtttgattaattgttctcgatctcttcttacattgcaaatcagttgatgatctgaatatatatatctgattaattgttatctcttcttacattgcaaattaatcagttgatgatctgaatatatatctgattaattgttgtcccttctcacattgcagatctcttcttaccggaaggtggaagagttcttaattt

SEQ ID NO: 42799 - DNA, 482 bp, Oryza sativa
  unsure (1)..(482): unsure at all n locations
tgagcanagctcanacttattagcaggaactggctntgtcatcatatcagctgggntatcatgagtacttattttgcataccttgacatcaccttcggcaatcacacctcaaataaagtgatatctcacatcaatgtgctttgttctctcatagaacatctgatcctttgtaaagcatattgcactttgactatcacanaatatattaatgcaagacgtaactccacaaagctcagtgtacaaacctctaagccaaatagcttctttacaagcttcagaaatagccatatactctgcttcagtagtaaataaggcaacagttgcttgcaaacttgccttccaactaacagcacatnctccaatagtgaaaacataacctgtgagcgatcttctcctatccaaatctccagcaaaatctgaatccacataaccaacaagttcatctctagatctcccatactgcatacaagcactagatgtac

SEQ ID NO: 42800 - DNA, 440 bp, Oryza sativa
  unsure (1)..(440): unsure at all n locations
agcttanggccagtttagttcccaatattttttccccttcacccatcgcatcgaatctttggacatatgtatggagcattaaatgtggacaaaaagaaaaaccaattgcacagtttagctataaatcgcgagacgaatcttttgagcctaattaggccatgattagccataagtgctacagtaacccacgtgtgctaatgacggcttaagtaggctcgaaagattcgtctcgcggtttccagacgagttctgaaattagttttttcatttgtgtccaaaaacacttccgacattcggtcaaacgtctgatgtgacacccaaaaattttcttttccccaactaaacccacccttaacatacatcgatcacatcagtataaaaaggagagacatatgtactgtatataaagatgagctagagatcatatattcatatggaga

SEQ ID NO: 42801 - DNA, 309 bp, Oryza sativa
tcacatcagaacatgattactcaggaagggtcatcattgacttacaatgggtgtcaagggattaccaacaacttcctgtcaactcatgtagaaaatgatgatgacaaattcgtgcctaagattgtaacatcaatggtgaatcataatatatctctggtcaatcaaataataagcactggaaacaaggaagcaacaacgagacatacttatatgtcctctgaattcaagatgtacagatctatgttaagcagtatgctaaaacttcttgtgtgctaccccttctgctgctgctggtgctcttgataaact

SEQ ID NO: 42802 - DNA, 432 bp, Oryza sativa
  unsure (1)..(432): unsure at all n locations
agcttgaaaggacgattagttgagctttgttcttctccgtagccagccggcaggaccaaagctagccactacagaagagccagcacaagaagtcccgggcttcgacggcacccggagctcaactgcaagagccctccaaggtgtagaccaaggcgggtggcaggttcatgagcgatccctgcgcttggccctggagggccatagggaagaaattcgccttgacccggtcgtcgccccacgtcgcctctatgatcgtcgtgtggatctggagggactcagaggggttgacgctactgtggtaccttacggtgaggctgggccgaactttgggggtcatcggacattccgaagactcgcaataaagacctggccgccagtcttacccggtgaagatacggngggcctagccccctgcctggggtggtgcggcac

SEQ ID NO: 42803 - DNA, 460 bp, Oryza sativa
  unsure (1)..(460): unsure at all n locations
tgccggcagcgtcnggcgctggaggagggcaatggcgttttcgcttgggccgggagaggctgagatcggtgggccggcggcgtctggcgctggggttaggtggcggcgtctgtcgctatggtggaggcgcacagcatcggcgttgggcgtgggccgtgtcacgtggcgctggcatgtgggggagaccgtgatctcaaccgncaccaccagggaagggggaagggaagctagggttttggtttttggtctgttgggccttctaaataaatgggcctatgggctttgtggcctggcagcctaactcgttagggctcgcgagccagctcgagctggcttgttatctctagcgagctaaacttctagctcggctcgttaggaatatcaaacaagtcgagccgagcttgtcacgaaccgagcgagctaacgagccacgagctttctgtgcacccctacacacacc

SEQ ID NO: 42804 - DNA, 441 bp, Oryza sativa
  unsure (1)..(441): unsure at all n locations
agcttcaaataatcaaatgtagtggataattgtttataccatgtagagaatgaaggttactggttgcatgaaatagctgatgtgcgcaaaactaaaaacgtatatgcttgattctgcagattctactaaaatggaacagatcacacaaaacaaggatgctgttcatggtcctttgaagactcagaaggataaggtccaaggaaaggctgttgatgtccttccccaaaaagtgttgtatgatgtcaaagttgacagaataaatgtggcaacagcagattccctcattccagaagatcctgcttcacaatcatttgtttctccactaagggaagagaatgcactagcatcaggcagtgatgatgagaaaaatgacagtgctgttcagccagaagttagtacagaagctaagagaaccacttcctcagtaaaagntactacaga

SEQ ID NO: 42805 - DNA, 461 bp, Oryza sativa
  unsure (1)..(461): unsure at all n locations
acctcagagtcacctgaggcatgcaagcttagggttggaaaacgtgttctaattttatacaactctaaatgcagagggatacatcatcgagtattctggactccagcaatataataagtgagcgagtgtaattaagtgtctagcattgagaggaccgctatacatttttttagataatggaataaacatcccggcctttgctcatcagagctacagccaattattacaaagcatcactctaacaaaagatgtagttcaaacgaaattaaacacatcctataaaataaaaagaccaaacaaagataaggagaacacatttattgaagtctggttgtaaatctccatccatagtttgtaaaaagttgcataaccgtcgtctcaagcctatgacatgcaactttcataagctctccatcatcttcacacttttgcagctgtgcccaanaccggagccaattagt

SEQ ID NO: 42806 - DNA, 334 bp, Oryza sativa
acgctcctagatgtgctactagacaccataccagaagatcaaggattaaggcctactctgcagaaagtctaaccactcaagacgaacatgtccagagcgaacaacttactcaagtatatctactaattatagctcatggagcgaactatgtccccgatttaagacattttgatgcgctggacttaataactctaccgtatggtgagctgctgatactgcgtcacctctgaatctgtactctggtaacacaggttatagcacgagtgaccgtgcttttttataaaagaatgaacttgtgcctggagtcatacatgttgttctacgtcagatacct

SEQ ID NO: 42807 - DNA, 438 bp, Oryza sativa
  unsure (1)..(438): unsure at all n locations
agctcgagttgttgtgttgatagagatatttatgaatcttatacttataattagatatatactcacaatttgaaaattttgaaaaatttggacgaatttgtatatttcataccatggtgcacaggcaccatggtatggtgccccatatgagtgtcctatatatatattattattattatgtgccatttaactagggttccatggtggcgggtataaagatttaaattgagtatatacctaattcaaatgagtatgaatttttttaaaatgtttaggtatgaacattaacttttttactactttgtaattagttcaaacaagtttgaactgaagttttgacatctttttgttagattttaatgtcaagtatatagnatccaaacatataattagttacgtaagtaataatggattgtgacataaagttgaatatgaatt

SEQ ID NO: 42808 - DNA, 446 bp, Oryza sativa
gatcatgagttattttatattctaacatgaggcacataaatgtgacgaagctcaatataatgttaagcagtcatatgcataataagatgtatcaaagatactctcgcatatggccctggtaggtatagcatgaagtcaattgaaggattgagcctttaacacaattttattttgaaaacaaatccccaatagtcataacaagagttgcaagaattcctttcatcttgaatcatctcacataaagcaatcacttagatgcataagggtccctaaacatagatggttgttcacaagcacaaagtcagctgagaatcatgaatatacaagatcaatcatatgaagaattcattagttggaaatttatctttacttatgcttgaaccaatgcttctgaattctgctctagactataccatgtggagaatacagataattacgtgctacct

SEQ ID NO: 42809 - DNA, 447 bp, Oryza sativa
cttaagcaccgagctgcaactgcaactcagcgagaccggtatttctgtcgatgcacgatcatgtctggtcagatgagggtgtcaccttccatgtactaactaccattttacttcgtgccattgccatcttaattctgccaaagaactgcatttgcaatgcaacaactgaggcctgtgttatttcccaaaatttttcttccacaaacatcacatggaatctttggacatatgcatggagcattaaatataaataaaaacaaaaactaattgcacagtttgtatagaaatcacgagacgaatcttttgagcctaattagtctatgatagggttgataagtgctacagtaatccacatgtgctaatgacggcttaattaggctcaaaagattctgttcgcggattccagttgagtaccaaatagctttttatttcttccaatacccctca

SEQ ID NO: 42810 - DNA, 361 bp, Oryza sativa
agctcataagacctcaccagaggctactgtttctgtgtttattatcagaaacataaggagaaatagcccgtgcatatggaaacataaaggcgccctaatgctttatttaaacaacataacccccttcgactatgcacaaggaaaaaacagagtacattggataatgtgcgcgagaaactactatctatacagccagcatgaatacaatggccttttatattccatgttgtcttgcaccacctttacccacaaccttctgctatggaaaaaagaaaaattcaagatatctaggactcgatttgtccaaccagcaacagctaactgatctcgatcaaaaacattatatagccaccagatactc

SEQ ID NO: 42811 - DNA, 456 bp, Oryza sativa
  unsure (1)..(456): unsure at all n locations
gatgcaagcttgcgtatgaatataacaaggcnggtatcatttcttggctggatgcngctcacaagttngtccctaccaaattgcaatagcaaaaattacttattcatgagcgatatctgcaatgcgcagcatcatgagctgtgtttcctgagcagatgcatattatttgctccaggataattaatttaattttggaaatgagtatctattcgcaacaagcagtgcaaatttaaatgattctgctattacttgtgtgaagtttatacagtagtcgtacctgaagtttctgtgatgttggtgtgggtgcctaacccgacgaggcgcatatggcttctctatgcaacgattagtaattctgagcgatatgattcttttttccccaatctccatttcttggagtcgaatccaaggtgtgaccttgagagagacatttgtccgtgaaagcacgagacaagt

SEQ ID NO: 42812 - DNA, 443 bp, Oryza sativa
agcttcggcgttgaacagcttattggtgttgtcttcaagatggatgccatcggctactcgaaagaaagaattgagttcatcaaggttcaacttggtagttttctgcggtcatgcaatttcaaagattcatctgttacctggattcctcttagtgctgttgaaaatcagaatttgatcaaaattccttctgatgtccgtttaacttcctggtaagttatgttttgacacactacttccatgccattcggaacactacatcgtgtagaatttttcaacagaggtggctgtttcatgcatcttgcaatttctaaccttttcacatggtaatatcgacatatcgtagtaagcacccatttgggtcaaatcagatagtttggatgatttgaacatatatgagaatagcattactgatcttttgaaatatttgggaccataccgtcttc

SEQ ID NO: 42813 - DNA, 471 bp, Oryza sativa
  unsure (1)..(471): unsure at all n locations
agcttgaganagcanatgtcgctgagcatatggcagttgtattgtaaggtgtggctgaacagcttgaagttgaaatcgctgatgttaagaaagcgcgcgcgaggtcagaggagttacttggcaaatggaagacaaaagcactggaattggaggtcaggttggaggaagctgatcagtctaacattctcaagggcgagtccttagaatcagcaatgaaagaattggatgcaaaaatgactctgctccaagaaaaagaatctgaaatcgaagcacttcaggataaggtcaggtctttggaggatgaagtagccaagcagaaagaagattttcatactgctgataaagaagctgatgaattaacgttggagatagaagaccttatgttgaagctcgaagcggcggaagaagaccttaacaatgacaagatngccagttcagatatggaaaccctgattgaacagaagaacatgc

SEQ ID NO: 42814 - DNA, 446 bp, Oryza sativa
  unsure (1)..(446): unsure at all n locations
agctnggatattgtataatatctaantaggcttatttctaaatagatattcagaacgtctattttctttcgtgaaaccagctttctcaaaccacgtgtttcttgtaaaagttatatatacacatgtttttctttaaaaatatttttaaatttatagtagttaacactaatttatctcgtttgcatgccaaaaaatcctaaacagttatagagttgtgtatatagatcaagaaaacaaaaccggccttattgtcaagtaccagtaattaagcactgaaaatgatacttcctccatccattaaagttagacatattttatatttaagtttttcaaataagttgttcctacttataggctctacacatttaaatagagaggacaattaaatgattgatcagaatccgagaaaccacttttatactaaatggttgtacgcgtgcatatat

SEQ ID NO: 42815 - DNA, 477 bp, Oryza sativa
ctaaacttcttccggcctattgttccctcaggctgagactcagactctcttttttgaatttttaaacctaaatagataggtgatttctgaacttgtattgcagtccattttacagcattaacatttgaaccactaagagacatgtatataaaagatttattcatacaataattgttggttgccaataaagcgtgtggataagcgtaatgaagggattgtctgattgatgaactgaataagataataacatcagccgcagatgcagagataccactggtttgagtaagcatcccttttgtggatgcgttcaattgtactgctgaaaatggtgatgacatcctatcaaacagaatggacggacctggatatttacacaacacaaatagcgctgtgtcatgaagctcaaaccttcaagctgttatctgtgagggccaaatgtatactactacacagtagcctgcaagaatacattttcta

SEQ ID NO: 42816 - DNA, 456 bp, Oryza sativa
  unsure (1)..(456): unsure at all n locations
atcttaagtcacctgcngcatgcacagctaacacctcttatgtgacttttttctattntgaaatacgaaaaagatccaaatccaatatgcaaaggtcgtcttattcaaaacctcaatcatcacattccctctctcccacttcacacctcggaacgcactggtcttataaagagaaaggggctttcccatcttcttaacccgaaatgaaatggctgaggagaaggaagttccttttggggggtacccccgggaagagatccactggagacggtgtgggcctgtatctcagaggattagagcacgtggctactaaccaccgcgtcgggggttcgaatccctcctcgcccacagccttccaaaggggaagggcctttactttccccctgagggtaagaaaaccatgatcgggatatcggacgtaaagctattgaacttgtgtatgctctttccttttgt

SEQ ID NO: 42817 - DNA, 300 bp, Oryza sativa
  unsure (1)..(300): unsure at all n locations
ccaaaaccacncgaccagcagggggagcgggtgttttgtgcaaccccgcccagaccagggaacggcgcgaacgaggcgagtcaaacaccggggaaggacatcttacggaaaaaaacgatacgctgctgaccaaaaaggacccaccacccggcaggcaaaaccacgagaattgccacacccccacaagaagacaaccagcaagtacgcccacccacaggttccacccaggaagaaagcctcccgaagcgggcagaggacaaccccccggagagccaccaacccgagacgccccgccccgac

SEQ ID NO: 42818 - DNA, 438 bp, Oryza sativa
agcttattacattgtatagtggctacatattggttcttaacgaaatcagcatagcttatggtgtattggcccctgcctttgtgtgattatataactcaacaaattgtttgtcattttacttgcttagaaggtagagggttggagatatatcacttcttgtttccaataaattataagcgaatgttatttgacggaatcccatccccacaatattaacaaatattaacaggtggcatatagctcccaagtccccaccaccggtgccactatctgccgcaactcccaaagtccccatcaccatgctgtttagggtggaaaataacatctgagatctcgtttgtttagagatacatatatgtgcgggcgtgccagtgtacctaaatacacaatgtcaacaaaacatagggaacatgctctttattaatcttaaatgatcat

SEQ ID NO: 42819 - DNA, 492 bp, Oryza sativa
  unsure (1)..(492): unsure at all n locations
taggacaatgcgaacgaagataatcaattgaaccacattcttatcttttatttggaccacctcttttcctgttcctgacattattcatagctcgagcaattctgttagcaaccaaagccaaatcctcctcctcgatttgttcgagttgataatcggatgtggcattaaaagcagcaagaaaagaaggcatagatgaagaagcatcaacaatcaaagaagaagaagaagaaaccaaaacactcgatttagaatcaactttgcgagaaagaatattcatctcatgtgttttcaatttagtataaagtgaatccaaagtcaaagtagacatattaacagactcctcaatagatgtaactntcatctcccaaatagacatgtcgagaccattcaaaaagtgacgagaaatctcagattgtggataattaacatcataagaagaatcaacagatctaagatcactcacaattttattaaatctagaaagatagttat

SEQ ID NO: 42820 - DNA, 439 bp, Oryza sativa
agcttgcactcgtcatatcagatcacttatttatcttgtatgtatctataattagattctatttgctgtacatataatgaattccaattctaagcgcttgttttatatatggcagcaattcgagaggctgtttcagttttctcgaaaagtcgatgaattgacatacaccatagctgctgaagaggtgagctgatactatgttttagtgttctactattccatggactatgatttcgaatcctaattagtaatgttgaactgggctgttacatgaaaactggcatgtttatagaccagcagatagtgccttttggtacgagactgagttacaaacagttcacattctaaattgtttcacgttgtctactgtatttaaaggcaacaatttatgaagctctttgtaataaatctgaactatttctttactccataggatgtg

SEQ ID NO: 42821 - DNA, 245 bp, Oryza sativa
taaaaaaaatacctaccatatctctcgccttgggttgagctgaccgaccttaaatcataatatctgaccgtcaatacctgcatataatgaaataaaacacgatatccaacttatggggacggattattactaatcattttcactaatgttggtgaaatatgtgcatgcgggtaatctgaggagaaaacacatccgtcatgtcacaaaatgcacctccgtgcatttatgacacgcttacatggatt

SEQ ID NO: 42822 - DNA, 245 bp, Oryza sativa
agcttgctgcgtctattatgtgaggtatttctttcttcttttccacacgactagatcccaaataatgacgtcctattagccgtcgcatggcgtgccgtgcttgtactgatcacgatgctatagtggcagagatcttccatagcttaccgtcgtctgtggttcgttgtcatctatctctctgctcggctgtgtaggccatcctgaatacaaaatacttgatgatttattttacaactttgccttta

SEQ ID NO: 42823 - DNA, 445 bp, Oryza sativa
  unsure (1)..(445): unsure at all n locations
agcttgaggctggaggtgctgccaaagttctcttctaactcttcacctgtacgccctattcaatgaaaagacactctagtgctgttttcagtttttttttaaaaaaactcttcacctgtactgaatcagaattatagtataattcagtactgcacaacgtgcaaatagaggatcgatgaaggcggcttgaccgctgaagacacggcgacatgcaaaggagaggcttgcgagcgcgcatgagacaacatggggaatcttaacttggatgtcaaatgtggcatttggtccagatgaagttcctacattcattttctttacctaatcgaagctttccacgattccacttctagacttgtcctagttcaatgactaattgtccacaaggaatatgcgcgagtcataaacaagctgcgcagaaaacagcttctctctccgttntacaccc

SEQ ID NO: 42824 - DNA, 450 bp, Oryza sativa
ctcaacttcagagatacagccacactcggaatacgacctttgttttatacaatacctggcgaataaattcttattgatacattttgaattggttatgccaaccgtatattggatatatcaatgggaccatcatcggtacataagttcagagagatatttggagtattgtacatattatgtggcccctttcgatgtggtaaaattttgatccgagaaggtcagggcgtatgactcgtgcagacaagcgtggataatacacgagtacatgtgggaatataaaagatgcgaaattgtaacctaattaataccccccctatggtttaacatttttacttattatcccacacatatcaataagaaaccaatgaatacacccctattcttcatttttacctacttacttttacaaacaattataccatgactggctaaaaagaacctatttaccta

SEQ ID NO: 42825 - DNA, 419 bp, Oryza sativa
  unsure (1)..(419): unsure at all n locations
agcttatgagctcgatcgctgggcttggtttcaccggggattgcactcatacaccacggtttgcatgctgcattgtcgcactctcacctttgacagactacataaactgactaacccacccccatacattcacgcacacacgcatatggacctacagggtctggcttgactagatgctgaaagatgcctcgtaaattgcaatctaagattattgctactattatacggaacgaagatctaaccatgagacttgctagagtcattcgatgaaggtggtcttcaaactacttataagcactgagtctctaactcagatggtgacatcacagatagaaccgcccgtattgctacacacaccttgtgaggaggagccttggctacaagtanaaatatattgctcagacagcccatgaactgat

SEQ ID NO: 42826 - DNA, 419 bp, Oryza sativa
  unsure (1)..(419): unsure at all n locations
agctngacgttccggtgcctgccgtctctctttctgtcggaccggccttgcgcccggccgtacgacgagacagtgctcaatcacctccctggggaccccgggcatgtccgacggtctccaggcgaagacgtcagcgtttgcccgcacgaaggagacgagcgcgtcttgctatttgtcgtccagaataccactgattcgtgtgggcttggacgggccgtcgcccaaggcaacctgcttgatcgggacctcgtcgcacgtgatcatccgctgcctcggggcggctgggacggaagtgctgagcctatcgtcgccacccgcgggcttggatgccgcggcgagatagtccgcgcgctgctccatgcaagcaagcgcgactttgaggtcgccatggacggagatggagccaccggggcccggca

SEQ ID NO: 42827 - DNA, 447 bp, Oryza sativa
  unsure (1)..(447): unsure at all n locations
agcttctcttactgaagaggggaaagattgagtaattatgagtacaaccacagtactcagtaagccacaccggagatgcataattaatgcaaggcgggtacaaggggataataatatacgggttaagttctgcagtaaacagcatttaaaagtcacttagttgcccaaagccattttatagagacgatcctatagctacacataattattaaacaaggccgtgaaccctcacgaacctgccttaacccaaggcctacgatgattcagaccgaactggcaacccgaccttgggtcctagctcgtcccaagccaacccacgtcaaccattctacattttagtngttgagcaaattttaataattaaaacactgacttgggtacattgctcggtgtcaccaccggaaataacccaacgggcgttccttacgtgcgtgcattaatccttgt

SEQ ID NO: 42828 - DNA, 162 bp, Oryza sativa
  unsure (1)..(162): unsure at all n locations
accaacgatgccggggccggcacggacaacgaggcgcngaaccccgagaaaaccactcaggaccngaacaccaagacgacggccacgatcaacaacaagaaggagacatgcccgaacaccaacgaggactataccgcgagcgaggaacgcaaaggagacgcc

SEQ ID NO: 42829 - DNA, 317 bp, Oryza sativa
tcatttgataagcaccccgctgggcgccttattgaacagatacgctgccgatcatacagtagatatttgctcgacaggttattttctcggattctgcgaaggactgggcaactcatcgctgtctatgaatttaatgagtggggtccaccacgcggccgtggtctcgatgtcggcaacggggtgctctgtctctgaaaccccctgagctgatgtcaggggtgactgggctatctacgacgattgcctctttcaccgatggctctgtaggatgtccacataggtgccgggttcgagtggctctccgctggatgcacgcc

SEQ ID NO: 42830 - DNA, 406 bp, Oryza sativa
  unsure (1)..(406): unsure at all n locations
agcttggagcaccctaaggaggcaggcatttggtcgtttctttcggngcatcatctttgatgtggaaagtatgcaattatgcgccatgtggatgagagactccggatgcctgagcagtactacaccgaagaagctaaacatatttgtgaaccgttgggcagaatgtatatcaaaatggttccagtcgagcatgaccaatatgagaggagctgtctactacttttgaaaatattgtgatgagacatcaacgagtcgaagctagagatacaggagaataacgagtttattcactctacaccggaccataatctttctccgcagctaagattgttcatgagaaaggctgagtgctaaacactaatacatcgcatgagaaacacgtacgtgtctgtcggtcggctctgca

SEQ ID NO: 42831 - DNA, 424 bp, Oryza sativa
ctcagcttatcacctttctgactaccgttcttgctgctgtcggtgattgtttgttatctcccaatgtgcacgtctcatattatatacagaaagaagcaatctttcattcatggagcgttgttatatatggggataggatctcaagatcttacaccacgctgagggcccatgtttcttatattacacatacatctaagtttaaggcgaaatattggcaacgcctaactaaacgcatcagagatgatatggatgaaacataggcttgtgggacgactttacgctgtttctagtgtgatctgctcggacatacttactatatactgctcgacaatgcagacttatcatacggtgcgaatgctaatgcataccgaccagcttgtggtggtcagccaccaccctgtgtaggaacaaccagcaagcgcgc

SEQ ID NO: 42832 - DNA, 449 bp, Oryza sativa
agcttgcggaagccatacctaagttggccttgtcttatccaaacagcaaagcgcctaacttctgttcaccatccaaaccgacagcgacaatggcgtgatcctcgtgagtgctcccacaagtccacaaaaaaaggttaaagaaaaaaaaaacacctaaccgtggctaatgtgcaagtgactcgacttcctaccaccacaaaattcccctttctcatccccaatcccaaatcgcgaactaaacccaggcagatttgatggtgaacggccaagatcactatatgaagaagctaatactactgttctgcaaaggcggagtaattatcatcgcgctaagccgcagccatccctcctcgcatgactcaaaaaaaaaaaacaaagaaagagagaacatttttattccgaagtgaaagaaatcaaaagggggcgctctacctctgccagttgatgtt

SEQ ID NO: 42833 - DNA, 459 bp, Oryza sativa
ggatccttaagtcacctgcggcatgcaagcttgagggccttgacgcgcaatgttttgtctaggagcttgccgaggagtctgtgcatgagcctgatgaggagtctccgcttgagcctgatgatgcgacggtgcaagatcctgaggacgacatggcggggccaaacgagatcgtgtatgcaacgccgtttcgtacccagtgaggataatgcaccgcttgtgccatggcatatatgccgagggtgagagtagaatatgcatttgaccggctgctcccgcgtactcctgcctttggatctagcacacgcatcccaccaactctacttggaccttggagtatcctgctggaatctcgctgcaagggtacatccctgatcggtctgttgggatggtcatgctcgatgacttcttcacgtggtgagaagtttttatgagttatcatcatatatttacgacaccttg

SEQ ID NO: 42834 - DNA, 444 bp, Oryza sativa
agcttgttgacaactccggcatgattctgtatatcccagacgatggtcaaaagctcgccgccggtcgccagcttggaggcgtgcacagacgctcgatcagacggcgcgatgtacagcaacaggtttgcccagaaatgggcgagcaccttccacctctcctccgcatccttctttcggtccacaagattgagcgcgagcaccgctccctcgtacagcagagggcatcctgcttcttgctccttccaaccatcgcgacccagcttcatcaacttgtcatacttgtcactggttgtcctgcattctgcgaggtatgcgtgtgcatcctttagcacacggcaagacagtagctggcttgtgtaagtcccatctggtatgagatccggtgcgaaagctacgaggtaggagcagtatcccgagagcactgtggctacttcgtagtgatac

SEQ ID NO: 42835 - DNA, 472 bp, Oryza sativa
  unsure (1)..(472): unsure at all n locations
tcttgatggaattccgagattgcttcgcttggacatacattgttatgccaggacttgaccctcgtgtcgccacccataagctggcgattgatccccaatttcggccagtgaagcaaccaccaaggcgcttaaggccagagttccaagaccaagtcatcgccgaagtcgatcgactcatcaacgtgggttttatcaaggagatacaatatcctcggtggttagccaacatcgtccctgtggaaaagaagaatggacaagttcgagtctggggtagactttcgcgacttgaatcgtgcttgtcctaaagacgactntcccctaccaatcacggagatggtggtcgattcaacaacgggttatggcgcactgtccttcatggacggctcatcangttataaccagatcaagatggatccccttgatgccttcgacacggcgtttagaacccctaaagggaacttctactacactg

SEQ ID NO: 42836 - DNA, 440 bp, Oryza sativa
agcttaaagaacatttgacgataattatttcttatcatgattaaaataaataataattacatatatttttaaataagacgaatgttcaacatatctttaaaaatcagtggtgtcaactgagggagtatttgaagcaggctaggtagagcagcaagaacggagcatctagcaacaagagaagtcgtatgcctctacggtgaggatgctcgatgccttgatgggcctcgatcgccattacatggctagttcaggagagtgtgtcaagtctggcgccgtgttcgtgtttaacctcccgctggagctgggcaaaagaatgcagctagtgctcgtgaagatgccatattctcgttactgcaaattgtgctctgggtctatgattctctccaagcaaccacgtaatccccaaatcaggtctttcgatcgaatccccaacatatgtc

SEQ ID NO: 42837 - DNA, 325 bp, Oryza sativa
cctgatgaaagcgcaggttgatacctttcacacaagatctttatatcaaagtcttttcaggaagtgtcgcacagaattatgtcagagagttgttccagattttggatccaagtaagcaggccacctatcctgccactgatgctaaagcttgcaagaaatcttggaggtgagaatattggtggtgtgttgctcaaatcaggatcctctccaccatcttggagacggatttgcaaagacctcaagcattcatttagcattccaaccacttttagcacaacgtaagcttgcttggcattgataacaacaccaagctttcatagcagct

SEQ ID NO: 42838 - DNA, 379 bp, Oryza sativa
tttttttctctagcaccaccacgatgcgatcgctgtggaggcggacaccgctcacgggggagcggaatgagagctccccgatacaccggctctggtggtcgaaccaaatcatcacctttgtaggcgggtagtgaggggcgtctccgccgccgaccagggccaatatgttacaccggaacagcatcttcacgacgccgattgctgctcctccaccgccgacgccgttgatacccgcggtccccaggtcccggcggaagatctcgcggaatggatcgcacgtgtagatgcggaagcccgacttggtccgcggcgcgaagcagccgtagtcctgggtgaaggagatatggaggagatccttcgccgccgggtggggagccgc

SEQ ID NO: 42839 - DNA, 448 bp, Oryza sativa
actgcactgagcctctgtgagtaggaccgttctgttcgtgttccgatctcagatggcccagtccatcgaaaatcttggcccatctacatacgtgacagcccgagatgttctgggcctgataaaacgggcagggctctctcattctcacgtggtcaccgaccggcgtctcggtgttggcgttcatcagcaacccgacgacacaacgcaagagcatcgattaatcatgtgctatactgcctctttccaatttccccatggttttatgtgcgcatgctgctctaattcttaaacgtattattttctaaaaaatttataggcaagctgctttaaaagatcatattagtttttttaagtattattagcgatacttaattattcatgtgttaatccgacgctccatcttacgtatcagaagagaggggtctcaataattcttatcttcaacaca

SEQ ID NO: 42840 - DNA, 439 bp, Oryza sativa
agcttctaagttcgaatcgaacttatttattttatttctccgcctcggtgtcgggtctctcctctggcggcgatagagtaaggggagagaaataataaggggaataaaagggaaaccgtagaaaacaaagaacgtggcttatatattctagtggattttgctcctagcctacatgtaagttagatttcgcgggtaaacgggcaaagcgggcatgggtagtgattacctatacccatgcccatttacccatcgggcataacttttgacccaataagatacccacgggtataaaatggagaacaaacccaaccctaatagggtttttacccacaggtaaacgggcaaatgggcacaattgccatccctagtcgaggctaaggcttccaagggagatgcggtctgggccgggccagatcgcctttctccagtggttgtgcct

SEQ ID NO: 42841 - DNA, 476 bp, Oryza sativa
  unsure (1)..(476): unsure at all n locations
acctatgaaactcagctgcgggccaaataagtgaaactatatatttacaaacgttttatttttatgaataaaatatttatatacgttttcttaactatctaaaaacaaatactgaaaaataaactttgataagaaaacgttaaaatcagctctaaatttaaggctgaaaattcaaattctagctgataagtataaacttaagcgaaaagatgagactcttagaatatccttgtggcaggaacaagattgtgtgaagattggagggagcattatgaggttgttaaaacgttagatatgaaaaggctttcatatcgatgtgtagtaagagaggagtgagtgttcgctgggaatcggcgcgcaccaccgcagaccctgcccactgcactatgcgcgattctcacgtgtatactttacatgttttaaacaattntttcctacanaatntatttgatctacaattcagttacaccatcata

SEQ ID NO: 42842 - DNA, 378 bp, Oryza sativa
  unsure (1)..(378): unsure at all n locations
agctttccatattgatgaatgtattctattatttgatgaccatgnacgcctttgaaccagagtctagcacaactcctctataacacttttatgatgatttcttcaacatcaaacggcaactatagtttctcaagcaaccttataatatacctctttgcatatgtatacctaaagagatcaccaattgctatacatttctattgtagatcgcaatcaacacagctgtgtcgtccttccatgttttttacgacttccttttaagttataaataatagcatctgccatatagaaatgttaaagatgcctgtactagttccatcttgatccatattactttctatgcctatcttgtaggattataaagcgtcatacactatc

SEQ ID NO: 42843 - DNA, 325 bp, Oryza sativa
ttacattatgtacccacgtaaatgtgcctttcataaaggcaaccatgtgaactcccaagtataaccaaaaccctaggagttaaaaaccgtgatgggggccataaatagtcccataaggccttgcgattggggatctcaagacaaaatctcaatctaatagggggcgtgcattgcgggaagactcacttcggcaagaggcgagccgattcgggatgccacaaaagctgagttcgacacaaccaacaacgaggcataatacaaaagcattcttatggggccaagaaaagcgaaagcattggggatactgcgcctgctaatccaaacc

SEQ ID NO: 42844 - DNA, 417 bp, Oryza sativa
agctttgtgggatcggcgtcgtcgatttgtcttttgatcaccttgccttgaggggcgggctatggcatgcgtttagcatggtcatgtgattcggcctcaacattgtgcactgccctgttgatttcggccagatcgccctttgatgtacccgaaggttgaagcccctagacgacgatcacgcctgttggacccggcatcttgagcttgagatatttgtggtgagagatggcttctaacttgttcatgattgcgcggccgaagatggcattgtatttgtatgggatgtcgacgacatcgaacagtatttgctctttacgcctgttttcatctgtgccgaagactactgccagctgtacttggcccaagacttgaactgcttctccgtcgaaaccaccaaacgaggctggtgattgggtg

SEQ ID NO: 42845 - DNA, 323 bp, Oryza sativa
agcttgaacaggaagagtgtgcggcgaggtcttttattctcctgcgcggcaggcatgggtgaggctagcagcttgaagagtgctcgcacttgccgcaaagagaacgctcaacgatataagatatgggctcggaacagctcctctttccacgcgctggtggttaacacttctcttggtgacaatcgatgcagggcacacctcttagtcgctcctaaaacgctcgacgatcatatcgctcctagactactcctgggtgaactcatgtctctcagggtacttgatacgatatgatctcaccatcgaatgattaatacacatatgag

SEQ ID NO: 42846 - DNA, 445 bp, Oryza sativa
agcttcaaacttggacaaaactctgctatattcgcttactagagaaccaaggcagagcttccatgcttagaagctgttgacagcacaactgcgtagctctccctccatcttttcatacccaccttgccttgagctgcccctttaattatgcatggatcagacctatgtatgtttgttttccaagtaatctatatctccattgggcatgtcacctttagttatgcatggatgtctcctttatagatccacctgttgatgttttctgctaatcgatgtctccagtgagcatgcatgtcaaagttggaagtttgtgtgtgctttgatgtaatggaaaagttggaagtttgaagaaaaaatttggaaccaaacttgtaggctgtgttatttccttccaaagttaaagcttgggttgaaattggtacgatgtgactgagaaattgtgtgt

SEQ ID NO: 42847 - DNA, 463 bp, Oryza sativa
ccggatccttaagtcacctgacgcatgcaagcttattaatgtcagtccttcggaggcttatatactcgattagaagcatgttgcatagctccttggtatgatgctgtttgaaacccttgcaaccttggagatcaagcacttgaacaattccgaacttgaatgaattggatggcagctggctcaggcttccaaacatggtcagtgatcggacatgaaatatgttcatgctgtctgtgccactgccacgtttggaatcaccactttggatggccagcctgcgcactttgctgctgggtggcggcatgagccaataccctccaaccaccgtcacgaagttctcttcactcgccttggacacgatgtactcaagaaccatgtcatggacttggcagttcttcaccttgccgttgctgctgtgctccacgggacgtatgatcttcctcctcacgagatggttgaagct

SEQ ID NO: 42848 - DNA, 425 bp, Oryza sativa
ctctcacccaaacacctcctgaatgtgtcttttctcgacatgcaccatcgccttgcactctatgctcttaaagccgttcatttcagctggcatcccaaccgacccccggctctgcacaaaacaaaaacaaaaaccaacagaatttttaaaaaataaattgaaaacaaaaatttccactacacctaaaacagaagttaaaaaccctatcctttgcaatacatggctcaccttccctaattcaataaacacacaattttacaaaaacaatcactctgagttcccttgtctgatatagggcctatttagttcacaattcgttttctcaaatacatcacatcgaattgtttgacacatgcatggagcatcaaatatggacaaaaagataaactaattgcacaatccgactattaatcgagagaagaatc

SEQ ID NO: 42849 - DNA, 444 bp, Oryza sativa
  unsure (1)..(444): unsure at all n locations
agctngccaattatctgatgaatacactctatctgtntatgctcccaatgtgttgcaggtgaatcactaatactaccttttccataatgtgttgcagttgatcaagagaattactccccatgatcgattacaaggtgaaaaagaagttgatcttgaatggtatatgaggaaagcatgggcagaagctttcctgaaactgcagaactttgtgagggaatcaaagcttacttactaacacacctggtacataagtgttgtgatttgaagtctaaaacagttccactccactaaattaattcttgcagtaagcagaaaatctttgccttgcaacagttagttacaacagctagaaaccaaaaccactcctagcacttacaatacaagtcgtgttcttgtattgtataagctggtacattttctgttttttctggagatattttgcat

SEQ ID NO: 42850 - DNA, 455 bp, Oryza sativa
  unsure (1)..(455): unsure at all n locations
gggacttaactacaacgaagctaagagtttggtgagctccgtcatgcttctaagaaataagattgtcgcccaccaagatgatccttatcaaaattacactggacccaaggttagataatttttatcatgtttaagattcccacattgtcttagtagcaaactgacttgaacagattattttttgctctattctaagtatactgcattctattttgttttaggagcaaattggcgtggctaaagccctcttggagaagcttgtgttagactccaagcctgcttacatgataaagctcatcgaagagatccgaaagcttaactggataggagagtcaccacttgttagaagtaagttataaagttgtacaacaatttaagtcaaagtaaaaaatgagtgcaagttaggagtactgcctcgtttaataattntaanaataacagatatgtgttactaa

SEQ ID NO: 42851 - DNA, 435 bp, Oryza sativa
catcaagctgagtgtgtgtgaattgatctgtcattcctagtagttgataggagcgtgtatattcttgtctatgtttcttgtttgctgctaaccatggcaggattgcgcaaggggaaacaagatggtcatgctcaacgtcaacatctacaccttcgacaagatatgacgacttcttcacgtgatgcatatgaggtacatgactataattttgcacaagttgcatgttagttaccagtctatgatggaaagtatgattccgctgcctacattaattgggagctagcagtagaaaaacaatttgatgagtatgatttttctaatgctcaaatgattaaggctgctagtaataagtgtaccggttctgcatctttttggtggcatactgtggggaataagcttgaaacttgggatgaatgccaaatactgatgagaaaa

SEQ ID NO: 42852 - DNA, 392 bp, Oryza sativa
  unsure (1)..(392): unsure at all n locations
tcaacctgcctaagaaccacataccaagcaacagaaactgcatatgttccaatggaaaaccaaaccctacaaacctgtgttacctttgctccttcggaatcgtntaaccactgaatatggtaacggcgtggatgtgttcgtgtacaccagccaagcttctttgacaaatcaaaactcaccaagttgttgcagctaccttcatcaatgatcacactcgcaccaccattgttgatgacgaaaaaaatctgaaaaaattatggcgttgcaacctgtcatgctgctgtacctgcgtgctgaacactcgctgcacaatgatgggtctgtagtccgctgtgtcatcacgaccaaagacttcaccattctcatccctaacttgcttctcctcctcttcc

SEQ ID NO: 42853 - DNA, 401 bp, Oryza sativa
  unsure (1)..(401): unsure at all n locations
agcttatccagaagagaccgagtgtatttattatgttgcctggcacgnnatctattaataacgaatagcctggtagtttacttttatctttacgaaagtgtgttcactgtcctataaggtctttatcttttccttttatctttagttcctttcttatcggataaggactagtatcttcctatgggtataaatatgtacatccggcgtcattgttatctatcaatctctcgaccaatacaactactcttggcgcatcgtcgctgtcagggttatggataccacatacttaatagtagttgactaaatctcgactagacccaccacatactatgtcttatacggaaacaaccttctgatatatgaggagtctctgataagaaaagacatctataggtctacat

SEQ ID NO: 42854 - DNA, 472 bp, Oryza sativa
  unsure (1)..(472): unsure at all n locations
cggtagcggcatcatacaaagctccctactctccattctctcctacattcaaaggcatcgnggctcgtggcactagcctctgccctattatggcacccatgcccccttgagagggcatgaggagtccgaatagcatgcacaaactcagccgagctagtgctgccgcaccgatatgacaagttgaagacactcgaccactgttatgtcggtgcactttgtacgactttatgccttgtttaattggcaaaaaattttgctctgcgtgtcacatcggatatacagtacattgaagtattaaatgtagtctaataccaaaacaaattacagattccgtcagaaaactgcgagatgaatatattaagcctaattaacctgtcattagcaaatgttcactgtagcaccatattgtcaaatcatggcgcaattaggcttaaaagattcgtctcgcaatttacacataatctgtgcaatt

SEQ ID NO: 42855 - DNA, 461 bp, Oryza sativa
  unsure (1)..(461): unsure at all n locations
ctattattcttgggatccggatctgctattcattcttgtttcctcttngtggatattcaccagataaaagtcagaatatggttcttatgggtggtttaagaaaatacattccaattacaagaacttgttttttatggggtaccctttctctttgtggtattccacctcttgcttgcttctggtccaaagatgaaatccttaataatagttggttatattcacccttttttggaataatagcttcttttactgcaggattaactgcgttttatatgtttcggatatatttacttacttttgatgggtatttgcgtgttcattttcaaaattacagtagtactaaagaggattcgttgtattcaatatcgttatggggaaaaaggatatctaaaggagtcaatagagatttcgttttatcaacagcgaagagtggagtgtctctttttcacaaatctatccaa

SEQ ID NO: 42856 - DNA, 441 bp, Oryza sativa
  unsure (1)..(441): unsure at all n locations
agcttcaagttgctcttcagaagtgcccattagaggctgttacgcagaattttttactttattntgttttacaaatatagaatcatagaagtggatttatgcatgtatgcgtatgcacactttgagttatatgcatcgaccagttcaaccccaaaagcttaagctgatggggaaagataggcaattcactttatattctaacattcttcctcacgcgaggccccttaagtatctagcattgatgcactaatcagttcaatccaaaagcttaaagctgatgggggaaagatggttaattcactttatgttccaacacatatcagtacacacaaacaaataattgcaagcaactcctttccttttagactaaaccacaatgtgttgatgagaacaaactctagtcaaatgtgttaccatgaaaaaaaaagaaacaacgagata

SEQ ID NO: 42857 - DNA, 424 bp, Oryza sativa
tacaggaccatcgggataaaccctctggtttcttatacctcgctgaagacgagtgaccggccgtgcgggctcatccacggctgtgtcgggtgcagacgatccgccggtcagagggctgccgctccccccatcatgatggctgcttgacgacatggctgcatgcgactgctccccctgctgcagagacgtcaagccaccggtttcgccgatttcttcatcgtcgggaaaagacagtgcatgcgtgtgcacacgtgagggctgaaatccttcctcgggatcgctgctgccaggaaaaatgttctcacgatcttctgtggcatccagatacggtgcatcctcttcaatatttgctgcagaactgtgatcattttgtgctgtatttctgaacctctccgaatgtatttctgatctgcacatgctcaca

SEQ ID NO: 42858 - DNA, 320 bp, Oryza sativa
agcttaaagcatcaagctttattttgtattatttcatgcagggtatcagtgtatatacgactacatgtatactggtcgacagtatacgtgcgtacgcacgcacgcatgcaaatgcattgatgtgcctttgtatgcatgcttgcccaaacaaaatattaatgagcgatgaactatgaataatgtgattaattacctagcataggggggtgaggcggacttggatgccatgggattgactgagggagagcatgatcctgagcgcgtggcggtccttaggtgccacctttacggtgaatcgttggagcaccatggccatcatc

SEQ ID NO: 42859 - DNA, 453 bp, Oryza sativa
tgcaagcttcaaatttcttcagagaagaggggttgttttctataatttctagcgaatttaggttggtgattatatacaaatcggaggtgcctaacaagttagcaacttcatccttcaatgttttttttgtcatattacatttggagctatgttttgcacacctttttgtctccaaaattttgttgtaagttgatgagagagaaaatctgtgtggggaagaaagaatatatagaaatttagtttatttgctaaagaaggttttataaaatagttgagaaggaaaatatagtgaaggttaatcttaaacaatagaaaacaaactaaaatgaaaattaaaagcagtacaacacattaatattagtttaaaactttagaaatagtaaataagaattatttggtgtaatatttcataatttttgtatgaataatgatttgtcattattgtatgactgg

SEQ ID NO: 42860 - DNA, 263 bp, Oryza sativa
taagcttagccctctgtggcactggccactgacgtcacgccgacgctagtcttcttttaccgcgatgtcgttgctgccacgagctccggtcgtgccgcaccggcaagcacctaataggtctctcccttcaccggccttgactcttgctggcactaactcaagtcggtgccgccgcgaagctcgcctctcacgatacagccgtggtgtgggtaaggggtggcggctgaggggcagatctggcaccagacgggttgagggagggg

SEQ ID NO: 42861 - DNA, 449 bp, Oryza sativa
  unsure (1)..(449): unsure at all n locations
agcttccatgtggtacttatataaacgctccttttttccacatggtactatctaatcccaccgttgattttcatttaaattagtggacccattattttacaccaatagactagatctatcattgaaaaataataacttcatcatgtctcccgtacgtacgacgtatgagtagtatgtgcgatgtaaacttctgctgttcacggaaggaaaaaatataaatatactaaaagtgcattaaaccttctacaaacgcttttaagccgtcatatgacacttctataaacgctcataagccgccacatgatactatctaatctaaccgctgattttcacttaaattggtgaacacattattttacaccattagattagatctatcaatgaaaataactctctcatgtgtagataaaaacgctactancgttctccatacgtacaacgtatgagta

SEQ ID NO: 42862 - DNA, 405 bp, Oryza sativa
tgagtatcttctggaccatatttgcatgcctcagaacaagatataaagtgaatctattggaacttttcataacagtatgctctgtctctgtagacagtcgaagtatttgctgtgctgataagcgcaacatgacccattcttcaatcccctaaactgagtgttttcaccattcttctggtgcaccttatgttgtagtgttatggcattgctaatctggagcgcagtagcttatatttgagaaaaaaagcccagtaccttttgctattaaattttctactaattataccaacaatgtcactgcgtgatagctagcatacttgatatccttacaggccacataattatatctttaaacagtgcaattccatccacatgattaatgatcctacagatcaccacaactat

SEQ ID NO: 42863 - DNA, 447 bp, Oryza sativa
  unsure (1)..(447): unsure at all n locations
agctntatcttttcgtcggagatcgaactctatgcagcccaactcgaaatcaagaactcgtcgaaaataatgaaggtaaaaaggtggcgatgcgccgaaagtgtattaaactagcgttaattgattacatggtctcgggtcatatttatacccaaaatagatatcaagtccttgctggacacgactccatctctaacataacttaaaatacaaacgaaccctttcaggtgggcccttaccgaacatatctctaagaaaactaccaaactatcttaattaatagatacaattgccttcttagaactcaatccatacgtggcaatactattgcagcacatcaatctatcccgaggatgattctagaaacaccttgccgagatcggctacatcgggtatcccttgtccaatccaatgttagccgatgcagacgttagccgatgcccccat

SEQ ID NO: 42864 - DNA, 459 bp, Oryza sativa
  unsure (1)..(459): unsure at all n locations
gaccttgatactcagctttgataatattaaggaatatcttagttccccaccagtgttgattcctctacagaaggggattcctttcaaattgtatctatcggctggagaaaaatcaatcggctcggtgctgatccangagcttgatgggaaagagagggttgtattttatttaagccgaaggcttttagatgcagaaacaaggtattctcctgtggaaaattgtgcttgtgtttgtatttctcttgcactaagttaaggcattatctattatccaatgaatgcactgtgatatgcaaagccgatgtgatcaaatacatgttatcggctccaatcttgaaaggcagggttggcaagtggatatttgctntaacagagtttgatcttcggtatgagtcaccgaaagccggtaagggacaagctatagccgattttattgtggatcatcgtgatgactcaatc

SEQ ID NO: 42865 - DNA, 440 bp, Oryza sativa
agcttatcggacgtagctaatatttattttttataacttaaatttaaaattgattttgatgctttttatcgcagtttattttcaacattagcttttaagtcgctaaaatatatatatgtagaagttatatataaaattagtttatatttgctaatcagcgttacgccttataataagtggtatgtgaaaggcaaaactatcacactgggactgaggtgctctcctctaatatcaactctgttaagtttcgaattccgtgaaccaaaattcttttgtcagcttccaccaaaaaatgtcctcttatttcttctcttgaatataagagcctggtctctataggtgaagtacagcagttttaccaactactatagtctggttgacacagcatttttttttcctgatcatgcatttacgtgatataggcccatattaactggtac

SEQ ID NO: 42866 - DNA, 371 bp, Oryza sativa
  unsure (1)..(371): unsure at all n locations
tgtcctcnccgagaagatcgatgctagcaatcgttttgctgttganggncctggngatgaactcgatctcgttcctctcgacatccttcacgaccatgatcttggcctttgcgagataatggagcgacagatcggcgactgaatcacgcaagatgcttttctggatgagcacgacgctgcatccggaggccttgatcttcttcaccatgcccaggatgtaattccgctcctcgcggaggattcgatacatctgcgcgtaatccgacacgaccacgctgtgctctatgtccgttttgcgaggcgagacctggaactggatcaccgcgatcttggcgtccccgatcccgagatgcccatcggcgacacggctg

SEQ ID NO: 42867 - DNA, 437 bp, Oryza sativa
  unsure (1)..(437): unsure at all n locations
agcttgtcngtttgctctatacattcacttgtttaattttagctgctgtaaacttacttaagctnggctttgctgtgggaagaagataagaagaatcacaatttctatttgtcttaggagtagctaacttagaaccctaggagatagtcttgcggcggccacccaaatcctaccaaaattcacaaatcgctactctgtttctccatttctggttcagggttctgacagaggtatcagagcacgagcgaatccttggctcttggatctctctggtgaaggttggtggaaggcggcggtgagatccaccgtaaaattcctgagctaggagggattcaatccggaggcgagtggtgcttcagatcggacagcaagggttgggttgccaccttcgtggtgtgcacctgtaaaatctccggcgcttctgatttgaggttggc

SEQ ID NO: 42868 - DNA, 361 bp, Oryza sativa
aaccactctgacgcgatcaattggcggcgtttttttaacggaagagaagaaaagtggatcaaaaccctaaaccattataggagatcgagaaagaattcgcccaatttgacggggagaactagttcaagcattgtacgggcaccgcaccatcttgagcaggttgaaatagataccacagctcacatgtgagttgggccaaataaaggattaattaacatcttacacattgcgacgcacgggcatttgtcttctaggctatacaataaagaagaggagagaggatgctctattctatgtgctaagaccctaaacactatacacctccgatcggtttaacgcactataagaaggtcatgtagct

SEQ ID NO: 42869 - DNA, 443 bp, Oryza sativa
agcttggaggtctcccgacgtggctgatctctttggctggatgatccgggttagtaatgtcatgtgggtaaagtgtaccccctctgcagaggttaacaaactgttcgaacagccgtgcccacggtcatgggcggatgtgaggtgattcctagcgtagttttgtttgactactgcttgtgaaattgctgttgagaaactgggttctatgtttggaaaacctgcagctgatgggatcagctaggcccgggtggccgtttaaaagttgttggcccgggtggccgtttgaaaggtgttggcccgggtggccgtttaaaaagcttttggccgggtgccaaccttgtttcaaaatctaaagactgatacattgcacatactccgaccggacgagacgcactgcctcatccgtgtcgtttgagaagcactcacttagttgcttttagaaa

SEQ ID NO: 42870 - DNA, 390 bp, Oryza sativa
  unsure (1)..(390): unsure at all n locations
cgacacgcacttatcggggttcagttttatgctggcggagccgaagctctcaaaagattgcgctatatctgaanaggacgcttactggtagcgcgcctttacaaccaagccatcgacataagcctcaacattacgttctaattggctaccccaagaaattccagtaggacgttgaaaagtaggacctgcattctttaacccgaatggcattgtcgtataacaataaggtgctatgggggtaatgaacgcagatctttcctcatactccctagccatgcgaatttgatgataaccagagtatgcatctagaaaacacaaaatgtcgcaccccgctgtggaagtcacaatctgatctatgcgaggcacggggtaaagatccttatgacatgc

SEQ ID NO: 42871 - DNA, 439 bp, Oryza sativa
  unsure (1)..(439): unsure at all n locations
agcttagctctactgtgtcactntattttattctttgttattagaatagtatctttgttacagcttatagtgagatcaacagcttaactagctagtctaatatgtcactagtacagaaagtgctattggtgccggttaggaaacccctgtaggtgctggttttctcaatcggcaccatgaaagcggcatagatgagtccaagtaattggtcttggatccacaaccggcatatttgaggcgcacgcgagccaaaaaatatcggctcaatgcatcgcctcaattcgtgccaatgcatcgagttgctcccattcctccaaatgtaaattgaaatccccgaatcaaaactagatcgccgccaagatcgattgacatcacagaatgaacactatttacaacaaatacatgcacataaacaaccacgaagaacgcgtacaggcat

SEQ ID NO: 42872 - DNA, 234 bp, Oryza sativa
actgcgatgggaggggccgggaaacaacgggccgaagggcagacacacttctggacgtctctgcgaacctcaatcaaaactctcttctgatgatgaccgccggtctccgcgggtaaagcgggcacgtcgcgttaaaaccaaggggcggcccgatggaggatcgacggcccaccggggacagacggtcgcctgagccccgaacaacgaccagcccgatgaagcctgctcaaaatt

SEQ ID NO: 42873 - DNA, 442 bp, Oryza sativa
agcttggatcctgcggactacattgtgatggctcttactctctcccacatgcttaatttggctaacttggccgaggaggctcagattgcctacatgaggagaatcaagctcaagaagggtgactctgctgatgagaacatcggactgacagaatctgacattgaagaaacttttaagacgcttgttgttgacctgaagaaatcaccagcagagggctctgatgcccttaagagtcatactgttgacctgtgttagactgcacatccaacacagtcagtgaggaggtcactgctttaaaaacactcgacgtgagtgacagaaacaatactatgatatcaaacatcctatggatgtttatcatctaattgtgacaattcaaatataatttaggataacgagatgcttggctcaactatactcaaaggatattacaccagatgat

SEQ ID NO: 42874 - DNA, 465 bp, Oryza sativa
  unsure (1)..(465): unsure at all n locations
tgcagcaccagcatgtgacttgtgagaatctacgataagttctcttgtttntagtgcatcgtatcttgatattctaaagaaataaacatgcagcgtctagtggttcgaaattgctctttttacccgaaatgatcaaaccaatatcatttctttaattcgccttacaatgatcaggcggtggctactagctaactcaataaaaaagtatgtctgccttttaattttatgcatatgcctactgagctgataagtcgtagtagcaatacgattcacaacataaaagtggcactatgagaagttctgacatctttctcaactttaatatccagcggaagatttgaccaaacatgtttccatggtgagagtattcagatcgagaatcaaacaagtgaaatttaaactaaccacgaacgtggagtgataaggtcttcctataatccacagtgcacctttccaaagcatatg

SEQ ID NO: 42875 - DNA, 388 bp, Oryza sativa
  unsure (1)..(388): unsure at all n locations
tgaaattatgaaccaactaatctgcacaacattaggtgggtgtgtggattcgtcgctatcaagaagaagacttaagttttgccactttggaggcgattttagctgaacaaattgtagtaattcctaatgtttcaagaggcatgtgttcttgtggttgagtattctgatatagaggatgaaatcgtgttggaaagntgggagtgacattgttgcatttgtggttgcctgtgtttttaactattaatgtataattccgctggtcctttggatctccatgtggttgtgagtaggcatggcagtgtcctcactgcatagtattaatatttgctccagccttggcgcttgatgatacatcatcacttattgtttatttggtaaataaaaacat

SEQ ID NO: 42876 - DNA, 431 bp, Oryza sativa
tcacctcgaccacctcctccgctcccggcgcgtcttcgtttccgacgtcggctggctcatcgtcggcggcgtggaccatgtcgcgggagctctcggactcgagcaccatgacgacgggggtgcacgtcggcgagagctcggcgaggaggctcctccggcagagcgggcatgtggagtgggagaggagccaagtgtcgatgcactcgaggtggaacgcgtggctgcacttgggcagcagccggagctggtcgtcggcggcgaactcgcacaggcagacagcgcagtcgaacgggtccttgccatcctcgccgccgacgccgacgacgttccggtacaggaacaccgggagcgcgtcgatgaaggcctggtcgacgccggcgtcgtggaggtggaacagctgctgcagctggccctcgaacgccgtcgcgctc

SEQ ID NO: 42877 - DNA, 421 bp, Oryza sativa
agcttatttcttctctctttttatttctaccctgtccctccttctctcattgtctttctttcttgccatggattttctaggagaagaaagcatattctaaagtaagaggttatttgaatggaatttttgtgggaagccaacttctagtgtagaagcttagcttaattaaatatgtggaaattaaagcggaaatgaccccttgatcatgagagtatgaaaaatatcttatcacaagtcacacaaatttgacgaagctcaatatatatgtcaagcagtcgtatgcataataaggtttatcaatgatatacattgcatatggccttggtgggtataaaataaagttcattggaggaatcaactctttaaaacattttttatctttttttgaaaacaaattcccataagtcgtgataatagttgc

SEQ ID NO: 42878 - DNA, 406 bp, Oryza sativa
ctgcagcttctagaagagcagatctactgtttcttattcctagcagctgcacgaactcgccgtaatatcattatcatatactacctgttcccataagactttgcctttctcggattgaaaactgcttcacaataattctcacaacatacaaatacccacttgccattcaaaatttttgctattctaccctcaactaccttcacactctgacctattcaccatttaggacctatttgtttcatcttaagattattataatctagattattaaattacattactctaagctggattataataagctgactatagaataagactgtgagttgtgtgcttttctagattattagaggcatctaacagtagagggtctttagccacttaataatctacaaaaagcttctct

SEQ ID NO: 42879 - DNA, 122 bp, Oryza sativa
cagagcatctggtacagagccagctgacttacgaactgcccatttcggctcccttgcgattgaatcggcgtatcactatgcagtgaagataaggtgaagcttgatgatcagaaatgaatact

SEQ ID NO: 42880 - DNA, 463 bp, Oryza sativa
  unsure (1)..(463): unsure at all n locations
gcaagcttgtggacaaggctatccgccaggaagtatttcgcatcataatggaccgacaaagaaaggcagctcagatcagctttcctcaggggaacaatcagaagcctcgcctcatgacgggacagctaggtgggccttccaccctgatcgtctgtcagcaccgtccctatcacccgagtaacttcgacaacgactacaacggtggcagtcacaacaacagtaagcagcacaaccacaactcgactccacccccactaatggcaccagctcagtcagatccgccagctgtgtcagttcagtcagaacaacccaagaagggggctgtaggaaagccaggaccctgcttcaactgtggcaagcacggccactntgttggcaagtgtccgaagctgaatcgcactggacccaggttcatccaggcccgcgccaatcatgtgtctgcagaggaagcacaggcagcacc

SEQ ID NO: 42881 - DNA, 470 bp, Oryza sativa
  unsure (1)..(470): unsure at all n locations
tcgaacctgtttggggagattggtgtagctacaacttntctatatatctaaagctctcccaaacaattcagtttttttatctagattctcagaaactgagaaactgcaattatagaattcacagaaatgaaagacataagttgaaaaacctagcttttttagattcttaaaagctaactaccaaccagtttcttctcagaactataagcttcctcgtaggtgaaccttgacgtgaccaattttcagcatccggtaaccggtggagctccttgttgccgtccacaatcaccattgttggagattgatctctctattccgattacaagcttgtactataaagcaatatgagtgccagatttcctctggtttccatagcagcctcctggctagcagtgtgtgtaccaaagaaagaagtcggaaccgtgtataaaaaagtcagcacgagtaatctgttcagatacctcctcttc

SEQ ID NO: 42882 - DNA, 459 bp, Oryza sativa
  unsure (1)..(459): unsure at all n locations
agcttatcatanaataaaatcgaacacgttttattatgtgattccggtttatgaataatgaaacaagtatatatagtcgccaaaaatgcttatatttatcaatgaattttaaatgaaatgtttgtatttatatatacacggatcaggagtactccctccgtgtcccctcctaggttacttttntttcggatggaggaaatagatcgggaatagataggagcaagtataataataggatgtaatccgactaaatgctgaggtggaggggagagagagagagaggagaagcaggttgtaaacttacagccggcttgaacctaagaaccaagaaactctgtgagagagagataaatgagtcctatattaattgtaaagagctaactattatatatgtgggctgagagaacgcanaaaataaccttatagccaacaaatggactgtattattagccttgctct

SEQ ID NO: 42883 - DNA, 301 bp, Oryza sativa
  unsure (1)..(301): unsure at all n locations
ctcatgttttatgagagccagaggagcaagccgttattctcttaaangcgagagagcttaactttgatagaatgtgcacatgctatgcgtatgatcaaatacgctagaagcatcttactgatacacaacaaggggacatgctgactatagctaacgcgtaaaccttacctgaaatattgaaaacgcccactatatacaaatatactgggtagttaggaagcttgctactgagtgctgctgaaggtgggacagcttttatcacgcaagactctcctataatgatcgattcctgctactgctc

SEQ ID NO: 42884 - DNA, 452 bp, Oryza sativa
  unsure (1)..(452): unsure at all n locations
agcttatcatcaacctgtattggggcacaaataataagtttatccaaaaaagaaaatcaaaagtggtacataaataactcattaatgaaatcctagatgctatcatgcaacttcttgttacccttggtaaagggaggaaaaaaataattatataatgaccaaacaggaaacaataattgagttaatggttccaagcaaaggaaaacctagcctatgtaaacagactgaaggcagcatttataccgtttctgatccatagtattgtacgatatttggatgctgtaggcggctcaatagtgatatttcctgagaaacaaaanaagaaaaacagggaatcatatattgaacaggaaaagacataatctgaacttcttttgcaactgtaggttaaagcacaatcaacagactatacctgccccaactgctttgcactttcctttgatttaagatca

SEQ ID NO: 42885 - DNA, 463 bp, Oryza sativa
tgtatacatatgtattaccaattttttatacacgtatacaaagttttgtatacatatataaagtttgtatacacgtattatttaggttttttatatgtacacacaaactttatatacatgtgtatatttttttacattaaaattatatatatatatatatatatataattatacgcaagtatatatagtatatacatacgtatatgcattgccgtaaagaagagagactacgagaggagaagtgactgcgcgcgccgcggggggcgcgactgctcgctaatcagcgccccgggggctacccgatcggtctgggcgctcgcccagtagcatatccggatgggcccagcgctatcaccgagctttctttctcagttgggctttacatctgacgcggtgcgtatgcctctcgggctcggctctcgctcgtcgcgccgggcccgcccatgatataccctctctgtct

SEQ ID NO: 42886 - DNA, 457 bp, Oryza sativa
agcttcgttgacattctgctcaccataccttttatttttggcggtttgctaaagtcaactagtaccgtactcgaccgtataagctatcttgattctcaaataaagccataaacaaacatgatataattcgttgaattcaaaactttcctccaacgtcaggttcgttgttatcacaaagtcgcaagttatcactagtaagaaactcgcgacacataatctctccttatgcatatattcttcagagatcatttaacatggggattttgttaatcctccaagtgggataagaggaaacagagagagaagatggttgccggttgggcttttcaaaggaaaagtaaaacgaggtttgaactcattgcttagtttcctatatggaatttaagggcactaagggtaatgtgtatggatattgtccttatgggtaggccccataataatggtcttcagttatttt

SEQ ID NO: 42887 - DNA, 406 bp, Oryza sativa
  unsure (1)..(406): unsure at all n locations
tgatgactgggcacgatctatccattatatatggtgcagatcntataaactgattcgggagatcaatcttctcagggaaataataagagcaacagttacaatcccagctacagaagaagcaaaggtcattacctctgctacggaagtagcggaagtcacagccgcagctacaggagtggtagttactacttctgcttcagaaaaggtggatgttacaaccccagctacagaaaaggtggaagttacaatcccagctacagaagaagcgagaattacaaccgcagttacagaagaagtggaagttacaaccccagctacagaagaagtggaagttacaaccccatctacaaaagaagtggaagttacaattgcttttacataatatgcggtagttcaacccctgtta

SEQ ID NO: 42888 - DNA, 386 bp, Oryza sativa
ctgcagcttccacaagctttggtgtcttttctttggccccaccgcggggcaaaaaggggtattaccatgggtcccagcgcggcgaacgatggggtgggccacctgtcggtctcgggaggtaatggggattgcggatggctatgtttgtttggcgggggaggcaggctgtcacgtttgaaatgggaagtgagggaggttcatcttaagccgttggatccgcgagatggacggttatgtgtgaaccacgtaagcttttgggaattttgcgtgtgctgtggatgttgcttcgctttcgctatcggttgggtggacagtttaacctcagaaggtttatgtgacgatattgtgaggatgaaaacctaccggagtagtacatatttaggcga

SEQ ID NO: 42889 - DNA, 345 bp, Oryza sativa
atgatgagggtgttaagctcagaaaaggttctgaagatgcaggagacacacaatgtcacaggacatggtgagggttttaagctcatcaaaggttctgaagatgcaggagacacacaatataaatattgagggtgctgactctgttgcgaataatgaagacagacagaaggtagattttgggggagagtaatgagtttctacagaaggtagatttttggggagagtaatgagtttcttattcaaaagtgactgaagatgattttgtcaacgagtgtagtgatattagataattttgtagataagtgaagtggatgtattataacacatgataacactggtgtcaag

SEQ ID NO: 42890 - DNA, 379 bp, Oryza sativa
  unsure (1)..(379): unsure at all n locations
gcttcacgctcccccgctacttattcatgatgtaagcagccnaaaaccacgaagcanactcatactagcagtgttaaacaccttacagaacccactagtgcaagacagaaactttatatgacccatcgtaccaaatttggactccttccaaattcgattcgcagtgcatacgcacacaataactccatcgtatgccatatggaatctccataaccacgtgcatcaactctagccttagtattccgcatgatctctgaccacaacggacgtcgttttatcttttagccgactcccggtccatcacgcgggatactctaccgagacatcgagtcaccttcacgtgggacaaaccaataaaccagattccgagaccaagcta

SEQ ID NO: 42891 - DNA, 463 bp, Oryza sativa
  unsure (1)..(463): unsure at all n locations
tntgcactgtatagtgccaaagtgaaacctggaaatgtacatctgttgtgtgctaaaagattgctatgtgggaatgagagatattgggagtccatatatctgtaggatgggaaaatcaagatctttgattttccttcccattgcgtaggatcaattgatgtggatggggtaacaatccaagacagcatgatcctgtcaacgggccacaatgaatttcaccaaagcggcttgggtttgtagttttgttcgaagtgagctcagataaacaataacatggaaatacaccctcgtgagaaacaattatcattcttagtatcgctacagatttcagcaataatcaatgttaagtgaaacatttgtacacgaaagaccaaaaaatatattagcctgccagctaattaatatgcttttctaatgccagaactcanaatatatctagtactgtggcagtggcaaaagcata

SEQ ID NO: 42892 - DNA, 444 bp, Oryza sativa
  unsure (1)..(444): unsure at all n locations
agcttctntatagctatattgctatgtgaattttcaatgatgtagccaactntaggttacactcatcatattttacaaagcagtcggtatatcacttggatcatattattcagggattcacaccgcatatgctacatattaatattaagtcgcttggttgactacaattatcgaaaccactcggtgcatctagtcgatgcacctgactntattttttcagccctccacagtcttctgatttagaaaaagtactcgggagatcatggcgaagatgattgaagcactcggctntggagtaatctagttcgagagaagattatctttctgactgtgaaggtctcaggggctactgtggagattatgggtaccccatacccacatggcatggttatccaactagttataggggataacttatatctatgaaatatgtaacagatcatg

SEQ ID NO: 42893 - DNA, 464 bp, Oryza sativa
  unsure (1)..(464): unsure at all n locations
cgngtgttggcggcggcgtttctcctttaagatcatctatttccttctgtagacgggacaccttgctcttcaacttgtaaatcttgcctcgattccagttttccctgtcatgagctgctttgtctcgctccacacttactgcatccatagcactaagcatatgcaccgcatgcatcagagtggcactctcttcaccatcatgacaggtataggttccatagtcttgtccatgaggcttgtgaggatgatactggaaagctgatgaatccaacttctcttcaaagcgttgacgcaactctccaatggccaccaaagctgcttcttgacaagcatggctgtacgatcttcctccagcttcgaacttaatggacggaaggtcttcacgatcactagccaacgtcacacgaacacgacacttctcctcgtcggggtcatgggaaatttggcggtactcgggagcaact

SEQ ID NO: 42894 - DNA, 411 bp, Oryza sativa
  unsure (1)..(411): unsure at all n locations
agcttaaagccatgaatgccttttatgcatatctatatctggatcctgcagaacaaacatatacgatgagtaatatctgatgtaaatataatactcaagaaaaattcaagtattttaaaatgtttataaatatgtatttctcctcttgtcaatattgatttccccgagaagatgactctttacgtttaaacactctgcctgactagtcatagacccaagcaccgggagtcggcctaggcacttnccaaacatgcatatgagtgacatgagttcgtcattaatggaacaaagtttcacgaatcagaacttactactcgggtacttttgcaattgttaagagcagaaaataaaattatattaatctctatgctttcgagttattctgaataatacttattaacttgcgttact

SEQ ID NO: 42895 - DNA, 390 bp, Oryza sativa
cctaaattattattccaagaggttttctcttataatcatatatctttgcaggcgtgaaccatcataatcatgtgtagatatactgtctaattaatacggcagttaatcctggcaattctgctatgcgattcaaattaaagcacgctgacagatgtttaagggctgttaacaatataacatacgcttctaactcgtccatgaattatatgcgccgctcaagtggcatgcaaaacatatgcatgcatatgctctatatccaccacccgcttgatagacccaaacgctgagaagcaccgacgaacagaacagtagagtctaaatctcgtcgagatcgattactttgtcccgcgggcgccggcgtgttggcagtatatgcactctgataattaa

SEQ ID NO: 42896 - DNA, 452 bp, Oryza sativa
  unsure (1)..(452): unsure at all n locations
tgcaagcttaaaaagaagttggaatttactatttccacttcaaattaaaaaatcgacgcaactatttatgtggtgtttggatttagaaactaaaataaaccctgtttaacactaagtcgttctagcatttcccatattcatattgatgtaagtcattctaacatcaatataaatatagaaacgacttacattgttaaacggagggagtaataaaactaattacgtaaatggaaactaatttgcgagaaaagttttntaaacctaattaatccataattagcatatgtttattggcattacataggctaatggctcaatagattcatctcgtgaattagtccagaattatgaaatgtattttgttattagtttatgtttaatatttntaattagtgtccacatatttaatgtgaccgtaactaaaaatttagtccctgatcctaatccacctt

SEQ ID NO: 42897 - DNA, 464 bp, Oryza sativa
  unsure (1)..(464): unsure at all n locations
tgtggattagaattctagacaatatcaatttgactgcttttacataaatattntgcatgggtacaatgtaattaatttatatgatactttgaagatatggatcttaattaaattgattgaacatctattttttgtggatctttcagatatagtttgttaataagtgattctcattcgcatatggctttatctaattattgtgtcttgcaatcataaacagtgaacatatgcagcttcttctatttcgggttataaagatcatgctccattcacacatgagtggtctctcctaaattcaaatactatagcgaattcaaatatggcacaaataggatacaagcataaccgtgcgaatttagacaatgtttcgctattatagatgacaatgagaagatgtggatnttaattaaaacaataggacatccattcttgtgcatctttaagatagtaatctgttaataacc

SEQ ID NO: 42898 - DNA, 407 bp, Oryza sativa
agcttgagatataatactatcttacttatatattaacatcaaaagtgaaactcttttaaagcgaggataaaagcacatagtgttacattgtaagtgtggtaacagtgaaatttggtaagcccctaaaagaattatcacatcaccaatagtcagattcctgctatatttggttaagaaaattaatctatcaaagaaagcttatccagaagtgacagagttcaagaaggatgcggcatgacaagttatctattaattagaaataaattattagttttcttttcatctttaggaaagtgtatttaatgtcctataaggacttatatgttctccttttatctttaggaaagcttctttatagtcctacaagtactagtatgtccccatacgtataaatatgtacacattgg

SEQ ID NO: 42899 - DNA, 427 bp, Oryza sativa
  unsure (1)..(427): unsure at all n locations
tgaacaagttntgtccagatggcagagccggtaacttttgtaacacctttgcagattcctagatgatactgacggaaaatgtttcagtatgatcgcgttatactgaaatgttgcactatagcaagagtctgctatagtcagtcaacccccgttaccgtggtggtggtaaagttaaactgttgtgtgtaacatgtgactgtcgataatgactatccatccattcatgtcagtgctttagatgcctttgatttttccccccttcagggctatactgggttatctgtgttagctcacttgcagcacgggtgactttcacaaacaagtgacaatggcaattccttgccttgtcacaattggagaaattgacatgattttccagatggtccggatattattatgctccaattattcttgaatggttagtgat

SEQ ID NO: 42900 - DNA, 406 bp, Oryza sativa
  unsure (1)..(406): unsure at all n locations
ctaaaataacttggtagnataaaaatctaaatatctcctctgtagaggcagtgcacaatgtttcaaatattatttcggcacataaacatcatgctaacttgcatcacctgatggaagccagacatcatttttagagaaatgttctcatagcacctgaaatggcaaatttcatcttacacatcagaaatgacagcttccaaagtgttggtatgttactgaagaaacacagcaatacctaccaattctcaagttacagacttggaatatcagcaaaattcccctccaggtgaagaccccaaaatctataaaaggtggctctgttggagatatgatggacctacacaatattggagacccatcaacgcagtttatttgatgtcaacagccgaagagatattaacaatct

SEQ ID NO: 42901 - DNA, 440 bp, Oryza sativa
tctctatacaagaatactggcaactgtgggacttatttgatggactgatcttacaacaggatatccctgaccaacacactttaaagttttcgaagtcaggaacttacacaagcaagtccgcttaccacacctatttcattgggtcgataaaatttaccacatggaagagaatatggaggacttggacgcccaagtgtaagttctttttgtggttaacggtgaataaccaatattggacatcggattgccttgagaagtttggaatatcacactcaaaagtttgccctctctatgaacaacagtaggagataatacaacacatccttgtgttttgtgtctttccccgtcaagtatggtacctaattatagaaaagataggcatggagacctcagggcctcaaccttcctcaaggcaattctctagctggtggtctcaaatg

SEQ ID NO: 42902 - DNA, 368 bp, Oryza sativa
  unsure (1)..(368): unsure at all n locations
ctctatctcgctctcgctctctcccctctttcgtgtnccgtgtcttcccgtggtcgcgtcgcggaataatgcgtggggttctcgttggaatttccgtgtgcttggccgtgacgcggctggtggtcgtctcctgtgtatttgtagattcgagaaaattggtatggagcaccggcacgatgagatgggacccttccaactcatgagttnttcttttctttttttttactgcctctatattatgcggaggaatgctacgtagtggtatcccattaagattaaatgatacctctaaaatatcacctgataccttaatatcagccaatacataccaaatatcagacaataccttagaggtatcatcttgttca

SEQ ID NO: 42903 - DNA, 469 bp, Oryza sativa
  unsure (1)..(469): unsure at all n locations
tctgaaataaagatgtcagatcaaaagtttactccctcctgtttttaatgtaagggtttctgggttggcaaatgctaagattaggtcaaaagaaacctttttagtcatttcagttgtcaattcttgaattttgaattgcttaaattccctttccaagcatgtgattggcaatgctttggaatcattgaaatgatgggaattagtgcagggatccttgtattgtggtacaagatttgaatcctaganatccttatattttggaacggagggagtagtacagttcacttctctcatgtactgatggtgtatactcatgttaatgctttgaccaatttcctgaaagaagattctgcgccatcttagctctatctgtttacggaatctttaatcataagttagtaaaccttttccagaacttcgtatgataatctgtctacacatgttctattctatgcacaagtttataact

SEQ ID NO: 42904 - DNA, 295 bp, Oryza sativa
tctacttctgtttacctggaataatggcgtgcctcctggtgaattcaccatgagagtatatggacaccacagccccactttctttgtcaagacaacactcatctggagtgttcttgttcagagagttttcacgcatgaataagcctacacatctctcgagatataattagtgtctgttacgcctcttaaatgctgctcttataagaaataataaaaattacgtctttgtcaatacatatactaatatttgccatcatctaaagatatatatataatatttgcagaatgaaaaaca

SEQ ID NO: 42905 - DNA, 466 bp, Oryza sativa
  unsure (1)..(466): unsure at all n locations
tggcggagatcatgattgaagcacctctggtggacctggtggagtgtgatgacgacacanaagcgctgctcgtagagatggaggagccgacatcctatcgtgaagcagccggcgagccggcgtgggtgaacgcaatgaacaaggaactggaggctattgagaagaacaagacgtggtcgctgtgcatgctgccagccagtcacaaggcaatagggctcaagtgggtgttcaagctaaagaaaaacactgccggtgaggtgatcaaacacaaggcgcggctggtggcgaaggggtacgtccagcggcaaggtgtggattttgatgaagtggttgcgccggttgcaagggtggacacggtgcgagctatacttcctgttgcagttgatcgaatgtggcaggtgcatcaccttgacgtcaagtcggcattccttaatggtgatcttgaggaagaagtatatgtctctca

SEQ ID NO: 42906 - DNA, 450 bp, Oryza sativa
  unsure (1)..(450): unsure at all n locations
cgcagctgcagctgaagtacaaggcacctccaattttcagtatcttctgttctcgncacctactcccccagggagaatatgggtccatactaatcccagggatttgtgctgataatttcccaaaaaggagttctttactgcaaaatacaccataattactcagctgtctggtcccaaggtggcagaggcacgcgttgatgcatctggaaggaagcacactgtactgtgtgtgtagtcctaccgttcaaccagctagtaagagtactgtatcagctattgagtggattcaaaattgagtcctgtatcaagccgtaataagatacgatgccgtatgatagtatatactctactggggtacttcactgttctgagagaacgccgggtgatagatagatgccgatggaccatctcgcatctatctatctatctaactattatatctattatatt

SEQ ID NO: 42907 - DNA, 470 bp, Oryza sativa
  unsure (1)..(470): unsure at all n locations
ctcaagcttagcagctntcgttatgctgctcggctgccactcagatttctttatgtctaatgctaacaaattagctaatgttacaatcagntagttccatacaaatacaagtatggatgtaaaagttgccagttatctagagaaacaaaaagggtacaagtttgatgcttgaactgtgtagtctactcgttcgtaagatcggttcgtgacgcatgtgtattgtacagtgactgataccgtatggagcatgtgctgttgtcttgctaattgctatgaacatactgtccatcaaaagtaggggcgtacttaacacatggctcaggccccatttgattcataggagattcgtagaaattctagaggattttatcttcataggaatttttcctactaagtctcttgatatcaaggaatgaaccctatgaaagcctattacattcctatggaatgcctgcttctatacaactttt

SEQ ID NO: 42908 - DNA, 321 bp, Oryza sativa
caccgaggtggaccccctctctgaatcattgggaggtatcactcttacgacaaaacttacatttattgtgcatactggacacgacacgtccaccgccatttaccttatgatatgctgacaactgtgaaatatagaatgttcagagggagaccactttcatgagcatgaggataaacatacgtggactagccacgccttggaagttatgctagacacactttcggtgtgctctaagatattgtaacgagatggcactcacttaggctgtggaactgcgacaatataactagggacttgttgacaagaacaacgaccatggtc

SEQ ID NO: 42909 - DNA, 372 bp, Oryza sativa
ccctagccaccatagtttgtgtgccttacgtacattgcatatcaacgacgggtgccgctttattttatactatccatctatagttagccctttattccttgcttgtccgacaagttatacacaccaaccatcacccatcaagaatgatgaaggcccatacacgcatacttgctgtcagaccaatcgatcattatttagtgggaaccacccacaataagctgattgattaattacctactaataattaggactggctcgaaatattctatgaaggcttattaaattactccatccggttgataatacttgtcagtacggacaaaggcacggtctccaaaaaacaactttaactataattttctaattatatat

SEQ ID NO: 42910 - DNA, 473 bp, Oryza sativa
  unsure (1)..(473): unsure at all n locations
atctctgagncacctgcngcatgcaagcttcttcggtatatatgttctagaaatctattgatgtaattaaatatgctccgatcatcacctttggtctttggaacgtctgtacgtgtctatccaaattgtgataacagaattatagcaaagttatgttgcttctgtatgttcaaaaatcaacagatttttttttgaacgcttagaagttcttgctgacaaggcctctagtttaacttcgtttgtgctaggcttattccgggtcaagtcgggtcaacagaaaaacaaatcagtttatagttcagtccaaaaatattttgtctatagtccaagtattggcaattaaatcgtacagaaattgtaactgtacaatacttatttacagctcgttaaagccaatgtctacaacagacaacactctaaagagaaagggcactctacagaaagctttttctcacacgatcatatatattcag

SEQ ID NO: 42911 - DNA, 466 bp, Oryza sativa
tctttctctagattctactaagaaaacccaagggaatcaatttgttcccgtagaatgcttccctatgggccattccctagggttcactgtagggaaacccgatccctagagtttttggctgttccctacggtttttagctctagggattactggaagtgacacagaagattattatacgaaaatggctataagtactagtaggtttattgtgatattacagaaaactatcgtgacttaacgtcagtggcgtatgtatgggtggtctaacttatataattttttaaataccctaaatataactaagctaaaagtataaattgatcaaatatacatagtaatataataataaaagagtgttttttaagatttatgttctcatatgcatatatataaatatatatgtattgcgataggattctttgggtggtactgggaccacccctagaagcgcctatgcttgacgtg

SEQ ID NO: 42912 - DNA, 456 bp, Oryza sativa
  unsure (1)..(456): unsure at all n locations
aactagctttaacctaantggagggttatgctccttttttgtgatgaagagctccatgttctttaattttatttcttttcatatgatgatgttagatgtatgtgtaatacttgatgcctcttgttttaatggttcaatgtggtaacataaattctcatttttttttatttttgctatcacatccaccacctagttgtagatctagatctagatcttgtcatatatagagagagaataaaattttaaatgtctatttattcggtgcaatcaaaaaatagttatagtattttgtaatatgccgatgatatgattttgttagatttttctaatgtactaatttggcatgtctgtgtaaaaaaattgaaataaactttgattttttattactttacacttaacctctagttaattagttttgaatagcgataagtttttcaataaccctacaattttggt

SEQ ID NO: 42913 - DNA, 390 bp, Oryza sativa
agcctgaaagggagaaagatgtgctaagtatttttctttttactcccgagcatgggggaagggttcaaggtgcgtccagtaagatgagttggaaggaagggttcaaaaatgacccctacaagaagcgtgaagcgtacaatgataaacttatagacgaagggactgcggagtttgaaaggcaaatgatggatttctgcgtcaagcacatgattttgcctcgccccgaaaccaaagaacctgagccagattaccccttcgataacctcaaggagaatacaccctgcagattgcacgttcccattggacgctccgggaaaactcttgatgccgctacagccattgctatccctgtgagaacatacaatgaagagttcatacccgctgtgtatg

SEQ ID NO: 42914 - DNA, 421 bp, Oryza sativa
  unsure (1)..(421): unsure at all n locations
tgacaacaactcaatctcggtctggaactcatgaactctctgcttatataatgggntgctccgctngatcgcttcatttacgccattattgtctatatcttcacgggatacatccccaaatccacctctaccaagaagaaggctttcatcaaagtttctcgttgcaacttgtatttcgtcaaaggtgaaattccgacaaagatttgatggtgaatggtagaattcagttctataagtcatgcactttttatcagtcatgaaagaatgcttcgctaccttctttagtctgcagatgatgcacacagaaaaacaagcgataagcatagtggcagtgctacccatggctccacgtatggatgctgggacagcaccctttgatttccctccaccagatacccctttatggttcacatcagacttt

SEQ ID NO: 42915 - DNA, 441 bp, Oryza sativa
  unsure (1)..(441): unsure at all n locations
agcttagtggatgctgnggtggttgcgcttattataagnggagcagcttggaagctntgaaaaaaaagtttgaaggcgatatgacaaattgataaggtgttggtctgcactgggcgtaaaatccaggagctgcaatcaggaaattcttggtctttgtttccattaaaaaagaatacagtgataattgaaacttcgttcccattcaaagatagtaatggttgagacattggatatgtgggcagccggataatgtgattttttttctttcgccattagttacatcatcagacacatgtacaccacctgtagacacatgaatgcatatgcatggttttggggagaatatggaggggtttgtccggcctgtatgagcctaatctcttatcaagaaaagaanactgaatgctcatattcaagttttctttctctctctttctatgg

SEQ ID NO: 42916 - DNA, 458 bp, Oryza sativa
tccctatcgaactcggtatctctatcagttatgtgtatcttaagtctaggtagtgcaagttaaacagctgagaaacagaatctggtaccttgtgaacattgcaatttctcaggcacaagacccttagcaatctaaagctttggtagcaatctgtgaaccaagacaacgatattttctctgtaaacatgagcatggaccgaagctgagatgaacattttgctgcttggactaaattgccatccttttgtaaagaaacacgccgtgatccatcggtaactccatctgagttaggacagtcccatgtagtagcaaatttttccttcttagatatggttagggatatttccctaacaagatcatgcatctggaatctctttggccttccatattcattcctattcacaacctgaagcaatgatcgactagcaagttccttcaggtaacatgcagctacatct

SEQ ID NO: 42917 - DNA, 367 bp, Oryza sativa
  unsure (1)..(367): unsure at all n locations
agcttgngaatnggtttgagattttacgattttatcttattggcagctcatttgggtaattaattgcggtgggtttaattttcctttttccgtatggattgtaaattaatcgtcggaggccatggccaccgaacgatcgaatttagtgttttcatcggggtttaatcaatcgcgaacaattgtaatcaaatacacttgtttaaatctcatcaatgttttcatgaaaatcatctcgatcctttctacgttctttcttggagattaattgtgtttgttcgcatccatactcaactatgaatcatacgctctaatcaatcaacaaaattcagatgattaatccgagatgccgaaaatagacaaaaataac

SEQ ID NO: 42918 - DNA, 458 bp, Oryza sativa
  unsure (1)..(458): unsure at all n locations
ntgcgagtctaggactatcggtttggctaggaagttaattttctcaattctaaggctaacttccgggtatatctgagttgcccttatattcctcccaggggaatgtactatcattggtacacgtaaattttgggttttccaaccatttcttttcacaaaagcttgtgataataaagaatgggaagctcctgaatcaaacagaactattgcgggtacggagttgacagagaacatacccatcacaacgtctggagcatcctgagcggtctcagcttgaatgtggttcacccggcctcgaccaaagttgttggaagcccgagaaccttgtccacttgcctgagagctaagacgagactgagctgccgctggagtatgagatctggcagtgctgccattagcatgccctgagttggtgttggtaggattctgagggcactgtctggcatagtgacccatct

SEQ ID NO: 42919 - DNA, 339 bp, Oryza sativa
  unsure (1)..(339): unsure at all n locations
actttccatgataaaaaaaacatgctatatccattggttcaaagntcaaagttcgttcagataaagttacatgtaagatgagaagagattatcactaattcattattacgtactttacattcattttaatgcctgctttttttcttgggtcaaaaagatgtaccctgatctggcagagaagaacaccaccatcaccaccctcaataccatgatccctcgtggtgcacctgaaaaagggtataaccatctaccttatatttcattttaagcaactgagctgagaatctaatagtaccactgaccttagattgaatcgaccacacattcttttatgctgat

SEQ ID NO: 42920 - DNA, 479 bp, Oryza sativa
cggaccttgaaactcagcttaccacttcctctacagttccatgaggaccagcttttttctgtgctcccaccttgtacaaggcagcttctcaccaagatcgatatccgctggagacccttcaatacagagatcaaggtgactacgtctcaccaccgccacaacagaactaattttgcgactagattgtgcaacacctcggaagagacggagcacatcgctgaagccactggttttggcatataacttcagattaaggccacaagcacgtgaatgtataatctcaacatcaactgttgcttgaactgcatttacaagcagaagaaacttcacacccaacccacacttctcaccatacagacggacagtttcggtgaatgatgttgatctcaaaatgttggtgaattcagtgcatccttcaatcaatgtgccacctttgggctcatcctcagcctcacgtgagtcttcagtccgaatacaga

SEQ ID NO: 42921 - DNA, 384 bp, Oryza sativa
agcttggtcgtactgtcaacgctgttaatttatgcaactggggacgaacgatgtatgcatgtgcccctcaccttttatcaacgaactacagctgcttcaagaactcgagagtgctgtaagagagggaaaaaaaaacaattaatggcccgggcccatatcagggtacgtaccggcctgtttgtgctcctcaatcaatgacaacgtattgctaattgcttaattttatgcaagagagatgtgacagacacgtccaatgtgttgggatctcattgtgcgtcgatcgcactcgagcaaacacgcactttttcacagtatgtcataaaaacaaatacatctggaagtgaagatccaagtttatagaaagcgattatacttttttatttc

SEQ ID NO: 42922 - DNA, 438 bp, Oryza sativa
  unsure (1)..(438): unsure at all n locations
tccttgaagtnttcagctgtggggctaccattataattatggagtcgtgatattatcaatgcaatttgcttacttgatttatcattgtcctgctcggtctttcgacttagtcaatgaggactgaaggtttttaatagtttttgcgggttttacgctcaataaggcttgacaaaggctgttaagaaatcagaagctaagtatggaacaccaagcatagcataaattcatcagtattgtacaaattaaacctccatcatcattaatcatcaaaatcattgttatatcaatcagtatcagttctttcatcatcagaattatcacacccagtccgccgaaggtcgacatcttggaatctctcaaccacgtcagcagcaatcttgacagcggcttttatcgcatcattgatgacgtcaagagcagcttcttcgctcgtaccgt

SEQ ID NO: 42923 - DNA, 339 bp, Oryza sativa
  unsure (1)..(339): unsure at all n locations
actatggaggaggaggagggacatcataanttcttccaatttgcgtatatgccgcacccacagccctcttttaattgatatctttattctttatacttttatctggaactaaaacaagcactcgctgggctcttcccttgaaattttattcgctttaactgcaagtatctggaaatttttccccaaatgtatgaagtattttcgatgtgtttctacacaacgtaccagatctattggctcagcttgaatatttacatttcccttgcatatttccgttggtctgctggcatgggattatattatatgccaaggggtttctgggctcagttatgtggggcc

SEQ ID NO: 42924 - DNA, 460 bp, Oryza sativa
  unsure (1)..(460): unsure at all n locations
tggagcggcgctggcgatcgatgaacatgtctattatctattgtagacaagggatatgaaccattacatgctcaaatccaaattaaacaaagcaacgaatgactcaagtaactagccaagcatgatgatttttatgcatggaacatttttcatgaaccctaacaaaagatactaatgacaaaagatactaatgacactgactaagcaataacttaatgcataaaatagatgcatagctataatgatacgcataaaatngccccatcgaatctagacacaacttagtgcataacacccaacaaattcctgactggcggccaaataaattccaaataatttttttttctaaaacatcatactattcctagtcgataaatccaattaaataagcgaccaagaatttcccacaagacaggaataccaaaatttccaaattctctcgaaacaagtccaagtgaaa

SEQ ID NO: 42925 - DNA, 443 bp, Oryza sativa
  unsure (1)..(443): unsure at all n locations
cagaacaccatggcggtggcattatgtgactactggcccaattaggattgacttgtgtagcccatgaaaattgtatgcacatgtttaataccacattgctaatttagtaagggtgaaatcaacttataagagtttatccatccaacaatataactctttggtttatccttttacatgagactaaggatggaagtgtaagtaagtccgctcgttggatgggttgggctgcacctacgcggttctagagggcgggtagtagtggtacaagagtactagtcaggaccaacgcctagctccaacgatcagcgctagccgcctttcttcccaccatggtcgcttatgtagcgacatccccgtgctctgcagtgccgncgtatgggttgcgaccaacatcaagccgtactaccccatcatgggacatctctctttgtggcatctacaac

SEQ ID NO: 42926 - DNA, 462 bp, Oryza sativa
  unsure (1)..(462): unsure at all n locations
ctccgngaataagggcgttcctttcttaatgaaataaaagataaggaaactatgaatttaattgccatttttcttgtactagcttataggtgccctaaccttctgttttggttcggtacaataagattcttatttaggggtgtagtagttcggtgcttagccgcagcagcagcaaagttgggctgagtgttgttaaacaacagttggtattgtaccatcaaagccttaatatatgaatgatggtgagtatttcttactagttgacaataaatacatgattatagagtggatggtgtagtacacttgcacaatggaggatgaacagtttgtccggcgactaaccgcctatgaatctgcctggctgtgggtcagcatctgactagatctccggtagtcccctgcgtgctcgccgagaanacgacgcatcctcaaagagagttccaggcttggctcggctagctc

SEQ ID NO: 42927 - DNA, 440 bp, Oryza sativa
  unsure (1)..(440): unsure at all n locations
agctntggtgctntgaggagatacacgcnccttaccaaatctttgccaacatttccaacctcctttaggatagaagctggatccagcatggtttcatcggcctcgtctctgccacgcttctgtagtacaaaaatattgagtcagtttagttaaacagtttattgcaaccaatttgcaaagttggaaccaaagcaaccttttttttctaaggataaaaagcagagccaatcttttacaacttaaattgtgggagtaatacctttgagttctcccatgtaagaccgattgcgtctcctccgattgaatcataccacagcttgaaagttttaggaaatgcactctgtaaaatatataaatttatttcccttctgaatgggtgttacatgctttcatggagtcaagagcttcaatcttaccttcaaatcccgcagaaagtatgt

SEQ ID NO: 42928 - DNA, 473 bp, Oryza sativa
  unsure (1)..(473): unsure at all n locations
tggagctganagagcactagtgtcggccattacactgtctctgtttctttnntttttcaactccaaacttcaactttttcattntttggttagcacatttttcaaactgttaaatgatgcggattttttttaaaaaaatttctatataaaagtagctaaaaaatcaaataaatccatttttcaagtttatatataataattagtacttaattaattatgtgctaatagattttctcgtttcgcgtgaactggaaatatttcttcctaaccacaaaacgaacgaagccggatccatttggcaacaaaagggatgccactttgtgtacgttggcgtcacacttgcattggaggtcctgatgagtcattttcttggaaaagattttctagagagaggaagtgaagaaagtctcacagttccatccacttctttctccaaggattgngtagtacatatgttatgctatgcttctcat

SEQ ID NO: 42929 - DNA, 441 bp, Oryza sativa
  unsure (1)..(441): unsure at all n locations
agcttgngctatcccatactagcacatgtggttgcactgtatacgatatgaactgacattgagtgaagtccttacgtcggtttgggcacactctccccctatcggtacacaactaatcaccatatgtgcaccacttgaggcccaaacctaaaatccatgtttttccaccattttatttatcaaaatcacaagtattaaagttctgtccagattaattaaaaatttattttcatgtttgtaatgagcccataatgacaaggaagacaattctaagcatggctaagctttatatagtaacctagtgtcaccaaaagtcatatataaagtggtatagtcatattgttcctaanggtaggagtgagggatatggatatatgtggcgtcaaggtgaatgcaaacaataagaatttgtccacaaagttacaaaatttaattattatt

SEQ ID NO: 42930 - DNA, 471 bp, Oryza sativa
  unsure (1)..(471): unsure at all n locations
ttattgactatagatnggaacaagtcagctccaagaacatatattattggtganagtggatcaccctgtcttacaccccttttgcaatagaaggatttgccaagaacaccatttaggataactgaagaagaggctgaagaaaaaatatgagaaatccagcttatccatttaggatcaaagcctttctgcctcatgatgtccaatataaccgaatgttcaatagtatcaaaagctttctcaaaatccaattgtaaaagaactatttccctcttagaatgctggcactgatgcagatattcaaaagaccaagccaaacagtcctgaatatttctagccttaatgaaaccatattggttttggtggatcaattcaatgatgacagattgtagcctatcagccagcaccttagtaagaagttttagagccacactctgtaaagaaattggcctgaagtcatttaccttttctgga

SEQ ID NO: 42931 - DNA, 388 bp, Oryza sativa
ggcaagcttggccgatgccttgtgtcgggctctgtcgtggtagcttatgataagttaactgttggtgtggtgttgtaattgtgggtttcgctcaattttccctaattaactgagcactgtaagggttgatcccgttttctcctcaaaataagatatcttcttcttaatataaaacgtcggcaatggcctgaccgttcgaaaaaaaaagttgttggaattaagtaattaattaggatagttaaggacacctaccatgattggcacaatgagggcacatcagactttcttagttgcgtgtgccgtatatttgatatgcacaaaactatgatgtgccacacggattggtaagtacgtgctactatgtgttttagagaaagaatgtcatatc

SEQ ID NO: 42932 - DNA, 468 bp, Oryza sativa
  unsure (1)..(468): unsure at all n locations
tgcaaccaatcttgaactatctcggttaggtccgatctgttggtattgaaacttgtttagtatatttaactgaaacttgatattcttgtataaggctatatcagagttatagctgatacaccttatcttcaatcatctaaattacttcagcggctacgatataaatccatataattattaattgtctttttcttgagcataagcagttaatgctgtctcggttaggtccaatctattgtgattgcttatatttaagaaaaggatcgaattagtaattgcatgtcatttgcttctacagcctattgcaagtattttaggtctaatacacaaatatctgtccatcggctagttatatttaggtcatataattatctaatgattgactntaactntatcaaccttatgatgatgattgggttcgaccaataagatcgattttgttaaagaaaatttgttcataattatatt

SEQ ID NO: 42933 - DNA, 351 bp, Oryza sativa
ggcgaaaagctcaccgctcaaagagaaactctttttgaggtaatatatgaattcttccacatggtaccaccaattgatgcacatctgacttgtctatatcgtctccaatccaacatggcttctgagtactgacttttaatatgcatgctaacacctagcacttgcaggaatgtgggaaattctcgtatgaaattatgaacaacacaacttatgatgctgcagaacgtgctgttctaccacctcaagtgatgaagttggatatttgccgacaatactgccctctcattataaaggttgcaatacttttctattatactttcgctatcaatgggagatgttctgctgcataat

SEQ ID NO: 42934 - DNA, 405 bp, Oryza sativa
tataccttgcatgaacaagcgcctgtagtttatgttaccgacgacagcctaatggcatcgccaatataatgctctcctactcaacataaaacatgcaggtgcatacattgtttcagagttgccacccgatcatctctgctgcttatgcatagataaccgaccaaaagtttctgcagctaaccaactccttaattacaagttgaagctgaccctgataagatgctactcaacttatgacactcatttggacatggagctgctgccatcattccatggctctgcaactgctattaccgagaaagctcatttcaagggaagacaatgctgcatggatgcatgatcattatgctcagaaaaacatactcactctctcacttcgactccagcaattgagcgaatcctcct

SEQ ID NO: 42935 - DNA, 411 bp, Oryza sativa
  unsure (1)..(411): unsure at all n locations
gcttcatgtataattttgatttatgggacttctacacagctaggccacatgctctgacatgcctatgtgctatgtggcttggatggagtcgggccaatatgtaatggatagatgctcttcgatatttctttttttttataaaatacggaatgagagctacgctgaccaattatgttgagtcacctacattgatacatgtgatgatactaatatttggagatacatatcatgtctatttgtatcaaacttgttggtgctcatgggtatctgacatggtaattatgtcctagatatggtaccgtatnggacttgggtactaggtatcggaaatggtatccataggtatcagacctgaggtctcaaatatggtaccataagtactattagacttggttactaggtatcagatat

SEQ ID NO: 42936 - DNA, 464 bp, Oryza sativa
  unsure (1)..(464): unsure at all n locations
gcggcagcggcatgcatggaggaagaggaagactatgactgttgcggatgatgatggtgctgctgctgatgctgtccgtagtgatggtggccatggttcatcatcatcccaaaggagatgttcatctcctgctgctgacgatgctccctctcctgctggctctcgctcccgctcatcatcgatcgatcaaatcaaagctaacctcttcagaatcgagaggaggaagacgagaataagaagaacacacgccgaaacatacacagagaaggcaaggtagcaagctatatacgtatgcgtatgtgcctctatctatctatagccatagctgcaagggcctaaatactctntgactctatgaggctagcagccaaggcgccacctctctctctctcactcactatctctcttgctcttccacaccagcaactaccccatgcatgacctctagctctatctaggactct

SEQ ID NO: 42937 - DNA, 439 bp, Oryza sativa
  unsure (1)..(439): unsure at all n locations
agcttacagtaattcttcattaaaatttctcttttgttacttcgaggacaacaagtcatttgcattcaaccttccattgatgattgttcaggtgcgcggaaccttctgatggaataaattatctgaattcatcttctgacggaatgagttgtctgaattcatggttcagttcctgagctagtaagggtgtgtttagttcacgccaaaattagaagtttggttaaaattagaacaatgtgacggaaaagttgaaagtttatgtgtgtaggaaagttttgatgtgatggaaaagttgaaagtttgaagaaaaaaattgtaactaaactcggcctaagtttgtactatctgaagaacacttgggtgtgtttagttcacgccaaaaatgaatagttggctgaaattggaacgatgtgacngaaaagttgaatgttgtgtgtgt

SEQ ID NO: 42938 - DNA, 463 bp, Oryza sativa
  unsure (1)..(463): unsure at all n locations
ntanannatgaataccttgtactcgtaagtaccatgagcttcatggctgccagccaagaagctacccatcataacagtggatgcccccagagacaaagccttcacaatatgtccagagtttgaaattccaccatccgcaatgactggcacattgtgatctttggcataagatgcaaccttatacactgctgtagcctgtcgcacagaaatgcaagaaacaagtatcaaacacatgcagcacacagcagtgccaaaattctttggtatacgatatataccatatatataccatatttgttgtatccctataacatttgtatccgccacatgtcccatgatccacttattatacaaacctcatttcaagtttaggtctaaaaacagcagaaaaggaatgagctggacaaggtctcaatacatcacataacaaaatctcgtagacaacataatgcccaggttccac

SEQ ID NO: 42939 - DNA, 433 bp, Oryza sativa
agcttgccggcgtcctccctgctctctcttttatctcctgatctactgacatgtgagagtagtacaaagtgaaagcttttggtaaaagaaactagcccaaagtgaaaactttgtctttagaatggtccatgttaaaacttgggtaaaaataactagaccaacgtgcaatttacttaaaaaaaaaggaaagaaaatcagtccttggcgcgcgccactccgtcgacctcgtctccctcagaatcggcggtcggcggcgtctgctccactgtcaggcaatgcaagcatctaccgcatcttcctctcccggattcgctaatccggcgggtgccccgcaacttctcttctaccggcctctcctctccctgcagcgagctattcgtttgcacagtgctctctcaaagctgccgctgatggccacgggtggtggggattc

SEQ ID NO: 42940 - DNA, 465 bp, Oryza sativa
  unsure (1)..(465): unsure at all n locations
tcagctntntattatgctngttctcgcttctcctgttatattccgatctagctgattgcgttgtgtaactataattnttttcttctaaagtattgacgtgcaaccctttcgcgcgttcgcacataaagagtgatcatctcacctgctgagacatggtggccagcttctctcatgangcggaaggcgagggtggcgtcaagcaggtcgccgccatgggcgagctcctcgagcaggcaggcgtccatggcgtcgtcgacctcgtcttggaagtagtggtccatgcagaggcgcctgaggtggtcgacggtggctatccgctcccggccgccgctcgccgtcttctggtgtcgccggcgttgatgctgcagcatctcctgcacgtcgtccgtcagggcttcgtgccgctcaatcaacacctgcagatcaagtaaacacgagctagagtagcaattaatcaaatatatt

SEQ ID NO: 42941 - DNA, 420 bp, Oryza sativa
  unsure (1)..(420): unsure at all n locations
agcttgcaacaacgcttgaagactgcaaatttctgtttgtaattaagccattagcgagagcaattaaacggaaaccccagccagagaaaacgcggctgtttctcctgttcaggaaacgaatcaaccaaccaaccaatcacgccgaggcaaaagctttggagcggaaacacgcacacaccaaaaaaaaaaaaacacgaaacgaaacgcacgcacgatgagcgttttgctttggccggcgagcggcggcggcggcggcggtgcttacttgggtcgcgggcggtggcgctgacgaggcggaaggcgacgccctccttgtggccgaggatgttgtggacgcccgcgaggaaggaggcccntaactangatgtgccccccgattgtaaatacctctactatgtgtttaaagaaagatggcatatc

SEQ ID NO: 42942 - DNA, 458 bp, Oryza sativa
  unsure (1)..(458): unsure at all n locations
taactttagttntggtgcatatagaatggtgaattatttatcgcgtgctctaatatatcatacgtaatatggcctttgatttatttcgtatagagttgatagtttcgataaaagatactactccgtattctacgagtatgaatctagatatactccctgtccagatttataattttaggatatatcacatccactaataattctttgtatttaggggcggaaggagtggttcttatcttaaaagagagggcaaattgaaaagtttggcagaactaaacactcctcgagtactacattatctttccttcctttaggctgagttcggaactttcggttcccatccttactctttcattntccgcgcccacgctattcaaactattaaacggtgcatttntttaatagaaaagtttctatacaaaagttgcttatataaatcaaattaatctagttttaaa

SEQ ID NO: 42943 - DNA, 212 bp, Oryza sativa
tattagtaattaataggaatggatttctaaattaataagggtatctaaggataatatttctaattaatacctgatatgtgtgtacccattctaaccccaaacgaaatggttctgaaactaataatattttgctatatattaagcaaaatggggtcgcctaaactgatttcatttttatatgaaacaatatgcttcatttgatatgccaatta

SEQ ID NO: 42944 - DNA, 452 bp, Oryza sativa
  unsure (1)..(452): unsure at all n locations
tagaaaggcagatctctgcagccatgtcccatgcatccctattattnaaatttaggaaattaaagaaaatgcagaagaggtagctaaactataaaaagaatggctagtgccatcaattaccacatatggtgctgatgagttggtggcaacaaagggtatgaaattggggaacaatttgcggaccgcatgattctctcagcaagtaagaagttgcgaaagagactagcaaccaaaagatcctgcctgaaaagtctttggaatagatctgcgcagtgaaagttgaatcataacagattaaaagaaaatgaatgagaaagcaattgatcactggcattaattgtaactaaaacgactatcagtaccatgaggaagaacattccatgcaatagtgtctgtgatagcagtgaaaatccagttcaactcccctagaagagttntgcggtcattttgcc

SEQ ID NO: 42945 - DNA, 247 bp, Oryza sativa
agcttgcaatggaggcaaatgttatttcttgttctctttgtgcattatatcacttcatacttccagcttccatccttctgacagtctctcgactcacgcaaatgaggatgaagatagtcaggattcaagttggttgtcacacatgggaagtgctccagtcaaccaacatgtcagtcctgttgggaatgatggtgcctcatcatcttctgaagtacgctcccatatatctaaattaacttccatcgac

SEQ ID NO: 42946 - DNA, 451 bp, Oryza sativa
  unsure (1)..(451): unsure at all n locations
ggtccggtgaatggcgctaccgcagtccgcactgttccattcagcgcgccaaacacagattcacatagaccaaaggcgccaaacacgatcgaaccgagcactcaagaagcactaaaaaaatttggtgaaaaggaacgacgagccggcgacgagagctccagaaccctagccatggcgggagaggcagggggagacccccgagcgtggcttgccgtcgacgagacggcggcggccttactctcccgctccctctcggcgcggccccccatcctcctcccgccggcgctccaccgcgctccgctccgcccgggcaacgtcgtcgagatcgctggcccgtccaactccggcaagtcccagctgcttctcacggtaagagaatccanagctttctccgcctaaatggttagcgaacataaggcatttagccctcacttagacgacctttctacca

SEQ ID NO: 42947 - DNA, 456 bp, Oryza sativa
  unsure (1)..(456): unsure at all n locations
agcttcatggaaagaaactaaagtcatattgcccctgtgtaacttggttggttgaatctttacttatccaatgagatttttgaagtgtctttgaaaagacaccacattgtcaaaaagaacctaaatctgctaatctttttgtgctgcacacttctgaaaacagaaaatattgaatgaaacgtaacacaatgcagtcaactaaggttttgccataccaaaagattttgcccaaatagtatgaatttggtgtgtacaagtttcgatgattgttccagtgacaaggtggatttaaataaatacatcctttttgttttagaataaaatgacacaccagaaactgcacataagcttgagaaaagcactatgtcattatctaaatgagttcccaacataaaatagatntaatttcataatgaaatctcatatattgaggaacgatgtacatatcaacatctt

SEQ ID NO: 42948 - DNA, 446 bp, Oryza sativa
atgcagagagcaaataattgggactgtgttctgatgtggtaatgtgtctacgaatcctgatacagttgaaatcacctacgagttactcccttcgtcctaaaatataaacactcttagcatagtgtcaatgaagttaaatatttgtagctttgactaataatagcaaaaaaaatagaaaagatcaaacatgtaaaattgatgttactagatttatcattaaacaaactatcacaatatgcaactctttttatttaaagcattttacttttatagatatcatcaaagtagcatctcgaagactgtatcgaagtctaaaagtgtttatattttggaatggagggagtagtagaaaattattttggatccaggttgtgcgcgcattggtacattcatggtatggctccacagcgtgtgctgtatctagtctagaactagaaggataccct

SEQ ID NO: 42949 - DNA, 196 bp, Oryza sativa
gcgcgcgatcgtatccgcgcggagcgcgatagtcgcgccgacggccgagtgcgagggtcggggcgaaacacccgccaccctcttgtaaggtcgcccgagaccatccatagggagggaggtcgcagtcgcgcttggcggataccgctctaggcccttctctccaaccgttattggtctagggggccgggcgacgcga

SEQ ID NO: 42950 - DNA, 429 bp, Oryza sativa
  unsure (1)..(429): unsure at all n locations
acatatggggctcacttgcgtcctgttgttggcattctgncacacatgagaaattaagaagttggtgaagagagaggaacgccgctaatatgggggcggtggaagaggctaggcgggggtgctcctcgcatcggatacatcaccgtctcgattaagtcccaactggaggacaacgggaagaggataatgtggatcgggtgcaagctaattggatagctcggattagctcgtgtactatatcataggtgccacaagagaaatcttccctgcacacgtcaaacaagctatgtggccattataatagtaattaaagtgctaccatgtttcatcattggtgcttaaatcgtctataatgcttacatggctatataacaaaaggctaccatacgaatgtgtatagtcgctaatgcttacatggctacatgagaa

SEQ ID NO: 42951 - DNA, 486 bp, Oryza sativa
  unsure (1)..(486): unsure at all n locations
acctataaatctaagctggtntataggctatcaaatccaccataaaacatgagccttatctcttaagagatgttgaacaacttgcaaagaaacccggtacaagtgttgtgacatgtaaaacaactcggagttgaaatttggcttaggtttttcaaccaacacaaagatgaattattttgagcactagtattcaaccaattatatgtatgtggtatcccccttaatagtacggcatcctaaactcaaatgtaaaaaggaaagttataccaataggaataccttcacaccaatttctttcttcacttggaggattaccggcgtcaaggtcatttgatcatcgggaaaatatcatcttgttgatctttgacatttcatcttccatttctcagatgattgataaggataatccatggcttcaaatggcattgcacggtccatcacgacaaagtcttcactcgcccttcaccaccggtttcggttcatcgt

SEQ ID NO: 42952 - DNA, 333 bp, Oryza sativa
ctgaacaaagagcaattcagtgttgtttggtttcggaggctgtgccctatattaaaatggtaccttgtagataagtggtagaccatagtttcaacttggtgttgatgaatgggtctgaatttcgcttcctctgatattctggagaggagttgtttacacccaagataaaagagaaacttgcattttcttccattagaaagggaccagctgctgaaacacgtttcccccacgaatctgctgtgcagagcaaaattgaagtgataacagataaatcccactgttgatagctgaaagctactcctacccaaaaatatttaagaaactgacgatgtg

SEQ ID NO: 42953 - DNA, 469 bp, Oryza sativa
  unsure (1)..(469): unsure at all n locations
tccnctgcttccagaagccaagttcaaacatggcgcacaatgacgaagcgtcctcgtcgcgttccaccacctcctccgccggccaacccttgtcaccgtcacctncacgcctcgcctccgccttctcctctcccatggacgcggtagcgcccgcgcgcgatttcatggcggaatccctccgcctcgttcacaaccgcctcacgtgcctcgtcgaccgccgcaccatggcccgcgtatgccacgcctggcgcgccgccgtcaagccgctgcatcctccgccggaggagaggcctctcccgtacatcctcctcccgggagatggggagcgctccttctcgtgcgctctccgcggctgcgccacccaccgcttncacattccggacatcccgcgcgacgcgcgctgcttctgcgcccaccccggcggctggctcttcttcgccgttcgccagacaaccaagaacgcgatcct

SEQ ID NO: 42954 - DNA, 431 bp, Oryza sativa
  unsure (1)..(431): unsure at all n locations
tgcagctcaccttacataggcatgcaggttttatcttttttttngcaaagatcacacaaccttaccactgacaattccaaattaacatgtgacagttcatttaacgacaagcccattagggagacagtagctgggccactgggtaaagaactgtttgagaaagaacaagaagacctgctctccgacctgaatgacattccaaagaaagcctgtgaccgtcgagtgagaagctcatcatcatcatcatcagaaacaccttttcttgcaagattacatatatatgctcactcatgctaaccattcattctgtcactgaaaaactgtttggtggtttcagatcaacgaattcgtgaagcgttcgaggtcagcctaggtccatgctcacataatcagncacctgaagaatgagatgcctgcgctgatgggcaagg

SEQ ID NO: 42955 - DNA, 462 bp, Oryza sativa
  unsure (1)..(462): unsure at all n locations
tcattgcagtaagaatgagttcatcatggaggagagttagtgaattatatggatgagtaatttacagatgtttttactctcgtattggacgaccggctcgaagcatttttcgtaactaaccttattaatactcaactcatttgaacttattttcctaattgttgagttgtgatccaaattcatttgcacttaataaaggccagcttctgccgtagtggagcggaggtccgtcgccgggaggcccttttagggttccaccatatatatacctcttgtaaaccaccgtgcggcgttgtaaccttacctcagatataatgaagatattttgctggctggtgcccgtggttttttctctcctggtttgggagggttntctacgttaaatctcgtgtctttgatgatcgatctattggtttttatcgtttgtcgcctatcggtttctaacactaataagcccacttg

SEQ ID NO: 42956 - DNA, 462 bp, Oryza sativa
  unsure (1)..(462): unsure at all n locations
agcttcttccaaagcatacggctntctagatgatatgacgatctctagacagatggatcttatatgaatcgtatgatgaagtaccacatgagtggatatataggaaaggaatccaaatctgccgaatcgctcatgttatgatcttctacatcctaggtctccgcgttccgtcatctggcttatgttcttcatgtagcattcagatcgaatgactctatgaaattacgtcgatacttctacatattatgggtaacgtaggagacatccctattttcccccgggggtcttaattaccactgcttagctttcaattcgcctctgaccatcaaattaaatgtgaataacccgtcctcctctctttgaaacaaggnngcgcttcggttctgtgcgtgcttcanacaatattgtcttctccatattaccatatctctagagtcacataatttctatgaggaactactg

SEQ ID NO: 42957 - DNA, 479 bp, Oryza sativa
  unsure (1)..(479): unsure at all n locations
tgtaccagtttgggaaggggggttntntgtagagagaaagaagaatcttatttcaactcgatatgncccttaggcacnggccatacattaacatagnaaatcacaccgtggaagggggtgggcagattagcttagagcagcagggtgctgtagncgaaactgattgcaaaagaaagggtaaatcggcccactttaagattacctatctggggagggtccgtttgggtatcctcaaaactgcttagcaacagtcggacaagtgggtaatgttggggtgaaccaaaaaagtttgggtagagccgggtctaagtgttggctaggtaaacgccccgtagtaagaggggtagttatgaaccctgtggaccacccccatgggggcggtgaagggaaagcccncattggtagaaaaaaacccacaaacccttggggttatcctgcgcttggaagaagaactactgaaaggaaaaaatatagtgata

SEQ ID NO: 42958 - DNA, 443 bp, Oryza sativa
agcttccaacatagacttgcttctaagctttatttctaaagatgaggcagaataccatggatggtgcctatttcactacaataactaataatgttcttttatcagttattttgccactccttacccgctaccgaagttggatatggttgctattcctgattttgctgctggagctatggagaactatgggttggtcacttaccgagaaacagctttactttatgatgagctgttatcctcagcatccaataaacaacaggttatgcctatatttatctctatcaatttcatttgtttcatttactattggagagatagtctcgcacttgaatcctcatgtgtagttatggccacggaaactgctatttttaaaatagaaagaaagaaagaaaaattaacatctgttctctttatgttgcaatcactgttgcacatgaattggc

SEQ ID NO: 42959 - DNA, 458 bp, Oryza sativa
  unsure (1)..(458): unsure at all n locations
tcacatcctctataatatttgaagcaatcatcaattatcttctgccaataaaaccccgctctcctaagcaaccaattcatcttgtgggccgattgatgagtcccacaaattccttcatgtacctctctcatagccactttagattgatcttcatctaagcactttaacaagacaccatctatatntcggcgatataaatcttcatcaagcaatgtgtacttgaatgcttgccgccgaattttccgatcaaccttaagcgtgggatctttcaaatatcgaatcaaaggaatcttccaatcttcttctgtttcttgggcacaaatgtccgaattcacaattaattcggcctttaaattgattgaaaagtgccctccagcgctctgcccagaactgatcataccgctcggggtcgccggtctgaccgactgcatgtggccggtcagaccgcccctggtcac

SEQ ID NO: 42960 - DNA, 339 bp, Oryza sativa
agcttccctggatctgggaagtttctctttcacggtattgggatcgtttgatcgatttccttgatcgctacttatgggcgtgcgctcaaaggatacaaacagggattcgcaaacaaaaaggggaattcgtagtcactttttcctgtcgcgtaaaaaaaaggctttacgcgagagcaatagaggttgggatacatctatctcttctgagcaacctcttttggattcttaagaccacccttgcagtaggataccgtctgctttgggttctttattatattatctccttcgagggatttttaggatcgttcaggctatatttagtctattttggcttttact

SEQ ID NO: 42961 - DNA, 420 bp, Oryza sativa
  unsure (1)..(420): unsure at all n locations
ntccatgaagtacttgcacgcccaaatcggagtttttatgatgtcgtggcggccatcagaagttggcgctgccctacagtccgaatccaccccgcgcgaatcctctcccctttggatcctctccatcgttcctaagtaaaacacgagtgcacgcgtctccggggtataaagaagaggaatatgaactcaagaaagaactcacctgataatttagttgacgtacacgagcgcgggtaataggaccatcatgctgtacttggggggacgtggatgtatcgatagtgttgatgtcctcgtcaaaatagttttaagttgtttaggtaattattaatttaataattataggctaataaagtagcattgtttttcgtacgcggagaagaaggttaggcaccctcaaccgcggggacttacgagcat

SEQ ID NO: 42962 - DNA, 286 bp, Oryza sativa
agcttcagattacatcagggattatatttattttttcttcacgaagacacaggagaaaagatgaggacggatggatcaatgcctccccttctttctctccttgcaaaagtatcctaggggtgctaagtagacttaaccataaccagcatgctcatggcacccctcaaagcacgacctgatcatcctaacaaaccttaaaaagaaaatggataatctgattcttacccgcattaaactatgtgtcaagcatgcgatatttagagactaagaatcacaaagggtacta

SEQ ID NO: 42963 - DNA, 444 bp, Oryza sativa
tccttctgctgatcggcatcttgtcttaaccgaatcttctatatattcttaccacactttgacgttaataacgtagcatacatattatgcacatgattatgacgcctaatactaattataatacttaacttagccacaataacttcgtctcgctcttttggtcttggatcaacatgcactatacaacatagtgtataaaaatgaatgttttgcacgtttatggacttattgtaattacgataccacaatacagtttactcaataactatttcaatgtcagaaacatcacttccattattcctattcccgagatatgtcctgccacacctctcttctttatttgtactatgtgacaacaactattactccattcttgctattatgaaggatactctctttctatgtggacaatgcgtacgttagtctgtactctacgctcatcaa

SEQ ID NO: 42964 - DNA, 367 bp, Oryza sativa
  unsure (1)..(367): unsure at all n locations
caaaaaggggaataaccatgggtcccagcgcggcgaacgttggggtggcccacctgtccgtctctggaggtaatggggattggggatggttangtttgtttggcggaggaggcaagctgtcacgtttgaaatgggaagtgagggaggttcatctctagccgttggatcggcgagatggaccgttaggtgtgaaccacgtaagcttttgggaattttgcgtgtgctgtggatgttgtatcgctttcgctatcgtttggttggacagtttaacctcacaacgtttatgtgaccatattgggaggatgaatacctaccggagtagtcatattttgcgagggttggtagaaattatacaccggaatcaatc

SEQ ID NO: 42965 - DNA, 444 bp, Oryza sativa
ttgaataagcagagaataactgagaatatacatatttatatgcttgataaaatggaaacacaggggcagatgcatgttgagcaatgaattcattcacaggacatgatgagggtattaagctcagaaaaggttctgaagatgcatgatacacacaatgtcacaggacatggtgagggttttaagctcataaaaggttctgaatatgcacgagacacacaatataaatattgaggttgctgactctgttgctaataacgaagacagagagaatgtagattttgggggagagtaatgagtttctacagaatgtagattttgggggagagtaatgagtttcttattcaaaagtgtctgaagatgattatgtaactagtgtattgatagtagataattttgtaaatatgtgaagtggttgtagtaatagcagaggaaaacactggagtc

SEQ ID NO: 42966 - DNA, 458 bp, Oryza sativa
agcttcctgtatagttggagagaattgcaattttttgattgcaaacatgggggcttcactgtatagtttatgtctgatgtgatgggtctatattttggcctggtttagttcccaactttttcatcaaacttccaacttttccatcacatcaaaacttttctacacacaaacttccaacttttctgtcacatcgttctaatttcaatcaaacttctaattttggtgtgaactaaacacagcctttatcaaagcatgtgatacatttagttaaacaacgaaaacctttttccttttgcaagaaaataaatctccatttgcattgatgcgcaaatttctgttttggtagttcctgatttgttcttgaacttatttgagttgacctgctgtagtgaacttatattgtgttgcaattctattcgagaaaagttagataactcgaagcctatacttattatttc

SEQ ID NO: 42967 - DNA, 463 bp, Oryza sativa
  unsure (1)..(463): unsure at all n locations
ggaccaacgggacatcgctatgcaagagtagtgctataaactaataggagatttgcagtatttatgataaatgtaagcatctacaaccatccttctaaacatgctagaaatgtggaccggaaggtggttgtggtcctcgcacagagacgcgacactaatcgaacaggactctagggattccttatgtgagcatgaatcctgggggattttgaaatagaaactttcatgctcatatgtggaatgttttctctcatcctccagagtcgatgtctcaagcttgtccgtggcctccttctcaagagatacatcgtgcaagaacctggttgtttcttgatgataaacaataacaacgctttgaggaccagagggacaaggcttangcttgatcgagggtgatgagggtcgttccgtttcatgaagatggtcaataggttcagaagaaacgaacgaagatacaaacatc

SEQ ID NO: 42968 - DNA, 348 bp, Oryza sativa
  unsure (1)..(348): unsure at all n locations
catctatcgcccccgaacacactctccctgccatgggacgtgtgcttaccacacaccttctnccagctctccctccaatagaccttcaagtaacacccgcgtcccctcctccagactcagctgcccctcctcctactactaccggcgcgccgcgcgcctcgcgctctgcggcatcgccgacgaagtcgcagagcctgtctaggtggatgaggcgcccgcccaggacagcgcggatgaggtgatggccaaggaggacgatctgttcggaccggagctgataaagtacatgaagcagcggcttaccggcggcttcgcggcgcaacggatcacccgcacggggcgacgcaa

SEQ ID NO: 42969 - DNA, 315 bp, Oryza sativa
  unsure (1)..(315): unsure at all n locations
gtgaaggatccacagctgacaacagctttgaggcggaggtgaagactcttggcaagattcgccacaagaacattgtcaagctctggtgtagctgcacgcacaatgacaccaagttgctggtgtacgagtacatgcccaatggtagcctangagatgtgctacacagcaccaaggctggtttgctggattggtcgacgcggtacaagattgctctggatgcagcggaggggttatcctatcttcaccatgactacgtccctgcgatcgtccatagggatgtcaagtcgaacaacatcctcttggatgctgaattcg

SEQ ID NO: 42970 - DNA, 443 bp, Oryza sativa
  unsure (1)..(443): unsure at all n locations
ngtcgttggcttgttgctaattaatcgatcgatctctcttgggatcaaactatgctagttgctgatcgatctcctcttctgcttgactagttccctttggagacaaaagggcaacttttgttcttaggtatgggtcattacccccaagcataaataagctttgctagctagtggcaacaacaaaaccatcaaggcaggataaatatagagctntgctagtgagagtgagatcgatggagagagattgtttgtgtgtgtatgtgtgagaataaaatatttgaagtggtaaaaaggtgaaagttgaaaggtgtgtctttaggtgtttgtgcaagcatagcaagggttagctagtgtagctagtgtgtgtgggtgtgcaatgcatcatgacacatatgatgaggagaaagatatggaaaggtggaaggagggggtggtaaaaagct

SEQ ID NO: 42971 - DNA, 285 bp, Oryza sativa
catattaaacgcacacacaggagtacggaagcacgcttcataacggcccgaacctgtgtaaaccactttcgtgtcaacgtattggaggagcctcccaaatcaagatcacacacagtctaccgcaccaaatactagaacctcacccgatgctctcgggcgaactctcaaaggggggcgctacagccttccgctagagagggacacccctcgacaactgcgtatctgatatatcgcacctatttacaactgaaccgtagtatagaggcgcattggcctatctagagc

SEQ ID NO: 42972 - DNA, 460 bp, Oryza sativa
  unsure (1)..(460): unsure at all n locations
agctntatgagctatacattcgatactgttatgacaatgtttctttgttacgagacattgaataacaggaacagcgattcaggtacacaaattagtgctccattagataaccaaatccagaattacaccatagcccaagctgcagttgaggaattcaaagagcttaatgaatatcttggagggggactctgtcctcaaaatgattcttttgatattctgaaatggtggagggataattcatcaacatacccaactcttgctaaaatggcacgtgatattctagcaatacctggatgtgcagtttccgctgaatctgcattcgattcttgcgatcagcgggtagaggtattcaaaggcaaatttcgcccagagacagctgaagcacttgtctgtgctcaaagntggatcaaatcatctggtacaaccttttactttcgattattaaaaacaataatgacac

SEQ ID NO: 42973 - DNA, 462 bp, Oryza sativa
  unsure (1)..(462): unsure at all n locations
gctcgttacatcagaaaaattacttgtagtctccagtatcttgttttactcaaanactgaaaactctggatgttttccttctaggtcccaaactaattctttctctccctgcaagttatcagatctccttgcttgtaatcccattatacctgaataatcaaaaatatcaatcttcaatgttcagttatatctaatgaacacaacactatactaggtaccttttatggtctgagaccacctaatgttaactagctagtgtcattctctctgattttaattaattagtaatgtagaatctcctagtatctgtacctcagtaaaaaactgaccatgacatcggtaagtaatttaaacaatatgaaatattgtataaattagtaacctaccttgtctgtgccccctccgccagccgcagtaaacaatgaagcatataaatgccaccacacgaattatgacaatggg

SEQ ID NO: 42974 - DNA, 463 bp, Oryza sativa
tctaatgcagaaagaacactagatagatataagcaatgtgtttgtatcattctcaccacttcgcctcatgcctcctcattgtgaagaagattagtcaaagaggtgcttaaccaaggtgatgttcagtgacttcatagctgactctgttgttataccaaaggagaactttgagttagtcacatgggaatcacggatacccccttatagaaggtttgtcaacattgtttcaaattatgataatgagatgaattttcatcatacagacttacctcacaagaagcgtaaaaaaatagataaataacatgatagctaatgaaatcaagcaatctatagctttttaaagggaagtcgaaaaaaaaatctaaaagtatagttgtatgtctatttgataattaacaacagtaccagttagggtatgccatcgcagtaatcatagagactactgtatcatatacaatgtgga

SEQ ID NO: 42975 - DNA, 380 bp, Oryza sativa
cgggctgacgtagcttcagagtatttaattaatgctcctaaagtattttaactatgaccctccttgcacacattaataaacctcttcactgtattacgaataagatactgcggctaaccaggctatgctagctaggttcgtactaagatgatactgaactaaaacacccatcacgatatgatagctgcgtatttatggcaatacgcctgccttgcaaataattcgttctatggcggtgatgagacatcggctcgtgcaaatgttaagatgttatactcacataacacctacttgagctaacgatcacatgagcatccgaacatggtgattacctgcgatactgtgcacatatcacgtgctgatggaggttctaccatgat

SEQ ID NO: 42976 - DNA, 386 bp, Oryza sativa
  unsure (1)..(386): unsure at all n locations
tgtgagtntactacaatatgcgttctgtgaacagatatttatgtttcttgagttggattattactggagtcatatgtactgtgtactgtgtaaatatgggggtgcatatgagctgatcaagaccgccaagtacatcttgacgtcagggaagggcatactctccgtacgacaagtctacgggcaccataagcaagcgcctggccagtatcaacgtggagaacgtggagcccaaccgtcatgcgctccgggagcttctcttcacgacgcccggcgacgttcagtacctctccagcgtcatcctattcgaggagacgctctaccatagcacggccgccggcacgccgttcgtctacgtgctgaaggccggtcgcgtgctgccggggatc

SEQ ID NO: 42977 - DNA, 435 bp, Oryza sativa
  unsure (1)..(435): unsure at all n locations
agcttgagggtcggcacatcataacggaagtggttaagattgtcgtcctanngccccggccgaagccgccaagaactatgtacgtcacagcggttgggttgtgcgggataacgtgcctgtcagtacggtgttctggcgaagaacaagggcacgccgagatcatgagagctttgtcccacattctgagaaagagatgctgtggaccacaatgctcgagacattcacccttcctgcgggtacagaggacaaagtgaaaaggtggactctgaagaaaatggcagaacagtttcagagcttatgggagatctgtaccagaagtatatactgaaggggcagacaccgaacttcgacacattcccaaagcttagggatcactgggacgagttcgttgcatatatgacaggtgaacaanggaaggcgatgatggaaagaaac

SEQ ID NO: 42978 - DNA, 470 bp, Oryza sativa
tattcaaagggctatccaacccatgaacaatccatccaagtatttacaacttttctcaaggagaaagggctcacactccaaaggatactccaccggacataaccacatgaggctacccaaatctataggatttgcccacatctctctttgtttaggacttgagaaaactcaccacacttggctagacaagcccaccaaatacacctacatgcatatgaactaatatggcacaagatcatccacaagcttgcttcatagacccctcttgatagtacgacgcctatctagcaaatccggtctacaccaaacactaagaccgggaaaagactaagaaaacattcttagctacattatacctttgccttgcaccatccatcttggggtcaagcttgagtcgagatcaacacttgtgaccatttgattcaaccatgtttataccaagatatttaccatcatttgccaagacattc

SEQ ID NO: 42979 - DNA, 428 bp, Oryza sativa
  unsure (1)..(428): unsure at all n locations
gacactatnacaaactcaagcttactgtaagcagcgcaactatacgagggtctatgattatcttgatacaatgggtcctcacggctgtcatgcagatgtcatcacttacaccacgaccatgacaaccctagcaaagcgcgaaagcgattgatgaagcctctgaaagtgtctaatagaatgaagtcatctggccgaagcctgaaacactattctacaactccttcgaacaccatattgggaaaccacgccatttgttcgaggcatgccaagtatttccagtggaaatgccaatgaatggtgcgccccataaactggccacctataacgacatgacttcaatcttttgctactacggtcgagatgatgatgctctcaatgagctgaaagaaatggaaacaccatcgtgtaagcctagacattacacatat

SEQ ID NO: 42980 - DNA, 380 bp, Oryza sativa
  unsure (1)..(380): unsure at all n locations
agcttaactaggggtgaaactaatcacggttaatcttgtctaccgcccataaccgcgggcacggctattcgaatagttntactctgatcagaggtgtacaactgtacccacaagacacagccccacgacacgttcccgtgcgccgacatgccaccacgacataccggaaagaggccgtgacaggacccttcgcataaccccctctaaccgatcgcaccacaccttagggttcgcccccgtccccagcaggcaacgggcagccccctttcgtgccgcggtgaatccggaagccgatcaaccggacaccccggccgacccaacttcatcacgcccaccctcgcctgtgtacgtcngctagagaaaagctacactacaagccc

SEQ ID NO: 42981 - DNA, 467 bp, Oryza sativa
  unsure (1)..(467): unsure at all n locations
tttcacacctccaaattntgtaattatgtgaaccatattgttcaatatcttgaaatttacatattttttaaaaaatattgtctcaccaacttgacaaaaaagtattcgtaactcaggttatttgagagaatttgtttgggaacttttggaaacttgtaagtatagtttgcggttgtggagtggtttttgcaatactaccgcacaggtggattcatctcaaggatatttgccctgtttttttttcatattaatccaacctttgtatcgcttcattcagcttcctgctttcctcgatggtggcatagtcatcatacgtgtcatccatagttacaagcagtgcaaatatcttctcaaagatcatccgtgaaagcactaaatctttctcgtagaacacgacatatgaccaaaggtaactatccaccgcacgatccctggcgtaacttagttgcacatatccatagatattt

SEQ ID NO: 42982 - DNA, 461 bp, Oryza sativa
  unsure (1)..(461): unsure at all n locations
agcttgatcgattccccctctgaaacaagatgttctggaccgggaggtataagatcaatcacttggcgtccatccgatgcatcgactatggatatttcatatccccccttttctttacgcagtatttttcttactacacctgttgacgttgcattatagaccgtattgttactcttgctaccatcaggatagatctgtccccttcctcggtttccccccacatatatgggatattttaagaaatgaacgtctttcttcatagcagggtcgggggaaagaatgggaaagacgatttcactatatttcttaccgggaacagggcctatcacaagaatatttnttttattgggacgataactctgaagagagagatttcctatcttttctttcaactcaggagaaatacggtcgggcggcgctaattcgaatccctcggggcaaataagaacagcacccacatt

SEQ ID NO: 42983 - DNA, 445 bp, Oryza sativa
  unsure (1)..(445): unsure at all n locations
ngatcaaccattaacaagtaatcctaatgtgggatgttttgttcanggggatgcanaaatagtgcttcangatccattacgcgttcaaggccttttgttcttcttcgcatccgttattttggcacaagtttttttggttctcaaaaagaaacagtttgaaaaggttcaattgtacgaaatgaatttctaggtcccgggatttcttaccatcaagttggtaaaaagccgcgatttattggcgattgctagaattctctatgatccattctggaaatcttttttttgtttagactattttttgtttgcgagatgtcttgtctgcaattccttatttctatcatctcatgcaaaacgaggagaatgcaaggcaagggcgagaacaataaaaggaacaaatccttttaggagggagtgctggtcttcttaatcctctattgngcacaag

SEQ ID NO: 42984 - DNA, 253 bp, Oryza sativa
tgggctcggcttaaaaagcctggggtctccccacttagtactcctctgcaatgtgctgcgcaattcgtgcttctggctggagatttaattggacagccatgataaaatagggtgcatgttgacagctcatgttagtaccaccaatgcgcatttttcatgcttggccacacatcaatcgagcaaaatgatccttataaaaaaaatgccctgataaaaatgtttgtttatgcaaattactgggcctcaatgagtc

SEQ ID NO: 42985 - DNA, 444 bp, Oryza sativa
  unsure (1)..(444): unsure at all n locations
tagatgtgacttaaacgataaagatgtgacgtccattgttttattaatntgntngccaatagcaggttcattgctcaaaatactgaacagtcaagatattcttgaggacactagcaatttgtgctgttcatgagtgacatcctatcaactaacatccatgaaaaattatcattctttcaagaatcaagaccaaccgtattttttttctcaaacataaattagccaagtaaacatttgataaattacctgttcatgctgtctggatattgataacacatttgatagtcttatgcaacgaattagcttggtcagaacaaacatcattataagaaaagtaaaggttcatgtcgttggtgtgacactgtgagcaacaatagctagcatacatgcatgttcaatacatgacacagtgaaactgtagggggaaatccacattaacaaaag

SEQ ID NO: 42986 - DNA, 450 bp, Oryza sativa
  unsure (1)..(450): unsure at all n locations
agcttcttggggtttattnnttttcattatctttgcctcctctctctctggaccatgtgccctagaaatctccggaaatttccatacgtttatccaattgttattttttagtgcatatgtaactttctgatctaatggctattatttattcaacggttgatatatttttgatgatgtggcgtgttctcatgtaagaaagcttgcagctttcactatataaaataacataagataagatatcaattagaatcacacttaattaacgtcggagatcatcccaaagtcatattattattgatcattggattattttttggtggcttatatttctattagtgatacatgtttcatcccgtgcatttctttctcctcatcatggntagcataaccatgcaacctcaattaatcaagcaaacaatanggcaccaataccatgcataaatctaaaca

SEQ ID NO: 42987 - DNA, 411 bp, Oryza sativa
tctgacgggggattgatctagactcggacctgcgatctgtacgagcgcatatacagagcgcatggcaggacctgtcgggtgatgtgtggatgtgtacgtctagcgttcatgccactagagattagttggctaattaagcaatatatgcaagccatgtatatgcattgatatatgcaaacatacatgcacaagcttctttatacctatatttttttatgtggtactaagcagatgttctgttcattgatttattttgttcattgatttattttgtatgtacccgtgtcggctacctttgctgttgccgactaacatcttcaccgaccggccacctcgtctgctaccgaatggtgccctcgcctgcacggctggcctattatgccgccgatgttgggtgtctacgacttcacc

SEQ ID NO: 42988 - DNA, 458 bp, Oryza sativa
  unsure (1)..(458): unsure at all n locations
tctcaagctcaagcatttacttttctagttagagatcagcgtcttggagctaatgtgggatctgcccaaggacccacaggtttaggtaaatatctaatgcgttccccaacgggagaggttatttttggaggggaaactatgcgtttttgggaccttcgtgctccatggttagaacctctaaggggccccaacggtttggacttgagtaggttgaaaaaagacatacaaccttggcaagaacgacgttcggcagaatatatgacccatgctcctttaggctctttaaattctgtgggtggcgtagctaccgagatcaatgcagttaattatgtttctcctagaagttggttagcgacttcccattttgttctaggattcttcttttatgtgggccatttgtggcatgcangaagagcccgggctgctgcagcangatttgaaagggaatcgatcgtgat

SEQ ID NO: 42989 - DNA, 443 bp, Oryza sativa
  unsure (1)..(443): unsure at all n locations
agcttgagtagaggagtgccattgtcaaaggttgctgtgccaacaatggcatcataggtccagcttgttggggctgcaataccatgtcaataaggtggaaggcctgcgcacaaaggcagcagctccatcgcagctctggcatgtgggtacggcatcacagcgacatcgcagtcatcgatgaatgtgctatcatactatcataggctgcatcatcatcacaaattcgtcttgcggaggaggcggtggcaaggtcacaagtccaccatcacgaatgaaccaccaatcgtgggcaccgaagccgcttgcaggggcatcagtgccaccatcgtcgccccaagcatagccaagggcgccatcacagcgacaatcgcgcctgcggccacatnccatctcatgagttacttcccccatggcgcctgcgccaccacggacacccncatcac

SEQ ID NO: 42990 - DNA, 433 bp, Oryza sativa
taccgagtgacttgtcaggtcgaggtggattgtttttgtttatacagaaaaaaaaactaaaattttcatcggatttgtaaaccctacttaagggtttgtaaaacaaatgttcagtcactgaatatcactccctagttgttttgtcgataactgcttttttagtagcaaaaaagagaacttgatgtgacatatcctttcacatatcaggtacggatacgtggcttttgagacgtatctaggtaacatacgtatccttatatcctaggcttttcaaaaattctatatcctcatatccacatatcacatatctgtatccgtatccccgtatatagtaggtaacataagtgacatgcacgtaagtccatggggagttttgggtattatctactatcacagtacatggagtaataaattggttggaggagaggggatg

SEQ ID NO: 42991 - DNA, 465 bp, Oryza sativa
gcaagcttatctaagatcaatggagtgaactgtcatatggccttttatattttacagactagctatctcaatttacaagaaacagcaactgggatggcagcatccactttacaagctctgtgtctgaatactctgtttacagactagctatctcaatttacaagaaacatcagctgggatggcagcagccactttacaagcttggtgtgcatctctgaatctgtatctcaagttccaatttgtgtttccaatttctcattataacatccaaaattcccacgcatattacatcactgacagtactaagcactaatcatctgatcaaatacacaacaatcagtccctagtgaacacgaccagaatttctcagaaacagaaaaatttccgcttcgatgaacatcaaatagccaagcaaatgcaatgtgcattctctaaaaaacgaacatcaacaatcaacatacgggt

SEQ ID NO: 42992 - DNA, 425 bp, Oryza sativa
  unsure (1)..(425): unsure at all n locations
gagcctctgttgcanagcactaccgtacatcccatgtttttcttgtatgcttccctcgtggctcagtatgcgtataaacacaagtacacagattggacatggaataaagcaagggtccatcgacattcttcatggcatatgaaagctacacgaactgccgcccggtagtcaagatgtcatgcgatagggttggcgccctgctgctaggaggctcagtcctgcctgcctgtccctcctgttccggccgtaggaggattgggtctagactcttgtttatggctaggacggggcgggaactatgtcacgttttccgttcgtataccgtggtggaatgtggcacgtggtatcacactatgaagacgagcttgtgggtaagattacacctgtgagagagtatatctattctaaagtctcccctcattatg

SEQ ID NO: 42993 - DNA, 478 bp, Oryza sativa
  unsure (1)..(478): unsure at all n locations
acctgaggcatgcaacttatggccttcctattttgctctctacatgctactctgctgcagccaacctcttcaatgctccatagcaacaatcctgaacactgccgactatctcagatgctngggcatcacgtcaagctccagaagcttttctcctcttttaacagcatcctaaaatgaaatgatgcgaccatgcctgttcagggagtccgagtgaatagttgcacatatgcatgaacctaagatgccttgcataacttttgattgcgttgagccagttcgattaatcgattgagggggatcggaatatgatttgtttttaatcaaaattaaatcccaacctaatcctcctcatacatccaacgggcaaccataaacacattaccatctcttcatcacattacgctatggtcccgatcgcaaccaagacatnccaccagccaatcccacttaggtaccagagaccatcatgaataatacg

SEQ ID NO: 42994 - DNA, 361 bp, Oryza sativa
ggacctacccaggcaaaccagtgaggggttttctttttatcgtgccaagctccaaacgcgaatatctcacttttatagacacaacagaccctgcccaaaaccaacaagctactagcatcgtgtctacttgtgaatgcctaatgcagcactacattttccgaagctctcttggtgtaaagtgtgcattacgcttcacagctgatgaccaaaaacccctcccgggcaccccagctagagaccctcgtgctgtccccgttcacactcccaacccgcacaccacgcagtatagacaaagagatcctctaattgaagacatcgaaatggtctcgccgcccagctcagggactcttacctgcgtatc

SEQ ID NO: 42995 - DNA, 446 bp, Oryza sativa
  unsure (1)..(446): unsure at all n locations
tatcatanagggcttcgacaaggggttttattcgctctttgagcaaaaagataaagatcggatagattcgaaccgcaattgcaaaggtaatcactactatgccagcccaaatcatgatcttcaccaacttggatttggttctctcgcgaaaatcgcgagttgcagagatgagaaccatgaaaagcaagatcccgaataagaaaacagaaaccgaggaaaccacaagagtgaagactagtagagtctcgncttttgtcattctttgctcctttctcactcaatgattcattcgaatttcccgaccaaaaattctatatgtctattcatagggcctcgttgctaagtgctacaagatctagtgcactggaactcgcggttatggacccgaatcctttagtatggaacattgtctgttccaagtaaaaaccctcagtatatgaaagaat

SEQ ID NO: 42996 - DNA, 434 bp, Oryza sativa
  unsure (1)..(434): unsure at all n locations
gcttgtggaatcaaagccacctacattttactagcagttatcaagngtacacacatctataaattgtagtagtaaccaccttagctgaggtgatggccatggcgatgaaaagggtggtgcttgtggcggccgtgctgtgcgcggtggtcgccatggtcacagcgcaggaagcatccaacgtgcgccccacgtatcactactatcgccccgcgcagaacaactgggacttaggagccccagccgtgagcgcgtattgtgctacgtgggacgctaacaagccactgtcgtggcgtcagaagtatggctggactgncttttgcgggcccgttggtcctatgggtcaggctgcatgtggcaagtgccttctggtaataattgcctcatctgatttttaatcaagaatattatctatagagatatggtttgttatcaag

SEQ ID NO: 42997 - DNA, 466 bp, Oryza sativa
tgaggaccctgtctttcccaccagatgcaaccttctcaccgtctgggctccaatccacagcatacaccttacagatgttacatacaaatgtgaatatcatgctgattgttctagacttacccgcgcagttagtctggaacaaaatggacttactagacaacaaaaggaaaatacatgcgtacctcatctgcgtggcctggcaagtcctgtttcaacttgtgtgttcgaatatcccaaacctgaattatacaaacagagagcgtcagcgctcagcagttagatattcacggggagatagagcctcataaaaaaagataagtgtatcggtcagtttgtgctatcaaggtccatgctatacaagtaatttgagtttataatccagtatgcataaaattagaaacaattatgacatctcagtagcagtttcagcaaattttcatgttggattcaccagtgtttgggatga

SEQ ID NO: 42998 - DNA, 377 bp, Oryza sativa
gcaccgctacatgcccagaacaaattctctatcggatatccattcacaacacatcggctgatgttccctaaccattggggctctctacaaccatccattggagggactccttctggacaccgggggtggggctatctccttcttggtctctggcatgacaccaaggacttccgtgttcttcttctgttttgctgtcctcaagacagctgatgatcactgtggactttggttaccgtataacatcttccagtccttgttccaaaacaatactgcctatcatgatgtccaccatcagcttccacgctcatagtacaattactctcacgcttttttctcaatctgcgacagaatactggcgacccacatgccctacaact

SEQ ID NO: 42999 - DNA, 484 bp, Oryza sativa
  unsure (1)..(484): unsure at all n locations
cggacctataaaactcagcttgagtaccagatattttttgaaagagcagaatcaaattatttgaccaagttgtcagtcaaagtaaaaactgtcctgaaactaactatacaaagaaggggtataatagaagaatattacatggatttgcttagctagctagttgaggcagtattccatttccacctagttggtgctcaattagtggacctagcatgtttgtatataaactngcaatgctagtcatagatgcttatttaactgttaataaagggttcagctttaatttcttcgcacacactctatatgcatacctaacttaacagttcacaagttgttacataaaagaacagatggcatctccccttctagatatcaaataaaaatgataaggtcacttgccacagaatcacagaagctgccagttgacataataattctccaattgtggatggaacctaacaaacatattaaatgtgtgatactc

SEQ ID NO: 43000 - DNA, 465 bp, Oryza sativa
  unsure (1)..(465): unsure at all n locations
tctggattntctntgaagttntctggcaggttgaattcattcatgcactatcctgtttccacaacaagtgaaaacaaccaaggttagcctgcaaaggaaatgattacacaaaggtaaatataaagtattagttcaagcaatctctattatgaatcttccccggcaacggcgccagaaatgcttgttggtacttcttaacgatgttactagaaatataattcccagcaatggtgcagaaatacttctggtatattatggttacagagttcatccgcaagtgcacggatataccattgtagcatttcacctgaaagtattccaacagtatcgtatttattttatcccatgggaagatcatgtacagagaattcaactaataatttaaatattacttgtaataatcatattcttagcaggggttaagataatccaagggtagagtgacacacaagcattaactactca

SEQ ID NO: 43001 - DNA, 384 bp, Oryza sativa
  unsure (1)..(384): unsure at all n locations
agcttnctatgtggntataaaaatatgggcttatgataaaactgtaagggagagtcttggtgtgcacaaggtatttctactatggtactatgtatgcttccattgacttttcaaagtatatgcactttgctactggtggatggaaatccaaagtttgcaaagtgaatatataaattcactttgcagttggtcttccgcatgaaattaggccgattatcatattacaaattcagcattgtccttacagaaggctaatcattctttgaatccttttatatcaaaataattctttgaaccgaaactcagcctatccgctgtgaaggccaaaggaaaggattaatttgcattgcatgatagttatgcatatatacgagtttaattcat

SEQ ID NO: 43002 - DNA, 461 bp, Oryza sativa
  unsure (1)..(461): unsure at all n locations
ctattacataggaatntanactgcgatcgttctgatctgttttataacacttaaagagcaagcaaaaatccttattaagacagccatatcataggcacatgatatcgaccgtcgactgaccccaaacaagcaacctaaacacacaaactaacaagcagaagctagacagtcgataaactaataggaaacgagcctaatgctcggaacggctcctgcagtcggtggagtcgaaggcgtcctcctgctcgtcacccggtccctctgagcgacttccggagcctggcaggtaagtctcgccgctgcctgactctgagccactggagctgctgctgctgagagcgcggctgccactgggagtagcagacaaccaacctccggtgccactggctggacctctggcggctgatgctggagcgaaagagagagcggacgccggagctggagctggagctgcaggaact

SEQ ID NO: 43003 - DNA, 442 bp, Oryza sativa
  unsure (1)..(442): unsure at all n locations
agcttcttcggtatatatgttctataaatctattgatgtaattaaatatgctccgatcatcacctttggtctttggaacgtctgtacgtgtctatccaaattgtgataacagaattatagcaaagttatgttgcttctgtatgttcaaaaatcaacagatttttttttgaacgcttaaaagttcttgctgacaaggcctctagtttaacttcgtttgtgctaggcttattccgggtcaagtcgggtcaacagaaaaacaaatcagtttatagttcagtccaaaaatattttgtctatagtccaagtattggcaattaaatcgtacagaaattgtaactgtacaatacttatttacagctcgttaaagccaatgtctacaacagacaacactctaaagagaaaggcactcctacagaaagctttttctcanacgatcatatat

SEQ ID NO: 43004 - DNA, 459 bp, Oryza sativa
tctttccctagattctactaagagaacccaagggaatcatattgttcccgtagaatgcttccctatgggccattccctagggttcactgtagggaaacccgatccctagagtttttggctgttccctagggtttttagctctagggattactggaagtgacacagaagattattagacgaaaatggctagaagtactagtaggtttattgtgatattacagaaaactatcgtgacttaacgtcagtggcgtatgtatgggtggtctaacttatataattttttaaataccctaaatataactaagttaaaagtataaattgatcaaatatacatagtaatataataataaaagagttttttttaagatttatgttctcatatgcatatatataaatatatatgtattgggataggatattttgggtggtactgggaccacccctagaagcgcctatgct

SEQ ID NO: 43005 - DNA, 429 bp, Oryza sativa
agcttcagcatgggagtcctttcgtcgcatgtcttatttctaccggacatgtattgcatgagccaacaccacaccaagttaatttcgctcgctccacgatcaaaatttacttggtggggggcatctgtttgatggtattttggcgattatatgtgtacacaagacttactcatgatggacaaagcaaacaagcagttcgtaagttggctagcttatcatttctatgcaatgctcggccatgtatatacacgcaaatacatgcatgcacaggcagcttggaatatatatacttggattagtatatgtgcatgtataattaaccaataactatccgtgtgaagattggctagtgaggcaatcacgtgcatgcatgcatgtactatagtagacccgccgatgtgtgtgcatgcctcgtgattaagcacctat

SEQ ID NO: 43006 - DNA, 147 bp, Oryza sativa
  unsure (1)..(147): unsure at all n locations
ggaccttgaaactcagcttggtatcatcttgatcgcaggagggaagttttttattatcacncactaccgccaggaggtgactcggtctcacactcctcgctaggatgaagacgagccgcctgtatcctcacctattgtcttaaatcc

SEQ ID NO: 43007 - DNA, 365 bp, Oryza sativa
  unsure (1)..(365): unsure at all n locations
acaccaaacacacacttatctgttgttaattntatgcgggcggagcggaggctctcaaaagtttccgctaaatctgaaagcaacgttttctggttgcgcgtttttacaaccaagtcatcgacataagcctcaacattacgtcctaattggctacccaaagaaattcgagtagtacgttgaaaagtaggacctgcattctttaacccaaagggcattgtcgtataacaataagttcctatgggagtaatgaacgcagttttttcctcatcctccctagccatgcgaatctgatggtnaccagagtatgcatctagaaaacacaaaaggtcgcaccccgctgtggagtcgacaatctgatctatgcg

SEQ ID NO: 43008 - DNA, 459 bp, Oryza sativa
ttcctatatttcgacaatttgaatgaccagtctatcatttatttctcaagtcatttttttatgtcatttcagacaaatctggtagaatggcttaaaatgatgatcagcagcaagagggcggaggaagtactggatccaaaccttgagattaagcccccaaaacgtgcccttaagcgggcaatcttggttggcctgaagtgtgttgatccagatgctgacaaaaggccaaaaatgagtcatgttgtccaaatgcttgaagcagttcagaatgcatatcgacaagtacgtttagtacattttttgtcagccgttttcaaacttttgttttacacaactgagcatctttcttggagattttgtttctaacaagtaaatgctatctctcttttactattggcaggatcagaaaaggtccagcagtcatatgggaagcgtcgatgtctagtcacagcaatctgc

SEQ ID NO: 43009 - DNA, 356 bp, Oryza sativa
  unsure (1)..(356): unsure at all n locations
agcttgacgatgactagaccaatgttcagttttcttccttagntcctgtgtcgaagcatgtctcagcatgttaaatgctcactcattcatttatgaccagttctctgatatgatgctgatatggaccgagagcattgaagtggcattgatggagagcagatggatgaacactgatcaccatagtgtggaggggagagggccacagacgcatcaaggagatacaatcatacagattatggtgattgaatctcatgaagacgaacactaagacgaagattaagatttagtgtttcacgtcaaataatgtggtgataacgtgtgagtaaatagagttgaattattagcaacttgaaaat

SEQ ID NO: 43010 - DNA, 453 bp, Oryza sativa
tggtagagcgtcctggcgtgcttggcattatcgtaactgctgctgatgaaaggtgagactctgaaaggagtcaaatgtagtcacgctgcacgtacgtgtaccagtaatccgatgagatgaacaacgaggcagggttattgaatttctcggtcggatgttatctggcactgcacgtcggctgccactctcggtgcactgttattatagtgtgcaaaatatatctcaattgggccaaaaatacgacttctgtaatgggcgctatctctaacggacataaatagaagcccgacactaacaagagtcatcggtgactggcagtaaggccatctcaatcgggcctttgttgggcctagtaattatgcccgattgagacataggtagtaatctcaatcgggcctaactgtgagcccgtcactgatgagtgtcatcggtgacggactatagttatatgca

SEQ ID NO: 43011 - DNA, 454 bp, Oryza sativa
  unsure (1)..(454): unsure at all n locations
agcttactagtgtatctgctnttgttgttttatatcacaccacggataccacagggagctactagagcaaatgattgcatccggttggaagccccctccaacggccagtgaaccatctcgaaaactcagattatgtagcaggaaagctcctccatcaaagaagtcttccatgaagcggaaaagagtgaagaaatcgagctcgcggaggcgtctccccaaaccaatcactaggatgactgatactactacctggcaaaagttgggcgcatgatgatccagggctctttcctctttgttgacacaattcactctgctggagggcgagctcattctattacgacacatacttgtagttctttttccctccgacgagatttgttcatagtttattcttgattgttggtgaaataacagcgaaagcaatataatcaaatatcttcgatgagcagccatt

SEQ ID NO: 43012 - DNA, 446 bp, Oryza sativa
  unsure (1)..(446): unsure at all n locations
taacagaatttcttgacatattctatgaatcatatcaacttaaatgtgcaaatataaagcgntccgacagtatcgatttctgatgattcgatcaatgatcatgattacacaacataagctaggatattttctcatataggtggaacattccggtgattaagaagcatttcataacctaagccaaacaatattatgagagcatcattcagaggttgatgatccccacttggtcacgatcgaagcattctatgcatacaagcacgcaccaccaatggaattgaattcctcgatcccctgtcacccaacccaacccaacccaacccaaaccccaaaaggccattcccccggttcgccgcatgagcagactactgagaacgaacgaacgagaccacgctacacaccagtaatcacaaccgggtgcactgaccacgccgcaaccacgcgat

SEQ ID NO: 43013 - DNA, 470 bp, Oryza sativa
  unsure (1)..(470): unsure at all n locations
ntattgctatctctagaggtaacccacattgatgtaatgttagtgaaggacccacaacaatgacagaacgccccgagtaatcgacccgtttcccaagcagagtttcgcgaaacctcccctctttaccttcaattacatctgaaagtgatttgtatactttattgtgaccatccctcgttggttgcccgcgggacccactatcaagaagtgtatccacggcttcttgtaccaatttttcctggcacattactaaatctgctggcgctaattcacttctttntaatagataggcaagattgttgttccgacggataactctcttataaagttcattaatatccgaagtcactactttatccccagacctataaacaatgggtcttaattcgggaggaagaactggtaataagcacanaaccatccattctggttctacanttggttgaataaaatgtttcgccaattgcatg

SEQ ID NO: 43014 - DNA, 415 bp, Oryza sativa
agcttcctgatcaacacggccatgatcgtttattttcctttcgccgttcttctccctgatctccttctgtctttactactcactttcactaagaaaaaagctaataaactttactgaactttactatgttcttctcaaaattctgatatgttcatcactgaattggagcaagactatatagtggcaggcggcggttgcttgctcgtgacgatggccacttgaatctgcgttagtatttggaattaatttaagggatttttttttgcggggaattaatttaagggattgacgccgtctgttggaaatttatactgaaaatgaagaactatgaaccaagtctaagctcctgaattttcacacatcagatgccatattgcaatgtctaatgattcgctgctggtacgtactggggaaa

SEQ ID NO: 43015 - DNA, 469 bp, Oryza sativa
  unsure (1)..(469): unsure at all n locations
tcccttctcacggaggtattcacttcttccttgtgatgtctttcttggtggttnacagtctgcatgtggtaagttgcatttcatgggaatgagataataagcatngttataagcttacaagcatttgggttcaagctccgactccctaagtcacattaaactagaggtctggtcaatgagctctcatctaggtcaaagatagtacttatatcctctgctagacctcaaataggtttgaatcatcattatcaaaactgtaattgtgttgattcagctagatagactagtatcaactgctacttgattaggctcataatttgaagatgtatattcctgcaattcagggtttacgtgctaacagtaagttgtcttgaaactaacagaaatcttatatttaaactaacagaactccttccgcatgaaagttgaagtagaaaaatgttttattcagtccttgtcccaagcaaga

SEQ ID NO: 43016 - DNA, 456 bp, Oryza sativa
ggctgcaagctaatctcgttatcatctgtgtcccaacagattcagttagttcagacgatattcagagcattgattcgcttatacttgatctaccaacaatacgagttgctacagatgattttgctgatactaaaatgatcggccaaggaggatttggtatggttcacaaggtagaaaatcataccacatgtacctttatcagctatatttttggtggttatatagtaagtatctttacttggatagggagtcctacctgatggccaagaaatagccgtgaagaggctttgccagagttccagacaaggaatatgagagctgaaaagtgagctgattctggttgctaagctttaccacaagaatctagtaaagcttattggtgtttgcttggagcagcaagagaaaatacttgtctatgaatatatgctaaatggaagccttgatatctgtcttttc

SEQ ID NO: 43017 - DNA, 455 bp, Oryza sativa
tcgaccacaccctccggatatcccagccagtgcattcactgcttctcaagggcaagctgccgggcagaagctgatgatgcctgtgattggctacccaggattttcgatgtggcagttcatgccgccttctgatgttgataccacagatgacaccaagtcatgcccttctgttgcataagttaaagcagagatcaatttgcctcgccttgtaggatagaggtgaaactgccttccattcaagcccagtttggtcgtcagtgtttaaactacctagctaatcccaggattaaaccgaagctctcctgtatcgaagtatcaaccggtgacatgtgaactgaccaaagatgacaccgctgtatattacatattagtaaataaattccatctcgccaactaaatgagaattagatgccatataattatattccaccgtgttttgaccattgagaagcata

SEQ ID NO: 43018 - DNA, 441 bp, Oryza sativa
  unsure (1)..(441): unsure at all n locations
agcttaggagaaacttccctcgaggggaggttctctcgtnttcnttataaccatctaaacggcgatgaaaaattctggaaaaatttaacaatattcatacaacacatatatacaactctacaaaatcttaagtccaaactcaactcacacgtcgagatataaaaaagacaaattcagcatatgaatagtagcgtactgtttatatctaaatttgtcttttttgtttctcgatgtgtagatcgaatttgaatttgaattttggtggactagtaggtattattatactttacattgttaatatttttggagattttttcataactattcgcatcaaatttgaaagataaatgtatacgagggggatagtccctcgagagattataatccactccccgagcttagaccaaaccatatgcagcacacacatatgcatatgcatgc

SEQ ID NO: 43019 - DNA, 464 bp, Oryza sativa
  unsure (1)..(464): unsure at all n locations
tcatctggagtccagcaatgcatgtgatactgaacctatttagtttcagaggattctagttacaattagattagctatgcaaattaaattttggaacaccttctagttaaaagcactgctattgtaggggattgccatgtgaaatgatccttttattgtgtgtgaccttataacttctaatagtactgtaaaatgtattatggagagttttaaactaaaattacttcatgggtgtggatcattgggtatcattgtcgaggtaaacttggatgtcaatttgttcttttgcttgaaaaaactcagttttggccaattcatacattaagacatcattttcgtagatgcgtctaaggcaagaattggcaggcagcgatgtaaaataatagctgattntttttttgtcagatgaaatactggaccagagtatctgctaattacacgtccctttcaattgagatattctt

SEQ ID NO: 43020 - DNA, 378 bp, Oryza sativa
accttgagctatgcagtttctccttgtcaatagctcctataattggaaaatcattattattttgtttgcaacttgcatttttagaatcactcacttaacttgcttggtctcggattgcgtgccaaaccgacggacctacccagtattcgcactaattcctgtatgctgtactaccctgattccttgtctctccacccttgtggtacttctgtattcatgctttctgagcgcgcataccaaatataccacatacaccattgattgtcgaaaacttgggaaatgggtttgtgaagccttcaaaaccctacatgtggtgtctgtgtgtttggaaataaaatgaattgcgaaaacttctcaagcgggggttgtgcctatgtg

SEQ ID NO: 43021 - DNA, 459 bp, Oryza sativa
tccctgatcttatagctacctgatgaaggaggccttcttgttgacactgctgccatgaatcctccctttgggacaagcagacaaggagctgacatggaattcatttctatgggcatgaaagcgagggcactgtgcaagagttgtcatcatacacatgactgagactattgcatgatgtgtaaaatttataatatctattgctatttgcacgttgccactcgagctgtctattcgctacacattacttctaccagataagcaagtgttcctcaatgggattactaatgtcagacacaatctctcttttatactattagattctgatgataaatgattgattattctcttctctatttgcaacagtgtattttcgacactaaataaccatatatatcaatggttcatcttcgaatatcacggaaggttattaattgattgtataacacctttttgagtctg

SEQ ID NO: 43022 - DNA, 451 bp, Oryza sativa
  unsure (1)..(451): unsure at all n locations
agcttagctgttgatcatgagccttgttgctactaatatgaaggttcatcagtgatgaaatgaatagtgaggcttcgttctggcatccctagggggcgatctcgtctgtgtctctttgttggtctagcggcggtcggtcacgcttaacggcggtcgatccggagctagccttcatctgggattatgtgttggcgatgtcggcgtgtgggtggttagatatttnttcctttttcctggttacgaccctccagggttgtaatcttgtaatttttttcctgctctatcaatagaacttcgcaccgtctcgtgcgagtcgttcaaaaagaatagtgaggtttcgtgaacaacagttgttgggaagaggaagaactagagagcaatgctttacatatttcaaaaagtgtgtccaaaaacatgctcccaaattggatatttnttccttgtgagctct

SEQ ID NO: 43023 - DNA, 456 bp, Oryza sativa
tcatcctgatcagactccaaagactcaaaagaagatctgttatatatctcatccttggcagcgacgaaatggaaattatgcagccagtgccaaggccaaaaatgcccaaatagttggccttttcagcatgagcagcaggaggtgggctaaagcaatgcaaccaagtcgatgacttaacatgcacctaatcagcagtatgagcacagaagagtagcgtttaaaatgagctgggtttaatcagcatgagaggcaggagggaagttagaatgttaatggttcaaatattaattctgacagtttatgtgttcttgaagatgtcgcttcactttaccaaagggccaagtagttagtgcatgaaaagtatataagaaataagatgtaggtgataaggacagactaaccttggaattctcaagctatagtgtctaccgtactttgcatgcaggcatacagaac

SEQ ID NO: 43024 - DNA, 457 bp, Oryza sativa
  unsure (1)..(457): unsure at all n locations
aagcacctgcagctgcagcttggcaaagcggcttctgtgccgtgtcangggatacctgagagagcagggcctcgccgtcgccattaagaggtttgctaaggattcctccaagcaagggaagaaagagtataggtcggagatcaaggtgataagccggttgcgccaccgcaatctggtgcagctcattggctggtgccatggccgcgacgagctcctactcatctatgaactcggtcccaaccgcagtctcgacattcacctccatggcaatggcaccttcctaacatggccgatgaggttagtacctcgtctctttaacttcatctaaacttcctttgtgatgttaaattaaatggcgtgttaaactcagctaaccttggcttaacttgtcacagggttaagattgttcttgggcttggatcaccactattctattctcatgaggagtgngaacagt

SEQ ID NO: 43025 - DNA, 426 bp, Oryza sativa
  unsure (1)..(426): unsure at all n locations
ntactatttgacaccttntaagatgcatagtaccaactcttaatatgttaagcaaccgcggtatataaggatcttaaggtattgggcacttgatcacgcgcactttggcctaagcaaacagtgcctaagtccctaaaagaacgtgacaggccacacctgagaatatgggctgcagacatattaagcctaagccaaaacatatgccttcgacaccctttaaaggatgacgcatataacatgcttccgagtaataaatctttcgggtaatatagaccaagcgtagctcatatgaatagcttctgatctgagtgtgtatcccttatgggatactccagaatagatgtaacaattgaattccgactggcgcaagtattcagttgataacccttacggggaataatagatagtccagtctttgagcatata

SEQ ID NO: 43026 - DNA, 407 bp, Oryza sativa
taattgatcagaactgtagaaatgtttcatctaacttatctataatttacaataagtaggttaaatccaagtgatgcgaggaacgccgatgttttcgaatagcttgatacagatactgagtgtgggccaccatgaaggactataatagttggtttgtgcgaactgtccttgcaggacacaaagatagcttcaaatggaagcttactgtctgcaggatataaaaaacatttgcttggtgaatgatgataagccacatatgatagtctaaaatatttgtgtccatgactataccatcagagaggtcatcagaggggttagtgactggaatttttaatatgctgaattggtgatgtgacaacaaaagccttacctgcagcagatggtaatgtgagaatgaaaaaaaaaag

SEQ ID NO: 43027 - DNA, 383 bp, Oryza sativa
  unsure (1)..(383): unsure at all n locations
nagcgtaggatctagtgtgactaaataatgcttgttgttgtctaatgcccttgtgtcacaacttcacacaaatgtttcatatccatccacaggtcgttccgcttcttaagatgatcgagcatgctttttcttcccctttatttgttaccgtgttcaaatctgcacatttacgaatagttcacacgtattcaactgctacgagaaacaattgaatatatcttgcacgaattattctgctaactatgatacaagcatatgtattttgcagcaattaccgcttgctacatgtagactatggataacacttgctcctttactactactacctgagattgatacttgccgtctgaatgctctgggagcctttgtgcttttcaaatcca

SEQ ID NO: 43028 - DNA, 443 bp, Oryza sativa
tgatggcgtagtagatgtgctcacagacgatcaattgcatatatcatcatgtttgtgtgcttgatcgggtgatcaggccgaagttgcacacagcggaatgacgaaatcgaagccggatgccgatgtcggagacgcatagatgtcgacgaggcggtgggcgacgcagttttcacgttacgcagtatttctctcctcctattctattcaacaaacagattagcttggttctcggctcaacccctcacggcccgtttggttggagggagtttttaggagggattgggagtttagagggatgaggctattaagtgttttgtttggttgggaaacataggaattctggtgggatggggatggggaattgaggaaggaactccctccttttcaatacctgtgtaggggcaggtaattgggagggaattcctcctttactttttctaagc

SEQ ID NO: 43029 - DNA, 415 bp, Oryza sativa
  unsure (1)..(415): unsure at all n locations
ggatccttgagtcacctgcngcatgcaagcttggctgagctataccaggcangctctcttcttgtcgcctatttctgggacaagaccttctcttggagcgatgcctcctcacttctgccattctgcagcaacttcacgcgcctggccagccagagcaccatgtctggttntgtatccgctgtggatgctgcactgcaagaggttggtcgccgtgtagaggtacgcctctcatgcacctgctttggtagtagcattggcaagaggcaagagattgagaattctggcatccgcgaaggggcttatggtgctgttgtaaatggtgcgtacatgaggggcgcatatcatggtagaccatntcttgactacatcttagctctgggaatgaatacactggctggtgccgaccgtctcgaac

SEQ ID NO: 43030 - DNA, 460 bp, Oryza sativa
tgactgatgcccagttagccgacttggcttttcatggtatgatccctccaattagggagaaattctcatctgaggattttgaaaacttgtcccatcttagacagaaggtgaccttgcatgaacaaaggtttgtggaggctatgaagaattccaggaaggttaatcatgtatgtccttatatatatggatcggatgatgaagatgatgattctgagatagatgcagccgaatgggtaagaagtaaaatagttacaccatgccaatgggtaaagagttctgaaaagaggaaaggtatgactttgatatcactaacgccgacaagatttttgacttgctactccgagagaagcagattcaacttcctgctggtcacacaattccctgctgaataattgggcaagaaaaggtattgcaagtggcacaattctgggtctcataccactaatgattgcaagatctt

SEQ ID NO: 43031 - DNA, 430 bp, Oryza sativa
  unsure (1)..(430): unsure at all n locations
aaaaagcttcttaattggtggtaccaaaaaaagagcagcggatttagtagcatcagctgcaataagggctcgttgtcattatgttaataaaaagtggttcagtggtatgttaacgaattggtcgattactaaaactagactttctcaatttagagacttaagagcagaagaaaagatggaaaaattccaccatctcccaaaaagagatgtggcaatcttgaagagaaaattatctaccttgcaaagatatctcggcgggatcaaatatatgacgaggttgcctgacattgtgatcgtcctcgatcagcaaanagagtatatagctcttcgggaatgtgccactttggggattcctactatttctttagccgatacaaattgtgacccagatctcgcgaatatatcgattccagccaacgatgacactatg

SEQ ID NO: 43032 - DNA, 469 bp, Oryza sativa
  unsure (1)..(469): unsure at all n locations
tcgggctaattggcgaagaaaaaactagtcggataaataacagaattaaaacaaatacaggttaaactaagtatattaggcataacaagcgtttcgttcttgtagagtagataattggattttgattgagttatttttctaagggaaaaaggaaaaggaggattcaaaatcctttnttcttcggactttcccaaacacaaaatacctccttgtattcgcactctcaaatgagagtggaagaaattcgactttcatataatatcttaatagaattccatgtaatgatcaatgcattttttggattctatattattcgcatgtctagaatcctaccaagagaataccccccatttttatgtaattgaagtaggattgacgaataagaaataaacataatactgtttattagtgtcgcataaaacccgaaatggggcgtggccaagtggtaaggcagcgggttttggtcccg

SEQ ID NO: 43033 - DNA, 452 bp, Oryza sativa
agcttgatgggtgtcggtacatagtgctgtattgttatatttacatctaatacttgtatgtaagggagaatatatatgactagggcgggttggatgcttgtgcaacgtggtgcgtggcgacttgttatgtcggggagtggtatctggtaagcttgaattgttcattgatgctggatgctctacctccttaatccttccaaaggtttcattgcgttttacttttttttaatcaattgtcaactttcacgccaaaggattctaaatatcgaactaaaagtcatgcttttatgccccatttgaaacagagaaattttgtagattcaaatcctataggatattttcttcctatttgaccctctgaaacagaggattaaagctctcaaaatcatatgagattcctaataatggctcaatgcgtatattctaaagaccagttatcaagagttccaacc

SEQ ID NO: 43034 - DNA, 457 bp, Oryza sativa
tgtgcgtagatctgcatcgtggtagtatttgttccaaatgagctacccaagattgtttcaaaatctctccaatttaattttgaatgaaatttgctttcaccatatcttggctcgttagctcattaacaaaaatagtctcaaatgatagtaaaatataacaaactataaaaagttgatttcgaggaaaggtcaatggtcaaatcagttttccccactcaccagacagatcacacttttatatatcctttttgtgaaacagaggattccaaacattagaagtctgtaccttggcgagctcctacaaaaatacaaaaaatatatatacaaatgtaatagaatataaatgaacccacataaataaaaaaagaaaaagagagtcacaacattctttttgctaaaattctactttaaatttaggctatcgtgtggttcagtttaatgcgtcaatttcaggcat

SEQ ID NO: 43035 - DNA, 439 bp, Oryza sativa
  unsure (1)..(439): unsure at all n locations
ctgcagcttggtttgctttcctgcactagatgttgattttgcttctgccttgngagagcaaaggggaggccatacgggtcttctacatagtatatgttccattttgaagaaaagaacttgtttgatgatataagaagtataactttgctgctgcagtcaattgatgatcgtttgtttgatcaaattgtggctgattgaatggaaggagcatgtgcattagtgcatagcaggatccacatccattctatggcttatcgtagcaatgttaacttacatatgaactagcatctaatattgcaacatactagtacaagctatacttcttgtcacacacctgaagagcaatactgcaaattattgttcatatatccttctcggatacggtgaaatctcagtcagctaactatataattcgcccgtgtggaaactggcgaattct

SEQ ID NO: 43036 - DNA, 467 bp, Oryza sativa
  unsure (1)..(467): unsure at all n locations
tggtggtgtggtanggtggttgcaagcaagcaagcaaagcatactactactcctatattactatttactcatatacactccatgcatgtgtatgcacttaattatgcaggcattcaacgcattattagtggcttcatgactactccaggtttgcaggatttggtgaggaaaatgggtggccatcactgcagcggngtgccactgctgctgccacggctactattgatgatatatactccattagttccattttaagtgttgttataattaagtttttttttctaattttaatcgttcggcttatttaatttcttttttaaaaaaataaaaacataagtcacgtataaagtaaaatttatgttctatcatgtaataacaataaaaatatcaatctaaaaaatttcaaataaaacggacgatcaaagttgaacatggaaactcatgactacgcttaaaatgagacggat

SEQ ID NO: 43037 - DNA, 467 bp, Oryza sativa
  unsure (1)..(467): unsure at all n locations
agcttcatgataactcagtcccttagatgttctttgaatcaagcgatcattcccgcaagaatcattacaggtctgtaaggactcatcactgttgccatgcagtaattcacaagcttcgaataaataaagatcatccattaaaaccaatgaccaaagatggaaatacaaagcatactattactcagtcccttagatgttctttgatcaagcgatcgtatccgcaagaatcattacaggtctgttagggctaatcaccgtcaaatgaacatggtaagatggcatgaaagtaaaaaagccatgaagtaccatgtcccatgggaaatctccaggggcgcaagaaaagggaagcctatgtatgataatatttccaggggcgcaagaaaagggaagcctatgtatgataatacaacatgatagtactccctccgtttcacaatgtaagactttctagcattatncatatacat

SEQ ID NO: 43038 - DNA, 467 bp, Oryza sativa
  unsure (1)..(467): unsure at all n locations
ggggagaggcanaagagaagacaaagatggtgagaagaccatacgacaacaagcccaacaacaacaagtcgaagggttcatcccaagggaggaagctggataatctcaggaaggcttttcaacaagtttgcgccgccttcgagccactaagtgatgtagatggtgaaagtagagatgatgataagggaaagaacatatctgatgtttgcttcatggcgcatggtgaatctgacacagagtatgaagataatgaggtgagtgcttttgaggaagctattaatattttgagtgcaaaaaataagaagtgtgagaagatgtatagaaaacaggaatttatcattgaatctcttaaatctaaaattgataggttaaaatctcttattcctaatgatgatgaatgctcaaattgtgaggttttaatgaatgagattccaaaaattagagatgttaatgctgcacatgatttg

SEQ ID NO: 43039 - DNA, 283 bp, Oryza sativa
tactaccgcaccaacttctgagatcaagaaatgatcttatgccaagaccaaactttcctgtgggagtgtgtgacagccaacgatcctgtgtgagttcattaagagttttctccttctgggacaatgagaagttggtaatggaagtatgccgaccggattgactgccctgtgaagcgtctgcaattacaacctgggagcagaacacacaaaaattctttcatttgtcacactaccataaaagtttgccacaataaaaatataaaacatttgcttaaacagaaac

SEQ ID NO: 43040 - DNA, 451 bp, Oryza sativa
tagggtacgataactgatgcccaagagcttttctaccatttaaccaaggaccttttgcatgcaggatttcttcatgtgatacatggaaatatgaatgcagaacacagatgaaatgatacagctccagcatagtgccaacagcaaatgcaaaacttactcatcaatacataagacagcttaatctcgcatatgaccaaatctaatgccacaacatcatgttcagaaaaagaactttgccaccctcttttaatttacttttaagagtatatgttacaaaaacaacaatcttttgcctgccagtatacacttccgttggacagcctaacctaagctatgggtcctctttctaaggaataaccaacaattaacatgatatctttacatctcactgttccttgctaatccgattatgttcatgaaaccatgagacgtgtacaacggatgtgtcagt

SEQ ID NO: 43041 - DNA, 382 bp, Oryza sativa
attctacttaacataatatggtagtaacatattagcacaaaggtcaggatggccgattgggctaaggcgccagactcaagttctggtcctctaacgagggcgtgggttcaaatcccacttctgacaatattttcgatcatttttttgaaacttttgctataactttattataggctgaacactaatctttctcaaacagcacgatatatcgtgtctgtcacaaacaaaaatagttcctcaattttttttttaaacttttgctttaactttactatagcctgaacacttatcttttacgaagagcacgatgtatcgtgtttttacaaagaaaacagtttaatttgtatattctggtcaccaatcttcccgaacacatgatgac

SEQ ID NO: 43042 - DNA, 465 bp, Oryza sativa
tcaacaagacatactgtatcttctgaagttccaattcctactttgcgaccttttctgatcctttctgcacttgctctgagatttttcttctgctggaatagccttctagttcagcactcacctcaaatgcagggtaattctcagccttctttgtcacattacagttgaaatctatctgctccaagacagagccatcaatctcctgcagctgagctctgatgctgctgtattcagagcttacggtagattttcccttagaagcacccaccattttctgctttatttcttcaatgctggcttggacaatagacagcctctgagcatcagaagctagtttatcaaggacatttttgctccacaattgctgaggttccagggacactgctgatatctcaagcctgtcaattcctggatctcttccccttgctagttcacacgaagggtactcactcttcacctcctcca

SEQ ID NO: 43043 - DNA, 458 bp, Oryza sativa
  unsure (1)..(458): unsure at all n locations
agctttatttgctcataaaaaaaaactattatttccaaagcgtaattntgggccattattgctgctcagaatgtgaccagtggaaaccttacagttgcaaagtgtatgcatccttcttttatgccttacggaaaaaaaagggacatgaaggtatataattggtatgttctgatgaatttatcttattacgagcatcttgtggaccaaactttatcttaaagatgatgcggntctcttgtactagtataatagcacacgcaaatcttaacaaattatgcttgattgttactttagtgcgggtacaccctggattaagggatactttacacctaagctctaagtttcagagcacctgtcgatcacatgcgcacgcatgtaaaagtttaaggttttattttgaacacantaaatatgaattagcaactccaaattctactactccatccgtcccataatat

SEQ ID NO: 43044 - DNA, 459 bp, Oryza sativa
tggccattgggccaaagactgtcgacagccacgacgcggtcaggcccacgtcgcacgggtggaggaggaagagccggctctgctcctagctcacgcaagcatcgagctacctccagcggcaccggccgcagcggctttcctccaccttgatgagccgaaggtactcgtctccctctgcgacggctccagcaacgacaaggctgatgggtggtacctcgacaccggcgccacccatcacatgaccggccgacgggagttcttcaccgagttcgactccagcgtccgaggcaccgtcaagttcggggacgcctccggcgtggagatcaagggtgttggctccgtcaccttcaccgccaagtccggtgagcacaggctgctcaccggagtctactacatcctcgcgttgaggaattctatcatcagcgtgtgacagctggatgagaacggctcacgctgtgt

SEQ ID NO: 43045 - DNA, 404 bp, Oryza sativa
  unsure (1)..(404): unsure at all n locations
agcttgtaccatctaagtatttgtttattgttttttagncatactatnngaatagccctgtgaaaattattttgttttgaattgttagatttgatctaagntaccataccaattttggttcctcaacttcctatttgtggacgtagttaactgttttaccaccatggtggaaagtggctggagtcctcaccaccagaaccatgagttttaccactaagccacgtgaatgtgcccatctctgttttatgcaagatataacatattaacattcattattcaggttgaagaacacctgaaaaatggaattgttgggtctgtttcaattccacctgacgatgctgacaaagaagaggttatcaatgcattagctgctaatgttgaatcgatgattaaagccgacagga

SEQ ID NO: 43046 - DNA, 465 bp, Oryza sativa
  unsure (1)..(465): unsure at all n locations
nntaaatgttacttgaattggtatagaaattctgcgttatgctattgaaaagttatcggttccattaattatattttttgttcaggttgatatgaacaaatattgattagttgattgggaaactgtacctgaggcttttgttatgcttgctgacaaaaaataaagcaataagatgctcgtgctgtgacgctacatcgcttaactaatgcaatcagtgtgcttgaattcttcaaaaacatagcacaatttgtcaagatggcacatggtacatgccaatattatacatgaccaaagtcgcgtcaactccatggctgctttataattgtgtaattagagaatttcatcgctgcgaaattctcgtctcaatcatgggggacttgttctttcgtttgacctgtggccatgcgnttcgggttatgggtgcttaattatgttntagccccacgaacatattaatcaacgtcc

SEQ ID NO: 43047 - DNA, 322 bp, Oryza sativa
ctggtactatgctcatggtggaacgctcaacctacttgatggctccctacgcttcagcgatcatattcgcgaggctgcgagtccactaacggacgcattggaagcctcttcttatggcacgttcctacccctcatagagaaggacgagctgtcactcgccctgaacacttctgagcatgcaggacgaacacgagggaagggggcgattccttagaagattggattcaacgagggcatccatacgtacaggagttggatgaggagcacgagagatacccacgcgaagattgcagatcttgagtcaagggtatcgagctacgag

SEQ ID NO: 43048 - DNA, 436 bp, Oryza sativa
tacttcgattgagccgactccgtcatgaacacgacatctttgtgacttaactcccatcggctgattctagaacattgaagtcgatactgactctaaatcgatggaaactatgggcttaccaaagttcactgtgaacactctgtaatgactttatattctgctattaattagaagaaaaattgcgctctattatccatttgttattgtgtgcctcggctgattcctacacgagggtttacacacatgtaagcatttggaattttggatagaaataccgagggtgacagatactagctgtatatgtataatggctatgtgacgacatctatccattactcacaatattgaactggaaactagacaggaagttcctgacctggaagacaggaacgtccaaactacacttatgaaaatctgtttcacaagaccggaactt

SEQ ID NO: 43049 - DNA, 348 bp, Oryza sativa
  unsure (1)..(348): unsure at all n locations
agcttcaccacaatattgtgagttattcttgtgtagttggangacctatctcattcccaagagagagtgatatttggacatacctacgaggctcgtatcaatataagtcaaagaaaagtctactcctcgctcttggcacgcctgctcttatatactccctccgctcctctttagatgacaccattgaccacttttctttttccaaaatacttgacactgcatagttgatgacaaacatttttccaatattacccctataggcccagcccacatatgaagaaacgagaaatatctggacactggagtgcagatatggaggcattcaacttgtgcacactccacagtatc

SEQ ID NO: 43050 - DNA, 370 bp, Oryza sativa
tctcttaaaaaccataatgatccagacgtcaaattataacttatacttggctcaacttctagagattgaatattgtcccacaaagaaccaacttctaccatcctacctacccttagcacgcagcggacgacagcggctgcgtggagtggcgcggcggacaggcggcggcacggagggcccgagcggcgatgctggcgctggtccactgggcggctcgagcgcctcccctcctcctcttgttccggctgcgccgcggatcgaggggcggcgcggttagcggcatggccgatcgagcgcctcccctgctcctcctcttccgaccaccgcagatcggtgcggtgcggcggctcaagcgcctaccctctctctc

SEQ ID NO: 43051 - DNA, 457 bp, Oryza sativa
  unsure (1)..(457): unsure at all n locations
ntgcctgcacgagttcctccagtagatgggtcatcagctgatgccttctgattattnggatcattattgttntcttctctgtcatggtttgtcgatgctagggaacctccaatctcaccttccctcttccctcccatctcatcttccttctctaccaccttatcctgtgatttcttacctgtttcccaatgagacagttcccaatgtatgaatgtggtcatgccttatattaacaaacataaaacatgctaataaagacttggttatcatttaaaaacatcaagcataactatgataaaaccatcacgcctattacagcatggtttcaacagggaaaagacattaaccctgataacattggaagttacagaatggtgttaatgggatgcatcatgcaccaaatcaagcctggaatagcttcatattcatttatggttccaaaagacatcttataaaa

SEQ ID NO: 43052 - DNA, 430 bp, Oryza sativa
  unsure (1)..(430): unsure at all n locations
atcttaagtcacctgcngcatgcaagctaaccttgaatgtaacttcgtgacttttaaaaccaaaaacaagagtctctgtatgtgtnataataatggaagtatgttttgggttttgcatgcaccaactatgagcacataattatttaaccgtgggtagcaagatctaaattttgttcgtagagtcatacacctaagattccaccggactcctgatttctactctattcctattctaccagctagatactactaaactaaacttgagaggggagccactccacacaaatacaaaaaagaaaagcagcccaccctcaacaacacatctccgtgcaggggagggtctattgtgtaagcacgtgaaaagaagtatggtaacattgtaacggtagttttcatatatgtacaacatanaatagtttaactgacacat

SEQ ID NO: 43053 - DNA, 457 bp, Oryza sativa
  unsure (1)..(457): unsure at all n locations
taagtgcaaagatccaatataaataataggtgaacaacatgtatctagaacatgcacaataaatgtataagaattgctctccctaaatatattcatacaaagaaatatataagagaggcaagtgtatgcacaagtagagaagaaccaatggggtttatcctatacacatggagaaggtatgtagcaatgataaagacaaacataaacacatacctttatcatctccatgttcttaatgtaaagaacactaaataagaaaatgctcaagtaaacattagtctcgcacttatataacaataacatggaaatcatatatatgaatctatcaaaaagtatgagataagaagtgatacatatcgctntatctccatgcatttcatctttgtcatgattaagatccaccaccaaagaatgcatatctaccacatctcatcatcggngaaaaacttctcatcat

SEQ ID NO: 43054 - DNA, 450 bp, Oryza sativa
ttccctattgataccttgctacttaatcaaagtattactgctgctgtgaagctcatgtctacaaatagattgcatgttcctagccactacagcttcgaatttgatgatcaatacctgctttcactgattgatcatcaaaaggacctctcttttatttattggcctgatccaacaatgactatttggcaaaagctaattaaggataccatttactatccccacaagtggtgttcttgatagcatggggttcttccgcggaagtgataattcaactatcatgtcatttgacttaaggtctgggattaagagaagactaacacttgattttgatggtaacctcacgctgtatagtctaatgaatgatggaacatggtcagtgacatggatagcatttcctcagctctgcaatgtgcatagtttgtgtggcaggaatggaatatgtgttgatac

SEQ ID NO: 43055 - DNA, 346 bp, Oryza sativa
  unsure (1)..(346): unsure at all n locations
tgagagctcggtgatattggcgatgttcgcctgcgactggcgttaagatgtcccatcattgtgaccaagatcaggaaacatcgatggtgctgtaagttggcagtatttgctacagtttgcaaggtccggaaattggtaatcattgcccattgtgctgaagtgggttgtagaagattgattcatttgaaccaaaggctgattattcacttcagggtactgcactggaaactgatttgttggcgcccaaaactcaccatttgactgcactggaaactggtttgcaggcaccgaanacccaccatttgactgcacttgatactgatttgcaggcgccgaaaacccacaa

SEQ ID NO: 43056 - DNA, 437 bp, Oryza sativa
  unsure (1)..(437): unsure at all n locations
tactctgaccggatccttaagtcacgcngctgcagcttaaggtgagctaccgagttcaattgggaatctttcttcgcattngagctatcttatcatagcgaacaacaatatagaaggaaaaatacctgaaggaatagggaacttgatcaacttaaaattgctctatatggatattaaccgcttagagggaattattccagcttctcttggcaaactcaagatgctgaataaattatctataccatataataacctgtctggatccattccaccaactcttggcaatcttacaggactaaatctactacaactccaaggaaatgcactcaatgggtccattccttccaatcttagcagtcgtcctctagaactattggatctttcatataacagtctcactggcttgatacctaaacaactttgtctcatttctactt

SEQ ID NO: 43057 - DNA, 470 bp, Oryza sativa
agatactcagctttatgaaattgccgttacatctgggagcatcttagtgatttcttgtacatcgcagtttgtttgtcccgaacgatttattggtttctctgtggacgctccatatttcatccataggtttatgttttgtacttttagttggattcctttattttcgaacattcttcttgcatcgatttcttaaatatcctttttggagtttccaaatttttcgggtatcaccgttcgtcttccttaagttggtttgaactttgatatctggtttataaaaactttactttggtttcttgcgtgacggttgtctttttatcattgagtttcaacttggtacttttagttggatttcttcaattataaagattatctttttcgaacattctctttgacttcaaaactttattttagttttgaaatcttccttgcccaaagatttgattaacttttgcctactagtttgtgaa

SEQ ID NO: 43058 - DNA, 297 bp, Oryza sativa
agcttccaaggctcaaggcaggatgtatattttggcaatttaagcaggtacgtcactggccgccatcttatttatcagtatcttggcgaaatccatttcataatcgtcatgtgaagaattgttaagcatgtgaacagtttcacgatgacgcgatccacgggacacgcagacatacatcaacgaatgtcgttgagttgagatgacctgcctaccagagtttctccatgcttcctgttgaaacttgaacaacaccggctgatcgatggtcttaccgggcgtagcagcctatggtgagtg

SEQ ID NO: 43059 - DNA, 466 bp, Oryza sativa
  unsure (1)..(466): unsure at all n locations
ntatgaaacatgaagagaacaagaatcgggaagaaatctttgttgattatgtcttcctacccacttggtgctggaattctgttccaacagtttcttatacaacttcaaacattcatattaagattacttaacaacaaacaaaatattaaaaaaaatctggtaaactaccctgtcgtcagaaaactactcattgtgatttctaagccaaaggtttaggtgagtacttcagcaacttcagtttgacaaatcagtcgtgtaagcttaaaaacatgcatatcaaggaggtcaagtaactacagccatattcttttgattttatttaccggattattgaaacagattatttgttccatgcttcaaaaaatatgttttctttaaaaaaaagtccttgtactgcattgcttagatcgcttaatttaagctttttgttaagtttgtttcttaaaaatattcattntatcactac

SEQ ID NO: 43060 - DNA, 282 bp, Oryza sativa
  unsure (1)..(282): unsure at all n locations
agcttggccacccatatcttcacatgtttgctgtttgtttcagagatctggagataccatgggcccacggcaatgagttatcctacgctgtccttcaccgncgtcacaatcccaactctgggatctgcccacagccgcctcagaaaagtgaattgcagatgtagattgcatgtgagttgcaagtggcccaatctgtgtttctatttctgacttggacggctggacagggtgcatctggacttctgctgcagcatgttacaccgtggtgatgctttaccaaga

SEQ ID NO: 43061 - DNA, 470 bp, Oryza sativa
  unsure (1)..(470): unsure at all n locations
tacgtagaaggtggtgacggtgccggcggagttgccggtgactatcttgatctgcatgtcgatcttgccgaagaggtactcgctcttggactggaacccagagccggagctcctgtcaagcgtgaggtcgagcccacggccaccatcgacgatcttgccgcggccctgcccccacgacacctccgcgtcctggaagaagttgcctccatgcgcaatggccaccaggcaggccatcgccacaatgccaagcgccaccgtcctcatcgcgcgatcacaacacacaagaacccaaagatctagcaagcgagtcgaagcgtgaggacaatgagagctactgggatcagtgtggattggtcactggaatgggatggcgaagcacttgcctatgagccggtatttatccttgggcgtggccggngcagctagcaatagcagagctgcgggcagacaggtggtatccgacgggcaaa

SEQ ID NO: 43062 - DNA, 443 bp, Oryza sativa
  unsure (1)..(443): unsure at all n locations
agcttcagatcatcaccgagctctttgttgtacgtgactatagatatactccgtgctatactacacctatattgcaatatagctaaaacaaacttaacattgtataattntaactgcgagagcaatcattgtcatactcttattgagcttagtagtcaaatttgtcggatactcttattgagcttagtagtcaaatttgtcggatactcttattgagcctagtagtaaaatgtttactactccatccgtttcatattataaattgttntgattttggtcaaagtcaaactacttcaagtttgactaagtttatacgccaatatagtaatatttacaataccatactatgtaattaaatatatcttcataataaattgtctcgggttgatactattcttctacacacctcgctaacttgaagcattgactttaccaagtcaaac

SEQ ID NO: 43063 - DNA, 456 bp, Oryza sativa
  unsure (1)..(456): unsure at all n locations
tgccggtatatactgctgtctaattgtgttgttcccagtataaattgncaaccttgtacctggaatatatcatgagtaaggtcatcctcaaacaactgaaatctccccagccacacttggttttgtactgaaccaagacacactgcttgaacaagaagggatcgatcaatagctcaatttgatgttagccatgttatgtcaatagcaccaaactgtacatttagcaacaatggaagaggatagcactttaaatataccttatgagacgagataacagctgtgcatcatttacaggattcttcttgtgaaatggagattaagacctcacgagactgcataataatgtattatatgccaaccccaaaaatatttgtgagatgtcttctggtcctccaacaaacagcagcggcaatcagaatcagtcttcggtatttggaacatatcaccccccataat

SEQ ID NO: 43064 - DNA, 471 bp, Oryza sativa
  unsure (1)..(471): unsure at all n locations
agctntatcaagtgccacacctgatgatgttcatatttggcactgcagcttatactatacctgtgtatcaagttcaaactatgatatatcacatcataacatcagaaacaattgtttgagggaggcaaaacaaaatagcaaatccaggattcaacggaaaatcctaatacagtagagcgcaatgatgctatttcgtctgggctaacaccagcatccatgacttttaacccatgaacagaggcagaccagctcaaatttacagcatattgtagagtctgattaaatattttggatacataaactcctgcttatatcccattcctccaagctgattttagtgcctgtgtttaaaaccatgaaaataagaatcaagtcaaataataaccatgaatatgattctcaaacaatcatganagggatttgagtataatacatctatgtaagtgctgttcttgctagctggccctttca

SEQ ID NO: 43065 - DNA, 414 bp, Oryza sativa
acggaacatgaaactcagctacctacacctgatacttagcagaaaagatcaatttaccctgaacatgaactctccaattgtcaaaatcgcctaattatacacataccaaggttaaacaaactgagggctcacaaataaagtgtaatccggttcgaatttttggaccggatcaaaaaacacaaaccacttaatttttcgtcatttttttaaaaaaatcaaactgaaattttaatttttaacaaaatttattcagaatttattggtttttgtcgatttattaatggattatgcgaaatccaatgatacagcttgcaagcaaattttgattcagtatcgggactgtgaaccctaaacatagaatactaaagagaaacgtagcatcgcgtatcaatatcaagaaacaagttgaacaca

SEQ ID NO: 43066 - DNA, 486 bp, Oryza sativa
acttaagcaccgagctcagctggtccaaaaagaaacattatttgttatatctccccaccacttgtcaagggccagaagcgtgaacgaggcaaggggaaggtcggggagttggcgccggagccaaaaaggggcaaggctgcgacaccgatgccggtgagcaaatcgcggaaggtcgtgagggcgccagcccaatttgagctaagcatgccattggtggacgacaatgcgttagctgcgatgggtattgcttgccgagagctacataagcaatacatggagctaagcaatgccaagcggaaaatgagggagtcatccatagttggacatcacgaccaccagccgttcctatcgtcggctgcctatataactataggctttgatgacctcttcgaccttttcaggatcccgacgttggacactggtcttctaaaacgctactccttcgaagtgcataccttctatacttgtgatatgactggactatat

SEQ ID NO: 43067 - DNA, 342 bp, Oryza sativa
  unsure (1)..(342): unsure at all n locations
actatananaccaagctgggnncgggagggcnaccgctctgtcgacaagttatttccattgtatttactcagacaatggagagcatatagagcgatcttacaaatcataaaacatccattcacactagacggcctggatcattctcaaccatagaaatcaccaccgctcattcagatcacgacaacctacatattaaaccacatctactagggacatgggaatcaaccatgggcaacctggaaagcggactggctacgagggatgacattaccatcacatatacggatcataagtcttatggtttgaacaacactaatgttaaacctttcgaatttcgacta

SEQ ID NO: 43068 - DNA, 457 bp, Oryza sativa
agcttctcgtgagcatacacataacacatgtgttcttgtaatgtggaataaattacacgtagaggatttggaagagagtgactgcgctagcaatcgctctttgagagttgtgttttacagttttagtgaggaaccaatttgtatgaatgtgcaataatcatgtataaagtataattgtacacgccaggtatttcaatttcatattgcttgtgtgatgtatgcgttcgaatactatacagtcaacaaaagagaacaaaattactatgagcttatacgaccagtgttcaaaataatagccagtcaatggtcaataaaaattaaaattaaaaaaaaagtcttacaaattcctgattttctatcgtttgaaaaaaaaaaacaacttcgggatattacacatattacatattgatccaataatcgaatatttcaaatactttcttaacgacttctaacttgg

SEQ ID NO: 43069 - DNA, 440 bp, Oryza sativa
  unsure (1)..(440): unsure at all n locations
agcttatgttgatgatgtagtcttcatgatcaagcagaaggatgatttgattacggatctacaagagacctttgcgagcatccgcgctttcaagatgaaattaaaccctgaaaagtgcatcttcggagtaccgtcaaggaagctgcttggctttatggtgtcctatagaggcatacaagccaacccggagaaaatcctcaacatgaaaccgctgagctcctagaaagatgttcaaaagttaactggttgcatggcggcgctcagccggttcgtctcacgactcggcgagcggnggatgccttttttcaagctgctaaagaaaactgataatttccagtggggacctgaagcacanaaagcctttgaagacttcaagaaacttctcactactccaccagtcttagcttcgccacatccgcaagagccgctgttgtatacgt

SEQ ID NO: 43070 - DNA, 363 bp, Oryza sativa
  unsure (1)..(363): unsure at all n locations
gagcgcctgagaagatggatccgtaagcccgctactccgctgctgtttattattattgacaggcctgaagcgcctctgtaataatgtaaatattatcgatataataaagatgtgtcttttatatcatgtttgtgtggngtaccccggcttttcctgagacggggattaatacactagcgctcgggaaaaggccaatttctcggtcgcgacacgcggccgttccgggtgactaatggcgccattcaagggggaaattagggggaattgaataggaatgaaaggtgtcattccccctaatcaatttggcaagaacggaatngattcgcgcagatgtgaatgacgaaacgcatagcgtttcatggg

SEQ ID NO: 43071 - DNA, 366 bp, Oryza sativa
  unsure (1)..(366): unsure at all n locations
tctagggngcntaggtctcttgtccgaggcatttatgcctactcctgaaagatactggctatagagcggatgcgcccccccagcaaacttatggatgtgcaatgcgtcaccggttgcatggccgccctaagtcggtgtatatctaggctgggagagaaagcgttacccttatttaagcttctcaaacgctccggaccgtttacctggacggaggaagccgaaaatgccctcacccagttgaaggcgtatctaagctctccctcagttctggtcgccccggagccagacgagcccttgttactctacttagcggcgaccccgcaagtagttagtgcggcattggttgtggagcgcgatgagaacaat

SEQ ID NO: 43072 - DNA, 366 bp, Oryza sativa
  unsure (1)..(366): unsure at all n locations
agctntagagaagggagaggatgatagcatttttgatatgatgatggcagcttgaaggatgatggcaaagtggtcaaggctgtggttgtaatcaaggaagaggacctgcagcctaagaagagcaaaggagaagatgagaaagaacaaggtgacaagaagatggacagtgctgatgtggtggacattgcagttgaaaagaaacaggcgacgaagcgggcttctgagaatgctgataagaagcaggcaaggaagcgcatgggggatgctgttgccacaaatgatggtacaaggacgaaaacaggtggtgatttttggagacatcatcagatgacgatctctcctgagcggctgaccttctgcttagtt

SEQ ID NO: 43073 - DNA, 460 bp, Oryza sativa
tgctgagcgaccatatgtctgcccatatgatgggtgttgttaagcctacattcacagttacaaattgaaccttcatctaaaaactcagcatcctgaacatggtcaagaagagaatggtaggattgctgcacatgcaagtgagcatgctgtaaatgatcgtgccaatcagtataactatgctgagattgtcgaccttgcaccgaatccaaaaaggagcaagacaaattcagggcataagaccccctcatctaataaagcctacaatgtcaagatttctagcgtgttgcctgctgatatcagtggagtgaagaatcagtggccaggtaagtatgaagatgacagtgaagagacagaagaagaccagggcaacaacattgaagatggctggagatatggtaaccagaatgccgatgatgaggaaacagaatatgaagataaccaaacgattctcttttgtctt

SEQ ID NO: 43074 - DNA, 426 bp, Oryza sativa
  unsure (1)..(426): unsure at all n locations
agctnntgtgatattttcataacggaagcgtgtgctctctatgcaacttgcaaatgatttcttgaggaaatgcaatgggtatgaggtgatccacaataaaagaaaccttcttcacgctactattggcagtcccagatatggagaagaaacttgtcttctcaggcagttataggaagttgactaaaatttgttgagccaaaagagcgacagaaggcgagagtagcaatgataggaaggatccaaacacctcaaaacatgtggtgctgtcactgtcaatatttaacaatactaatcatgcatatgaaccatcatctctgtggacacactgctagtgtttttccttaatcagttgtcaccatgtgcttgtcgtagatcaagcatttatactgtgcatagattatttctcttctaaaatgccgcgctttc

SEQ ID NO: 43075 - DNA, 419 bp, Oryza sativa
tctcgggttcttggtctctgcccgaggcatggaggccattctttataagatacgggctatagagcggatgcgccccccagcaaacttatggatgtgcaatgcgtcaccggttgcatggccgccctaagtcggttcatatctaggctgggagagaaggcgttacccttatttaagcttctcaaacgctccggaccgtttacctggacggaggaagccgaaaatgccctcacccagttgaaggcatgtctaagctctccccagttctggtcgccccggagccagacgagcccttgttactctacttagcggcgaccccgcaagtagttagtgcggcattggttgtggagcgcgatgaggacaattctcatttcacgccttcccaccctgtgccgacttggcccgggagagagcaaggagga

SEQ ID NO: 43076 - DNA, 470 bp, Oryza sativa
  unsure (1)..(470): unsure at all n locations
agcttgagctacctgccgattgtggggtttgtctcacgtttaacattgcagatttaaagccatatttgggagaagaagatgagttagagtcgaggatgactcaaatgcaagaaggggaggatgatgaggacatcccttccaacgatacaaccacgcctattgcacagcaaggaccaatgactagagctcgagctcgtgaacttaattatcaggaatatgggagaggaaccaaatcgcaagcagcactagcagcgctgatttgatgaagtcaatgctcttcactccggagggcaaacggngcaaatgagtacttgttggaaagatctcgtcgtctactttcagctatgtgtggcctcaccatcaactntgacccaggctgctcagaatgacgaaaatagttctttacatcagaaacttgngctcgggccttgtatcattacagccatcattacagcccattaggggtccac

SEQ ID NO: 43077 - DNA, 450 bp, Oryza sativa
  unsure (1)..(450): unsure at all n locations
gcattaccaatggtttggtagagtagagaaccaaactcaccctaaatacatacacaatttgggttagagacaaaatattgtgataatcacttcctttctaaataattgtctctatgggttaatcactaggcttttccttacctaatcgtcacttggtccaccttaaaggtgtcataatatccttctgtttgcctttatctgctagttatgccatggcactttccttgatcaacctgtgcttatgaaaaatgtttggtggaagcctatctcttgcttgatctgcttgattgatacaacattatggattggctgtttctaggacatcctacaattagtcttgttcaatacttatattatgacgccatcgatccgaactaatctatcttgaactgcaatntggatctatgcagtactgtactaattgaacttcattctataaaggattctaaa

SEQ ID NO: 43078 - DNA, 457 bp, Oryza sativa
  unsure (1)..(457): unsure at all n locations
agctntgcaattataaaacatgtgtgagctcttttctggaaaagacaggaaggctgcgccgttgacatgcggaccccacatgtcaacctaaaggaccacggtagaccgggtacacagagacggtccacgggtcgacggaagcggaccccgtgtgtcaaccgaggcgagtggccgacaaacggactccactagacaccacacgggttgcacacgtggaaaccacgcggttaccgagcgggcacactaacacggacactacactgtcaccacccgcacacgtgaacgactaccgacaccggtacacgggtaccggggtcgacgaccgcacaacgggtacggtgcgacaccgataggacgagggcggtgaagcgagaggacggattcttaccaccacgcgacgaggcgcgggaacgacaacgactaacggtcgcggctgatacagactgtcacaacggag

SEQ ID NO: 43079 - DNA, 474 bp, Oryza sativa
  unsure (1)..(474): unsure at all n locations
ctatgaaactaaccttcacaaanatccataanacaacagaatatcaatgtccctagtcttgatgaaggggatgttgatcttgatgctccttgtgtttctgtccctggntattatgatcctacaaagataaatgagcttatttgcaaaatgatcattgtccatgagttgccattttgccttgtggagtatacatggtttaatgttttgctaaagaggctaaacccttcttacaaaaaggtggggctcaaccttcaaaatgctgcaatctgcatttttttataggtctgccttggatgtatatgctgcaggagatgcaaactataggtggctgccaacaccagaggaatggaatctatattgtgaagtcaatgatgccctttctgtcattcatgcagccactgaggagttctcatgttcaacctacccaacatctaacctttcttattctcacattgtcgatattaagagagtact

SEQ ID NO: 43080 - DNA, 468 bp, Oryza sativa
  unsure (1)..(468): unsure at all n locations
agcttcttatctttaattatggttatgattatgtttgcatggctctctttctttntgggaaagaaactgctaatctatgataactaaagagtagtgattggctgcctaaactaaaatctaaacgtattactgcgtagtctatgaagttagaaaactaatcccaaaaaaactatgatcctggcaatctgactacctcaactgctagttggagagtggcttggctacctggactgctcaattctgttcagaccatcagcctagttaccatagacttgatgagaaaaaataattttctatgtcacaccatgccccaaaaattcacaaaccagaattccaagcagaacgtgcattaaaccactatccaggaacagctagggtagttgaactaagcatggctaagcaattcctaatccaacatctagtcatgttacatcccaagtttacaaaggaataaggtacaaaaataat

SEQ ID NO: 43081 - DNA, 459 bp, Oryza sativa
actcagcttagacagtttgcaaacagaattctctagttaaaatttatcatggagtgcatgttctgatctgcagaaagaagaaaccaactccaaggcctaataagcagccagcctttcatcattgcggccaggatcacagaagatgcttctgagtaatcaattaattaggacagcagaggaaacatcatatgtaaagaaaagaaaataaatctgaaagcaataggtcatactttgtttgacttctctttcagattaggtgttctgaaccaagtggtagacgattaagcggctcaaagacttgcacctcgtagccgatcaggattcacaaacaagattcaaaagaaaaatgtgcttccgtgaaagttagcacctgtacaagtgtggttccatgttcatttgtatgtgcaaaactaattatgttttatcaaagcatatacagtgcagccattgaaaatgcaa

SEQ ID NO: 43082 - DNA, 474 bp, Oryza sativa
  unsure (1)..(474): unsure at all n locations
agcttatgcagtggaagaaggatgttgtttttctngtgctgggtgtcaggttaaatagggatgctttagatgcattagttacttgagctaaggtaagtaacttaggccgtgtttagttcacccgcaactaccccaaacttccaactttcgatcacatcatatcacatccaaaactttcctacatatataagtttttaattttttttccaaacttccaactttcccaaacttcgggcatgttcactttgatgatattttcaacattaccaaattttggtaaagttatcaaaaaaaaagtggctacatttagtttgctgttaaattttggtactatataagaaatcctatcaaaattttggcaagttgctaaaattttagcatagttggtaaggtttttttttgacatcaaagtgaacagttccttntaactcntttcagtaactaaatacagcctcaattaaagcctcaattaag

SEQ ID NO: 43083 - DNA, 348 bp, Oryza sativa
ggggcctcgtcatcttgagtgagctgagcgaggatgtttatcttggtggcctgctgcgcatctgggccgagatggcccatcttatgctggcccaactcacctgtcgacgccaccttatcctctcccacaatcggatcttccccaccgcgactgttcggatcgttctccaccttccgtgaagacttgtgagcgatctctgccatgagcggcagcatccggtcatggaccccctgatattctgagaaggagaggacaggtgaggagcatacgatctggatcagagggtcggcgagacacacaagagcgtggactggctgctggtcggcatcaccctggccactgacagcg

SEQ ID NO: 43084 - DNA, 476 bp, Oryza sativa
agcttgcactcgtcatatcagttcacttatttatcttgtatgtatctataattagattctatttgctgtacatataatgaattccaattctaagcgcttgttttatatatggcagcaattcgagaggctgtttcagttttctcgaaaagtcgatgaattgacatacaccatagctgctgaagaggtgagctgatactatgttttagtgttctactattccatggactatgatttcgaatcctaattagtaatgttgaactgggctgttacatgaaaactggcatgtttatagaccagcagatagtgccttttggtacgagactgagttacaaacagttcacattctaaattgtttcaggttgtctactgtatttaaaggcaacaatttatgaagttctttgtaataaatttgaactatttctttactccataggatgtgaggtgatggtccaatacacccatcactccttggagat

SEQ ID NO: 43085 - DNA, 460 bp, Oryza sativa
  unsure (1)..(460): unsure at all n locations
tcgtcgccacgccgntacaccgccaatcgtctgcgagtcatatgtgagcttcgncgccaacgccggtcgtctgcttccactgacactgccatccaaccgaacatctgtcaccacaggatcatgcgaagaagatggtcgtgcccagaagaagcacgtgctggatgcatgtgctangagctagcaagctgttcaaattgctgtgttcgagatatgattagttntttaaactgaatattctttacaatgtattaatctggttttagaatgcatgtaaccagctcgttatacaggacaataaaggagggaaattcagttcaagcaaaacaaaaggtaaaattcataaaaaaatatttttttcagccacatttaaataggtatatatccaattacaaatgggatatttacccaaaatatgcgttttcatggtgtatacctaatatgcatgtctacataggtatat

SEQ ID NO: 43086 - DNA, 473 bp, Oryza sativa
  unsure (1)..(473): unsure at all n locations
agctcgccctgtctgccgaagaactttttgaacataacatgccagctgggttacttcaacctctccctcttcctgaaatggcttggtctcacattacaatggattntgtcgaaggcttacccaagtctgaaggcaaggatgtgatctgggttattgttgataggttcaccaaatatgcacacttcattcctcttagccatcctttcactgccgaccaaattcttactcaattcttggagcacttttacaaattacatggcttgccgacagtgattgtgagtgacagagatcgcatcttcactagttccacctggaaagaagttnttgaaaaggctggcgtcaaactccacttcagcagcgcttatcacccgcagactgatggtcaatcggagcgagttaatcaatgcttggaagattatcttcgctgcatgacatcgtccaaacccaggagatggaaagctcttctacctcat

SEQ ID NO: 43087 - DNA, 432 bp, Oryza sativa
  unsure (1)..(432): unsure at all n locations
tatgccttatctcatgttntcctcacaggggttnttctatagataaaacatggcatggattactccttaaacctttcagggttctgatagagtaatcaccaatcacattattcctattttttttccccacagggtttttcgaaggaattaaagaacaagttgatctcaagatggactcgatcaaaagggggagtgttacaaaagcatcatgagacattttttatctcatcaaaggctcatcaaagagcaacaatggcaggaatcaagtgacttgtaaccgccatactatggtgaatttgtgacacataatcatccatatttagtggcttaaatcacccttaattcctaggagtatcctangctccttaattcctaggagtatcctatgcttgtgcatatgtaaatccccactataaaaggggacgatttgag

SEQ ID NO: 43088 - DNA, 455 bp, Oryza sativa
tgcggcatgcaagcttgcccctaggaagcgaaaggattctgctcttctgactccgacgccgacgacgaggatgatgccgaacaacgcgacggcgaggaggaaggagaggagaaagaggaggccatggccgataaggccgctaacgaggcgatcgaagaccgcgtcgacacccccgactacactcctaccccaagtcccggtcacaacgagaccggggtggagtcgaacagctccccccttcgacggaaggatttggaaggggcgaaagccctatttgcattctcctcgggcaaggcggcgaatggaggtccggtgcagaagatctctaataagaaaggactcgtcgacatcgcccacgttttcagcgacgacgaatcttctaacgggactccaacttctcctgctggccgcagtttagacctttcgactgctcctctcactccactctgcgttgc

SEQ ID NO: 43089 - DNA, 441 bp, Oryza sativa
aaaactcagctgtcatggactacgctgtctgccatgggatgtttttatcttgtcaagaagaacagagatgcataatgatttgacagccgatgaatattatgatctcatggccgacgaaagggaagacttggttcaatcaagattgagagcccttgcaaaggttaccaaggataaggaacgtgtcgctcgacattacaacaagaaagtggtgtccaagtctctttctgaaagagaacttgtgtggaaattgattttgccaataggaactctagataacaaattctacaagtggtcaccaaattgggaagggcccgttcaaatctacaacgttgtatctaacggagcctatatgttgcatggactcgatggagaagattatggatgagcacgtaatgaaaaatactttgaagaaatatcacccaagccgttgggtaactcttg

SEQ ID NO: 43090 - DNA, 470 bp, Oryza sativa
  unsure (1)..(470): unsure at all n locations
cctcagagncacctgccgcatgcaagcttgcagggggccgaagcatacttcgttatttgatgagattgtagcacgccgatgttgctataccgctagagctgagcagggtgtttctagtatctgacaggtcttgttgtagttgtagattagtgaaaaatataattgtgaagaagcaaacattatgaataggtattacacacgtcaaatcataattnttgtgtaaaaaatattggcctttgtgtattaaacactcatgtccatataggaccgcccctgatacactacacaggggaataattacccgtgcgcggcaatgatgggccgatggggtggatcacttacttgagtttttgtcttaccatttaattgttaaatgttatgaaaaccatgaaatgcacggaaaaaatctcaaaatatctgcacaaagattgaacatttctgacaaagctccaagcactcgattattaact

SEQ ID NO: 43091 - DNA, 397 bp, Oryza sativa
acaacaaacaccatctatagagggctgcttactcacccaccatcagagtagataccaagctttagaccttacccatgcacataatccgcaagatctttgatgccagaagggaaagtttatgggtcaggtagcaattgatcctacacgcacacgaaacaatgtattaaaaactaaagagggcaacttgttatgcatgtaattatatggacaggaatgcatttgtaatggtatcagtacaaccaaagaagactgttctgagtgacgtgctgtccaagctcgtaaaattatcaaagaccaaagcatgacatattaggaacaaagaattggagaaatcacagccaaattagcaaagagaagcataactttgtccttttttaattggacaacatcatctgaa

SEQ ID NO: 43092 - DNA, 446 bp, Oryza sativa
  unsure (1)..(446): unsure at all n locations
ctgcagctgtcactcgctccgttatttgttggggacgtttctgattcctgcgtagcagatatcaagaagtttgcagatgctgttattgttgacagggaatctgtttttgccgagagcaaaggttttattattaggaaaagcaaggttgtggaagatgtgcagtctgcagggttagctgtgtatgtggaggtattccgcaatgagtatgtatcaccaccggtggatttcttcgcagatggaacagtggagatcaacaactatgttcagttggttcatgttgatggcttcataactgacttccccaagactgttagaagatacaaaagtaagtttactactactactctgctagctagctactacctccatcccataatataagaaattctgactntntgaatttttgactntntactttcaatgtntgatcattcgtcttattcaaa

SEQ ID NO: 43093 - DNA, 192 bp, Oryza sativa
aataaaacagcattgtgaaacttctgctggtgaatgagccattagtacaccactagatgtacagtgctcataacactggaataaatttttaatgagaaccatcaaaacagattatgaagtgcatgtgccattagtttggtgtaattaaaagagaaaggaggagaacagtgctacttttccaatatttttaaa

SEQ ID NO: 43094 - DNA, 447 bp, Oryza sativa
  unsure (1)..(447): unsure at all n locations
agcttgtctgacaaatacaaagtgtctcttctacgagtattctgaggcaggtttgcggactctggcacttgcatatcgtgaacttactgaggacgagtatgttgcgtggaatatggagtactcagctgcaaagaattctgtacataatgatcatgatgtagctgttgagaaggcatcagaaaatatcgagaaagatttggttcttttaggtgctactgctgtggaggacagattgcaaaagggggtatgtcgatttcatttgagactttaaagttatcctcttctcttttttttttttcatttactatgcttgctcacggtgtaacatggcctcctgttcagtctgaaaaaccccaaatgatttttctatttggttgctgtcacatagcttgcacttttcatattttgtgcggntgctctcatatctcgtgatggtaatttctcctg

SEQ ID NO: 43095 - DNA, 448 bp, Oryza sativa
  unsure (1)..(448): unsure at all n locations
taggtcgcacatgaaacatgcaggacaacagtctgtctttataatagcttatggaaacagaattaccaatcttactggatgcctggatggttccgtatctgctacaaccaagaacaagcataggaaagtttgccaactaaatctaatctttcgcaaaagaaaaaggtttagctgcaattatgaaagaaaaatatcgtagttacttaataaaattcaatgtttcgcacttcaatcctttggagtttggacacacaacaattcactttccaaatttgcagctataaaactctgcatcatctaacagttttactacgtatcatgtctataatactggtttcacccaattttcaactcgcaacactaagcaaacgcacatgcagaactttacatagaggaaaatctcanaccttgtcagtcagtctcacgctgactgggagctgaaaactta

SEQ ID NO: 43096 - DNA, 397 bp, Oryza sativa
agcttctgcttacaacatttcccacccttttcttcgataatgttgtaatgtaagctattcacattaaaacaaaagaacaagtttaccattttgacatgacatgatactagaaggttgaagaatgaagactatatgaatccgagcaaaaacagaactcagcattctaagtttctaacccattaatcaacataataactccgtactagtactatccacactctacccctattcttgttcaggtatactaacagtattcacttctaccaggatccaggaggcgagggtctctcatcggctgctgcgccgcaaatcaaacagaagacaatctttcatgcatcctaagtcccagataaacacacctggaagaggaaggactcgttgccgccgccggaggcaa

SEQ ID NO: 43097 - DNA, 436 bp, Oryza sativa
agctggccgttcgccttaggaacgaccactgtttttttcagccactccgggtggatgacctcgcggatgaatccggcctccagaagtcgcgccacctcctcgcggatgaaggcttgacgttccggggcctggcgccgcactttctgccggaccggccttgcgcccgatcgtacggcgagacggtgctcaatcacctccctggggaccccgggcatatccgccggtctccatgcgaagacgtcagcgtttgcccgcaggaaagagacgagcgcgtcttcctatttgccatccaagagaccaccgatccgtgtggtcttggacgggccatcgcccagggcaacctccttgaccgggacctcatcgcacgtgactatccgctgcctcggggcggcggcggcggatgtgccaatcctctcgtcgcacccttggcttggac

SEQ ID NO: 43098 - DNA, 444 bp, Oryza sativa
  unsure (1)..(444): unsure at all n locations
tgggagtggctaganaaccctcgaacatgaaagaactgtatttgaatggtcaaagggtggacctgggatgaaatccatatntataacggctaggtgatgtcatctagccgttactcacatgtttgaactggaaacctgccatgaggttccgggcaagtgctaggaacttctgggcagcacttaggaaaatttttgcaattaaacggcgcccggaagttccggccagaaccttcgggtagccctctctgtcctggggagaaaatcatttttcaaaaatgattccaaaaatcttttgactcatggatatgactaagagcactntgtataccatagaaccacacttgaaacccctcttaatagtacgggttttcctaaactcaatttcgaaagtgaagaacctagtctaatcacctacagcgattntcgcacttaggaacattcgaa

SEQ ID NO: 43099 - DNA, 477 bp, Oryza sativa
  unsure (1)..(477): unsure at all n locations
agctntatagcgcaatgttcgtgaagccgtttgtgatggattctgcaaatattgaaaaacatcatatctccaatcatcggcggttatcgtagcaacttctactttgacatccttcatcatcggcttgaaccccaatgctccttgagccaagtccattagcttcaacgttttgctctcgagacacatgctgcaaagtcaccagccgaaatccattcatcaattcttggcacttctcattgtaaaccattaatgtatcattcttgcactcatattccccggccaattgacagatcaccaacaaggaatcacccataatctcgatagcatcagcttcaacttccttgagcaattgcaaccctttgagaactgcttcatactcagcttgattgttagttgcatcacgcttaatagtataggcaaactcgaaacttgcccccagaggagaaattataaccaagccgataccacaaccatgag

SEQ ID NO: 43100 - DNA, 468 bp, Oryza sativa
  unsure (1)..(468): unsure at all n locations
tgccatagttgcggcaggcgtcgtctcgtgccggcttgtggttgccggtggcaatgccctgggcgcctctgcgggcgccaccctcggcacgtcttcgcgcccaccgtagctggacacctccccgcgccttgcgcggcttacggccgcctgtcggggaagatgactcccccttcctcccgtcaccctgagaggcctcccactgctccctagtgagatggagcttcccgccgatggtgatgggccccgagagaggctgtggctcatcaccatcgacgaccttgaggcgacctaacgcctcctcgatcgacatcgtggagaggtccagcagagattcgatcgagcgagcgatctgtctgtacttctcanggacgcagcggaagagcttctcgacagctctctcctcgtcgtaggtgtcgtcgccgtactgcaccattttctgcaagagagtggtgagacggagagcaaagt

SEQ ID NO: 43101 - DNA, 472 bp, Oryza sativa
  unsure (1)..(472): unsure at all n locations
agcttctaaagtgctatagactttgttgatatactggtggtcaactcatcatcaagaccaaacaaaaacttctcctacttctcagcatcggtatgcacgtcctcgggagcgaagcacgcaaggcggttgaactcgtgcaagtactctgtaaccgtcctggttccttgttgcaatgcacagaactctctcttctgttgtgccataatcctttcacgaatctgtgccttcctgaagctttgacaaaactctgcccaagtaacctccgttgcagttggacgggtcaccacatagttatcccaccaggcagaagcgggacctttcagctggtgcgtagcaaaagcaactttctcttggtcgttgcattgcagtaggttcagcttctttttaatagcatggagccagccgttggccttcattgtgttggtggtgcttgagaaagtangtggcttgatacagacgaagtctaacagat

SEQ ID NO: 43102 - DNA, 457 bp, Oryza sativa
  unsure (1)..(457): unsure at all n locations
tcccggcttaactcgctnttatctattgcgctgcatattttatcctttctatctttgcaagacgtggatctggatgtcaacaattatcgtttgtgtaccctggctggtcctggacagggatttaatgcacattcaccttagaaattctggtttgagaatttctgggcgtgacacgaagcttcggcttcactcccacaggcagcttaactggggtataagccaaacgtcttctccttcgtaacttgtcttcaactgaggtttgattgattattgcaaggtgagcatatgacatactcatcaagccacacagcaaatatgcaagtgcacaaggataccaaaggatggcataatatatggctcatttcaaaagcagcattatcaaacatttaagagtagttaaacagtagagtgattaatcattaatattatatcatcactgaacagcacatccatgctg

SEQ ID NO: 43103 - DNA, 458 bp, Oryza sativa
  unsure (1)..(458): unsure at all n locations
agcttcaaataaccgtgattatagactgtcgttggaggaggcaaaaacatctctaaccggtactantttgctcgcttttgttttaatctcttctgtcatcggtttgagattgattaatatacatgttcatgcaggaacacttgatgacattactaatttaagtgcaatcgaacttggaagaaagcgtgataaagagatgtacgcttcacttcctgccgagaaaaaagaggctaagcttcaaaagaaccgtgattatagacagcgtaaaaaggaggcaaccatatctccaacaggtattattttgctcccttntgttttactgtttgctatcatcagtttgaaattgatttgaatacatcttcctgcaggtacacttggtgacattactaatctaactccaattgaacttacatggaagcgtgctangcaccggtacgcttcactcagtgctgagaaaa

SEQ ID NO: 43104 - DNA, 433 bp, Oryza sativa
ggatccgtagcgacgacggtgatgaagaaacaatgagtatttgctgatgaaagtgcaaggaagcatacccaaaagaggtctccgctaacttattactccatccgtcctaaaatatagatattttttagattggtatgagtattaaggaagtaggtgagaatgatgggtggatgtgcgtgattagttaaaaagagaaagaaggtgaagaagaatggttatgattggttgagaggaggagataggaggagaaatagttttattttatgacaagagacactgtgctagaaatggctacattttgggacggaggtgataacttctctatgacgaaggaagcttccatgataaaacaataaaaactcagcttccctaataagatgcacggtcgttgatgaaggaggcttgcattgtgtttaactcgccggagatgaac

SEQ ID NO: 43105 - DNA, 465 bp, Oryza sativa
  unsure (1)..(465): unsure at all n locations
agcttgaccatcgttgagaaggattcttttatcagtgacccataaacacggtttcaccgtgagcatcagagttcttactgaaaaaaaaaaactntacctcggaagcttgacgatcatcaaataaggacccacttatcagtgacccatcgacgtggttttgccgtgggcactgctcttatcatgtgatctatagaagtctagaacctaccacctccactgaatatataaagaattacacgtatctttgctccagatgagaaagggattacgattgattggcttcctttttagcttttctacggcgcatcacgatgctgtttgcaataacaaaggtcaaagggagggagaaggaaggccaaggaaaaaaaaaagaaggggtggcaaccatccaaaacacctgaaaggatgtacaaaaagaagagcaatttacggatgagtactactactgatgatgataaaagtgaa

SEQ ID NO: 43106 - DNA, 438 bp, Oryza sativa
cggacacataaaactaagcttacaatgctgcctggggtactatatccatgaacattttcgtttaatgacgaataaagactgcatagtagttaataaacatgtaaggttgaaccacctaccagtaagtggaaaacgcttcagctaaggttataggtgcagattgattgcaaaccaaaaggagttgagcaaaggcagtcatagcttcagcactcaatgatggaatgctgctatcatcaggttcttccttaatcttaagctcactaaaggatgtaaaaatgctggttttgtcactgagccctgaagggattgttcttctcataggatttgttctagaccccctatccttttcaggggttctacaactgtcgtgaagactgcaatcactaccgactgatggacaactggtgtctccatgatatcaaacaaaggcctggatgc

SEQ ID NO: 43107 - DNA, 465 bp, Oryza sativa
  unsure (1)..(465): unsure at all n locations
agcttacacatacaccgttgctacatctttcattctntggtaagactattgagttagaatgtgatgctagtggagttggcattggaggtgtgttgatgcaagatggtaagcctgttgcatactttagcgagaagttgcatggtcctgttttgaattattccacgtatgataaggaattgtatgctcttgtacgttccttagagacgtggcgtcattatttgtggcctatagaatttgttattcactctgatcacgaatcgcttaaatatcttcgctctccacaaaaatgaccggagcaccccaaggtgaagtacttggtcgaatgtaccctttctgcagttgcttgtcaacctgcttcttgacctctgtcgcgtcccagaacgaccctaatatatatcctttaaattatgcctagaataattaagatacttgtgaaagccttcaaaaattaagatgtgcatagtt

SEQ ID NO: 43108 - DNA, 453 bp, Oryza sativa
  unsure (1)..(453): unsure at all n locations
ctttgctctcganaaggatcgcctggcgctagctttggatgtccaagctcctgcagcacggccctgcttgttcgtgctgctgccgctgccgacgaggacagcgtgcttgtgtatttgctccgggactctacacttgccctgctagatggcagacaaggacgcacggcgctaacggcaagcctaccagggggaagagcggctgtagctcaccaacaaccattctgagataaaaatatatcttcatccctattcctcaccattcaacctgcttttctctcagtgagctcaccaacaaccattctcagcggtgaggttgctggtcacagaatacgaagagaaggtggaccacacacagacagtgggtgggaagggtttgactgggacgaagagtctagcatcccgagcttctcctgcagcaggaggcacagatgcaagcgctggcgtcggccatac

SEQ ID NO: 43109 - DNA, 340 bp, Oryza sativa
  unsure (1)..(340): unsure at all n locations
agcttactcttaggaggcgaacggtgttttcttagcgtgcctcgaagctgatttctgcagatcatgtgcgttgacacgcctgcaccgtctagatgaactgtcaaaagccccccttgtgctgcggatccaacttggtcgaccgatggtgctcgacacagaaattgaattcttatgatctccaacgcattggctgcatgaatgctatttggaggacgacaaaaacggcgttggatgatcggttctactataccgacgcggattttaccaccccataatacatgctgtgangaatgaacgaactctttcactgtacaaagaaggaactcgatactacctcctg

SEQ ID NO: 43110 - DNA, 334 bp, Oryza sativa
ctataaaactcagcttccgagacgaaagcgatgcgtcctgatctttttgtagttcagatcactatcttctgtagcagattgatctgctgatgacttcttcttgggcaggctagcagctcgttacacgagaatgaatgattgttgatgttactcgcaaatgtaaccaatgatatgattgtggtaagtgttgcatctgtcaacttacaggatgtcgaaacattttttcaaacaaaacttgtgaggaagcagcattttgcacattgtgccccttgtatctcttattctacagatagaccctcctattgacttagagtggaccctctgttcacagcat

SEQ ID NO: 43111 - DNA, 333 bp, Oryza sativa
  unsure (1)..(333): unsure at all n locations
actcaagcttttctctgaatgctntccaacaccagagaactgctttctgaacaataatatttgttggagcggctgacggcatcacaataatattacctccacggcattgtgcattccacattccattangccagccaccgaagcagctccacagaggtggcacaagagggactggaacaacaggagtacagagtcctgnggcctggaccatcagatgtggtggccatcaatgccggcacggtatcccatcttttaaccccacaacgggctgcattgagcactgggtagctggcatgagaggaacactggttcattcaagactacaagggagca

SEQ ID NO: 43112 - DNA, 463 bp, Oryza sativa
  unsure (1)..(463): unsure at all n locations
tgaccaattatgtgaaggcccaatcaagtctaacattgatcgtgtcttgaggctcgcaagattgaactcttagcacaacttgaagaatgtaacgctgagctagatatggagcacaaaaagctagccgatctcccaaagtctattgaagaacagaaagcaagactcanatcggccatcaagcatggtgctgatctaaccaagtctctgaaagttatccctggaaccgatgctcaggatgcccaagccatagaagaagtagagcagattaggcagaaggctatatcggccatccagtgatacttatctcaataatctttatgtaataggacttagaattttgtaatcggctgagacattctgatactttagaaattttgctcacatttcgcactatatttgatatatatatgcccgccctagttttacaatgtcgaaagcatttgataaattacagaacaactaa

SEQ ID NO: 43113 - DNA, 458 bp, Oryza sativa
agcttcttaattgttggtaccaaaaaatgatctgcggatttagtagcatcagctgcaataagggctcgttgtcattatgttaataaaaagtggttcagtggtatgttaacgaattggtcgattactaaaactagactttctcaatttagagacttaagagcagaagaaaagatggaaaaattccaccatctcccaaaaagagatgtggcaatcttgaagagaaaattatctaccttgcaaagatatctcggcgggatcaaatatatgacgaggttgcctgacattgtgatcgtcctcgatcagcaaaaagagtatatagctcttcgggaatgtgccattttggggattcctactatttctttagccgatacaaattgtgacccagatctcgcgaatatatcgattccagccaacgatgacactatgacttcaattcgattgattcttaacaaattagt

SEQ ID NO: 43114 - DNA, 471 bp, Oryza sativa
  unsure (1)..(471): unsure at all n locations
ntntccctgactngctgcatcaaaaactaaatcacaagcttctgataaaaaacgggtggttctagcgagatttgtaatatgagtacctttacgctntgccgagatgtaaggggccattttaggattccatttcttaataccatgaccaaaatgaactcccgcttctatcatctctttcaaattgatgttccaatatcttcttgtcattttttccacacttccttttgattttttcttttttttcatcctacctttccattacgaaatttctttcttttcgaagattaagaaagagccgaaatagcttgaaataaataataattgttccgatggaaccttctacatggtataagcataaccttaatgaattaactaaacttctttttaaattaaaataaaaatagaaaatctaacctcttagcgttctaaggtcaaaaatctagtttaaagtaaaaaatctgctttatgtat

SEQ ID NO: 43115 - DNA, 397 bp, Oryza sativa
agctctacagtcacgggtgtgtggaatatgtaaaaagataacacaaggcgaattcagagaagagagtccccactctggagtatcacggcgattgcatgcataccgatatgcctagcaacctctctgctaaagaatactgaagtatcttggtagggagaaaaagaaaaagataaagatgaagaggagaaatgatacaaaataaaagtactcacactgcaaagaagccaagagaacctgacaagacatgaataaataagaaagaacattccacgcttcatgagtacaaacagagcttaatcaagaagtaactaacttacagcggcaaagatctgcgaatacggatgaggagaactggagaaggtgaagaagaagaagaagtcgatcggcgaggaaagaa

SEQ ID NO: 43116 - DNA, 430 bp, Oryza sativa
aaaccggcgattctattattggatttatccaacgatactaaatcttgaagcatccctagctcattatgaatggaacccgcgatttcatttctaaatagatacaaggatatcaatctttgaagcatccctagctcatgaggaatatgaccagaaaacttattgaagctaaggtctagaaaatacaacgtggacaagtttcccaagctataaggtattgagccggctaatttgtttttgcttatatcgaggacctccaagatgtctagtgtgccaatttctgaatcagatagcccttgtgacaacaaattggaagagagatcaagagaggttagcactgtaagaatacctaacgtgttgggatggatccagaacactattgctggacaaatccaatcaaagaggtcgacagacgacctatgcttgatgggat

SEQ ID NO: 43117 - DNA, 425 bp, Oryza sativa
  unsure (1)..(425): unsure at all n locations
gaaaagcattanaccaaggtactgcgtggggtgagtaattaagtatgctcttagatagatatgtttacgatatgatttttgcaaattgatcttccaacatgaagaaatacagtgcacatggttcctctcttttttaaaaaaaaaaatcttgttctattttttccaataaatcattttcttcatatcatagaaaatgttggttaaaacaaaattcgagcatttaacaattgtcacgggtgaagatgtatctaggatctatggacaggaagaagaccttacaactgcaattcctgcgctcttatttcaaaacagcatgttcaatttcaccatatctattatgtcctgaaccattctctctcttaccacatgaaatgatagcgaactgtaattatatccttcatatcttctcaaaacacctgtcttca

SEQ ID NO: 43118 - DNA, 431 bp, Oryza sativa
gatcaaatgtatttgtttcttagtacacatttaacttccgggttgctgtgaagggtgtattcactgattaagaatgaattttgataatttatgaagcaaataataaagcaatcaaatattgtattatcaggtatttctttctcttgatgttatgagtgttaaagcaatgactgtaatattgatttgcgttattggtctttgcctgaagtgacaattatgaaataaacgtcctgtcaaaatttgtggtttcattttttattcaacttgctaccatgcatctaaggtatgaatcatgaacattagtacttcttgaatggtaaaaactggatacgagttgctgaggaataatatcgtttgatagaacaagaaatttattgttgttgactgtgtcattaaatcaaggtctttttattttcttcacacaaattcta

SEQ ID NO: 43119 - DNA, 489 bp, Oryza sativa
  unsure (1)..(489): unsure at all n locations
ctcgacccggatccttaagcaccgcngctgcagcttggccctggtaaggacagtagctcctgtggtgactgatcaactgcatgcgtacgtctggaccgggtaggtcagggtggtggttgtgaaatggcaaatcctgatacctcctaggccaagctgaatcagtgtccctgtatgcctctatgtatgcagtggagntcatctctctttgatctttcatctgatttgttntatttatacatcattttatcggtcactacagtggaatgcagaagtagcagccacctaccacctgtatatatgggccaatggttttgtcctgaagatatttcagtgcttaattactcggatagttttagttcacttaaaaagttaagacaaacaaatatcgatggctcattaactatatcatcgtctttagggacggacccaagactggcccaaggctcangccagcccatggagaatatggcccaacatgattaatacatg

SEQ ID NO: 43120 - DNA, 456 bp, Oryza sativa
  unsure (1)..(456): unsure at all n locations
ngacactataatcttccttatcactactgattcaccattattgggacactngtgtcaactgtgaagtcactgtacttatgtgaatgactgactgtggcaggaatgagtaatgctctgttctaaacatattatttgccggattaattgttgcctctagttattactcacacttctaaaaatacgatttcttttagttacaacttttcttctacaacatagggatattttacagtacccaccagtgaacagtgaccgttcatttgttttaagctaatgattttgatgtgattactgccacctaagtttggggaagtaggatgccaggacagcagggtagaaaagtatactccctccgtccaaaaaaagacaaaccctgngtttccgtgtctaactttgactgtccgtcttatatgaaatttttttataattcgtatttttatttgtggtagatgataa

SEQ ID NO: 43121 - DNA, 458 bp, Oryza sativa
  unsure (1)..(458): unsure at all n locations
agcttcctagccacagaaatgatgtatgtatcattcatttgcttttcttcatctgtacagaaagtgtaaatttttcaggaaacaagatctgaccagcatgcaccagaagcagatcataatagccaatctagcaatttgtacataacagtggtggtaaaacaatgaatacgcatacaagaacaaaatgcatggagcatgacaatggggtaaatttaaacaggtatgcaccaaaggagtaatttaaaacaggtatactgggtgacaacaataattcaaaaggagacccactagtttatatttccacattaaagactgaggaaaatatgaatcacagggaatgatggaaatttgcaatagcatcagggaaatgaccttnttctcctttggtaacaaggctccaattcacaacccgaggttccacggcaccaagtaaattgaggaagaatatgccacttgaa

SEQ ID NO: 43122 - DNA, 463 bp, Oryza sativa
  unsure (1)..(463): unsure at all n locations
ggatgatgttctccgaccacttgagtcattgcctaacctgcgtagtaaaaagcatatgaaatcagaaaatatattctaaagtgcacgtcttatggacagaaagcataagatctctgcaaagaaagatagtgaacgaatattagaaataaaaattgcaaacaacccgagctgaagagaaanttgtacatcacattacaaaaaacatatggttgcattattcttatgtgtagcacagtatagtaccaagctaacagtcaaaatagtcagcaagaagggtggtaaatcagcagttacatggacttttgccaacatatagactaagcataagctgatctatatatataaagcagcaagcaaacaagctcaaaagagcttgttcaagttattcatgcagattagggaaatcaaccaagacgaacagctgattcaatcaaaacgaacaagttaaaatgctaaagcatta

SEQ ID NO: 43123 - DNA, 471 bp, Oryza sativa
  unsure (1)..(471): unsure at all n locations
agcttcttccagagatttgaagtaatctgtttgcctcgatcagacactattttcttagggacgccatgcaaacacacaatccctgccatgtacaattccgccaaccgacttccagaataagttgtctttactgcgatgaaatgagccactttggtaagtctgtcgactatcacccaaatagagtcatggcctgatgacgttctgggtagaccagtgatgaaatccataccgatttcctcccattttcattcaggaatcttcaaaggctgcaacaaaccggcgggtttctgatgttctgccttgactcgctgacaaacatcacatactactacgtattctgcgatttcacgcttcatacttgcccaccaaaacctttccttgagatcctggtacattntggtactaccagcgtgaatggagtataaagtatcatgagtgttctttagaattgcatcttttacatctttgttg

SEQ ID NO: 43124 - DNA, 374 bp, Oryza sativa
  unsure (1)..(374): unsure at all n locations
tcgagccgatcaatantggatttgatcggaccttcatatatctgatcaagtttggtcttttcttcatgcacaagctgccgattagctcggattgtggcctcaatctctctgtgctcacggcattccgctagtcttagcttatctttttccaccttgaattgatgttgctcgaaactagtggctggagttaggacatctgccaaatcttccggaatcagagcctgaacttcatgcagccgtgacctaattgatccacagtcaaccacccagctatctaaagaagaggcttctagccgatgacagatgtctcaagtgtttttctcacatcatccgatacaggagctagagctttgctccaaagatcttactctgct

SEQ ID NO: 43125 - DNA, 495 bp, Oryza sativa
  unsure (1)..(495): unsure at all n locations
ggatccttaagtcacctgcngcatgcaagcttcacagccagtagagataatatgtgtcctatacttcagaattntccctgatgaagtttttaaggtatgtgttttgccatcaaacgctacaactggatcctcatacaataccttaataagagttcaatggcttcagatagaggtcatactgtattttcaaacacattgaataatgtttaacaatagtgtcaagactacctctatgccgttctccttgtaccattcagcagtctgcctctgcccacctgatccaacacaggtatgaaagccctgcaacaagacgaatctcaagaatttgagtctatatgcctaaatgggtggctttgggctgtacccttaatggttcagtgtgaagcgtacaaatctctcatatcagctaaaagaacactacagaaagtgtaatgccaacaaactggagcagacttcactgaagtccaaataagccatcatacagaanattacagt

SEQ ID NO: 43126 - DNA, 471 bp, Oryza sativa
  unsure (1)..(471): unsure at all n locations
agctngaagcgttccgctggacacctgattgctgacaggcgttcgtcgcgctcaagaaggcgatctccaattaccggattttgccaaggcatcattgtcgaatgtgatgcttctggctccaagatcggcaccattctccaccaaggcaaagaactgctagcgttcttctgccagccgctggcaccgcaacacgctggactggcagcttatgaacgcgagctcatcggtcttgtgcaagccatgcgacagtggcgagcctacctcgagggacgcatgttcactgtgcgaatggaccactacagcctcaagttcctactcgaccggcgcctctccatcgtaccacaacattagcaagctcatgggattcaacttcactgtcgaattttgcctataccgcatcaatgtagtggcagacacactctcgcgccacgaggagaacactacagccgcgctcaacgcggtgaccccacc

SEQ ID NO: 43127 - DNA, 429 bp, Oryza sativa
  unsure (1)..(429): unsure at all n locations
ntacaactntgatatacatctgaggtcacttgaaaattttgaaagattatttctttaaatagatctgagaacttgtaacgcatattacatgtaaataatgtcaaatgaaaaggttgtccactacaaacttgtacatcgcgtcaatatctacaattttgatacatactcgtatatgtgaataagtaatcagatacacatgtatgtcgtacatttatgatacattacagggacactntntatggaataacgtatgtgaagatgtacctcactcacatacatgttttctttacaagcatctatgaatttttatccccacaacatttatgtgctttctttggaagcatctatgatgattagttaggagacgtctggcctcaaccaagcaagttatcacacgcaaattggctttcaactttgtcttgatatcat

SEQ ID NO: 43128 - DNA, 428 bp, Oryza sativa
  unsure (1)..(428): unsure at all n locations
agcttctanggttcttggtctctgcccgattcattgaggccaaccccgagaagatacgggctatagagcggatgcacccccccaggaaacttagggatgtgcaatgcgtcaccggttgcatggccgccctaagtcggttcatatcgaggctgggagagaaggcgttacccttatttaagcttctcaaacgctccggaccgtttacctggacgaaggaagccgaaaatgccctcacccagttgaaggcgtatctaagctctcccccagttctggtcgccccggagccagacgagcccttgttactctacttagcggcgaccccgcaagtagttagtgcggcattggttgtggagcgcgatgagaacaattctcatttcatgcttccctaccctgtgccgacttggcccgggagagagcacggaggagag

SEQ ID NO: 43129 - DNA, 438 bp, Oryza sativa
tatcatctatcaaagttgtgattctgttactccattaattcattttaattaaatctgtataataagatatcacatgactatattctgatcgaaatattctatttttattgttctctgcaataaatgatctttaagtttttcacattattctatttatatatttcaataagtattcgattatcctactcctcggtcgccgacggaggggaaaaatcggtcgctcccccctccccccatgacgcgcgtgcgcacgtgcgccctgtgccccacgatgtgtcactgactacctactacgtgtcttcaccacatactccgttgcaacaaattacccatatattttggaaactctctattaagggaattccgtttatttttcttccaaatacaatgtttcacctagtgcactcacaattgtttactatttttttatcttatatt

SEQ ID NO: 43130 - DNA, 510 bp, Oryza sativa
ctcgacccggatccttaagtcacctgcggcatgcaagcttgcggacgatcggcagcgcaacagatagccagcggcagtgacgaatctcgcggacaaccgtagcatcataaagctcgagtacatatataccccgccctcgacccccatagtgcttatgggaatgcgagctgatggacaatatgctgcaatgttagctgcctacatataactatcgaaattaacgggtttgatgtcaactgatttttctcataccttaattggttccgatttatggacggccggcgtaacaatgtggccaggaagcttgcggacaatgtccacaaaaccacgaggaaatgactgcggatatatgtatggttgatttgggaggaggcataggcagatagaatcatttaaaaaaatgtaaaaccgtgagctggtccttatatatactcactaacaaggaaactaggccgcgttcgatagcgagagatcgaggagatttggtgaattgtgcactgttcagcactg

SEQ ID NO: 43131 - DNA, 460 bp, Oryza sativa
  unsure (1)..(460): unsure at all n locations
tcatccaagaactcatcgcccatctcgacatcgcagtttgtttccttcatcgagttcttgtttccctttatgtcaaaaaagttcttgtttcccttcccatccttcgtgcgagagatttcttatcttctctctctctctctctctctctctctctttcattntctcactcaaaaattatgctctggtactgtaatggggaacttatattcctgattagggtgttcctgcttgtcctgtgcttggacttgctaagatgatcatcctgcctgctagtaactggaaaatcatgacatcatgctgtctctggaaatttataagtacatcttgtttaaaagaaaatcagtgcaggatgtagcatgcattgattgtttagtttccatattgctccatgcagtaatctgaagaatgggaaaaaaagatcgttcaagtagtacatgttntaaggaggaaactacctatt

SEQ ID NO: 43132 - DNA, 431 bp, Oryza sativa
agcttggtgggtcaagatgtatgtcgaagcgtgtctcccatttccttgatcccaaccgggctgttgtggagcagttatcaaccatgaaggccaccccacgagcgtgcatgaatgggttcagggaatccacagactcgatcaaactctcgttgatgatctccgagaaagagtggcccttctttctaaggacttcaatctaaaatcagtgcaaaacagaacatatgaataaacattttataaaccaatgtatataaatgggttctaatttgaaaaaaagaatacaatcatccaacctgtgccatcataagtgcaacatacactccagcagtgaaaggatgtaatgggccaagatcacctgctggccgtgttgaccgcaccctttcacccaccttccacatacgtgtttgatcaatgttgcccatcgggaaagc

SEQ ID NO: 43133 - DNA, 489 bp, Oryza sativa
  unsure (1)..(489): unsure at all n locations
cggacctataaaactcagctttaatgctgatgaggtaaagcaaattacttatgtgcatgggttttnttttttcttttgaccgtatctgatacggtcctctataaaagcaaaagattagcgcgcgttccaattttcttcctttntttttcattcagntcttgcacctgacttgtgaagattgaatcgcaatattcaaaatagtaatagtgcataaacgaatctcaaaatggtgctcttttctctttcacaatgtttggtgcgatggagaagagaatctttatgtactactagcctgtttggcatagcttcagctccacctccatctctcgtaagctggaactcagccaaacagtttcagctccatctaattaaactgagagcggagctaggtaaacctctctcacaaaataaactcctgaaactaaatctagaagctggatgtctggtacaccaaagtacacttaaaatgcatcactctacaagaatata

SEQ ID NO: 43134 - DNA, 457 bp, Oryza sativa
  unsure (1)..(457): unsure at all n locations
cttgtgccccatctctctctctatatatatacatatgtgctaactttgagaagattcctagctcgcaaaagaaacagattcatactctagcagatatgcctagcgttgaatgggattccctgctgcaccttcgatctaaagagtaaagaggtgcttcaattcattcgcttatcctggctgcctagctatgtctcttgcattcttggctacagattttcaaagctatccttttcttcttcatcgncatcttcttcctcctcctatcggagaatcaattttatcgagattaaaagtgaattatccggtctttcgcattatagattaatcttttttataataaaccagctggtgttgtgtacacggtttacgatcgaacacaagacctcacaattaaaactatacacccttatcactgtactattaagtgtgatcttaaatgagtcatatgagattagcc

SEQ ID NO: 43135 - DNA, 466 bp, Oryza sativa
  unsure (1)..(466): unsure at all n locations
agcttaaaagcagtaataaaaaacagtatggcatttatattatgatcctaaaggctttgagatggatccacactatttatgtttctaagtgtacatcttatgcaggcaaaaaagaagcacaaatattaatctcaaagcagtctaaaaaggaaatttaccttggcaagcaaagagaatcattgcatacatttgaaaggtatcctangcttgattaaatgcaggaaagccccaactgcaagcagggaaccacatgggggcgtccttgttggcactgcaaaagaagggttgccgattggaaggaaatctttggcaaaagagatgaggtaagggccagagaagaaattggaggtaccaggaagcgacgccgtgagcacggccttgccagcgtcgacctcattgtccaaacatccaaatagaagctacaatagttggcaacatagtattaaacatttacaataaaagagca

SEQ ID NO: 43136 - DNA, 436 bp, Oryza sativa
  unsure (1)..(436): unsure at all n locations
tagtagttntatgtctgagttgaaatgaaaatagtaataatgtgtgctttnttactatcattttaaatggaaatggaaaatgactgacatagttcttcatgacttatttcgacataaccagtgattttggagtcttaagaacctggacttccagatatccaaatagccctcgatagtagttgataaaacaatttcaaaggtaagtttcttttttgaagggaaggacaaaagctttgccacttttatattgatagagaaagagtaaaaataaattcacaaaacaagggactcagaatatacagggtccggcaaaacagctggcccgcaaaagaagagcaataccgcctactctcttgcagggatgatctctgtgagctttatagctcctgcctgccatgagccaggtccgcgactcctcttttattatggcgatgat

SEQ ID NO: 43137 - DNA, 473 bp, Oryza sativa
  unsure (1)..(473): unsure at all n locations
agctntctatacacactaattaacatatgtcacacaaaaataaaaaaaaattgtagtgcttgtagtactatctatggaacacacactgacacaaaactactgacagcagacacagtggcggaactatgtgtaagatgtgtggtcgattgaccctgcagttnttttcactattacccttactagtcttaaattttccatataaatccatttatatttacataaataaccccactaaaatatcaagtaataataattgactgcagagtaaatttaagccaaaatatacggataggttttgtggggtttgcttcattagagcaggtacaatagcaggctattagctagttataaacatattttaatgagataaacgatgaaagagaagagcagcgggctatagatctgtagccagctgtagcacggtgttaacgaccaaatttggtaatctgagtatcggagatgaagaacgaatc

SEQ ID NO: 43138 - DNA, 364 bp, Oryza sativa
  unsure (1)..(364): unsure at all n locations
tgccctcgccggctccacctnccggatcggcgagacgttttcgctcccgtccaaatccagcttggtgttcgccgccggccgccgcggccgccgggaaagcgcggaggacctgacggactcgaacacgaaaagcgaaaaggaggcgacggtgacngccgcgaccaccttcttgctccagatcacgaggagggcgagcgacaccacgccgacgagcgagacgaaccccagcccaaggccgaacacgcggcccttgggctggcggcggaggacggcctccaccggcggaagttccggtctcggtctctgctgggttggcggcgagaccgagacagcggccgcatgcggcggtgatggtggtggtggt

SEQ ID NO: 43139 - DNA, 470 bp, Oryza sativa
  unsure (1)..(470): unsure at all n locations
agctngcctatgtcttcatcattattattattgatcttatttagnataaaaaagagctgttgtgagtcctccctttcctgtgcatcagagctntgcgtggatctttcgcactaggtaaacctgtattcttattgtgtaaagtagttctcaaggttttgttgctatcatgtgaactaagttttggtgccctttccttgtgctgcgcttaatacttcagttcaatccaccttaacatagctggatgactaatatatatttaacatgtactacctacaggtataccctgaggggactcactttatgattccatggtttgagaggccaatcatttatgatgtccgtgctcctcccaatcttgtggagagtacttctggaagcanggatctccagatggtacgttngcatcttnttaattctatattctcatcgntggaatgtgtgtatacttctcatctaatgatagatatact

SEQ ID NO: 43140 - DNA, 472 bp, Oryza sativa
  unsure (1)..(472): unsure at all n locations
actcaagctgggggaagaaaaancnaccatatcagaaatgcatattatatggnatatgatngaacatataccactattgatctagatgaaggacacagactggcagctatgtaatcagcatggtccacaactataaactgccagtagggcatttattaactgagtgttgctgtcatgacgacatgtggtgtaaaggccaaagcaccttgaaatagccaggcaatatatggaacatgattcagcgattttgaaccgcatagcgccaacaagagaataacaaatactcaaattttaacaaaataaatcgaagcggctaatggatttctatcaagtatcaacccaatcccatcctagtttcctagctgcaagttgctggcagctatgttcctcatcccaagtcaagattgcttgaagctaaaattgaagtaagatcagaacactatgttaatggctaaaaccagctgcacttacc

SEQ ID NO: 43141 - DNA, 437 bp, Oryza sativa
  unsure (1)..(437): unsure at all n locations
agcttaacagtagaatgcaacatccctattactccaacaaaacaaacctagctacctccatcttcttcaactccggtcgtcggcccccgaggaaacccacctccgtcgacttcttcttcaactccggttgccggccctcttcttcttcaactccggccgccaccccccgacacctacatcttcttcttcagctccggctgccatcccctgacatctccatcttcttcttcaacttcggtaagccgtgcctccgcctctccgatggacggcgccatggtgcgacctcaccgctgtcgtcctctgcctcgtccacgaacgcctcccatgcctcgtcgattggcgccgcatggcccgcgtatgccacacctggcgcactgccgtcaagggggagcagagcananactgccggagcgctcggctccatggattctcatatc

SEQ ID NO: 43142 - DNA, 459 bp, Oryza sativa
  unsure (1)..(459): unsure at all n locations
taagatagtgaagaacaatattctattntgtttgggtattgttagggatatatcttttctggttaattatcttggntttccaatacatttaggaagctgactaacaagaattggaaattgttacgggaaagaattgagaaaagcctaagtagctggaaaggtaaacatatgtatgtgggtagaagattggtttatttaactttgtattaataagtctaattatgtttatgattttttttgtttgatattcttagaggagtgcttcaaaagattcattattatagatcaattttcttttggcaacggataaacttaagaaaaaaaatatagacttacaagatgagatgtcatctgtcaaccaaaagaatagggtggactcgggttttataacatagatattcaaaaccaatgtcttctaagtaaatgggtggttaagttaaaatacgaagatggagtatg

SEQ ID NO: 43143 - DNA, 464 bp, Oryza sativa
  unsure (1)..(464): unsure at all n locations
agctnggtccgcacgaagcaggagaagtacatactgaatccgcanaaggtgccgcctggaccaggtcattggttacagttaacacgtactcctacactttgaactcccgcttaactagtttgcacttgacatggagtgttcactgaaatatactataattttctagtcaagtagtactagtttttaaagaacaaaaggttgcttatatttcaagcttcatgtagtagctagtagctcgttttatgtgtatattgtgcttgacgagtaaaattgacttaaggctgtgttcagttccacactaaaattagaagtttaaaaaaattagaacgatttaacggacaagttgaaagtttgtttgtgtagaaaagttcgatgtgacagaaaaattgatagtctaaagaataaaaagttgaaacctaaacagggccttacaaattgtctgtgatacgacacatcgatggtcg

SEQ ID NO: 43144 - DNA, 457 bp, Oryza sativa
taggtcaccagttgctggagctggttccacgtacaggaacctaaccgaacacactacagttacacactggtactagtacgcagtactccattttgaataacgactcgcgacgatcacgtcgaaattccaaacacattaattcacggtagttcgcggccacatgcgagcacgagcaagcgcaaaaaccaattaattagcaagcgcgcccgcccagtactactgctcatatgttcttcccttaataagcaaagcatcccccaccctatccaacgtgctggacgcctggactgctggtgggtcgggtgaatttacggcgtctcacacgcaaatcccacgtactccacggctcgcaccggcatctcacgcgagagccacaagcccaacatctcgcgggacacgcgagagcgatcaggcgctcgcggtggtggcgcaatccgcgcatctgtagcgaaacgag

SEQ ID NO: 43145 - DNA, 389 bp, Oryza sativa
  unsure (1)..(389): unsure at all n locations
agctnggggttntggagagtagtgacgctcagttcgtcgcaatgccgccgccgccgccgctggcgaagctccacctgatgttgagcgagagtacagtgacacgcggcagctccggcagatggcggatcaagtcctcgcacgcgccgccgccgtcgtctatccagttggcgagagccatgtgttccggcatcacgagctccatgtcgagatggccgacggcgagggagcacgaccgcaggagctgcgtggtgtaaggggcgtcgaacaggtcgcgccgcccgaccgccgcgagcttgagtggcccggcgagccggcgaacgctcgccacgccggagcggaaggcgagatgctcctggtagctccggtgccatacgacggtctcgatcccc

SEQ ID NO: 43146 - DNA, 460 bp, Oryza sativa
  unsure (1)..(460): unsure at all n locations
ntatcttccttatcttgtcgggcttgaaagtatatggtggtatcctccatacatggagctttctcttatttgtaatacccaaaaattcaccagagctacttgcaacaatcatttccggtttacgggtctgtttaaatcgaagcaaacaacacattgatgtaagttttaatagaaaaccttaccacagatactacagcacaatattattgttatatttctaattgcaatagcaacattagcagcaaactacatttccaaatggaagctcactattcatagcatgatcaataataaaatatctaaaaacatattgtcgcaggaaaatggttagaaaacgaactgggacaggtaaaatttgtacctcagccagaagactacccacttgacgccctttggtaagtcataaattcgcaactgcccgcgcaatttctcattagatggcttactggtgtcttcaaca

SEQ ID NO: 43147 - DNA, 486 bp, Oryza sativa
  unsure (1)..(486): unsure at all n locations
agtcacctagaggcccgcccgcttcatctgcgcgccggcatgggattttcgtttgacggngcgcggcgcgtgggtgtacgacgcatcgagctcctactcgaagcgctggacgatgatgcacaacgccatcttattctctatcagcgcgagattctggccgatgcatactcgaggtccgcagccaaacgggaggaacgcgctgcggttgttggacgccctgtagatccccttggcgaacctctccggtctgaactcgtgcacgtctctgccccacatttctcggtcgtggtggataatacagcacaagcagttcgaggatcactcctctggggtacacgacgccccccatctccatctccttgtacgtctttcggctgaagacgatcgccggtgggtacaagcgaagaagctcgtataaaaccatggcgacctgaaagcatagatgcagagaccgatatatcgatgtgtgcattaattgttgacact

SEQ ID NO: 43148 - DNA, 374 bp, Oryza sativa
ttcccaggcttggtgttcatcgaatacacccaggggctgggcaccatgattgtcagcatgacagtatgtaagtgcccctggagaggagaatatgctgttttcatttgtaccggagagtagttgacattagtcattagtatcgatcatgaagtgatgagttataaccatcagctgttctctgaaaaggaaaattcatcttgtgcgagagaagctcagaaatgttgacaggagagcgcccgtgactgattggacacgtgcacgaagatactagtagtacatagaagtattattcactctgcttaatatgttggaataagttgtagcgctactatctttacattacactggcacacaacgtcattaacacgcaaaat

SEQ ID NO: 43149 - DNA, 482 bp, Oryza sativa
  unsure (1)..(482): unsure at all n locations
ttaagtcacgccgctgcagctgtatgcctctagcaatattgataattttttcatttcctcgnatcattttgcagtttaaactaaccagcccatggttgttctaaatcttactaaaatatggatatcattgttatcatatcatggattcatcaagaaggtcaaataacttcttttttctagttgcagcgagtgaaacctttgaaatatgcgtccccagacttctgtgaattccagaacattttaggcatatgaaaactcctatattagctgatctgtataggaaaaaacacatagttaatttaaaaggagtaaacaaaccatgttgctcacagaagataaaacactcacgcccatttgggatcaggtgagctgcagtcagcacatattctgttttcactcttgtgcaacagctccttgagctttctcatcttatctgcacgaaagcactgaaacttgagcccatcatacaacanctacacatc

SEQ ID NO: 43150 - DNA, 467 bp, Oryza sativa
  unsure (1)..(467): unsure at all n locations
tcgtggtaccagtcagcctaaggtgcaatggtcgcagtttattctacctgccaactagggttttgcgactgatcactgtggaggggaatgtgtgaaagggtggagaatttcgttttagccctctaattatcccttttgttcctatttatttttttaatttgatgtgcaatgagaaaaaaaaatcgtgtctaaggtctgtttatcacaaccttagatcgattttagatttacgttggattcaaagtttataaattgaattgcagtggttaaatttttgtgtattttttttaaaaatagaaacaatctatactactttaaatgatgttagtggtggcgtccgaatccgtctccaacgtcacaagctaatgtgtggggccataagatctccacacatgaatgcttctgctttgatgttatatgcctaataactaactatattatattgcttatccgntgcaatacatgga

SEQ ID NO: 43151 - DNA, 424 bp, Oryza sativa
aaaagccaacaattctgagagtggacaaacacgcagatatttatagcacagcaaatccatcatcttcctttacttaaactagccaagacaactttcgatgcatcgatcaatatgcaagacttttcagctttgtgaatatcacctaccacatcgtcgaagcacattgttcgtggtatacactgtgaacaaacttacgactgaccacatctggtgtttcctatccccgagtgatatgcacactactcgcagaaaagttgtttacacgctagtgcctttacagaagccgtaaagtgtcccacggcctttacagaaaggccgactactgagtacactccctcgcttacatgcacaaaaaacaaagagaaaaaagggtactagtgctggcctaagactatgcagtaacacaatactgttgcactgcatc

SEQ ID NO: 43152 - DNA, 128 bp, Oryza sativa
  unsure (1)..(128): unsure at all n locations
caaaaacaacngcaggcggacggggagacggacttccatccccaagggcccgggcaggaccagcgacacagaaggcccacacacagggacacccgagcagacgaccagcacacgccgcacaccgagaa

SEQ ID NO: 43153 - DNA, 434 bp, Oryza sativa
  unsure (1)..(434): unsure at all n locations
agcttatctcttacgatgcaggaatggatcagtcagaacatcaccaccggctcgcctcgaccgccgccgactggtgtttccgcctgcacggctggcctattatgccgccgntgttgggcgtctacgtcttcaccgaccggcttgccttcgccgccgccgactggtgtcctcgcctgcacggctggcctattatgccgccgttgttgggcgcctacgtcttcaccgaccggcttgccttcgtcgccgccgaccgatgtcctcgcctgcacggctggcctttatgccgccgttgttgggcgtctacgtcttcaccgaccggcttgccttcgccgccgccgactggtgttttcgcctgcacggctggcctattatgcnncgcgtgttgggcgtctacgtcttcaccgaccggcttgccttcgtctgcgccgactggt

SEQ ID NO: 43154 - DNA, 327 bp, Oryza sativa
  unsure (1)..(327): unsure at all n locations
cccaaccaaacaagagtaagccatgtgtattccgaggggcccgatttcagctggagggggactctgagccacaagtatttctctatgcccttcaagacctcaaacaaagggtggcatgcaaactggttntatattcagaatcctgagcctgctcttcccgagtactcttgtcttcctccggtgtaccaagatacctggaactcgcttccgattggggatgaagcagcccaagccttggagctgatggatcgcatgctaaaactcaaagaacaaggcttacaaggagagcagattactctgcactttatcatatgccgactggcacca

SEQ ID NO: 43155 - DNA, 414 bp, Oryza sativa
  unsure (1)..(414): unsure at all n locations
agcctaagatatagcatagactatttcttttctaattccagcacgtattacacagcaacggttcttttcaccatccattgtcttcccaaagatggcttcccagtactggctgcaatgcgtatctggggataactccttctcgcttttcgagaagatgaaccaccagtataaaatcatcatgcatatgccatctcattcaatttaagacttcagagtctaaccaagtgtaatacatgttctgatgctcaatatccccgagcacggctattcnaatagattggttttactcacactgcagtggatgtacactttaaccgtactccgcgacttgccccacacatgagcctacgtaccaacaaatgatacttgcccatgcgacacctttcaaaacctcacctcggcatacgcgctcca

SEQ ID NO: 43156 - DNA, 430 bp, Oryza sativa
  unsure (1)..(430): unsure at all n locations
tgatcngactttgcagtcggtgatgcctcgagttgtctattgttaccctttttctattttcctgacaactcccaagccaatatggtggcttctattgaagaagaaatgagtgaatccagtgagagaagaacttccaaatgcacagcgaanagacgatgcaaaagctggaggcatcagagtgtgcacttcacctttgcctacaatggtgtggctatatatttggtttggatgtggacagacaatgaaaggaaccatacattagccttaaccttgcctacattatgatgacttgatcgcctgacagataacatcaaaccaaatcgacattgttttcctcccatccacgaaagcaagtaccaaatctattcttatatgctgtaacaggatagaaatctcatctttgtgtacctattctnctaactttntctac

SEQ ID NO: 43157 - DNA, 74 bp, Oryza sativa
  unsure (1)..(74): unsure at all n locations
agccttgaattggacttagagagtgtgacctttcatctttngcgagctcacatccagcatttcggttctttctc

SEQ ID NO: 43158 - DNA, 428 bp, Oryza sativa
aactcaagcttttaaggtgatggcctatggcaagaccttttgcgcaacaagtacttatataggtaacccctctctcacatgtcacacaaaccaggaacattctaattttgggctggcctaatgaaagcaaaagatcaaatttttcagtatggatcttttaaaccctggtatgggatggaaataagattttggaagacacatggttgggcttgcaaccactcaaatatcaatatccttctctgtacaatgtggttcgaaacagacattctactttggcagaggttatgagcacaacaccgttgaatgtttcattccgacgatcaattataggaccaaaagtagttgagtggagtgaattgatttctcgactagctaacataaccttgtcatatgaaaaagattgctttatttggtcgctacataaaaat

SEQ ID NO: 43159 - DNA, 338 bp, Oryza sativa
  unsure (1)..(338): unsure at all n locations
agctanntggctcctatgctgtggcaactcctacgccatctcgccaccaccaaccgatgtaggccgcgcacgccattaatggagtacgagcgcatccacggccccccgctccaacgtcaggtggcctcctccccgcgattaccgtgtgaatttgctctttcttcccggattattcgactttcttcttcttcttggtgtgctcttcttctttcttggcggcctgcacccattctgagaccgagctcatatccgaggtcatggcgcctctcgtcttcgatggctggaactgaaatactaagcatcagcgcccactatcttgcttcgatttggtaattatc

SEQ ID NO: 43160 - DNA, 456 bp, Oryza sativa
tatctcttacgctccaggaatggatcagtcagaacatcatcatcggctcgcctcgaccgccgccgactggtgttttcgcctgcacggctggcctattatgccgccgttgttgggcgtctacgtcttcaccgaccggcttgccttcgccgccgccgactggtgtttccgcctgcacggctggcctattatgccgccgttgttgggcgtctacgtcttcaccgaccggcttgccttcgccgccgccgactggtgtttccgcctgcacggctggcctttatgccgccgttgttgggcgtctacgtcttcaccgaccggcttgccttcgccgctgccgactggtgtttccgcctgcacggctgacctttatgccgccgttgttgggcgtctacgtcttcaccgaccggccgactcgtccgccgccgactggtgcttccgcctgcacggctgacttattat

SEQ ID NO: 43161 - DNA, 459 bp, Oryza sativa
  unsure (1)..(459): unsure at all n locations
agcttatgtttcatcgctagagaattaattcttgaacttggattttaaaacaaaaaaaactaaaacttctagtgcttcagaaccaattntgcctaatttctacccttgatagcaaatgtcaggcttccctttttactcttttgataagattttgttgctcattgctgttcttccatcaattttgggacttcttgtcagatctttgttatgatccaactattttttatgtcttttgcaggtgttcagtagggcctagccatcaatttgtatgtaattctgttgtggtgactacttttaaatctttcaggggctatatatgagcaagtgttatcttgagaattaatgtcaaaagaccaagatgctttcgagaggaacttctatcaactcaaagccttgtacatggatacacggtttgtgtcttcttgaatactttctgggactgtgcaatgtcaagaactc

SEQ ID NO: 43162 - DNA, 474 bp, Oryza sativa
  unsure (1)..(474): unsure at all n locations
actcaagctggttactntatntacttacctttatactctgattntctatttttattcaaactaatcaaaaaacttgtgctattaattggataaaggtcttaactccctcctttcacttgtctttagatgccgcgttacaagcctgagtacctgtttggtgttgagggttttgtccaggagttgcgttcgatgtcctttgtcattggatttgggactgcccctttttatgcccagattcctcatgatcgtcatgaagagaagtgccgagtcaaagtcaccttgaacagtaatagtgaagatatccccttagtgatgtttgaagctggaggaagaaactacatccatgcatgtcangaggtggcaaggatcgccatatgagagctccgtgatcgctacagtgatcaattggccgacactgagtatcgctaccatcctcgtcaaccccagggaagtgaccgtggcagctatcttgag

SEQ ID NO: 43163 - DNA, 51 bp, Oryza sativa
  unsure (1)..(51): unsure at all n locations
agctngcgcctctgtccttagccctcgatgatatggaggggaggggagggg

SEQ ID NO: 43164 - DNA, 468 bp, Oryza sativa
cttcctgtagtagactgaattccttaaccgaagatagcaggtaattctactattgacgactctataactcctatcgggtgattccgagatgctgcatctgataatgattataagccgatgacgtctatgccgattaccaaatttgactggtaacacccattagccctaccacagtttgctgggctgggctgagccgggccacaccaaaagcatttatccccgtggatcaagtgcaagacaagagtaaacaaggcacagcattaatacaaataataagtgctatgataagtaaataaaatataggcaaatcggcttgatccatgccaacatttctactgtggtaccactgcatgcatgaattgttatgtactacttctatatatggactatgtagcatgcagcaagacagaatgttccaaatttcaaagcagctaattaaactactgcttagtaacaaattaagcccta

SEQ ID NO: 43165 - DNA, 445 bp, Oryza sativa
  unsure (1)..(445): unsure at all n locations
acccggatcttaagcaccgcggctgcgctttactagagggatgattgtttattcgaattctccatcattatttattgggacaattatgtttctacccctactttgatgtccaatattgattntacccctacttttagggttttcattttttacggaagtgagtaggaccatacttagtgcggtgaagaattggacagaaaaggacacgatgaatctttaaattattgattgacccttgtacccctaggaaatatccatgtactacttgtggacctccaggatcaggctctcggcgtcgactcttcccctctcgaacccgaatccccattgtgaaacaacggcagcagtaatgaccgcgggtaggtggtggcggcagcttacgcatcgcgaggaagccttggcaggtatgaggacaatggtggcggcttgacgcaagtatgtggtg

SEQ ID NO: 43166 - DNA, 405 bp, Oryza sativa
gctcccgctgaacctacgacgccaggggaatgcacatttcgatgtgcaaatgccatctgcgatcactgtactgactatcctacataagctggctatgttcgaccgatgtactgtccatcgaaccatgctgcaatcttgatgataatatttggcacctttcacttggtctttcatactccaacgactggtgagctgactaactaacgtggacatatgctagcccttatggtgggcaagagatctgcactacatgcctgccgatccactatgccgcttgcgcagatattgtgataggcttatattatctgctaacccacactgtttataatcactgactgtgagcgggacaacaacgctgaaaatgactcattctaatagtgggatgatgaaatactcaagattctt

SEQ ID NO: 43167 - DNA, 462 bp, Oryza sativa
  unsure (1)..(462): unsure at all n locations
ntaagaaaaacattattttgttactccgacacaagattttctatttcactagtattagcaatgggatcattatgcatgaaatttatggccagtaacacgagggaaaaatattttgcgatattttgccttcggggtataatttcgtgacttatataacattcggtcaaaacacatgagtattaacatttgaggaaaacaaacgtattaatttttccctccgaccaaaaatttaatttcattagtacaagtactgggatttgcacacggaatttgtgacataacatgaggacgaaatatttcgtgatatttttccttctgtgagttataacacggttcaacccttataagaacagggagagagaacacggtaccttcaccgcccaattntggatgctgcatttacgccccgagaatccatggtatggtccatttatgccccgcttatccaaccgatggcccatg

SEQ ID NO: 43168 - DNA, 458 bp, Oryza sativa
  unsure (1)..(458): unsure at all n locations
cggaccntaagcacctgagcatgcaagctgcatcgacaggcagctatctatttctcnnctccttctctttcttctttctttctatctgtcgcggccccctctcacatgtcaggttatcttttctcctcatcctctccggatgagttcactcttgctcgaaatacctcatgttgttgtgctgaaagcggcgaacggggaaaccttggtggtggtggtggccggcgaggaggatggccgcagcggcattgactgtggcgggtactacaatgccgggatggactccggcaagtacgtgcacgtacaccccggatcatgtggaggcgctggagcgggtgtacgcctagtgccccacacccagcttttgtcgtcgccagcagttgccaacatcgagcccacacagaagatcaacgtctggttcccaaaacagaaagtgagcaaaagcatgcacggatatacta

SEQ ID NO: 43169 - DNA, 466 bp, Oryza sativa
tcaggtccatcctatggcagagtcgtgcatgcaggcatttatgtctttctggaatgcactacgttgcttatgtggattcgatcgaaggaagggatttctcttcccattatatagataagatgcgcaccgtcaccacatgcacacacatcatactcacacactcatgactatgttcttttttaacataccgtaaaagagacggagacaaacaacaacaatttacttaaacttctgcaggctactatatctgcaaataatttgttatatatttatcgataaattttttaaaaaaatttgacatatgtaattgttatgtagtgtagttacattgtaacttgtatgtaattacaatgtaacttttacatcattttaaatcgttagattcgtttcaagattcgtgcaagccgaaaaattacagtgcatgcacatgtgagaggattcactcctatgatgtccagtttatgga

SEQ ID NO: 43170 - DNA, 408 bp, Oryza sativa
  unsure (1)..(408): unsure at all n locations
ccggaccttaagcaccgcggctgcagctgcggtaaagagcattattgtcttctgactgcttgngcagntgtgctcgatatataggccgacaaaaactatctgtgaaatcttcattctttggctaggtcagtgtcactgtccatcatcaggaaacctattaccagtaattaatactgtcacagtatatgactgaatgattcttactccctccgttcaatataaaacactcaaccaacggacaacgaatctagctagataacgagtcttttttttacggagggagtaaaagaaaaatacagtaagaattatctctgctgcctcacccgcggatgatgaccacgatcatgacgatgggaactgtgacctgtacctcttcctggtgtattttctaagaatgcatggtgggag

SEQ ID NO: 43171 - DNA, 463 bp, Oryza sativa
  unsure (1)..(463): unsure at all n locations
tgtggtttctgaagaatcctgtaaaatcaggcgatgcatgattcctgacgagcgacctagctgtaaacagtcagtcttttttctctgaaagttcattatattcctatgcatccttcttggaagcaaaattgagaatttttagtacttatcttctcttttcccgtagtgttttcttttctcaccaaccctcatgacttttcgatcgaagtaaaattcgtcgggcgactttagattctctcccggtaatgtttgatgtttccatcacgtgtaaacctgacactgatatatctacaaaatcttgaattcagttcctcaaatccaatattctttgcatcttagaatttttattgctcccccatgtgtcatcacatcgagattctagggcatacatctcacctggaaatgtcccattntgatttctcagttttgttggattccaatgattaaaatatcctgctctgtc

SEQ ID NO: 43172 - DNA, 453 bp, Oryza sativa
  unsure (1)..(453): unsure at all n locations
agcccgaaatgagctcactgtgttgtaatcattgcattggcggtgctcatttatactagaagaatatcccatcattccacttgctctgcattttgtaatttttttggtgagattgtattccactagctcatctctagtgagaaaggattaaaggcaagagttatatgctcgttctcggtggtcatagtccaacatgggcaccactgtttaggcagttctagaattctagcagagcaagttaaaccgatttgaagggcaatcaaattatgaaagcattaagctagtgttcttcataccaacattcgtcttgtaagtgcaataaattcttaatcagcttcatcaccttgaggagagtgcaatatattcttgtacaaaatgtacagggtgatgtcttacatgtagcntatcttacgctatcttcatgacctttatgctaaggtttatcatatatgt

SEQ ID NO: 43173 - DNA, 402 bp, Oryza sativa
  unsure (1)..(402): unsure at all n locations
tcaactntgtggaagcgacaagaactgaactatattttgaatattaatcgcgcgtgcggaactaataaccagaactatcgcaatatttatagcactcctgctatagctgaatcctaatcgcagaacaggctagctctcccgtatgtcatattatcatgtgcgaaatgacacttgacatatacataagacacgaatacctatctggtcataatttgagtaataataaactctactaatgcatgcacacacttcgtttgtctgatggctagaggtgctcaaatatgcatgtacttagcacttaattcttattagcgtgctggtccttgcggtgactataaaacaaaggagtaaaatcgtctaaccggtccacaaaatgcacaaatcatgactctcatatccaat

SEQ ID NO: 43174 - DNA, 474 bp, Oryza sativa
  unsure (1)..(474): unsure at all n locations
agctntagaatagcgagcaacaatatattcttctcaaacagaaagtcttgtttaaagcgaagctagcgtcaactgatcggatttcttgtgatggaactagctcgtcagggtttaacactgttactcgcatctatgactaattatcctttcggtggtaagcccatgttgacttccttaatgccaaaatatgcaagctcggtctttcaggaattgctcatatggataaggcgtacgtgtgtacttatcacaaggcatgagtttagacaatgtttctagaaaaaagaaagcttgttattaattaaaaaaaatcagacataaagccaattcgaccttgntccttctgtccagtgacgtgtatccagcgtgtcagcctcgtccggcttcatccacttgcgtcccatttttctcgccctcggcgctagttcacgacccatatgctgtgcgtcgcgtgttcgtccaccacaccaccactca

SEQ ID NO: 43175 - DNA, 478 bp, Oryza sativa
gacctataaaactcagcttgagatgggaaaatatatccttctgggatgatatttttttatgggaaacaccacttaagactcaatttccatatatattcagtgtatgtgctgatgataacaaaactactcaccagatgtatgttgaaggggagtggaaaatctctttgagaagaactttaggtgaaggggagttagaagagtggggtcaattacatgctttattgcagaacatcgaattgaattcacgaaaagattccatgtgttggaatttaaacaaaactgggatgttttctacaaaatccctgtatcgagaaataagttttggggggattaaagactacatcttacaagagctgtggaggtgtcatattcccctcaaagttaaagtggttttctggcttatgctaaaaggaaaaattcaaacacgtcatcatgtaaagaagatgaaatggaaggggagtccaactgtaactctggg

SEQ ID NO: 43176 - DNA, 428 bp, Oryza sativa
agcttacgctagcgacacaaacaaacttttccttatggccggctgccatccaaacggcaagagagcaatctgactgacgaggcccaactcgagttttcacgcatgacagagtccaacaggctcagcccatgtagcacaacattgagccgtaatcttcttcctttgtttcttggtccacgtacatattcagcaagcttttgcacatgaacatgcatcctcttctttcccagaagcgtactgcatgcatgcacttgggatccatctaatcttcccttttgaattttgattatcaccagccactacaactagaaaaaacattttttgcatatgactgaaaacggtctcttctcaggcggaccaaaaacattattgtaggcaaaggccttcttatcgccgattttcgcaggtgaacgggagcacggcacgcc

SEQ ID NO: 43177 - DNA, 420 bp, Oryza sativa
  unsure (1)..(420): unsure at all n locations
ntccataatatcgaanatacatcatatgtttatcacattttgaaaatccccaagttggaagaagctgctaactgatctgtcgattttagcttcttctgccctctcttaagtggcagcaggctcggctagaaaaaatccatttgatacgaaagcatcgatcttagcttcttctactctcttaagtggaagcaggctcggcaagcagaaatccatttgatacgaaagcaaagtccattttgggacgattgaagcttggagtttgtatagagatgtttgtttccttgtttggaggggttttttttcaatgtgattagaattccttgttctagttggattcgtggctatgggcaaccatatttttagatataaatatatgaggggttcaaaatagcaagtaggagactcttatgagagaaaagt

SEQ ID NO: 43178 - DNA, 371 bp, Oryza sativa
  unsure (1)..(371): unsure at all n locations
ctgtanggaggcccctacgctatattaaatttcaaaaggaaaagtttaattacaaaagtttctttttttttcctgctcactggattttccatgtcacctattttaatcttaggagcatgcattagcatctttcacttangtccttggtgatgtgcaaaactgtttcacctgtggcctacctttattaagcatactttagttggttggtaattgtgctcctcttttcttttttcttttcaaccaagggtttaactttcaatatgtgttatttatttactggaagacccgaaggattaaaaacaataaaattgccataaataaaatgaaaccatattacatgatcaaggtaattatataaatcatttattatt

SEQ ID NO: 43179 - DNA, 437 bp, Oryza sativa
tgttcttgacagaaaaatatactttattgctgttcttttatgtatatataaaataaaatgactttctgtcattaaaactaaaatgcagttggccaagtacaaataaaatgtcaataacaataacatgctgagaaattcctgacctacaattttgtctgttgaatgtgttgttcttgaacccaccagtgtttggccaatgatgcatctatgcctctatctgagttccttatttggttgagactttttctgaaaggaaactaactatagctgaggccttatatctttgatcttttaacttcgtcaccacttttctttcttgaaaattacttagttggatgatgttgacaaatcatccctgtgtattcttgtgtatgcctgtgaaagtatttatcctcactctgatattgtgtcttcttggttgtaggcgaatttaatac

SEQ ID NO: 43180 - DNA, 471 bp, Oryza sativa
  unsure (1)..(471): unsure at all n locations
agcnttgccaacaatggtgcgtgctgcagtatggtttccgcatatcccagaatgtatgtctttcagcaattgtctcccttcctctaaagatacgcagcgttgcagaattcctgaagggcttttcttgtataactcagattcgtgcataacataaagtttgctccgccttgaaatccgctcggcttcatctttatcttgagggagctcttgagaagttaaaaatcgtatgaagggctctcgccagtcggcttcaaccatagcgacatcatgggtgcccgtaacttgagtggcatctttgtgaggtaccgtcggcgtataaaggtgttcgacaaaaacatcagagggcgctgcctcgcgcttggatccgaagttcgcaagtctatcggcggcttcattgttgtgtcgaagaacatgactgagctcaagtccatcgaacttatcctccagtttgcgtacctcttgtcgatatgc

SEQ ID NO: 43181 - DNA, 468 bp, Oryza sativa
  unsure (1)..(468): unsure at all n locations
ctagtatgcaatgtcgatcaagaagctctgatgttntctgagagtttcaataaggtccaccaattntatatatggattattctgatcatcaatcaaccaagaaagcagagtgagatcaaggattggcaaggcgctcctctgacacatcagcaagggtcataaggttgcacctgagaacgttctcgatgaaatagcatatgtcgtctttggtgttcccatctggaatatccactacaaatgattcgaccaccaatgttccaagttggccatcgatgacctcagagtggatggttaggatggatgagtaattctattataaagacaaaaattatatattatcagtttcacaacaactaaagatctttcataaaaggataaaatcattatgttccccacaacatggcatggntccttatttgcctctcattctctcaatgaaaagtcagtctagagccaacatattagtga

SEQ ID NO: 43182 - DNA, 462 bp, Oryza sativa
  unsure (1)..(462): unsure at all n locations
agcttagagaacgatacatcttatctatgttgattngancattaccgtgaagaggaagttgtagccgagctcgatgacgcgttgctggagggagagcttggtccacacgagctcgacgtatgcctcgctcatgaagttgttggccgagctgaggttcatggtgttcaccttgaggtggtagcagtgagggtgcacagcgcggcagtggtggaacgcggcggtgtcgaccgcgaccaccaggacgtggtcgaggaggtgggcgatcttctcgccggcggcgaagctctctctgaagaggaccaggagggagtttggccgcgcgaacgcctcgtttaccgacgtgatgatcaccgtcctgttgtccgttgcctcctctggcagaagctcagcttaatctgcacaacttgactggaatattgaaatccacattaacggtgtcgattggagatgaaaaaacgatat

SEQ ID NO: 43183 - DNA, 294 bp, Oryza sativa
cagggagaaaaaaacgagaacacactccacaccgccggagaagaattaaccgctgttgggcaccggaaattaaaagagctcaccatttcacccggcgccctatatctaaggagggcacacctaggataaaaaactaagagacttaggataaaaaaatcaagaaaaaatttgggcacctactacactatcatcaataattaaggcgttattcaaactaagggggacatcttcccagttcctgatgggattttgctgacgatatgacaatcacggaatcccatcgcatacttctca

SEQ ID NO: 43184 - DNA, 416 bp, Oryza sativa
  unsure (1)..(416): unsure at all n locations
agcttctgagcaacaagctcaccaacattttctttagcatggactctgcaagcaccgagcagtgaaccccaaattgatggagttgactcaaatggcatattttctatcaaatttaaagctttctctagtcgtccagaacgtccaagaagatcaataatgcatccatagtgtccagtgtggagaagtgcactttgctctttgaccacagtatcaaatatatcaaggccctcatcaaccagcccaccatggctacaaccagataaaacagccaacaaagtcacactgtcaggcttcacctctttatgcaaatctttgaagagactaataacttcatgccccaatccatgccttccatatacnataagcattgcattccaactgacgactgatctctctagcatgttgtcaaatactct

SEQ ID NO: 43185 - DNA, 504 bp, Oryza sativa
  unsure (1)..(504): unsure at all n locations
ttacggaactataaaactaagcttaggcccattcgatctgatcaccaattacaatatttctggtgctgcgccctgggtcgttggaggcttgatgcangactgaattgccgtgcggacgtcatatatccttttttttttttaagaattacacagtacaacatatacactcacaatgcacgcacactcatccctattaacacacgcatgcaaaccctacccctatgagcatcttcgaagactgggccggcaaatccatcctggagattgacgaagtcaccacaggcacctcactgtcgacgggtacgtcgcctatcactgaaaacacaaagccattaaatcctgaaaaattcactcccataaagacactagtaaaaaacctctataggtgccggttgggaactggctatatgtaccagtttcacagccagcacctattggtcacanctttgctcatattattggtccagttctaaaccggccctatttattaaaaaataaaaaaga

SEQ ID NO: 43186 - DNA, 360 bp, Oryza sativa
  unsure (1)..(360): unsure at all n locations
agctntatgtatgctcaacgcgtagcagtttgtcttaacttatgccctatcttttatatgattatgctgctctctccaggtattcaaggctccagggtgtggctaacctaactctacatttccctgagaactttggatgtgacacaactaagatatattacattgggttgcgtggtgaagctactcacgtaccaaagccttgcttatttagcttaaaaaggcaattggatatcgtgctgatgctatgatttcaaaattctgccaattgcagaacaaaagggatgttgtggccacaattgtgtatgaaataatgcctaatccatctgatcacaagtcaatgattatgatatgaaactactc

SEQ ID NO: 43187 - DNA, 327 bp, Oryza sativa
agaatatgaatctatttgcttctgaaaaacaccgacttgactaaaccagtatatctaaacttacgtcgagtttagatccacactcttttttatctaaacttccaacttttccatcacatccaaactttctatacacacaaacttttaacttttcccgtacatcgatccaactttaacccaactttcaattatagcgtgaactatacacatccttatctagagaggcccttattaaccttgcatacgtataaatttaacgacacatcttctatctcggtcaatatgataattgtgtcgcattggtcaaaagcatcctccacttcttct

SEQ ID NO: 43188 - DNA, 408 bp, Oryza sativa
  unsure (1)..(408): unsure at all n locations
gcttcctggactggaagttctcttttttgttttgggatcgctagatcgacttccttgatcgctacttatgggcgtgcgctcaaaggatacaaacacggattctcaaacaaaaaggggaattcgtagtcactttttcctgtcgcgtaaaaaaaaggctttacgccaaaacaatataggttgggatacatctatctcttctgagcaacctcttttggatgcttaagaccacccttgcagtaggataccgnctgctttgggttctttattatattatctccttcgagggattcttaggatcattcaagctatatttagtctattttggcttttactgtctccttttctcatggaagtcggtaaggacctcagaagatagaagagagcgccaggcgcaaatttccggaatac

SEQ ID NO: 43189 - DNA, 410 bp, Oryza sativa
tacatactcactatcataaggcttcgacaagcgtgtatgcgtcattgagcataaagataagaacggacagatgccaaccgctattgctaacgtaaacactactatgccaatccaatatcatgatcctcaccaacttggatatggttctcttgcaataatcgcgagttgcagagattataaccatgagaagcaacatcccttctaagaaatcacaaacctatgaaaccacaagatagaagactaccacacgctcgccatatgcattctttgctacttttcactcaatgagtcattcaaattttccgaccacatattctatatgtctattcatatggcctcgttgctaagtgcttcaagatctattgcactcgaactcgaggtattggactctaatcctttattatggaaca

SEQ ID NO: 43190 - DNA, 409 bp, Oryza sativa
agcttatttataaaccgttgtgcacggttgtattgataaaggttagagatggaaagtactctctaaaatattttgcattccggaaaacggttattactattttgataaggaatttcaatgctagctagaatgataagtaatctaaaacgaaaggagctaatagtaccagtttggcggcgatgttgggaggggcgatgtatcggttgccctggctgaggatggtagggctcatgccgccgccgatggcgtacatgagccagtgcgtgtagtcgttgttgacgacgtggaagaacccccaccggcatcgcggcatccgctgcacgagcccacggccgaagtggttgaacgccacggtgatctgcatcaccttatcctgcgggtagggggtgataatggatcaagatccatg

SEQ ID NO: 43191 - DNA, 462 bp, Oryza sativa
  unsure (1)..(462): unsure at all n locations
taagcttaaagaccgctntttggtggagtgagtggagcaaagaggcatcttcaaatcaggtatacccncacacaagccttcattcccttcaattgcagtgtcatttatattgagaaatatcccatcattaggaactggcccttcaaaatggttgaatgagaggttcaaactagctaggccgttcatgcttgctagaaattgaggaatgtctccagaaaagttgttgtgtgaaagatcaagtacttgaagacctttcagccgactcactgatgctgggattggcccttgaaggaagttcccctgtatcttaaaatattgcaggctttgacaatcaccaatagatggaggaatttcaccagaaatttggttattagagaaatcgatgtctgcaatattnttcaagttactgatttccaatggtagtgacccactgaacatgttgctttggaagtacatgaaatc

SEQ ID NO: 43192 - DNA, 412 bp, Oryza sativa
agcttattcatctatttggtggtgatatgtaatttgtatatgcgctacaaatttactgttatatttaacattaacacttttttggttccgagtatcggtagtaaaccgcctttccttgttcctatgttctctagacaagtggcctgggatgactacaaactacagggttcacttgacaaggcattattggactagtgattgcttcactgcactgccaataccgaatatttttttgtttgtgtcaagcatttttctttctgtgttaatgtgcaaacataaagattaaaagtaaaactcacaacatctcatggatgcttaaatgagcaagcgttaagtcataccatgttatatctatcactggtcagtgtactttgtttgctaaggcatactagtgattgcctctcagcactga

SEQ ID NO: 43193 - DNA, 307 bp, Oryza sativa
ggggcaatctgctcatatcgagctggttagactcgatctgttctattcggtcaaaccctagctcaccattctccaccagcaccgacgcccacgccgtcgactccgccgccactgctcttctcgccatccccgacaaacagcgccgggatgcaagggtgaaccgtgctgtgtgtgtatctatcctccggtgatgtctacaccgccgtcacaaggggtggtggcatgcgcgccatggccggagaacccgaaatggttgccaaaacggtaagttttatttccgctgcctttgattcggacgggatgaatg

SEQ ID NO: 43194 - DNA, 340 bp, Oryza sativa
cgaagatatacacaatcacccactgcgaatctcaagtcacggcgacggttatctgcataacttttctgccgggactgtgcgcccctttatatcaatccgaaagatactgactttagcttcagcttctcttaagatatcagacccgaacacttggctctcttcaacttggacccacaatagcggagtccggcatttacgcccgaacaacgcttcataaagggccatttgtatgctggcttgatagctgccattgtacgagaactcggcataagggagaactctattccacgcctccccgaaatctatgacacatgcgcgaaacatatcctctaggagctga

SEQ ID NO: 43195 - DNA, 411 bp, Oryza sativa
  unsure (1)..(411): unsure at all n locations
ctatatagctgccccgctgactatattatatagtcatggtgttgttcgcgntcttaagcaatggattggatacaatatcatngctttntgccacgtaagtgtgcatttttattgaccaataatatggcttacgctgattatatattcgtggtcattatccacgccggttggtacatcctctatgagtttatttactcatattttatacctcatatgccatatattgccaggtgtggtggaaccatgtgtcttctatggacttaagcacatctgttaatagcagtgtgcgcatggcgtatgcccaatactatggaaaattctttattcacaacttacaagcttctttatagctatattgctatgtgaatttcaatgatgtagcccactttagttacactcatatattttaca

SEQ ID NO: 43196 - DNA, 391 bp, Oryza sativa
  unsure (1)..(391): unsure at all n locations
agcttatcagtgccgccttttctttttattatttggcaggccgtagttggaaggcttccgagttacgcctaaaatcctgggatgaccttcagaagctatggtatgtccttctgaaggaaaagaacatgcttatgagtcagcgccagatgctacattcagagaatatgcgttttccaaaccctgaacgtgtttccaaagtattgcacggccatcttaacaccctgcctcatgcaagtaactgagactatntaaagtctcagttttgtgtaactaagtcaatacgggacaaaatctggaaaaattggtaactatccaataactatatcatgccttttggggataatatcctggttattccggggatgggaatctaacgaccacatgttttttg

SEQ ID NO: 43197 - DNA, 393 bp, Oryza sativa
ggggctgcgttcttcccaccctcaacagagttgacggaatactgagcgatccattagcacatgattaattaagtatctgctaattcttttcaaaaatggactaatatgatttctttaagcaactctcgtatagaaactttttgcagataaatgcaccgtttagtattttgaacagcgtgctaacggaaaacgaggagaatctaatcctactagcctgaaaagaacgcatccttgagaggagaaaagaattcaaattgatgctgacggaagatgaacaaatgcaagtaggcactcatcatcagacactaaaactgaaagatatacctgctccaaacacttatttttctgacatgtaactctgatggagaaagtaacacacactcctctccaaat

SEQ ID NO: 43198 - DNA, 412 bp, Oryza sativa
agcttgttcagcaaccaagcccaactattatttaagagtcgtttatacaaacttctactttatacgaatggaaattagttaggttaagtagtgaactcaccagttcctgatagacgacggcatcacttttgttctcaaatgtgacagagccgtccgggttgaccttaccccttgcccgcgcccagttgcgagctctttgtttagggatgtctgaaaacggagcagggacattcgctgctgcagcggctgcatcttcttgggcccatattgcctccttgccgatgtaccctacggtgcccagccgatgtgggtgctcattccgctgttgcagtaggcgatgtgcctcgcttgattccctaaactcttgggtgttcttgagagagcagaattcctcccacaccgtctcggttat

SEQ ID NO: 43199 - DNA, 446 bp, Oryza sativa
  unsure (1)..(446): unsure at all n locations
tagctacaaantaagtcaatgacaagcacgcccatttgtattaaaaatatgcctgcgacaaagnttatagaccgaaagacacaagaggtttatgtgttataaatctatacattcagaatgtggctctgctcctaaaacatcttcacaaattgacactactgttgatttgcgctgggtaagacttatttgggattcatattacatgacaaaagttccctaattaattttccacctatctgacatatacagagccatatcacaatgcacaatctagtctaggactactgttttgttctgggatgatctttggaatgggaaaaatcagaaagtataagtttccaggtcttttctatcatacaactgtcagatgggagttggtgtgtttttataataatgtgcatcttgaagattgtttcaacctttcacttgaaccacattgttatata

SEQ ID NO: 43200 - DNA, 412 bp, Oryza sativa
  unsure (1)..(412): unsure at all n locations
agcttcccagntgagcttagcattgtctgtngatgtgcgatatctgcttgaagaatacaggacacatggtcgagctgaattttatgtcctccttcatccagcccatagctatcctgtccagggtgcccaacgaggagtactgatatgaccattcactgccaccaggttggtctacccatgtgagagtgaagttgtaacctacaatttgaacaattcagttagaaaatgtaattggttccttacacgtgatatgatatttacaaatcaaatgttctaacagtatggtaaaagggatcgaagttataaatcctgaactgaaaacattggtgacatgaccctcaggttatgcacccaaacatgtaacatgtaagtacactgtatgctggtatacaatacgagttctgctacaaac

SEQ ID NO: 43201 - DNA, 390 bp, Oryza sativa
  unsure (1)..(390): unsure at all n locations
ctaagctancccaacctacgngcaccttggagcctagttantttatgttgccgcattacagacttgttcttttatatgcaatggtctatgatatctaaacgtctatcttgacttcttatcatagatttcattaggatggcggagttccacctccaaaggcttgtcttatggacatacgttaagcgtagaatatctttatcacagaatctcggtgagacatgcatgttatacactctataaacagagtcgatctataacaacggatgaaatatatgtgaaatcaaataaccgggatgaaaaagatgttcacccacacgcactttcttatattatatcttatattgacaacatagtttgatgtacaggatgctcactcaaacatctctttgt

SEQ ID NO: 43202 - DNA, 409 bp, Oryza sativa
agcttggtgtttacacccaaatttgtcttctatgattaaaatacgaaagattgccaaaatttggaaatctaccggtttcctccgagtgggccggcctgaccgacatgtgttatgcggtcagaccgccggttgtaggccgatcagaccggcgggtccgagtccgaccctgtttcgtcgggtctcgaggtttccttgctcgggaaggtatgtttcgggtttcctttggattctaccccgagttggacgtggaggagggcctgtagaaggcaagaccaacccatatataagggacaaggccggttcattgtaaaaaacaatctactatcaatcaatcgaatcgttcttttcatattgcttttagatttctcttagtttggccatctttgtcgggttgcgccgtaaaccgtcc

SEQ ID NO: 43203 - DNA, 412 bp, Oryza sativa
ctgctgggttaattagattgcagttatgacgctgacgcgttaatcatcttgggtgacgttaccagctgaggtatgtgatctacatcttgcggtccaagtttcaaaagcctcgctcgatcttgagctcttgatcaattagctcttgctggcagctctaaatcaacgagcacaagcttgttggctatagctcttaactaccctcctggcgagcaaaatatatctaatcttagccgtttagtgataaaaatcctttcaaaagtagtagatgtatatcctcaatcaagaaaaagtaacgaatattaacccacaatcaatgccaatcgatcgatttgtaggcacgcacaaacagatacttcgctctaagtagtaggagaatcttctagtataaggcgtggagctagcatggaacaat

SEQ ID NO: 43204 - DNA, 348 bp, Oryza sativa
  unsure (1)..(348): unsure at all n locations
agctntaatccaaaaacatatgtatttaattgcagggcttaatatatattttggtttggcttattctatcggtggntactgatataccgaaatttttataattttaaacaaatgttggtcaaatttgaacaaaatattaccaaattaaaaaaattaaaaattttggccgaaataatatcgtatcggggggtccgaaatttcgaaaatttcattccggaatttctaacactggttaaatgccaagtatcgaaacgtgtgttgttttctgaaacttgaaggtacttacgttatgtgaaatttacaaatcgaatgagaagattagtggacgtacgtggctggcgagcatgt

SEQ ID NO: 43205 - DNA, 390 bp, Oryza sativa
tcgcagaaccctcatcgacggtggcagtgcactcaatatcctcttcgccaagaccttggatgatatgcagattcctcgctccgagctaaaaccaagcaatgcgccttttcacggcgtaattccaggattatccgcaactccactcggccagatcactctcccggtcacctttggcacccgggaaaacttccgcacagagaatatcagctttgaagtcgccgatttcgagacagcataccatgccatactcggacgcccggcgttagccaagtttatggccgttccgcactacacttacatgatgatgaagatgcctggtccccgaggagtcctatccctacggagcgacatcaaacaagccgtcacatgcgacaaggagagttgcgacat

SEQ ID NO: 43206 - DNA, 400 bp, Oryza sativa
  unsure (1)..(400): unsure at all n locations
agcttgcactacgcaccgactatctctttctttccgacacaaaaatgtatgcgattttctacccagatggtgcaaaccatcatgaccattggacggtgtctcctgctaaatatgaataaagactgtcccttgcgagacactgaactgccaccttcttgtttatcacacgacactaccactcccagagcgaattagcacattgcttttgtatataacaacacccatccacatttttttctcatgattaatggggctcttacatggccagatgatcgtactcttgtcaacttcgtcatcaatgagtaattccccatacatcgacctggccgaaaacccngcctccccatgcgggctcttttaacaccatcacaccagagattgtggtgaacctggcgataca

SEQ ID NO: 43207 - DNA, 417 bp, Oryza sativa
  unsure (1)..(417): unsure at all n locations
taatagaccanaagcaccagctgcgagaagagcctatgctcttagtccagcggaggattcttcttgccttattcggaacgatgatatcttacatgagccctgaaaacatgattattaagttttaaaaaaaagcaggtcgccacactaaaaaggagatgatcatgggtactgaaacttatggcgaacaaatggttactgtcagagtataaacgttgtcataattaggacaagtagctgatatcatggtctaattactcaaccacaacatcataaatctagcattgtgtgcataatgcaggtttaactgtctaaagtaaagataagatcaatcctgccaaacagatactcctgaaaactgttgcagaattactatgtagaatgtgaactgtgatttgtttccaaaccccatctgataca

SEQ ID NO: 43208 - DNA, 325 bp, Oryza sativa
  unsure (1)..(325): unsure at all n locations
cttggagaagatgtcttacggggagtcctggcttatacactatttgtnctcctgngaagatggagccgtaggcccgctagtccgctgctgttcattcttgattgtcacgcctgaagtgcctttgtaataatgtaaatattatcgatatcaaaaagatgtgtcttttatatcatgtctgtgtggtgcaccccggctcttcctgcgacggggattaatacactagcgttcgggaaaaggcaattttcccggacgcgacacggggcggcgcggatgaagacaacagcgaacggctacggcnagccactggaggacgacgtgaaccggc

SEQ ID NO: 43209 - DNA, 409 bp, Oryza sativa
  unsure (1)..(409): unsure at all n locations
ctgcagctagactggtggacgttaggtcattttttctatgcctttgaataagagtggtcaccttattgctgcagggtctacacaactttgttcctggcgcaaacagcagtggctgctgaatgggcgtggacacctctgctaagaatgactccacatcatgctgggcctcatccactaagctctcttgtggatctgcatcagatgaaagaacaaaaacacgggaagcagggcgtggtacagtagcgtcaggggaataaaatgaacctcccaccatagcctcatgcaccataggatctacgtgccttttaagcatgagcaacgacccttgctcctgtgacacaagctatatgtcangtgatagaagttccagaggaggataagcaactgcagagcaatgcccattttcaag

SEQ ID NO: 43210 - DNA, 404 bp, Oryza sativa
cgcttgtatgtaagaatttgatcattccaacttcatggtttcgcatgtaagagcaagtgatctttatctcctgaagatgctctaacgagatgatatggtaatccttctgattttgattgctgacctctgtaggtacttcacaatgtgcctgcggagcataatcatatataatatttaacggaacttttatttaaaagaattgatggtgtggtattaataagctactccttccgttttatatgataagttactttgaattttttttctagtcaatcttattcatgtttgatcatattaatatgagaatatagcaacgtctacaacactatttgtaacactaaactaacgaacgttaacattcaaactatcattaattcgtatacattaaacttacattaatatta

SEQ ID NO: 43211 - DNA, 412 bp, Oryza sativa
agcttggtttaaagattagtaaatctaactccttgcttgttagtgcgttttctgatgcagattgggcaggatgtttggatgacaggctatcaactggaggctttgctgtgtttataggacccaatcttgtgtcatggagtgcacgtaagcaagctactgtgtctagttcaagtacagaagcagaatataaggcattggctaatgcaactgctaagattatgtggatatagaccttacttcatgagttgggagttcaagcgcctaaaacagctaaggtatggtgtgacaacattggtgcaacatatatgacagctaatcctatgtttcgtgctcgtacaaagcatattgaagtggactatcattttgttcgagaacgagttgcacggaagttgttacaggtagaatacatatc

SEQ ID NO: 43212 - DNA, 437 bp, Oryza sativa
  unsure (1)..(437): unsure at all n locations
gcttaaagaagttnggctaagaaanaaaatcagaataacttataatatgatacatatgtagtaactatatctaagaggtgggtcaaatatttcatgataaatattcttttattgtaggcaacaatattattatttttttccttttatccatagcaaagcatgggcatctagttatctacaaatgacaaaaacatattaaatttactatcggttaacaaatggngaaaagttaaatttggcatgacagatggctggaaaggcaatcgcccaacgaaatgactccatctctttttcagctcgtgacaaggaaaaatatgacagtggcataggacatgagtatcaacacaactgttggttgagactgatgaagaggatgaacacaatcacccatgncagagagttcattctttcttggcacctaattcaacaagttcatc

SEQ ID NO: 43213 - DNA, 279 bp, Oryza sativa
  unsure (1)..(279): unsure at all n locations
agcttgaatttatttatacatataacatacttattgtaagntaaatatatgttttacagtttaatatatgtttccgtatttgttaccggcttctgatatgtatcaatatagttctgtccatattgttccgattcaggtttttcgatatttgttttggttctcacattaccattttttatttttgaaatggtttaagttggtttccgaattggttccaacgctttcattcctactggacacccttgatcagacactacaacttcccaacaacttgtaccc

SEQ ID NO: 43214 - DNA, 491 bp, Oryza sativa
  unsure (1)..(491): unsure at all n locations
tatctagactctcggtgtaaccaatcatgttaatcacatgtttgctcactggattaccttctgcaagcctgcacgcaaacaaggactttgaggtattaaacctctcagctcttgcttggtcctcaaacatgttacgtagtcccatgattatcgtatgagcatccaatgcctcatattgcctttgaagctcaaggacatagtagcaagcatgagacaatttatatcaagataatcattgcatcacttttcatgctccctatgttgagcaacaagagcattgttgggcaagtcagctggaaaaggctctgtaagcacaaactctttgtgctcttgcctgagaacaattctcacgttgtgataccaatccatgaagnttgtacaatcaacttctctttctcaagaatagaccgcacagtaaaactggatggtgcaggagcgtgcatgatcttacaaccatgcgaactatcggtcatctcatgttccgatcatct

SEQ ID NO: 43215 - DNA, 413 bp, Oryza sativa
  unsure (1)..(413): unsure at all n locations
agctntgacgatacaggtatcacaaatgttcattgttatatgtgccacttcatccaccatgagtgctgtcatgtgaaaggagatttcttcgacccagagggtaccctatcggcaagtgacgaattcaaggatcttcgggagtggaacactactatgccataatgtaactagatgaccttatttgaagtgacaatgtaaaaaaatattgtaatatatatattttggcaacacttttgagttatgcaatatatgtagatttctcaataccaaatgcttgataatcttccaatatatgtacataataatctacctacaagaatttctattaaataatttaaaagtaatttatgggcaaattattattaaatttcaatattttctacctatcttcgcaggcggaagtgtttttttgc

SEQ ID NO: 43216 - DNA, 420 bp, Oryza sativa
  unsure (1)..(420): unsure at all n locations
catgcaagcnncactcggaaaaggcgagccgttttttcgtttcccctcatcacaagcaaccgcccggagtgctcgcttttgtccgtatcgccgtggttcgctccaccacacagcgcctgcacccgccgtgcattcgcggccgggtcgtcgaatacctcccgccggcccgcgtggtagacacatatgcgccacggcggcgccagatcaccctacaccgggtcgagccgaccccggtctgtccctccccgtgcgcgcgttccaccgcgagccgtgaggctgctcgtgggcccgccacattcgcgtccaccgcgaaccgcgcgcgtgcaccgcgtacctaccccgcccgcgcgcatgaaccgcgtacttccttcgcacggtgagccgagccgctgacaagcgtggtccacccgggaccgcgca

SEQ ID NO: 43217 - DNA, 449 bp, Oryza sativa
atcatattagagaaagtatcatttagattatattttctatggtaaaacttgataactttatgaactagccttagtggcatgctctattattgtggttgggaacttgagatccttggttgagaattggagctacgtgtagcagtgctcaactacatctgcattatattgttctgcatatggctgtgttcggtttaagtggttgggaacaaatctcccgtgcacggaaaacggagcggtttattagcgtgtgattaagtaagtattagctattttttaaaacaatgaatcaatatgaattgttaagcaactttcatattgatacgttttgcacaagacgtaacgtttatcagtttgaacaacatacacacgaaatactagggagaggggttggaatgagtagcaactaacattcatgtttgctgcaagagcaagcgcatgtgctcatgcgt

SEQ ID NO: 43218 - DNA, 411 bp, Oryza sativa
agcttattgccaacagtataccaccaagatgatgcttaaccggtacacttattactagcaaccttaatcatttgagcattagagaaatcatactcatcaaattgtttgtctaccgctagctcccaattaacataagcggtggaatcatacttaccatcaaaaactggcaaattagattctacccttgcaagatcattatcatgtacctcatatgctatgcgtgaagaagtcgttatatctcgttgatcgtgaagaagtcgatgttgagcatgaccatctcgtttccccttgtgcaatcctgtcatggttagtagcaaacaagaaacatacacaagaatatgcacgctcctatcaactacttggtagtggaagctccaatatcacacacactcaagcttttttaccaagctc

SEQ ID NO: 43219 - DNA, 409 bp, Oryza sativa
  unsure (1)..(409): unsure at all n locations
tctcgcagaaagaattcatgacggaatgaggggttgtgcgtatagctaatactgctngattaccatcagcttccaatgtagaaaaaaattgagaaatcttctaagaaaagcagtgagttagtctactcggtggtaggatgagatatgtccgttgaaaaaaatagacccaccaaagctaaagcaggaaaaatgcctttgttgatcagccagatctatgaacttgagatagatctatggagaaaagtaccaatactatggctgcgtgttacaccgtggaatgtgctttccctcatagcataataaggaagatatggtttgtccttcgaccatgcccattatgactagagtcgagccaacagatgcgagtggttgtggcagctaaatatggattcacacaccgcgtaataat

SEQ ID NO: 43220 - DNA, 314 bp, Oryza sativa
  unsure (1)..(314): unsure at all n locations
agcttgtgggaggctgcgctcccatgctttatctggaagtgctggcctattcaatgcgtacgctacgctctcatgataataactaccctactgatgatcttgccatagccgcatggggtgatgcgttgtatatggtgaggcatcatctatctcgtgctcgtactgaggcgtacaccgcncacaataacggactgtactaatatactcagcaaatatgacagttgacaacagctatcgtagtcgctagcttctagatcatgacataggatatgactatcctcccggtatggcctctgcatttacaaacgctccta

SEQ ID NO: 43221 - DNA, 117 bp, Oryza sativa
tattacacaggacagcgttaccgcatctgatgattaagcctccttgaactctgaatgatcatatcgaaaagctgacatggcgtgtaagtgagacatgtatcgatatgatgagcatct

SEQ ID NO: 43222 - DNA, 404 bp, Oryza sativa
agcttgagatcgagctcagccatggctttatcttcttcagctcgaaccagggacctcgtcacaagaatttaggttaatgtagggtcctttctgcaaaagctcaagacacacagaacagtcataggattgcgtttgatttcctgaaaccctagaggcccttttgcatattggcctgagaccgacaggtggaccccatgagtttaaaatctgaaaatgtaaaagataatactaaaagcctttactttttaacagcaaaacacctaaacttgtaaaatccatataaaatcaaatataacttattttgagatgattcaaatttctataggttcacaaaactatgaactttaatgtggtaacattaagcttggcaccctcagcacaaaccttgtctctaaaatgggtct

SEQ ID NO: 43223 - DNA, 503 bp, Oryza sativa
  unsure (1)..(503): unsure at all n locations
ctattacggacctatgaaactcaagcttngggttacgctctagagacagctgcgttcacactaaacagggttccatcaaaatcagtggataagacaccatatgagatatggactgggaagcgtcccagtttgtctttcctaaagatttggggctgtgaggtctatgtaaaacgtttgcaatcggacaaactcacacctaaatcagataaatgcttctttgtggggtaccctaagaaaacgaaaggatattatttttataatcggaaagagggcaaagtgtttgtcactcgacacggtgttttcttggaaaagagtttatttcaagaaaggatagtgggagcatggtgcgacttgaataaattcatgaaacaccgtgaaacgcttcaacgttcacacaaccacaagctgagcaagatgttgttcaacaggttgaacaagttgttgttgaaccagttgtggaagcaccggcttcacgaaggtccgataggatacgacgtacacct

SEQ ID NO: 43224 - DNA, 397 bp, Oryza sativa
agcttgctctaccggtgatcacgcattcttgatcaacatagcctggtgtcccagagacggcggtcatcgtctgcatccccacggcatggtcgatgaaccttgcaagcccgaagtcgcctagcttggcattgaattactcatccagcatgacattgctcggcttgatgtcacggtgcacgacacactgttcccactcctcatggagatagaatagtgctgatccaagcccaagaacaatcttaaccctgtgacaagttaagaccaagttagctgagtttaacacgccaattaatttaacatcacaaaggaagtttagatgaagttaaagagaacaggtactaacctcatcggccatgttaggaaggtgccattgccatggaggtgaatgtcgaggctg

SEQ ID NO: 43225 - DNA, 129 bp, Oryza sativa
gtagctgatttccttgccgagtggaccgagtgctcatattacatgccataggagaagatggaatattggactatgtattttgatgggtcgaagaggcttacaggcactggagcttggggtggtttaatc

SEQ ID NO: 43226 - DNA, 412 bp, Oryza sativa
  unsure (1)..(412): unsure at all n locations
agcttgtccttcanagtgtcaaacgacttctcctgtgtctttccccaatggaagaccacccctttcttcgtcaactcgttcaatggtgcagcaaaggtactgaaatctttggcgaaacagcgatagaatcctgcaagaccaagaaagctcctcacctgtgtgatggtttggggaaccggccaactctttatggcttcaattttcgactcatccacctcaattccctgtggagtaaccacatatccaagaaaagagactcgttccgtgcaaaagatgcacttttcaaggttagcaaacaaacgtgcatcgcgtagagcattaaaaacagcacgtaaatgatccatgtgttcatccaaagacttgctgtaaatcaatatgtcatcaaagtaaactaccacaaatcgtccaataa

SEQ ID NO: 43227 - DNA, 451 bp, Oryza sativa
  unsure (1)..(451): unsure at all n locations
cttgggaacttagacttagcagaaccatctntaccagccgtagacggcgatgctggcggtttctcagccatgagaaaaacactgttgtgattatgacttctaatcggtcccactgggcgtgccaaaagcgtgttgatgtaaaaacacgaggcctaggagatctgcttaactccagtgcaggtccaaaacttgcctttgggtgtgtgagcgtgccagttgatttgatcctgcaatcaacaagaaacaaagacaaacaaaccgtgattaaatccataaacgatagccgatcggctagatgccgatgacatcatttatctttgagccgatgtcatatatgcatcaatcggcagtcattaataaataagaaagaactaaatttactcgatctgcttgcccgatcttctggtgagggaataactctggctttgatcgagtgcgacgtttgtgacgt

SEQ ID NO: 43228 - DNA, 411 bp, Oryza sativa
  unsure (1)..(411): unsure at all n locations
agcttatgtctgtgaagattagttgcttttggtttttctttgcactttcaaataaggttgtaatagtttagatctttaaaaccattaacagttgtataattagtttgtatgaacaaatttgtataattaatcagaagctgttttgtatatcaatctgtgcgtgatcgaaatcctggacgatcacgagtgaattntcggggcaccaagcctaaattgggtgtccccacaggatatcacaccctttgatctgacaagcgggcctatgggcaaaacagtccacaatgcctgaaaagaaatacaaattgatctatgaaatgagaaatacataaaaaaaactgagaaagtggtaccaaaaagactaattagcagtcctaatgtcatattatagagggcatactgattatgtggtaa

SEQ ID NO: 43229 - DNA, 469 bp, Oryza sativa
  unsure (1)..(469): unsure at all n locations
tgcacgcagtcggattatacaggttcgggccgctatagagcgtaacaccctactcctggtgttgggattatagatgagttttacaaaggtttcttcactctagaaagcgcgctcgcttcctctcttctggagttcaggttttctgggcgtcgtccccttatctcaatgggcagggtcctccttttatagctcaaggggataccacatgcgccgcctccacctaccctctatcggagggggatcccacttcacttttcctgggctttaaaccgtgccttctcccggaagctaagcaacaactggccccgcctgacacggaggacaaccctgtcattccctcatcaatgaacgatgacttgcgacagcccttcctcgagtgacgctcggatgtgacgggtcatacccacccccactccnngcggtacaaaggcgacgtgaggacatgattgccctatccatcggatgtgac

SEQ ID NO: 43230 - DNA, 417 bp, Oryza sativa
  unsure (1)..(417): unsure at all n locations
agctngtactgatttgatcttgaaacagtagcttgttttctcagagacaccgctgccacgaggaggcatgccatacagtggcggagccaggatgttaaagatgggtattcccgtctaagcgataagctgatgcccgcccctgcccatcgcagacgccggccacccaaccgacctgaccggcttagcttggcggagtgtcgggcgccgcccgccgtggcaatggcctccccctgcacggtagcacggtccagctcccgccgccgattgccgtctcgctgcgacgccacctatggtttgcaaatggggagtggctcgagggaaccgatccaaggtgggatgggtcatggagggagagcgagaggaggctgtctggaaaagtggtggctaactgggtcaactgatgtctgatgggtcatg

SEQ ID NO: 43231 - DNA, 513 bp, Oryza sativa
  unsure (1)..(513): unsure at all n locations
ttacggacctatgaaactaagcttggcttatacaactgcaagtacatccaccatccgccttcatgacacattcctgcacggcttgcttgcgatagataccacgcctgctcctatcaacacacattatttcataacgatgcacttgtgtgccttgagcaacaactctatgtctccgtgcctttttgattttatcttccatgtactttgtcactacgttgccaaacactatgttgttatcggccatggacggaccaattttcttgtatcaatccctaaagtacgcttgcgtgccgtgaaggatgaattcaacaatagcaaccaatggaagtacccgaactcctcgcattacccagttgtacacctctgccaaattggttgtcattatgccataccgagatccatcggtgtcgaacaatagagaccacttctccttatgctcattctcaatccactgagtgaaatntctgatggacgaccctgacctccttctcatttgtggtggtcatcatgtat

SEQ ID NO: 43232 - DNA, 415 bp, Oryza sativa
agcttcctaatcctagtcgttgccttgatcgttttctcatgactctggctgtcaagacttagtagatatttctctcttttttttttgagaaaaagatggaaggagtgttacttttcagaacgggacataataaaaaaaaagttttataagaaccacttggtacttttctgagtattataaaagaacaacttcactgaacaaaaactatgtagccatgcacctcttggctcttgcaacgaaatttacatgaccgtacttattactagtatagactatagagctatgattttatccggaaatttgagattacagtttgaatgttcgtgtgatgagatcatactcttgagtgatccaaagaagttattgagtccagcatcagtgatgctctgtctcagctttcgacttacgttatgcg

SEQ ID NO: 43233 - DNA, 384 bp, Oryza sativa
  unsure (1)..(384): unsure at all n locations
atgagtcannggaaatgacaccanggcatgctagtgtattggtatgttgtgaaatactatctggcataggctgcctttcttcctctgtaactagaactatgtgttcctttgatatatcagggagtntaactattgattcctcgctcccatttagggttggacttccagaatggctcgtgaggtggtttctctcggtcgacaatagttgggtggaaatggaattttggctgattatctagttgcaaacgtatatagacctcatgtaggatattgagatattcatatgccatcattcaatacttaattaatgattcttattatctccgtaggcattctgtgacctgcagcctatatactcatacgaaggcacatacgacatcaaca

SEQ ID NO: 43234 - DNA, 356 bp, Oryza sativa
  unsure (1)..(356): unsure at all n locations
gacctctaatcacctgangcatgcagctatccgacgggcagctagattatttttttttcatccctttcggagatgatgtggcgtactgataaatccattccgaaataaaacctattcgctaaaaggaatgttagaactaattctaattctgaatgataatggccaacactagaaatacgtgcaagaaaaattttaatgtggcctgcagaatatctgttcactgctccttgctctaaaaggagccctccaaatgtacttgaagtttcagaacaccggaaataaatattaagcaacacactccattatgccagaaccttaaaacgagaatctataaataatgctactcttcttccttt

SEQ ID NO: 43235 - DNA, 388 bp, Oryza sativa
cactatacatactaagcttcaataatagctacgctagtctccaatagcgtcttaagcgttgtgtttctttgcgggcatcgtaatggattggtggttcgttgcctctattttaaatagggtacggcatacttgcctgaatcttctctctcggctactcagcggagtgatctctctcttatattcccataaggataaggaaaagtagacggttcgaaacccgtgcttaaatcctactcaaggcccactacgggtagcgagcaattaacaaatagagacaatgatgaggagaaatgacgcatatacggccggcctgtgtcactcatgatgttggtagttcaagtgaattgtcgtactgtaaggaagatagattggtgttctgattgtactt

SEQ ID NO: 43236 - DNA, 418 bp, Oryza sativa
  unsure (1)..(418): unsure at all n locations
agcttagctgaacattaagatgtcccgtatactatctttcaattgccacttttcagtcagaacttcacatgtccacatcccgttctaattgaatttttgtaaccaattttactttatcatgttccgaaatcatttattcccctgctgaattcaatgtgtaccatgccagcaccaaatctcttcataccttgtaccaaaatccgaaattgctacttagagccatacgtttgcttgtgtgctgttcactcgggtgatgtgtaacggtataagttggatactgacttactgaggacatgcttcatgtgtatcaagttcaggtcttatcaggaataatcattcacgcgttaaagagaaataagatgttcttgctatttccaattntgtgaaatgaaataatcctgtataatcttttggtaaa

SEQ ID NO: 43237 - DNA, 501 bp, Oryza sativa
  unsure (1)..(501): unsure at all n locations
ggctgggggggcgcatccgctctatagctcgtatcttctcggggttggcttcgatgcctcgggcagagaccaaaaacccgagaagcttgcccgcaggtacaccgaacacgcacttatcggggttcagttttatgcgggcggagcggagactttcaaaagtttccgctagatccgagagtaaggtttcttggttgcgcgtctttacaaccaagtcatcgacataagcctcaacattacgtcctatttggctacccaaagaaattcgagtagtacgttgaaaagtatgacctgcattntttaacccgaagggcattgttgtataacaataagttcctatgggggtaatgaacgcagtnttttcctcatcctccctatccatgcgaatctgatggtaaccagagtatgcatctagaaaacacaaaanggcgcactccgctgtggagtcgacaatctgatctatgcgatggcaggggtaaggatccttaagacatgccttgtaaa

SEQ ID NO: 43238 - DNA, 417 bp, Oryza sativa
agcttgcggaaggcgaggacaggtggcgttactgtattgcggaagggggatctctccttttgcagctagggctacgcagagacagaggaggtatggagcggataggccatgaaggctaaactactcaaacccgacgaatttatcacatgcctccaagctcactgccatatgtggaccaccaacgacgcttgcatctgtcgatggagaatccggggtgcaccctacttctatatggtcgcactcgcgcgtacggcctaacggaaagcccgggaccaagcatggatgactccgaacaggaaaactgaataaaggattactaacacgtacttacgcatcagcgattatgtaatttgggaaggcatataagataggtaaatatcaagtgttccatcgtaacgcacgttgatgtacttggag

SEQ ID NO: 43239 - DNA, 352 bp, Oryza sativa
  unsure (1)..(352): unsure at all n locations
tagctatcgctgatatattattcgaaaaacatgtactacctcgtctcataatataagggatattggatagatgtaacacatccttgattaattaatctggacaaatattatattacgatgtgtcacatccatcataanatactctatattacgagacggatcagtatgtacgttcagcatgaggagtatgctgctgaaagttgagaccttgtcgagctttgcttcatgccaaagcctcagacttttccanataggaatatgcatacggccgggagcagcaataattaattgtgtcggcgcacgtacgaatcatgatgcaagacaataacacagtactggtcagataattaac

SEQ ID NO: 43240 - DNA, 306 bp, Oryza sativa
agcttaagatgacgaggatcccgatccatctgatatcgcacttcgggtgggtcggatccccctatagccaaattgtttgttgtcggacaatccgtcttcttgaacccatctcgtcgaaaccttgaagcatcaaaatcccctactaggcgcaccattgtcgatgttttagatcacgactatggtgtttgcatagtatggagatcattggtaccagggtatatgcgagattgagataaaagagacgaagacaaggatttttatacaggttcggaccccttcaccagaaggtaataaccctactcctat

SEQ ID NO: 43241 - DNA, 491 bp, Oryza sativa
  unsure (1)..(491): unsure at all n locations
gacctatgatactaagcttcgataccctggtgcccctgttcatcttgtgatcgggatgggtggtcaagattatcaaccattctggcagccaaggaaggatcaccctgatgtacctgtctatccgcagcctgagaggtctatgtaccgtggtggggagtttggatacacaaaacttgtagctacaaaggagaagttgacactaacgtacatcggcaaccatgatgggcaagtccatgatatggtggagatattctctgggcaagtatctaataacaatggtgttcctgaggtgatcgatgatacaaagctcagcacaggggtcagcaccaaacttgaaatccctctgttctccttggaaattgtaggcagcgtgatgnttgcactcgttctgggnttctctcttggatttctgatcagaaggaagaaagaagctgcacagtggaccccagtgaagaacgaggagacctaatatcacacactgtatctaatgc

SEQ ID NO: 43242 - DNA, 416 bp, Oryza sativa
  unsure (1)..(416): unsure at all n locations
agctntgttgagcctaagacccaattattctattaaaaactttcaatcctcgcagactaagtagaaaaaatcaaacaaggcaatgatagaccaagtaagcaaattaaattgataaaaaatcacactccattattatgatgatagcccccgactgacaacggcaagaagaaaacttgatggtgacagtcaagatagggaaatacaatgataagcttaagcatagaaacgacgaaggtgttcaatgttccaagagttgtcgacgagagtaccgtcttcgcgcttgagtcggtaggaacctggtcgggtgacttcagagatgataaatggcccctcccataaaggagataacttgtgccgatctcgtgtagtttgaattttcctcaaaaccaggtcgccgactagaaaggcacgggatc

SEQ ID NO: 43243 - DNA, 462 bp, Oryza sativa
  unsure (1)..(462): unsure at all n locations
tgtagcgtagtgccacttgcaccattttgagtacatgctatatgcagagattacactgaaataaagggataaccatgattttgagcattaattcattatgggaagccaaattgccacattgatcatccagcttaatagttgacatttttcttttgcaatagctttatgattgacattagtttggaacagctcatcagtggacatgtcactgtatctagttntgagacatgcatctacattagaaggcagaaactgattttatgatgacaaccaagcaacctcttttactatatgcagttatcaaatagccatagtttgcataccttgatgctacntaagccgtgacagaagcaatctgaacatactcatccccagtagcaatatttgaccaatggaaatggattctaccaccaccaccacctccttcaccaattaacctccattgcaccagaagctgatagt

SEQ ID NO: 43244 - DNA, 411 bp, Oryza sativa
  unsure (1)..(411): unsure at all n locations
agctnnttttccttatcacatcaaacaataattatcattgnactttatcataagccttctcgaaatctagctttaaaatgatcccttctagttttctaacactcaattcatgaatcacttcgtgtagaatgaccacaccatctaaaatgtatcgaccaggaataaatgttgtctggcattctctaatgattttccctgcaactcttgacagtctgaccgctaacaccttagtaatcagcttaaaagcaacattgagcaaacaaattgacctgaattgtttgattgtattggcattcttaatcttcggaatcaaacttatgaccccaatagttgagcctccaaagatctaagttcccttcaaaaagagcatcaagcatttctttaaagtgcatcttatagtgttcccaaaac

SEQ ID NO: 43245 - DNA, 495 bp, Oryza sativa
  unsure (1)..(495): unsure at all n locations
tcgagccaattggacgagccattgcacacgaacgccctgttcatgaacaagatccactgctgtagccggttntgctggcactgtgctgcatacagccaaacactgaaacactgaggttntgctggcagtggcatactggcatcccgtctcaaaccctcccatgtgctaccagcggttcctgcagcttttccaaagatttcaaccgaggaaactgatgtagatgaattaaattcatgcatgtataacgagaaattaattaatatttaattaatataaacttgatagatgaatatttgatattctaaagtaatttctatataaaaaagttttcacatgtaatacactcgttagtaatataaaaatcgggtcaatgaaaacatacgtaaaatcggtatgttattcagaaagcgtcatcaaatgctcaacaccaccaccagcggtaaaatcagatggtaatcagacagcgtcatcaatagctcaacaccaccaccagcg

SEQ ID NO: 43246 - DNA, 394 bp, Oryza sativa
  unsure (1)..(394): unsure at all n locations
agcttgaatggaatgaactaggtagatgttttccgangacctgaatttgtttgtattgaagttgcgtctccccggcaataagtgaaaaacggcgatgattttgccatgacattacagtcgcatgaaattaatgtcttgatgacaaccatgaagggcataggcggtttctggctttgctatgggtttggggagggggtaggggaagcaaagggagacgaaccatcgcggggtgaggtggggcangggaggcgccactgggccatcgtcacggtggccgtgctacttgccggcgtcaagcatcagagaggaagcaccacaggtgggggaggagaggcggcgtgcggttgcgcttccctggcggcaccacttctttgtcgtggggacggacgaagag

SEQ ID NO: 43247 - DNA, 489 bp, Oryza sativa
  unsure (1)..(489): unsure at all n locations
tgccagaataccgatcgaggtggttggagtttgatttgtttattctcaaatggcctatatttatgtgaggatatgatccttctatgtggcatgaggtaaccctgcgtcagcttgggaaaggctttgttgcgaacctccgatatcgacgggtgttcggaataagttcgtatcttgtgggtaaagtgtacccctctgcagaggttaactaactgttcaaacagccgtgcccacggtcatgggcggatgtgaggtggttcccgctgcgtagatttgtttgcctgtgcttcgtgaanagatgttgttgtgtgggaatcgtaacctgaatcagcctatgtggcagatggacaaccttgagtggtcagaaacgaatctgtgtgatttgggatgtctgcgggcatcatagactangcttcccgagtggaagcggattgttgtgctgctgtgcagctggactctgggagtccgagaaaatgaaaaaagctctgggag

SEQ ID NO: 43248 - DNA, 367 bp, Oryza sativa
  unsure (1)..(367): unsure at all n locations
agcttcttgcaaagcatacggatttctttatgtatatgacgatctctagacagatggatcttatatgaatcgtatgatgaagtaccacatgagtggatatataggaaaggaatccacatctgccgaatcgctcatgttatgatcttctacatcctaggtctccgcgttacgtcatctggcttatgttcttcatgtagcattcagatcgaatgactctatgaaattacgtcgatacttctacatattatgggtaacgtatgagacatgcctattttcccccggnggtcttaattaccactgcttagctttcaattagcctctgaccatcaaattaaatgtgaataacccgtccttctctctatgaaac

SEQ ID NO: 43249 - DNA, 484 bp, Oryza sativa
  unsure (1)..(484): unsure at all n locations
tatgccattntcaatccaatcgtggattttatgcctgtcatacctgcactctgttttctattagcctttggttggcaagctgctgtaagttttcgatgaaatctttactactctgtctgccaaattgaatcatgtattcattctaaaaaaattcgaaaaatggataagagccgagaagtcttatattatgaaccttcgattctaaaattcaaattcttctacattgaatgtatagctgcagcaataaatttggatcagcctttctactccctgcatctacgttgagcaggtatctttaggtaaccgcacaatacctaacctaatttattgataagagtgcttattataaatcaattcttgcaattgttttcaaaaattgatttgtgcattcctaggtgtcaaaataaacaaaacccatcctactgtgattgtgtggtaaggaanaacgggtaatctattccttataaaanaatcttggagatat

SEQ ID NO: 43250 - DNA, 411 bp, Oryza sativa
agcttagaaagcgagatcaatctatatctctctatatatatgatagctcagcggcttgcatggacattattagagcgtcctaaagatgtatgcactaatcccgagaacgcaagccaccatgacaagatttacctcttctttggagatcgaacccgatgcagaccaactcgaaagcaaaaactctgtcaaaacaatgaatagaaaagaggtggcgatgcgcccaattgtattgaactgacgcaccttgattacatggggacgggtcatatatatacccgaattacatgatatgtccttgctggacacgactcttatctctaacacacaagaatactaatgatcccttcacgtggaccataaccaagatttctctaatgatactaaaacatgccctaatttatagatacaact

SEQ ID NO: 43251 - DNA, 464 bp, Oryza sativa
  unsure (1)..(464): unsure at all n locations
tcaagacaaatacaattaatatataagtgagagatatagtgaggagaagaaaattatatccaaccttatagctaatctattatatgtgttggttntaagattgattaatattaggaagttaactctattattatagagtgctctcagtatggaactggacttgagaaaggacccgttcgtaaatttaactgagatccagatgtccagatgctgcaggttgaggctcctgacgaagatagcgagagttaatacagtcgacaggcacggatttcgaggccggtcaaccgtgattagcgttgcagtttcatcacttccctagttgtgcagcaggagctcacttctactgcctgcagagccagaggcagggaccatggcgacgaaaaagagaatgagaaagataaggtgaaggagaaaggaaaaaaattgagctggccggtgcggtggccgtggatttggggaaataa

SEQ ID NO: 43252 - DNA, 408 bp, Oryza sativa
agcttaatgctgtctcacagaggatcaatttttatgcttgcataattccatcctaccaatgctggaaaccttctctctataactaatcatctaatcatacagaagctcaaaattataccgagtgtgaagttgacaacttgacaccattctccatactccatagcctaaggagacttcaccggccggccatggtcgtcgagcccgacgaccccctccaccgccgagatgatctgcggcaccgacatcccgccggagaggacgatctctgcagcaaaattgtcccaaaaaccaaaaccaaatcaagaaccaaactgttcagcaaaattccccaaaaaccaaaaccaaatcaagaaccaaactgttctacaaattcaagaataagaagggctcaatcttcagtttaccgat

SEQ ID NO: 43253 - DNA, 479 bp, Oryza sativa
  unsure (1)..(479): unsure at all n locations
tacaaaactaaacggaaggcatgcataatatacaaacatatcagaactgtgtccacttatttagtgcttacgttctggcatcacgcgggcaggaaaaatttattacagttcgaacaccaacgatgtcaatcccctacaagtcaaaccaacaattcatcaacaaataaaaatgaaatataaaaaaatgtatttatatttctcttacattatcttttctgtttttattatcacaacataatcttattattgcatatatgaaaattatgaaagatataaaattttactcacacgagctgcaacatcagttgcaatcaggaagtccacttcttgctttttgaaaagctctaaagcctatagaagaaatgagaatttcattaggttagtatgctagagctatntatcagtgagcagaagtatcaaaatgttcaatgcaaaacaagaactagtatattcccaaaacaatttggaaacatgttaca

SEQ ID NO: 43254 - DNA, 414 bp, Oryza sativa
agcttattagtctgaatgaaagttgaactgttttctaaactccaattaaattgaagtgctaatgtaccaagggagagagcgcagtggctaaaacataatatagaaatccttcaccgggtttatgaactagtagctgtgaaatacggttaagatagaagtaactgaggtcaactccgcaaatactagatttgtgtaccaaccagtgccttgttctatatatcatggtacatggctgggtttcacctacattttgaacagaagtgttagccatatgttctttagactgattattgccagttagtgaggagctgattctgtttgacgcaccattcaccttggcgacctctgcagcgatgtcaaatgcagattttccagagcctattatagtcaccttcttccctttgacaaattcag

SEQ ID NO: 43255 - DNA, 463 bp, Oryza sativa
  unsure (1)..(463): unsure at all n locations
actcaagcttctcctctgatctataggctagtttatataagatgtgggttaatgttcagcagttattaaaattactcctatctaattagcccaccattccaaattaccaaaacgcggattaatttgcttatgagaatctaacggattttcacctttcttcactcatttgcacttccataaaaaacctaacaagtctctcatgctcgcagattcacgaatgcattgagcatcccgtgtcaaatggagtaccacggtggaaggtaatatgcacgctctgaagagagttgctctgccgtttctgaagaactgtcagtcattgtgttcctagagttctcgactaccattatgtctgagtaacaacggcctgcgtctagtattatggggagtgagaaaatagcaatccacttggaaacctggcggcanatgagtgaaccagtagtccagtatatatcctaaacctacc

SEQ ID NO: 43256 - DNA, 414 bp, Oryza sativa
agctttctaacagcaggactacagatgtttctctctaccaactcccaaaagtagacatctaactgaaacccaagcacataaccatcccgacaggatataacaatcatctcttgttacaagaagaaaggcaccaaaaacacatcctttaatagaacatcaagcaggacatccatatgcaccaaaacaatctagaattgcaaggctaaataggaacagtatacaactgcaatacttcttcaacttcacaagtattggtaggtcagaattacttcagaaataacagcatgccatcacattaaaatcctaaagctaaaaagactgctagaggacacaagcattttagtctacgatctaaagcaaaacatgagattactgaagcaataatcaagagactatatttcttatttgataaat

SEQ ID NO: 43257 - DNA, 406 bp, Oryza sativa
  unsure (1)..(406): unsure at all n locations
agctcagatttgataactctcaagtccagttgaaaaactttaccttagatttaaaattnttcaaatcaaaattcgaaaactttcaactgaagatttgaaaattctcaactgaagattaaaattttcaactcacaatttagaacttttatcttaaaattcgaaactttcaacataaatttgaaaatgttcatgttaataatagagctaattactggaaaaaagaaaaaaaaaagtatgagatcatagcgctacgtactcatgttaatcacgttagatatggcgttaatcacacactaattgtatgagttggcacctgcacgtgctttactaatgagcctgcgaacgttcgaaacgcgcgctgagttgacccgttggcgcgtacgcacacaacagcaaatccgtatta

SEQ ID NO: 43258 - DNA, 370 bp, Oryza sativa
agcttccgtgcagcaccgtattactcatctcttcaaatctagcacggggttggaatactcagagtagcgtgcaaccagacagagagaaccgtcgctggatcgacgaactcatcattgaccgcccaacacgccaaatcgagctgtgcggcaccggatagagcacctggtcatggagctccagcgcaaccgccgaatcaaggtactcgtcgttcgctgactgagcgtctcaccattgagctcaagccagcaacaccgatgacacgaaatgtctgagattggtgccacatcgccgccgccaagatcaacagatccagtggctctggatctatcgccgtctctagatcaaagagagagagagagagggaggggg

SEQ ID NO: 43259 - DNA, 377 bp, Oryza sativa
  unsure (1)..(377): unsure at all n locations
ntagcttcctctcacattccactcctcacatatatatatataccacattgttgtcatggcacggctcctactccaatcaatcacaaccaacgaattagaatctaatcaccctgtcccattaaccaaattaacatcgatcgatcattagtacaaactaattaatcaatcaattagttagagatcaagttattagtgtccaagtatagcttatgaaggtaatgggaaagagagacacgccggcgaggtcctcctaagttaggaccttggaccgtccctcctccatcctcacggctataccaactntattctcgccccctccccaccacccctctcttccttccctctaaacacacaccgcaaccgcatggtcacgccct

SEQ ID NO: 43260 - DNA, 373 bp, Oryza sativa
agcttctcccgctcagcccaatggccgatctgtcagtggcgcacagcctctctccgaacgctagcggtgacgacggggagcaaaacccgcgccgtcgggctcgcaccccaccgtccccctctcgccgaaatcttgggcggggggaggcgctcggggaggtcgaaggatccgcgacttctccgcccgcgggcgactggggaggacggcgagacggggcgcgtcgccgcctcgtctacggcgatggcggcactccccagggcgcgctccaagctgcgggcgcgctcctgcgtcacccgcccgtcgtccccgatccagagactccatcccgacgttggctggatgacgtggccgacttggtcatgatggcgcagca

SEQ ID NO: 43261 - DNA, 383 bp, Oryza sativa
  unsure (1)..(383): unsure at all n locations
agacgctccaacagaagagaaccaagtcctgatccagttccaccaccaacagcattgaacaccaagaatccctgcagcccagtgcagttgtctgccaacttgcgcacacggtccaggcatagatctacgatctcctttccaactgcatttcacaaacaatgagaacaagacacatgcacagttgcaatagaataacacttgtatgaactctaagctgaattaccagtgtaatggccacgggcaaagttgttagcggcatctccttcccagagatgagctgctcanggtggaagagctgacggtacgacccaatgcgcacctcggcgatgacagtgggctccaggtcgacaaagatggccctgggcacatgcttgccagcgccc

SEQ ID NO: 43262 - DNA, 236 bp, Oryza sativa
  unsure (1)..(236): unsure at all n locations
gaagcacccaccagagcgccaaagaaaagngcaccacccaccaacaaaagacaaaacggcacaccccccgcgacaaatataagactcactaccagggactacaatcgaacagaagcgaccagaagcactaacacgtataccaaggagggcaacacaagaaaagccgacagcacgaaacatcaggaaagaagaaagagcaacgaaaaccgccacaccaaaaactaaacagaagatgg

SEQ ID NO: 43263 - DNA, 408 bp, Oryza sativa
  unsure (1)..(408): unsure at all n locations
ngatggagcanagaccgattgatacttcatcggtcacttgtgaaactatctcggttacatctatgcctaagaccggaattgttagtgatcctctccctgttagttctattgatgttggcaaaaagaaagggaaaagtgttattattggggatcctcggcctaagaataggataaaaaatgtgaaggccgaagatcataaagttgcaaagggtgagtcatctagttcccaaaagaccaaaaagcagaagctcactcttaagatgcttatggctaagtacaataaaggattagccggtcaacgagttgataatcaaactagtgattcaaaaagaccaagatcatctcgtanggacagatntggtcaaacaccaaagcaatcggagccatcaaccataccaactctataca

SEQ ID NO: 43264 - DNA, 412 bp, Oryza sativa
  unsure (1)..(412): unsure at all n locations
agctntatatagctgccccgctgactttttaatatattcatggngctgnttgggtttttaagcaattgattggatacaatatcgttgcttttcgccacgtaagtgtgcatttttattggccaatattatggcttaggctgattatatattgtggtcattttctaggcggttggtaaatcctttatgagtttatttactcggattttacaccacatatgccgtatatttccaggtgtggtgaaaccatgtgtcttctagggacttaagcacatctgttaaagcagtgtgcgcatggcgtatgcccaatactttggaaatttctttattcacaatatacaagcttctttatagctattttgctatatcactcatcatattttacaaagcagtcggtatatcactcggatcatgt

SEQ ID NO: 43265 - DNA, 481 bp, Oryza sativa
  unsure (1)..(481): unsure at all n locations
tcacaagcacaccgactaggggtttaccccatttagttctcatcctagaagaagcaatcgaaacccgcatcactcaaagactaagtctaaacctgcaaacaaaaggttatatcaacagcaagagtcagtacattaaacaagttaatgtactggcaagcacaagtcaatcctaccatactacatgtaaggcatatattcaaaggaaggcaatatgtagttcaatttcagcatatagcaagttttgttccgcaattcttttgtaaggagttgatgcttcaattaacaaagacaagttttaagtttcattattaacttcttcataattccatcataatcaatctcttattgccatacttaactataagtcataatgtatcaccacacacacaactcaacacatttatcaatttcaaaccaatgtcacatgatcacnattttaaaacatagtctatactcatgacacatcaccaaagcgctcatg

SEQ ID NO: 43266 - DNA, 411 bp, Oryza sativa
agctttatgtaactgcacggaaagggttattttcacttcacgcgctgatataaagtgttacatacaatgtgacgctacaacctacaacatcggcttcttgacaaaattttctgctgcacactttattacactagtttctcgtgtgactgcacctctacaagctggcgcatatgatgcttcccagcaacaggatgttacacagttacaaatagtacaggtacaagatatacattacaatgccactttccaattctgaataactgaattcatacatacccatctcctcccgtgtgaagtagaagttgcttcgcaacaagaatggaccataacctctattgcaaaattggctagctagcctgaataatttcctcagatggcaatttaatactttgtagaggagcctcaaatctg

SEQ ID NO: 43267 - DNA, 438 bp, Oryza sativa
ggatccttaagtcacctgcggcatcaagcttaaagaaacatatagactcttctttttattgcagggctttaaaaaagaaaaaaaaattgaacaagtgccaaatttcagtcagtcctcgtcatatttcaagtctggttagggtgccctataataagcctgttgtgtattgagttaagaagtctataaccatgcatttaccgctcttttcaaatactgctgcagaagttgagcgccttgacaactcaccattcagatacttccttggagaactatatggtggaaattcacttataggcacaatttcagcgggcaatgataagaaacgacagcgggtctacaacactatgtttcatgtgccgtggagatgtgaacaggtatatttctgcacttgtaatcatgccagttgcaccctgataccctccccatacactagagtat

SEQ ID NO: 43268 - DNA, 354 bp, Oryza sativa
  unsure (1)..(354): unsure at all n locations
ctttctctccaccctagnacacagacatcaggagtgacatatcatangcataggcacgtagcagctgatgaaattgttcatttcttgtcatgtgaaggctcgctcggtcgccgtgttggaagagcacaagcaagccatgctgatgcatgaagataagaggaggcgcctncgggtaattacaatcttactgtgcctcttttcaatgggccaaattcacgcccatacccctgtataggctgagaatttggactatgaacttctttctatcttttatgagcatttaacagcttcgcgtgaagttttaccaaacaatcttgcgtttatacgaactcactggaattaaaatagcattga

SEQ ID NO: 43269 - DNA, 411 bp, Oryza sativa
  unsure (1)..(411): unsure at all n locations
agcttgcgcacctcgcgccagtactcgttgtatggcgcgaaggccacgttcttcatgccgtacgtcacccgcctcgtccccgcggacacgggccgcgtgcagcagtcgaggtcgtggcccctgagcgcctcccacgccgcctccgccgaagtcaacaccacggccgacgccttcccgagccgcagccgcatcaccgggccgtggacccgggccaggtcccgcagggcccggtgcggctgcgggccagctagctggtgcaggtttcccaggaggggaacctgctccgggcccggtggcatcttgaggcgccctttcctcgccagcagcacgagggaaacgatgacaggaaggagccctgtgaggacgacgggctgccattgttggggtagggagaagagcanggaggtgatc

SEQ ID NO: 43270 - DNA, 456 bp, Oryza sativa
taccgggaccgacaatgctgcctccctcaagctgagggatggttcccttgttggcaggcgatatgaatcgagtgctgcagcagttgattcttctgatacgccacctgtggagaagcatgagtaccaggcagaggtaactactggagcaatggctaatgttttatttttcttaatcaatctcgtgttaccaacggtgtcatgatattgtccaatgtgcatggcaggtcaataagctcatggacttgattgttcacagcttgtatagcaacaaggaggtgtttcttctagagctcgtcaagtgggtgtcattcaagaacataagttgttcactatattgaagtttgtactaatcatcatctctggttactcttgtgcgttaagttgatctctatgggttaatttttttaattcttcatcggtatctgtttgcccatgcagtgatgcactgataattgc

SEQ ID NO: 43271 - DNA, 403 bp, Oryza sativa
agcttcacctcaccgcaaggaagagaacttgtctcccacctcgtctccagttagcttcgaagcttcgcgtgatgggagatgctgtgccagatcgtgctgaacctgtcatccacgtcttaagtgatgaggaagaagaggaatacccagaagaaagagtgccagctactccagaggaagaagatccatcgcttcgttccgacgcaaggcgggattagtcgcttagttagatcgttgccgtagttcgctgtgttagattgcttgtttaagtttgcttgtgagtgtgtgggttttagttgttgcttacatcattggtgggatgtaacagcatgagtctagttcttttgcttgtcagagtgtaagatagttggtgagatagtgttaatgcaatctaaatgtaatcata

SEQ ID NO: 43272 - DNA, 461 bp, Oryza sativa
ctgctgttatcgctgccgccattcttgcggcttttctgcgactagctccctgggaggaaggcagcggcaccgcggcgggtgaagcactacctcgccgacgtgacacacaaggtcgtgaaggcgcggaggcaggtgttgtggcgttggaggtggggcgagggcgagctcgccagtctttctgaccccctcaccaaacctatcttctccctctccgccactcgacgccggtctccccgcccccctcgctggccccagctctcccgtggctcaagctccttgcccactccctcctcaccaccacctatggcgtcctcggtgctgtccccttgtataagaacgtgctccgccacaagttgaggctcctcgtcttcgcctccgcatcgggccttctcgcccgtggcctggccctcctttggacctgcaactgtcaaacgcagctcacctccgcactcatcatagat

SEQ ID NO: 43273 - DNA, 410 bp, Oryza sativa
agcttctgattatcctgctactacattgttgtatgaatggcaagagcctcagtggtatgctcaattgtacactcagtggcaaacaacatcatcatggacaggtcaaagttgggaggaatacaaggcggggttgctacattcacatggcttgatgctcatgtccacagaggagtacaatatggcatataatcagtagaatgcgtagctatgcatgtccttgtttatttcctttcattcgaactagaattgtaatcgtggacattatactgtggactctacaatatagagtaggtcatgccgaatttttctgttgtataaccacatcttaattaactaaaatactcacattttagtttttttctattatttttttcatttttcttatttcagttccaacataaactaaaata

SEQ ID NO: 43274 - DNA, 464 bp, Oryza sativa
cgatcaggaactattctttttctgccagttgtgccgacatctgctaaccttccttcgtggcgagacgcaggaactccgataggatcagtctcggccatgtaatcgatacataactcaatggcttcctcggtcgtgtaaacttcaatgatgctcccctatggttttgctctgttccaaacgtaggacttcagaattcccatgtaccgctcgaacggccacatttctctcattaaagctgtcccacatatttttgtttgcttcactaggtgaacagtgagatgaacaatgatatcgaagaaagccaatagaaaatacatctccaagtgaacaaggtactgacaatatcggcatgcaaccccatctaagctttggatctataatcttttgaccgattgcattgaataaggcacaaagccgttggatcgtgtgacagacttgtggtggtagaatgcctctgataacaa

SEQ ID NO: 43275 - DNA, 413 bp, Oryza sativa
agcttagcaagtgtgagttctggctgatctatatctttttcttggggcacgtgatatctgctaaaggagttgctgtggatcccgaaacagtgaccgccgtcaccgattggaagcaacccaagacagtcactcagattcgcagtttcttgggtttggcaggatactatcggagattcatcgagaacttatccaaaattcctcgacccatgacacagttgttgaacaaagaagagaagttcgtgtggagcccgcaatgcgagaaggcgttccaaactctcatagaaaagctggtttcctcgccagtgttaatcttgccggatactcgcaaggatttcatggtgtactgtgatgcttcgcgccaaggattgaggtgcgtgctcatgcaggacggtcatgtggtagcctatgcttca

SEQ ID NO: 43276 - DNA, 271 bp, Oryza sativa
  unsure (1)..(271): unsure at all n locations
tatgatgatcttaaagcaactacaggtcaactgggaatgacattcattatgctggcanagtttgaaaaggagcaggatacatgtaattctcagagaaaaagagctgttgatatgagcaatttcgcaaatgctgttatcaacatgagcagatcacagacaaaactaaatgctaaaatggaaatacatctggattgttggaaattgtaatagaaagaatgtttgcttcttatgatttcttttcatgaatcataatattatttttgctttgaca

SEQ ID NO: 43277 - DNA, 413 bp, Oryza sativa
agcttcacagtgcgtgttgagagtgaagattgtgttttctatttataggacaggtatgacgactattctgatacgaattgtgctttctgcccttaaaccgccatcaggaggtgatttggaccgtccatgccgaaacctggatcaaacggccacgaaagtggttcggccgaaccctgtcctggcccaacaaggccaggacttggcctgttgctactccctgctctgccttatccaattctccgagtatttggcccatttgatgatatttctgtgtagttcctggcccactcgttgtatggataggattcttatcttcacttaaatctagacttcatcccaacttcggcggtttattacctgcattcaaatatacaccagcactcgcggaatatgttataattaaaccctattac

SEQ ID NO: 43278 - DNA, 473 bp, Oryza sativa
  unsure (1)..(473): unsure at all n locations
ntagaattagcagtttctaccgcacgtgtgtgttcagactatttaacagtacgttntgtgcaaaaaatntatatataaaacgtgctttaaaatacaaatatattcattntcaagtttataataattaaaactaattaattatttactactacatccgtcctatataaattgcacttctatctaatttaggacaaaatagtaggattgaaaaatgactataataatcatatttaatgaacacaaaagatgcacacattctatatatataaaattgattaaaggaagtttgagacaattaaggaaacattnttagattaacaggaagattgtggaatgaaatgttaggagactcatatgaaacatattagaattaatcaattgctaggtcttacgtgaatagaatatatgttttgagacaagcctgagacatagttgagttatatggacggaggaataaatgtttacgtttacga

SEQ ID NO: 43279 - DNA, 310 bp, Oryza sativa
taaagaaagacagaccgacagacagactgactgacggacagaccgtcggattgagagatagatggataggtagatagatagagagagagagagagagagagagagatatcagtggctggactaagacacgcttactaggtgcaatgggcgaataaatctaccaaaaaacttctcccctttttgcgagggtgtctgttagccccaaaagcttttgccgtgcatgccgaatttacctcatgtgcatggactcacttctccgggtatgtcgtaagtaaatttgggagtcctataacctaatgtttattaaaga

SEQ ID NO: 43280 - DNA, 418 bp, Oryza sativa
  unsure (1)..(418): unsure at all n locations
agctnttctttctcaaaagtaaaggaggtttgttcttcgtttcattgagaaaaataaaaaaaagggaaaaataattacaaacataaggaacaaattaaaatggccacactcacataaactcgttacccagaaagccatcattagtcgtccaaattaattgacctacatacaaagaaagcttacagagcgctcgagtttccggctaaacaccacaaatactgtcatttgccactgcacgtgctaccaccaaaacatttagagaagctttgaaaatacaattgttacggttcttccaaatctcctatgctactagaataatcaatgagtttagtcctttgcgcatctcttttgaaacttcattgatggctttacacaccaccaacctgaanaatgaactgtcgttggctgagatgcaacc

SEQ ID NO: 43281 - DNA, 362 bp, Oryza sativa
ttattaaagtacgctggatggttcgctcattatgattcatgacctaatgtttctgttagattccacgtcttggtgttctccaagacttggtttgtgccacaagatgttttcaacttgctactgttgatgaccacaaaaccccattcccatgaatatttttgcacaggaccatggtcattggcaaagcaggccatatcgggaggaaagctattgctgatcgcgtagcgctttctggcttcctgcctttagccaatcttttcatctcttattaattcccctttgttttgatgtgcatcaacattttttaagctctcatcgaactgcactcctgctgcatccagcttttcctgatgtttcagctt

SEQ ID NO: 43282 - DNA, 413 bp, Oryza sativa
agcttgccgcaatacacaactccgtaagttattatttattaaaacgactcctagctatgaattcggctcattcagattcatagctcaatgttggttattatttttttttaacggagggagtatgtagatacatctgaaatgttaattaagcatttaggcagattatatacgttgaatgcataagcattgcaaaagtactagtacacgtgtaaagaaaattgtcttattaattcctccgtctctgagtgggttcatttttcatgcctcccattgatcccaaaataaatttatttttcagctaatattacacactagaatatataaaagtaatggctccggcagtgggctcagttacaaaagaagtgtgatgaagatggagagttcttgattgttgcatgtcgtaagcttgagat

SEQ ID NO: 43283 - DNA, 275 bp, Oryza sativa
  unsure (1)..(275): unsure at all n locations
cggacacttgaaactcagctanatgttaagatttnntaaaacatcaataagttcaatattagtctcttgctctcctgacttctccaccccgttccaagaacaaagcagacagagagcgaagaagcaacaaggtgagcccatgcttgattccttgatccatattagcttattcttagcaaccactcgctgtttcttgattttctctgcccgattcgattccgtaaccatggggggttcgatttgagtatcatgagctgttgatttcattctccacg

SEQ ID NO: 43284 - DNA, 381 bp, Oryza sativa
  unsure (1)..(381): unsure at all n locations
ttttaacttaaatttaaaattgattgtgatgccttttatccgagtttatcttcaacattagctcttaaggcgctaaaatatatatatgtagaagttatatataaaattagtttatatttgctaatcagcgttacgccttataataagtggtatgtgaaaggcaaaactatcacactgggactgaggggctctcctctaatatcaactctggtaagtttcgaattccgtgaaccaaaattcttttgtcagcttccaccaaaaaatgtcctcttatttcttctcttgaatataagagcctggtctctataggtgaagtacagcagttttaccaactactatagtctggttgacacangtattntttttcctgatcatgcattt

SEQ ID NO: 43285 - DNA, 413 bp, Oryza sativa
  unsure (1)..(413): unsure at all n locations
agctnggagtgtgtgagtgaagagaacatttgttgtctttatatagcggcaggtgtaacggttatagaacgcaaaaggtcaattttgccctccaaccgccattcatgagctcatccagaccgtccatgcaaaaccccaaatcatacggctacagaggtggttcgactgaacccgaaccatgggttcagccgaacccatggcaggcccaacaggcttcaactttggcctgttgctcctcctctgcctcctttatccatttctgtgagtggaaggaccattgaagatgtattctagtagtttctggcccactctttatatggataggaactctccttcacttaagtctatatttcatccaactttggcgggttattacctgcattcaaatatacaccaaaacttgcggaatatgt

SEQ ID NO: 43286 - DNA, 225 bp, Oryza sativa
ttgtccatatgccactcagaatactgcactcggttgcttgcgcactccacctgtggtatatataaaagcatgcgtgtcgttgtgggcacgtctaggaagtaacttctcatccattcacatgaggggctctattgacatggtcgatctcagttcattataaaccagcttagttcaacctcacgttcagtctctattcgcttatatgctcgctcagttaatttacca

SEQ ID NO: 43287 - DNA, 405 bp, Oryza sativa
agcttactttctttgcttgggcaattatctatctatctgatacgcttctctgaggaagaaaatagatttgatacgagtacttgtatttacgactaactgttttttcaatgtgaatatatatatatatatatatatatatatatatatatatataaaatctaatattgcttgcaagatatgctgctacttaattcggccgatcataatatgcagtatggttcttatgtaaaaacacattaaattttttattgttatatgtacttttttagtatgctggcaatcttaaccctccgataagtattatatttcgtttgcaacagccaaatacttctagttacaagtgaaatttactttctgaaacgttaaataattccgtccggaggcatataagagctaagtcacata

SEQ ID NO: 43288 - DNA, 399 bp, Oryza sativa
  unsure (1)..(399): unsure at all n locations
agcttgggtatatacgtgtgcatttatctatgcttatatgcagctcgcatatatngattggccaattaatctcctgtagcatgaacgcttgatatgcatccacacatcgcctgaccaatccatgctcgtgcaatctagttgggaagcttgtcttcttatgaatcggactcaaccgttcattagacatgcaaaaatatatatcacaaattaacttgtgattagtgaaaaataataattaattaattaatataatcgccgtaaccggccagatgatcggttgagaactcgacacggcagtaagcgatgctatccgaaatctcattatagatctctattaaatcagccattgaatattgtgcgacttcagccaaatcgcagggcaagatcggacgcagaagc

SEQ ID NO: 43289 - DNA, 471 bp, Oryza sativa
  unsure (1)..(471): unsure at all n locations
taacgaggggttgtgcatagagatttacagtaatttcttaagtaaatagataaaagtggtattaacctgtaccttcattatcttgtaactactatatntgtgcaactagttgcgctatgcaagtagaattcattgcagcatggctgtagcaaaatttgtccagaaagataatgcttcataacacacaaaatatatgaaggctatctatttatgaaaacacaggtaaagtgatgaaggtgagcgtgaaattgtgactggtgtcaacaacattcatgtggtgtttgaatctcctgaagatgaagatgaagatagagattaagtgttctacgcataacgaggtggtaataacatgtgattaattatagtttaattattacaaactttcacaaatggactaatctgatatttagaacaactctctatagagaatttcgcaaacacgcatcgttaatagtttgaagcgtgcccgat

SEQ ID NO: 43290 - DNA, 415 bp, Oryza sativa
agcttcaacagctggtcttgtctctactttattgagctgcccctgcaagtctgactatgcaccagcggcattgaaggaaataaaaaacctgaaaattgattagccagatcaaagatcaatggggaaactctcactagctggctagaacgatgttcgttcttacccacagccgcaaggggcgcttgaagggcactaagatccgctggcaaggaactgtgaggagatgagattctctttgccttatttataaagttcttatatagagtttggggcatgcatatagttagggcatatccttttttatgtgtttgttatctcgctgcgcgccttttcgatgataagatcattttttatctgacttggttgagtaatgcatgagatcaacctgcggccttgtgaaagaaaagttggtaga

SEQ ID NO: 43291 - DNA, 287 bp, Oryza sativa
tatcacgaacggcgcatcctatgacagagaaatatgtatctatttcttttggagatgatgtcacgtcctgataaattcatcccgaaataaaaattattcgctcaaaggaataatagaattaattaaaattcggaaagaaattggcaaacactaaaaatacgtacaagaaaaattcaaatgtggccttgagaatttctgttaaattctccttggtctaaaaggagccctcaaaatttacttgaattttcagagcaccggacataattattaagcaaccaaaacaatta

SEQ ID NO: 43292 - DNA, 408 bp, Oryza sativa
  unsure (1)..(408): unsure at all n locations
agcttttccagtggcacacgccactattgtccgctccgagagccgggctggacgtcgtgttcaatctccgccagcggatcttccattgaggacaagtttatagcggcggcagcgtagtagcagtcggaggcaagcatgacaaggtcttctcgttgtgattccgcagaaaacctgattgagggcctgtttagatcaatttgctgcggcaaatttttttgtaaaagatttggcattgcaattttacaactaggtgtttagatccattttacccaaacagtggtctaaaaaggaaaacttttgtcattttggagagtctaaacaggccctgaatgcatacgtaatgcgttacttgctacatggtcgaatcagaacgcaaagctntgcttgatgcttggtgtaactataatc

SEQ ID NO: 43293 - DNA, 469 bp, Oryza sativa
ctattcggaccttaaaactcagcttatcatatttctttttttttgtcatggacatgtgtggatccatctttatttgtatacgggcgtatcccaaaatttatagtttagaaaataaaatttgtataggtgtatctccgtatccatgttttctgaaaaataccgtatccccgtatctgggtaacataggatagacgtagtcccaacatagacattagcattcaggtccaacttgacgtcaatcccattcacttgcttaccgaataaaacagccttagattgtgtacacgcacgtaggaggcctcccacaaggcagcgaagatggaaatcgtagagtcatctcgcccgtgctgtgtgtacatggagatgaccgagccccaggaggcaggagacaaggttccgatggtgcattagagcaacttcagtgtacgaagtaaatcgaaccatacttgaagaaccgaatacaacacac

SEQ ID NO: 43294 - DNA, 408 bp, Oryza sativa
agctttttcaaaatcaatcttaattattatcccgctcttattcttgcgatgtaattcatgtatagtctcatgcaaaataaccacaccttacataatgttcctccccggtataaaagcagtttgagtaggactaatgaccttctaggcaacactcataattctattcgtagcaactttggtaaaaatcttgaaactaacattaagtagacatataggcctatatagctgaattttcatggcctcaacacacttgggtagtagaataattgtaccaaagttaaaagagaatagaggtaaagtaccgttatgaaaatcattaaagagatccattaaatcatgtttaataacattccaaaaaacttgatagaactcagcaggaaatccatcaggacccggtgctttattatg

SEQ ID NO: 43295 - DNA, 439 bp, Oryza sativa
  unsure (1)..(439): unsure at all n locations
tctcctcgtgcttcacatcatcaagcggtcaagcgaattatgacgtatttgaatcatatacttgagtgtggaatatggtattctacttcatcttctatatgcttcagtggatattccaatgctgattttgctggttgtagagttgataggaaaagtactagtggaacttgtcattttcttggtacatcattgattgcatggtcttctatgaaacaatctagtgttgntcaatcaactgctgaatcataatatgttgctgctgctagnntgtgttctcaaatactttggcttatatcaactttgaaagattatggtcttacttttgagagagtacctctcttttgtgataatactagtgctattaacattgctaagaatcctgcacaacactcacacacaaagcacattgatattcgctttcactatttgagggaacatg

SEQ ID NO: 43296 - DNA, 415 bp, Oryza sativa
  unsure (1)..(415): unsure at all n locations
agcttaatgaggatgccaatgctcatctgcatctttttctgaagatctgtagcacgcacaccatcaagggcgtcagtcctgacgccgtcaggctatggctgttttcgttctcccttctcgggagagcgaagtagtggttctatcccaaccgtgctgctatcaatacctgngacaaatgctttacggcattcctctcgaaattctttccgatggacaaaaccaatgcccttcgtggaaggatttcaagtttccagcagacaagggacgagtctattcctgaagtatgggaacgtctgcaggagtatgtggccgcctgtcctcgtcatgggatggacgactggctgatcctgcagaacttttacaatggactcacaccgatgtcccgcgatcacctggacgccgcagctggaggagc

SEQ ID NO: 43297 - DNA, 467 bp, Oryza sativa
  unsure (1)..(467): unsure at all n locations
tatctagactctcgggtaaccaatcatttngatcacatatgggctcactggattaccttctgtaagcctgcacgcaaacaaggactntgaggtattaaacctctcagctcttgcatgctcctcanacatgttacgtaatcccgtgattatcgtatgagcatccaatgcctcatattgcctttgaagctcaggagtcatagtagcaagcatgagacagcttatatcaagataatcattgcatcgcttttcatgctccctatgttgagcagcaggagcattattgggcaagtcagttggaaaaggctgtgtaagcacaaactctntgtgctcttgtctgaacaattctcaggttgcgataccaaatccatgaagttgttccagtcaacttctctttctcaagaatagaccgcaagttaaaactggatggtgcangagctgccatgatctacaatagaaatatatgtatg

SEQ ID NO: 43298 - DNA, 408 bp, Oryza sativa
agcttaccaaaacgatgatccttctggctaactcttccactctgacccaccgagccaaaaggaaagaaaaagaagtaaagaacagtgcagaacagccggttagctcgggtagtcgtattatcattttttttctatgccctgttaaattgttagcataatctttgtttggattgatacgtttgaacatggaattccttacttcttcatggattagaatattaccagtagagaagtctggctttgtttgtcttgtatgttcttccatagggaacatacctttgcccaagttggtggtatggtgctgaactgtttgcatgttgggtgtgctttggggcgacatgagttggggtgagtacattgtcatttgccaatataaccaatatggcctgcttggagaaaccgagaaag

SEQ ID NO: 43299 - DNA, 445 bp, Oryza sativa
  unsure (1)..(445): unsure at all n locations
ntagcccgccgactcactatgcgcaataattgcagccnctttaactcttttccatcccttttctcctcgtctgcttctgcacacagcttagctagtagctagctgccctcttcgtcagaaacacctcacatttcgatcgatcgatcgatcgagccggtcaggatacgagaatggaccagctcgtagcgctgcactacgcttctctgcagccgagtggtggtggccggccgggcaagcagaaagcagaggagacagcagtaaaaaaaaaaaaaaaaggtgaccttggcgcctaccggctaccatagttcagtgctaccatcatctacctcccaatggaggccatgaaatgaagtgtttgcactctttcaagtgttaattatgaccacagtaaagatgcagcaagctagctagcagctgctgcaatgccattgtcacctactctaac

SEQ ID NO: 43300 - DNA, 415 bp, Oryza sativa
  unsure (1)..(415): unsure at all n locations
agcttgctcacntgactgaacagagaaaatgattattttatctgaaaatctagggtcagatatagcaatttctgaacaccaccgccacattagaaagtaattgaagaatccgcatggagtcaaggactttgggtaaattgcaataaaatgccaacacgaaatggaatcagcatttgtaccacgttacaaaattttgcccatcgatcatggaagaaacgtgcataccattttgtggctggccaataaactacaaaacaactgaaattattgacaactatgaagagagaatgacatgttactgtgttttttatggaacatcccctcttgctcaaaacacaatcgtggaagaaacatgcactctgaaattggtgcacaaaagtttatacacacaaaatgcttggtatcagctcgatct

SEQ ID NO: 43301 - DNA, 407 bp, Oryza sativa
  unsure (1)..(407): unsure at all n locations
taacataccaactggactaagcacaagccagtcatgcatttagctatcattganacaggagttcgatctgtgcagtctgtagtataaagtggctatggctctgatgcaacatcgagcggatataacattgacccatcggtaaaggaagcaaacacacttgcgtgaagttattctatgattgcacactatattgagttataattcatacgacaattgataaaactgggtatttctaaccatgcttcttctattgtcagacaatctaatacagctacttgacttaacccatccaattgctccttatctcttaagaaattatttgtgggctggtcacaaacttatagctctcttttcatggaccactntactggtatactaatatgataggaatggcatgggtacttcaa

SEQ ID NO: 43302 - DNA, 414 bp, Oryza sativa
agcttgcgcaattgagtaagggtcttgatctctttcagaatagctcggcccttctttgcaacactgacgtcgatgacacccagagtgtgtaaggtcgtcatttttcgaatccctctgggcaccacaattccaccattgcaggtgccagcaacagcaggctgctggccgcggtgccggcttgtccacgtctcccgcaactcgaataaacgggacaccgcagttgcatcactacaacaaaaatgctttgtagagacatctttctagtactatagagacacttttcaaatgcctttacaatactatagaggcatttttaaaaatgtctaataagtgtcttatggtgaattgtctctataaacgaagaggcattttataaaatgtctataaggtggtagaggcattttctagagacat

SEQ ID NO: 43303 - DNA, 465 bp, Oryza sativa
  unsure (1)..(465): unsure at all n locations
gacctataaaactcaagctgacacggagaccgcctctcatnagggctgtaacgatggacctgtcaaagaatatagctccggcttgttggatgtttctggcgatggccggagcatcgccggaaaaaagatcgaccgacttcaggcccgcggtggcagtggctctgcgcttatgcccgagttgcaggatgccgtctaggtatttgcaataatgtagtacaactatttatttgcaagtttggcaaaaagttaccttctccaactattataacacatgttgttgcacatatttaagtcaaacttcccaaatttgaaatcgatccttcttaatatttggtggagcatttaactgctctacctccatccaaacagtgcaccgtgaaaacggtccacgatgacggctctattaaaaaatataaatgtttaataaaaacacactaaggtatctgtttatcactatacaaaaaa

SEQ ID NO: 43304 - DNA, 336 bp, Oryza sativa
ccaagacttcaataactgttacagatgattgatattaaaatccgccactatcgtgtgagcttatacatgaactggatcttaactggcctattcatatggctaattcattggcatgtgtgtatgttactatctgactattagcgagacgctcctaccgcaaccttgggatattggggagagcaaaatcttacgcaaaaccatcaattgttactaaaaacttctctctttggccagtaatcatggctatcaattggttatttcgtcgattatattggatcactgaatgattctagatcactgacctcgtaactcaaattactgatggtgcattgctta

SEQ ID NO: 43305 - DNA, 412 bp, Oryza sativa
  unsure (1)..(412): unsure at all n locations
agcttatcattcccatcaaacgtaatttttgtcttaaatcctgncaaattggcaaacactccatgtgctgggacttggccatcaaggttattaaaggatatgtcaagccaatataatgatgtcatgttttccatgttctctgggatttgtgcagatagattattgtgtgaaagatatagctctttcagtccatccatgagtcttaagtcctgaggaattgcaccaagaaggctatttttggtcaaatttagcagtactaatcctcgcattttgctcactgatacaagaatggtaccattaaagaagttatcgtccaaatgaagttccatcaagctctgacagttgctgagactatttggtaacaaccacaaacagttgttactgtacatgtataaatatgtaagttttgtga

SEQ ID NO: 43306 - DNA, 427 bp, Oryza sativa
tcgaccttggcgacgagatgaacggatcatgggatggatggatggatggaacgaggcggctggccgggagggaggtgtccgagttatatatgggcgtgcgtggtggtggcgcggcgggatcggagttgggatccgaatcggaatcggaatcggaagccaggaaggaattaattcttctctccgattcggtcgccgtcgggctcgaacgtacgtacgcgcgtcgggcgcgccgcattcttacgagatcgcacgcacacgcacgcagttcgggagccgatggccgggctcgacaccgacacgttcacgtccaccacgtcgaatatccatggctccatggcccatgcaagcagacgcgcgcggcggtggcgcttgacatgccgcaggagtgcatactgcaaaggcaagagcaagttcgttctggagcacc

SEQ ID NO: 43307 - DNA, 410 bp, Oryza sativa
  unsure (1)..(410): unsure at all n locations
agcttatcacatcacctcaatgggttttttctttnggatcattgatctattatttctcttctcttatatacacgatcttaatacttctagcattggaggatctaagataaatgtaattatttgtaaagcacatgaagtcaatttgttaatttggctacaaagcaaattcagtttgtaccacacttttactttttatatcatacaaaatattgctagcaatctcaaactaaacaataacactttcagataagcatatctaatcaggcaagagataacaggaattaccttttcttagtgagtacttgctgtctaactggttgatcacagcaaggctgaactgtgcatatttactccatccatgaggctgttcatttgcgtcagcaatatctatgtacatcgaaagggactgt

SEQ ID NO: 43308 - DNA, 493 bp, Oryza sativa
  unsure (1)..(493): unsure at all n locations
ggtcagtaaacaagaaccatgtctagtgttagcacatggtatactgtataggctgtaccattggatagcaagaagatgaaaaaaagaacttcacaaaaggtaagatcaagtacaaagtgcttcgactttcctgtacaaaacaacaaaaaaatctgatacgtactcgcagtttggagaggttgtatttgatggttcggattagtataacaaccatcaaagatcccaaagaagtttgatgcataaggcgctcatggtaccaagggacgctcggaagcacctagaataatacataaaagcattaacactctntgaataatataaatatatagtaaatcaacttgcttaccaatttgtgtacactagcattgaaggttgaatcttgactgagtataagaagaactatcaatagcatgtatatctgattggaggtctttcttgatgcattgtagagcatttccaagataggcatcagctgttcacaaaaattacaaaa

SEQ ID NO: 43309 - DNA, 414 bp, Oryza sativa
agcttacccgatcatgaagatcgactttctttcgaccctcaagttcatcagaggcatcacatcccgatttggagtgccgaaccgtatcattacggacaatggcacccagttcaccagtgaactattggtgactactacgacaacatgggcatcaagttatgcttcgcctcacccgcccaccccaagagcaacaaccaagtcgagcgcgccaacgccgagatcctcaaaggcctcaagaccaaaacatacaacgtcctcaagaagcacggggactcttggctagaagaactgcctgtggtgctgtgggccaatcggaccaccccgagtagtgcaacaggagaaacccctttcttcctgatatacggcgccgaggcggtcctactgtcggagctcttcctaggctcggctcgagtt

SEQ ID NO: 43310 - DNA, 445 bp, Oryza sativa
tcgtttaaggggggaagaatgtcacgacggctacctcatctgatcaaccccaaggcaaggatgatcaaggcatagaaccaatctcacacaacgagcagagaaggaagtctgtgcgggagagacagcctaatagattgtataactcaagtgtttggactcagtgatattgtgctgggccactgtgaacgagtgaggcccattagcgcagtgctataataggccaccagggagtggattgaatcgaacaatgtagaaacactttccctgaaactaattcaaatctctccatgttctatagttgttcttccccaaatccctcttcctcttgctgtcttgttcaatctaaattccgatccttcccgctaaaccctaattttagaagtctgatagtgcagcccacccaagtgaattcttctctgaaagttacctctttagcctgaatctg

SEQ ID NO: 43311 - DNA, 413 bp, Oryza sativa
  unsure (1)..(413): unsure at all n locations
agcttctggcattggtagatctgcgaattatttattgtgagtgtctactcgacttgccaagtttcccatccctccagtgcattaaaatggagggtttctgccgtgtcaaccatttgttgcaactccctctattctctcagcttgagatgctagaacttcggtgtcacaaaaaactcgtatcgctgagaaaactccagcatatttccccatttcacagtttgagattgagaaaagaactagtacaaaaggtatcaggttgtgaagtgttgccattccagaatccctctgttcaagatagtcaggtatttgttctttctcaagtagaaatcaaacatgattgctatcaaatgttgcatactctaaagcattgcatgctttgtggttntctgtgcatttcaaaaaacttggacatt

SEQ ID NO: 43312 - DNA, 358 bp, Oryza sativa
  unsure (1)..(358): unsure at all n locations
tatagagcacagcaactatgcggcgtgcatgaaccgggcctagctcgagctcgtctcgtcgtcgtcctcaaggagctcttctgctaagccgatgatgtggctgaagccttcctctgtcaacgcgtcgtcctcatcgctgcccacctcctcttcggtctcgacgacgtcgtcaccgctgtggcgagacgcgagcgcgcgcgcggncgactcctctccctggagggcgttcactctggcgcagaagctggcgacgttcttctccgcctctacggcagggccggccctgacggtggacgagcaatgcggccgctccggggccccgtatcgtatgtgccccaccccacccccaggccacccc

SEQ ID NO: 43313 - DNA, 414 bp, Oryza sativa
  unsure (1)..(414): unsure at all n locations
agcttgcttgctagggccatatatatacttttcaaattaaattcatcgccatggcggaccacgaagtaagaggtctctacccgatcgacttatgtcggatggacatgatgaccgcgcttggcttcgtcggcagctagcgacgtcgacgacgacgaggacagcggcaaggcgatatgggatgatctcgcttctgaaatcggcggcggcgccgccaccgtggatactccggcgacggtgagttctaccaatggatgcattcatggtcatgcatgtatctgcttagtggttaatttttgctggctagctggatgtgttgtcagatttattgtgctgctagctgttntttaatcacctatgcgattaaacaggtggtcaggtagccagctatagctaggtaatgtactcctactggaa

SEQ ID NO: 43314 - DNA, 345 bp, Oryza sativa
actcaagcttctcttactcgaaggcgggacagattgagcaagaatgatttcttccactcgtcctcagcaaggccacactcggaagatgcataataaatgacagggggtacaagggtgataaatacagggcgaacagttgcgcagtaaacaccattgaaaagtcatttaggtgcccaaagctattttataaagacgatcctaaagctacacaatattattaatctaagccgtgaaccctcacgaacctgccttaacccaaggcctacgatgattcagaccgaactggcaaccctaccctgggtcccagctcgcccaagccaacccaggtcaaccattccacaattt

SEQ ID NO: 43315 - DNA, 410 bp, Oryza sativa
  unsure (1)..(410): unsure at all n locations
agctntatttctctctttatttctctctcttttcttctatagccatgcctttccctccttttctcattttctttttgccaaggatcttctaggagaagaaaacatagtctaaagtaggagttttattgaatggaatttttgtgggaagctaacttccggtgtagaagcttagcttgattaaatatgtggaaatgaaagtggaaatgaccccttgatcatgagaatatgaaagatgtctatcacgagtcacacacatttgacaaagctcaatataatgtcaagcagtcatatgcatgataaggttcatcaatgatatacttgcatatggccttggtaggtataaaatgaagtcaataggaggaatgagcctttaaaacattttttattttgaaaaacaaattcccataaat

SEQ ID NO: 43316 - DNA, 469 bp, Oryza sativa
  unsure (1)..(469): unsure at all n locations
ggggctatcccatactagcacatgtggttgcactgtatactaaatgaactgacattgagtgaagtccttatgtcggtttgggcacactctccccctatcggtacacaactaatcaccatatgtgcaccacttgaggcccaaacctaaaatccatgttttccatcattttatttatcaaaatcacaagtattaaagttctgtccagattatttcaaaatcaatttttcatatttgtaatgagcccataatgacaaggtagaccattctaagcatggctaagcattatagtaacctagtgactccaaaattcatatataaagtggtatagtcatattgttcctaaggttaggaatgagggatatggatatatgtggggtcaaggtgaatgcaaacaatangagtntgtctaacaagtttaacanaactttaatttattagtgtacaatcgacatgcaagatttgcaaacat

SEQ ID NO: 43317 - DNA, 387 bp, Oryza sativa
agcttgggagaggcaaaagatattacatttatggtgagaagaccaacatcaacaacaagccgaagggttcatcccaagggaggaagctggacaatcttatgaaggcttttcaacaagtttgcgccgccttctagccactaagtgatgtacatggtgaaagtggagatgatgataagggaaagaacatctccgatgtttgcttcatggcgcgtggtgaatctgacacagagtatgaagataatgaggtaggtgcttttgaggaagctattaatattttgagtgcaaaaaataagaagtgtgagaagatgtatagaaaacaagaatttatcactgaatctcttaaatctgaaattgctagattaaaatctcttattcctaatgatgata

SEQ ID NO: 43318 - DNA, 452 bp, Oryza sativa
  unsure (1)..(452): unsure at all n locations
tatgttgatattacctcgttaaaaactttggatgagaatacctaaagggtgaaactcatacaaaggaaaaagagtataatatgacgaaaataggttatttgccaaaggaagatactccccctgaatcctgcaaatttttaagtcgtctcataccaattccttcgacacatttaaagaatgtggagtatggcagagattttaggaataaatcagcaagattatcacatgacttagtttgcaagatgtttatctctccatgttgctaaagctcatgaggataaaataatttaggagcaatatgcttagtgatgttgctcttaatataaccagtttccatatgaacaatacaagcggcattatcttcatagataatggtangtgatccaatgaaccaataccacaagatgttaatatgtggttaaccattctgtgaagccatacacactcacgtg

SEQ ID NO: 43319 - DNA, 317 bp, Oryza sativa
agctttccctagacactgtttctcaccagttaattctctctatcctggcctatcctttgcttggtgtcttggatgaaccgaaggaagaactgaccacacacgttcccttggattcgataccctttggaatactctgtaggggaagtgcaacatcggtatatccgtgcgcttgcggattttatctgtgatcataagaattaccaacagggagcgcgccacatgtgggtgccccctccccccccccccccgggtgtcgccgccattttttcctctcgtctctagtgtagagggcaaacttctatctccacgtccttttt

SEQ ID NO: 43320 - DNA, 492 bp, Oryza sativa
tcagcttatggtgttcttcagcatggtgccctggattccaggtgtgatggatcttgacactgataacattctgttgtgtgctgcggcaatgagagcaaatagaagagggatctccctggttgctgacaacatattattaggattcaagttgcttctagcatcccctggatcaggattctatctttgattgtgaagtccgtgacttgacaacaatgatgactggaccatgattcttggagttgacttgactaggacttttgtagatgaaaactactcccactcagactctcttgcgatccttctcgtgtccccagcactgcgacatatgttgccttgccccacgctagactgctctgtcctgtgcccggagcatgaatccctatcttagctatgggctgtactgtattccaaccataacaaaccttctgctggatcttcttttgtttgctatgcgataatatgataactcaacacattaacagtactataact

SEQ ID NO: 43321 - DNA, 412 bp, Oryza sativa
  unsure (1)..(412): unsure at all n locations
agcttctaaaatatgcaaagccatcatctttctaccttangagctaatatggatggtatggcaaagttcggaactcccgtttcgcaacttttgctccgcgagcacgtttcacgaactgctaaacgatacttttttttaaaaaaaaattctatagaatagttactgcagaaaatcatattaatctatttttaaagttttttagccaatacttaattaatcatatgttaatgagctacctcgctttctgtgcgaagtgaaaagctactttagaacatcttaatcctgtgcataatagcttctcatatacaccaaaagttatagaaatagcattgcatctatatataaagtctcatcttcttattagtatattttatttagctgctctaaattggtgcaggcgggcgctggtttg

SEQ ID NO: 43322 - DNA, 437 bp, Oryza sativa
  unsure (1)..(437): unsure at all n locations
tccttcttacttcttgtgctaagattaatacagatgttcctctcttgggtggtattgacagctatctcatcgaattgatgatttatgggatatgcaacattggaagactatcaaagatgccttgcctgatgtcaattgtggtagcagattgatagttataactcgtctaaacaacatagccaatacatgtagctctggccagaataatntgacgtataaggtcatgcctctagctcaccatgactccagaacattgtttctcaaggaaatattgggccatgacggcagttgctcggatgcaccacattttgatgaaattatgaagatgtttggtggtatgccttcagcacataaatgtattggctcatttctgcgcagcacatcatgcacaactgagtcttagaagatcaatatgagttctttgtatcctgaacttg

SEQ ID NO: 43323 - DNA, 337 bp, Oryza sativa
gcttttagattggccagacttttcttttgcaggttaaatcacatattcagcagagtttctactgggatcagaaaacgttgctgcttcacatgcactttccctgcttgagaaaggactatttgcggccacagtttctgagcttacggatggcttcattctgattgaagaaagcttacttgccctcttctgagcgagtgcaccacttgatttattcaccttctttactatcttaacgtctctaaggcttttagcatcagtaatgtcactgagtttgtgatacctgttcttgatggagagatagttaagtcaacccttggggtcactccctcacaacttt

SEQ ID NO: 43324 - DNA, 441 bp, Oryza sativa
tgtttgtaaataccatacttcattcgtttatcacatgctacagaattcttaataaatgctggtatataccctacagattaaatcagaagtcgggacacaacagaagttgaggaagataaaataatatactgaaagacgaacaaattattttgcaccctacagattaaatcagaaattgaggcaagtaccctgaccacattgatactctatatttctattaaataaatacaataaatagaaaatatatatgatgtaaaagattggatcgaactttgtgatcctaataaccattatttttacaatatgtattttctggctacactacacattctaaacacgttatatgcaacaccttcaggttgtatgagatctcagcaatttaagaaagattaccttttttttttttgataatagcatctgttatcttccggtcaagtaaac

SEQ ID NO: 43325 - DNA, 383 bp, Oryza sativa
agcttgttatgccaattagataagcactattcttatacattgagtaaatcaaactcagtttgcaatggtttgtttagcaagtgatgaatgcggatttggtttatttatggcaccagcagtacaatatgtgcagtaatgggggggggggggggaagatataatttttattaaggcatgaatgatgatttttagtataataacactccctaaaccgtcgaaacatgaaacatgtaccttctatatgacatgttatgagtgaacgttgaagagaacatactagcaacatatggaactttccgctaacatctaccaatttaagtttgattctagagacatacaagaagttaaattaattgtgcctagaaaaagtatctgaatgcttt

SEQ ID NO: 43326 - DNA, 465 bp, Oryza sativa
  unsure (1)..(465): unsure at all n locations
tcccgtccattcggntgcgcccggtcccaagtcgcttccaggccttgtcttgttcggtatgtatgtaatatcactgtcatgttctttgctacctccaccattggaatntgcactctactgtacagtcatgcctaacttctaagctcaatgcaagtgcgtgatgcctccaacagagttggaatgcacatttctgccatgtggataatcaactgaactgcaattactttctgatgctaaatgtagttttgatttccactccagatgttaatatacatgttagttcagtcaaccaatgaaattattgcttcactgcaatctttcttcttctcttatacgttcaccaacaaaagtagttgccgaaaccaccataagagaatctcacacacaccatacaatgccaagaactntcactatgtttngatgtatcatgccatcacctactgcatcttacatttcctttacttg

SEQ ID NO: 43327 - DNA, 328 bp, Oryza sativa
ttcttggaatagttactgtttaggcaagcacattcatgaaagacaggaatgatgttgcgataactctacgatcgcaatataaactatacttgatagcgccatacagccaatgcggtttctggctctcctctgtgattggggaaggagtaagcatatcatatggcgacaaaacctggaggtcagctgagctcatctaaatctccagccgaactctaacccaacctactacgatatgagctcgattagctcaccagctttgagcactcctacaaccttgaggagaacacaccctctcttattgagtactacctcccgctcaaaataagtg

SEQ ID NO: 43328 - DNA, 415 bp, Oryza sativa
  unsure (1)..(415): unsure at all n locations
acccaactaagctcgcaaccaactctactcaaatgtacagtgcggtctactattttacctgagctttgattcccaccatgcactgcctgcaaactgagttttgttctcaactcatacagcacacataaggtatatataaatntccccagataatacagcatatgacctgcatgcttaatatggtaggagatcccagtggaaatgaagcaacgcataaaaccacggtgactcatgctatgaagattctccacttcttcgagaacacgtgccctcaagttaagagtgaataccatctttggctgctcccctcgtggtgcggagcggacacctttttctttcacatgctaagcaattatttgaataaaacccgaaaaaaattgacatgtagagttaatgaacctactagccccaaaat

SEQ ID NO: 43329 - DNA, 383 bp, Oryza sativa
  unsure (1)..(383): unsure at all n locations
caaaattttttatcctatccgcacacgcggcatatgttcgatggggtcccatataattcttttctcgattttctcgcgaaactaatggtgccggatcgccgtgcttgacaagatagttagccctatggctaattagggccaccaaaatgattatcangtgatcaattaggcaattagcgtgtcttaagcatgcatgttggacacgaagcgtgtgtacgtgtactactgtgctttgatatgaaaagattgaatctttttgggttggggtcagtgtttaatcaccaaccggtggttagatgggagctggctaataccattagtgtacctgcacttgtatgccatcttgagattgcagtaaacaaaactcaatgctagcttgatgt

SEQ ID NO: 43330 - DNA, 492 bp, Oryza sativa
ggatcggagcattggtgaacacggtatgcgtacacggttcacgtgaagaaatatgtgcgcgaaagctctaatctctctagcacgggcggatgaatcaaccacgtacgcggtactcctcgttctcgcgatccgagtccgacgacgacgaagccgccacgttcgcccgcccgcccgcgcgcggtgccaaggcaaaagaaagcacgccgcaatggcgcccatgcaagcaaagcatgtgcgcgcgcgcgcgacccacacgcacgcttgtcacgtacatatcgatcgcaaatatcttgtgcaccttatacaatattcaaatcgatcagcctctcgttcagtcgttcgatcgctcgcctcctcctctataaatagcgggccagtttgctcgtacaactcacacacactcatatccactactactactagctaccgagcactgagcactgcactctgctgctctagaattgaagctttgcattggttggtagtgagaga

SEQ ID NO: 43331 - DNA, 408 bp, Oryza sativa
agcttggtttaaactatgagatttgctcttgtcattaaaaagtatctcgaggtactagtatctcacggtactaaatcgtttccgatcatttgatctagttggacatgatggccattgctagatccaacgattgaaaacgatttgataccgtgaggtaccagtacttcgagatattttttttttggactgaagcaaatctcttaaactattctacaactccacttcatagttcagactcaactcctgaagctaaatttaggatttgagttttaccaaacagttccatattttagcacgctacaaacgaattgggggagcctgagcctgaaatgccatttgcctgattgccttacctctgaactgtgcactgacattcattgcatcattgaatgtcgatcaggggtagga

SEQ ID NO: 43332 - DNA, 484 bp, Oryza sativa
tcatttcattgagtgcattgcatatgtgcatatcagatgatgaacaaactacagagcgtggtgattctttgtccctcccttgcttgtttgtgtgagtgagcgatttgctatgcaactggagacctggttgcatgagcacacatttttctcatccttaaaacgtgtgcttgtgttgtggacttgtggtaccatgagcttcagtttctcattcaacagtcctctcctatgagcaatgcaaggcagagacatgaacatccctgctgcacctgcaacagttaacatattgcagatgcaggcacttgctctcagtgtatgtattcgtgcaaatgttgaccatattaacatgatacatgtccaaaacttaattaatccatgctaatgttccaaatctgttcagagtatagccagccgtgcggtaaaataggatgaatactgatatgcagataggagaaaaggacacctctgctctgccattgctatcatc

SEQ ID NO: 43333 - DNA, 404 bp, Oryza sativa
agcttgtggaccagctattatattgtattatcagtacaagagtctcgttgcatagaatcaccgtggactaatctgcagttatactgtcatacaaggaattatgtcccatcttacaaccgcatttcacgaatgtccaaaaaacaactctatttttaatagtagttcaggttcgaacaagtgcacagtatagaagttcaagttgtttttagtctttgaaagttcagggttgtcaaatagactattcctaaaaaggagcatattcctgactggcttatcaacacttaacatatgtacttcatacctttgtcctattaatagtgcaggtgtaacttttcatctgttttcaactagtgattactcctaactttcaaaaaagtttcatgtttcacattataagacatttt

SEQ ID NO: 43334 - DNA, 464 bp, Oryza sativa
  unsure (1)..(464): unsure at all n locations
tgcattataccaacaatcattgtaaatcatgtatgaagttaagaccctacgggcgtatatagcgattattcatcattgtttctagtcggaggacttggcaaacataatccaggatggtgttggcaaaaaaaaaaaatctataatgatcttagaaacactagctaatatacatctctactagagacctaatgtctgaccctgctgcaaacaaattgttaacagaagattgtaccacttacctcaagttcataagcctgagttctttctttatcatcttggttatcagatccttcttctttatattcatcattttcttctctggtatccttttccagtataactagcattttcccaccttctttctggatataaccaaaggattcacagacaaaaccagacaccgtcntatactgatgaccctgcaacaaatgcatttcaaattcaagtgaaccctattcacctat

SEQ ID NO: 43335 - DNA, 403 bp, Oryza sativa
agcttaattaatccatcattagcatttgtttattgtagcaccacattatcaaatcatggcacaattaggcttaaaagattcggctcgcgatttacacgcaatctgtgtgattagttttttaatctatatttaatactccatgcatgtgtacaaacattcgatgtgactgggtgaaaatttttgcgtgggaactaaacaggaccttagtattcatctgatatgttccccaaagtctcctttgaaatagagaagttttttttaaaaaaaaattacaaaagctgaagtaatttataggaatcaatcggacaaatttatgcgtcctaaaggatccttaaataggtgcaacaaacttgtaaattgcacattccatacaacttgcttaagtataaaccaaggccaaaac

SEQ ID NO: 43336 - DNA, 413 bp, Oryza sativa
  unsure (1)..(413): unsure at all n locations
ntaatcggcaagtggcggtaatggaagagagcgcagatgtagttggtgatagactacaagcatggcaagggaagaagaggagactaccatgccgcacggagctcgctagggtctcagcaattgcctccattgctcggagtgaggtggacaaccacgggcaatgagaatgaggggccggagaagggaacggccatctatcgcctggtccatgccattgccggctgcagcttcctccatgtcgcctttagatctgaagtgcccagctaggacaagaactccccaaccgcctcattgttgagcctcggcctcctagctcccctcatacctaccgctgtatcctccttactcttgcaatagcctcatcgaagccctcccttgacggcgttgatctacataaggtcgcccgatttagc

SEQ ID NO: 43337 - DNA, 371 bp, Oryza sativa
agcttcatagagtgcgctgctcattttgttttgctgcagccggctacagtaggatatgtgcaccgcttagcggacatattatctcacgttcgatgccatctatcttacctttggtgacgagatagatcatttcatgatctcatgatcttacacaaggctgagagcccatattttttctatacaagatccatgtggaggaacggtgtaatatggatgactcctttctatacacctctgatgttatatggttgacttatatgcaagtgggaagactttacgctgatgctagtgtgggctgcgcggccattcttacaggacacgcccagagactgctcgagctcctcacgagcgcttattgctgaccatctgga

SEQ ID NO: 43338 - DNA, 410 bp, Oryza sativa
agcttgctagttgtgatcaaaataactgtgtggaaattgatagagtaactgacctcattccgaagatcataggatttacaagcttcagaagtgacacaatgaacagtgaagcacagcaaatggtcctagtgaagtcatcactgaaggtgttgcagaggctgacaagcattgaaggggaaatcggcaaagcactgcggtacaagatatcgaagcatcccttcttgttaagaaacctcgcagatatcttgggagacaacatcagagaccaagaattaaaaaagcttgcagtaggaatcctcagaaacatttccattgatggtaacacaaggcacgagattgggaacatgaaggtgctcataaccagactgatgaaggcattcctcgacttacatagaacctccaacacagat

SEQ ID NO: 43339 - DNA, 409 bp, Oryza sativa
agcttcgtgcaaagttctatgggccatttataatcctgaaaagaattgggaaagtggcttaccatctgcagttaccggaggaagctggaatacatccagtgttccacgtaagccagctgaagaaacatgtgggaaatttggttgtaccacttcctaatcttccattggtggatgaagatggtaacatcaagactgaacctgtcgctgtactatcaagaagggtagttccaagaagaaatgagccggtcactcaatggcttgttcactgggaaaatctatctcctgaggatgctacttgggaggactctgcttttattcaagcaacgtttccacattttcgaccttgaggacaaggtcgtgctcaaggggattggattgttagagatggagatttcaaagaagaaatgga

SEQ ID NO: 43340 - DNA, 413 bp, Oryza sativa
  unsure (1)..(413): unsure at all n locations
ntgaagaattatgtagttcaaggaaggatgatcaacctgtagctgtatgtcaactacaccgtctgcatcacaatactgtagtgtggacctctgacgctgaccttttttcacaatttattaattattgaagccaaatggccaataaattgatcgaaattttgtgtcaagctaactacaatgctctagagaaaaggtgaacaatctagacagacagccattcggcangaagaanaaacagaaagggatagtcaatctgcctgaaaagatcagataaatatgttgaacagttaaactgcacaagctaatattgaccttaattaagctccacttttttcaataaagtgcatgcctttgtgtaaaacatggngcatgcctgctgcaagtactagcaggcacaatcagttcatggaatt

SEQ ID NO: 43341 - DNA, 408 bp, Oryza sativa
  unsure (1)..(408): unsure at all n locations
agcttgatgaagtccttggggctcctccatctctctgtattggagatgcacaggatgggcgtcaatttccagagatggcgccagcgccgggacaggacacaggtcttcacggcatcctcggacggcaagaaggacagaatgtgctggaggagagcatccgggaggacgtcgatcccgtcctcttcgctggcctcagccattctcttgctcctcaagctcttttgcttatgagacattccgtcgaacaggtggcgggcgacgcgggcactaccgcgcaagaagcgaagagccgactcaccaggtgcaatgcgaggtcctcgcttaatcaatcagacgcgcggcgcccatggcggngaggaggcccagccagccaggtggctggccgtgtcagcggtgcctttgactttg

SEQ ID NO: 43342 - DNA, 399 bp, Oryza sativa
tggcccaactcatggtcatgctatatattgatagccaatataatgtgcacaatatatacttgtctgtggatgcctagtcacaatcggcacagctaaattggccggcttggggtttatatataatttgatatgtgcacagtcagctttggagcttctctctttaatgtgtatatataattatttggctattgatgacgcaatatgttgcttgcttgtgttctcaattcattggacataaataatgttaatcacttgcttaatcgcaacttgatttatgatccaaataaaattttagtcttaatcagtcactacttataaaacgaattttcacaacgatacccacatcaccgtgcagacgggctgtatttcggacacgaacgcccgtctggatagtcgtgg

SEQ ID NO: 43343 - DNA, 428 bp, Oryza sativa
tcttaatcaccgccgctgcagctgacggtctagatcaggctcctattctcatacttgataagcaatgctcataatactctaccaaaaggacgtggctcactttacgatccaaataccgatgaagtttataattcagactttcactacgtggggtgcttttcatcccaggaaaaaacaaacctttagtggacgcagaagcccatttcttcctcaaagtgtacattctcgcaagccgttgggtgtcttcacaacctttatgcttgaccttatactcgacccactttctctcaaactcttcatgatgatatggcgcgtggacaagtgcttgaaaatctgaaagcatatcacgacgaagatgtcttgccatgttgtgctcaatgtgccaagtgcacaaccgatgctcataatccggcattacagctgctatt

SEQ ID NO: 43344 - DNA, 415 bp, Oryza sativa
agcttgaggcttggatgatctcgatagatcttgttgtcgatgacgataatcgttccgatcttagtcggaagatttacttggacaggttggatctctccacggccgaagtcatcgagtagcttgttgttggagaatccatctcttaaacccatcttgtctaaatcctgaagcaccaaaatccccctacctggcacgccactgtcgatatctgatgtcgcggttccggtatttgcatggtatgaggatcgtcagtgctagggtatacgcgagactgaggtaaaagagatggagacatgaatttttatacaggtttgggcccctgaattgttaagtaataaccctacatcctgttggccggagccggtcgttgctcttattcaccataatcacaccagtacaatatttggggtagcct

SEQ ID NO: 43345 - DNA, 193 bp, Oryza sativa
tgccgttcgccttgtgaacgaccaccgggttcgccagcctctccggatggatgacttcacggatgaatccggcctccagaagtctcgacaccttctcgcggatgaaagcttgacgttcccgtggctggccgcgcactttctgccggaccggccttgcgcccgggcgcacggcgagacggtgctcaatcacctt

SEQ ID NO: 43346 - DNA, 411 bp, Oryza sativa
  unsure (1)..(411): unsure at all n locations
agcttcacaaactctgctactcactctcttgtttgngngngtctccgatcttggccatttccaacagggacgaagcagctccgagtggagaggcggagctcgccgaagatacacgcgtggggaggagctcgagcgccatgaccaccgcgagtttggcgcacccattcgcctagcttggtggaagcaagctcgagatttactcaatgaggagcgggctcgcctccatcagactgtggtcggcgcgaccggcgtctacgagctacctctgtcatcgctggccgcctagctcctcttctgcaatcgagctccgtctccgttgccgcagaccagcgcattctccggctcagtcgagtactactcctgctcctgctcgtgcttgtgctagtccgtcgtctcctgcagtcctgcttg

SEQ ID NO: 43347 - DNA, 467 bp, Oryza sativa
  unsure (1)..(467): unsure at all n locations
tcctttagtagatcaatttccttaaccgaatattgcaagaattcgacaactgacgacttgacaactctcatcggctaatctcagatcttcgaagccgatgctgactctaagccgatgactactccgggcttaccaaatttcactgttaacaagcacactccattatcgagaacatactatacaaatgcagagttgtcgcgcgcaacctaccaacgaagaccgacgacctatctcatagcactggccatggctggactactcgagaaaaggtgttaacggataatngctcgcgaacgatgtcggcttgatcacccaacattattgcggacaggacatccagatatgctaccggttgtgtatgtgagtcatgctggcacatgagatcacatgtataaaccaactctagcacctcattggtgtcgaaaataatctactcgctgttcttgaccagtacatggaagaatctc

SEQ ID NO: 43348 - DNA, 412 bp, Oryza sativa
agcttcttgtggagtggaattgaactggtatgtttgataggtctgtttaagtttcagcaatcaagtcaaatgtcagctactggcatttggaagagttggaaactatgctactgttcaaattcaaacagggatggtggctcgccggttcgttcaaaaaaaaattcaaacaaggcaatattcggattagcataccctgtattcaatttcctcctctgtataccaatttggtgtgtcccagaaattgtatggttcattatgctgtccccagcgagctatacaaactggctgatccacaatagtagccccctgtaatgatgcaaagtgacatcaaatgaacaatagagaaagttggtgtttgacaatgtaaaagagatatgatgacatattagtaatctaagtagtttcaagagca

SEQ ID NO: 43349 - DNA, 488 bp, Oryza sativa
  unsure (1)..(488): unsure at all n locations
ntcgtcagtttcaaagatgctcatttgttacgaaaacggctgcttaattattctgctcagctacctaaaggatttatggtcaatatgactagtaacaaacgtagtaattaatccaagctagcgtatatattaacacacatgtggtgaattctgtactgagaaagtttcgctaactattatacgagtacctttcagagtgtatcattctatcaaaggttatgttcacatttgtttttggaatgtgtggattagtctagtccaaagaacacttaagcccacgtgatgccaccattattctagctcgcatgcatactagtggagcacagctnttcccatcctccatgatcatctctagttcgctaggagggtagaaatcctcacatccttgctnttgcgttgctaatgacattattaagtccccaaacaaagttactagtactacctgtctacctcacatcggcacatcactggattgctcgtgctccaac

SEQ ID NO: 43350 - DNA, 406 bp, Oryza sativa
  unsure (1)..(406): unsure at all n locations
agctttatataacatgggcggaggtctttttttctaccatcgnggacaaaccctagattggtggaaaccctggaaagacaaggtatatgcaggcggaagtatatataaaagcataatgacaactataaatccacaagctatgtttgggaactaagcttgaaaccctaagaaatcgtactcggcctgctcttgaaagtaggctttgacaaaagggtcaaggtatccttcctctaactctataatataaatataaaaaatagtgagtactcaatgtactcagcaagccaggaaaaaatatgacatgcaaggctaaaacaaggagtggaacggtttcatttggaaaacccaagatgtttaaatgatttagttgcaaacttctagtgtgtcaagttttattttcgaagta

SEQ ID NO: 43351 - DNA, 403 bp, Oryza sativa
  unsure (1)..(403): unsure at all n locations
tcctaagaacttccatttcctcaggcggatagtcattcttctgtcttccctntatcaatatcatggcatcattgtatgagagctgtggcagttgcatcggttcaaggttaatcacacgtggtaaacgtgtggtcacaatgacatgtgtcgctccagtgttcctagggatgaagtcatggagatccttacctttccaccaatccctctcactctcaaggttatcaatgacaagcaagtacggcacgtcgcggaacagctcccgcttcaccctctgaaaagcatcaaactcctgctcctcaaagctcctgatcctacctctctccttctcagcctctgcactgatgtccaatcccaaattcatggataaatagagtatgtttggcctcaaataccgagcttcacc

SEQ ID NO: 43352 - DNA, 331 bp, Oryza sativa
agcttggtcaacccgtagaggcacatcgtctataacaccaccaccaaccacatggtgatcgtctcgtaagggaagccgtcgtcttcgtcgccgccgtctaagcccggccggaagttgagcatgccgtagtcgtcgtcgtcgccgtcgtcggcaccatccgaattcctccaagcgctctcctgcgcaacaagcagcagcgcgttgcgaccgccgcccggcgccaccaccaagacgttctcgccgtcggccatggatgacgacgatcgacgagagaagaaagtacggagctaagagagtattaattctagccggagatggggaagaaaagagc

SEQ ID NO: 43353 - DNA, 405 bp, Oryza sativa
  unsure (1)..(405): unsure at all n locations
agctttatttattttacccattntattgttggaaccaattagatggcatattaatgatcattaagcttcaaccaaatgtttgatcttagacgttgattcttacacgcaggaacgttctgtttcaactggtaacacgtcatcttgtaaccctgacgtatatttgttaacacgtgggagggcatgggcaatctctctcagcctcagaaacacattgagtgaaaagtttttatcagcatctgtcattggaatggatacagaagaccttctttataggttactccttgttctaaacatctggtgacattttactcgttcttatgtttttttaatgtttctattgaaggccgtaaacttctaaactgtaatcaataccagatcaattcctattatgggttttcattacat

SEQ ID NO: 43354 - DNA, 368 bp, Oryza sativa
agctatagagcgaatgcgccttcttagtttatttaaggatgtgcaatgcgtcaccgtctgcatggccgccctaagacagatcatatcgaggctgggagagaaggcgctacccctgtttaagctcctcatacgttccgggccgtttacctggaccgaggagagctgaaccggcccgtgtctcatgtgaaggcgtaacatcagtttcccccggtcctggtcgccccgaaaccagatgaaccgttgctactttacctggcggcaaccccgcaggtgggcaacgcggtgttggtcgtggagcgcgactaggacaaccctcgctccgcgcaccctcaccctgtgtaggatctaccccggagagagcatggagg

SEQ ID NO: 43355 - DNA, 404 bp, Oryza sativa
taacagaatttcttgacatattctatgaatcacatcttcttttttgtgcaaatataaagcgctccgacagtatcgatttctgatgatatgatcaatgatcatgattacacaacataagctaggatattttctcagataggtggaacattccggtgattaagaagcatatcagaacctaagcccaacaatattatgagagcagcattcagaggttgatgatcctcacttggtcacgatcgaagcattctatgcatacaagcacgcaccaccaagggaaatgaattcctcgatcctctgttacccaacccaacccaaaccaacccatacccaaaagggcattcccccggtcgcccatgagcagctactggaacgaacaacgagacacgcaacacaccatttttaca

SEQ ID NO: 43356 - DNA, 408 bp, Oryza sativa
  unsure (1)..(408): unsure at all n locations
agctngaagaaagatatgagatcaatttgtaatactccaaagcatggtctggtatgaagaaggctatggagcaaatccatggtacatatgaagaaagcttccagcttcttttcaactggaaggttgcactgcagaacaagtcaccaggtacaattgtagagatagagttgcagaaagtaggcaagaagatgtgctttaagagaatttttgttgcattgaaaccttgcatagatggatttttggctggatgtagaccttacttaggtgtagatgcaactaggttaactggtaaatatactggacagctagcttcagccactgctatagatggacataactggttgtattatgtagcatatgttgtgtttgactcgacaatagatgattaccgactctggttcatgcaac

SEQ ID NO: 43357 - DNA, 473 bp, Oryza sativa
  unsure (1)..(473): unsure at all n locations
tggacatcatcctaaggatggatggggtggctaagcacatatgacagatagattgtgccgaaaagtccatcactttgcaaggacctggaggaaagcaagtccgctttacccctaacacccctaccgcaagtcggtctattctaacctgtttacaagtcacctccttggagtcggtgcccatagtctgtgaatatcccgacgtatttccagaagaattaacgagtatgccaccagaccgagagattgagttcgccatagaactggcaccangcacagctccaattgcaaaaagaccctaccgaatggcagctaatgagttagcagaagtctaaagacatatcgaagagctagagagtaaaggttatgtgcgacctatctcatctccttgtggagccccagtgcttctggtaagaaaatgatggtctgaagaatggtatcgatataagccctgatgaagaactataagacaagta

SEQ ID NO: 43358 - DNA, 388 bp, Oryza sativa
  unsure (1)..(388): unsure at all n locations
agcttagtttgtatcgaggtttattcttttatgctatcnggcgccgaaagtgttcttgtctttgttgtgttcagggtgaacgattgattcatgctacaagaaggaatttgtctcaaggtggagtttgatgagttgtgatccaaattcatttgcactttataaaggccagcttctgccgtagcggagcgaaaatgtgttttaagaggatttatgttgcattgaagccttgcatggatggctttttggctggctgtagaccatatttaggtgtagatgccactagattaactggcaaatatactggtctgttagcttctgcaactggtgtagatggtcacaacttactgcactatgtagcatatgctatatttgacttagagacaaataa

SEQ ID NO: 43359 - DNA, 375 bp, Oryza sativa
  unsure (1)..(375): unsure at all n locations
tcgntgattnttctgtagtcgcaacctttctatatatttcaaaggattgaaagcatcatctcactattgcatccagaattaaagttatcttgttaacagtgctggttttggattctgtatataacatttgttttaatcttcagtaccttctgtgagattttttttactgagtctaatcctatgatgtcacatangttaagagcctgaaaggtggaaaggagatgaagatggatgttctagtgatggaaaatcttctgtttgaacgtcatgtgacaagattgtatgatttaaagggatctacaagatcaagatataaccccgactcatatggtagcaataaagtacttcttgatcagaacttacttgaagctatgc

SEQ ID NO: 43360 - DNA, 316 bp, Oryza sativa
  unsure (1)..(316): unsure at all n locations
agcttgtgccnaggcgacgctgatatcgatggttattgcacgctctatacggacgagatgtatctgatggggctgacgaaagcccacaagagttgtaccgtattaattgcggccggaatggacggaatcgctgtagttataggcgcgtactcctaggcgcacgagatgcgatacgtggaagataccctgtatggacactgagaaactgacgacgctatgaatctgcgtgagtggtgatatatattctagcacgagaacagatacctcgctatatctgctggatggactgaactaacactcgtttatgtcgggttac

SEQ ID NO: 43361 - DNA, 486 bp, Oryza sativa
ggacttaacaccgagctgcagcttggctactactgctgaccttttttttataagagagtaaaataattggaagagccagagttagttgtgcacatgcataatggcttgcatgtttgtttcggcggtgtggtgttagctagttcatgtcatggcaaccatgaagtatatattctccatatatcgattatcaaagtcaaccgcccccgaggaataatcaagtatagcttcccaattccattgatctcacattatttggctgttaactaattaaatacccattatcaaacatttaattgaatcatttcgatccttaaacacgctaaagctagctggtgtgtataacatttattataaataggagtacatccatcatcgtggacgatcaccaccaagtacgttacgtacaaacaagaagaaggaaggaaattaagcggatcgatcgatcgaggcagaaggcagcagctagcaatggcagggatgatgagt

SEQ ID NO: 43362 - DNA, 438 bp, Oryza sativa
taaatgaatttcatcgatctatatatgtcttccatgtgtatgtagcgctaattcagcactctcgggtgcgatggcccgtagagttgagcgggcatgcgctagtgctgcagtcgttattatgggcttcacacttgatgccttctcagtcactcgatccggcaagcagctatagctagatatgtcggcttaatttccaagttactctatatatatgtcggcttgcaccgtaattgaagatgatcgatgttgactatcgataacacttgattttgtatgggatcctgacgctcaatgaaacttaattgccactgtacgtaagggcatatatcttgtctagatatgcatgaataagggcataaatatattgttatcgcgatatatatatatgcatgaataagcacaatttgattgttaataagagtacacatgttatccatg

SEQ ID NO: 43363 - DNA, 299 bp, Oryza sativa
  unsure (1)..(299): unsure at all n locations
atacggtcgatctgtcacctaccaaggccagatatcgatggtggaatccatttcactatggacagacttcttccactactctgcatcaggagatgcatatgctaatgaaattgacttatgagtgtcatacacgaggtacacatgtgaagtcatcaccaaaagacttagccaacctttgtctcttactccttcgangagcttcactgaccttctcctcagatacaagtanatggagatgttcatcttgttctggtgggctgaatgaactgcgaatgattctatagggttggttcgaacca

SEQ ID NO: 43364 - DNA, 495 bp, Oryza sativa
  unsure (1)..(495): unsure at all n locations
agcttcncaagtttaacagagctagacatgactgatatggtataataaattaacataatatctctcgtagtcgccacggccttcgttcttgtgcatgtatacatagacacacactacacactagccttctagtagtcaccaacacagcaaagaactgcatgctcgtactgacaaacaatccagagcaaacatgacaaggtaggtagcaggtgggcgtgtggccattattaaattattatgtctcaggaaagaacaaaacaaacgcagttcccatcgtttgtccagatcaggatcggcctttcgttgttgtgatacgctatagattatgcttagttctagactctttgcacatatcgcccagtgagttgcgcccctaagttttgatcctttggctcctgcgccaaaacagtggttttgcgaagcagcacgtaataatgcgtaattagcctcagaaatgtccctgaatcatttcatattctctggagaaaaaattaa

SEQ ID NO: 43365 - DNA, 432 bp, Oryza sativa
taacttctaaaactcctatgaagaccaaagtgacctttgatatgcttttggggaagcacgagaaacaaggtggtgagaaagctctcaacaaagggaaaagaccaagatcacctcctagggagcaatttggtcattcaccatgcacggtcggaatcacctcaatataattgttctcaaaacatgtcatggggtccatatccaatgccgccgtcgggttatacttatccttactacatgccatggggggcaacaccgccaatgttcaatcatatgcctccaatacaattcaatcaagggtggggaggaccaaggaggacaatccatgagcatttgtcttcaccaaaccatggctggttttatggctagaaccgggccaatgaagaaaagagagaaggaaagcgtattaatgtggaggcaagaacttctgaagtg

SEQ ID NO: 43366 - DNA, 413 bp, Oryza sativa
ctggagccggcacctacccaacaaactgataggatgaggagtacctgatgtgagtatactactcgagaaaaatgacgcattctaaaatgggatgaatatgcatttctccacttgacaactgtgagttccgcgagcagatgactccctacgtttaaacacattgtccgactagccatagtccccacgcatcgggagacggctatgcacttcccctacatgcgtatgagagacatgagtgtcccattagatggagcaaagtttcaccgatcagaatctactacttgtgtactcttgcagctattaagagcacatgacaaacttatctgatatctatgcttgggagtcataacgaataatacttagcaccttgcgttactctggccatccaacgagcccgcgggtgctatgaatct

SEQ ID NO: 43367 - DNA, 425 bp, Oryza sativa
  unsure (1)..(425): unsure at all n locations
tctggcgttcattcagcangattgcagcatgacaccttttgtcccttgctgatgggagcatgtggggtgagaacgatcgacaagccacactcggtagtgagaaacggctgctattgttagcacgtgatcgtaaccgttcactctaacctagtaactgccaaaggagaacatgtgaagcttaattagctagttcagtgaagagaaagtgacaaactatttgattatctttgatataaaataaagcctccccctttgaattatacatgcaaactaacagtgatgttagaacacattttctgttggggtttgctgatatacagacaaaaggtgtgaagtctgacagagatgtacaacacagtcttgtgtgggagtcttggaggttgcaccattatggtaacaatattattagtagagtgaggaaactt

SEQ ID NO: 43368 - DNA, 441 bp, Oryza sativa
  unsure (1)..(441): unsure at all n locations
agctggccgttgcatcgaccagaaattactttatcccttcttgcangcangcaccaacttaanaaatagtagctggattttatgatgagagagactaccccatggtataccgccaaagcaacgggatacatcgtttatgaccctcacgttatatcaggttccacgtaatcaagtacaaccatgctagatgtcagttggttattaaacaatcccgtcgggacgtgatcccgttgcctagattgtctcttttatgattgataaacaacataaaaatattttaaaatcaaatcaaatatatgtgattaatactcctaaatattctctttacaagttaaagaatattctaaaaaaaggcagacgtgatttaatttatatacgggtatatatgtattggcttttatagcgacttaagttttctccctttttttttatggaacttca

SEQ ID NO: 43369 - DNA, 253 bp, Oryza sativa
gcttggagaacctatccactactagtatgtggttattgtgagctgctgatatccgcatcaatatgattttgcgaaacatgattaaccatatataacttgtcaatacgcaaatgcctaatgaaggaagcgaatgatgaagaaaaaggcttacattgcggctgctgagactacccttcttattctttatgatgctgatgatggtgggtggttaatatcaacgaggtacggtgtgagtatctaactaggctgatgg

SEQ ID NO: 43370 - DNA, 329 bp, Oryza sativa
cttatattcttaaacatccgggaagagtactgacatccactcaaaggaaaatacttggtctatcatagcatgacttgaagcgtctccaaacggctggattaccagatcttatccacattagggatgaactaaaccttatcagaatgacactacctgtattgtagtgtgagaattatatactcctgcacattatcattgttgcactggtgacttacatcaaccgttgctactccaaaatccagtgtgcagaggttattatgctatgctaccaactacaatccgaggtgtgtgtttgtcttgtccacaaagccatgattctcacttgagtt

SEQ ID NO: 43371 - DNA, 491 bp, Oryza sativa
  unsure (1)..(491): unsure at all n locations
agctagcataggatagttagcattatgaattttgttntgaaacactntttgaatgacaattttctgtgttgttttgttttatagaagtacatgccacatctggcagccattttctctcatgtgatagttgatgtaagcagtatatcggctttgtgctcccgatggttccccaaaggtaaaattactccggtatttataaatgtaatgttaattcttgctttcagtcttgtgctgtgcttgtagtcctctgcttcaacagtttaatatctgattgctacacttttgggtgtgtgcgatgtgattttcctccgtgaattaacaaattctgcacttgaccaagctgctggctgacttattctttaacaactgaattcccacacattattgtggaattgaaaaagagaatcacgttgtaattgaggaaaaaaatatcgtcgatgtatatcaatccatatacatcgtaggtagctgttntaaaaagtcgaagttga

SEQ ID NO: 43372 - DNA, 439 bp, Oryza sativa
  unsure (1)..(439): unsure at all n locations
ntgtacttntattagaatactcttctatatacatttatggtattgaaatactttccgagtatatggatgccaactttacattatgttcatgtcatactgattataccgctagcttatctgggagatgcattggtacgggtatagtgtttgcttatgcaattactctatatcatgacgatgatattagagtagtatctgatagtttaggcgtagtgtctacattacgggatatcattatttggggttatatgctgccgatgacaggtgggatgctgatggtgacagctcattacgggtattcctccgcgcgtgtatatagttctaagttaattttctggggagggtactcctccgtatttagccccgattgtatggtcatgacgggctgtcgtaaggaactcgacagttaagggtggcttctctaagtatcaggaggaca

SEQ ID NO: 43373 - DNA, 488 bp, Oryza sativa
  unsure (1)..(488): unsure at all n locations
agctngcattggaaccacatcacaatcaacagaatatgcatatgagccaatagaaaacgaaaccctgcaaacctgtgttacctttgctcttccggaaacgtttaaccactgaatatggtaaggatgtggatgtgtacgtgcggtcaagccaagcttcttgaccaaatcagaactcaccaagttgttgcagctacctccatcaatgatcacacgtgcacgacggttgttgatgatgaagaaaatctggaacaaattatggcgttgcaacctctcaggctgctgtacctgcgtgctgagcacccgctttacaatgatggtcctatnaggccgtgtgtcatcacgaccaaagacttcgccgtcctcatcctcaacttctccttctttctcttcctcttccacgttggaggtggtgatgtagccatcttctgtagcaacatatgcctgttgactatggcaatctttctacacatgcccaaacccttggcaac

SEQ ID NO: 43374 - DNA, 431 bp, Oryza sativa
tagaaacattaccctactaatgggatgaatcatatatactacattattatttatgggtatatttaatggtagctcacgatggttaatcgtgttatgataattaattggtaattaaaatatgattaatggtgggttgtgagcacatggttttgaaggtcgtgctcatgacaattaaggaccggttcgcgagctactgttgtgaaacatttaccgtgccaaccacaagccagcgtgggcaacggctttatcttttgtatagcatgattcattgcggcgtgccagactgagaagcggcgagaagtccgtgagggtcgctagggaatccatgccttgtttataacggggtgattatgatccaggaacggtgcactattttgagttgtgttgtgcaaagggtattgtcacgattctcccctttgcaatgccatggt

SEQ ID NO: 43375 - DNA, 90 bp, Oryza sativa
actaaagacctactcgggggggaaaagacgacgactacactgtctacaagctacgagagagatatcagaaaccaagggcaaggtttgcta

SEQ ID NO: 43376 - DNA, 440 bp, Oryza sativa
  unsure (1)..(440): unsure at all n locations
ctatagagactcaagcttggcacacgggtactatggacttcgtagaaggattacctaaatctgnggtgtatgacacaattatggtagtggtggacaagttttcaaaatttgctaagttcattcctttaactcatcctttcactgcatacacagtagccttggctttcattcaacatgtttatgatgtgtttggcatgccccaagtgattatctctgatagggataagatattcactagcgctctatggcaagaattgtttccgttggctgatgtgaagttaaacatgagctcctgttatcatccccaaaccgattgtcaaatggagtgactcaaccaatgtttggaagcatttcttccgtgtactgtgcatgctacaccaagcaaatggtctggatggctatcacaagctcagcattggtacaacacttcatttcacagt

SEQ ID NO: 43377 - DNA, 500 bp, Oryza sativa
  unsure (1)..(500): unsure at all n locations
agcttcaagcacttgatggaagagaaggttcttcttgtcgaacgggaaaatggatgtcaatgtaccgaggacagttcttattaaggtgcctangagcaccaattcaccatccgtgttcagcagcggctcaagcaaatggaaggaggaccaaaaagtattggattcttgggagttcattactttttggaagctctgtattggagaactttctcctaatctctgttatgctttttggtacttattgtagtatcacctcgaggaagaaaacccagttatcgcaaccgtccaataactctggattacctccaaagattttcacttacagcgagctggaaaaggcaaccggtggtttccaagaagtacttggcacaggagcctctggtgttgtctacaaaggacagctgcaagatgagnttgggactaacatcgcggtcaagataatcgaatagcttcagcangaagcacaaaaggagttcttggtggaagtccaaaccattgcg

SEQ ID NO: 43378 - DNA, 315 bp, Oryza sativa
  unsure (1)..(315): unsure at all n locations
acactatagactgactaagcttgggggctntggtgacggtcattaacgatcagtttcgtctatcaatattactaaaacatgagagaactagtgatgcttgcaatgcataaatatgttagaataataatattccactagtattaggtctactaaccttttgcagagaatgacaataaagtgaaggagaatcgacatcaagtcacacgataaatcaatcggacgatgtcgagaaccaaacttgtgtatgaatgggccaagaacgcagacttgacccgatgaatcaggccaaaattcacaagtctaccaagtgaagca

SEQ ID NO: 43379 - DNA, 459 bp, Oryza sativa
  unsure (1)..(459): unsure at all n locations
agctngcatttgctagtaatattcatatctatatttcatactccactgttactactatgcagtactttctccgtcctaaaatgtaagtacttttaagggtggcacggctattaaaaaagtaggtgataatgattgaaaaagatgtgtgattggttgaaaagagaaagtaagtgaaaaagaatggttgtgattggttgagaggagaaggtgggtagaaaaatagctttattttggaataaagtactgtgctagaaatagctacattttaggacggaggtagtattccaattcatcactgcgtgtgtgtttgtgtgttcatcatccacacggacactgcgacacgcagcaaagctgcaaagcagagccaatgagccatggcaatgccactgtgacgcagccattggagaacccgatcgaactattattgacctaccaacagtatacttcctccatactcat

SEQ ID NO: 43380 - DNA, 434 bp, Oryza sativa
  unsure (1)..(434): unsure at all n locations
ntactccggcagcgctgacggctccgtccgcgtctgtgactgcaactctggcaaggtagctgggctctccgctctctgcactcccttcaggctctttacgcacgattcacgttgagtaaattcaagttgggggttgcatctgcgtcgattcctccgttgattgtggcggtctttgaagtgcttccatgagatcaattggggagtactatctgattgcttcctgtggtcagacatattgctaccaaatcagttttttctttgcaagattggggctatcggcatgccggaccgaattgttacgggaatcttttcgcctgcttgtgtactgttgatcagtatattacggtcagtttgcgagcaacgcaatgaggctggtttggctgataagcaacgggctctctggaattacattacaagtctctctggctgatggg

SEQ ID NO: 43381 - DNA, 492 bp, Oryza sativa
  unsure (1)..(492): unsure at all n locations
agcttataatcgtagtaactaaatgcttttcgtctcaacaatgatgctaaaaacatacctaacctcgcctccctactggttataatgcaatgcagtctatcagactcatcagggtgccattttgtgcatatgcggacttttatgtttcatatctctaacctgtgggtcctctgcttaatccttaaacaacaccagcaactcctgcgctttcatcttccatcgaatttttcatgttgccgctaatcagccataaaatcatttgcagatgcgctctgtcgaggtagtctcataaggttcgtttatagatcgacggcaatgtgagttaccttttccatactaattataaaaagacagtacaaacaggatcattatggactccacgctcatctccactcgtcccgatgaagggacgctntcgttaagtcgcgcccgacgagctgcgttaggcagcttcgctggtgccgtcgtcgactggtatgaaattttactcta

SEQ ID NO: 43382 - DNA, 432 bp, Oryza sativa
  unsure (1)..(432): unsure at all n locations
agctngcacgtagctctcctagctcctcatgtcaactttcttccgatgtgtntaacgccagccatactccaccaacataattcctcttggatgcaactactcatctggtgtaccgtcacctcctttcctctgaagattcttgcgttccactccttccaaatttcccaagcgatgagcaggaagagagttccgaatcctttatgttttgttgctctcggatcgcttgttccttgtgtccactaatacagaaggtttctactattattccatttcacgatgatgtgcccttggggcaaccatgtgagaactctaaaccagatttgctttgagaccgggcattctaacaataaatgatcgagggccgtttattctgattgtgagacgcattaaaatgcaatttgcgccccgaattgattgacagacaattaaatt

SEQ ID NO: 43383 - DNA, 442 bp, Oryza sativa
  unsure (1)..(442): unsure at all n locations
tgtcaggaggctcgtggagtggtctcactcaacggngaaccaatccaacgtctaggtgcttacctactggagggtttggttgctagacatggaaactctggcacaaacatctaccgtgctctgaagtgccgtgagccagagagcaaggagctcctgtcctacatgagaattctatacaatatctgcccttacttcaagtttggctatatggcagccaatggggcgattgcagaagcattgagaactgagaacaatatccacataattgattttcagattgctcaagggactcaatggatcacactgatacaagcattagctgcaaggcctggtggtcctcctcgtgtgcggatcaccgggatagatgacccactgtcagagtatgctcgtggtgaaggtcttgacattgtggngaaaatgttgaaaagcatgtctgaagaat

SEQ ID NO: 43384 - DNA, 502 bp, Oryza sativa
agcttgcttagatgtttcattaaccaatcaaagattttactgctccaatccatattgtcaatacaactaagatcttcacaaacactcagatatttcgtgctatgttgaagagaagaatttgggcacaggaagcaattctaggatacaatcatgaaacacattaagatttgctcatcagacattgtttcatttttgataagcttctctccaaaatatttgacagagggcaaagaagagaggccgaaagagtcaagaatgatctgtttgccaacttcaaaatctgaactaatcggtaaacctccaataggcaaacccaaaacaatatgaactgattctttggaaagtggaatgactttatctctaacgatgatatcacaagaggtgacatcaactctttgtgccacccataaagcaaatttatatggcacgggaacattttcatagagtaagagagttttgaaacaggttctataaataatctctctctgatgttcagacaatg

SEQ ID NO: 43385 - DNA, 442 bp, Oryza sativa
  unsure (1)..(442): unsure at all n locations
actcagagcttaatagcagaacacccctgagcgaagtcattgagttcggtgtttatgctcggngtgccggtgggtaggacaagattgcttactctctccacaaagggaataaggtccgcccgggtctcgaaatcaccaggggcgaagtgggggcgccacaagcgaatactccgaggcagatgcttcggcggccgcacccttccccttcgtcttgaccaacggcgaaacagctggttcatgcaaagggctcccgaagaccctcgccgcgaccgtcacgatccgttcggcggaggcgctaccgcctgccccagcaacgccgagtggaagaaggggagcggtcgaaaggtccagactgcggccagcgggtgaagtcggagtctcctcagaagactcgtcgtcgctgaatacgcgagcgatgtcgacgagtcctttctctttagag

SEQ ID NO: 43386 - DNA, 490 bp, Oryza sativa
  unsure (1)..(490): unsure at all n locations
agctntacaactagttggccatagtcaatctttagatttatgcttaaaagaattgtctcgcanattagttgtaatctgtgtaattagttattttttagcttatatttaatattgctgtttaaacgtttgatgtggtagggtgtaaaattttgggatgggatctaaacaggcccttagttcatactacaacatggtaacttgcttcaagtacgcgtaggcaggtgagatcgtacacaaatgataaacactagccatgtatagctcttttccctagcattaattgtgcatcaccacccatattgtatacttctctctgtcccaaaatataacaacttttatcactcacgatttgttccaaatataataactttttcaccaatattctcttcccaacaaatcgcaaccctccaacattcacttttttcacctacttccacttctcaaccaatcacaatatcttaatatataattctacccatgttcttaataa

SEQ ID NO: 43387 - DNA, 425 bp, Oryza sativa
tcggcatgagacgtggacggtgggaccaccgtcgatgttcggttcctaatacctgacaggtttcacctgatacttcacaagtatcacttgatacgtggtaaggatcacttgatacctgacaggtttcacctgatacctgacaagtttcacctgatacgtggtaggaatcgcctgatacctaacagggtttacatgatacttcgcaagtatcacctgatatgtggtaggaatcgcctgatatctaacatgtttcacctgatacctcgcaagtgatctatcacctgatactggttaggtattactattacgatatgataacctcaaggtattatgaccagatacctgacccgtatcattctgtcccaacggtgttctattgtacagcaaaccctcaatattcttacgtccaccatcaaaaatgaaca

SEQ ID NO: 43388 - DNA, 495 bp, Oryza sativa
  unsure (1)..(495): unsure at all n locations
agcttaaataggacaaactatgcatatgttgttgtatatcattntggagagtacgtgttcctgatccataactccatatatgctacattgtgcttaacttctgcctccaattcctactcttgctgaattttcctcctgcaaagtgcaaacaggcaggagatcgtattagttgctaatatgaaattaacaaaacttctaatttcatgcaagccgtcgctatgccaattactcatctctgactggattacgagattaattaacctcgttcttttcagtcaaagtctacaatttccaaaacaaaatcaacacacaaacaaattgtcaaagactcagaccttgaaataaacgactgcttatctctggtcaagaaatcgccggaataacaaacaaacaaacaaccgggaaaatatataaacaataaaagggagaatgccgatcgagctagctcgtgcattccggtccaaaaccgttggctgctcgaccgaatcacctacc

SEQ ID NO: 43389 - DNA, 440 bp, Oryza sativa
  unsure (1)..(440): unsure at all n locations
tcaaccaatccgaccgagaatggccactaaagccagccttccactcgtggactcgctccctatggattggtccttaacccatgctcgtcctccataggtcaattcttaacacgtttttatgaggggccaatgagtgaccttttctaactaagcttgaaattcgcttccatggggagtcgaatccaggacctagaggtgctacttgagcactgtaactactaggttgcatgcccttctactgaaatatggcatccctactgtaaatttcttaattgtacagagtagcaatttagttcctgattgaacttgtgtaatttcccaagccttcccctggtctacatttgcattacattacgttatagctncatttctgatttcaaatgagaattacatgtgattgcaccatatgcacggacacttcttgattgaatattatactc

SEQ ID NO: 43390 - DNA, 460 bp, Oryza sativa
agctttgtcccaagctccaccaaaatcattatcgctttctctcaacatatcttccaagatgtgattgactcgctcggtctgaccatcagcttgcgggtgataggccgtgctgaagtttaaacgggtccccaattcttcctgcagtttctgccaaaactttgaggtgaactgactacctcggtcggatactatctttctgggtaccccatgcaaacacatgatccttgcgaggtacaattctgccaatctctttcccgtataggtggtatgtactggtataaagtgagcaaccttagtgagtcgatccacgactacccagattgaatcatgtcccgatgatgtccggggcagtcccgttataaagtccattccgatctcctcccatttccattccgggatttgaagaggatggagtaaacctgctggtctttggtgctctgctttcactcattggcaaaca

SEQ ID NO: 43391 - DNA, 444 bp, Oryza sativa
tctagttctactctgaccctgaacatcatatttcaattggtacatatttcttaccaaatggaacaaacaaaacatcacaagcaacaagatcactcatgccgaactatcaccaccgaatcattccctgaaatttagaagccataatcacaatttcacaaacctttggagctccctctgctgtcctcagacgctctgcttcaatgtcgtatctcagaactctgaagcactcgagcctctcctccaagaacagcgcgtacgtgcgcacccacgccgagcaatcccacgctgagcaaagcaattggagatttcaaatttgcaatcacaaagaaatgagaacgatcggtgacaaacatttttgaaccgattgagttcatgttaatccagttcagtttatgcaggaattcagattggattgggagctgacccagcggcgtggagtcgtcc

SEQ ID NO: 43392 - DNA, 490 bp, Oryza sativa
acctgccgcatgcagcttcttcgcggcgcctgtgtccgtttctcttttccgccagcggaggttgacttctctagcctcctctcctggtcccctcacatccctctccacgtgcccctcctggatcccctccgcatccctctctatgttcccttcctcgctcaaatactggcttggatcctcgttaccctcttcttcgttccagtactggctactttcctccgcgaatgtatagtacaatatctgtccctcatcgcgatcagccatctgttcatacaggaaacagttgctaagtcatgagacatttttgatttaacaatcttatgtgctaacaatcatatatgctaagtcatatatgctaagtctaactgtcgtatatgcgaagccatatatgctaagtctaatcaccaatctaataatctgctatttaaactataataatctcatcgacaacccaataatcttcattaagattcaatattttatgctagtc

SEQ ID NO: 43393 - DNA, 431 bp, Oryza sativa
  unsure (1)..(431): unsure at all n locations
tcctcattggntccctatgacggtaatggatgaaatggtcttaaccacgttcgntagtaactgttattaggcatcaataaaagaaggaatgagcttcaatctcaacacacaactcaagcggagatctctaactttcattcaaggctactctctagcagagtgttagaaaatatggagagagtgagggcaaattccaacagcagtctctcaactcttgtacctcggcagatgtatgttttataaaaatgagtactcgatatttgttctgggtttttaaatcttcttgtttaagtaaaatatattctcatcattgcagcttcatcgcttaatattttatataaagtgctccaatactcacgctgtataaagaaggaaattcttgcaccacgctagctatattagtaatagataatgtagatgtagtgtttatg

SEQ ID NO: 43394 - DNA, 487 bp, Oryza sativa
agctgacttcagcagcgagcttattctctctacaggcaatccttgacggcagcgacgaaaccaactgtgacaaaacagctccaactaggaagatcttcagctctggtgtgggggaaaaagagagcaagactgagtactacccactgtactcagcaagtcataccggaaggggaggtatgatgcaggatataaccaaaggaggctagaggttcttttgcataaaactagcatttaaaagcagtagttgaaagcagtaaaacagttgtagtaattaatcaatattaaccaaacactgtccaacgctacaccacgttgcaacaggcccaaccaaccacctgaactacaccagttcattaagctaaactaggggtgagactaatcacggtgaatctagttgatccgccataaccgcgggcacggctattcgaataattttactttggccagaggtgtacaactgtacccacaagacacgattccacacatg

SEQ ID NO: 43395 - DNA, 446 bp, Oryza sativa
  unsure (1)..(446): unsure at all n locations
ctnactaagcttcaccgggaacgttgccctgcttgctaatctttgatggtggagtggcaactgtcttgacagctgtaacaggtangatcttcttgcccgtggggttaccaagcggtgatttgccgatggacctccgaattggagcaatacgaggtgcattgctagaactgacaatagtcgagcgacctggtgctggcgacacttgctgcgggtgctgacgaaggagcgtacctcccctttgtaactgtagcgagctgttgttctcctggcattgcttaccctgctggcgctggtgctgtacgcttgaaacgatggccggtggaacaatgcggcctctgacggtgcccttgacgataatccgttgaggcggaggttgcacattcacgtgtcgattggtgtcgtgggcagtgctggtaacttgtgaatcacgatgaactgcctttgct

SEQ ID NO: 43396 - DNA, 493 bp, Oryza sativa
  unsure (1)..(493): unsure at all n locations
caagctttaccaagtgatacagttgagtcttatcacataacacatgaaaatcgtgcagaaatccatcccaagaacccaaaattcaacccatttttcagcataatcaggagggaaaaggcactgaccggagttgacggatcgcacgaggttctcgatcttgccctcctggcggaacaccagcgggggcgccccggcgtacagcggcaccgcacaagtagaagcgcaggagggaacgtcggcgtcgacggcgataccggaggagtcgtagccgcggtactcgaggcggcggaggccattgaagaagacctcgaggatgtaccggcgctcccgcgacacattgtagttgaggtacgcgaagatcccgcacatcttgcgccgcgccgcgctgggttgggctactagaaacttccagaagtttctgggctctgacgaganacagagacatagaaaaagacacagacatagagatagagagagagagaggactctgtta

SEQ ID NO: 43397 - DNA, 387 bp, Oryza sativa
  unsure (1)..(387): unsure at all n locations
taattanaacagactctgggatatttatttaccagagatttaacataaagacaaccgatacgggctgatagtaaaaacagcatgagtgcagacatgagaaataatactgataagggccgaagtaccaaatgcttttattgcgtttttggatgtcttaataccctgaatatgtgatgtcacagcctcatatcggcatgagtntcaaaaaacattctcctgcatgtgtgcgcctaaacagaattagctgcttattgagctggggttcaccacccaggataacctgcactaaacttccgcactagacggagttagtacgaaatgaagcggcggagttagtcgcaaataagaaggtatcactcctttgcgtactttaatttggatcgagtt

SEQ ID NO: 43398 - DNA, 474 bp, Oryza sativa
agcttagatgaaacttgtaatttactcattatgaagtaaacatagcgaatataggtagaaatattcagaaaagtgtcaactaccgcaaaaaaatcatgactgatttagtaatacaaaccttgtgatttagccatatcaacattgaaaacatcagctactcgtgctgttgcacctggagacaagggcgcagatctcagcacataaaaaataatgtgacctccattggttcactctaatactagcaactaagttcaaaataacaaccaatgtatgagggaaagacaagagtaacaaatagcaaatccccccccccccaaaaccttcccccgaagcacgaagaggggggaaaggactataaccatactgacaaatcattaggtgcaccttgaaccaaacatttgcagaaatgcagaacaaacacaaagtacagaagtacagttatcttctaagcattagctgcacagtacatatctg

SEQ ID NO: 43399 - DNA, 428 bp, Oryza sativa
  unsure (1)..(428): unsure at all n locations
tgtgtcatattgagctcactgatactagcctttattctcaaatgttaaaaggaagagtaaattcacagaactgtaattttttgggttaaaactatcacttcgccaactaagaaaccattattccattagccaatccccataccttggagccaatcacagggcagtagtcatcttcagctggtccttgcggntgctgggaagccccgccccctccctcgctgaggcgcctcttctcctcccgggacctgcgcgaggattctcccacccccatggcgctaaaaccaacacggaaaccgcaagtcagaaactccaagttcgtcacatcgcccatacgcgcgcacggcgaaccaaccatggctagtgactgaggagatgacgaanatcttaccctgatgatccttgccattggagcaccagtgcttgcgctg

SEQ ID NO: 43400 - DNA, 494 bp, Oryza sativa
cccggaccttaagacacctgaggcatgcaagcttgtgccttggaggatcttccttattttattaaaaacaaatattttgcctagcggttgcatcgttgtagaaccaacagcgttgtcgtgctatttgaacatgtaaaattcaccaagattcctgttgtttatttgtagctgacatccgtgttgaatatcaattaacatagattttgttgaaaaagaaaggaactatgtcttgctagctagattgatctttttctttccctaccagtctagctggtgaatactgaccgcattgagggcggtgagtgaacctgcaaagagctgaggcaatggcggcgactgtaatattcacgttggtttggaatcaagagcttgttttttacatctccggaaccgtacgacggagtcagaaatcttcggctgaacattctgttattcaaaatatacatatatagttattatttaatttactgagattaaattatcattagagtttt

SEQ ID NO: 43401 - DNA, 435 bp, Oryza sativa
  unsure (1)..(435): unsure at all n locations
tgctctgctgtgttggngccctgaaagtatctcacatttattgtaagcgcaagaactagaacagnttcatttccctcgcccactcaaagcagatactagcttgtattaagttcaaaacatgaatatccaacgaaaacaaattttataaatgtatgacaacatataaaagaatgcataatctcttgtgcatgacaaaaaaaaaaagctgagaggacttatgagagtgagccattaaaggcactgcccaatcaagttttaagagaggcaatatgtctgcataccttgtgggccaacttctccagcttctcgtgttccattttctgcagtaagtcaccatgcatgttgttagcatagcgtcaagatacattctaaaacagaaagtcgcaacgattaagaaagcgggtaatttcggaaaaggtttctatttgaaagaaa

SEQ ID NO: 43402 - DNA, 438 bp, Oryza sativa
  unsure (1)..(438): unsure at all n locations
agcttccttgacgcttactctatctatctttatatcagcanggnaaaagaggatgaggagaagacagcatttatcatgccgctcggtgtattctgctacgttaaaatgctcgttggactgataaccgcaagaaataccttccagcgtacgatcctaggcacgttcggttagcctaagaatctgatccatggttgctctcatatccgatccccagggtgtggtcagggtaacttctctacgtctacagtcaattactcctctatgctttgctaaccaatccattctcaaaatgacatcaagagtttgtggtatcaaaaccataaggttggagggaaacaccacatccctaaggcgaataggtacgtcaatgctagctgtgtccacggctatttcacccccaggtgaatggactaacatntggtgccttagtttaactct

SEQ ID NO: 43403 - DNA, 417 bp, Oryza sativa
  unsure (1)..(417): unsure at all n locations
tagctgcaaacgtacacggatgaaactcatccacttttngaaaaccctaacctacagaaaaagtgcactatatcaggctnctctataaacatttgaaaattttctagcccttgaaacataaaaattaatgtgcttagctagctttccataactcatgtatctgcagtccccacaggtccacactcctccttttctcaaacatattcctaaccaggagtacacagaactattcacatctgcctcggggaactgagagcagatacctttcatgcacagaatatttacgggccgtaaattacggatcaaattcgtactcacaacattggccgctgctaancacgatactacagcctttcggcaatatgcaacacactgatcaaacaactaaaactggaatcataacgaggcaagatatgt

SEQ ID NO: 43404 - DNA, 486 bp, Oryza sativa
  unsure (1)..(486): unsure at all n locations
agcttgaggagattaagaacgaactttgtttggtttgtctactgcacgnatgacctctgattctgtgcatagccattatttatgccataccttaactagttattttctgctcctgatatttgtaaaacttgagtgtacgccaaatatacatgatatgctcaatgtactgggacgacaaatacaatacccaacgaatatcaaatgaggtaatctctattggtttagaggctatccattttttagagattcactatgattttttattctgaanactatgggatctggcacgttgattctgcaatgagggatgaagtgaacaaagatactcanaatctcctatcaaattcctttttattagatgacgacttatggtatgcgtgatttcctggttaaaaatttacagccaaatcattactattcttattgtagaacatgctttaccgtctgttgatttgcaccttgatgtgatgctttcttttagtatac

SEQ ID NO: 43405 - DNA, 450 bp, Oryza sativa
  unsure (1)..(450): unsure at all n locations
agcntggaatagaaagcatgcatctctgttagattataacacggcctanatccagtccaatttttcatcccactatcataggatagtggcccaataggtccactttggcagtaaaaacgtcccaggctcccagcccatcacggcctagtatcatgcccgaagggagaaggaaaaaagttcacctcaggttcctcagtttactgccgagttacaaaatcatccctaaaagaaaaaaaaaagaaagatataacgccttccttgccttacaaaatcagatcattttgagttctaagacagtattgcttccatttttaggtgacatggtggctgaatcantatggtacccatatgtcatactcacataaaaaaatcctcttcatgagtccgcaatctcttccgctccacccaccatccacagnatgagtccgcacaagcgggcatgctcggcac

SEQ ID NO: 43406 - DNA, 447 bp, Oryza sativa
  unsure (1)..(447): unsure at all n locations
ntaatatttggaacatgtgcttctatcagtgtgaaacattagctaaaatgttgaatcattcaacttatatattacaggtggtaaagtttacttactttgatgagcatcggtcatcatcccttttagctcggtcgaacagcaatatggtcagaaagatcacatagaagtacggcaggaactacacgaaagcagggaccacagttattaccatcctggctaaagtcgagataaattgtaatcagggtgtgcttacatgatcaaaaagagctggaactgtccagaaaaaagcagatagaatctctggaacatagtgaaaatgacgagacaagccccacctgtccaaatggaaaatgagggtgcatgctcaaaagccattcattgcctctattgaaacaaacatggtacaaatcacttttgatgaactatgtaaagaagaaatgacgaata

SEQ ID NO: 43407 - DNA, 481 bp, Oryza sativa
  unsure (1)..(481): unsure at all n locations
agcttatttccttgccttntaatctgtgttggatgcacctggctgntngaataaaatgcttttcaaataccattaggttggtgttttggttctgtttctgattntgtttggttatacaagctaacaagcctattttttctattaagttttattataaagctgtctttgttatatcgatttcaccctcctgccctaaatgaactaatagtgtgttttcttgtcgagcaggtaaatctattttgtatcactaacattttgtgcaatgttctgaatgggataatgccaaaaagaaatatcgctgtagttataagatgtatatatcaggtcattgctttntgataatttacctgattatgctattccagatgtactgtaagttttctggaagtaagagggtgttgatatcaagtgctaactatactctnttttgggtggnggttctgaacttttcagattgttgatccctaccttgcttnctatg

SEQ ID NO: 43408 - DNA, 442 bp, Oryza sativa
  unsure (1)..(442): unsure at all n locations
tgtagagtacaacaaanagcagctggcactgagagccatcgcgactgcgatcaatgacaagaaagaggagacccacagaaaggtggtgcttacattgcaatcctacttccgcttttgactatatggtgctacaggtttcacctggccctgtagtattaggccaaattctcttctaggtctgagtgtccgactttctgacttcattatataacttgcagttctatattgtgttggttagaaatgtcagaagcgtccaggtcaaatagggatagaaaccagaaggtttgcagctttgccatttggacaagacgatctttgtgtataattggattgaaaaatattttggaaaacccatttacattgtaacacagtatcatttactcttgacatatgttaagctacactgaaatggttctcgctgacatgctgaaattttagatat

SEQ ID NO: 43409 - DNA, 492 bp, Oryza sativa
agcttgtatgttgtgaataaagaagattctaaagtattatgcatacgccatgcgcacactgctttaacagatatgcttaagtctctaaaacacacatggtttcaccacacctagaaatatatatatggcatatgtggtgtaaaatctgtgtaaataaactcataaaggatttaccaaccgcctggaaaatgaccaaaatatataatcagcctaagccataatattggtcaataaaagtgcacacttacgtggcaaaaagcaataatattgtatccaatcaattactttatgaacccaaacagcgccttgacttatataaaaaagtcagcgggcagctatataaagtattactgtttggcaccttttaaaatgcattgtaccaactcctaaaaagttgagtaactgtggtataaaaggatattaaggtattggacacttgatcacgtgcactcttggctaagcaaaaagtgcctaagttcctaaaagaacgtg

SEQ ID NO: 43410 - DNA, 448 bp, Oryza sativa
  unsure (1)..(448): unsure at all n locations
aatcgcactgcagaaatctgtnctanagaacatctctaacatgacttcacattatggatgccatcgagagagactctntgatgtcatgcagttcactgatgacatctacggtttgcattctactccatggcaattcctgagagcaagacaaccctcgtctaagcagtgaaacaaggcactcattgatttctttgcatggagaaatatctggagtctgaacccaactcttagaatccaaaacgagcttcctgtcaacaacatccctcagtctaccatgtatacccggttcaacatactgacggaggctcaatccaggtccgaatgtagtatctcgtggtcgcttttcgcttactgtcttcaacactagaattccgtaactataaatatctccatgtgtggacgcaatggtcccgacaccatactctgtttcactatgaaaaaaactgta

SEQ ID NO: 43411 - DNA, 491 bp, Oryza sativa
agcttgtcaacagttcagcaatgttcaattggcgcccgccgccatgttgaatcctataatcaaaccatggtcgttccaacgttgggctttggatttcattggtcaaatttatcattcgtcattaaaggggcataggttcgtgctagttgctacagattacttcaccaagtgggctgaagctgtgccgttgaagaatacgactcatacggaggtatttgactttattttgaagcatgttatccatagattcggtattccacaaacattaactacggatcaaggtgcttcttttatatctaaggaagtgaagaattctgccgaatcctatggtattaaattgttgagttcttctccttactacgcttaggctaatggacaagccgagtcgagtaataagacattgttgacactagtgaaaaagaagattgaggaacacccacagaggtggcatgaagtgctttccgaaccattttgggcgcataagatatcta

SEQ ID NO: 43412 - DNA, 439 bp, Oryza sativa
  unsure (1)..(439): unsure at all n locations
tgcccctgctcgtcgcttgccaagcaggcgttcgctgtgacgctgagctgaagaaagcgccgggattgtcacctttgctcttcccggacggcgagcttgtgtttccggagcaggcaggagaggcggctgcactggtgttgacagagcagcaatgaactcctggacagggcttgcctgngttgccgccaactcctcttgcgaggttccctgtactgcaaaagaaggcacaaaaacaggggaaacagcacgcggagaggatgtgtctggcgaatagatggagtgctgtacggttgcctcatgaagcatagggtcgagatggctctccaggagggtaagaacctcctcgctcccctgcgaggagaagcaggaatcagcttgaaggatggactgatcagggatgtgctagttgagagaagggcttgcggcagcgccctcatca

SEQ ID NO: 43413 - DNA, 493 bp, Oryza sativa
  unsure (1)..(493): unsure at all n locations
agcttaacctacagagaggacatatcattttttactaacaagangccacatcatcattcactaattaacaagatgccacatcatcattcactaacaatcatcacatttaaacatcatgcaaacatgctatatctttatagtttttataatttaagagcttttcaaatacaaacatgttaaattatcatccaacataattcacataatgtttcaatgtatatccttattatgttttatgatattctatatacttatatagttcatcctcacttagttagtgcttaaatgattaatctatggtccaaattatctctcctttttttcctctaattaagtcatatcacatcaattgtttttagcctttaaatgattaatctacggtctaaactatctcctacttttcttcttccataaagtcatacaacattatnttttacgtttgaatcaccattctacatactagtttaaattaaattatcataaaccatattaa

SEQ ID NO: 43414 - DNA, 135 bp, Oryza sativa
  unsure (1)..(135): unsure at all n locations
ctcaagcnnnggcctaannntctcatggacaaggcatattattattatgagtatattacactagcggncttaaacttgtaacgaactatcacttacgnccacaaacttgcaaaacctgcatccagactcttaaac

SEQ ID NO: 43415 - DNA, 436 bp, Oryza sativa
  unsure (1)..(436): unsure at all n locations
ntaactactgaccaacgagcttctttcatgtcacatctatttagtgagtttgtcgaatcttttagaattaaattgctgaatttgtcgccttattatgctcaagctaatggacaggccgaatctagcaacaaaattttgattaagcttataaaaaagaaggtagaggagcatccaagaaggtggcatgaggtgttgtcagaggctttatgggctcatcggatatctaagcatggtgcgactcaagtaacaccgtatgagctagtctatgggcaggaggccgtgttaactgtggaggttaatttacaagctcttagaatagccagacaaaatggtttgtcggctgtagattataggaatttaatgatggacaggatagatgacgtcccagaggaaagattgaaggccttgagacatattgagaaagaaacaataagag

SEQ ID NO: 43416 - DNA, 416 bp, Oryza sativa
  unsure (1)..(416): unsure at all n locations
agcttttgagagaaaatcaagcatgtcatattgtacatgcagtctangttcaggttcttttcaacctggatttatgtgccttcaatttcttcaccctagggtgtgtttagttctttgggtgtaaagtttttgaagtatacggacacataatttgtctcgcaatttacatgtaaattgtgcaattggttttttcccgcatttaatgcctcatgcatgtgtccaaacatttgatgtgacgtttttggtttattttttttgtgatggccctaatagaaaaaagaactaattcctcctatatatgatgtatcgtcccttttgttgcatatcaccttgctcattggaaatgatggttttaaatttacacctttaagataatcactaagtacatcattcaagatctcgttgaactgaagata

SEQ ID NO: 43417 - DNA, 432 bp, Oryza sativa
tgagcttccacacaagagtatccattcgtacgatatgttttaattcctgagaattatcaaccatgaagttcgaaagactaatatgacgatctgtgttttcgctgatttctttcattcagtaggatatcaaaacaaggatgggatgcttcttcctactttttatgcaaagattatttgcacatgtgataaaaatatttaagacctatatatcatatttatagaacaaaataaattgctatgttacacaaattccaatgcttattgtgcaaatgaaaacatatataaaatgaaaaaggagaaggaaattatagcttactgaaagtaaaggtagcattgaagaaagactgtctgaaaaactttccagagtatcttgaggagaggtattgttctgaatgctaaccattgccatcttaagaggatcacctatttcac

SEQ ID NO: 43418 - DNA, 482 bp, Oryza sativa
  unsure (1)..(482): unsure at all n locations
agcttgctcagtgcattgaacatattctatcgcgatgactgaagtgtgggaccaacaagctcgcacctactccttccgtcctaaaatataaatgattttggttcgatgaaacatgtatctagattcgtagtattagaatatatcacatccaatcaaaatctctaaaataaagagggagtaggattttttattaaattttaaaccacctttaattcaaatttatatgcaatttattaaaaaaattttaataaaaaaacccatgaatagtggccgaacaaaggtggtgatagtgttttgctatgctaccgtgagtggcgtggcgaaacccttgctatgccatagtctttgtctagcactgaagtgttgttctaccatataaatgagaattttttggttaacagatgaagggctgaagataccttccaattcagatgtttaacgttntgcatgcaaagtacgagaaccgagttattctcatatgc

SEQ ID NO: 43419 - DNA, 420 bp, Oryza sativa
tgtccgtggatgatgcagtacagacgttttatcagatgcttctggttccgccgacatggttgtcacttgttcatgcagtgaatcggtgaccttgattgaccttggaagattagatagagaggccattgttgttgcgaagaagatgattgtgatccgataataatgtgccatatgtaaagcttaatctattttctgaaaaactgtatgatggtttggcgccttaatgtttatttggcgccttctatttggcgcctttgtttccctggagggccaggctaattaggattaatcgctaactacgtaatctggtgactgacggaaagaataatcctgtaatctccatttatgggagggccacacagaaagaatcgacaaacggatgctcttcacgtgatatggaacaccgattgtaacacaaca

SEQ ID NO: 43420 - DNA, 445 bp, Oryza sativa
  unsure (1)..(445): unsure at all n locations
ctgctaaagccatgaatcccntttatgcatatctggatctggatcctgcagaacattcatataggatgagtagtatctgatataaatataatactcgagaaaaaatcaagtattttaaaatatttataaatatgtatttctcctcttgtcaattttgatttccccgagcagatgactcattacgtttaaacgctctgcccaactagtcatagccaccaagcactgggagtcggcctaagcacttcccaaacatgcatatgagtgacatgagttcgtcattaatggaacaaagtttcacgggtcggagtttactactcgggtactcttgcaattattaagagcagaaaataaatttatctcatctctatgctttggatgtattccgaataatacttagcaccttgcgttactcggtccatccaacgagcccccgggtgctaggaat

SEQ ID NO: 43421 - DNA, 503 bp, Oryza sativa
agcttctccaaattaggtgaattctggaggaagagattcaatatgtcgaagtcagcgaccatactgatacaccactcaccaagggacaaagtcttcaggttgctaaaagttggacaacttcttgattccctgctcagaaccacctacattgtacgtgacagtgaataacgagttgcaggataaaagtatattcaggtatgcagtgccattttttccttttttgctaatgaaattgcatatattcctaggactggtcttaggattataggatacatataaacaaattgtttgctcaacatagggagttgtttgtatgcaactaaatgtttgcagcgtccataagtttcaatgctggagggaactcctttttagtgaaaagtgcgaactcttgaagatatctaaaagaaatcattatcagaatcattccactagtaaggggggaagaaggaaatgccctcatctaccatgacagcaagaacctaaagcatgccattctagtcaat

SEQ ID NO: 43422 - DNA, 433 bp, Oryza sativa
gagcttatataataattatttgggatagagtgcgtatgtgtctagagataatttgtactccactaactacacaataagtctagtattgaaacaaaattaattacctatccccaatatactgaagcaactcatcattaacaaatccgtacccctcgaacacctcaagtcgcccatcggagcggtccacggccaccttcgccattgcgcgcatcacaccgctgttcgttcaagcagatattaattcatgcgttgtgtattaaaattttgaattcttttcatcaagacaggatctttgcaacatgaagtttgtaatcgcacgcgcgtaatgctgggacatatagatgtagatgtcaaattgagaatacctgtcctcgatgtacttgcgtcgctcatagtatttgacaaactccattgcgggcaggtccacggcggg

SEQ ID NO: 43423 - DNA, 456 bp, Oryza sativa
cacctgcgaagcattggtgatctcgcttgcaacagtttagtccctcgcactccttccaagggaaagggttctaaatgatgaataaccaatcagaagcacgccaccttttattcgccacttttttagtaaatactgaatgtttgccctgcaaaaaccacaagtggaaggggagtcctttcaggccaaaaatagaacaccccatcataatcgtaatgaaaccttatttcgacagcatatagaagttttgacacatgcagacattccatcatcagcagaaaagggcttacaagaatattcaccctaactaatacatctagccacaggttggttatgcaggtaatcaattgaacctatcggtacaaggacatggtggaaccttcatcttccgttgcatgtaaaaagatgccttgaagctaaagcaattcacatgctgcccaatgttctgaagtgctgaac

SEQ ID NO: 43424 - DNA, 390 bp, Oryza sativa
  unsure (1)..(390): unsure at all n locations
acaactacccnngcaacactaagactaaatataattattgtcaccttatgtagatcactctaatatatacaaagtatgtacctaataaaattagagatcttgtgggattttaaaaataataatttagtggagaggatgtgctagttaattgttatatgcatgcatgtcttatgtatattatgatgaaatatgtgaaaaatgtacttgtgtccttatatttagaattaatggagggagcgttatttatgtcataaaatgcctaattgtaagaacttgtagatacatgtatatatgtgaaccaaaagaaggcttgcgactaatgcacgcgtacataataattaaggtgaatgtacattagtttgtaccactgggtaaaataaaccgaaattg

SEQ ID NO: 43425 - DNA, 490 bp, Oryza sativa
  unsure (1)..(490): unsure at all n locations
agctngcataggatccacatcacaatcattatattctgcatattagccaatggaaaacgaaaccctacaaaccagtgttacctttgctcttccggaatcgtttaaccactgaatatggtaagggtgtggatgtgtaagtgtagtcaagccaagcttctcgaccaaatcagaactcaccaagtgtgttgcagctacctccatcaatgatcacacgtgcacgacggttgttgatgacgaaaaaaatctgaaacaaattatggcgttgcaacctgtcatgctgctgtacctgcatgctgagcacccactgcacaatgttggtcctgtagtccgttgtgtcatcacgaccaaagacttcgccatcctcatcctcaacttcttcttccccctcttcctcttccatgtcggaggtggtgatgtagccatcttctgtagcaacatangcccngtgactagggcaatctttctgcacatgcccaaacccttggcaacg

SEQ ID NO: 43426 - DNA, 455 bp, Oryza sativa
  unsure (1)..(455): unsure at all n locations
ggaccttacgactaagcttgcccatttntgaatgccttccgcttgagcctattctttgcttcggctggaaatgtgaaccatttctccattgccgtccaagctcgctctttctcggcttctgtgaccttcccgatatctttatggaggatcccgaagttctcacgtgccgctagcccgcagcagttagaccatcttccaatgacagtcctgggcgccgtgggcctaccactagcgtcaacctctcttataacttgcactgcggtcggccatatattttgtgaccgcggatttctactagacctacttgcacttgtcccgcccgacatcgacgtatgttgttcctgcggcaattctgcagcacaaacagaaggcaatatttgctaaggggtgctagctaaaatttatgtggtcatgtggtgaaaatntatcctataaattaccatgaatttcgggtt

SEQ ID NO: 43427 - DNA, 472 bp, Oryza sativa
  unsure (1)..(472): unsure at all n locations
agcttgccaactgatgtgaatgtgatcatccattatgtngnatatctcatgaacacaccatccaactgtgtttagtacttcgtatatactggttgcttgcatttgcatgagtaccgaagtctattccagcatgacaaggtttagattattaggcttacattatcaaaattaacgctattcaaacggtcattttaaatntgaaaataagtcctaacgtatgccatatagaagtaggagtatgtattttatttatcagttgaattttcagactacgaactagtacaaaagtatttgctattgttatagccatacatagaatctgtttggtagagctccaacccctaaatttagctccaggagttaggtttagagtgaagttgtagagcggcctatacccaacctctctagttcattttgtgagagcgctccacccagctccgctcccattntaagtggagctgaaactgtttcg

SEQ ID NO: 43428 - DNA, 429 bp, Oryza sativa
  unsure (1)..(429): unsure at all n locations
tgctgttngtggctagaactagatagccatgcacatacacctgctcaactgacatgcgttgaccctgctgttgaaatgattgttcagcgtcctcctttattttttccttgaactccatcctttttttttttcaaactaattacgttcctccttccatataaaaacttaaagactcttaggtttggatacgattaaaaaataggtgaaattggtatcccgcgctttgccgcgggttttatagctttatcgtcaaaacacaattgaagttttaaatggttagatgaaactctatgtacatgtaaaatatatgataatgtggtgttatatatacactacgtcattacaatacaatttatgctttactttgcaaagcgttatcgggtgttcttataacatatgaatattattttcatgcccaatataaaattg

SEQ ID NO: 43429 - DNA, 497 bp, Oryza sativa
  unsure (1)..(497): unsure at all n locations
agcttaatatatnttacactagtgagatctttatataatgggcagacatagcatataaagtaagtagattgagaacaagatagcatagctaacttaggtaagatcggctgaaactccaatactatctctattgataatcatgaagcaagctagagattatggttctagatattacttaatagatcaaacttaactgatgcagcattaagcataaagagaaacataagatctaataaacaaaccaatgaaaaccttttcgagatgatagatatactatataatctaattcgacgaagatatctaattctatcggctgatcttaatgatagaagctagccgacaagactagataggagcattgatccagattatatagcatatatgataacttgacgatttacataaacaagattagagtgtcataaagatataagcactaatcccgagaacgcaagccgccataacaagtacctcttcgtcggagatcgcaaccgatg

SEQ ID NO: 43430 - DNA, 435 bp, Oryza sativa
  unsure (1)..(435): unsure at all n locations
tagcacctggnggacggaggtggaactggaatggagctgttaccgcatccaccaaatccgacgagtctgacatcacgtcaccggtggagttggaggggagcgcangcgttgccgccactgccgccgctgccgtcgcgggcagctgcgggagggagtcgtgctcggcggcggcatcagcttctccgtcggcaccgactaccggcgctggatcttgacgcccgcggcagccggcaaaagaaaagaaagggaagggagggaggaggtgacgcatagggtggagctgcgagagggagtcgtgctcagcaacggcattagcttctccaccggcaccgacgaccggtgctggatctcgatgcccgagctcgccgggttaccatcctcgacatcaccgatgcctgctcgtggcaccccaatcttgtgctgagctcgtcaccg

SEQ ID NO: 43431 - DNA, 446 bp, Oryza sativa
agctctattctcatgtatgccaccatactatatatcatagcataagaattgggaatgataatatacctctgaaaaagatagccctgcatttctatctgtgtaccaatagaacattccttcttgaatgtccacgctcaaagcaagagacatgtacatgtaaacacatggtcgccatacttcaggacattttaaggttgccatcattgttctacttgcttctacaaacttcatatgggcctaattttttaacagtatacaggaaaatgtcaatccaggaaaacaaaatagtacttatatctgacatgataaagcaaaatttgttaccagctcatatggaaaagttggcatatggacgttctttatcatcattccagctaggattaccagtgcagaatgtattgcaacatgccaagggcaccctcgagaaacacacgataatctatgat

SEQ ID NO: 43432 - DNA, 421 bp, Oryza sativa
tccttctattgattcgactgcactaagaacatgatatatggcgacttgacaactcccatcggctgcttctagaactcggaagccgatagtgactttcagctgatgatgactttggacttaccaaatttcatcgttaacaggaagaaggcgtcgtagcagtcgagcggcgccttgccgtggataacggggagctcgtcgacggcgaagaagtggcagtcacggccgctggagcagtcggtgaataggatgtcggggtcgccagagtggagcgtgacgcggaggctgagcccctcgtcgcgggccatgtcgacgacggctctataccccgcccaattgaacctatccagcgacttcagctgcgctcaagtcgtccctcctgccgccgcccgtgcagccgccgcgatgcgtctgcctgaacccg

SEQ ID NO: 43433 - DNA, 483 bp, Oryza sativa
  unsure (1)..(483): unsure at all n locations
agctcgacgggccggagagtgcttttctttccttgcggnggngaattggacatggcaaagccgtccttctttgagctagatgccacggcgaactggtcatggcgaagtcgtccttcttcggtaggtactcatgcgacccttcgcctcgcatcattcttggttcatagccatcgccacgagtttcggcagatttggtcgaagggcctcatgccatccgccaacaagcccctcacgggcaaaggtgagagtggagcttctgccgagaccatgcaaaccatgtggtatgggatatggcgccctctttcgaccgatgctcctgccgaaacctacactggtcctgcaaataagatatttcttactttaaccgggccgaaaggaacagtattgggctttcctttgatgggccctttactgtgctgctcggatgatgggattttacctgtacgcctacnctttgcgcacgtggcgccttctaagtggtgg

SEQ ID NO: 43434 - DNA, 346 bp, Oryza sativa
  unsure (1)..(346): unsure at all n locations
acatgaaaattgatttttaatttatcctggcacaactttaaaacttgcgattttgataaataaaatagtggaaaacatggattttacgtttgggcctcaagtggtgtacatatggggattagttggataccgatagggggagagagctcccaaaccgacctaaggacttgactcaatgtcagttcatattctatacatgacaaccacatgtgctagtatgggatatcccaagcttagctacanatttatggcttagccttacattcctgtacgctcggagtgtattgagtcgtgaaactcagaagaacattccttttaccccgacgtggtaagttaagtgactaaa

SEQ ID NO: 43435 - DNA, 480 bp, Oryza sativa
  unsure (1)..(480): unsure at all n locations
agctncatgngatcccaggatccactcactaaatagtttgtcagatatgcattacccagattatctatacagaaatgaggaaataaagaatttttgttaaaacagaaataaatcgggaaaaaaaaagagtatctcagaacaacccattcaatgctgatgcagcaagattgatggacctggaacccatatatgtctatttcataacttatgctgagtgcttcttcatttagaaatataacattgctaattcaaatttactactcaatgcggtatattcaaataaagaggcactgaacataaatgttgatggttggtaacacatcactattttttgtagtagtaaaactaaacagtgtatctttctgatggcattaagtgtactttaaaacttatgtggaactaaagtaattgtggctcttttcaatggtatgtaaccattctttctgtacttagcatctccataaattaagatatatgatc

SEQ ID NO: 43436 - DNA, 189 bp, Oryza sativa
tcgctagctatccctccctatctgcgtgcggaacgagtttgcgtttccgctttgccgctttgggcgggcgagcaagcaagtgctgtacctgaccgatggtggtgggcgcgcgtgcaccgtgcgcgatgcggtgcgcgtggcctatttttatcattatctttttgcgtcggatgctcggaaggggggggg

SEQ ID NO: 43437 - DNA, 451 bp, Oryza sativa
  unsure (1)..(451): unsure at all n locations
cctgcggcatgcaagctctcggctggacagaccagcgcgtgttctcgcttttctcacanancgcggtctcggatcggatggatgcaacactgacatcctgatgtgtttgcagcaggaaagctccggaggggaagctgctttccagctgcgaaagctataccagtggccgcagcgcgtgtatttcgacgaggaatgcacactcgaaagctgatcaatatctgggccgcacgacgcggtgacggtacaacaaatatgggcctccgaactggagaggcccgcccatcagcatggagggcaggtacggtctgcgccattatggcttataactctacccgaaaggcggggctcggagagacaaaggtctgtcccagctggacggtgtgccttcccgtgctgtaacaaaaacggtgaaataataaagaggagtcggtcacaagggcacccncttgcc

SEQ ID NO: 43438 - DNA, 264 bp, Oryza sativa
acactctaatcaacctagagcatgtagtcaacacctgaggaaccgtataatctgaagaccaacggttgcaaatgtagtttctaaacaggaactgatttactgttgtaccaaccggatcgatcggcagtactcctatgaatataatatagcgtcgacaatcgatcaggactaaacacaattcaagttgattgattggaggcttcactttcaacctgaatcatcgaatcctcatcctgatcgatcgatcgatcaagctatagctag

SEQ ID NO: 43439 - DNA, 322 bp, Oryza sativa
  unsure (1)..(322): unsure at all n locations
gtagccaccctgcattgctgatcaccggaggtagcaaaacatatgttccacacgccgatcggccgcatcattaccctgacgagtccatcttctacacccacgctgatgcangcgccacagatgtttcgaaaggagcaccaccgagacacctctgagcggcagcgcacccgcggcaagaggggctccagcggcgggagctctcccgtgtctcccgtgaatgggtggatgaagcggattgcggtgtcctggtccctctgcagcaagaggacaccctcggcggagtagatgatgcaatggtccctgacatggggcagcctgacgc

SEQ ID NO: 43440 - DNA, 443 bp, Oryza sativa
  unsure (1)..(443): unsure at all n locations
nttggaatcacacctcaagactactccagagctgtagaatgcctattctcagtgccactctctaacttcttccctcacacccgatctccacgaaaccagttacaaaataccattgcattctaccaatctctctcaaggcaccctctcaccacaatccgtgaactgttcgcctatataatggagcttgccaccggcaagagtgtgcacaaagagaaaatggcatatgatgccaattatcaagaggaattccctgaagacgaattacagcgagcaacaaacattgctctcaaaattctccgtgctgcagatagatgggttgctacacggacactaaaggcagttacatcccatccaattggttcgccacagctggtcgattactgcatcaagacccttggtggtacaagaactgacgatgggatggttgttgcaattcgatgcaa

SEQ ID NO: 43441 - DNA, 282 bp, Oryza sativa
tttttttttctccaactgattacacgttggctaacacctttgctacttgtccactcatctcgatctacaagctttgttaccttgtctatttatctcgatatacgcttataatttggataccatgagcaatttctttctcttgacttttcttgtacgtatcttcttgacttacatatttctttgcttccaactagaatggacaaatgatcaggcccaactaaacaatgatcgctctcttcgtctacatattatgccgaaaatgtaaacaaaccgcctctccaa

SEQ ID NO: 43442 - DNA, 363 bp, Oryza sativa
  unsure (1)..(363): unsure at all n locations
tcctacaatcaaaccatggtcgctccaaggatgcgctttggattcattggccagatctatcacttcgcattatacgggcatacgttcgtgctagctgctacagattacttcaccaagcgggctgaagctgtgccgtngaagaatacgactcatactgaggtattcgactttattttgaagcacgttatccatacgattgggctttccacacacattaactacggatcaaggtgcttctcttatatctaacgaagcgaagaattttgccgaatcctatggtatcaaattgtctgagtcttctccttactacgcttacgcctatggacaaccccagtcgagtactaagcaattgctgaaactagt

SEQ ID NO: 43443 - DNA, 493 bp, Oryza sativa
  unsure (1)..(493): unsure at all n locations
agcttattntattagtatctatgataaactctgtaaccacaatataccaggagtatttctacgtcattggtgagtattatatttctagtaatgtcgttaagaaataccaacaagcatttctggcgccgctgccggggaagattcataatagagattacatgaactaatactttatatttacctctgtataatcattttcctttgcaggcttaccttggttgttttcgcttttgttgtgaaaacagggtagtgcacgactggtttcaacttgacggaaaacttcaaagaaaatctagaagctttctttcggtgcgtcaggccgcgagtcgttgctccacagaaaactctaccgacaaagaaaccagtcgtaccagcgccaccaacctttaagactatggctgacaagacccttcgcgagtttgctgctccctctgctgacaatgtggccattgggccacaaatcaacatgggagacgtggatttcgacttgaag

SEQ ID NO: 43444 - DNA, 444 bp, Oryza sativa
  unsure (1)..(444): unsure at all n locations
ctgactaagctgggaatcgcgattccgctggagagatgctatatatctatacaaccgagagaaagagagcgatgtaagataggagaaaatcgatctgctgctaagaaagaggatctagccggtggggacttacctcagcatactcggccgatggcgcatcagatggattggtggaagacgacatcgctgcaggcggaggtctcgccggagatgaagtcgcccgggagtcgcttttgcgtcggaggaatcgccagacaggcacccgataaagcttcgcttgagcgatgtatacagaagtcacgaggcgagatttctcgagggtgacggttagtatttcaagcacggcaatatcggcccgaaaacggcaaactgccatacttgctcggagtcacnacacggcaaatccagaacattgccaaatatccccggacttggcgggcatgt

SEQ ID NO: 43445 - DNA, 487 bp, Oryza sativa
  unsure (1)..(487): unsure at all n locations
caagcttgtaaaacgtattcctatctattatatgccattatnctctacttcaatagaatgtcatatcagctattactttgctctctctcagatacgcattgtggtgttagaatatcatatcagctattactttgctttctcacattcgtattgtggtgttatagtttggtattaagtcaacctctctaatttgaccaaatctataaaagaatgcagtggcacctacatcatcaaattattttccttaaaatctaacatgaaatatgtcttgataatgtatttattggtagtgtaaaccatgattattctttatgagcaaatttgacaaaaccacaattaatatggatcaagttgcataacgataaatattttgacgcacgcagtctatatgttttatggtcagaacatatcacacaaacgtactgttgatctctctaaggctatgtttggcattccatgctagaaaaaatcctcccgacgtataaca

SEQ ID NO: 43446 - DNA, 438 bp, Oryza sativa
  unsure (1)..(438): unsure at all n locations
ntatacaatgtcacaattaaagtcagcacatattatcttgtgattcggaggtggatggctcagaggttgagcgccgtggctttggatggcatccaatgtgtgagttttgcaaaagcccatcttatggtgatgatgaattatactcccatatgacaagacaacatctttcctgccatatatgtcaaaggtattctgcaagactgcagtcattatcttatttggtgaggcaacagcataatgctgactttgtgattgttaacaggcaacattctggacaatatgactactttaggaactatgatgacttacaggtatgctatatatatatcaagctggcatactcgtatgaaatcaagtactgtcttaaattcaatccggacatggacacagaccctgtgaatttcaaatccaacatcaaccttacattagagaaaaacc

SEQ ID NO: 43447 - DNA, 316 bp, Oryza sativa
  unsure (1)..(316): unsure at all n locations
aagaaccgagctgcagctgcctagagatgatggattttttttgganaagnactcccttgccccgctcgaagtgtacactcctgtacttcagaggcaatacgccctccatatgaaccaagcctcttcaatatatctgtaaatctagaagtcgtgctcgagaggtgaatactacatggaaatctacaactagtgcttgagagctgacaattttatgacagaacagcagggctttgggcccctgattgtgtatttggtcttgaaaagaagttgatgccctataggtccatgttgaagcatcatgcacatgaggatacat

SEQ ID NO: 43448 - DNA, 405 bp, Oryza sativa
  unsure (1)..(405): unsure at all n locations
ggaccaacaaactaagctttactcactctcctccctacggtagtgccatttcttcttcttagaaanctgcacacttttgaaacctccgctccataccgtacgccacaacgcaattcatgacatgcccttcaagtacctctgacacttcgtctgcaccagactgggtggatgcatgcctaggtgttttctctcttccccaccaccactatccaaaagatgcacagcacgcgaaaggaaaagaaacatatcatgatcgcgtttccttccgcttncgacgtttagcccttgaatccatcttaattccaggaactgttgacatgtgtgagatgacttctaaccacatcaaagtcggatatcaagccaacaaatgttacaaaaaaaagaatcttcttagcacccaactac

SEQ ID NO: 43449 - DNA, 485 bp, Oryza sativa
  unsure (1)..(485): unsure at all n locations
agcttgtgtgcatggtgctgcanagcattttatgcgtgagaatgaaatcaaaaggtattattcctggtttctgaaactcaattgaagagtactcacagaagtaggaagagtagaaatgtatacatgttcatccccatagatcgtttccaccgctacttgatgatcatccggtgcttcggattcaaggagacgaagtgtgtaatggcattcatcaacaacacctgccacgagacaatgtttaggaaaagaaaaggattactagcaaaacaagattatgcatgcataagtaagaacaagcgcacctctacataaatactgtacagggtgaaaactaagccttttaatctttcgagtattcatagttctcccagttggatagattgacatgatatcattctgggtatatgcaatgtctgcagtactctcagacagaaagaatttggatggtggcaatgggcatgatctttctgaaccatcaagtttag

SEQ ID NO: 43450 - DNA, 428 bp, Oryza sativa
tgagtctataactgcatatcaatcaaactacatcttcttatttattcatactgtcgcggttaattaattgctggcatgataactatcacatgattttagtgacttggatatgaatttccattaggatgctatgttgggatgatgttgtatgagcaatacctcttggaagaagtttgcgttaatcatcatcgtttcatcatgttttatttgctatgtgcatttcctttcaaaaaaaataattgctatgtgcatttgcagacctattagcttcttgttgaatcgtcgtgctgaacctgtgatgtttgcttgaaatcgtcaagcttgaagtctataactccatatcaaccaaactacatgctctcatttattcatactgtcgctgttaattaattgctggcatgataactattgcatgattttagtgactt

SEQ ID NO: 43451 - DNA, 468 bp, Oryza sativa
  unsure (1)..(468): unsure at all n locations
agctnggaggtctcccgacgtggctgattctcacgggctgggtgacccgggttagtaatgtcgtgtgggtaaagtgtaccccctctgcagaggttaacaaactgttcgaacagccgtgcccacggtcatgggcggatgtgaggtgattcctagcgtagttttgtttgactactgcttgtgaaattgctgttatgaaatcgggttcgatgtttgaaaagaatccgcagctgacgggatcagctaggcccgggtggccgtttaaaaagttgttggcccgggtggccgtttgaaaagttgttggcccgggtggccgtttgaaaggtgttggcccgggtggccgtttaaaaggcctttggccgggtgccaatcttgttcaaatctaaagactgatacattgcacatactccgaccggacgagacacactgcctcatccgtgtcgtttgagaagcactcacttagttgctttt

SEQ ID NO: 43452 - DNA, 419 bp, Oryza sativa
tggagggaaccttgtggcctgtggattatttctccttataccgaggagggttttcaacgtaaatcaccgtgtcttgcatgcatgtgtttattgctgtttcgttgctgatttgctagttgaaactatactcaaagcttatggcaagatgaggggttgattgtgtgaaatatgtttgccggtcgatgaattgtagtttgcacatgaagtgatttggttcagccccaacaaagtggcaactgggctgcctaagcataaagattctattatcatggcaagtaacgaagagagcttactgcagcatcaaagcgctggactgcggtcactgggaagtactgtcctttctccagccgaccctgctaagacatatttagttcttttcagttcaccaccaactaagcaacccagcacgaattttttca

SEQ ID NO: 43453 - DNA, 450 bp, Oryza sativa
agctttcctactatgagttccttccctgaagtgaataacatctcatcattcggcgcttctcacaccaatggaccacctgtgttcagtagtttcagtcaaattggagcagcaactaatattggacctgagccagggtactactctactagttcttttgtaaaatatgcagcgattgtggtactaatctactccctccgtttcacaatgtaagactgtctagcattgcccacatacatatagatgttaatgaatctaaacacatgcttatgtctatactcattaacattgaaatgaatgtgggcaatgctagaaagtcttacattgtgaaacggaggatgttttgaacacagactatatattcagaaagcactgcttagtaaagtttattaaacacaatcgcaaagctcacatatagttgaccagtttatttatgctgttcatttggttctg

SEQ ID NO: 43454 - DNA, 440 bp, Oryza sativa
ctagctatgactatctatctttccatctacaacaatgtttcacatattgtgctttgttccctgaagattacaagtttgatagtgaggagatgattcacttgtggatagggcaaggcattttacattcccaggatgaaaacaaaacaattgaagatattgtgttgagatatttgaatgatttgggtaattatggattcttcataaaagatgtgaatgaagatgggtcaccttactacactatgcatgacctactacactgagtagcattgaaggtttcatcatatgaatatctttctataagtaatactaaagtaatgtctatgcaaattccgccatctatacggcacttatctattgtgatagatgacatggacgtaaacgacagagcaacttttgaaaatattaagaaggattttggcacactaagtaagatgcttgat

SEQ ID NO: 43455 - DNA, 387 bp, Oryza sativa
ttaccacccgattcgatagcgataatcgccgtgatcaattgtggatcgacgccccacgctgcaccggctttctggcttattggcatccactgcatcgcactttgcaccggaactttcgcgttccacggcgggttcgtataggcatgctttgatgaacaacccgctaataacacaatcaaaaaggcaaaccatctcaatgtcacttcttctattcttatagcctggaatcgccgttgaggtgacaacggcacacctaagcggcatgatatacattgtcgttttgttgtcagcaaggaattgccatgtctctgtttcacttaattgctgccatcggttactgcattaaacaccacgccgcgctgcgtgggatccagcgccttaccgacg

SEQ ID NO: 43456 - DNA, 344 bp, Oryza sativa
  unsure (1)..(344): unsure at all n locations
acctgcagctgcagctacngggaaggaatgcggaggtgttattctttctanccnccttaacaatcgtatatcacatcttccttcgctaaggttttctcaacctacgttattagcttgacctcatttaagaacaaatccttagatttcctgtgctgtaaccatgtccattatatggtttgtgtaaaaaaacctgcaaactgttatgctaacttaccgaagggattacgctttggtgatctgacatcgaatcttcttctgtcgattgtcttctcaaagactcattatatgcattgctcctatacttattatcctctgcgaacggttctttaaaattatcagataag

SEQ ID NO: 43457 - DNA, 424 bp, Oryza sativa
  unsure (1)..(424): unsure at all n locations
cttanctcaactcggntcatcgaagagtggaggttcagactttgctattcattgtctcgtatcaaaaaccggagccctacacgatcaaaaccagcatcacggtggtcaccaccacgaagaatatgcatcagaacacaacagtacagtactgaagaacggagatacctagctacgttggaatggacgaatgagctaccacagcaaattatcaagcaaatggcctgattaatcaagctccgatcggatctcttttgccgcgcgcggaacccagataatcctgggctgatctgtcgcatgtaattatctcgttcctcgaacttggttgatccgtgtggattactcggctcgatctgataagctgtagtagtagcttaatttgttgactccctgctccatccatgcatggtcagacttgacaaattct

SEQ ID NO: 43458 - DNA, 501 bp, Oryza sativa
  unsure (1)..(501): unsure at all n locations
agctntgtgctcgtcttaggaacaagggtttactatttgacacctttcatgtttcagtagaggagcaagtggcaatgtttctgaaaaaggttggacaacaccattctgtttcatgtgttggattctcattttggcgatccggtgagactgtgagtaggtattttcgtattgtgctgcgagccatgtgcgagatagctcgagaactcatttacatcaggtctaccaatacacatagtaagatcaccagcaagaaaaacaaattntatccatatttcaaggtaattctaaacaccaagccataacaatgcatattacaatacattttgtttattttaactctaatgtttcactttgatatgtacataggactgtataggagcactagatggtacacacatcacggcaagtgtgccagccaagaatgtggatatgtttagaggccgcaaaccataccccacacagaatgtattagctgctgttgactttgaccttanngtcata

SEQ ID NO: 43459 - DNA, 430 bp, Oryza sativa
  unsure (1)..(430): unsure at all n locations
ntaacatttcttctctgctacagtgctgctagacaattatcaaatttaatggactatcataatatcagataacctcccttgatattatgcaggccattacatgttgcatgaagcagaatacaggagtgctgtaaatgatactctgataaaagctcttgtcaccttttgccacagaagccagctgaatgccacaagtgatcaggaatacaagatagcacactccgtgtgcagtctgcacaacgtggctgctaattctcatgagaggctgagaagggtagccaacgggcccagtgaccacttcttcttgccaagttcaaaggaccataatgaatctatggattcggattcttggattgatgaacagaggcgacaactatcctatccacccagcatggagcctcaaggagtccttggccaaattctgtttgat

SEQ ID NO: 43460 - DNA, 493 bp, Oryza sativa
agcttaataataaagattggctatcaatttatcaaagaattgagagaaaacttagtagttggaagggtaaacatatgtttgtaggtgggagattggttttgattaactttgagttatcaagtttagttatgtttatgattttgttttttaagattcctaaaggggttctttaaaaaattgattattatagacctcatttcttttggtaagatgatgaacataaaaataaatatagattgacaagatgggatattatttgtcagcctaaagatcaagggggccttggtgttcataatttagagatccacaaccagtgtttattaagtaagtggtagtttaaattaataaatgagcaatgtgtgtggctaaatcttttgaaaaggaaatatcttggtattaaatctataactcaagttgacacgaaacaaggggatcttcattttttgtcaagtttgatgaagctaaaagttctctctaatatgggttctggata

SEQ ID NO: 43461 - DNA, 440 bp, Oryza sativa
ttgtccatggatactccctccttcttcatggtgtgatttatgggaacagtctctgatatcctttcatcatcattgaacacctcacgctggcttggcattccatcgaacatgggtgtcatgagcaccacccttgcccaaatcaagcaaccactcgcatgggggcgttgctgaagtgcactccaatcgactccatgatagaaatcccacgaatcaacgactctgataccagattgttaggaacccaattcttccaattcaatagcaaggatccaccatacaagcaaccattgttttgcggtgaaaaagagaagaagaaactagggaatacaagttctggaagcttctacaactaggagaggtagctagacgtatgaagagaggtagaggagagagatcgccaaggttccagcccggaaaccaggacgccgctgccgccgtgg

SEQ ID NO: 43462 - DNA, 441 bp, Oryza sativa
  unsure (1)..(441): unsure at all n locations
agcttaaggtgttgcgatcgtgcttgtcttcttgtcacanaaagttgccaacacgatttttggcgactccgctagggaagagatccgttcatcgtcaactcgacttcgacttcgccatgacgaagccatcatccaagatggaggtggagccatctaatgtgatgccggtcacattggatgactttgaaggagaggatcgcaaagccatggaggagtacatcaacgagctcacacgggaggcattgatgagagcaactactatgactcgtcaaggcgtgatcatcaagcccgggccacgtcccaagctcgctcccgacatggtaagtaatgacgaggtatcgcaatctatcaaccaacaaattgcatctacaatagattcatctatggctaattttaaagatagattagatgtaatgtttaaggataagggtgatggatttt

SEQ ID NO: 43463 - DNA, 428 bp, Oryza sativa
  unsure (1)..(428): unsure at all n locations
tggaattgntggtcgatgattattgttntgtcctaatacttgcagtttcatgtaaagtacactaaatcaaatctttttttttaaaaaaaactagttttactggaaactggctttggttatccattattttgtctgttaaccaaacagaccagcaattttccaagaccctactagacctggtctctacaaaattcataacccaaacaacctaagtctttcctaccgatttcatatgtgttgttgctatgcatgatatcaaggcaaggcctctttttaggctggttgccagattgtaatgatttgataatcttgtatactggacgtttctttttctttatactttcgtattctttaacagagcacaaaatataattggaacatcatttactatttttaccaccacccaccttctcaggttgtcatggagc

SEQ ID NO: 43464 - DNA, 306 bp, Oryza sativa
tcaatatattttatgacatccaagtctatcttcttcaatgctatcttctttctaaaggtagaaaccacggagttcttgtcagttgggcggacacgacaacttggtgggacatgggagaatgcgttcatcttcttccgcggatcatagtataacttccgaactggtaacaagttaatatgaactgcatgcacgataagaaactatatttcatatacaggctattttgataacgatgcatatatgcatgtgtaactaattccaaggaagaatctgaatatatagcatgcaacttctcgttagctcatg

SEQ ID NO: 43465 - DNA, 438 bp, Oryza sativa
tgtgcgtaaacaaacactactgtgaacgcacgcgaggttatgtacctgagcaaaggcaaggagagccccaagaggtgtataggtgtacagtaaatgttccatttttcaaacagttctgttccaggtacagagagcccaccaccaaggcagagtgggaggacacacttgcatcagcaagactagacttggattaacttgcaaaggaccctacctcccagtttcattcctgcctcatctcaatcacaggatgactacaaacttctgcaaacatgcaacatctccatctatatctgatgccgattgcttctacccctcgctatctcaaccctcatcctcctaactaagggggctgttggttttcagggacttattcacctcagatatttaaacactaatttaaaatattaaacatccactaattaccaaacccatttcata

SEQ ID NO: 43466 - DNA, 472 bp, Oryza sativa
agcttcgcagccccaacagttgaatgtgttatgaggaaagcccctcacatgtttcaactgcggagatcccggacattttgcaggtaagtgtcctaaacgaaagcgcaatggacccaagattgttcaagctcgtgttaatcacgtgtctacagaagaagctcaagcagcgctggaagtggttttgggtacgttccctgcgaactcaattcctgctatagtttttttttttctggtgctacgcattcatttatatccaagagatttgttggggtacacgggttaagaaaagtggaacttatttcttccatgaaagttaatacaccgggaaatagctcaacattagttagtttttgtccctctacgatgatagaaatccaagtgtcaccttgtctagccaatcttatccttgtggagtgcaaagacctagatgtcatactgggaatgggattggtgacaaaacacaacggagtca

SEQ ID NO: 43467 - DNA, 409 bp, Oryza sativa
gggatgttgcgacaaaagaaatttccagagtatcggtctttcacaccatgcgcacactgctttaacagatgtacttaagaacttaaaagacacatggttttaccactggaaatgtatggcacatgtgatgaaaaatccgactaaataaactcataacggatttaccaaccgcctggaaaatgacgtaccataatatataatcagcctaagccataatattggtcaataaaaatgcacacttacatggcaaaaaaaacaacgatattgtatccaatcaattgctttataaaaccaaacagtgccttgactaataaaaagtcaacggggcagctatataaagcttcactgttcgacaccttgtaaaatgcattgtaccaactcctaaaaagttgagtaactgcggtataaa

SEQ ID NO: 43468 - DNA, 467 bp, Oryza sativa
agcttctcctcgccctatagcataccctttcacgtcgtacgacatcactcttcaccccattgccaagaaactgatgcgaggtgttccatctcatcctcctcgccctcatcttctctgccggccgtggtgaaaacaaaggccgccatcgccatcgagtcgcggtcgtctctatcttttgcccgatccatcatctcctttcagtgccatctccattccatctaatcacaccccatttcgtgcagtgacggcgttggaacgcgacctcgccaccagagctcgggagcatgctccgagcaccgccgccatagcgacctcggcgttccgaccaccgtggagcattaccggtcaagctgactcgccatcattatcacctcgagcacctcttctaaacgccccatgaaccgccagatcgatgaagcgagataggagaacaaccttttcttttccgcgccggctaccgccttttt

SEQ ID NO: 43469 - DNA, 424 bp, Oryza sativa
  unsure (1)..(424): unsure at all n locations
actatanaatactcaacgctgatcgtactgactgcagagatgattcttttgacctctatcgcacactgtcttatgatgaaccaaactatgaaacctttgatgatgaaggagatatgaaaagtcagtcggttaagatctttgacagttgaggaactcatacaatctcacgggatgggggttgatgttaacatgcaaaagaaggaagcacttgatgcgaaggagggaaagagtcaggaatctgaaagggtggagataaatgtggagcttgcgaaggaggaagccactgaggctaataaggcaagcaagctcgaatcacaaggggtggaggtaaatgtggaattgcacaaggacgaagcaatagacgtgaatgaggcaatgagtcacgcactttcgatagttggaaatcatcgtgatgatgataatg

SEQ ID NO: 43470 - DNA, 419 bp, Oryza sativa
  unsure (1)..(419): unsure at all n locations
acggacaccaatcagcctattgtctgcataatcccatatgtttagtacttcaaggtacgatcactctgttctgagatgtgcttatagcgcactagcacgggttgctggcatgcaaaccgttggctctggttcaattctcgtggagcacactcacgagaaatattcacttatttcttcttaaaactattgacatcaagcccttacttggtgtccaactttttaagattgctttgttttcttgatcatttggaggcctgttttatcaagtatctattatcacttttggccattacacgcacacgtttgagatattgataacccatgaaactcttaactcctaccactaccacagaacggnggaacactgctagcctattactgtctgttctgcgtgaaccgatggtgatccaacactattg

SEQ ID NO: 43471 - DNA, 437 bp, Oryza sativa
ttaaaactcagctatcgagcacgccacataacataagagatactgattttgaatatactgtcagcattcaataaccaaccaattggactgatctgtaaaataaagatctgatctaaccagactcacttgttgtgccaacagccaatgtcatgtttaatgagcaaaaagcaagtgatgatacaacgcgaattttctccatccatatttacaccaaccacctgtggtaaatagtaataacttgcatgagttaacatcgttagttatttgtcaacagggaacaacacaatcaataacacagcacaactgaccttttcatccaagacaaacattggcgtcagaactggaaagggtggatcccatattctcacagacctatcttgataccctgcaatgtatattctttccacggggtaattctcggtcattgacatttcact

SEQ ID NO: 43472 - DNA, 473 bp, Oryza sativa
agcttctgttcctcacgtacaagaacttgttcggtgtcctcatgctcggcatggtcaagaagccatcgccgccgccgccgccgactcataccacctactcctccttcctccggcaacctctcgagacgtcgaggctgctgtcgacggggacgaagccgttgaggcacttgcacgttggagtcgtcgtggcgccgatgccgtcgcagtagccgaatggcccgcacgaggcgtacttgtcacagccggtggggaaccgggagaagacggtccacgacgacgtgttggctgcccagctctggaaggtgagctcgccggtgtagtccagcgtgatgcgcatctgcggcgagccgtcggcgacggtcaactagaatgagtagccgtccgtcatgtctccgtcgatcgtctgatacagcttgaagctggtgtcggtctggattacgccgaaaatggacgctccggtccactcccctcgt

SEQ ID NO: 43473 - DNA, 322 bp, Oryza sativa
  unsure (1)..(322): unsure at all n locations
gagggagacattcntnccgcactgagcataaatgtttatattganattttccttaccaattgcatatttgctttccaattgctatctatcaaacttgaaaacaacataaaaatctgcaaaatttgaatataccaataagatacgacanngctcagtcatgctancgtaatacaagtcctagttctctgctttataccacatacacatttcgcacaatcttgatcttaagtatgtttacgtcatctgctttatgctaattttgtgacctacgaataaatcgtgaatgctgatatgccatgtcggatccctaccgagctccaca

SEQ ID NO: 43474 - DNA, 487 bp, Oryza sativa
  unsure (1)..(487): unsure at all n locations
agcttattgtgatccgttgtacgacgggacgaacgttcctacagtgtttacactggttgaatctgactctgatttatcaagagaaccgtctcacatgtacaaattaatggttagttaccacagttcacgttcgcctcgttggccctagctagttgcaccacgaggaaataaacatgtactagtacctggacgagtgaatgcgtcatgggaaatcttaactaaaactgctttggttctacgatagtaggtagatgcgtccaatgcaatcgttgcaacaacagctagctacattntgctccatagattggcacttccgagtacattaacattaccatattgttgtgactgtcacgttttcgattgtttctcgcgtgacgcactaacttggctcactagctagtttagctggtagtggcggatacatgtacttcacacgcacaagtactagtgtatagtttggtgcatgtccatatcatcatgtgtagct

SEQ ID NO: 43475 - DNA, 448 bp, Oryza sativa
  unsure (1)..(448): unsure at all n locations
ttgctnngttggaaagacggncactgctgtcgtcgctagagggatgccacttgcccgcgacttctcttcttgctatgttgcatgcgctgataggtggtgcctctcgtgtgcaatggagcattggagagaaagaaaataaggtggaaagagaaatgagaagagcgagccacgcgaatgctcgcccataagagcctccccccctcagcgccccccatacaccaacataactcaacttttcttgaatgatagttttagtggtacttttgcagttttctagtggcagtcttgcattaacgattcaaagcagtggcaaatctgtaattacccctaaatttatcttaatgttaaaatttcaagcattgataaacttggaaaatacttaacttcaagaanaagacatgcatagttttgccttggaaattacttccataaccaacaaaatttattt

SEQ ID NO: 43476 - DNA, 489 bp, Oryza sativa
acctgcggcatgaagctctctctgaaattaggcaaatggtttttctcactaaagatataaacaagtaggcgcagagaagttccggtgtttcatatccacacaagattagcaaggagaaaaagtatatggctcacaattcaagaaacactaatataaatgaagcatctttgacataactgaaactgcagctgtaactggtttcatgtcatccacgacgcattgccaaaacctggtgaaccttcagtttctgcaaatttggtttcctgcatttatatagcaagatagaaaacaataatcgtttactagatacaaccatgcctagaatagatatgttcgtcgctaaccattaacatatcatcaacgtgatgatgcaaggtgcaatgtactaagtaagaaatcatgaattggcatggtgtgcgcctagatatgacaaggcataaaaataaactctgaccttggtactgctatgtcatctatgatgcaatcgca

SEQ ID NO: 43477 - DNA, 423 bp, Oryza sativa
  unsure (1)..(423): unsure at all n locations
tataatactangattaataacaagatatcgtgtaaatgtttctgactaaaatgcacatgattatcaagtttatgtaccagtctactcattttctaagttcttgcactaaatcgcacgcacctaccaatttcttgtatcgtgggtgtaatttactcttattttttcaatcttactttactagcacgatccctcacgagattggatgatattgggttggccccacaaaacgtgttatattatcaccaaaagcaatctgctatcaagtagcacgtgaaaaactacactggactcgggcggtaaaataagcgcccacttagttctctctcttccacatatgaattaaatgatgtgacatatattggagcctacccagtcagcttatagtactttactgcttgctctaaggccgagttgtctagtgag

SEQ ID NO: 43478 - DNA, 473 bp, Oryza sativa
agcttgtgggtccgaagttaatgagagcaacatcgtgcccatcactttggacaagttgacacccgaacagataaatgatcttgaggcaatgatgcagcagacacagagccaatttttgaactcatacatggagactcgccaaggaacaattgttctgaggtacaagatgaaactagttgctgatgttcctgggacaagctcttccaaggatggagaagtgcaacaagtgtcagatggtatagctcagccaggtgataaaggtgctgcagatggctcgggtgacaaaggtgatggttctcaaggggctcaatgtgatggttctcacggatttcaaggtgagaatcttaaccaagatggtaacacgcacaactgcaatttaacaactttcaagatcggatcgactatgccgcgcaacatgctttgattaatcaatctggggtgttagtcaatactctgtcaaacatagtgaagtc

SEQ ID NO: 43479 - DNA, 461 bp, Oryza sativa
acggacctatgaaactcaagcttgaattaccacggctattggtactatgacctcaaaatgtaatatttaaacacaaatttcagtagattgtttacacttgaggcaatagtatgacatggaatgaagcacacttactgactaatggttgataagggattccatttaattcgagtgcatagagatgtaattgaggagccacaattggcaatattaattagcatggttcaacacccagaagtgaaacacaataccaacaaattaaaaagaaatgcatacttttccatgagtcttatctacagcatataatacaataccttctgaagaagccaacttgcatataattctatatttttcttatcacacaacttgccacaactaatagtttttgaaaagccaacttgtcacaactaattcttttaagcaactataaaaaaatcaaatactcatggaattatcgtcat

SEQ ID NO: 43480 - DNA, 419 bp, Oryza sativa
  unsure (1)..(419): unsure at all n locations
tcacgctcttgcactacgggtcttagttcttctcanaacagccatcactggcgcagggttctcaaggctggagagcttctgtgttgattgccgtgtgccacgactgagcttncagagtgaagccatgccggtgttgaaacttcttcagttcaagttctatgctttccgggcaaccaaacaagagcctatgggcatcgtgcacctctcgagtctccgaagcgtcgatttcacgtgtgcctccggctacacaacggatgctccgggcatccgtgagagtatcaatcaggtgaggaaagaagccaaggagcaccgcaaccgtattaccctttgcataaacccaaagagatcgtccatgacactggggctggagcactggacagctggtaccatgcggaagtgtgatgatagaaacctgacct

SEQ ID NO: 43481 - DNA, 494 bp, Oryza sativa
  unsure (1)..(494): unsure at all n locations
gcttctagaagccaggttccttcctttactggcagctcgtcctctccaggagttactttaatntgtttcttcctcttactacttccttggcttgagcaagtcgccttcttcgatcttggcaaacctccctcgcactcttggctggctgtctgcaagagccttcctgcaagcatactgcaaccatgccaaacgatgcatcagtcagtgtcagtcagtcagtcagtctccttgtttgtactattattcatcagcctcaatcagcttctctaattaatcatgtagtagtaccttctctgtccttatgttctcttttttcttttctttgaaaaattaaaaaggaagaggacaatatatagttttaccttgatctttctgccaaagattctcttcaccttcttctttctgtacctagatagcttctgcttcctttcttcagatatcaggtcactgatggttacaagcctctcgcaagatgctaattgagcgtttcctga

SEQ ID NO: 43482 - DNA, 436 bp, Oryza sativa
tttctaattatttcacggatagcaaagatcttgcttattggtaccttgacttacttttattaatcttgcctcgggatctctggccaagtaatttctgatatatgcatgcaattgagttctgatggtctaaaactatcgtgtcccttgcataagtctcttttgttagtctaggcttgcaatgtccaatgaatcatttctgttcttttgacatgttccttcacagtcctttcctgttccattttggttttaatgcgcggtatgtttgttcctcccagattgtggaattcatctctgttttgctgacgattggtagtgaaactgcggaacaggagctaatcaaccaatctgcagtaaaacgtttcatcgatttgttctttcagtaagtggggctattttatgtgctcttcttcctaacaattgcaagagaatcatcaca

SEQ ID NO: 43483 - DNA, 359 bp, Oryza sativa
  unsure (1)..(359): unsure at all n locations
ggaccataagcgactgagctgcagcattctacgagggcggtntactttggtcagggcggactgccttgtttttgagattattcgacagaataacttgatcgcgggtgattaggaacaatcatctgctttacgggaaaaaaagccactacggctatatattgttatagcagcaatagttgcacttctaccttccctcgcaccacaggaataggatagggtacttgaactctctttccgattccgattaattatgtcattttgactctacgaggatgatagatgaatcaactcatgtttgcatatgagctcttgaactggaattcggatgacttaccattccgcacattgggagaacagat

SEQ ID NO: 43484 - DNA, 396 bp, Oryza sativa
acagacgtatttatggaagctcaatagatagtctcaactattggggataggttgagaattgctcactctcgactaaagagcttctccggataaccgtcgataagagctcacttttgaagccggggattatgtgtatctttgggttactccgctccggagagtgcaccgttattaaacctaatgcaatttggctccatgtcttttgtgacctttcatacacttgctactaaggggagaagttgcttatcagctacaacttacattcaatatgatcggcactcatgatgtctcccacgtgccccatttaatgaatgcttaagagcacttgatgaacaggctgtgtctgcatcatcgatattccgtaggacctgtcatatgtggagaagctgattctta

SEQ ID NO: 43485 - DNA, 416 bp, Oryza sativa
  unsure (1)..(416): unsure at all n locations
ctcagcttttggtgcacaccgaagagaggacagggatttgttcttgcttctctccttcttcctcctcttcttgcgggaagatcactactactattaccatcaccatcaccgcatcatttgccaaaccatggaccagcttgcctttctccaggttgcagctgcctgacgcagtttagccagccactgtcaagtgcaggtccatttatctgaccaatagagtatgcgagcttaataatcgcacagntttttgaagcgcaattctacgggagtaaaacacaattagtgttggaggggaaacagcttttgacattgctgtgagatgacggggctggtttggtctgcggcctaaataggtattaccaaatgttgttaatgccaaattttggcaagttttggcatgactaattttggtaagt

SEQ ID NO: 43486 - DNA, 427 bp, Oryza sativa
  unsure (1)..(427): unsure at all n locations
tgtgcctgtttggagagatcatcataaattattaaagtatgccgttcgcggnacataaaatactcagccagggctgctcccgtataaggagcgaggtattgtaatgtagcaggggaatccgccatttcagctactacaatagtgtattccatggccccctcttcatggaaagtagttactacttgagctacggaggatgctctttgaccgatagctacataaacacatattacatcttgccctttttgactgagaattgtatctgtagctactgctgttttgccggtttgtctgtccccaataattaactctcgctgaccgcgcncaataggaatcatcgaatccatagcaataagccccgtttgaaggggttcatatacagaacgcctggaaattatacccggagcaggagattcaattaagcgag

SEQ ID NO: 43487 - DNA, 449 bp, Oryza sativa
cacctgcggcatgcaagcttgttcgacgttctaatttggtactgcatgcatcgaagataaacaatatattagtatcataaatatgtgaagatgtctagtacatagtatagagacttacatcctctgcgttaaccctgtacctcccattaaccctaaggaattctcacgcgtaatacctgcaaaggaccgttcctcgcagttgcttgtgacactttatgacatatcatagaaaaaaatagttaaactttacaattagtgacattaagtgagttgagtattaccggtcaataggtacgtactatcagcttctctcttggtcgggtttggtctccacccttgaacttgtagtattggaacgcactgtacagatgtcgtaccgtttcacattaagaaggatattaatttataatacattcatatataaatgcgagagtcataatcacttacta

SEQ ID NO: 43488 - DNA, 424 bp, Oryza sativa
  unsure (1)..(424): unsure at all n locations
ctataaaactcaacttatatagctggtccgctgactnttttatatagncattacactgtttgggcttatcaagcaattgattagatacaatatcattgcttttcgccacgtaagtgtgcatttttattgaccaatattatggcttaagctgattatatatcttggtcattttccaggcggctggtaaatcctttatgagtttatttactcggatttcacaccacatatgccatatatttccaggtgtggtgaaaccatgtgtcttttagggacttaagcacatctgttaaagcagtgtgcgcatggcgtatgcccaatacattagaaatttctttattcgcaacatacaagcctttttatagcttgtttgctctgtgaatnttcaatgatggagccaactctaaggtacattcatcatatttta

SEQ ID NO: 43489 - DNA, 471 bp, Oryza sativa
cccggatctctgagacacctggagctgcaactaactgcatagagttgttctttatactcgagggagaaaaggaacccatttgtggacccaattagttgctcggtcattctcatcaacctgaacgcaagaacaaacctgtatatatgcgaccacttgaccaatcactcgacaagcaatgccaattcatgttctccaatccaatctcaccaaatcgagaaccaacattttccaacgacaaaataatacactgaacctatgcctgcatttggaattttggatcactcgttcagttcttgcaccgctttattaacctgtagcgatgtactaccaccatctgtttcacggattcagaaaaagaactgagagagacagcggagcttactgtcgtcggtgctacgatgaaaagggttgctttcaagtgttcatctctgtggcacgtgaatggcttctttatataagacccaaatggat

SEQ ID NO: 43490 - DNA, 403 bp, Oryza sativa
  unsure (1)..(403): unsure at all n locations
agccacttctgtttagaaacacctctactctcagcgcgaggctccatcctcttcttctctgacaccatcgcttgctgagttgccttcttagcttcattctgcagcaccagaaacagcatagagatgaatacccaagactgcacagacaacagctatgacaaaacaatggaattgccgatgaccgcaccatcttcagccgcaactcaaatagcttcttctggctttctgtcatctgcggcgaaccgtcctctgagccggcgctctcctgctccgcatcatcatcaccaccaccaccctcagcttggtgagcgccggaattgccagcgtctgcatagagcggntcttgctccgcacgctccaacccttaatcgaagccaagaatcactccatatgcactcaatac

SEQ ID NO: 43491 - DNA, 164 bp, Oryza sativa
agcttgtatggttactcgagggtgggagactgtttcttcctgatccatagaggatgtgacgtagttatctagcggatctaaacagagaggtcctccagcgcatgtatatgaagatgaaacattgactactcttatctattggtggaccacaccaggtacctatg

SEQ ID NO: 43492 - DNA, 352 bp, Oryza sativa
gttgtattgcatgatcaaataataagtttgtgcaccttgactgaatcttgacgaggatttaatacacaaattatatttgaaattgcacgtgacacggatgcacatgctgttacatacatacgacatgagagctacaggtcacatgaagttcatgggcaagcgcctgggaaaggacatcatgcagacatcatgtgtgcagctatgagtcgctctatagggcgtgggagagaccgtgtgcttacacgatggactatagaatgtaaaccaccactacatttttgtgacgtaaagatatactaagtctttgcgttcaaatgtttggaactaacggtatactagtagtgcaaaaata

SEQ ID NO: 43493 - DNA, 185 bp, Oryza sativa
cgacttataacttcgctaagaggacgatatgcttgttcctatgcaccaaacggggcactatgaagcgatcaatgtagcgagactaccaccctgtctttgtcaaacacattcaccatgccgcgtttggtaggtacactatctgcaatattagatgtacatgccatgcgcattctgtaaactcagaa

SEQ ID NO: 43494 - DNA, 315 bp, Oryza sativa
acatgcttaaccaagcacacctagagttagctttctttgcatgccaacatgcaaaaatgcagtgcattatggcacttgcacctttaaatcatgcaagaatactctcaatgacgtctttcccttacctgctcaatcttcttactattaacatcaattcccaaatattgagccataagagccatgggagagccaagagcttgcaagctatggcttcttgaggaggcaatggatgcttcttggtcaagcagtttcatggcgatgacattcactatagcgaactattgttcgcaccctatatagccggagacgctcgtc

SEQ ID NO: 43495 - DNA, 379 bp, Oryza sativa
actaacttattttgttgaacctatttaaaaacatttggaacacaatttatggatggtaattacaggagatggagaatcaagaaccggcttcaaaacttctaaaagaaaagagaaccggcttcaaaaatataacataggttcatcctgataagtctaatgtataatagagatctttataaaatatatgtctactgcatcagagttgtcattggagttccaacttcggaactggaattacatttattcacacagcagaattgaaataccgatttagcttattggttgttaacattctgtgcagctaataaatggctgatagtgatcggttcagtgatttactatggatgccttatgggcagcacatagtatctaaaatttc

SEQ ID NO: 43496 - DNA, 465 bp, Oryza sativa
taaagctaaagactgtgctcatttgaatcatagaatagaattatatctgagaagagaaaatgaatagttaggcacaggcggaatatgtgtgcatgtgcacagagagggagggaagaaagggctatcaaactcttcgctgattacaacaaaatactggttcccatctactatatattataacagaaaccactatggaaacatctggtgttaaactaagctaacactaagctgtagaggcacaaagcgcaacccaaatgcattgttcaattaatccctcccccaaagggattgacggggatttattccacatctattgaggcgtggaaataatccctctcatccccttgctgatgaggattaacagaacaagccctttatagcgaaatttcgcagagtgcaaaccatcataccttacagaacatgttgattgagaaactctggatccattcatgttgacaaattgct

SEQ ID NO: 43497 - DNA, 438 bp, Oryza sativa
  unsure (1)..(438): unsure at all n locations
gagcatgcaagctaaaaccatttacgtgctgattgatctttgataagncngagggtgccggggccttaacctccaggcctaacactgttatattcacattaaataagcaatagctcttgaagccagcatatacatgttgtgcttgacccattcagtagaccctatctgagacattgagtgtgccgcatcaatacacaaccttctgataaagaagcatttcagaacaagtgatcaaggacataccagagcatactcttctgcatcccaactacacacaatgattgttcgtctaggcctccattccttcttatcaagcttggacagcctttctgcgatctatatatatacgtgtgatgctaacattatatcatcaactcttggcattcagaaattatagatgccttttatcatcaacaaaaagaatatgcacttaaattt

SEQ ID NO: 43498 - DNA, 433 bp, Oryza sativa
tgtgtacccgtagggtcgtacggcagggcggcgcggcctgtattgctgctcgatcagctttacgccgtggcgccgagcggagcgagcagtccagcacgtcaccgacgctgctgacacggatcaacccagcttcttcttattctacaccatgcagagcctggccccatgtctgtctgaaacctctgatcatgcacagcacagggaagtactctctgctagagtagagaagatatactgtactgactatgagtatgagtaaaatattgccgtctgctggatgatcatcgatggagtggacactgaacaatactgtacgcaatatttgctgaatacacagaacttgttctcggtgaggagtggtgcaatacacctactcgattattccatgtcgtcacgagacaggtcgcacgactcggctcgatacgatactctc

SEQ ID NO: 43499 - DNA, 316 bp, Oryza sativa
atgaaggtgtgaggaatcatcacggacttcattgcgttgtatcaggcagggaaaaaaacggggttcgttggcgcgcttccttaacccgtaactttataagaatgagaactacttagctatgtacatatttctacattaacgaatgtttatatgaaaattttattaaagtactctaaaaatcagataatctattttaagttatataataactaatcatgtgtaacgcttgctcatttattaactttaagacgttaagacttaccttcgctaaaccaggggcttacctttataatttagttacataaactttcaaaaa

SEQ ID NO: 43500 - DNA, 472 bp, Oryza sativa
tgtattgatcaacctgtcgatgacagactgtgttaagctgtttgtatgaggcagatctcttttctcttcatcgagaaattctctgcaacaatcacatatatcaaacaatctatttttgcataacaatacagaaagagagaataagcttgtgtaacgcacttgcgaaaatcttcaagttcatcacagtgtcggaagacatatcgatgtgcttgtactagaaattggttatcaaatcgggctactgcgatagccttgccgattggttcaccagcactctcaaacatatacaagtcctttgtattatctgaaggttcagggattctgggtggacttgtaaagcgtgtggtttcatcaaaaaaactcgaacaggatgtcaagcactcgtctgcaatataaccttcaacaattgaaccttctggagaagctcggtttctgacaagtgcctttattcgaacaaatgatctatacatat

SEQ ID NO: 43501 - DNA, 423 bp, Oryza sativa
  unsure (1)..(423): unsure at all n locations
ctctcggctggagatgaacaatagtntgagtatccatattattgtgacgctccacgtcatcgtgactgcccatagaatgttaccatgttgcctcaatgttccaataggatagtactaagaagacaatctctaaatgtataatagctttgataattcaacattgggatataagctgccctgaacggctctcatctggacaagaactgtgaactggtgatatggaaaatccattgttcacctataaagtgtgggttctaactttacattagctgccgatctgatgatcgcttagaggatagcttattattattcacttcacaaaatgcgatggtggcaccagcaaaatatgttagtgttagtggacagcacattatagggtgccacacgctcacatatgtatacacaatcagtagacactgtgtc

SEQ ID NO: 43502 - DNA, 440 bp, Oryza sativa
  unsure (1)..(440): unsure at all n locations
catgcaagctnggaattaaccatacacttactacnaatttctgttattcgtaatgggctgtacccctgggtgtatgataacaagatgccttgtcagaaatgagtggtgattgatgtgaaaatctcatttgtgttgggtcctcttccttcaccaatgacctntatctctgaagtattataatcatgacctgtcaccaatgcagataatgggaaaaaagaattacacaacacggcctgtcacccatgcgaaatgcccatgaaaaataaaaatatcgatgctccccttcgaatctcattgccgccgtcgttgtccgcatatctccgtagtcattgttgccatcgccagcttgaaccgtggaaaccaccgaggtccccaaggtgtgggtgaccatatcaagcagctgttaactctcaagtggctagatctggtggcctcggaca

SEQ ID NO: 43503 - DNA, 461 bp, Oryza sativa
  unsure (1)..(461): unsure at all n locations
gggttgctgttacagtatagtcctagagactatntggctttctttgtatttacctacatgatgtattttttggtgatggatgtttttcatgctaccagaggaaatttgtctcaaggtgaagattgttaaatatgtgatccgaattttgggcccacaatatattcggattagtttcctagcagtagttcctattaggtgtctttcttttatcccctatatatacttttgtaagccgtacggaaaggggcgacgttcccattgttattcctctacgtttgtatccaattcctttcctttatagtgatcattgccgatcggcgtccgtggttttttcccgcaagagttttttacgtaaaaattcgtgtctccgttgtgcatttattttcataacaaagggacacgtacacaagtgcacagcgccgccactggcacccgccgccgtcagtcagagtctcgtgctt

SEQ ID NO: 43504 - DNA, 446 bp, Oryza sativa
  unsure (1)..(446): unsure at all n locations
agcatgcagctttcccttgcatgatcttactctttgtctttaccactgaatttgaacatcactttctccagtgaaggactatcatcagtacttaacgagctgacatttcaacgacgcacctggtatcgtgtccccatatcatcaccaagctctattcgcgcaatgatgcggggatgcgtggggtacgaggctaaaagaatgccctatagcaagccccttttcgttttctgcatcggccatgatgcgattgaangttgttgaaagccgacaatggcaaccggccatgaagctatgcaacgaagggagcaaggaacggaggaagaagaaagaaattatgagaatgagtttaaaccgtctgatgataatggacggtggatagaatggaacttcacgctcatgactttgatatgcaaagtcagaggatccgcgtncgctcatctgtcatc

SEQ ID NO: 43505 - DNA, 465 bp, Oryza sativa
ggtatagagctcagctgccggagcttgacgccctctgtctttaccgctgctcccttctccttcggccctcaaccgcgcgcgccgcgccttcaaccgtccgccatcgctgtcgttgtctaccaccagctgcgccatcgttgttgtccaccatcagccacccgtcgtcgtcctcaccaccagtgctgaaagaagatttggggaagaagggttggatcggatgtggaggagctcacatgcaaatatgttgccactctggatggccacataagctagtcaacccggtcagagatcctttagacctcaatgagtcacttaaacaagaccgtggatcctaatgtcgatttttcaagatcatggacctaagtgacacctcgctccaactttaaggaccgaccgtgtactttactctaggtaaaagttgataaaagaattgccaaacttacaagattgtcaatgaagacaact

SEQ ID NO: 43506 - DNA, 400 bp, Oryza sativa
  unsure (1)..(400): unsure at all n locations
agcttgcatttacccataacattaccaatctattgattgtttgttcagcggctntgtatttgttcggaagccgcttttgagaagccaagaccttcaagaaaaaaaaatccatcttagcaaatagaacataatataagtgtaaactatatgtacactgtcatttcacaaatgtattcagagagtctaccaaatatacaagaatatggaaatataagaatcaggtggccaaactaatatggataccatattcagggacgcttaagacagcagatacaatttttcaaaacaacgccatattgacagtaacgaaaagaacatgcagtgtgaattataaaattttgactaaaataacaacaaacctgtgcagtggcttgccgcatctttgtcaaatcgtcattca

SEQ ID NO: 43507 - DNA, 457 bp, Oryza sativa
  unsure (1)..(457): unsure at all n locations
ngatactctactcanattggttgatgtcaaaggcactgatggttatactacacttttgcattntgtcgtgcaggagattatccgaacggagggctcccacctctctgctagcaaccaatcaactccacgaactcaggcaaaccctttacgggacgagctcgagtgcaaaaagcttggcctccaggtagtggctggcctcggaaacgagctcagcaatgtcaagaaggcagctgccatggactccgacgtgctaagcagctatgtctcgaaacttgctggaggaatagagaagatcactgaggtgttgcggttgaatgaagaagtcaagtccagggaagatgcatggaggttccatgattcaatgcagaagttcttgaagagggctgatgacgacatcatcagggttcaggctcaggagagcgttgcgctatcacttgtgaaggagatcaccgagtac

SEQ ID NO: 43508 - DNA, 410 bp, Oryza sativa
agcttgctcacttaccgatcaaggtggttttattttgatttgtgaacgcctaaaatggcctatgtttatgtgaggatttgatccttctatgtggcatgaggtaaccctgggtcggcttgggaaaggctttgttgcgaaccttcgataccgacgggtgttcggaataagttcgtatcttgtgggtaaagtgtacccctctgcagaggttaactaactgttcgaacagccgtgcccacggtcatgggcggatgtgaggtggttcccgctgcgtagattcgtttgcctgtgctttgtgaaaagttgttgtggtgtgggaatcgtaaccagaatcagcctatgtggcagatggacgacctgagtggtcagaaactaatctgtgtgattcgggatgtctgcgggcatcatagact

SEQ ID NO: 43509 - DNA, 443 bp, Oryza sativa
  unsure (1)..(443): unsure at all n locations
ngctgatgagaggcgatgaaaacgaagaaacaaggtattgttttaatctaccgaggagtcaagaacacggctgtgtgctcttgcatacatacttgggcttatctagctgcgtggcctgctcgatgaggattttgcagtagagctctacgatgtccagcacctccagcatgttgtcctcgtcgatgacttgctctgcctgcataaacagaacacagcggctactgttaacggaggaatctctgcgcgtgtcaagcaaggcaaaagcatggcatggacatacacggatgagagcgcggtccatgtggtcgatggagaggagctgctcgacatcgccgcgggcaatggagcggcgcccgatgcgtggcctgcggacgacagctacgcgcgcggtatcgagcttgatcatggacttgagcttggcggtctgcttcgaagaggcgctc

SEQ ID NO: 43510 - DNA, 398 bp, Oryza sativa
agctttttaataagtgcattctctgttgttttgtctttatactgaaagaaccagggggatatgtaagataaacagtggcatgcaacccatcctaacaacacacagacatcgcattatgtctcgctcgagatatctttttcacttgcgtgactagattgattatggcagaatctatttcaccctagcgcatcatatcctgggcttctgtgcttatctagctgatatatcaagtgtgacaggacgagagagatgactaccttatccttcgataccagtgaaaacaatgtaatttcaaagtggctcgtaataaagctatgtttttgcaagtcaaatagaaggttataataattcttcaagggagagcattgaaaacaattatttctagatatagtatacat

SEQ ID NO: 43511 - DNA, 417 bp, Oryza sativa
tgcttacgcactagagatggcttcgtgcaagcttttcttctttttctagcccacaaagtcactgagtcatcgcagtaccctgtgtgcgaagtactccgaggcaacgaagttactggtcgactcatcaagtgggcggcggagctatcccctttccacttgcattatgatgcccgcactgttgtcaagactcaagtgctagctaacttactggctgaatggacactggcattcgcccctgagcccgagcccgtcgaacaaccctgtgtgatgtactccgacagctcgtggtcgcacaagtggagcagacgttgcggcggtactcactatcccagggggtgtgccgattcagtgtgtaccaaggctgcagttcgacacaaccaacaccgcaccagagtacaaagttattcttctgggcct

SEQ ID NO: 43512 - DNA, 438 bp, Oryza sativa
agcttgactaaccggcacttgcttcgaagttcttgcttcttgagggaaagacataagaggcggttttgctgcagcggattcaacctccttaactgtgtgaaagtattcccgactttcaaatgctttgccatctacaggcactactgacttgaaccgagatgcatgacctggaccttcccgaattgtttggtacgaaagcaacagtttgcccttcttctgagcataaatttgcaactgacttttgtaagaagattggttttctgcaataagaaaaatcattcaatatgagaaatatagagaatataatagtgaaaaacaacaatgttcttacaccatgccagtacacggtgctcttagaccccgcaactacaaatgttacctattatatactaaaagtccatcaaacatcgattggaatccctaagaaaaaatagatag

SEQ ID NO: 43513 - DNA, 464 bp, Oryza sativa
  unsure (1)..(464): unsure at all n locations
ntcggcgcaagttccatggtttaagtatgccaacatacttatctgattcgtcctgagtcatgctccctgtctcagggtcttctttctaaagcaccatctcaaggtttctttggctctaaaagattggatccagttgagttggagggggacatgaagctttggtgctgttaagtttttggtgtaatcatggcctacacgtcctcctctttctgctgccaccctgacttccacaggggccttcttgtgctgctcccttagcacagggtggaagtggttctccacctaacacttttttccttagaaaatctgtgtatgattgctatgaacagctctaattctttcatgcagttgttgactggttgtaaattctgaccttagtgctccttgctgtaacctttgctcatccagctccaagtaaaaatagcttggtatggtatgactaggattntaaaattttcttatga

SEQ ID NO: 43514 - DNA, 353 bp, Oryza sativa
  unsure (1)..(353): unsure at all n locations
atgcagctgcgcgcctatattattagacgaaagcttgttctttttgtttcctgtgnctgaatgggttgactgcgtatggaccatgcatgtgtcatgtgatccagctgcacagtggatactcgattatagaagcaatttggtagtcgtgactagagaactcaactgtattgtgatcgtgcgtttacgcatatgatgttacgtacaccctcatatggtaatttcagctgcttctgtctgattttatcgtcagcagatacgttcgcacaattcacatgttatcttctgcaaccgtttttggcattacagggttgattctttcagattttcttaaataagtatgcatgccaaatttg

SEQ ID NO: 43515 - DNA, 470 bp, Oryza sativa
  unsure (1)..(470): unsure at all n locations
tcttgctggtcgagcagatcgatccagcttgatggcggatattatctatccanctgctgtgtatatcatcatacataaataagatgggaaagagaggccggactaatgcaatcgaccgtttgaaaacatgaagaattgaagatgaatacaccggactaatttcttcgggcagattaattcagattcttgccctgtgcagccactgatgcttccgtttcttcatgcacacacctaggaggcaaagaggtcgggatgcgggtgcttgagggcgcgggaaggcagctgcggcacacgggtgcgacatcccggggagaatgggaagtggcgactacagcgccggagccacgggatgcgatgcggtcgtgaggcggcgtccacctgtggcgtcggtcgctccgagggcgctacggagatgcactgaggatcctcgagatgtaatcgagcggctgagaactaaacaatgacgtggc

SEQ ID NO: 43516 - DNA, 442 bp, Oryza sativa
  unsure (1)..(442): unsure at all n locations
atgcagcttatcaatcaacctaggcacggtttttttttttctttnttttcgacnggcgnacatgtatggcgcagatataaaatgatagatggtattctagtgggagacagaagaacaggcatgaactagtagaaggaaaaaccattaagaaaatattttttctatcaagagctgatactaacataccatcgattggtttctccacaaaaggcttgtaaaatcgctttccatggatctcaataaaatcatcttgctcaacaaagtactttaactcttggttagggtattctcttctgacaacagcataagttggaacaagaactccgaacaatntaaggtgctaaacaggcaaaagggaagtatcaacatttgcgaaaagagaataagctattatgtaaaaggttgcaaactggagtggagggtagtgtttctctataagtat

SEQ ID NO: 43517 - DNA, 371 bp, Oryza sativa
  unsure (1)..(371): unsure at all n locations
acccatacccatctntacaagagattagggcgtttncttcgttgggggggaggggtgganaacgattgacttttcattcttacaaacttacaccaccgtcctaacaataccaccgcttaacgctatggatactgcttagtatgctggccaccagaatcatgcgtgcttaacagctaggactcctgtgagggtcttgtcgttcaacagtttcaatgctcgccccatgctttccacaaaatgtggttcatgctgttccctaaccccaccttgtagacagcagtctccgaatcaccatcttccttgaacaatctagcgcctttggcggtgatatcagccaatttcttggtacgcgcctgaattgagggataaca

SEQ ID NO: 43518 - DNA, 393 bp, Oryza sativa
atgcaagctttaaatgcaaaagtactaatacattatttcttcagtttctgtaaccctcacatgttgtagcttccttgccatgctcatttatgcgtatttctgtgcagatgccgtcattccgataacatgtgtcatattagtgttcctgtttgcactccagcattacggtacccatacggtcggatatctctttgcaccaataatcctaacctggttgatttgcatgagcatgcttggcttgtacaatatcatccactggaaccctcaagattatcgcgctcttaatccctattacatgctcaaattcttgaggaagactaacaagcctgggtggatgtccctggggggaatattgctctgcatgacaagtaaagtgaagtatgcgtatgctga

SEQ ID NO: 43519 - DNA, 417 bp, Oryza sativa
gactccgagacgcataatgctgttgaatacacattgtctcgggagctatttattaggaaactcctcgataggctgaaaataaatgaggagaatgctggttgattatatcagctaatgccggatagttaagataatgtccaaattccaccggtcttcctatcatacgctgaaaccaactgagagataaatctgttgtgagcgatcggaacatatgagactcgaatgtacagattgagacaaacgcccgagctccaccattgtcgctctataaaaagacagaggatgatggatgctgactgacgactcagctctctccaaccgtataccttaaatcaatcgaccgatcgaatggacactgtaacgggttcgtgaggtctctacatcgtcggacacaaatgtgaagaatgaagaagtgcc

SEQ ID NO: 43520 - DNA, 380 bp, Oryza sativa
tatacaaaaacacccgctgcgaattccagggcacggcgacggttatctgcataacttttgtgccgagacagtgccacctttatattattcacaatgatactgactttatcttcatcttctctcatgatatgagtcccgaacacttggcttattccaacttggtcccacaataccggtgatcagcatttgcgcccgtacaacgctggataaggtgccatttgtatgctggcttgatagctgttattgtaggagaactctgcataggggagactcttatcccatgtcttaccaaaatgtatgacacatgcgcgatacatatcttctaggatctgatttagacgctcagactgtccatctgtctgctggtgatacgcggtgct

SEQ ID NO: 43521 - DNA, 272 bp, Oryza sativa
cccaagacagtgactaaagatccgcacattgttaggttaggcgagatactaccggagatgcattgagaacactttccaaatcgcgttacccacgactcagtgtgatgacaaaagaagagagatttgtgtggagcccgcaatgcgagaaggcgtttcacactctcatggaaaagctggaatcctcgcgcggcggtaatattggcggatactctacaacgactagatggcgtattgagaccctactcgccaaggattgatgcgcgtgctcatgc

SEQ ID NO: 43522 - DNA, 470 bp, Oryza sativa
  unsure (1)..(470): unsure at all n locations
ntgaaattattatcgacgctgatatgtacatatggagatttctgttaagcggaatgcgccagattgtactggcgatgtggcgagttcatcttcctcctactttatgatgccagttgtgtaaacacgatccaatatgatccatgctcatggatatgaattgatgattatcgtcccaacgcaaaatcgcgagtgagacgatagcactcaaagaatgggccatgccgaccttctgatcatgctctgcccatatcacgatatttattgcggagatacataattcactctctgcgtggatgatgagattgctggatgagttgagtcaacttggtgctagatagagcatattagctctttggctacttgcttagggaccggaatatatagatagagcgcatgatatgttgtgcttcttgtatagagaccgtgatataaaggacgaaggatactatgcttattgtcacgatggttgg

SEQ ID NO: 43523 - DNA, 435 bp, Oryza sativa
  unsure (1)..(435): unsure at all n locations
gcaagctttgtcatggcggcagcggntgccggtttttttgccgtgatctggcgagacgtcgtctctctccgcgtccccgcgtgatctaaggtatcgaaataatatgtcgattcacctactcgaacgcgccgagccaagcgcgcgcctttccacggagtcgaacgagaaccgagccgctgaacgtcctctctgggcatattcatagcaagcgttcgattagacttctgtctacgcggcatctatccaggtcagggctgcagcggccttggtttgcagccggtctgcaccaaatttttttccgattaggaaaaagcgttttggtgaagctgcaatctggtgggatggcaccttgtgtttgcatgcttttcttaacagaaatattatataaaggtatattggtctaacngaagtactccttcgtccaaaatagctatc

SEQ ID NO: 43524 - DNA, 463 bp, Oryza sativa
tggtgagcaggaggcagaagggaggcaagaagacaggatgtatttagtaggatttgtgctttagtgaggagagagagagatagagatttttgcttcacactgctgctgctgatgctggctgctgctttgtgtgtgagtgtgtgtatcagaagcagatggagcttaccttagcttggctggggctgcaggaggctggagcccaagtgatgaagagaggtggtgatttgggaattgggaagggatggatgatgctgggggattgtgggttatgcatgcgtggatgattaggacatctgttgtattattaaaaaacagtagacaacgatcgaatcgcgatgaaactcgaacacacacacgtgtacgtgcctttgggaaaaaaaataaaaaccggaggcacacaccctagtctccatggataaggaattaagcgcatctcgatagctctatggtaatatatagcaat

SEQ ID NO: 43525 - DNA, 450 bp, Oryza sativa
  unsure (1)..(450): unsure at all n locations
catgcaagcttttacctcgtagtggcgatacttatgtttttgtcgggtaacaagaaaaacaaatacactactgtgttatcttttattggaaaattcatttggtatcttgtattcaatcatattgtcagcaaactggttcactaaaagaatcggacctcatcttttcgctcatcattatgcttatcagctaaaaattaaatttttaaccttaaatttggaggtgattttgaggttttttcatcgaagtttatttttcagcctttgttgctagatcactaagaacacgtatataaaagatttattcataaattacttttcgtttacaaatataccgtttcgcttactcgcgaataagcgaaatgatgtgacaagttcattttataatcangtgatagacaacgaggatgtgaatgagggtcttcctcaaatgcggatcctatatggcattgg

SEQ ID NO: 43526 - DNA, 451 bp, Oryza sativa
aacggtcgttagcaattagttttgtctgtcaatattaccaaaatagaggagaactagttatgcttgcaatgcatatttatgttagaataataatattccactagttttaggtttactaactttttgcagagaataactataaagtggaggagaatcgacatcaaatcagacgataaaacaattggacgatgttgagaatcagacttatgcatgaatgggccaagaactcagaattgacacgatgaactgggccaaaattcacaagtctgtgtatgggagcaatagaggaggccacctgccgagtttgggccaggtcggcctagcccatggttcggccgaacctgccgtggcgccgatggatgcagggttttgatggacggctaggattgattcccaatgacggttggagggtattaccgacctttccaaccgtcataaccgtcattacctg

SEQ ID NO: 43527 - DNA, 446 bp, Oryza sativa
  unsure (1)..(446): unsure at all n locations
tgaggcatgcaagcttcatgaatattggcataatatttagattcttgtatcatagngaaacaatctagatagctagcataatcatattctggaaattggtagtagctgcattcatcttttcatgtagcccaaaccataattgattaaatatgcatctttttacagtagttttcatacataacctgtacgctccacgaattttggttgaattttttttgagtcattgcatcatggcataaaaattcatataatactgtatagttctgtccggaaatctgtaagatgtcagtttcacaaatttgcgtagcctaaactacaaatgataaagtcatgattccttcagggtagctcctaatctaacccatctatctctctgattgttgacaaaacttttgtatctttagagctagacctaacaagttgattaagacagtaaagtgatgaat

SEQ ID NO: 43528 - DNA, 463 bp, Oryza sativa
  unsure (1)..(463): unsure at all n locations
tagtatatntatttaggtgatcttgcaatagcccactgttatcatgcgtacaggtttagtgctatgttttccaacctatgtgctttttactggcttgatcacagacaaataaacagcctagacaccattccaggtcttgcggtgacccacattgatttatgtttaaccagatgattgagatattcttgtttcattcgtggaagcattcatactagggtctttctttatttcagctgtccaaagcattctatggatatattgaagttctgctcagcaatcatatcacttttgatctcaaattaaatacaaacaccttcgtgcatattggcagcactcttgaatctggcttaaaagggctagataccgggatatcaacacaggtatgtggcatgatgccttttactgcttgaaaaatgttcctcgcttcttgttacaacagcatctgtggatcaatgcttaaact

SEQ ID NO: 43529 - DNA, 453 bp, Oryza sativa
  unsure (1)..(453): unsure at all n locations
catgcaagcttgtctgatgcagagacatgctgattgatatctatccctaattaatataagagaagaaagtgaggacaaatggagctacataatcatatgtaaacaaacatatggatgcacatgcaaacaggatgtcaggtgaaattcaataagcataaatgataaatcatctacacttcttgacagaaaagactaacgtatctgcaaagatngatgagtataagatttaagtagcacacaattacgagaaatggaaaagcggaaaacgataccttatttccgagatatcccatcaaacctctgccaacacatgagaccttcaagttcttcacatgttcccttatatcacttcgtacccaaaccatgagaaaaacaccaaccatttgcttgctggcaactaggcaatatctgctatattacagaaaactctattntcagggcaaatatttgtat

SEQ ID NO: 43530 - DNA, 468 bp, Oryza sativa
  unsure (1)..(468): unsure at all n locations
ntaaggtaatgtgcaattatgcaaccaacaaaccagtgtttatcatcccatagtttaagatcaggtcatctctcanatatactctagtttaatggctaggctaattttgaagatgattttccttcagtttcatgattgattctgcatgcaagactcaagtttcatgaccgattctgtgatctggatggaagcttttggatgttattcgtgtgaggcactaatctgccatgcaaacacctggctggctaacatattcaataaaagatttttgtgtcgggtactttacataaacataaacaacaagtagtgtcgttgtctaagctttaatgcaactatccaagcagcaaccaggatagaacatccctttagcagaattgaattaaaaatcaaggaacatatcaataagtaaacacgaagtatactctgtgaacaaagagagcagctagacagactgcaaatatgatgcgt

SEQ ID NO: 43531 - DNA, 441 bp, Oryza sativa
  unsure (1)..(441): unsure at all n locations
agctggtataaaatgtgtctcccatttgatttatatgtcccaaaggaacacacacaaactggacataggtacacaagtttctgttgtcaagatttttattgatgacatattaatagcaaagtctattgagaaatctccatccatagtcaacgaaaatcatcgaaaatcagcatgactgctgtctcgagaaaatggcatccgcactaattcttagaaagaaatagaatgctacaacaattccgcaaccatcactctgcctcgaacagtgacaccaatgccgatctcgctcatctctccggggccaaccttgtgcgccacctctagacaacaacctgcatggctgattacgaggtggccgcacacatgcttggcgagtgtgagcgtanggttgtcgaggccgagatctgtctncaagccaagatcgatgcacttcagatggag

SEQ ID NO: 43532 - DNA, 472 bp, Oryza sativa
  unsure (1)..(472): unsure at all n locations
actaagcttaatngagttgaaatctctctcagttggtcactctactttggggaggattgggtactgctggcaggagtcttctcagcaaggttatctgggagtgccagtcaggtaatgatgtgatcatactttccattcacgtaatgaacttggcaacaaataataagagtgatgctataccagtgatagaagagcaggtcaatcccatgtcactgatgtcagtacatgaatgttccggttccatatttgacaaggcatagtcctgaacaaagtgacaggggcactacgtatttaatacagaactgcaaccagataatggtgtattccttgcaaagagatacctcttcttggatagtagtacttggtagcaattcttgcgtgctgcaatgtaccacctgttgcatttcagatgatttgacatctacggtgtttcctgtttcagaacttccctgcattntgctccaaaattata

SEQ ID NO: 43533 - DNA, 423 bp, Oryza sativa
  unsure (1)..(423): unsure at all n locations
agcttngtttgtttgggctggaatatattatttcttgttgctaatngnngcagtcaaatttagctccaagtgattctcagttgtttaggtgttacctgtagtaagtctggttctaagcagctcaaagcagcaggggcagaaagtgtgtgatcaggtcatgcttcccatgcgcacaaggtgcttgttgcattgcctccccgggtgacttgcacttgcacgcatgtcacttcaatcctctccggtgtgaaatattttgtcatgtgatttcgacaaccaaaaagtcccttttgttgagacatatcgtctacaaaccaacggtcatccgattgttcttgttccggactacaaccatcaggcaggtcactggttttggtttggtgtttccctttcaagagggcccggtgtaaatctcnttctgattag

SEQ ID NO: 43534 - DNA, 421 bp, Oryza sativa
tgcagcgctcactgctctcgacatatcaataaaccagttcactgggtcattgcctgatgcacttccagatacattgcaatcattcaatgcctcttataatgatctatctggtgttgttccagtgaacttgaggaagtttccagaatcttccttccatcctgggaactcgagactagactatcctgctagctcttctgggtctggcagttcctctggttcagctggtggcaggtcactcagtgcagcagctaaaatagcacttatagcagctagtatcgttgctcttgtcatccttatccttgttgccattgtttgccattacaagcaaatctcacggcagttccctagctcagaaaaggtttcagacaagaacctccacaagactagcaaagacatggccagtacaaaaggaaaggatgac

SEQ ID NO: 43535 - DNA, 400 bp, Oryza sativa
tgcaagcttgtacttctcctcgatagacttgacaagaccttactttgtatgacccatcttgtggtcctgaaagaatgccatgtatcaggatagccgttcttatgatacggactatttacaccctattgaccacaatgctgtcgtcaccattgatggaagacgagcagtacaatagctacttattagtacttacattattcaatatatagatgttaatgtttagatccataacgctactggtataatgagagaatcaacgttgcatatcggagtgctatacgttgtcattcttgaacaagcactttattgaatctcaagtccttttaatacctatgaatgagatccgtacaacattgttcagataccatactacactattaactacgccctgcgctacaga

SEQ ID NO: 43536 - DNA, 320 bp, Oryza sativa
tatgaatattacgtgaaacaatgcacatcatagcatatcatggagtcatattaagaacttagataatgccaatcctccactcccgtataattacctccctacacgctggacatatgagcatcctcactcattctctgatagtccatcttcacactcaacaatcacgccttatatcgtcgtgagcgaagcatgaatgttacacctatgcatagaactatactatctactacttctaccatgatgtgttgcataactaataaattccataaacgacctatctgcagtgaacatgcatctcatagtactacacgcattcgtat

SEQ ID NO: 43537 - DNA, 358 bp, Oryza sativa
  unsure (1)..(358): unsure at all n locations
catgcaagcttgtttacgcacgatgcggtgtgcacctttgttttcttactacncgactacgaacagccgcttgagttatacactctacctcacccccagacttgtcatctgagaactcttatcgggagataaggctctaggactctatactagccttagctgaagtatcactagttctagcacctagtgctgaacattgtaacatccatttggcgccacacagtttggctgataggcaccgcgagaactcttacacgaccatatcttacatggtctatcacctatgagggatgcgacaccggctctatcactgtgcgttgccacaccctaagttcccttaagtgcatctacgccttgc

SEQ ID NO: 43538 - DNA, 378 bp, Oryza sativa
ctattaaactcagctcttaagaactatgccgctgttatgcaggggcgaactgtcttgcttgactagcaactcatgaagacacacctggcgctggatggggtactgtgacaactacgaagcccagcggaccttgctgttgatgatgctgcgacttccgacacaatcttgtttggtgccctgtactcgaccatttgtaccacgaccgctgtgaacttgctgattgtggatgctctgcgataccatgaacatcactaggatcggatgctccaccactggagcgatgcgtgggcactattgattgaactcggcccgctaccacttcgtgaatggtacctattgttgccatacatacgaagcttgaacgggctctctaactac

SEQ ID NO: 43539 - DNA, 391 bp, Oryza sativa
cggataacataaagacctgtgggttgttaatgtataacgtgcaaagctaaaaaagttgtaaaaaggatgaatggtctagctagagtgattttactaccaactgtaaatatatttctatttcgatgcatgtgtttgggttatcatttgtcaatcgttttcgatgctctatgatttgattacctacgtggtaacgcattgaggaattttactgacaacatatgctctataaaaacagcacgtgtccagacatagtatgtttatttatctaccaaagtggacttttggggtttcagttaaactatgattgagcaaatgctctgttggatggatagaaaacccttacgttctgaaaaaaacccatttatgacatcgcatcatattggataaaaaa

SEQ ID NO: 43540 - DNA, 468 bp, Oryza sativa
  unsure (1)..(468): unsure at all n locations
cgccctgagacagaatggttntggagaacacatcgtttgtcatacattgtcaaatgaggtaactactacacaacatgatatttaagacttctcaagcaaaggatgtgatatataagaagtcaactcttgaatcctgaatgtgccaaaatgttatgagtgctttgcaatggtcgttaagaagtgacaacagtgagctaaaacctattttggccagttttgaataaaaaaagttaaaactgtttttctcttaaataaacagacagtaaacatgttgattaagaaaaaaaaagccagaaggaatgccaaaagagtgggatgaccattgcttaacattcaaatgggaactaaacggcaatgacaaagtcaaaacagacacctctttcttgtccactagtggagagaatatttaatgtcagttaagatcgatcgccaaaccatttttatcatgcacttcaaattaatctcaca

SEQ ID NO: 43541 - DNA, 362 bp, Oryza sativa
  unsure (1)..(362): unsure at all n locations
atgaagctgggtttaaaaagcgtagaggccataatattttcctanagagttggttatgggaggttgacagaaatctacnccaccttctattctataagttgagttaataaacttgataaaatagagattatgtacttttagggcaatatagacatttgacatcgaatacctactaaatatgtncaaaatggccgagtgagtaccatttttgttcacgatgttaaaacacagcaagctcataaacatgtttttatatgcatttataacatgcttaactataccatatgaaacatttctaacattttgcaaatcattggtttgaagtggtttagttgactacatcatttaaatgttgaatttga

SEQ ID NO: 43542 - DNA, 468 bp, Oryza sativa
actaagctatcgcatgcgttaaaagctgaacatatattactttttattcagcatttactatacaaatagctcctaaataccgtgcgccaaacagtgaaatgccatggtgaaacatgataggattttaccaaaatctccagttggccacaatgtcaacctgtattataaacaatagaagtaagccaatatattcagatgccttatagcattaacagatacttttcgatatcatgatttctcttattgttatatatcagaaacacgttgtaaacctaatttacagttttagtaaagtaggggaacaaaaaaaatctgacacttgcatgtattacatacagttttgaccttggtagcatgttaatctgcaaatctgaacattatttgccacaaattatgtatattttctttccaaacttaaacaaaacctgaaacaccatgatgtgatattcattggtaggagtacatact

SEQ ID NO: 43543 - DNA, 424 bp, Oryza sativa
  unsure (1)..(424): unsure at all n locations
aagctgggtggtggggagggaagacagcatatgatgttttcttcatnggacacccaaggtaatgcggagacagtattgacgctcctaatctaaacaataagctacatctaccaatctcaaatgccaagctcatgatcatctatatcactgaaaaaaggtgtgggacggatgggtgaggagctggacgtgcgtggatcacatcacgtgctatgcgatatagatagagacacatatcacatctctatttctaatcacaagacacttgctaaggatggcactccctgagctaataaaaggaggccatgatttagaatntccaaacatacgtacgatacataaaatcagaaactcttcatggagtacggttaaccttctaagcttctagatactaagagacctcatgcctatgatagtctgatactac

SEQ ID NO: 43544 - DNA, 329 bp, Oryza sativa
ctaagctgtgacgacattcatgcaattcaggatgagcattgtattttggtctatggagaatggagctgttattcatgtcatcaatggagagcctaacacagttagagctgatatgtgaaaagctttacaattctagagactccgttgagcgagcacatgcggaaagcaccctcaagtgctgctccgagaacagagactacatttgacagtgccgagatatattggacaatgcctcaacaccatatgccctgatgctggccagatcaagcttgctgaaccaagacaacgaccgcggactttcattggaattgcgtcttgatatctgcaat

SEQ ID NO: 43545 - DNA, 365 bp, Oryza sativa
actgcagctgcagctgatggccgatatacggatactttcatttgttccgcactcctgaactgattcagaaagcgcttcgtaggatatctgcagttgccttctgtgccgatgaactcgggtgattccccttctcccggcttccgaatgaatgaattttgttgaatggcttacttcacggaaaaacaggtcttatatggccaacggatggtgtcccctggatcacacttagtgtgattctgagtcccgagagcgggcagccaaatgccctggcatgcactgtgcactgaattactcaatccagagagaggctcactttgttttgaatgcactacagatttgcgaaaaaatactcggggcttgcaggc

SEQ ID NO: 43546 - DNA, 465 bp, Oryza sativa
  unsure (1)..(465): unsure at all n locations
tgtcgaaggctntctcggttacatcatgtgttcgactcttgtgatttcactttaaaatcataatctgttttcagacaaagtaaacggtgataaactggagctcattacattaagcaacgattttgtttgcaggaagcagtagtactcccaccgtttgtggcattcgctgtcagaatgaatcctggtatctgggagtacgtcaaagttcactctgatgatctttctgtcgaaggaatcacaccgtcggagtatctcaagttcaaggagaccttatacgatgaaaaatggtatgcatatccatgatccactaatccagtacgtagtagctaatgcgaacatttccatatacagattgaagaagaacaggagcctgaaacttgaaaaaaaaatggtcgatctgaccatgtgcatttcanggccaaggatgacaactcactggaagttgatttcggtgcccttgacctc

SEQ ID NO: 43547 - DNA, 424 bp, Oryza sativa
  unsure (1)..(424): unsure at all n locations
agcttgacctgatgcatgatcttgtctaatttagtttatctcgcngaccaaagggagtggagattgaaacggtgagacagagcacattatggataattagatcttttgctacactgctggctgagctagcactaaatatggctaaatagcaacaatttagcgggtacgatggcaaataaataaagatgcttggtaagagggtatagcagaatatgtcggtgagaaatatggccaatagtacaagatcccgctagctacttacttctccttagtgcgtgatataacgtgtaacaggttcgtgctggctttatcattctataaacgttagatgaatacttaaacagcttgaacagcacagattctggcaacgtagtataagggaattacaccacggctacagcatccattctcatatatcagcgct

SEQ ID NO: 43548 - DNA, 402 bp, Oryza sativa
cgacattatatattatccgtgcagtcttgccatatatttttttctctatctctggcaaaaaagtacagagactctactcttgcattcatgaatgaaaatggtgggtcagacagtacaggccatgctgtcatgttcatattgacagaataaatactgatgatcctgggaacagagtgtaagagagagtaacactaatctcactagaacagacattagaactataacttgaaagataaggtgtaagacagtttagctgagctcgcatgctcaattactaatgagcactcggaagctcggtttggctctgatctcctaggatatgatgtcatccttgattttgtggagtacgtttgataatgtgcagctcttatgctgaaacacattggcattccagctcaatcc

SEQ ID NO: 43549 - DNA, 447 bp, Oryza sativa
  unsure (1)..(447): unsure at all n locations
cgacccgcggcatgcaagctaatgttatcttcttaaatggatattgctttgctcttgttcgtggctatcgcagctgatcatcttcaatttctgcttgtatctctacagttacatattgcattgcgcatcgcatatatagccgatctgacattactgctcgatcggtgcttgtgtgcaggttgaatgggatgcctccgccgcgtcatcttccatgaaaaacagatttgttaatccttggcaggtccagcctgttgatttccctcctcttcccatggggctaaagatttctaacaacaatattagtgcacctgtgtgcaatggggattcactgctggtgccaccgatactaatgcacccgcaacctcaacctcccgctgacattcanggagccaggcataacaatggccatgcctatgcagatataccctcttcatcaacaccatcaat

SEQ ID NO: 43550 - DNA, 466 bp, Oryza sativa
taagcatagaaacgacgaagatgttcaatgttccaagagttgtcgacgagagtaccgtcttcgcgcttgagtcgataggaacctggccgggtgacttcagagatgataaacggcccctcccatagaggagataacttgtgccgatcccgtgtagtttgaattttcctcaaaaccaggtcgccgactagaaaggcacgggatcgaacattgcgattatgataacgccgcaacccttgtaagtatcgagccgaccgaatcaaagctgcttcgcggacttcttccaatcggtgcaagtcatccactcggtcctcttcgtagcgttcttcacggaaatttcaaaagcgcaaagactcgaattcaacttcactcggcaacattgcttctgccccatagacaaggaaaaaaggtgactggcctgtggcccgactgggtgtagttcgcaaagaccaaagtactgatggcagct

SEQ ID NO: 43551 - DNA, 453 bp, Oryza sativa
tgaggcatgcaagcttgccctatgtctgactgtctcctactttctatgtctgaagctggcactgccggcctccgtgaaccaccggtgccggagtgcttgcgccaccgtcgtactcttctccgggttgcacgtcataagtccactcaacacctcgaaccgcgccttcgacaatggtggccggcgtgacatactggcgtcggtcggagatgggaacaagccacgaagagagctgtccgggccgcatgctcacagcagctcgctggccctagtagcctcgccgccgattgatgtcgttcacgccgaggacgtctacgatctctccgagctgctccctgtgcgagctctcacggaacagctgatttctgacgaggagctccgccatgatgcagacgagcgaccactcgtcgacacgctcgtcgtagtccgtagaccctacgatgatctcctgcgcgc

SEQ ID NO: 43552 - DNA, 470 bp, Oryza sativa
cgtaactgatgattccctatcatcacacgcttagccttcttatgatatgcatatggattacccactctagcaataagaagcagcgaattcacttatatcacaatataatacgtatgtaagaattccatttgaagtcctcccgacctaatttcaaagcatggtgccttgatgtaaaaaaaacataatatttgaagggattataagcgtgttggagattaaataccggatatccgggttgagaccatataactcttgtgactgcacgataagagtatctcctatgtgaccgtcgtgacatgttcagagtgtgtcctaatcagtaaatgaggacaaacatttgccagctgattgtatgacatgcctacatgataaatttgttgtttcagtagcttagaatataaccgaccaactctattcggttcactttgacgatagagatacataacatagccagatacgtaatgatggat

SEQ ID NO: 43553 - DNA, 451 bp, Oryza sativa
  unsure (1)..(451): unsure at all n locations
catgcaagcttcaccaaagaccactaaantaatacatttggctaatgtttggtataaaaaatacagatacgctttttaatacatatttatgccaaattacagaaaaccattgtctgatagaaaaaagttatatatggtttgcaatatgttcaacaaaacttgaactgatttgttctgaccagagttacttcatttcttaatagcccacacctcaagataatttctctggaacatccgtagtacatttatatttcaacacaaaagaacctcaattcttataaagagctagcataacaaaataggaaagagaattcaataacttactctcatgacgatcagcaatttgaaatacttggataaaaccagggcaaaacttgtatatagaaccatcacggtggctactgccttctaatattgttgcaggatgtacatcaacagtgggacagttatc

SEQ ID NO: 43554 - DNA, 466 bp, Oryza sativa
tcgaggcttgctaatcataggattacaaaccataacttttatcacaaaacagaagtgcataacagagagtatctaaaaataatatgtgcataaaagagagcagcagtaatagacgcagccggctgcgagttcttttcacccccatttctcttcagaagaatggttctgacgagagtgaaatggttacaaagagaaatactacttgttcttgtagccagcaacctctgaatctggtcatttttaatgtaacaggcatcacctttgatgatacccctttttgcctaataaaatttggtcagcagcttacttcttgcctggcaaaaaatagcattaagcgatagtaactagtaagtaaaaggttgtattttattcccagaaattaattatgaaaaagtcatcaaccacccttttcaccttgcaagaatgagcagttccattagcttctttcagtcacggtcttcgaatc

SEQ ID NO: 43555 - DNA, 318 bp, Oryza sativa
  unsure (1)..(318): unsure at all n locations
catgcaagcttcagagtgaaggcgaangattatcattttttatgataaccgncacaggcctagttgagagccgcaagagcgccacggcttacccgatgaacattatgtactgggacaagaataacattactggcagccacgttatttgacatccgaatgaatgttcattttaaaccggttaatacgataccactcatcctctaacctacatatccgggccaacgaagttcctctgcgcacacgaagaacgtgtgggactttatactgacatggcgcctacctgacttctttcactatgtatccgagagtgaggcacaa

SEQ ID NO: 43556 - DNA, 384 bp, Oryza sativa
  unsure (1)..(384): unsure at all n locations
ngcagcgcatgataagatcctaagaaacatagatgtttttttagatggtatcgctcctgctgttcacaatcagctgagctataatgcaatgatataaacccatctagctcaattggcatccttagtccctgcaaatgaatctaggaggattccggggcaaccccactcctccattgaaactgtcaaggcgatcataacgagggaaggccagtacactcgtgagccgccatatcctaaccctgcatgaactaaagacatgtgaaaagaagcgacatctaatgactccgctgacaaggcgattccgccagaatagaccgtgcacgacgaatactgccacacatggctgttggcattccgtgcatggagtaggaaaccgccaacgga

SEQ ID NO: 43557 - DNA, 435 bp, Oryza sativa
  unsure (1)..(435): unsure at all n locations
agcttcaatccttngaatcaaaggttcaattatgaaaatttcctataggagttgaatcctatgaaattcctacataaatcctttggttcaaatgggcccttaacctgaaaccatcactttgatctgaatcctaaactgcagttggtgaaacctaccatttctgacaaccttttctcacttcactagctgaaattaatttacacagacttatctgaacatacatgtggcaatgacttctcctaccattccttgatcaatatatatagtcttgtgtacaccaaaagaagaagaaaaatactgtcttgtgcagacacatctactttcatgtatgtacagtgtttgtttcaataactgagagccctagatagccctgttgacattgcaatactaaatcaaagtagtcactgtgccagtatgcaaatgatgatgggtatg

SEQ ID NO: 43558 - DNA, 417 bp, Oryza sativa
ataaaagcctcgacgcccgcgtggctcgaacccacgaccacacggttaagagccttgcgctctaccgactgagctctacgggctcacatgctgaagagcttctgcttgtctattcattgtgaagtcaatgtctgactaaatttcaagccaaatgatgtgtctttgtttgtcaacatctacagatgagaacaactattgattacctatccatgttggttcgagggagtacttctctgtagctattattacagcacaagctccaattccctttgtagggagaaaaaaatgctcgagcttactcaagataaagtcagcagcagctgagtgtcgaaatggagctccaaggcattatacactgctgatgttgaaatcataagaactatcttggccactaagcctagatgcatcatcacagat

SEQ ID NO: 43559 - DNA, 417 bp, Oryza sativa
  unsure (1)..(417): unsure at all n locations
atgaagcttcattgtctttgactgcaccagggcaccgccttattcctcacctcctctcggcggggcccatataaacccccaggggagcgtggcttccattcgcccaagcctttcgagtcgtcttctccccttcttctcctcctcctcctcgattcggagctccacccgcagccatggctaagaactaccccgtcgtgagcgccgagtaccaggaggccgtcgagaaggccaggcagaagctgcgcgccctcatcgccgagaagagctgcgcccctctcatgctccgcctcgcgtaagccgtcgccctcgcactcgctcgcttctaggttttgtgtagaggcggatttccgtagactgatccggttnttgtggagacggatcgcgcaggtggcactcggcggtgacgttcgacgtgtc

SEQ ID NO: 43560 - DNA, 411 bp, Oryza sativa
  unsure (1)..(411): unsure at all n locations
ctacaacctgccattccatgtcctccttttcctttgttacttctttgctgcaaaatgcaaatgaagcagcacttaaaattgtgaaacacgatggctaaataaaatcacatatatttattaagacaattggcttagccaagtctagaagagtaaaaatggtttacctgccctgtataagatgagcgagtgctactgcaccaaacactgtcaaagagataagtggcagcccatatcgaacaaatggatgtttccgtccccaccgtntgaactgtgagggttgtcgaacaatcttagctgctgtgtccactggatcagctctctgagttgtttccatggcagagatttactgaaaaatgttaacagaaagttaacagaaatggagcatcttcaagctgaacactgtcagttata

SEQ ID NO: 43561 - DNA, 446 bp, Oryza sativa
  unsure (1)..(446): unsure at all n locations
gcttagncactcttgacctctttaataatatcattactggacaagtgccttctgagataggtatgctcacaaatttgacaaacttgtacctccattacaattgcctggatggtgtcatcacagaggagcactttgccaatctaacgagcttgaagtcgatatatttgtgttataattacttggagattgtagtggatcctgaatggttacctcccttcagattagagaaggcatactttgcatctacttcgatgggtccctcatttccctcatggcttcaatcacaagtcgatattcttgaacttgctatgagcgatgctggaataaatgatacatttccagactggttctctacaacattttcgaaggccacgtttttggagatgtcgcagaatcaaattgctggaggcttgccaacaaatatggaaaacatgtcattggaaaaa

SEQ ID NO: 43562 - DNA, 450 bp, Oryza sativa
  unsure (1)..(450): unsure at all n locations
gttgctacaggttatgcctctctaccggtagcagtcatggtcatcttgcctccacgaggtgagaagtcctaagtggtcgctagtgatgtctcgcttgaaggccagaagggcgtcccgttcccgtggcacgcaagcgacggtggtggcaccagagccgagtttcggtacggtatcgcatggattgctcgggacaaagtggtggttgctagcaggagaaggcccaggaggaggaggagcaacggcttgccggtgggattcatgatttcatggggtgcacaggcttactatgtgtgtttgagtgattggaggagagcagtgagcacgtatggattgtgtgtgtgtgcgcgcacggcaaaccggccttaaattaagctcattntaaaagacccgttcttgcgtacgactagtggactgtggagtataactacctgcatttcgcccttaatgctg

SEQ ID NO: 43563 - DNA, 442 bp, Oryza sativa
  unsure (1)..(442): unsure at all n locations
gcttgccgacgacaagcgcgtaccatccctttctcgtgatttacgcaatcacgctngacgagtcgtcgcgcagcccctgttgagtcctacagagagccccccgacaaaagaataaaatgttgacgaattatacacgccaatacagctgtaatcaacagaaaagatcggcggaacggtacgaacggactactccaactgtccaacacaacgactgatgaacaagttagcggcgcagaggatccactcgtcgatgcggctgctggatatcggcgttcttagtggagcgttgtcagcactcagcagcagagggcgatgagcccgccagacagccaaaggagaaccgcgaggcgggtggaagcggaacgcgaggcgctgacccgagtcctcacctattatttctcgtcaacaccacgtccccactcaaccagaccaacagtagcca

SEQ ID NO: 43564 - DNA, 457 bp, Oryza sativa
  unsure (1)..(457): unsure at all n locations
tcttcgcaactctgcggcattcttctcgtgctcgctgttatatctgacaccttccagcggtaaaacactgtcgtttgtcagcacatagaccgattatctcaacttctggaccaataacatcatctgcctttagaacctgattgcgcatgctaatgcacatgttcttagcataaattagtacagatgcgtacaccaaaagagttgacattgtaacacacgaaagatacctgtatgccaataagttcacataatcttggtacactaggagctaatctaaatttgggagtgatacccttatgacggccctgaatcatatagagatctactcatcacactggcactatgaatctatgatactttgtatgtgaagaaaacgttcaccaacacggctntgtacgagtaaattatataaaatctcagcacaatctacacatactcctgcataatgaactgcatc

SEQ ID NO: 43565 - DNA, 462 bp, Oryza sativa
caagttacctgaggcatgaagcttgttctgaagtaccgtgcaccatgtatttatatgtttccattactacatccagtaccatctatatatgcaagtaagtattggcggttgtccttgtcactctgatctgcatacagagtttttcttgcatatgcactcactgacatttattatctccttcatgttagttatcacaggcagctgcctatgcaaggaagaaaacagttattctgaaaggagatttacctattggtgttgataggaatagtgtggatacttgggtataccccactttatttcgcatgaatacagctactggtgcacctacacattatttcgacacatatggacaaaagtggggttctactacatataactgggaggaaatgtcaaaggataattatgggtggtggcgagctcgtctgacacaggttatttaatagcacatattttctcctgtct

SEQ ID NO: 43566 - DNA, 470 bp, Oryza sativa
cgcataagtataggagagacacgtgagtaattggtacgtatttcttaacatacttgcacatctttgtcataacaatcacaataatattgtgcaatgcttccttatctaggaaaattgcatgaagataacatttttgaagaggagtttggcagcttgaagaactctggtcaaggagcatggagtgaactgagtaaagtagtagcgtcaaacttatctgaaagtgttgactcgctggcttcattcgatggtgattatgcacgttggcttttaaagtttgtatcaagccatcactcttaatgatggaaatcatgattttttgcatgggatattatgcattctgcatgcacaggcgtagctatcaaaactgatttatttggcacaagttacctgacttcagctagcctgattagatcttttgatgatgaaagcatgatcatgccatttgtgtctgtaagctcttctactttatc

SEQ ID NO: 43567 - DNA, 376 bp, Oryza sativa
  unsure (1)..(376): unsure at all n locations
tgcagcctantgtgcaaagtcgagagcccaatggagagttattattgtatcccgggaattgctttcctgctagcctttcgtaccacgtggggtcacgtactatgctcgccataggctggacgagttcgaatcagaagagaaaagcgccgatgcgaactgaagaagaagtacgttcgatggctattagcagcaccgaatggtctcccgcagggataactattcccagacgtgtaagaggaaatacctttcgaggtgcccgactgttgacccagcaccttcttagccatggtggcagagtatctgatagtgaatggtgagatcaagtctcctcgaatgatgaagatgagtctccccgacatctctgctgggaagagat

SEQ ID NO: 43568 - DNA, 380 bp, Oryza sativa
  unsure (1)..(380): unsure at all n locations
catgaagcttaacataccagagtagnttttgtctgtttccaccaaccagcctcgcgacagtacatagttgaagatgcccacaccctagctggaatacgcgtatacttcttttatgaaaaccacctacaccttacctaagaaacgatggataccaccgaacaataattagacagtcaactcgtgagactcacatattaaagatacgcgccactctacctcgagatacgttgatacagcgataataatgagacagtaactcttgaagaccacgccaccttatatcgccgtgtgctatagcgaaagagaaaacccgcgtaagtctggatttgacaacgtgggaggttcatccaaggagccaccagataacacgccactttcaa

SEQ ID NO: 43569 - DNA, 244 bp, Oryza sativa
acttacgagctctctgatgctgtagcccataacggcaacacacacacggacaaggctatggatctgttgctctgctggccggtcgacttcatacatacatgggcacaatctactacactgggcacatgcgacgactgatgacaccgaggactgcgctgcatttccggaaaaagatgatgatcgcccaagagttacgtacggcctgaggcgaacctggatattgctgtatgaggcttgggtatcc

SEQ ID NO: 43570 - DNA, 449 bp, Oryza sativa
  unsure (1)..(449): unsure at all n locations
agctgcaagcttgccgagaaatgatcaaagagtatattaagaatttttatggcccnnncatctacacgacatggaggatttggctacaaagaaatgctanaaattttaacaatgactatggtacagcatagacattgtcacatgtggttgactcaacatgtgcaaagccttcgatgaagcgcaaatcgtttatatgataaaacgccgacttttgctgttagtggctttgtactttctcaaagtgctataatctccttcagtgcataaatctgaagacacctcttggagatgtccctgtacgtgaaactgcttctttctcctttaatgaataagcagaactcgtgccattatcctctcgaagaaagatactaggctggattcagactttcagagaagaggatcacagtttcctgtgggtctgcttgggctggtcgagtgagccacagtga

SEQ ID NO: 43571 - DNA, 415 bp, Oryza sativa
  unsure (1)..(415): unsure at all n locations
tcagacctcttanaagccgntctggagatttcagaagatgttatgctcatatggacataacacatggcataggaaataagagcaggtcaggtcataatatggcttatatgatcacttggacagaacacttctgtagtgcatattattgttccaattcgcagaaaatattaaaagcctatcggaaaacgaggacagtccaacgacatcatttgatttttggaacaccacacgcatgttctaatatattgacgggaaaagtttttgcacattcacgaaaaaaaaacatagtaaacagacagatacaatcagagtactgtcgttgagcatggtctcatttgcaaccatacatatggagttatggacattgttaagtcacaagaatacaagcaacgtgcattctgtatagtcggtgggg

SEQ ID NO: 43572 - DNA, 401 bp, Oryza sativa
agcttgcttcacgctctattgatcatactgctcgtttatggagtatcgatccccatggccgagtgaacattctctgctttcctgattgcacacaaaataaccttcattgttattatggaattattagataaacgcatctattgtcatgcactatgaataactgtcaccctttttttatgaacatttctatcaacttgacagatcatcatgatgattaattggaaatatctcccgctgtataagttaaaattatgtaaactcatacagtaatcacacttaagcataccatatcctgtgtctctgagacatatgtttgagctatttaatgtgaaattgtgaatgatatcttagctatgggttcttttggatcccgtagctgtacttatattttcctcttaatg

SEQ ID NO: 43573 - DNA, 437 bp, Oryza sativa
tacttagtatatcgagttccttaagcggatgtagcatgtatttatcaactgacgacttgataactctcatcggctaatctcaggacttcgaagctggtgctgactctaagctgatgaatactccgggcttaccaaatttcactgttaacacttagatattgtagtatgagaatgagtagcttcatgcttgtgtgtcactctaccctcggattatcttaacccctgcttagactatggatattgcaagtaacatataaattattagtcacgttctctctactatgatctttccacgggattaaataaatacgataaccttggaatactctcgggtgaaatgctacaatggtatatccgcgcgcttgcgaatgaactctgtgaccataatataccatgagtatttctgcgccattgctgggaattatatttgtagttat

SEQ ID NO: 43574 - DNA, 453 bp, Oryza sativa
acctgcggcatgcaagcttgaagcaaaaacagaattatttatgtttgaatatggagattgttatcatagcacagtggactgaagcagcactttggcatgagaaatgcagcttttagattctttgctgtgttattttaaacgagctgacctgataaaccctctgattgcaattggaccgttgagcacatttcagcttaacacagccgcgccgcttgggcccacaagagtatcaccaggtgggccccatttgttcttggaattttcaggggatggcaatgaatgggccccaggacccacagaatgaaacagatgttagcaacaccagtgctccactagtactaataatttccagtctcccagttcacaaacaatgggatgaagatgcagcatagattttcagtcacatgtgctgaagaagataacataattaactaacaaggcatattaattatg

SEQ ID NO: 43575 - DNA, 460 bp, Oryza sativa
tggggcatattcaatgtctttaccactattactccggtttgtggagaagattctgttgtctgcagatcagaagaaaaggttaattaaggtttaaatcggctgttggttatttaagtaagagtgataaagtgaagacttacctgaggaatggtatcagggaataggtccgtcatatacatggaggtcgattggtggaacacgtgcagtttccattcaccccaccatctgtcaaaagccctactcctgaaccttgccagctttatgttctcgatgctgcccaacggaggtccggggatgttcaacagccgatccatcattaaagttgaggagatgtcgcttctgcattggatcttgtcagcaaagtacaggccgattggcaattgtcccattccaagttgtctggctaatgacatcggatgataaaactcgtagtagacttggatatttctcccttgatgga

SEQ ID NO: 43576 - DNA, 401 bp, Oryza sativa
  unsure (1)..(401): unsure at all n locations
aagacacctgcggcatgcaagcttgattgatgccgcctggattcagggtttttgatggccatccagncgcgccgctgggctccggatagtatcacaggctctactctaactggccttgttagcatccagcaccagacaaaaagcgacctcttgaagccccatctgttcggtcattcactaaaaaggcaggtgacaccacatagcatgaaaggggggagaatatagaaaagattgacggacttataggaggccccaatgtcccatatagtagactgatttatatgggaggaaaggaaatattttggtagtattatacgtggccacactaaatattgctatgctcgacttgacttttggttgacctgctacgacataaatagtatgagatgtctgcatacact

SEQ ID NO: 43577 - DNA, 461 bp, Oryza sativa
tgcgtgttgaagccatcaggcatgaatgcatatgtttgttttaacaactcaaagagcattaagtgtgaagagtaacagcaacttgacatgcggaacgggtgcattttcaagtggtttacaccgaagatgaccgcgtctgcaatgatcgatccctagttcataacatgttaacggtgcccgttcatacctgtatgactgtcggatctaacgcagacactaccaaagtggtgctcatgaggggaggaagatttgatgaaccggcacctacatattattatttccagaagaaaaacagaaaagagtcaggtctacttaatcgatccgattcttccattatataatgaaattgcatgacatgaataacaattaattattgttacaaagccaacagattccatattcttatcacggaacaacattgcatatattctcatccatgcattaacacatctcacaattac

SEQ ID NO: 43578 - DNA, 432 bp, Oryza sativa
  unsure (1)..(432): unsure at all n locations
tgcaagcttgtatgcgtgtggctcgagggcaagggtttatgcactgcntattgagaggaggtgtcgcgcctctatgcgttatattgaaccgaacaaaaccttactcaatcttgtgaatttggcaatattgccaaggttcgacatgaaacattacgtgtctactctctgcataccagaatataagcatttttagcatagtgacaagatatacattttcaactctgactatgaatacgaaaagataaagcagatcattcatataaaattaatggtattagatttatcatgtaacaaactatcaataatgtataactctttgtattaaaatatatacttttatgatattattggcaaaaatatatctcgcgaccgtgtaaagtctaccatcctatgtttggacggaggagtctgagttgataataaactatttat

SEQ ID NO: 43579 - DNA, 438 bp, Oryza sativa
tgtacgacgtcagcacggcgtggaagccagcatgcgatctttcctctgctcttgcatgaacgatactggcgactttgccgatgctccttgaactgctaccgctgacgggtagaagaaacaatgcactcgtacgcctcgcatagaataaatcccagcgtgaccgtgcaccacccagttcacacatgtgcgtcaggccatggcacgtatgtgctgcgtacagacaacgcgccgaccacctgtatctattgtagaatacacgccgcgcagcagctcgcagcgaagagaaatatcagtatggtgtggagagagaggttacctagagatcgaagagccctctatatatacgtctagagagcataagtgaggcttggcgatgatatcactggcctaatgtattcgatacatgtcaagcaatcagataccgcagtccgcacatga

SEQ ID NO: 43580 - DNA, 414 bp, Oryza sativa
  unsure (1)..(414): unsure at all n locations
cttcttganaattcccagagaaaaatcctctcacctcatcccttctcccgttatctctctgaccagtgggcctaaggaccattggccccacctgccagccaccatctccttatccctgctctctggctttctcccttctctccatctattcctttcaggcaattcatcgagcacctagcgtgcgagatcgaggtcattgttttcaagccgaccaagcaacctctgcccgcgattcccgctggcaaagctgaagcaaggctggtgcgcccctgcccgaggccctgccgctgccttcgccgcgtccctcgccggctcgcccaacccggagctgccgctctcttgctctccctctctctctctgcccgagcaacgacgcgacgcgacactgcgccaccctcagcccacgaatcccgc

SEQ ID NO: 43581 - DNA, 354 bp, Oryza sativa
aagattggaaccctcgggacaagatagcaaaagctatgcaagaatttggagatggagaatacaaacacatgctttgcgtggagcctgcagctgttgagaagcctattactctgaaaccatgtgaatagtggaaaggaagacttgcactctcagatgttccttccagttactgtagtgggcagctcgatccattgaatgtgcttcacggttgagagatctcatttctgcgtcttgtacaagtgatgctttgctctagttggcaacgttacctggatgagttctaaagctaattttgctcttgtggatccattgcattacttgtgaaattttgttgttggttagatgctatctacc

SEQ ID NO: 43582 - DNA, 448 bp, Oryza sativa
  unsure (1)..(448): unsure at all n locations
tgctgtgtctattatatagaccgcagctatggggtatactcatgatgttatntgatcagaaaggaagttagataatataagggtatttattttattaacgcattagagactgagttgacactggttatcttataatcgagagtaaaatattcgaaggtatgaaaaatataattgcactgcaataacatgattgtcagaaatagaataggagatataacgaaggtaaaagataggaggatcaaaattatattgaataaaagaagaaaaatatatatatattcaagtcaataatgattcaaatggataaacatgattaaatattgtcatcttaatgcccatggtaaattacctacggtaagagataattgatatgcaagcttctaatctatgacagataattaccactctagacagattactcttcttaataccacttttaataatttac

SEQ ID NO: 43583 - DNA, 449 bp, Oryza sativa
  unsure (1)..(449): unsure at all n locations
agcatgaagctattcccccagtatgccacgcaaaagatctaatatggtacacttattactagcagccttaatcatttgagcattagaaaaatcatactcatcaaattgtttttctactgctagctcccaattaatgtaggcagcggaatcatactttccatcatagactggtaacttacatgcaacttgtgcaaaattatagtcatgtacctcatatgcatcacgtgaagaagtcgtcatatcttgtcgaaggtgtagatgttgacgttgagcatgaccatcttgtttccccttgcgcaatcctgccatggttagcagcanacaagaaacatagacaagaatatacacgctcctatcaactactaggtactggcagctcaaatctcacacacactcnaagctttaacaaagctcttacaagatcttaccaatgcaagtggaatggtgat

SEQ ID NO: 43584 - DNA, 468 bp, Oryza sativa
  unsure (1)..(468): unsure at all n locations
tgagtgtgtgtgagaattgagctgccagtacctagtagttgtattgagcgcgtatattcttgtgtatgtttcttgtttgctgctaaccatggcaggattgcgcaaggggaaacaagatggttatgctcaacgtcaacatctacaccttcgacgagatatgacgacttcttcacgtgatgcatatgaggtacatgactataattttgcacaagttgcatgtaagttaccagtctatgatggaaagtatgattccgctgcatacattaattgggagctagcagtagaaaaacaatttgatgagtatgatttttctaatgctcaaatgattaaggctgctagtaataagtgtaccggttctgcatctttttggtggcatactgtggggaataagcttgaaacttgngatgaatgcaaaatactaatgagaaaaagatttgtgttttcatactatagacgtgctctccttga

SEQ ID NO: 43585 - DNA, 353 bp, Oryza sativa
tgcaagcttgcatatcatgatagtaaggagcaactttttttgttcttgcttacacttgccgcgttgacgatgctactattcatgggacagaacattctaaacatctttgtgacttccacaccgggtattgcatgccacgtatgttacatcatataagcatgctgattaatacactagaggcacacatcacgtgtctgtttcacccacctgacatgctgttgaggacactctcaaccgctagctaccaattgatgtcttcacgacgatataccctccctctatataaagcgggcagatctgatcttacctactacaatcatacttacctcataatggtcatgctgaaccctgct

SEQ ID NO: 43586 - DNA, 429 bp, Oryza sativa
  unsure (1)..(429): unsure at all n locations
tggcggtagcagagagggaggcatgacacgaacaagatgactatttatagaanggacggagacgaacatatatgcgggaaaggctgacgagataaccgtatatacgctactacacataagaacaagtgcgactgactataacgagcatgaaaccacctctcaataacggagatactgcatgacaaacgcagggggactgtgacattctcacaacatgaacaccgactaagagagccctaggtcaagcatgccggtggctatgatcgaggaccgattgctgatagagagtcatgagcaataaaatacgttcgggggcaccatgtaactgaatgaagatacccacgctactatatattacacactccgttactgaatgtcgaaggctgaaggatacaaagtccacattacgtaagcactatgtctcaacac

SEQ ID NO: 43587 - DNA, 434 bp, Oryza sativa
agcttagccagcgtgatgagccggcttgttttatattaccgcatacggcacctgatatctgctcaatgagctgctggagatcccaaaaccgtgacttgccggcctgaaccgaagcaaccgcagacggtcactgaggatcgcaagtttttggggatgggaggatactaccgaagattcatccagaatttctccaaaattgctagacccatgacgcagtcgctgaagaacgaagaaaaatttgtatggagcccgcaatgcgagaaagcattccaaactctcaaagaaaagctagtttcctcgccagtgttcatcttactggatactcgcaaggacttcctggtgtactgtgacgcttcccgccaaggattgtggtgcgtgttaatgcaagaacgtcatgtggtaacctatgccttacgcctaccactgccccatga

SEQ ID NO: 43588 - DNA, 463 bp, Oryza sativa
  unsure (1)..(463): unsure at all n locations
tgcctngttntgatatgcggacgcgcagacatctagtttatcatttatggtgtagtcggcattacttacggacacagagaagattcgcgagctcacggatataccgatgtaacacttcccctacacagtattgcaagggtatcgaatacgaggaaacgtgcgtgatcagatcttcctccgggatcttctatgacacctaccaaataagaggctaggatagagagaatcttctagcgagaaatagtggctatggaaagcttaactctagtaatattgcaatacttcatgttctggcaatccggtgctcccagatgtcgctctactacttacctgtacagggatgacttaactgatacttatggctgtgatcacctctacgcccaccttaaaagtgctgcgagatacgcagttattactgcataataactgcctatgcaacacgcttaatatgacaagatctacc

SEQ ID NO: 43589 - DNA, 421 bp, Oryza sativa
  unsure (1)..(421): unsure at all n locations
tgaggcatgcaagcttcangatttaatcacagaactgttgtttataattctgacacgctcatatggcgcactaccgacaaaaattcattgccatgaagcaaaacaacaaaaataataattgtattatcatctctcgctctttcatatctatcaaagcatgtttagtattccggtgaacaatcctggtggagaaaccactatntagtcgtagtaatttaccagtggactatcttgacttgatgattgtaaagatcggtaaaattcacatttaaaatcactgtcggcaacatgctttgcatgcatgcagatgtagatgatcttaaccttcctcgccttaccttgttagattataatgtgatctgccagacagagttactgattaacgtccacaactacttcttccgtggcagatgaaaaaaat

SEQ ID NO: 43590 - DNA, 401 bp, Oryza sativa
  unsure (1)..(401): unsure at all n locations
acagngagatcacgacgctccggtcacatcttgaacttatgaggtttaatgcgagacatggatggtctgataccaatttcaacagtgtgttagaacttctgcagaagatgctctcgaggcctaactcactaccatccatcacatatcaagcagacgagactcatatgccccctttcacttggtgtggaaaagattcatatgtgcgtaaatgactgtttacgtgacaaaagagagtacgcttctttaaatgaatgttcaacatgccgtgcaagccaggtcaagtcgaatagcaatactggtctagaaccctatgaagcaactgatggacgacagagaagaatcacgagcttgtgatatggacgcttcctgtcaaagaccgcattaaaatgatatactccaac

SEQ ID NO: 43591 - DNA, 440 bp, Oryza sativa
  unsure (1)..(440): unsure at all n locations
agcttcccacagagcactcctagtttgacttataatattgaaccacactataatgtccaatttcaataccttttttccttctggtagtgatcagagatgcaatgaggccgtagtggtggatcagctagctagctagcacacaaatatatacaaatggcaaaaaacaataaactagaggatggcacatttccaggtgtttgcaaacccatgcactatttttgttgttggtggtgataaaaaggaatggaatggaatggaaatggaatccatccattgctttgtggaaggggcataaaggagaggtagaaaagaaattgcagcacttgctgttgcttctgatggccctgaatgactgaatctgaatgccatgcatgaatgaaatgaatgaatgccangccttaagtggagcagcatccatctgtctagtgtgtgtatgtagt

SEQ ID NO: 43592 - DNA, 467 bp, Oryza sativa
  unsure (1)..(467): unsure at all n locations
ctcaagcttggatttagctcctaaaatctgcaatcttaatcattagggagaaatgcacaaaatgagctattggaaagaaaggaactacgatatcttgcagaatatatttcaaataaaaagatagttgcttattcgttcgagaaaacaggttatcaatttggtacagatttggcttgaattttacattttaatgctagttggtgaaccgtccagtactctgatggccatattaataatttccccataaaaaaacataaactaaattcaacctcggacactcaactttatattgcaaatctgaaataattttactgcattagaaaaatcagaagatggctgcgagtaatattagtgtcagttggtgaactgttgagtactcccatttccatatatattaatcattttcccatcgaanaatgagaaaccaaatgcaaccactcaactttacattaaaaaactaaagtaat

SEQ ID NO: 43593 - DNA, 390 bp, Oryza sativa
  unsure (1)..(390): unsure at all n locations
tgaggcatgcaagctntcaatacacgtgaacgancacgggtgtttttgtcatcggatattgcgacatccctgaggaagcaactctgacaaatgacgagcatgtatataaattcccagcaaaaatcaatcatttccatgtataacatatgttcaacgattttttaacacatatttatcttctgtttcagctattgaagcccttggagctatgctacaggtcgctgtgcgcctgtggtgaccgtgccatctctgatggaagccttcttgatttcttgcgcccagtttccacctttggactctaccttgtgacgcttgacattaggcaagaatccgactgacacaccgatgtccttgatgccatcacgacatacctgtgcataggatcttacc

SEQ ID NO: 43594 - DNA, 454 bp, Oryza sativa
tgagcataatgcgtagactatcacaaggctgctcgttgtttattattgtattcccataagagtatagtgaaaacctgcaattgcgtaaatatcagcaaaatattcgtaaacctgcaattactaatgcaggatgtgtgaatgtgctatattttccaagtattttgtggtcgatctggctcctaacgaaaataaaaacaagagtgtatgtatatgctttcaagtacatcattcttgactagtaattataaacacgcacggacatgtgaggatgtgaaatgactacctggctactgcacactctcaagatatccaatatatgcgaattagataaagattgtttacaactgattgagaaaataaatttaggatgggccatgctatttcactttgcttctgcatgtaggactatcagatctaaggcattaaaatcacaagtaaatcataacatgtcata

SEQ ID NO: 43595 - DNA, 443 bp, Oryza sativa
  unsure (1)..(443): unsure at all n locations
catgcaagcttgatattgggaataaagaaatttcttagtattgggcatacaccatgcgcacactgctttaacagatgtgcttaagtccctaaaagacacatgatttcaccacacttggaaatatatggcatatgtggtataaaatccgagtaaataaactcataaaggatttaccaaccacctagaaaaatgaccacaatatataatcagcctaaaccaataaaaatgttcacttacgtggcaaaaagcaacgatattgtatccaatcaattgctttaaaaacccacacagtgccttgacttatataaaaaagtcagtggggtagctatataaagaattctggagttgtcnggaatcctctcttatctcttgtactttatttattactctgatttaatagaaatatcattctgagtaattaagaattacttagtgagaattac

SEQ ID NO: 43596 - DNA, 461 bp, Oryza sativa
  unsure (1)..(461): unsure at all n locations
tcaccctannaaaatctttagtctacataaacaaagtcttatcgtgaacaaacctttttaagctacatccgcaatggtgatcgtacataatataagacatacatttataaaggcaaaatttgctatgggacataaaaaaaacgtacaattttccttgaaagcagattacataaagataagtttactcagcagcccaccaaccatcacaatcaagctccccaatttctgcctaggtagcatgatgccgtctaatcatgttgatagaaactggcatatatatagtcccacggtgtttacagaaggaggctatgaatatggcaggaagcatccagctcctagagtggtggctggcaacaaaagtggccaaaagacgaaaaatttggagagctaacattatttactaactacagtattgtgttgaacaaaccacaggaataataaatctcaagtaaaatttagat

SEQ ID NO: 43597 - DNA, 431 bp, Oryza sativa
  unsure (1)..(431): unsure at all n locations
agctttaacatggaanatcaaatcattctttttttttataanaaaaaggtagggaccgagaacatgtatttattttttattcataaaaaaggtggtcacaaattacatgaactctatttcgctgtggtatggaagatgatgacagaatttgcctaacgagctggtaaatagcattgtagaaaaaaccacttgcaatcctttaatccggcagcattgcattgtgaaagcaaaaatattgtcttcaaagcctccgtaaagtaggacagtggattatcaatatacagatggctaccatccttttctgtagaattaagtatgtgcccaaccaaaaaatgattacttcgaaaattaagggcaatactgtacagcaggcaggagcatcatatgtatggccaacagannaacagagagagcatactaaaaagtacccc

SEQ ID NO: 43598 - DNA, 440 bp, Oryza sativa
  unsure (1)..(440): unsure at all n locations
ngatgcgtagcacgtaatttctgtgcagacaatgtgatgatattctgttaattactagccatacgctgaatagcatgggtctcagaactatatattactctgatcagaatcaatatttatagaagaaaaaggcactttttaataaatattgactaagttgtaaaaaatgtgttcatatagcaagtgagccctgtggatttcatccaatacaagcataatctagtccacgagcatacgaagaagtaaacctagaaatactgcctgttgcatggagctacacgctgcaacatgcataaacaagaggtgggcattgactagaccagactggatatacatatgtgaattatatattcataacagatggataacatgataagcatgtgggttggtgaggcatggtggctggctttacaatagttggaaataattatagtagagaa

SEQ ID NO: 43599 - DNA, 459 bp, Oryza sativa
tgaggcatgcaagcttgtcagtaaattagagatagatcagattattgtctataatattatagattgggtcctcagatgtcaaatcaatccttcttatatataaagggagcccatgtaccccatcattaattaagcaggaaaatcataaagttaggttacttaggtagattgatcagagtctcctgaacatcggacaagccaatgccaatgagaatgatatggactttatcccagtcttcagaccattacccgatccatgaatcagcgtccataacataaatcaagcacaaatcaaacccaagccatggacaatcagttctagctgatgtggtacctccgtaggccagaatctcataataccaggcctagcacaactacaaagttatatgaaatatcaagtcatgaaatgataaaattcaggataaagcagtatatgcaaatatttacttcgccctgagc

SEQ ID NO: 43600 - DNA, 468 bp, Oryza sativa
  unsure (1)..(468): unsure at all n locations
ggccagtccaggaaactaactaggagtataaaacatgattatatatctggatcagataaatctcattgtgtcagcaccaaactgtaactgattaaccgtcttaagctgcagacttgcagtattgcatgagcaaaagactgctgggtacggtcagttatcctactgtaatgactaatgacagcaacttactggtaagtgatttggtctgaaacaacatccttagctttaagttgctggatcggccttcaacgattccaggtggtttggttgtaccaaggaaattggattacaatagaaggattccaagttcttttttttcccccgaaacacattataggtactcgtgtacatgtgcgtacactcatgaaatatagtacaacgcgtacacacttagagcaagtntaatagtatagctcactactagctccaaatcatctatagctaatataatagccaattcatacaata

SEQ ID NO: 43601 - DNA, 420 bp, Oryza sativa
tgcagcgagtcgtagtgccacaattgatacatgctagctactgatcagttgctcagccacgtgacgcccgacgacgatgacattgacggcgagatcttggcgatgtggtacatctgcccgcgcgcgctcggtgctctgtacgctttggcggtcaaacaaccccgatcaaacaccttacgtgcatactggagatgtctggtaccgctcaccatgacaacaccgactacgaacactgatcggagccactggacctgtcatctactggatacagcatgatataacctcctgagtttacatcttatatatgagcgaatgtcagactgcgtggtttgatggactctctctctaatctactctgaatatcatacaatagaaaatcacattctactaagcccgcttgcagaattatctactttcgcg

SEQ ID NO: 43602 - DNA, 429 bp, Oryza sativa
gtttaactcttctcatatcctggggaacttatttcactttccaatcactactaccaaacctataataggggatgtccgatcatattcaccggcttatcgaaccggtacatataaagctttttctggcctcctaagtcctgaccccttgtaccagtctaaaactaataacagcccctaagatcttatatgtgccagtctatttaaaaacggatttgctatcctactgtctacagtttttaggggtgaaaactgtcaatatgctttgagatttgtgctgtggaggggtgaaaactgtcaaattttaaccgtacgatatgctatgaaatttgtgctgtggaggacaaaatgaatacaaaacccgatgctcgcaacaaggatcaaacatgagacctgtagcttgcatgcttgttcaactaaccaattgatcca

SEQ ID NO: 43603 - DNA, 471 bp, Oryza sativa
tcagctattgtatactccgacacatatctatgtattactcttgtcaagctctcctgatgcttcgcgttcctatgtccgtgcacatatttgagaaatagaatggcatatacattgtattcttatggctttatatatgggagttattgtgtaaatggaacggatataagtttataaatttagaatctcggactcacctcatatatatgaataatatgggcgccatcgtttggcatattggtggaataagccaaacggcatattagcaaacgaaaagtaatttgtgaataaaatttttatataagtgttcttagcgatcttaaaggaaaggctgaaaaataaacttcgatgaaaaaaccccaaaatcagctccaaatttaacaataaaaattcaaaatttgggtgataagcatataaatatgccaaacgatgaggacgataagcaactttttgtgattatatggatgtatatat

SEQ ID NO: 43604 - DNA, 468 bp, Oryza sativa
actcagcttctgcttgtgcgcgaacgcagatcgaacctagcggttaatatagtgaccaacaggttgagggtgtatatcccgatgagcagtggtcgggacactatgctgataacaagatatgcctctggcctgcagagtgaataaatcataataagggcatgcacatgatgatagaattgaaaatacagaatccaaccattaccacatcaggggccattgtaatcctgcacttatgatcgatttggctatcatggcgatgaagaatcgtatacaagctctccctcaccagatataccaatatgattacagtcattgctgaaacacgaaccatttgatccaatactgacaaaacaaaatgccataacactcatgataacagcgctaacctaacgtaccggagcactatgtctgtgagagaatgaacattcatataatataacccacattgggttatagctagtcaacaat

SEQ ID NO: 43605 - DNA, 461 bp, Oryza sativa
ctataaaactaagcttgtcgtgatactgagatacatagatgagacgagttttttttcttactcggtgcatcaacgactagtatactcatacacggacacatcaacacagtgcaccacaacttacgtggcactccactacatgaacaaccatgtcacgtacacctcatatgggttctgatactgcagacgcatacacatgtgtgtcgctatactctgtcatatagatcatataaacatttctctattctatataatacgcatattgcgctgaatctcactatctatgtgtgccatggagtatctggagcgtattgagacggttgttcgataaggctatctagataccatttgctctacacactatcgtatacatatctctctacatatatgatcgccgctcagttatctatgtactagacaatgagacttacattacactggtatgtcgtacactgaatcac

SEQ ID NO: 43606 - DNA, 310 bp, Oryza sativa
ggagcgcacagacgaagcaccgagaggacgtgaccgcaagaaatccaagcacagcaccaacacccccataagcgacaagcaaagcgcgccagagaaaacaaacaaacaacgtcagcccgaccaccaccactcacgagcgcaaaacgcagacacaggtgcccacacagacacaacccgagacttcggccgcactccgaacaccgaaagtggagctcaacaagcaaaacttgccctaccacaaaagactaatggaccacaaatcatgctccacaacgccggccagaaaaaagaaagagactaaccaacacac

SEQ ID NO: 43607 - DNA, 387 bp, Oryza sativa
gcagcatgcaagcttaaacggaatatagacattgttttgatcttcgatcatccccatgactacgcagtataaagtacgatatattcaccaccaaagaaaattgtgcgtggcaaaaccatcacaactacaaagaccaagacaagttcatcgctataaacgaaactactgatctctcctgtgtgatataaagcataactgcttaatacagggtgccaaacatggagtgatcaccacataagcgaacattgctcatgaagaatatcaataataccagcctgggcgatgtaatgttcaattgctaaacttgcaatgtgttgttctcctcaaacatgaataaaatgaaatgggggagacagagtatgatcacaccttgcttatatttggact

SEQ ID NO: 43608 - DNA, 362 bp, Oryza sativa
  unsure (1)..(362): unsure at all n locations
tacggacctatgaaactcagcttgggcttccgcgcacagggtgccatgcgcgctattccttattattataatgacagcgacacgttttgaccaggtgaatagcaaatatgggtcacgtagttctgcttcaggctcagtataagtctttaggttataaggcgtctatattcatccttgtaatgaaccatgtgatgctatattagtcttgcagcgagcactgacgctgagcgatcatgccaaatcatccttgcctgcatatggctgtatgaactgaccagtctatcatcatatactatatgngcatgaaagagcataccttactagcatactctccagccctctgaagcccagaaatgtagctg

SEQ ID NO: 43609 - DNA, 409 bp, Oryza sativa
  unsure (1)..(409): unsure at all n locations
agcttacacttacatagcggngatgttttgttctttgcgacgaacccactgccctgcttctatgcaggggtatccttctgaagaagcccagccatggacgtgaggcgagcccagcgacgcgcacaactggtttatctcatcacctgctagcgacgaaatcacgatactatcattttgtctgaaatcaaaaacatggtgacaactgacgagtgatgcacaaaaatacctgcttgcgtgctcttgaaggcgtcaaagaacaggatcgggaatggcaacgctcgaatcagctgaagcgagcaagagacgagcagaaccgagatcaccagcctgaactgcattgcgcttccaagcggctcgctgatcgaatctagaagattntaaggtaaagatggtggtgagaactgacaac

SEQ ID NO: 43610 - DNA, 468 bp, Oryza sativa
tgtcatagatgggctgtctcatgactactctcgcacttttccgcctcactgcatcacgagccatcctggagtgaccacaggctgaaagagaatgttaaccatcgtgtcatattgcctgtcttatgagagcaaatgcttttgtaaaacatcatgtgaacttgcgccttgctgctaccagctacttgctcatgtactcacacgccggtgacctgagtacgcaagacacttttgcgtataatgcatatgagagcacattatgctcaaatgctcactggaaccatagtaacagctggtttcacacatgctacgagggttactacacgtgttgcgactaagaacgatgatccataacctatagatttagccgaagatatagataactgggactgagatgcgcatccaactaatggcggcaatgatgatcatacccatcatgagaacatctcttgtcttaaccgactatatgct

SEQ ID NO: 43611 - DNA, 428 bp, Oryza sativa
  unsure (1)..(428): unsure at all n locations
agcttngaccttagatccaatggntctgattttcctattcctacaagcatcgctacctgtttggaagacctcttgctctcggataataatttcagcgatcatattccaatgggtttgttcaggtatggaaatcttactctgttggatctctgccgcaataatctacacagtgatgttccagatggcttcttgagcttcccaaaactcatgattttggtcctttctaaaaacaacctgacaggaaaaattccacagagcttgctgaatgtctccacactgtttcggattggaggtaatcagaataactttgttggctcaattcctcaaggaaataccagcaacattatgatgtcggatttgagttacaacatgctcaatggtgatataccctctgaactgctctcacctgatactttggagaccattga

SEQ ID NO: 43612 - DNA, 465 bp, Oryza sativa
tgtgtattttctagaacttgctctggtatctggctaaatatattgtgccctaatattctaatttattatgaccaaacttgcactagtgtgatgtctctatgcgtctctgtatttaactattgaatccaccattccacccacctatgctctttttctctaaatttctgtctaattgcgcttcatgttgtacggtgtgagggaggaggtcattgttgaccttgttgggcagtgccgatcttatcaaggtcgagtcatggaccttgttagcaatactgggtatgttctattcttttactctgaaattttggttccatgtccttttcacattgtcatgtgacatattgtcttgtatcctctgcagtgatgagagccttctatttcaagctctcggtttaaatgatgaactgcatcgtgttcttcagcgtcatgatgacatcgcaaagggagtgcctcccggttcacgcc

SEQ ID NO: 43613 - DNA, 353 bp, Oryza sativa
  unsure (1)..(353): unsure at all n locations
agctntaccatgttcgggacataagtgaggttgttttttatcgcgcttctgcggacaagggtgcttgggctgtcagaaaccagatcgtgtacccggtgagctaccccgcatgccctgagtctggcgatgatcttatgcgatctatgaatgagcctaacggggctatattgggctgcgccgatggcatcccttttctctggaatgaagcgaagataagcccatgtagattctgttacctgagacgtgttatggttcacgaactatgaagaacgttgcactcatgtcctcatgatgatgttgcatgcaacattgaggaggggttctatgaaaccatacagggccggcgtgttgtc

SEQ ID NO: 43614 - DNA, 274 bp, Oryza sativa
gtacatgatggcatgactgatgctacactattccgagaatgcagaaccactacagacttgccactggagatactgatgaacaaataactagagagaatcgatctcgacaagcattatatattggcacgacaccaatcatacatataagtcactattgacagccatgacaacatatctcgctgcacaagtattacaatatcttcgacccattgtatctagcatggatgccaggtacaaagcgctcaacaatctgcgcgatttgtcctactatcca

SEQ ID NO: 43615 - DNA, 444 bp, Oryza sativa
  unsure (1)..(444): unsure at all n locations
catgcaagctntgttatagtaacaaatttgtccatgttattttcattacacgaatataaacaatgaatatggtcaaagcgaacatatgtatgttagctgcacgggttttgaaatgatactacctctgttttatattttaagttattttaattttttttcagttaaacttttttagggtttactaaatctatagaaaaatttagtaacatctacagcatcgaattagttntattagatataacattgaatatattacgataatatgtttgttatgtgttaaatatgttgctgcgtttttttataaacttagttaaacttttaaaaaaaatgacatgaaaaaaaaactcaaaacgaggttggagtactaattatttgtgagagggagagtactaagatgtcgttaagcatattaaaactgtctaacattaattaatatattaaaaa

SEQ ID NO: 43616 - DNA, 456 bp, Oryza sativa
  unsure (1)..(456): unsure at all n locations
tcctgaggctntaaaagtccgcgagtcctccattcctcgctcacagccttctggtcgtcaatatggccctaattgtagcgcagagaaccaatattccattgcaaatttctcagatatctcaagaagtggtcaaagtgaatcaagatttttctacttctacggattcttatcagcaatatttctcatcgaggtaattttgattgcattaggatggtggtttattttgagaatggagggcaggcaattaacaggagtatggccagctgaatccggctatgaaatgataacaagccatttccgcagatacacttacaaggagttgcagagagctactagaaaatttaaggaagagcttggcaggggagcatctggtgtagtgtacaagggaatcttgaaagacgagagggcagtagccgtgaaaaagttggcagacataagccaatgtgaagaagaatt

SEQ ID NO: 43617 - DNA, 348 bp, Oryza sativa
agcttctcattttgctttagcacagtactctatgaaatagaggtagtagcgcacgcttgcatatgcatatctttgcatctcacacatggctcattgcttgggacaattcttgaacgagatggctcgcttgggagagagacactattatttaacggttctaacttctcttcgagaatgaggtatgctttgtccaagccatacactatctcttgaagatgagcggtcgccacctcaagattagcaggagactctgtggattgcttgtaaagccctaccaatgcctcattgttctctctctccttagcaagctcactcttgagtttatgagaccgctctttctcacgaatg

SEQ ID NO: 43618 - DNA, 463 bp, Oryza sativa
  unsure (1)..(463): unsure at all n locations
tgagcggatgactatagcagaggcaagggcgcttaactctttagtgctgctcttggggtgtgtcacgaggatgacgtcgtcatggcggggcttaaagttctccttgacaagcatgaatttggtgaccatgtgtgatctaagtcaacagttgttgtacagggtaagtggggtggaccatccttcccttgttgggagggttgatatgggattgtcatcggggttggtttcagatgaaatacctgcaagtaagttcgagtctttctctttggtctcaacatgaacttgttccatggctgataggttggggagctctaaaagtttttgtgatgcaaacgttggggatatatagattatataggtgacgattgttgattgaaaccaccaccgacactatctgtacatataattatatcagagactctatgngttattgaaactgccaccgacactattgttgagactg

SEQ ID NO: 43619 - DNA, 469 bp, Oryza sativa
actaagctgcgtagtgcactgccaactcgacatgacaacatattatctactaccatcttgccagcaagctggcattgtgactgatgaactgaactgtggagggctcaaatatatgatagtgatggattgcaccataatggacccaatctatcggctcagtctgaacatagggcctgcttatcgaatcatagggcatttgcaactgtatgactatgaacaaaaaaccatgagatgatatatgaactgtgctgactggaatatgacagaataccgattgtactaaatgaacgatattaactgcacatatatatgaactacgcacgctcgcgcacaacctgagttattcctagagcaatgatatgtctatgtagtgatgacgcaaatattcaggacatgaatgacctcatattaaaccattaagtataatgcgtgaatcctggaacgcaggacaactaccccaccagcttat

SEQ ID NO: 43620 - DNA, 386 bp, Oryza sativa
  unsure (1)..(386): unsure at all n locations
tgaggcatgcaagctttgncactaacttactagcgatgcaccgtattattgatctcaagctctcactcacatgcatccactgcaaatctgcaattcctcgatattttcttggatttaggggcacaaatagtacaccaagaatagaatggctccgtcccttgtgcttcaatatctgcagcatctgacccgggaacactccttgtctaanaacatatttttgcagcatccgatgaaattgcatatctcctttttctctcctangaggatgaactgtgcatgaggagagcgacacaggcacaagctagctagctaggcccctgcattgatggcggtgctccccaacgtactcccgcacgggcctaagcccctcacgctccctacagtac

SEQ ID NO: 43621 - DNA, 466 bp, Oryza sativa
  unsure (1)..(466): unsure at all n locations
tcatggacagcanacatgatatgatagtaaatcaattttttatacaattgagttcaccaataaagatttgtttgtgttttttcagcagaagagcgagatttttgccttttcaaaaatgaaaatgatttttcaaaaaaaaaagaatagcgagattttttttcctttgcaatgttctttgggagtgtggatctagcaaaaccaacgaaatgaaatacatcaagcattttttttctcaactatatctaggctgtaggccaaagaaatgccctagtgcatcatgttctctgggccatgcagggttcgtttaagctttttttagtgctttgcttcactggatatgtgttttctgctttcccatagattcctttggaggtatctatactaaaattttcactagcaatcaaaatacctactagatgtcagagtgttagatcattacacaaattatttgaaatattgggatatc

SEQ ID NO: 43622 - DNA, 244 bp, Oryza sativa
ctgtgagtttgaatgagaaggaaagtcatcttgctttatatagacaatacttacgggaattgacagaaccatggaaatatcctcaccttgtgtgcaattgacacacatattttttatcaacgcacagttagatgtatcttgctgctactgcacaggttgctctatcaagactgattgagaagggacctcattggtctatcgtgttgacacaggaatgagctctagagtgcttgaactttccagg

SEQ ID NO: 43623 - DNA, 442 bp, Oryza sativa
tatccctaagtaaccgagcctagagaggatgcggcgcggctttttatctattaattacgaatagttcgttaggtgcctttatctgtaggaaagtgtgtttagtgtccgataaggactatatattttccttttatctttatgctacgttctttcttgtccgacaaggactcgtatcagcccatgggtataaatatgaacacccggtgtctatcaatctatcgatcaataatactcttggcgcatcgccaccctcttccctaaggtttttacttatcttacggcggaacttgggcacctgactcacggctgcatcggcttttatctctagcgaagggtagtcctaactctgctgccctgggaatctgcggtacgtggtgtgccaagcctgctcattcgactcttgatctcttgagtggagaatatacgatactgaattaattta

SEQ ID NO: 43624 - DNA, 170 bp, Oryza sativa
ctctcgttacacactctcactcttgccactatttaaggaactttttgttcttaaattattccgcacacataattatcttgaaaaaaaacgtgagaatgggcaacctaaccctcacaagaatggataattcaatcactctatttctacatgcttacgctctccatactctg

SEQ ID NO: 43625 - DNA, 463 bp, Oryza sativa
  unsure (1)..(463): unsure at all n locations
tactaaagacctangagtatgacttatacgctccacccgatgtgtagtctacagacggtctagtaccagataagactttgagtgaaacttgcttgcacaagacttgcaattcaaggcgtagtccattgttcaagttgtgagtaagtgtagcttggagttctaggtggatgttcaaccttaattggtctccatcgaaccgctggtatataaacagtacattggaaaagacaaatctcagtgggattttgagatttggtgggggattgttggaattaatgaatgggccttagcccactcgaagattaattctttggaaaatcacaaaagcccacctcatgggatggcatgcatgtggagtttagtaccaccttgcttattctatgagagggggacctccttanaagggaggatgccctcctagccacttgaagcatgtgtggtggagagaagaggggaaacacac

SEQ ID NO: 43626 - DNA, 364 bp, Oryza sativa
cttgatccatctacaatacggagtgccttaccaccgtccggcgccactcatgcaaggcgagacgccgatccacatgttaagagcaatggaccggatgttgtcctcatgagaacggctatgatgccagagaaaggtcgttatgtgcgtcgtccagatgacacactgcggatgcaccctctaagctcttatgtttttgatacacccggatggctatgccttgacatggcttacctactgataaccgctgaactcgagttcatatgcagcgaggcgcgatacccattaactcgagatgaaggaatcctaagaccgcatagatcttatgagcacacatcctagaccgagcgagccgacagccgccttc

SEQ ID NO: 43627 - DNA, 429 bp, Oryza sativa
  unsure (1)..(429): unsure at all n locations
agctngaccaaggcgtgagtcactggtcgttatctatggagtcagtcggcgaacttcaccaacaactggatcttgtcaacaagttgaaccaaacttcttcaacgacgtcttcccctcgagttccgctgacagacgaggaaaggaaagcgccgttgctgcctacgccgacgattccatcttaagcggctgctgcggctgaaggcggaagcaagatggccagtggccgcctactagttcatgaacacccgggaagggcactgggagtggcaaccaccctgtgcccgactccggtcaagggtacgtatgaatctccttccacatctctgaaaaatttcgagcaatatgagttcgggaatggggattgtgatggcgatcagtttgggcgccagtataaccataagcgtcctaaattagatatcctaagttgat

SEQ ID NO: 43628 - DNA, 441 bp, Oryza sativa
  unsure (1)..(441): unsure at all n locations
gtaacctcataccctgttcagtgttggcgatgattgtctggtggcttcaattngagtgaaataatggctactactttcattgccgaagctgatgctccaatatctataagagatgaagttgagcagcataacggatctccagtggaaacattcctggacacagaaacggtacaagctgggccttgcagttctactttggagggcaacaacaccaacaattccgatgaaatgcaagttgtttgcacctcaggaaccaattagaagtcaagacaagaagggaagttttggatttatcatatgaaaaaacaacttcagtgctcgttgtaaatcatatgcagatgtgcgccatgttctgatgtcgatttaaattcgcacattacggaatatcttgttatgtattgtacgttagtgaactaaggacagaggtcgctgaactcgatg

SEQ ID NO: 43629 - DNA, 439 bp, Oryza sativa
  unsure (1)..(439): unsure at all n locations
agcttgggagaggcaagaatgaagatgatttattattaaagaggatgacgtgaataagaggaagaacacaaaggagaagaagaaacattgcatgcagtggttaatccaagaaatcataaaagcttttgatgaatcggaagatgaagatgagagcaaaggtaagcaaattgttgatatagcttttattgctcgtaatgcaaattctgatgttgatgaatctgatgatgataatgaagaaaagcttagttatgatcaattagaatatgctgcctacaaatttgctaagaaacttcaaacatgttctattgtgcttgatgagaaggatcatactattgagattcttaatgctgaaattgctagattaaaatctttgattcctaatgatgataattgtcaatcttgtgaagttntattttctgaaattaatgctttgcaagat

SEQ ID NO: 43630 - DNA, 467 bp, Oryza sativa
  unsure (1)..(467): unsure at all n locations
tcttgatcttaccaaccaggacatcaaactgagcttgatatttgattntacggtctacaaaacacatttataataagaatctgctgcgttaaagagaggaaagttcaaattgtcaactagcagtaccttcaacttccttcaaggctgagtccctttgcgcagctagttctactttgtctcttttcaaggcttcaatctgtttctccatttgagccatcctggtagcttgcgctgtttgaaatccaaatgtttgaggatatagctatgacagcataaattaatgggacagatctagaagattaccttttgatgaaccacttagctcgaagtttgaatcctggagctgggcaattcggtcccttaactccttctctgtctttntggcatactccttggcctcatgcagctggtccctaactgcttcaagagttcccaaatgaggaaccagctnttccaaagttgtagtc

SEQ ID NO: 43631 - DNA, 450 bp, Oryza sativa
  unsure (1)..(450): unsure at all n locations
catgcaagcttggataatcaagcaagcgagngtactttacttttgcatagcgcngagatacattgaggatcttacaaagagcgtaacgcatgataccgcacgtaaatcaatcataagctctcaacgcaaacgatcgggcgaccgctcttcacttgagtaagggaaatgataaatatacgcagcaggctgtaataagccaccacactatactatacaagcagacactacatgatgagcactcagtgtacaaccgagttctacaccgcataatatgatgatgaggcggtgcccgggtcatatcagattggcagacatttcacgtgcaacagaacacagctgttagaacgctgggctcaaacatgtcaccatctcttaaccttctgaggtcgcccattccatgaatttgaggacttacctaatagagagcatcaaatgcaacccttccatgct

SEQ ID NO: 43632 - DNA, 357 bp, Oryza sativa
  unsure (1)..(357): unsure at all n locations
tacggacctatgatactcagcttgcacnactcaccatccatgtgaggtaacgagacactattcttttgtccacccctatactcgcggaaagcaagcgacgacggaaatcaatctacttcaagaacgacaagtgctcactgatagcttccaatatcgtatgatgtgcgtacgaggcacttaaggcttgattctctctgatgataacatccggagggctaattcctagcaattgcatctgctgtatcaagaggatacctcaccattatcttgcgcgtgcccgaggatcttttgatacaatagagaaagaccaggacgtttacatgcgcgaattacccctactatctcgattcacacact

SEQ ID NO: 43633 - DNA, 421 bp, Oryza sativa
catgcaagcttctttattccggaaatggtcgtgaattatgtttttgggtgccattctttaatcaggaacacgtacttcgtatctttgtccgcctcttttctggctcacatgtgcaagcgagaacacaaacaaatatggcttatacagttcaagcttttccgagacgaaataccactacacagtacacgtcttggacggcatacaatgcgtgtgctagacaccgatccaacaacatccagagctactgcaccacaaagtccacgacgaatcctctttcggcaccgatctcccatatgctgtgcttcaaagttgcccagaacaagttctctcctgaagcagtggctttgggaagtactatacgcgccatgcagatctttttggtaccatgcgaaatctgcgagacatttgcaagatccacaac

SEQ ID NO: 43634 - DNA, 341 bp, Oryza sativa
  unsure (1)..(341): unsure at all n locations
acactaagaaactaagcttgccgcgacgctcaccaagaggggaacacgtttttattntcacgcactcgaccgtgccggcggcgattacctctagagctgacgctcaccgccgagctcacgccgcccgatgcaccgatagagcacgcgtcgatcctagccgctaacaccgtacctagctgtgtacagtcgtttaatcgacgacggagagccatatcggacgacgctagggtttagatagaatacaccgaaacctacttcttctcgcacgaaagagagagtatacatacgttaatctaccgcgtgagtggcgtctgcatggaacgctctcgattgctgatgaa

SEQ ID NO: 43635 - DNA, 435 bp, Oryza sativa
  unsure (1)..(435): unsure at all n locations
agcttcttgaccaaatcagaactcaccatgttgtttcagctacctccatcaatgatcacacgtgcacgacggttgttgatgacaaanaaaatctgaaacaaattatggcgttgcaacctgtcatgctgctgtacctgcgtgctgagcacccactgcacaatgatggtcctgtagttcgttgtgtcatcacgagcaaagacttcaacatgctcatcctcaacttcttcttccccctcttcctcttccacatcggaggtggtgatgtagccatcttctgtagcaacataggccggttgactagggcaatctttctgcacatgcccaaacccttggcaacggtggcactgaatgcgtcccgtcgaggcgacagatgatgcactcttggcgggtacctgcgaggaacctttacctgactctgctggtcgtggtggagat

SEQ ID NO: 43636 - DNA, 461 bp, Oryza sativa
  unsure (1)..(461): unsure at all n locations
cgagaagtccacaagttgtagaggatgtccgtactaccttgtggttagtattattactctatctttcttcaattgctttgcttttttgtaaccagctaactttatatttttgctttttcttattaataggtcaattacttggattttcttaactttggtatgcgaaaaatgctgcaagatactccaagaatcaaagtatggaaaggaacaatgataaaaaattttcaaagtttgataaaataagcaaagaagtctatggcaaaagaccgataaaagatttttctgagagctgttacaaaatggtaattttatacctacttttttagttctgaacttgctttattttaaattgtttactctntagttctatcattntttttgtagattgaaactggtactgccaaagcaacttttcttcanaggcttgattctgcaattggtgttgacttacctcaagaaat

SEQ ID NO: 43637 - DNA, 429 bp, Oryza sativa
  unsure (1)..(429): unsure at all n locations
agcttgtatcactnggggcgacatgggcgattaagaagttgagagtatcctagaggtgctcaagaagaacatcgacatcttcgcctggagccctgacgaggtggggggtgttccggcagatctcatcatgcatgacctggcggtcaagccggacattaagccaagaaaacagaagttgcgcaagatgtctgccgaccgccaagaagcggcgaaagccgaagtacaaaaattgctcagggcaggggtaatccaagagattgaccatccggagtggttggcgaatccagtgctggtgcggaagtcaaatggcaaatggcgcatgtgtgttgatttcacagacctgaacaaagcgtgtccganagacgacttctccttgccgcggatcgaccagctcgtggattcaacagctggatgcgagctcatgagttt

SEQ ID NO: 43638 - DNA, 458 bp, Oryza sativa
  unsure (1)..(458): unsure at all n locations
nggtttactntatntacttaccttgtactgtgattttctaactttattcaaattaatccaaaaacttgtgctattaattggataaatgtcttaactccctcctttcacttgtctttagatgccgcgctacaagcctgagtacttgtttggttttgagggatttgtccaggagttgcgtaccataggatttgggactgcccctttgtatgcccagattcctcatgatcgtcacgaagagaagtgccgagtcaaagtcaccttgaacagtaatagtgaagatatcccatcagtgatgttcgaagctggaggaggaaactacatccatgcatgtcaggaggtggcaaggatcgccatatgagagctccgcgatcgctacagtgatcagttggctgacactgagtatcgctaccatcctcgccaaccccagggaagtgaccgtggcagctaccttgagactg

SEQ ID NO: 43639 - DNA, 451 bp, Oryza sativa
atgcagcttgccgtcgcctgggaacgaccccttgttcccattcactccggatggatgacctcacggatgaatccggcttccagaagtcgcgccacctcctcgcggatgaaggcttgacgttccggggcctgccgccgcactttctgccggaccggccttgcgcccggccgcacggcgagacggtgctcaatcacctccctagggaccccgaccatatccgccggtctccatgcgaagacgtcagcgtttgcccgcaggaaggagacgagcgcgtcttcctatttgccgtccagaagaccaccgatccgtgtggtcttggacgggccgtcgcccagggcaacctccttgaccgggacctcgtcgcctgtgatcatccgttgcctcggggtggcgggggcggaagcgccaagcctctcgtcgccaccctttcggcttggatgcagcggcgagg

SEQ ID NO: 43640 - DNA, 466 bp, Oryza sativa
  unsure (1)..(466): unsure at all n locations
cgcggcanagaaaaggatccattctgtgactaggattgtcttttatggaatgtgactcttgttacctttgctcacaaaaggtcttgtgttttttgttctctacatggaaggatagaaagttttctggcagtatgcaacagcaagacaggagatttgaccatgttctttgatgagcctgaaccgtggaagaaataagatcattgtggcattttgcccttttgacagaagtgatttgcttctctttgcgttagcgtcttacgatgaaaacttttctaggaagtattcaaaagaagttgtgaggtgtgacactatatcctttggatgactggatggcgtagtgcgtaagtatattgtgtgtataggaaaatgcgattccattgttgcgttgctctttacaaagtttatacgtatatattttacctacattnttttgtttgattaaagaggatctaaagatctcctggaa

SEQ ID NO: 43641 - DNA, 428 bp, Oryza sativa
gcttagccatcccgctccacaccgccatctgtttttagttatataaatcgcgggagagagaacacaagctggagggagatgggaacaaaggggagagaggtgaaagaagactgggttgctgaaatatgggtcttatactgactcaatcatcacgttagctaaaattgaagactatattgcctttagccacaattataagaaaaaggatatcttatatttagtattgtctcatgataaaatttgaactggacgtcaagacgaggaacctggagtgaacttattacactcaagaggaatgctccaagaaacccatgaagcggaaccgcatattggccggagcgtgcttgctggcccaaacgctcgtcaccgtcgacaacctcgtgcggctaacctccaacttgccgcgagcaacactcgcatcggtccgg

SEQ ID NO: 43642 - DNA, 438 bp, Oryza sativa
  unsure (1)..(438): unsure at all n locations
agcttgtgttaaccgngaaatgtggtatattccatttattaattaaggaaaacgtacagcacagtcgacagcgtgaatttaaggtctaagattgtatcagctgaggctgatgggtctatatcggatggaatgcatcggctgcgagatgatagagttagacgacgagggatggatgatggctgaaagctcactctttgtcggacttggttctggaaaagatagtggtgaatgttgaaaggagactgagtttgaagaaagtacggcaatgctatttatcgattaattttacgataagtttattattttccttttatgttntacgaaagtttatctcatgcgcgaggggatagctcccatctcaagtagccgaacacaatgtaagtcaaccatggtcagagaaacacgaaacgggatgagttggacggaaagggttcttac

SEQ ID NO: 43643 - DNA, 477 bp, Oryza sativa
cctataaaactcagcttcggacctacacatatattaattgtgtaggtcattcatcatcataaatgaaagccactctgctagtcaagctctttctctaaaatgagcttaacctggctgcctcctctttggaacaaggggcgattccggttccgtgggtgcttcaaacaattttgtgttctctatattaccatatctctagtcaataattttctgaggaattacagaactcaatcacttgctgctagctgcaactcatgttttcggaataaaaacaatactgtgtaatgtgaacaattcatcaattagaaaagggtagcatagacataaacatggaatccagtgggataaattgacccattcaaatatcacataatccttcttcctttggaagctaatctcacatgtccatttgttctgatgaaggttacccgtataacctggacttcgactatggtgcacttggccagctgcaacact

SEQ ID NO: 43644 - DNA, 416 bp, Oryza sativa
agcttgtaactgaaacagagagcatggtggtacaataatgtttacttttgacattcagcaatcaggcacgcatacctctttagttccctgtacaatttccggtttcaactcatccccactatctgctggttgtcctatagttttacccatcatggtcgaagatttaggagacactacttccttcttaataatgaaatagtcagtgcagttgaccaataagatgatcatagcatggacaaaactttcaatacaactgttagaactctatgaactctctctgtgacagattaccattgccaatcataaagctgtagaactttgttcaaatgaagatgataaacttttcaacaacacaatgatcatcaaacaatggggatataagctatacatttgaaaacgatgagctatggttctac

SEQ ID NO: 43645 - DNA, 296 bp, Oryza sativa
aactgcggcacaacccttagagaggagagtcctccaaaacaactctttatactcctcgaatgtgaatttatggtgaccggcggactttcgaccacgatcacctccggtcatccgaatacgataatataactattatgtccgcttaagaacttgaatacaaataagacatatagatgactaaaattcatagatctctacatagacagtggccaacgtaaacaaatgtacgatggatacataaaatcggggagactcgtacacgacctctcatgtacatatgcatattttctgtttta

SEQ ID NO: 43646 - DNA, 453 bp, Oryza sativa
  unsure (1)..(453): unsure at all n locations
tgataaatggtgcttgaacctctcttccatatcttgtatggcttgngtcttcttctccgttgccgcctcctcaatccaaaacttctctgcttctttccgagcctggaccttaagctcccccttgtgatcaagtatcctggaatttcccttgaaaacggcagttatgaacttgacccggagattgtcaggcaccttgtagtcattgcagtgttgctcctgtgagacccagcctgatgtgctcaggtaggtcataacacttgagaatccttgcagtctgttggttggaattgtactccaaatcttgtaaggcctgcgccttcaacttgttgtaatccttcgaaatgtaacccttaagtggttcctcttcatcatcacgcatcctcctgaatttaatctccacatggtttatgtaacgcagccggagatcatcaggtaccttgtatttctggaagt

SEQ ID NO: 43647 - DNA, 444 bp, Oryza sativa
  unsure (1)..(444): unsure at all n locations
agcttctcgccacaaaaacagnaatttgcaatcggtatttggcaattntaaattggccagacctggtgaagcgggggaaaaacaaatgtaactttttctgtagatgtccgtggatatattatatgcctaattgcaagtacgtatgaaaaagatatgactgttttatggaaggtcactcgaatcatggttctatttcctttctagtggtggcaggatgaagggcaactcacaatcactagcggcaacagatcaaacacaaatggaaagggacttggtgggtgactgcgatggcggtgatgacggcaaaagtgatgatggatgacggcggtgatgatgatggcgatgtgcggtggcaagaactcgaaactctaatcgccttcacactaagaccagcaaactaacacaaccgatgcaatcgaaaactcaacaagccctaactaagca

SEQ ID NO: 43648 - DNA, 465 bp, Oryza sativa
  unsure (1)..(465): unsure at all n locations
ntgatagtttccctcanattgaattatttagttgcatatattctagttgctttggtgaaactaactggcgggtgaaattcttgtcattcctaacccccgccgagttagtccgttcttgctctattgtgcagtatgaggaggcaactgtcttgtctgttcaaggggtttggctcttcatcaagtcatcatggcgaatctagcactcattcattagctgatgtctcgatggaagacgccgaagctccgcgatgactcctgaacgacaccgacctcgaccttgtcagtgatcgggagagacaagcctactacatgctgagcgaccgggaatatgctcacactcaagaatactctctggagctgctgaaaaagataggtttggatgttgaatttcgttctatttggaaagctgttggttggcagagatttgttgtggtagatgagcctggttctcgtttgcttactttg

SEQ ID NO: 43649 - DNA, 430 bp, Oryza sativa
  unsure (1)..(430): unsure at all n locations
catgcaactaatctgtctgcaacatctgtgatttctcttaaaaccttgngcaaaaatgcagactgtgggggagagatcagacctcttttttttttctccacaacccacaagttgtgtgaactgtgtatgatgtgttgtttctatcaccaaatgaaataatgtttaagattgttgttataaatcttgtttcaatcagtattttaagggaaagaaaaggaggaaggttatgttgccctgaaaggtggaagcaaacagtagctaaatagtaacagcgacaaactgtgaatgatattgcgccctgtcacttcttgcatcagggattgccactaccaaatcttctttaacaactctgttcttgttaaactcaatctagatggccaagtaatgatcaccnttcacctatttaataagcctttagttttcttaatct

SEQ ID NO: 43650 - DNA, 442 bp, Oryza sativa
taacgtacagatatatcacattatgattcactaacaattattacatttaattatcataataaacattgctatattatctattattttattcgacattggttgacatatgttgtgttgatgtgcgtgtaggctggagtacaacttccgcaactacttctgccttacgaccggcgagacgatcgccgtggcggcggtggacaggttctactacctcgacgtcgtggagacgaagccggccgacgctgtctgcgtcatcgagaccgactgcgaggtcgagttcgaccaggccctctaccaagcggagcccgccgccgccgccgccatgcaggtcgacggcgtctgcgccggcgagccggagccggcccggttcaccggcttcaggatgcggatggacggtaagccggtggaggaggagaagaagactatgccgccgccggcgacg

SEQ ID NO: 43651 - DNA, 401 bp, Oryza sativa
  unsure (1)..(401): unsure at all n locations
cttactaaagataacccaaggcaccttttattttcttggaaagaagaatgaggggcagcggaatctaacaatattactgccggcgctnagtcgacgggaaatgtgcccaatatgacctctggggctgactgtgcctcctctgcacacgcatgattgacacgggcctgcacaaacctgggtccaacatgtattggcttctggcactttccaacccggtgaaccggtttgtacaaatgaagcagagatcgggctttacttctaactcctcgggctgctttgactgagcaggcaaagctggctaaactgactgagctggaaacattaatggacttggattcgcgttgaagctgtgcttctctcttgtgccgtgactgccacaatggtagatactgccgaaacta

SEQ ID NO: 43652 - DNA, 466 bp, Oryza sativa
cggcagcgggcgacagcgggaggagcggagccccgaccgtccccgccgacgaggaggaggtggtcggagcggaggcagacggcggccgtccccgcgctctccctgcggcggcgtctctccaccgctcggatccggtggcggcgcccctctccggccctcccccgcatggatccagtggcggcgcccctctcccgtcctcccctgtgcgacaacaacgacgacggcaacggcgagatgcgacagcaactagggtttcgattttttttcggatttttattttcgcgtgcgggcaacataagcacccgcacgcgaaaatccaattatcgtgtgcgggtgcatcacctgcacaaagaaacctgagttttgcagacacttgcgggcaaatgtgcgccacctccgcacgcaaaaaatatttttgcctgcacagagaaactggtttcctaataatgaaagtacagcattttta

SEQ ID NO: 43653 - DNA, 432 bp, Oryza sativa
  unsure (1)..(432): unsure at all n locations
agcttgaaattatttcaatcgcagttattgtctgacagttaagtatagntggtacctatttcatttgacacatgggcatttgcactgcagatacattaaggagggcagcacggtgagtgttatgggggttgttcaaaggaacgacaacgtgttgatgattgttcctccatcggaacccatctccactggctgccagtgggccaagtgcatcctccctactagccttgatgggctagtcttaagatgcgaagatacatcgaacatcgatgtaataccagtctgagcttagctttgttctggcagctactcctagaaagaaaatgcctgtcaaaatctttggatntatttcgtgggatgttagagttgaaagatgtgcaaatgcagggtgtgattatggctaagtacaatatcggtggtctattatttgggtct

SEQ ID NO: 43654 - DNA, 440 bp, Oryza sativa
tcactcggcaattgggtccccagaggggttgtttctgtctacatatgctggtaaaggcattgacacagcagtcaccagagtcttcaccaatggagtagagcatagggaatgcatgagacatttggtgaagaactttcagaagaggttcagtggtgaggtctttgagaggaatctgtggcctgcatcaagggcctataggcaggacatattcgagagtcactataatgagatgaaagaggcatgtccaaaagctacagaatggattgataacttccataagcacatttggactagatgtcagttctctactctcagtaaatgtgactatgtcacaaacaatatagcagagaccttcaatagttggatcaggcatgagaaatcactgcctgtagttgatttgatggataagattacgcaaatgatcatggagagaatgtctg

SEQ ID NO: 43655 - DNA, 430 bp, Oryza sativa
agcttcaactctgtaatcttcccaaggtattatgaatcagcagcatttgcattaaactatcagagcttgttaattattcttgttgagatcaaactgttcgatgttcattctttcatgagtgttgctttggtccttttttaccacgtggtactggtaccatgaggtactaaaatcctgaccgttggtgatggcagatcgaacagtggcgattgcatggtacctcgaggtaccaacttggtcatgggtgtggttagcgcgagagagccacggtggaagggtataatcgtaatttcgcgtatggagggatttttggatcggtgcaaggtttggctgagttggggaagcgcggcagagtagcagaaccctatgtggcggcggtggtatcccgttcgcggtggcggcggcacatccatagctgccgacggcagca

SEQ ID NO: 43656 - DNA, 456 bp, Oryza sativa
tatcgagtgtcaggagacaatcctaaacctgggaaagctactgaaagcacttgcatctccaaaggatgcgatccttttcgacaaagtggttcatacaaaaattcagtctgagcgaaaaccccggtctcagtcgctaaacgagatgctagccatggatgatggaggattcgattacctcagctcccccaaaaccaaggagatcatatgcgcggaactaagatcgcggcatgaaagaagttgctctgtcgacaacggaggcgatgattcagtaacatgcagttcccacccaatgccggtggcaccaccaatgaggccctacgatgtgaatggaacttgcaaggatgaggctgctctcaaggtagtagcacttatgccgagcaagcagaaggggaacaccaacttgctgaaaaggattctggcaggaaggagaaaggaagccatgaccaggccaaatgt

SEQ ID NO: 43657 - DNA, 437 bp, Oryza sativa
agcttccacctgtaaacttgcaatggctttttcataagtacttgcgacatcaccatttagtataacatcttctgcacatttcaagagtggtcttgcaaaaccatttttcctgtgtgatcttgaagcatcctttttttccaatgcaccaccatctgatgagttaatgttcttttcctcaatgggaggttcatccttttttactggtgtaagggtcaggtgagcttctagaggctcagctttgttcacaatggaggtcactgttttaccatgcaagtcaatcaaatggtaaagggatgatgccctggtagaaatctcagcatcccacttgcattgcttcagcgcagacagtgcatttaagcatggcctggatcgacgaaataactcagaaacatgagcagcaaccatagctgctgcaacaatctcatttgaactataac

SEQ ID NO: 43658 - DNA, 465 bp, Oryza sativa
tgtgtacaactacaccaaggatatcagtctgaagagcagcccaatctgccatgccaacggaattagcttctaggcgcctaaagcaaatctgtatgtcagattatcggcatgatcacatcatgcatcataacagtaaaaacataaactttctgcagcaagtactcgagaatgcttatacaggattatgaagttgcataacctgtattttgcataacatgtgtttctgataggtagatctaaaaataagtatatgatgcctagtggaaacgtatgagatgccatgttcatttaattctgggatgtggtcaagagaacagaagtgagaaagacaaccaatttcagttatgaaaagcctaatccttatggtcaaatttgtgaagcatgttagatgatgccctacaggccagacgtaaagaagtattgtttgacgaatgcgactatatcaacccatcacaatgttatatc

SEQ ID NO: 43659 - DNA, 463 bp, Oryza sativa
agcttctcatacgccttccggaccgtttactctgtacggaggaagccgaaaatgccctcacccagttgaaggcatgtctaagctctccccagttctggtcgccccggagccagacgagcccttgttactctacttagcggcgaccccgcaagtagttagtgcggcattggttgtggagcgcgatgaggacaattctcatttcacgcctccccaccctgtgccgacttggcccgggagagagcagggaggagaggctcccgagccgaacggtggcccagggcccccgacgaccggagttggccctctgcccgcttgtcagacggtgctaggagcccccgacccccaggaaggccctgaggccactgtgggaaggccgcacctatcgccctttgaccccgaggctaaccctgtgctgactcgacccgggaaagagcagggagaagaggtcccccgaccgaacgga

SEQ ID NO: 43660 - DNA, 355 bp, Oryza sativa
  unsure (1)..(355): unsure at all n locations
tcggagtacttcgggtacatattttgcaacgaaaataatttatgaataaaaattntatatatgtattcttataactatctaaaagcaaatgctaaaaataaattttgatgaagaaaacttaaaattaattttaaatctaagattgaaaatttaaattttaactaataaacataacataagtataagtgaaaaaagattggggtggggaattggtctgtgttcatctcattccagttcaatcctcatcgaaaccttatgcaaagcgatgacgcatgaacggtgacgtacgttccanatcatcatcgcgtctttatgttcgttctgaactctgaaagctggacgtccagaaaaaaat

SEQ ID NO: 43661 - DNA, 470 bp, Oryza sativa
  unsure (1)..(470): unsure at all n locations
ttaagcacctgngctgcagcttatgtttgatatatttgcccgatttattatcttaatatagagtgggatcggagtattagccgatacatgttaaatctatctgatcggctatgctatgaatgctataatctcctttttaatatatatttcgatctaagtgatttatactgtctcggcatggcgaccgatctatcccaatcacatgatttaagtatatattgatggaagtattatatatcattaatatctttagccgatcgaatacatttagtcctttcttacctatttatgattgccgatcgacttaaatatgacatcggctcacagataaataatacatcatcggcgactggccgatcggctatcgtttatggatttaaccgctatttttctatctttatttcttggtgattgcaggatcaaatcaactagcacgctcacgaacctaaaggtaagatttttggacttgc

SEQ ID NO: 43662 - DNA, 459 bp, Oryza sativa
  unsure (1)..(459): unsure at all n locations
agctcttaactgcatcaaaccaatggcattcgatttactcaccgcgttctgattaccacccgattcgatagcgataatcgccgtgatcaattgtggatcgacgccccaggctgcaccggctttctggcttattggcatccactgcatcgcacgttgcaccggaactttcgcgttccacggcgggttcgtatagtcatgctttgatgaacaacccgctaataacacaatcaaaaaggcaaaccatctcaatttcacttcttctatccttatagcctggaatcgccgttgaggtgacaacggcacacctaagcggcatgatatacatttncgttctgttgtcagcaaggaattgccatgtctctgtttcacttaattgccccatcgggttactgcattatacagcacgccgcgctgcgtggtatccagcgccttaccgacgcggngcatcaagtcaataac

SEQ ID NO: 43663 - DNA, 455 bp, Oryza sativa
gcaggcatgccagctagatcagcacgaaccactcgtctatcttctacccgaaaaggaaggatcagatcagaagcagggactctaccacctcctgtttctgaaataaagattaccttagcactagtagagtatattatgcggtggaggtgttgcattttcctactgccgaggtgaccccccatacctcggcaggtccagcttaaaagactcatggcgcccttgacgccttatgggctggcgccattgcccatccatcattctttccacttccatctccaccgtttccagcactgggatcaacaagctgaatctctgaaacattgcattccctatgatctgtagccagtatcagcctggagctagctccagcatcacttgcaccacccacttgagtatctccggcagcttgatcaacaaagatatcatgatgcacctccaaagcactccaagtatgc

SEQ ID NO: 43664 - DNA, 428 bp, Oryza sativa
  unsure (1)..(428): unsure at all n locations
actagcaagtgcttatgcaagagaacatcgtattgttctcacatatatatatagacacacatgccggtgagagaagaagttgtataagttgtatcactatatatatacacacacatgctggtaagagaagaagttgtatcacgtccataacctagtatcatgctattcaacatatgggaagatgggagggacatgctcattatatgcatgcttctggtacatgaaacaacatattgtatgcttctgattgattacaattctaaaatgatagcacaattagattatttacttgctgaggtaaaatggtttaaccctccattttagtctgaagtgtgaacaacatgtcttgcccaaacaacagcagtttaacttcaattctagctccaagatatccaacttaccaggccagntccttatatattaatttg

SEQ ID NO: 43665 - DNA, 463 bp, Oryza sativa
  unsure (1)..(463): unsure at all n locations
agcttaagggtagagtgacactcatctaatgatttagctaactcctacatctcctaattatagctaagtggtagtaggttagatatgttctattcatgtactcctagtatgcaacatcttagtctattctaactagtatactctatgtagtataacccctttaacaatgcagcatagctaagccggaacttatctataccctcccgatgcatcgcaaagttaccccaggttgccgagtttcttacgacaacctgtcataaccctccaatcgaagcgggatatggaggagtatccaacccaaggaaattgtatgtaggaatataaactgcggnggacacgcccatactgagctgtcaccgagccatagctctcggcctagccaaagcagacttatgacccggtaatcagacattataccagcaacaatgcanatcccagaatgttaaccatatagatatactac

SEQ ID NO: 43666 - DNA, 412 bp, Oryza sativa
tcacctttattctccttcctacaccaacttctagactgtgtggctctatcatcttaggtctagattctcctatcacaacttccttccactttgtagatatagcttgctcccgccaaattaacacattcttatcattgaaatcaatagtattcacaggaaaaaaaaatcataatctagcttcatcttagaaccttcagtagattcaatcatccttcttctatggccgatgaaacacattgcattcattagtagtatgagaataagaatcatgccatttgcaaaaaaaacgactcttcaactcctctaaagatggtatgacatggcctctgggtaatctaatatgttttttttttgaaaagataatcaaaaatcttatcacacttggccacatcaaaactattcttaatctcac

SEQ ID NO: 43667 - DNA, 426 bp, Oryza sativa
  unsure (1)..(426): unsure at all n locations
agcttcggagaatccctacgctttctatttgtatggtgatgaagacgatggcgcccagtatgtcttatttacggtcgttgcctgtggcaatggagtgccgctgccttaactacgctgacttacctacttctgtttatggaatgtattccggaccgctcggtccgatgatttaagactgtgcctgccggcttatgatgtaataattccgactagactctcgagtatgtgcacttgatatttcagctatgagttcgtgtgtaccagactacttgatccagggaaatggtactatntacacgattgattcctgttataaaaacgggggtccacatcaactgagtgtaatcctaggaatcactaatctatgcgaggcctttcataacccacattgatgaaacatgtgggtttagattggtatctggatat

SEQ ID NO: 43668 - DNA, 467 bp, Oryza sativa
gtaatattatatcagctctaggatgaatttcgaattagttaagcttaatagtagtcgatattgaatcaatcacctgggagaacataatgaagtacaaacacagcttaaattgggttcaagttgctatgcgacagacataacaaccactcggatatatctagcagagtaccaaccaagcataactcttatgctgaatataatatatgttcagaattcttgaactttgaggtcacttctctattaatgaagggatctcaactctcaacttgattaatgtaacctatctttgcgttttgggagaaatttgctttatcttcattacaacagaaaaacaaaaacacaatgggttcacagattctaataatgtattttctaccttctgaatctttattagcacgccatgatccctgatattaaacacataaagttatctttcttttattgaacgatccatatatagtatcaat

SEQ ID NO: 43669 - DNA, 438 bp, Oryza sativa
  unsure (1)..(438): unsure at all n locations
agcttcagaagtatatgacattttcacattggatgttcttaaccaaaatctgtagcaataaagaaatccatgactccagntgccactccaaaacgtttaccattaggacgacgactcaactaaggtctcaaggggatacagcagcgactactgacacagatagaccccagacattcagactgaaccttgacgacgacgctggaccttcttgaccctcataactgttctaggactcactgtaacagtaaggacatgatatatcaagccatgcacaagagatgatgaagacaagcaaataaacgaaactgttgatagaaaacataagatatgcaatttatattgaattgttctaaagaaaggcatggcatataatgatgatcatactggaggttctaattatgcacctgattgtcctgatcagcagatgactcattaaca

SEQ ID NO: 43670 - DNA, 447 bp, Oryza sativa
  unsure (1)..(447): unsure at all n locations
ntatttctacatttccatatagaccatatcacatcttctatcccaaccagaatgagattntttgcgaatttgtcagcattcttaatccatgaaccaaacagttcctgcatgttcaaaaaaggattcatatttagagcacaagcaattatattccaaatcaatctagccatgggacaaacaaagaaaaggtgttgaattgtttcttccttatcacaaaactgacatttattatcacctttcctccagcccctcttgaaaagattgtcttttgtcaaaattgtattattggtaaagagccaaagaaacactctgattttcaaaggtgatttgaacttccagaatttttctatgaggataattcacctgcttcattttaagtgcattatatatagacttacagtgaatttccatcattggacaatgtcacaaagtttggctgtcaatttc

SEQ ID NO: 43671 - DNA, 388 bp, Oryza sativa
ctctgcctgcgcagcggcattgctcttgatgccggacctgcctactccagctagcaacggtgggggggcactgggtttggggctagctgtgttgtgtgtgggcgcgcgcacggtgcgacgttcacggtcggcagcggtgccgcgcttgccgtgggccgccgccgcgtgctggctatctgggctcgcagcggagcctgcctgatctagtggcagacgatgacggcagatgaaacgaagcgagaacaagtccactttgattccttctaatatgagtccacggataggatagtcccttaaaagcaatctaaactatagatctagtagtatttaaggatctctcaactgcaataacacatcaactattaaaatcattataatttaatttcct

SEQ ID NO: 43672 - DNA, 422 bp, Oryza sativa
agcaacggcacatgctattgatattcaatcttgagcataatcaaaagaaactctagaatggttatggtctaatatcaacctgtgaagtttcagactggaacacatgagacccattgaaaaacgattagacagaccagcacaaatcaatttggagatgtgcacaacctcactgatcggacattatgccagaagcttggctcacaattaagcagatgaattgaactcaggaaggcagaatggaataatatatcgtagggttagttctttaccctaccaattctttggttgccaaaacctatgcaagtttgaatttgacactactaattacttcctccgtttcatattatatgaacttctggccttacccacattcatatatatgttaatgaatctatatatatattaatgaatctatgcacaca

SEQ ID NO: 43673 - DNA, 384 bp, Oryza sativa
tcgcctaaggatcaagtttaaccacatctctaaacagagaaattgggtagaacacattcctcatcttccaaaaccagtgtcgatatagtcccacaggtagtttcggctgacgtagcacccgttgtgcattcatgaagaccaagtcaacatgtcaagtgggtgccacggtagttgatattgccatccaaaccgcctttgggctatatttgcactaattttgaaagataagagatgtgttgtatcccttttgcgattaaaggacgtgatctgaacttaaaccttacgagagacctataatgaactctcttatggatttaaaccaaacacctcatgtgcggatagtgggctgcagtgagatatgctccaatgtgtaagatttatgat

SEQ ID NO: 43674 - DNA, 426 bp, Oryza sativa
  unsure (1)..(426): unsure at all n locations
agctttggctggcccgggttaagaattgttttttttcttgaanatttatctaatagcggcaaataatgggtccaccacatttaatgaaaatatgattattttagatatttaagaatatttcactaatttattagagcatcacatggcaacttataagcgtctgtaagatgtcgtatgacgaattacgagcatttttggaagttcaatggacttttagacatctaatctaatgttctaaaacatcaattgggtcccaatttaaatgaaaatcgacagtggtatttatgtaaagctatagagtatgatgttctatctttttctatatgtacgtgtaagtatttatatatgtgttctttcggtgttctctgatcatgtattaagtacgtataggagtatgttctttcgggttatctgatcgagcttact

SEQ ID NO: 43675 - DNA, 450 bp, Oryza sativa
aagagaagacaaagatggtgagaagacctactatatcaagcctctcaacaacaagtcgaatggttcttaccaagggaggaagatggagaatcttatgaaggctattcaacaagtttgcgccgcctttgagccactaagtgatgtagatggtgaaagtggaaatgatgataagggaaagaacgtctccgatgtttgcttcatggcgtgtggtgaatctgacacagagtatgaagacaatgaggtgagtgcttttgaggaagctattaacattttgagtgcaaaacataagaagtgtgagaagatgtatagaaaatatgagtttatcattgaatctcttaaatctgaaattgataggttaaaatctcttatttctaatgatgatgattgttgaaattgtgacgttttaatgaatgagattcaaaaatagagttgtaatgctgccatgatttg

SEQ ID NO: 43676 - DNA, 397 bp, Oryza sativa
  unsure (1)..(397): unsure at all n locations
agcttaaggaatacgctaggtatatggtttcccattttggaagaaaatcatggnatgtaatatatgtaatatggctgccatgtactccatttatgtaagaacttgttggatggatgtaatagtaactaagaactcgtttgtccttaatttattaacctctgtgcttgctgtccagaactttggaaaatctgtaaacataagttcatctaagttagaaatctggttataagctcctgttaatatgaaccaacatttatcttgttggaactaacttctctagtgtcaatttaactaactatctaagcttccataaacccacaactgagtagaacttgccactcacccgcgaaataaaagtttccaaatgttttatggtagcaagtctgtcatacaactt

SEQ ID NO: 43677 - DNA, 474 bp, Oryza sativa
  unsure (1)..(474): unsure at all n locations
agcttaagggtaagacgggcccacatgtctggtgtttccgtcccggataccgccataactgccataaccgccctaagaatccacctgtcaccgaccctggaaagtgcggaggcctgttgagccggcccatgttctgctgagccaatggttcggccaaaccctgnaaagctcctctcatcccggccttccacgtggatgctcttgattgctcctcaatgatggttgcagggcaatttggacaattcacatagtgtaaccgtcattacctgcctataaaagaaggaggcttcattcacttcaacacacactcaagtagggatgaaaacggtcggaaacaatcagaaaacagcttcaaccatttccataaccatatttttctcggaaacaaaatcgaaaacggtatagtcggaaacgaanacaatatcggaaatatcggaaaaccataaacggaataatatggacgggaacatatcg

SEQ ID NO: 43678 - DNA, 425 bp, Oryza sativa
tcagttatgatgggattgtgaagtcatttcaagaatgtattatatattatactctctctgctctaacatataacaacattatattacaaatttatattaactaaaaccatatatatatcttgagtctgtcaagattaagattcaaagtactaatcagtgatataaatctaaattattatattctataacagatagattggtttttatcacgtgctatatacgtattattatgtatattattatatatttttcatacacagatgacgcacacgcacaccaccaccatgcatgcattcacatgtgctattattattattattaatattattattattattattattattactattattatgattactatgattattattattaatatcataatcgcacacattaccacacatgcacgccacgctcac

SEQ ID NO: 43679 - DNA, 430 bp, Oryza sativa
  unsure (1)..(430): unsure at all n locations
agcttgtaatctccaagggttgtcattatattactacatgngntcattgagtttaggcctgataaaagaaatcctttataactatcttattcagatatgaattaagggcactcacaccatcatatagccatataaattatgataactcagtaaaattttgcatagaggccatcaagcaaatttttaaaggaaaagacccatattctcgcttgaggctattcgcggtagcattctttgcttttcctccactatatttcttggaaaaatcttcctttactctctcaatgaaaccaactggaagttgccgaccaacaaactcggtagcaacaacacagtatgctgaataccaaatgcattgtcaaatgtgaactatcaaaattgacacaattctatagcagatactttgctgctcaattagtttatctatact

SEQ ID NO: 43680 - DNA, 440 bp, Oryza sativa
  unsure (1)..(440): unsure at all n locations
tcatgatttctaactcaggcattaagctacaactctgtgttacaaatgtatgtgtctggtggaagaatggaagatgcccttaaaatatttcagaagatgttggcatcgaacacaccaccaaatgatgcaacattcaaggcactaaagattattttagtgaaacgaggagtttcatataatgatattagaaggctagaattgctcagaaaaaatagaattcatgattgcttgcgccactggtacaggatgctatgcatggcggtaagatcaggtggtagttcttctcgacgtattagtgataattcagctctgaggacgcatatttttgacattggcaattccaagagtggcaaaagatatacaagatagcatgtaacttcataaatatttcgagtctaactgggttaacatccttcatgtngacacaacacggtgatgat

SEQ ID NO: 43681 - DNA, 469 bp, Oryza sativa
  unsure (1)..(469): unsure at all n locations
agctntgcatacgtgtatacaaaccttgtatatgtacatattataaaccaagagaaaaaaacacgaatacaaactttgtatgcatacgagtacaaaacttggtatacatacaaatacaaactttacaaacatacatcttaaagaaaaccggaagataaaaagatagagaaacccaacaaaaccggaaaaaaccaaaacagaatgagaaaccgaaaaaaaacaaaaaaggggaaaaactccctccgtgcggcgcgccgtccaccgtaccctctccgtgtgcgacacatgtctagtcgcgcaggggagggcgcgcgcgactggctgccaattagcattttcgatgtttggtggagctacgtactaagacagggcacggtcttagtactaaccatgtactagagtcgttgtacgcacaatgtctagagtctagatgtctnggttgagtaatgatatgcatttctacgctacg

SEQ ID NO: 43682 - DNA, 432 bp, Oryza sativa
  unsure (1)..(432): unsure at all n locations
ttcanatagtgtatttcatactttctccatcccatattatgttcatctctagctccttccttgtatcccaaaaatacgttcattttttaaagtaatcattacatcagaaattgtgaaagtatggaataattgtattggaagatgataaagtgagaaatagttgcattatgatttaataaaataaaagcattgtagtctctcttttttttaattagtatgtgtgggatgtgtgaaaaataaacttattcttagaacaaaggtagtacaaaaatatttctatatgattttttaaaaatagttttctaaagcaattttttaactacttataactatgtaattcattcgttcaaaccctatattttaatgatttatcctcttgtcccacatgcctgtaatcttatatgatctcacgtgtcaacgctatatgagtat

SEQ ID NO: 43683 - DNA, 459 bp, Oryza sativa
  unsure (1)..(459): unsure at all n locations
agcttaattcttttgatcaatgtttcagtctaaccattntgtatggggacatatggaacagagtgctgaacctgaattcccaatgccatacaataatcatcgaaagcatgagatgtaaatttggcagcgttatccatacggattgattgaatcctatgttcagggtaatttgccttcagccttacaatttgagacattaatttggcaaaggcatggtttcgtgtcgatagaagacacacatgagaccatctagtagatgcgtcaatcaaaaccataaagtgcttgaacggtccagatcttggtacaatagggccacagatatctccttgaatgcgttcaaggaatataagtggttcggctctaattttgagataatatggtctcaaaatcagtttcccagtagcacatgcagtgcatacgaaatcagaggatntgggatattcgtcagtgatcaaatga

SEQ ID NO: 43684 - DNA, 400 bp, Oryza sativa
tgggctatcccatactaacacatgtggttgtactgtattctatatgaactgacattgagtgaagtccttatgtcggtttgggcgcactctccccctatctgtacacaactaatcaccatatgtgcaccacttgatgcccaaccctaatatccatgttttccaccattctatttatcatatacttcatttattcatatctgtccagaacttaataaaatcatctttcatgttaatatgagcccaagtgataagttaaactattctaagcatggctaagcaatatagtgaactagtgacaatgtaactcatattccaagtagtactacgatatgattcctaatgttaggaatgaaggagatggatatatatgggggtaaggtgaaaatgcatataatatgaa

SEQ ID NO: 43685 - DNA, 468 bp, Oryza sativa
ctttcgtgcagcgggcgatgagttttgcttatcctcgtccttcattagccatagtattataacactggaacaacgtcttataattcgcttattcaatcggacaacccgaagcgtatcgtttacggaagcgggttctaatctctatgaacgattgcgcccagctttcgacgaaattcagatcatgttagatgagatgaatgattttcgtctgacaccgacaggaacgctcataatcaatgccgcccgggtagctgcacgtatatttttaatgtctttactggttggtttcacacgtgaatatcctgatattaaagtcgagctcacaactgacgactctcttgtcgatatcgtccaacagggctttgacgctggcgttcgacttatttgcatcgtcgaaaagatatgatcagcgtggcgatcggtccgccagtgaaattatgtgtagcaacaacgccagagtactttgct

SEQ ID NO: 43686 - DNA, 465 bp, Oryza sativa
  unsure (1)..(465): unsure at all n locations
agcttgtgtaaatgcatgttgtatgtatttctacaatggngcaggtcaaaaatatttttgaattgtgaatactgagaatatttattgaactgcgctattgcatcctaaagctaatgataacactagtgatgaactatcccctatttctctatggtatttgatgaaaggaagctaattcaccggttcctggctaaaatccatgattccattatgctggaaaatgctaaaaaatacaatttattgcttgaaaatttagttctcaaaacatagcggcatggccaatctacaaaaaccctaatagcaaactgtacaatcgaaagttatacaccccaaactcactaccatatcttaagaaagctctggtaaaaaaaagtaaggttgcccagcagtgaccaaatgatctcttcacaggcaaaagattttgcccaaaactcacctcagtaactgcttgatgagtccgatagc

SEQ ID NO: 43687 - DNA, 454 bp, Oryza sativa
gtgacaaatatgagatcaccactacgatgaatcacgatgatatcacaggaaaccttcataggtgcaacgaccacatctcatttgtatgacacaatgactatgagctgtgagaaaaccgtatggtaggggaaaaggaacaatgagtttagctaggtcttacattttcaccaaccccccataactaatgaaaataaaaaccaccttgattttaatatgcacttaatttgttaaacatgttctaaacaaactaagtctactattttttatataatgataaagattatagatatttggttatactgatgaattaaatattatatagtatataacttagagaaattatcaaagtgatgttgatgaagaatatttgtcgaggaaacgtacttccgaaagatggcagaggctatctgattaatatgatccgttctcaacgcagcccacgatacatgcccac

SEQ ID NO: 43688 - DNA, 453 bp, Oryza sativa
  unsure (1)..(453): unsure at all n locations
agcttgnatatcagctctaagataacctttgcaggatgcagcaacagattgaagatcaacacattcaccaagatgtagattctcggtataaagctaaaaacataatatggtctataagattaagcttcatataagaaaaaatcatcatgaacataagttaaccacatccaaaaaatgcagggcttgctatgttacatcatataatacaacattcttttactatttttgaggggaaaactacattcttatatgataccttaagaatctcgaacctttcttctgctgtaggaacagtaacctctatctctgagtcaaaacgcccaggccttcgcagtgctgactcaatagcatccaccctaatgaaagcaagtngtggtttcattcaagagaaaaacacgaagttcataaccagaataactaaaggaaaacttaagcgcacttagtggaatatgc

SEQ ID NO: 43689 - DNA, 330 bp, Oryza sativa
tccatcctatgcttatactagaggaaactccatggttcgtattggggacaacatatgctcatcaaaaactcgtacaaaacgactgtgtaattgtatatctataatgcctataaggacagtatctcaagagaaatatattgtagttgacagtgttacagaatatgtatacttcttatactaggattcatgaccactaggaataccatatatactattattatacgataagcgatataccgatatgggaatatagcatataagaacaaactacctgcatgggaatacaagatatcatgcaccaactcgcgacaagcaatgtcttatatgcct

SEQ ID NO: 43690 - DNA, 387 bp, Oryza sativa
  unsure (1)..(387): unsure at all n locations
agctntggagttagtgggttgcactttattaattttagatggcttagttctagtagtattataacgtacttccaatcttccatatctatagcctataggctagctagtgatccgcaacgacaacgaggagttgtcgaagcgaaagtcgaaggaggagttgtctattggtatcaaggaggagttgttatcaaggaggagttgttcattgataagcagtgattcattttgagcaacaaccccagccaccccctcgtctttagtttcggtgaagacgagtatgtcggctgtgaggtgcaaggggacggtttatcggagctctaagttgacatggacaaagctatcgaggaggtgatggcagaggccatgaattccatgaacgtgaatgcg

SEQ ID NO: 43691 - DNA, 421 bp, Oryza sativa
  unsure (1)..(421): unsure at all n locations
tatgttgagcaacttaagttcatcaagaccggagatagatgattgaactcacgggattcatgacagcatgacaagctgaggtggtcttaccccttgagatcaccaatggtttggggcaaggttcttgagtttgccacatccatgtagattgaagtattcaacctatcaaaagcctcaacaaacaatggcagaacttcgatgcatgtttttgagagatccaaaaactcaaggcttcgcatgcagcacatttcgttgggaagttcagttatcctgaagaacgaaacgttgagatatctcanatgcttcaattcaccgatagaagtatgtaattcttgaaagaggcatccactgagatccaagagacgtgagtatcttagtattgggaatatatccgcaataggcattggtgctcacaattctg

SEQ ID NO: 43692 - DNA, 172 bp, Oryza sativa
agaaaagcatgaagaaagaaagaggccaaacagggaaaaaaaaaaaagaagaaaacagccagagagaaaaggagcaaaaacgaaaaacaagaaaatagaaggaaaaataataaagaaaagacgaggataagcaagaaaaaaaggaaaagaaggaggaaccagtaataaagga

SEQ ID NO: 43693 - DNA, 463 bp, Oryza sativa
agcttgaatgcgagggtcaaggactcgttattaagttgctttgtgactgaatcagcctatgcaaaaatattttactcctcagtcctcaggcttcctgtatttccatcctttacattcctatgccttgtaaaagctgcgatgcatatgggcttggagtgcaacagggatgccctcatgcccccatcttatcaattccactaaaacaatctacagacgccacaaatccctgtcgcccaagtagaaaccaattagtggtctttggcatttgcactattgagggtgtgtttagttcacaccaaaattaaaagtttgattgaaattggaataatgtgatgaaaaaattggaagtttatgtgtataggaaagtcttgatgtgatagaaaaattaaaagtttgaagaaataatttggaactaaactcggcctgaatataaaaaaagggtcaggagatcactatggcaaat

SEQ ID NO: 43694 - DNA, 443 bp, Oryza sativa
  unsure (1)..(443): unsure at all n locations
gtttactgtgcaagtctnttttccacatgtacgtacaaactttgagaccttatagtaggagatcgaggtattatatagttggagaccgaagctgactgcaacccccttcaacgtacatgccaccatgcacatatgcgtatgtgcaatccgtgaccactgaaaacccacggatcgatcgatcgatcagccaacctacgtacgtacgtacgtacgcgttccgcccgttagtgctcatcgccggaccggacgcgcgccgtccgtacgtcgtcgcatcatatcacacgtactgacgtacccatgccgccgccgtgttgcaagtcgtgcggtcgcgccggcggcgtcatcggcgtcgagatatcgagcttcccgggcacgccgccactgcaacgtcgtcgtcggctccagccgcaccgtcacctttggacgactaccatgcgcgattg

SEQ ID NO: 43695 - DNA, 456 bp, Oryza sativa
  unsure (1)..(456): unsure at all n locations
agcttatctcgctacctttcatatgcattcattctcctgtccaaattcatctcgagtgaacgggaatcgccaaaataagacagtgctattgctgaaaccgaacttgggctttgggccttgtaataggctaggcctatcttggaagtgtctccctccacctccactaattagcacataaccctagctttgtttttctctataaatagctntgtacatcctcaaaagcaattgggttttgtttagttgaattttgccaagtgtcattcaccttgtctctagtcctcgctcgattagtcggcgactattgatttagagccctcaatagttggtgtgatgatttgccgggtcgattggatctaccacttcaatcgcaactattcctttgtgcttaatcacctattcgcaatatttagattgcatattatcttgttcttgcagtggtctctcctttgcatt

SEQ ID NO: 43696 - DNA, 434 bp, Oryza sativa
  unsure (1)..(434): unsure at all n locations
tcatgagttccaacacgcatgacaacttgctgtgcttcgtctngcatccatcatacaacggcatctggcaatcttccaccaacttactaaacttctcataatctctgtcgttgtcctctgcgtcttcaatgtcatgcaacattgtagatagacattgagtgtccaaatctatggtctctccacctaaaggagaaggtacgaacatgccttctcgagctgcggcggtgttctctacatcctgatccaacacttcttcagctgcgacatcatgcgcctcttgctctccatgcttggtccaacacgtatatttcttcatgaatccattcattatcaaatgagcatgcacttcatccttgtcttcgatcatctcgttattcgtacaatccctacatgggcacaacatgtgcatgctcatgctactctttctatcatta

SEQ ID NO: 43697 - DNA, 425 bp, Oryza sativa
  unsure (1)..(425): unsure at all n locations
agcttgcgcgaagccattacctgggcgttatcgagcttttccatctcaatgtatcttgtcttcgctccttgcaatgcttcggagacgaaatagaccggtttctggcctgaatctgtttcttggacaagggcagcactgactgccactggcgaagctgctatgtatagtagcagttcgcttcctggtgctgggctaatcaaagttggcgggctttgcaggtattgctttagctcgtcgaacgctgcttggcattcaggtgtccagttgaattttcccgcgccccggagggtcttgaagaanggcaaacctctttcggctgcctttgagaggaatcgactgagtgccgcaattcggcctgcgagcttttgtacttcacgtacgctcgacggnggcttcatttgcagaatggcatcgattttctcggg

SEQ ID NO: 43698 - DNA, 382 bp, Oryza sativa
  unsure (1)..(382): unsure at all n locations
ggtgaaaaaaatagccgcgtctaatggcgatgttggtctgtctagtgtcaatgttgtgcacaaggcccatatcatgaataaatagaaatacaaacctcacagaccaccatacttcagcagcatatgaataacaatagcaatccataccaggatgagagaacatgctttgtgtgtagctggtctggtcatctggccaatacgtgtccacaacgcaaggtgatgatgccacctgcagggcagacttcaaagtctgccaatgtgaccattggcaacactggagatggaagccggtatggtattttacctactantttttagttaattagtctactaactggtgggttcatacaagggctaatgtacatgttgttactgacatctc

SEQ ID NO: 43699 - DNA, 414 bp, Oryza sativa
  unsure (1)..(414): unsure at all n locations
agcttnttttattatttttattctctgtatttggataataaggaaatattattgtttaaataaagaggagggaccaaaatgacagatatattataggtggccgattaggaaaaaataattattaatttttttcatatcatttgatttattgttaaatatactatttttatacatatagttttacacatttcacaaaagtttttgaataaaatgaacggtcaaacatgtttaaaaaagtcaacggtgtcaaatatttatggaatgagagagtacttcttatttaactgttttttctcatatatcttacctccaactaccctctcactcatatacatgcctcatttaataaggagtatcatgtacctcccagctgttctaatatagcctatacatgatcaaggtagtcacctattt

SEQ ID NO: 43700 - DNA, 460 bp, Oryza sativa
tgctccatcccgatgttgagatgtgtcttgtctaatacgttctgtgaataaggtttgcaaaatgtcagcacaatatatcccacacaggcagaatgtaaacacatttattattttttgtattgcaaatagttatcacaatgtatcctcacagtcatgatgcaatcacatttgtgcacaacatacgaaaagatttgcatttaacaaacataatggttctggatagccataacaccaacttgttctgatagctagcatatttatgaagtcatagcttcattacagccagcttgttctgataacaagagcctcaatatgatatatctaggcacaatgcagtcatcatcaacttcatcaacttaagatagacacataaatgagcattcatgtgccatttaagacactaattgtactgtcactgtcatctatctacacaaattagacatcctgtataacgtagtcg

SEQ ID NO: 43701 - DNA, 463 bp, Oryza sativa
  unsure (1)..(463): unsure at all n locations
agctggcattatgagaagaaatggngcagtttacttatatccatgtactactatatatggtgatcgcagcatctggatatattaaagatctgtccacattacaacagtacacgtttacatcaatttcggatgctggtagcaacatgagctgtatttgtgtgacagatggcttccttggagcttgaatcttgaaacatcaaaacttgnggctgactacttgaaagaggtctacagaaaacttgggccatctactcaattgaaaactgggaaactctcacccagatctccatgagttgaataatttagtaacatgtagaagaatgttgtttttagattggcaaattatgtttgttcacagttattaacttatgagattaatgcaatatgatgtcaatgcctcaatggacaatttccatggtagataacttataatactccatatattggtttagtctctacagac

SEQ ID NO: 43702 - DNA, 464 bp, Oryza sativa
tgccgccgatcgtctaccgtcgtcgttcgtcgtcgggccttccctctgtgagcttccctcgacgagctctttcttccggtgccctccgtttacgccttcatgccatagatcgcggatatcgttgggacctgagccgcccgttggtgacgacgtcgtcacagacgtcagctcctgttttccttttctaagataaattataagcctaaaatcagattaatcttgtaaaattcataactgaatcatatggagtcggaatgaggccgttcaagtctcataattcatctaaaatcatgatctacatgtttatttatttttttatgtactgtttatttggagtttcttagtatttttttctcgttttgcgtggtagcttggtcgttctgtcgttacgaatgttcgtgagtgcgtccgaagtgttccagaagattgattgaagaccgattattgaaggcatgtcacacaga

SEQ ID NO: 43703 - DNA, 303 bp, Oryza sativa
  unsure (1)..(303): unsure at all n locations
aaaaaaaaaaaaaaaaaaaggaaacagcgcctcacacnaaaaananaanaagaagaatagaaaaaatttnttttaaaagaaaaaaggaaggaagtgaaaaaaaaaaaaaaaaaaaaaggaagaaaaagaaaaaaagagaaaaaagaaaaaaaggaggaaagaagaaaaagagaaaaagaaagaagaaagaaaaaaagaagaaaagaagaaggagagaaaaagggaaaaggaagaggagaagagaagaagaagaacaaggaagaaaaaggaaaaaaagaaaaaaaaaaaaaaagaaaaaaaaag

SEQ ID NO: 43704 - DNA, 265 bp, Oryza sativa
gaacagcgccgccaggacaaacccacgggaaacaacgacgaaactcacgccaagggcccaaaaaaaaacaggcccgcaccagagaaacgtgacaaggcgtcaaacaggcaagcgaaagactgacactcaccggtacgacacagggagaccagccccagcacccgaatgcccccaccacggacgaagcaaacaggcgattggaagaaaacgactaggccgaccggaaacacgtccgacaacacaacaacgaaacgcggcgaggagc

SEQ ID NO: 43705 - DNA, 477 bp, Oryza sativa
cctgcggcatgcaagcttcaccgcaagtaccttctgagatctttgtatctcctccttcaacttgtcccatgcttccttggatttcttggcgccaataatacgtggaaatagactttccgcaactccttgttggatcaagaacaaggccttggcgtccgacatccgatcctctgccaaagactttttctgttccgccgtaagagtttctccagcggaatactcttgatagccattctcaacaatatcccacaatccttgagatagcagcagcgtccgcatcttgatgctccatatatcataattttctcctgcaaatacaggaaccatagactgcgccattgtggcgcccgaacttgaagccatacttgtagcttcaattgacaataccgatacgccgtgctactctgtcacgccctactcgaacctgtgcgctctgataccagttggtggtgctaaatatttcctaagcaggggatc

SEQ ID NO: 43706 - DNA, 486 bp, Oryza sativa
  unsure (1)..(486): unsure at all n locations
acacttagatactaagcttctacggtacttcgcatccaagctagcactattgacctgcatcttcttcagaattngcacgatttgcatgtttagtggatttgcaagattgaaaatcagttagccaaatttgggactaaattataagagcctaagaggtcatcaatgaccgatttaatttgtcagccacaccatcagttctaaattatgtttgtggcgtccacaaatttggcctgcatacttttttaaaaaaatctgaattaatcaaccctgttatgccaaaaacggttgctgatgataacatttgatttgtgcgtacgtatctgctgacgataaattacgacagatgcaactgaaactacgatatgatggtctgagaaacatcatatgccttaacggacgatcacattacagttgaattttctagttactactaactaattgcttctctaatcgagtctccgccgtgcaactcgatcacatgacaca

SEQ ID NO: 43707 - DNA, 455 bp, Oryza sativa
  unsure (1)..(455): unsure at all n locations
gatccttaagtcacctgcngcatgcaagctttccacgcggaatgcggccgaatttctattttgtgatatcgagacgagctgagcgaaaccagaacgctcgtcactacgcaagcaggagctcattgacggacggatggcggtggtacgcatgagatggcaatatggcatcttgcagccaaaccgaccaagcatttaaagtgtaaaggctctgcatcctttgctctgctcatcatcagagagggcagcattgcgagcaataaattctctggcgcgggagcggaaagggacgggaggggaggaactgcagagaaaaggcgccgcctttacgccatcatcgatgggaatttcggtccgagggatatcacataaacccgagctcagatctttacgcgcgcccctcccgcacgggcaccgggatttccacgaacacacaccacctcgcctaaagaaaaaaa

SEQ ID NO: 43708 - DNA, 392 bp, Oryza sativa
  unsure (1)..(392): unsure at all n locations
tatgtgttctgtttccttttttcccttctcattatttntattgggcttaatacagagcgagcgcatgctaatagcgagcctatgcgatttcaagattctcaaaagaaactgaagtccttatggaggttgcatgaaaatattattttctgtttgcaagaacttggttctttcggagctctgcaagtgagtttaatctatgtgggagcaacttacatgtttacttagctcgatgctcaatgtttggttggttatgaggatatttctttcctggatcttgctctcatattgcctaaataagctgtagtggctttttgcacctggcaacatgttgatatgaaaccactatacaattgtgcgtaacacaccccttgttacccgaatcactcaatttc

SEQ ID NO: 43709 - DNA, 470 bp, Oryza sativa
  unsure (1)..(470): unsure at all n locations
agctngcagaacagagtaaatgaaaaaatttacatcttcgaacaaaggcaacatatccatttgtgccaacaaacctccaagtcatcataattccggaaataatcatactgcccaggatgttgcctgcaaccaatgaccaatcgtaagttagaatatcacatagcgtgttagtacaatttaactaagggtaatgaggtacatgatgatacctttgacatatgtgacatgaatagtgttctcgggacatatgtgtgtaaagctcgttatctccataaaatgaacttctgcagaactcgcacataggatgtcctgcaaaaccactgcgctcaacctcagagccatccacctcagagtcaccagtttttacatgctgatttaactgtgtccttgtataaagcttctgttcacaaatgaacacctggccaacaacacatcaactagtcaaacaaactaccatcaagtctcagtta

SEQ ID NO: 43710 - DNA, 418 bp, Oryza sativa
ttgcttaagataccaatgcgagtgcatactcctggaagtggcattgtttcaactcactactgcccatctgtgacagttgatattcaagggtcgtattttccatccaacctcattcttctcgaatccaaggacctagacgtcatactttgtcacgtcctgataaattcatcccgaattaaaaatcattctctaaaaggaataatagaattaattaaaatctcgaaaagaaattggcatacactataatacgtacatgaaaaattatatgtgacccggagattcttgttaaattctccctggtctaaaaggagccctcaaattttagtggaattctcagagcacaaataataactgagaacaaatatacatatgtgaaacggtttataacaagacatatcctaaaaaaagtactctttcc

SEQ ID NO: 43711 - DNA, 437 bp, Oryza sativa
  unsure (1)..(437): unsure at all n locations
agctttggaaaacccgagctttgttctttgttttgtgaaaganaatgagttttaaatatataactcgcgacacaaggccattcttgggcggaatacttgtgcggtcgcatctaaggaccgattcctttggaattacatccgagcatacaatagtgcgaccacatgggtggaatgggacgcccctggctgagtaaatagctaatcaggggagccttgatgccaagagacatgtggattcaacggggtggtgtcggggagaacccccgggcttcctggcacagtatggtttgggacctaacctgttgttggtctgggacccctctcgttagcatatggcaatcctgtgtcagctttcgaaatgccttgtcatgaaagcctcaaagtctccagacgtggccgctctacacgggctggatgattccggttaacaatgtcgt

SEQ ID NO: 43712 - DNA, 450 bp, Oryza sativa
cttgaagaatagtgtgcagttcctgtagctctgttttctttgatctgtaagccttgaggtgacaaaattggagattccaatagagaggatgtgttgaacggtggctaaaacgtctgttgagtgcgagaaaagggattcaaactttgatgcgagttccatgctgccagtccagcgatcatgccagaaagaggttcgcgttccatccacaatatgcacagaagttaagctataaagctccggaagcaatttctgaaagacactccaatgttgacccaaaggaagagttttcattatagactttccatggaattctttccaaatccagttagcccatgtcgactcattcgagaacaggttgaataatcttttcagaagaagagcctcattttgtgatttatgcatttgattcaagcccaccttttcttttgtgacatacttcatccaaccact

SEQ ID NO: 43713 - DNA, 462 bp, Oryza sativa
  unsure (1)..(462): unsure at all n locations
agctngccatanaaagttcatttcctgtctttaacctangccttcctttatagcaatatggattgtttcttacctgaaagacataacaaaattactgaaaacacaaaaaataaatatgcatacagttcaggtgattccttatcatagagaaaaggtgtctccattatgttccatctttcattagttgaatacacctttcatgtatttttcctatacctcttgacgccactcctcgcttttaattgccttatcaatgacatcttcagtaggaataattttccatgtaggtatcacgttgctaagcttgcttaggattgttatcacaatgggacgaggcttcatatcttctacaatctgaatcgaagttaacatcaacaattatattacataatgatcaacttaatatcgtgtactaatacatatttccaacagtcaattcttgggaacatatcaagctgtgaa

SEQ ID NO: 43714 - DNA, 463 bp, Oryza sativa
  unsure (1)..(463): unsure at all n locations
tgaagacgacactgtagcatggagggcgaatatactttctgtcttgggctggctgaanacaaagcanagaataaaaagatgaggagctcggctgggccgacttgggctgcacagcacgcgcgcgaaggagagagatgttgggctgaaatcagcccaacggcttatgagaggatttaaaaactttttccaattaaaataatcactgaaatgatctttgaattgttaaaaatacttctaatgctcaaataatttcaagaaaagtcctgaaaatactggaacacccaaagtacttaaaaaaattataatcagaccatttaatgattaatttaatatgttgataattactgaaatgttctttgtatgattaaaattaggaattgagctccgaaaaatctgagaaaattctagagagtataattaaccatgggagaattaataaaaataaattcatccatgccttata

SEQ ID NO: 43715 - DNA, 426 bp, Oryza sativa
agcttcactcccttgacccatttatctgtattccatctccagtccctcccaaaacttgacccactaacacgcggaccccgcttgtcaatgaccatctataatattcctaaagaatattcaatatccaaattccaaaaatcattttcttttggtacagaaagtcacttaaccttccaaaaaccatatctcaatatccttagctccgattgacattgttccacttccagcaattctctaaaattctgacctatctaacaatactattaatagtaaaatatgatatttttcttgttcaattggtaagtatctaattttttgcgtgtagatgcattgctggaatttcgtccaagtgtggatttctcgaagattggtgaagctcaagaccttgagaaaatcaagcctaccttcaacatattgagcctatat

SEQ ID NO: 43716 - DNA, 393 bp, Oryza sativa
tcactcgctctatagcatttgaaacaatcatctattattttctgccaatgacacccaactctcctaatcaaccaatttatcttatgggccgattgatgaattccacaaatcccttcatgtacttctctcctagcaactttagattgatcattatctaagaacttcaacaatacaccacctatttgtcggcgatataatatttgaatgctttccgccgaatcttccgatcaaccttaagtgtaggatctttaaaatatctaatcaaaggaattctccaagctatgtctaactcatgggcacaaatgtccgaattcataattaattcggcctttaaatcaattgaaacgtgccccccaactctctgttcatgatcagtcataccggccatgcaat

SEQ ID NO: 43717 - DNA, 440 bp, Oryza sativa
  unsure (1)..(440): unsure at all n locations
agcttggaggctnggagcattcttttgtttccgngtttcttactcctctcatcaaggagtttttgctaaaactaaatgggctaggcccaatcaaatcttagtaaattttatgagcccataattaatgttaagtgattaataccaccttggaatccaacgtagagggacctcgatttaaataggctgctaatcgagagcacctgttgagcggttaattcctcattactctaaattttcgtgcacgggtacgcgctccccgaactctatcgactggattgctcttcctcgttactctagtaaaagacaagcgactggattgctggattgctcttcctcgttactctagtaacagacgatgacaagcgactggattgtgctcttcctattattctagccgaactctatcttcttcttcgtgcacggtactcgggacgagcact

SEQ ID NO: 43718 - DNA, 465 bp, Oryza sativa
  unsure (1)..(465): unsure at all n locations
ttcatgggatntcatggattacatctagagtataagacttttatgatgaggcgaagagcttgtggtgattctaccaagggaatggtagttacccatcatagttttcttgacagattaagcattggctctgctcctcagcaaacttggacggcctacaacttcatcatttataaccctgtcagttgtaaatcgttcaactatgattaactcagtggcagtagtatactccctccaattcatattataagtcgtttgattctttttattagttaaacttctttaaatttgatcatattcgtagaaaaatacagtaatatttgtaacccataacaaacatattatcgaaatatattcaatattaaatttagtgaaacaaatttagtgtcgtggatgttactaattnttnttcttggacgatattcatattcacgacagatagagattcgtgtactttgcaagtaaaaa

SEQ ID NO: 43719 - DNA, 441 bp, Oryza sativa
  unsure (1)..(441): unsure at all n locations
agcttattttgatttttcatagagattatcgtgcatatatacttctcaatttggtaagaacgttttatacgctgagagtaataacaagaaaatacagatttgccaaacacagcagagagatcggtctcaggtgtaagagcattcagcaccaacatttcaacttcgatcgtaagacaattntactgctgtatacgtacgaatcactagctacatgctacgatatcggaaccctttgaaattggtatgtttcaaggcatttaataagtatatatttcaaataatggaaatgatggtttatatgatccccgatctatgtcatatagcacacagccaagatattnggctaaataagaggcatttagctagctacatttagaaatatattatatatagcgttgctggtggttcctgtatgtatattatctatgaataaaatcatat

SEQ ID NO: 43720 - DNA, 468 bp, Oryza sativa
  unsure (1)..(468): unsure at all n locations
agctntgtgttagcaacagcaaagagattttttattcagatatcacatgacaagccacttcctggatctgcaatcttcacaattggaactcgagcactggtaatagcctgcatgaatctgacaggcattagaagatgaacagtctcaacctgcgtcaattaagaagctatttttcaaatacatcaattatgaagaatatatttttcccgggcctaattttttttccaccggggcatttatgaagaattacatgaggcaactagctcttcacattccagttccagattaattatgcagctaatattaaatttttcaagtaatgatgaatcattcaaatttggaagagatgcttgcttgcaaaattgcatatatctggagaagaattaattaattacctcaacattgtcgaaatcatccttgcgcaatgtctctgctaatgcgagaagaagctagcaatgttctcttctg

SEQ ID NO: 43721 - DNA, 424 bp, Oryza sativa
  unsure (1)..(424): unsure at all n locations
ggatatatcattgtgccctagtttgctccaacgtcatgttatgtcagagtttcttcatgaaaacactacacctgatacaaattaccttgtcccatctctcaaatctctcaaaaatttctcgtctggaatatcaggtaaatggctaactcgaacgctttctcatttgccatcgcttgatgactttgaattgcggaaatgtccacagataaaattcctgctaataagtcaatctacaggagaagcaaccagcagtttggcttcagcagagacaacctcagccagggatggtcagcttctgaaaatgccatgtaatctcctccgttctcttaagcggntatgtatttatgatngtccggacctggagttttgtggatgcaatggaggcttcggaggatatacatctcttgtggagctacagatatat

SEQ ID NO: 43722 - DNA, 457 bp, Oryza sativa
agcttgggtgggctctggcacgccatgttatgattctgatatgctcctctttatggccgccacaaccataacgattggaaatggtgccaaaataagcttctgggaattagcctggacgtaggggaggagattgaatgatgttgcgccgcttgtctacgtaacctccaaaaaaaagaacagaacgcttcaacatgcttcgcaagcgaaccaatggcttcttgacttggacctgccagggactacgggctagacgacagacctgattgatcaacttgtcaaggtttggagcgtcgttcaagctatacacctggtagagcacgaggaggacaatatatcatggaagcttactaaccacggcgagtacacggcagcatcggcatataacgcgcaacttctttggaccaccgctaccaacttcaacatgctaatctggaaagcctgggcgccgcgcaagtgc

SEQ ID NO: 43723 - DNA, 414 bp, Oryza sativa
  unsure (1)..(414): unsure at all n locations
cagtacatgtggatatgtntaacatgtacatctctatttatataatttagagactcgaaccaagtaaatcggagcttagataaattagatatgaatctttgaagattaaatcggattaaaacacttaaattgattttaattgaattatgacgcaataatgaattatttctgaaaaggaataggacgattattgcgtcacgggctatggtttctgtggaccgggcgcacgggcgactgctcacgcgaacggacggtcgatatcgacttgatccataacggacggtcgagatcgaacggtccacgaccggctcacagcatacggtcccgatgacgtcggcgatgacgtcaccaccggcggcggctgctcgggcttgcatgctcgccggcgaatgacggcacggcggcgcgaactga

SEQ ID NO: 43724 - DNA, 286 bp, Oryza sativa
  unsure (1)..(286): unsure at all n locations
agctntntatagttaatactnaanattcanatgataatatatcgctccgttttccgtgtgaagggttggggttcccggccctggaaagaacacagcctaattacttcctccgtttcacaatgtaagtcattctatcatttcccacattcatattgatgttcatgattctatatanatatattgtcagattcatacttacgtctcgacccattcacattattatgaacgtgggaaacactataatgatctgacattgtgatacggtaggtgtattctgtacacaccc

SEQ ID NO: 43725 - DNA, 396 bp, Oryza sativa
  unsure (1)..(396): unsure at all n locations
taattacaatggtagttatatagtgtcaacattttacttatttacaatggtagttaccacattgtatgctttagccatattgatggtgaaatatcgttgaactntntatattgtttgtcgaccttattgtcaacttattaatcatcgtataacggtgttgtgtggcagcgtgatgatgcaagggtgaaattataaggtcatcttcatacatagttaaatgtgggatgataccacagttcgttgtttccgacatgaattnttgacttccgaccgatatcggtagattcccgttccgacgattccgtttcagatataccgacattactgatatcgttactgtttccgagtagaccgttccgattccattttcgagaaaataaaatgaaaatggaaatg

SEQ ID NO: 43726 - DNA, 224 bp, Oryza sativa
  unsure (1)..(224): unsure at all n locations
ggggaaaagagagcaagacngagnaccaccgacagaacccagcaaggcacaccggaaaaggagggangacgcaggagacaaccaaacgaagccagggggcccgaggcanaaagcaggcangncaaagcagcagncgaaagcagaaaaacagccggagcaaacaaacaagacaaaccaagaaccggccaacgcgacaccacgnggcaacaggcccaaccaaccac

SEQ ID NO: 43727 - DNA, 302 bp, Oryza sativa
aaccaatgaacatcctggccgaacactgggaattgagaacgatgtgccccgaaagcatggacgtgtctcagaacagcgtaccaagacaggaaatgaaaagcctccaaggaagagatggatgctcgatcgaaggccgaacataagagttgaggttctgccaagaactacaagccagcactgaatgcaagggtggaagaaagggttaacaaggtcctcgccgacatggaaagaccccgtcacaacacctgcggtgcaaccaactcctcgtgcacaacacgacgcgagaccgacacagcatagga

SEQ ID NO: 43728 - DNA, 478 bp, Oryza sativa
  unsure (1)..(478): unsure at all n locations
ccggatcttaagtcacctgaggcatgcaacttacgcacttnatatttgattcttattaaangcccatgcatcgcagtgggtaaaaatatcttgtatcggtgtacagtttntaatcctagcccagcccttgcctccctctacttggcatgtatctctttaacccagcccacaagtggagatgtaggactagctcacatagttaattaccgtcttcaacctccgaaagatggctctacccgttcagtgccagaatggatccttcccatcaaatttagtcgaatctttctcgatcttcaaaattagttgagggtttttgatacactcgatctcctttttcctttctatcaaaattagagcgaatccgcaaaactcaagataaaaaccgggaattaaatctgagttgaaagggaaaatcatgatggataacgataagagaatactggggaatcgattctattatttaatggagaggaacaca

SEQ ID NO: 43729 - DNA, 426 bp, Oryza sativa
ctcagcttgtcacgagaaccacactccctcagaaatcatgctttatttactgttcaaagcccgtctcacagaggttgaggaagcggatgagcattgactgacgcaacgaacgtccatcctaatcatcccaccctctaattgatgagatacaatgaacataagatggtgtcatctgaccaagctcaacagagatgcctctctatgcatacagctaaaacaataatcccattaccattccttaattcatcaagtctcatgtctgatccacaattaaactatcatacctagtttccccaaaagcgaaaagaataatagatggataaacgatgttatgctgttcacaaacaccatcaccaaattttcatgcctacactttgcttgtgggtggtcatccatctcactttacaaggtctcccttttgcattt

SEQ ID NO: 43730 - DNA, 431 bp, Oryza sativa
agcttgtgtaccatgatgtttcagatcttcgctacatgcacacagacagtgcacctagaggttcgcgtttttgctatgtttaccctaatttctttattgcaaatttaggattaattctcatggcgagtttgaagtatgatctaccgctcctggaccgagacacaagattctcacattggcaagtgaagatgcgagccgttcttgcacaccaagacctcgatgatgcgctttctggatttgacaagaggacacaggattggtccaacgatgagaagaaaagggatcgtaaggctatgtcatatattcatcttcatctatctaataatattttgcaggaggtgcttaaagaggagacagccgctatgctgtggttgaagctggaacagatatgcatgaccaatgatctgaccagtaagatgcacctaaagcaa

SEQ ID NO: 43731 - DNA, 468 bp, Oryza sativa
agcttacagagctgcaagtatcttcctttttgttctgagtcgctcatatcgcagcctcacagtgattctgtcgctacatgtatgtatgagttggtttattgagtatttgagtttaacacagtaacggtaaaatgacaatatttattgtattttttcgcataaaaccgttgtacataaatatactgtattagacaatattcactgtagcaaatggtaaaccatatatactcagtagtcccttcgtttcgtgttataagatgtttaaattttttttaaagttaaattcttttacgtttgatcaagtttataaaaaaagtaacaatattttcaataccaaacaaactaactaaaatatatttaatgttatgtttaatgaactaatttggtattataaaagttgttatatttctcaataaacttagttaaactcacacaaaattaacttatgaaaaaaatcaacgtgattta

SEQ ID NO: 43732 - DNA, 459 bp, Oryza sativa
tcggatgtgcatcgactacaccgaccttaacaggcatgttctttgacccttaccccctgcctcgcatagatcatattgtcgactccacagcggtgtgcgacactttgtgttttctagatgcatactctggttaccatcatattcgcatggctagggaggatgaggaaaaaactgcattcattacccccatatgaacttattgttatacgacaatgcccttcgggttaaagaatgcaagtcctacttttcaacgtactactcgaatttctttgggtagccaaataagacgtaatgttgaggcttatgtcgatgacttggttgttaagacgcgcatccaagagaccttactctcggatctagcggaaacttttgagagtctccgctccgcccgcgtaaaactgaaccccgataagtgcgtgttcggtgtacctgcgggcaagcttctctggtttttggttc

SEQ ID NO: 43733 - DNA, 480 bp, Oryza sativa
  unsure (1)..(480): unsure at all n locations
agtcacctgcngcatcaagcttntgttgatcttgcaatgttttgtggtttgntgctgcttgtttcagtctaagcactcgtgcagagccggctatcccgttatctaaaaacaatatgcttccaccgtaaactctttgagatatgttttactattcacctctaaaaaaatataattattatttattttgacttatattttttattataataggtttttaagcatgacttatatttttttttatgtttgcacaaaatttttaataaaacgaatgattgaagatttcttaaaaagttaaagtgtatattaaaaaaagaaggttgtatccgccatacacatcacacgtgacatatccatcgaaaaaaggatataaaaatcagcaccgacgataaagccatatcatgcatgtgtacacactttaacttcgtcctctcataataccaaatcagtatgctaaaagaataactttcttgggccatcctg

SEQ ID NO: 43734 - DNA, 468 bp, Oryza sativa
  unsure (1)..(468): unsure at all n locations
actaagctaagatattgatgaaaacaagttataaaataatatataattacataaattgtttgaataaaacgaatggtcaaacgtttgtcaaaaagtcaacggcgtcatacattaaaatacggagggagtaagtttcagtatgtttcatacccgaatattgtactaccgacatattttcggttgaaaattaagcatgctctgaaagctgaaactcaaaaatttaaatcttntttgtaatgtgtgaaacccagtacattcttttctgcacatgcatgtcatgcaagcaatttcagtaccctagctaattttgtgtgttaggtgcaaaatcagaaaaaaaaagaggggtacaacgtatatatgatccattgttcctcttgagagtttnttacggtccaagaggtgatacctncaggtactggtactatcatgtaccaaacaaaaatcaagccattcattctatatggacac

SEQ ID NO: 43735 - DNA, 460 bp, Oryza sativa
  unsure (1)..(460): unsure at all n locations
agcttttaagtgattactatcagcacttatcactatatgattgtccataaatttactcattcatttatgtctttaactaatggactgtatttgatcatataaattcagnttctatccttgatttaaaaaagtaacattcagttgtaatctctcgagataattttcactcaatgattatttaacatcttttcatccggtgtaatatgaaattaatgcatagcatttcccatcgcaacgcgcgggcatgtaactagtatcatataaaatcgtactacctccatcctaaaatatagctatttttagctataaatctgaacacacaagtaagattcatagctatttttagctatgaatctgcagaagtatccagattcataactaagaatgctntatatttgggacggagggagtataaacttgccgatgggtattgtacacagtgtacagtacattgtacact

SEQ ID NO: 43736 - DNA, 461 bp, Oryza sativa
acttgccgtgacacgtctcatgtgttgggatgaggctcatgtgttgggcagtcgcggagtgcgggtaaagtgtacatccactgcagtgtgagtaaaccaaatctattcgaatagccgtgctcgcggttaatgagcaccgggacatgtattacacttggctagactctaaattctttaacttgagtgggatggaatattgcatgataattgttatgctgatggagccacttcctgagaggcgggaatgtggacgtcctcagaaaatcataacgactcaatggcgggaagctatccttgggatcacaatggatggtggacagaaccgtcattgtttaatatgaacaatggtattaaaacttgattagtctttgctaggtcttaagcttgtgaaaagaattacaaaacttgctttgcgcaaatgaaccatagccatcctttgaaatcctctgtcatgtgcatca

SEQ ID NO: 43737 - DNA, 448 bp, Oryza sativa
catccacatatcatcaatctaacatgcatcatttatggttctgttccattcacattcgacagtggaaactgattctatgtacgcctactaacttcataatcttcttatgttcataggcaacctgtccagctgttttcgataacagaggtacatggcgatgtggttatgtttgtagctttcttgggagttctgaacaaaccattggtaacacattatccaggtgattacatggcttgtcttcccacagaaatgacagttttgttgttaatgtgcaatacccgaattcttggaggatcattgtttccatttcatattgttcaaaagaaatgtgtttccatttcatcatctggtagactggtatgtcataatgctagtagcatgaaaagttcggatcatgtgatcacgaactgacagcttgcatgcatgtaaacgtagacgtctagttgga

SEQ ID NO: 43738 - DNA, 391 bp, Oryza sativa
catattaactggctctaacattggtgaaactgtgtgcattcctaaaatttctcttagcactacaaaattgaaatggccatttacattgcaaaggcgacaatttcctattcgaggttgctattcaatgactatcaataaaagtcaaggtcaaacattacagagagttggtgtgtatcttaagaaacctgtttttactcatggtcagttatatgttgccttctcaagggcaacttctcgatcaggcttacgaatattgattgaaaatgatgatggctcatgcggatcagaaacaaaaaacgtagtttaccatgaaattctggatgctacgctagaagcggtaaaatggtgcgtctttcttaacttctgcaaaatcccttcattgatatgcttg

SEQ ID NO: 43739 - DNA, 435 bp, Oryza sativa
  unsure (1)..(435): unsure at all n locations
agctntgaggcaggtcgatgctccatgcttctttggtgtggtaggcgccagtctgttgaaattaactaattttatttgttgaattcctttccaatgacgcagtttaattttcaggttctcatgtacaagcgacacagtactcgacattatgctaatgcttcagttggaacaacagccgaggtgttgtacattttctctgctgtgcttcaagttagaatttgtttatcagttagtcattttcaccgattcttcatgtggtttggttgttttctgtgctgccaattgagcttttccgtagccagttccatcatccttgggtgatttgttattatttctacaggacacataagttaccctctcgtcacattttgtaattaagatgatctgcttaataaataaaaacatgagggagttaatntatatcattcaagaatc

SEQ ID NO: 43740 - DNA, 385 bp, Oryza sativa
gagcttgacgccctctgtccttaccagtgctcccttactcttcggccctcaaccgcgcgcgccgcgccttctaccgtccgccatcgctgtcgttgtctaccaccagctgcgccatcgttgttgtccaccatcagccacccgtcgttgttctcaccaccaagtgctgaaagaagatttgtggaagaaagggtggatcggatgtggaggagctcacatgcaaatatgttgccactctggatggccacataagctagtcaacccggtcagagatcctttagacctcaatgagtcacttaaacaagaccgcggatcctaatggcgtattttcaagatcatggacctaagtgacacctcgcttcaactttaatgaccgaccgtgtacttt

SEQ ID NO: 43741 - DNA, 454 bp, Oryza sativa
  unsure (1)..(454): unsure at all n locations
agcttgagacatcgactctgttggacgttataaagcattccgcanatgagcatgaatgtggttccttcataattccccaggattcatgctcacataagatatacccagagtcctgttcgattagtaccacttccctatgtgaggaccacaaccacctttcggtcatcatttctaacatgtatagaggtgtggttgtagacgctcatatttatcataaatactgcacatctcgtatttgtttgtggcactaatcttgcagagcaatgtccctaaggtcgagcttgtgacaataaacaaagcactgctaggagataccccggattatcatggtaagctttctgtcacaccccaatccggcaccgccgtacaacagcacctgactggagcgtgtcgtaagaataacggcgcgaaccgcttcctacgaaaccgcgatctcagtaccagtcccaggaca

SEQ ID NO: 43742 - DNA, 464 bp, Oryza sativa
  unsure (1)..(464): unsure at all n locations
tcattngaactcacctgcatgatacagatagcaccatggcggctaatgtctacgccttcacaatcatatccaatcaccagtttctgggcagcagatggttcaagaaactcaactgggagtcgaccatgtttagtatcaaccatcatgggcaggggaggggatagcagctctgaatcattaccagaagaactcactcagttaggacaaggtaagcaagctagtttctcttaatcggtacatcttaaccaaaagaaccatataataagaggaaatagaactgaaataattcttttcatgagttgaaagactccaatcagtacagggcatgctagaaaatggttaatatcatgctagatgatgacacgcctcaatttacatggtgaacaaaagctaataaaagtggataatactgaatatcatgaccctttgatgttatggttacagtccanatccgggactgaact

SEQ ID NO: 43743 - DNA, 461 bp, Oryza sativa
  unsure (1)..(461): unsure at all n locations
agcttgagtatgtgtaatatttctgctgtctctacctagtagnngataggagcgtgcatattcttgtgtatgtttcttgtttgctactaaccatggcaggattacacaaggggaaacgaaatggtcatgctcaacctcgacttcttcaccatcaacgagatatagcgacttcttcacgcattgcatatgaggtacatgataatgatcttgcaatggtagaatctaaattgccagtttttgatggtaagtatgattccgccgcttatgttaattgggagctagcagtaaacaaaccaattgatgagtatgatttctctaatgctcaaatgattaaggttgctagtaataaatgtaccggntctgcatctttntggtggtacattgttggcaacaagcctgaaacttgggatgaatgcaaaacaatgatgaggaaaaattttgtgttttcatattataaacgt

SEQ ID NO: 43744 - DNA, 424 bp, Oryza sativa
tatctcttatgctccaggaatggatcagtcagatcatctccaccggcttgccgtcgtcaccgacgactggtgtcttcgcctatactgttggttggtcacaccaccgttattatgtgtctacatcttcaccgccggcttgccttctccggcgtctactggtgtcaccgtctgcacggctagcctattatgccaccgtttgtgggcatctacgttttcaacgaccggcttgccttcatcgccgccgactaatgtcttcgcttgcacggctggcctattataccgccgttgttgggcgtctacgtcttcaccgaccggcttgccttcgtcgccgccgactggtgtgttcgcctatacggttggttggtcacaccaccgttgttgggcgtctacttctttaacgccggttatacttcgccgcaacgac

SEQ ID NO: 43745 - DNA, 328 bp, Oryza sativa
  unsure (1)..(328): unsure at all n locations
tgctccattngcgatcatgtaaaaaatgaattaagagcaagcatactataccatgtagatgcacagttcgaccaagaaaggggaaacaactttaacttatacaaatcatcgctactggccttaccacattgatcaataaatcggccgatatgctccattgttgttctagcatcctcatctgagaatttcatgaagttgggcacctcaaatccttgcgggtatgggaccgactctatgtgttcaagatacggcctttgatatgtatgcataactattttaaattctatctcactactatcccgccagacattatatcatctctttccac

SEQ ID NO: 43746 - DNA, 387 bp, Oryza sativa
  unsure (1)..(387): unsure at all n locations
tgcggcatgtggagacatgatcgccacattgtcctgatgttgatgacatgatttgtggaaggacaaataaaattaaacaactgttttcgactgatgcggacggaggatttgggtggtatccggaaaaggctagcaccgtccccggtcaattaaagaccgagccatgatgttaagcatgaaacgacccccgtacaaccgcacttctcatatgggtatagacctagcggaatagatagctgagcggaggcagtatccatgcatagtggtttcttgatgtgtgaggcangggctctaccgtggggtagccattggtatgaccgcgaggcgggtgtcgccatcggtaagactgccatgtgagaatctanacatatatataacctaatgcat

SEQ ID NO: 43747 - DNA, 410 bp, Oryza sativa
  unsure (1)..(410): unsure at all n locations
tgtattaccacactttcacgtcatgattgtgtgaccgcagtagcaattcattntcacactactaccatcatttgatatttccagtgaaataaagaatttatccctttgcctttgtcttccaaacttcacttttgttgtgcactcttgaaacagaattagatcttcatgatgttgcgcagaaaattccagttcaattactcatgagttcattcttagggacatagcacatattgtgtctatgaaggtagaaagtattcagttaattctattagtccgcaaatgatattcttttattatttatatccatagcagactgaaggaatcaatgctgcagcagctggtgttgcagatgagggtatgatgcccatggaaactataatccaagcagataaagctacccatctctctct

SEQ ID NO: 43748 - DNA, 461 bp, Oryza sativa
ttatattgataacatcgccctttctcctcatccgagctatacgacaaacgatgttaaagcgagactgcaacacaccgaatgctcgctcaacatccttccttgttccttcttcacgagctgcatataatttatgttcgtctgtttgaggaagctgtattgtcttcacgaatgtcgcccactctggataaattccatcagcaagatagtaccatgtgttatattggttcccatttacactaaactgtacacgaggagcttcccctctcaatgcttcaatgaacaagggtgacttgtttaacacattgatgtcattattggatcctgcagtagcaaaaaaatcatgccatatgcgaaggtctttcgatgctaccgcttcaagaatcatggtaggaactcccttgtcaccacgagtaaattggccacaccatgagaccgggcaattttccatgcccaatcataca

SEQ ID NO: 43749 - DNA, 428 bp, Oryza sativa
gtatttgccaccgtggttggtcatgttctacgagagagatggaagaaaaggtggatggcgagcaccatgagtccatgatgcaaatatataccatctctatacttgtcattcttcaagcatggctgtattttctctgtagtaataatcttatggaggtaacactggtttcgaagttacaaaaaggtatgcaaataagatgaagtctgctggtagttagatcatttagatatgtttgctcaaaaagagggtcatcggaaacaatataaaagaggttatttaataaaaatgtcctagagctgaaactagaaccggctgtcaagtaagaattggccttatactagaccatgactgatcttgttctataccacaatcacatcctttatccacgagaaacattccacctaatgtcatcacaaatgaataattta

SEQ ID NO: 43750 - DNA, 466 bp, Oryza sativa
  unsure (1)..(466): unsure at all n locations
agcttgacacctttatatttacttgctgtacatttttctgtgattgaatgctngtgcaagcatgtgctgctccatgttagaatgtctgcatacatctttttttcttgcaaaattaactgtaactttaaatattttttcatgtaatttttttcagtttcttcatatatgtaagttttgtactgttactgcagtcaagaagctgttaatattgatggagttcactacaaattctcatcttttggttcttcattcaaacaaggtggagaattatcaaattttgtaatgtctgtgttctgtcgatatatgtttaaatcgattcatccttcaaaatccaaaagacactatttcttctcttcaattgnggtaagtgtgtgtaatttttaatnnttttattaaatacaactctgctacttgcaaattgagtattgtattttttatttcagaatgatcttatgaaacacccttc

SEQ ID NO: 43751 - DNA, 404 bp, Oryza sativa
  unsure (1)..(404): unsure at all n locations
cttactacctataggtacgtaccatattttacatacagagaattgctacagtccaacaaaaaataactcatggtactcacggtatcaaatcgttttcgatcgttagatataacgatattcatcctgtctagctaaatctaacgatctaaaatgatttgataccatgagataacgatgcctcgagctattgttattagactgaagtaaatctcatagaanatatggtacctctgcataccttcttaaggatagtaaattacccatataataaagatgggattaagtgcccgcacgtagcgtatatggtccataacacaattaagtgcggcgtgcattatatgtgtactggtcgaatggaatatgcatgcacataaaggagtacttgtgtcgctcaattaatttgc

SEQ ID NO: 43752 - DNA, 293 bp, Oryza sativa
  unsure (1)..(293): unsure at all n locations
gctacccctattgactttctcttttttataccaattagatccacctccaaaatgcaaatgtcgtcttattcaaaacctcaatcatcacatcccctctctcccacttcacacctgggaacgcactgntcttatatagagaaaggggctttcccatcttcttaacacgaaatgaaatggctgacgagaaggatggcccttttggggggtacccccgggaaaaaaatcattggagaccgggggggcccgtatctcaaaggattaaaacacgtggctacgaaccaccgtggtggggg

SEQ ID NO: 43753 - DNA, 471 bp, Oryza sativa
  unsure (1)..(471): unsure at all n locations
tcgatanatacggatatacccattacgtcgatactcattgttccttggtagagaaagaccgtttccacattanatacaacaaatactagcgcaaacatgttattagcgtattcggaattgttaccataccccccccatgggttctatacccgattcataactagaaagcttctctggtccttcacgaaccggagctaaaagtgctgaaatccaaaatgctaatataggaataaggcttgctattattagaaatgcccaaaaaatatcatattcgtgaagcagaaacataaatgtactcccattaatgtggaatatgcggaactgaattagtcaattcaagtcagcattgtcaatttatacagaatgtctctcttttcctcggtgaaacaaggatcggtttttctcataccaataggcttagtttaacctttgtttcctctttgacacgtcttctttaaagattcatccaat

SEQ ID NO: 43754 - DNA, 462 bp, Oryza sativa
  unsure (1)..(462): unsure at all n locations
gacctaagcaccgagctgcactgccacattggcagagctgttgcttgtgtgtaaatacgngcaaacattgcttgtggttcaaagttaacattttacttttttttcatcctgagttatcttttccctcatcacctataaatagctctcctttgttgagaaagaccaccagagagagaaatttgctagtgatcaacagctgacttgtttgcctctgccatggagaagaattgtgcatgcccaccaccaagcaagggaaacatgatcacaattctgagtattgatggaggtggggtgaagggtatcattcctgctgtcatcctctcattcctggaatctaaacttcaggtccatcctatatttcttaatttcttcccatgtataattgtgtatagcttattgatcagtacgcttgggtaaattatgttaatggaattcataacctctcttagtaacatcttctca

SEQ ID NO: 43755 - DNA, 432 bp, Oryza sativa
  unsure (1)..(432): unsure at all n locations
ttatatatctcaatttcataagaacagngaacctgcaagtatatctcagcattagagatattctaagagcagattttaaatgctaatgtacatcaactgcttcctccgttccaaaatatagttattttcaggattcagatatatcccaaatgtagctatttctagatgtttttttaccccaaccagccaccctactctccacaagtcctccatgcattaatgaaggacattatgatcctttcaccctcgttcctggctgagttctttcccatagttaccaactcatcttcctcgtttttcgtgttctcggcgtgtacgcttttcaactattaaacggtgcgtgttttgcaaaagttctataggaaagttgctttaaaaaattatattaatcaatctgtcacgtttgtgtagttaatacgtaattaattatat

SEQ ID NO: 43756 - DNA, 451 bp, Oryza sativa
  unsure (1)..(451): unsure at all n locations
agctctgcaagccaaaatggctactgtgtttggggcaagagagaacagtttggatgcctgcacagaacaaaacgaacagcaacataagcaaggcctgagaatcatcagtctgcagcagctagatctcatccattatgttgtaggaaaggctagcgtatagatgtcaagtcaatttgctggaaaaaggccagcagctgccgacaatacttggatatgcattgctagcgagtccatcctattggcggcccgtgaaacgtgcacggcacttatgctggactgtcaaatggaatggacaaggtgggacatactcacgatttctcatgtgtgtaagagagaagaaatcataggatcacatggaggggacacaaaaggatatacaagagtagttctcattgactgggcagagntagagatatcagatattcagatgcacatatacatacacaaaata

SEQ ID NO: 43757 - DNA, 275 bp, Oryza sativa
acttgctgaccaaattcgtcgagaaaccgaaaagataaacattttaatactattctttacttattatgctttactcgtcctgtcatttttttagctgtaccatccagatgctcccccgaccacggtggcagcaaatctgcagactgcaacacacacaccacaggggccatggcacgagttaattcccgttcggcgagtgctcttggattttgtccgctacgggcacaaataatctattggtgcactgccgtgccgtgcactgcttgggcccatgg

SEQ ID NO: 43758 - DNA, 461 bp, Oryza sativa
  unsure (1)..(461): unsure at all n locations
agcttgtggcgccgcggagaggcaatggttgcggnttcaagctcgataggcttgtgagtggtcatgactcatgacatccgcgcgcggcggagctcggtgccatgaagcgcgtgttggaggacacggagtagtaattcagcggcgcatgctgcccttgccggtgcatccatccatccgctctgtctctgtctctctctctttctcttgatactcgatagcatttggtgaactgtctccctaattacagccagttttgcctgattcaactgggattgttttgttttgttgcgtgcagtgatgatcttgcttctccatgagtaaatatcaaagcctcgaaggtgggatctgatttggatgcacttaatgtcagtaatatccagtttccctgcagtatgtactgttgtttgctggtgaaaattcgtaatttatcgtgacacactaatgtgtttctgctgatttga

SEQ ID NO: 43759 - DNA, 450 bp, Oryza sativa
  unsure (1)..(450): unsure at all n locations
tagtacagtaggttaatttctgtaatgtttgcagatcttctacaaacaaggtatgcttgttgtgtgtatatagatngatccccatcgatgttgcttgctctgaataaaaggatgatgtgattaggagacaaggaggcacaggtgtgacgctatcaagtagttgggctaccattntaacgattgtgtgttgatgggcttgttttgttgacgaacaaatcggcaagcctcagaatttgaataaactcgcacaaaaacgtgacgtgcgcgcggtggatgtgcccgtggcatggcattcaacagatgacgctacttgtttcatcatgtggagaggaaaccgactaaaatagtatatgacccgcgcagattgtgcggctagcatcgttatatttttctcatattatagcatatataatttaacattgttaaatggcaatataattttaaactttt

SEQ ID NO: 43760 - DNA, 429 bp, Oryza sativa
  unsure (1)..(429): unsure at all n locations
agcttcggatgtgcatctactacaccgttcttaacaaggcatgtcctaaggatccttaccccctgcctcgcatagatcagattgtcgactccactgcggggtgcgaccttttgtgttttctagatgcatactctggttaccatcagattcgcatggctagggaggatgaggaaaaaactgcgttcattacccccataggaacctattgttatacgacaatgcccttcgggttaaagaatgcaggtcctacttttcaacgtactactcgaatttctttgggtaaccaattangacgtaatgttgaggcttatgtcgatgacttggttgtaaagacgcgcaaccaggaaatgttactctcagatctagcggaaacttttgagagtctccgctccgcccgcataaaactaaaccccgataagtgtgtgttcg

SEQ ID NO: 43761 - DNA, 413 bp, Oryza sativa
tctcgtacttgccttaccatgaacccggtttgtccgaccccgccccggcgatcccaactattggcatgcgaagtttccctgaaccgactatttacttagccagtgtgtcccattccaccttgaggttgcactttgattatgttcgatgagtttcctacaggaatcggtccttatatgcgaatacgggacagtgccacatatgcacaacccccgcatcgcgagttttcacaattcattttattttcaaacacaccgacaccacatgtcgggttttgaaggcttcacaaacccatttcccatgttttgacaacaacggtgtatgtgggatattggatacgcgctctagaacacaatccgtgtacccagtggggacgacatgaacatgtagtcgacctaggaattatgcgactact

SEQ ID NO: 43762 - DNA, 442 bp, Oryza sativa
  unsure (1)..(442): unsure at all n locations
agcttgcctcatgaagtcccctggggcttatgatgtggactagaacgctcttgccaagtacacccaatgcttcagtggtgcagatattacagaaatctgtcagcgtgcatgcaaatatgcgattagagagaacatcgagaaggtattttcatctaaccttgcaaatagcacaattnttattcatgtgcagctcatccgtattacaacaaactaaatgtaaggacgtttctggctttcagtattacacgaggctatgttatgttctatgttcatgactactttngtttaagatcagccactcctagaattgcagttgtctatatgagattatgcccatgttccctttgtattatatatatatatatacttatatatagnngggcctgatttgttacaaatttatctgtgtaagcactcttattcagaatgcattgattgatat

SEQ ID NO: 43763 - DNA, 404 bp, Oryza sativa
  unsure (1)..(404): unsure at all n locations
ctgcatggatcgggatcttcntaatatcacacactaatgattagtatctatcaagtaactactatagatcgaagggagtactttttcacagtaaagattcaatagccactacacataaatgagtcgccacttcattagtagtttggctcctagctagtgttaattgtacttgcttgatgtaattgtatgtaaacagcattttttttgttcgcgctagatgatagagctatcttatacgtaagtgcttgaagatataacaactatttctctttaataattgatttatctatctcatatcatactaaaattgtgagataattccataattaagaacacatcctatgttggacatatagtcataattcgggatatgttaatccaaattacacgataataacatgata

SEQ ID NO: 43764 - DNA, 468 bp, Oryza sativa
  unsure (1)..(468): unsure at all n locations
agcttgcttcttatgtggctcagaaaccttcgtttttggaaccaggtaatgttggctaccatgtggtgttcagcaatacccaagctagtagtgatcagtgggatgaagttgaaagcattagaagctctatggtagagatggacctgcaaaagctgcctgcatggacttgtgttgctgagactggtagcccttgatttgtatattccatctcttcccanaacttatgttgatttggtcagaaaatgaccaaaagatttgtggaagttgctgtatgactatattggactgaactgtatcaactgttgatctttcagggtgtgagattgaagtttctattgatgggccctgtagccagtgcactgttctttggagccgatcacctcgtgaccgccgctgtcaatgggggttggtcgtggcaggcagagttcanctgcttgctcgagggtcaaatcggtcggattggatggg

SEQ ID NO: 43765 - DNA, 445 bp, Oryza sativa
cccgcatgagctcctactgtggatcgcatgagtccgtggtgccgccgccgcgttattccggagggaaatactatgtaaccgcgtccgtgtcgccaccggccgccggacctcctcccacctcgctccagtgaccttctccccacccgccagccggattgcccggagaagagaataagctatagagagagagaggaggaatgaaggggagggggaaaagagagggtgctgaatcctaacatgtggggctcacgtgggtcccacgctgactcagctgccacgtcggataaaaccggggtcaaaaccatttaaggacactaagtgaacggtcttgtaagttgagagatgtcatatatatgggtttatggttagggacgattttgtaactcgatgacaaggttgaggaacttcggtgtacttctttcacaataatatatcccccatggca

SEQ ID NO: 43766 - DNA, 462 bp, Oryza sativa
  unsure (1)..(462): unsure at all n locations
agctntanggactgnccatttattggatctcatggttgctagcagctatatcctcctccatgttcacatcccattgagactgtcccatgtcagctaaaatagtggcataaaatcctcttgccatgaaccgaaacacctacaattctaaatagtgaggtgctgatgtgctatagaatntcttctaactgatttatgtgttgttattgcagattgtccttatccaagcacatgctgaaaaatctaaagtcaaagtaagaattcatttaaatctccagagactcatttcagtggattatctactgtggtaactcccgtagtcacaggcaactcatttagctaaatgtgttgtaatttatataaaattcttactttaaaactgtctcaggtgatagacgatgatcaaagggatgcagctctgctgactatgaagattgattctaaagaggaaatggaaaggaatat

SEQ ID NO: 43767 - DNA, 373 bp, Oryza sativa
gatgtcgagttcgactactccaatctcgccccagttggtctctcccactgacgatgaactcctacatgcgcatgccaacctgtggcgccacagactctactacctcacctccatggcgctccggtgcgccgtcaagctcggcatccccacagtcatccaccgcctcggcggcaacgccacgcttcccgcccttatcactgcactgtcccttccgccggccaaacttccattcctccgtcgcctcatgcggctccttgtcagctccggcgttttcaccaccgagaggggcggcgcggccgctgatgcggatgcggtatacggtcttgcgccgctctcccttcttctcgtcgacggcgcgttcactggtagcgag

SEQ ID NO: 43768 - DNA, 427 bp, Oryza sativa
  unsure (1)..(427): unsure at all n locations
agcttgtatgattcatggagtaccatctattagtgtgtattgtcatgtttaaagggtctctaataagataatagagttcttgtacatactaatttcatgcgctccatatggaattccatgacgctaccaacatacttgagcatgaaacaagctcatctacaaaagcagataagtccacctaagataatcatgagataagtagtgacaggaaaaatcaagtgcccatcttgcttgtttgagaagtgaggaactgattctacctccgccggtgggatgtgtgggtatgcacccccaccattgaggtttcgagttctttttgactttggacttgggtgcctttattttagttattgaaattatatttaattcttcctatgcattctcacttgctagttcgagaaataaaacattntagttgataatctta

SEQ ID NO: 43769 - DNA, 435 bp, Oryza sativa
ttgcagcgcattggcagtacggcagatcgattaaacccatcgaccgtttggaatcctaaagggcatgcatggtcgacggctcatgataaccaaaggttactagctgaacaatcctacccgtcactgcctttatcacgcttaaaaaaatataaaaaccaaaacgtgcctgttcttatagctatactatgaacgatcaaccaatgcaacgtaagtgcacgcacgctagcttactgctactaaccacatgcatgctgcatgcatgccagaatcactatattcactgccgtgccgatgataatacatcaactaacccttcgtgacatgtggttaggccaaaagagacaacccctgatccaatcgatcctccctctccgaaaccgtgcgcgaaacgacacgcgcgcatacatgcacatcaacgcgcggctcgcgagcact

SEQ ID NO: 43770 - DNA, 450 bp, Oryza sativa
  unsure (1)..(450): unsure at all n locations
agcttgttcatatctacacaaatatatgttntgctacatatttctcactagtgcatagattaagttgttttctctatggggcaggggatgtggattggctcgtatctgtacggctgtactctggttgtctgtactccgagtgttttctcttttgctgaatgactcatggtgtaaccgatgcaacagtccaacttctactccttccgttntaaaataaattaatttaagttgtattttatactatagacttatgaattactaccttactaattatttggtagcatcaaaactaagataagttntggcactaccaattctttggtagaattttattgtattggttatatttgatttgctaccaatatgaaactaacatgtgaattatagtgtagaatgctctagattgatgtcaaatttaacatgagcattaccaataaattgacttcaatc

SEQ ID NO: 43771 - DNA, 372 bp, Oryza sativa
  unsure (1)..(372): unsure at all n locations
tcttggacttcttntattgggaattctgatgtgccttatggtatctactcgtgccagttagttgcaactatccctgccaatctttactaccttcgttntatattataagctatgttgactttnttccaagtcaaactattttaactttcaccaacaaaactaacttggtgctataaatcttattatatttttctataaacttgggtaaactttcaaaaagtttgactttaaaaaagtcaaaacgacttacaagagtgtgatgatagtttgatacatttgcttattgtgagcatcctatgttactttcatcctgatctgtaccgctcattctaacttgtagaaatgatcagttgtcttgatccaagaactaca

SEQ ID NO: 43772 - DNA, 430 bp, Oryza sativa
agcttgtgcgagaacaactattttttttttcatgtataacggcatacaacctaattgtttgcttattggcttacaagcggcaactaaaaattgaattctttcatatactcgaattttactctactcttaacgctttataagccaaggcccaaggttacaaggtattgtagtgcaaatctccacacatggcttcttcaacctttatgctctttctcacaatgaataatgtattagaaaggactattacaacgtaaatttgttcggtgcctctggcgaattcaaatttacagctaggtgagctcaaaactgatattatctgcaatatcacctacttttccccctcatgtttttgtctcgtaaaacagtctaaagttccaaatcacatggttcggtatttattcgcgttttcatcgatttgatacatctaaat

SEQ ID NO: 43773 - DNA, 429 bp, Oryza sativa
ctcagcttttcaccattatcgacgagaatgtcacactatgtgaactcggatatgtttggtcgcagcaagctggattaatagctacccacatactcctgacagaatccttgggtaaatttacagtataaacgttcttttatttttgtttgattgctgcatttgctttcttgcagtgtgctaagactctcgctaccctttgttgctattgcaggaaccaatatataagctcgacctcatatgtggagtggaggaacctcaataccactactggagatgcttccatgctatcttcttggcaagcacccatggcactgcgctcaatactaaatcgtgaggcatccacatcaccggactcttaacgcacactcttctttgctaattctgggactcacaacctggtcgacttaatgaatctaactctagcccatc

SEQ ID NO: 43774 - DNA, 459 bp, Oryza sativa
agcttatctatgcaaatagtattccctcttctcacgaaatgtttaggacaaaattttggtcaaacttttgaggttttggaactttttaaaagaaaaaaaaagtatgcgatgtgtttattctagtattaaatttatggtcagattttaaaagttcgatcaaatattgttccaaatatcaaatatttatgaccaaaaggagtattaatggagctatatagctgctctgttggtttttgcattgcaactgaggagcccatttcatgttttaccgacaggggggctgcactctatcaaaaaaaacagggggctgcacaacatgtcacctggtggtaaggagatccgccatgtccgacagcgacagcgctttccggagaggcggaagcgtcagcggcgcaacgtcctggctgctgctgctgctacaggaaggaacgcaaagaggatgggaagatgagttctcgt

SEQ ID NO: 43775 - DNA, 461 bp, Oryza sativa
  unsure (1)..(461): unsure at all n locations
tatatgcaactgaattgctattaaaagagaatataactaatgcgacaaaccggagccatctaaacaaactcgagattagatactattgccaagccgtactgtagcgcgtacgaatcacgccattcatgctgccgttgcgcgatctgattgatcgccctcatcacgcgccgccgttcccgtgcataccgcattcatacgcctccgatgatatccaattctgaccatgataccttaaccttaaactctgctaaaaaaaacctagcatacttatatattttcgaactgaaggagtatttgttaagtttatttctcaaaatattaatttaccgtgttaatcaagtagatcattcatttcatttcacccgtgtggtatcactttcagatggggccctattgtgacaaaactatatgtttaagacacaataccacanagctagtatctatgtagcattgaatttata

SEQ ID NO: 43776 - DNA, 352 bp, Oryza sativa
catctactaaccattgtgcatactagtccatatggtataaaataacaaaaagatacccatatgcatatggactacccatatggaataaactatattatctatctctactcctctctcttcttctattgataccttgtatctatatacactgtggagattgctataaggaaaaacaatttatataggtctcatctatatggatcactctgacatatacattggtgatgctctaacccatcttgtcgagagaggtagttttcctctctcttctttataagaacgagaattgaatggaacgctgaagagcccaatagatgaatgatagaactggcattgtcattcgcgatcatat

SEQ ID NO: 43777 - DNA, 295 bp, Oryza sativa
taacttgaatgaatcctcagaaccctagtacgctcatgttaggttctgagatacgaaggctcatccgtccagaatctcaataaattctaggcccctgcacttatggacttgagcgggatacgagatggaagaaccggtgatggaataagtggcacgcaaagccaatactaagatctctaactgctcaaacagcaaaatatgctccaattccagtgggtgtgcaaaaaataattttcttatggaccatctgacactggccaataaacgctggacagttgcaagcctatggagaaag

SEQ ID NO: 43778 - DNA, 457 bp, Oryza sativa
  unsure (1)..(457): unsure at all n locations
agcttaacctcttgcctatctttactactctcaattctatacttttcagtcatcttttcaatgttgagcttagttgactcatgcattttcaaaataaattcagcgcgtgccttatcatcattatgaaccctctcactagtaggtaaagacaaaatatcaattggagcacgagggttgaaaccatacactacctgaaaaggacttaccttggtagtagaatgtgttgcccgattgtatgcaaactccacatgaggcaaacattcttcccacatcttcaaatttttcttcaaaatagccctcaacatggtacccaaagtgcgggtgactacctccgtttgtccatctgtttgtgggtgacatagtgtagaaaacaatagctttgtacccaactttgtccatagcgtgcgctagaaatgacttaagaattntgcatcacgatctggaacaatagtagaag

SEQ ID NO: 43779 - DNA, 395 bp, Oryza sativa
tcaaccggttcatagattctgcattctgttgtattgatcttcgcttctttatatgaagatgaaattaattgtgatattctcaaacgatagttgttttttctctgtgcagttctgtgatgtacgataatgtcaaaaataattccatcttattatttcgttctttcatttattctgtaaataagagcgatatatttcattcttcagtgtggcaaagatggtgtatacaccacataatgaacattgcaatttcagtataacaattattcgtgccttggcaatgtttttttttctttcaaatcttgcaaagatatatacacacagtctatgattcgtagtgaaatgaggggccccgtgatgatcagatgtctctcatcattgaacttacaattagtatt

SEQ ID NO: 43780 - DNA, 62 bp, Oryza sativa
taaaaccagcttatgcataaggcatcgccttttccctaatagttggcatgacagcgacatcc

SEQ ID NO: 43781 - DNA, 442 bp, Oryza sativa
  unsure (1)..(442): unsure at all n locations
ataatttcctattagttagtttatgcgaggtcattatctaaaaaaaacgtcaatgcgatgttacctgccgctgagcacgagtaattnttgtgtactattgctctgattgattacagatagaaaaacataaggctaattggatcgattaaacatgagcagcttgtataagttgttaatcttgcggagagcctacgtatgcttggngatatagtaagtgacattgccagtgtgccgcagcaagttcggctgctatgctcgctagggtagctagcaagaaagtgtgacacccgaactcccaagcaaggtatattcatttttcgtgctacatatcacttatttcactataattcgctggacatgcaatgcgctgttcttttttgaatgtacattggacacatatgatcttgtgctgatcttaataatgttgaactaattgtttgat

SEQ ID NO: 43782 - DNA, 362 bp, Oryza sativa
  unsure (1)..(362): unsure at all n locations
ctaggtgagtcaacctcaccaactctcgagccgcgaccttttttacagccctactttcaagggctaacgactattctctccatgtagcgcctttatacttcctagaccggctattgttccaatagtgaagaaacaatctttaacaccggttgaaaacccccctttagtacctgtattagcaaccgtgacaagtaaatcgggactaaagatctcgatcttcttactggaccgactntggttacactagtgaacaaatgatatttaacaccagatggacaccccgttagtaccgattgtacaaccatgacaagcaaaacgactttggcttcactcatatagaaatgatctttaacacgggctgg

SEQ ID NO: 43783 - DNA, 361 bp, Oryza sativa
  unsure (1)..(361): unsure at all n locations
gaacataactgcagtagtgctcaattcaagccaacaggtccattgatggcatgacattttggtcaacacggcgtgatggatttacaaaaattgaaggtccagtgaattcaacggaactttctagaacacttgtgtgatccatgtctgcatcaagtccgatctatggccgcttctctgatttatcacatattgttcttggactctctgttacctaataagtggtgcgcaagttaggggtttgtacaatccgctattttttttgatagtgtagtaactttctactatatctacatgactcgctagagttgttcagtgtattcctagcttgatcaanagatatctctgtaatatgcactgatat

SEQ ID NO: 43784 - DNA, 426 bp, Oryza sativa
gagctaggctttcgctcagggtccttgataaagattgaacccctgattacggaagtacgctagaatgtcatcatgctggtgctgcatcatgttagtgatgttggagaactgagcatcagcagactgttgccattcttgcgtttgagctatgtcttctgtgaagctgtattgaatctcccccgtctgcacatgaagggtgtccattctcctagtgatttcacccaagtcccaacgagaggaacttgagcgccattcacttggagatggaggcacaccacttgatctggaaggttgtgtgtccctccagcggatgtcatgaggcgcatgccaccggtcctcactggcgcttagccatattgagactgcccagttggtgcttgggtccattcgggtgcatacctagttggtgccaacctgcctcataca

SEQ ID NO: 43785 - DNA, 436 bp, Oryza sativa
  unsure (1)..(436): unsure at all n locations
aaaatctcagctgctgagagcgttcgaccgacaccgntaatggttctgtcgatcgaagttctggtactatgctcacggtggaacgatcaacccaggtgatggctccttggtcttcagcgatcagatactcgaggctgctcgtcaacttaccgacgcagtggaagcctcttctcatggcacgtttcgacccgacagagagaaggacgagctgtcactcgccctgctgactccaaagcatccacgacgaacatgagggaaaggagtgattccttagaagattggattcaaggagggcatccacacgtacaggagtccgatgatgagcaagagagataccgacgctaagatngcatatcttgagtacagggtatcgagctacgagctcatcatgcaatatgaggtggcaaggaaggttgatgaacgcatggccagtcat

SEQ ID NO: 43786 - DNA, 450 bp, Oryza sativa
  unsure (1)..(450): unsure at all n locations
ttggtccgagcgtccaaagtgtgggtgcagagatcgctggcaggtggctacatcctttgctgaacaaacatttcgaaggagatattttgtctgccccaatgtagacaacgatttcgttgtatgtctaaccatttacaaaatccgctatgatttgcacaaaattactacccaaactgaataacattactatttttacagggcaatccaaggatgggtgganttactcgatggatcgacaatgtcactccatcatatcatggccagaagataacagagtcagaaacacaagtagagtatcaacgattgaaggaccacgagaatgcaatgcattctgaccgacctagaaggagccgataggttaccgcatgcttgattcgtcgggatcgacaaattngtaccgtgtatcgatggcacttcttatctatcttatcattacaatggtttaatatg

SEQ ID NO: 43787 - DNA, 475 bp, Oryza sativa
  unsure (1)..(475): unsure at all n locations
gcttgcatgcgagatgcatatgtgtaagcgcctggatcgttacagctccgtgcggctgaatcgtcggcaacggattcctactcaagccgtgtactgtagacgtccgatcacaccaactccatacgtcgagcgaagcgtacgtgctagcgccaccttccacgcagctcgcggcgcacaaccgatcgaaccgtgcggtgacagcaaacggcgtgacctgaaagagaccgttcggccgcgcatgtgccgctccagaaaaagtcgcgcgtggctaccaatcggatcggcaacgacgacgatactgcaagcaaaagcaataccatagcagatcaatctgcatttagaaattaatctaacagagcaacagattngaacgagaaacctggcgtctctttgtagaatggattgatangaagatgattccaatggctacagattccactggcagatgaaaagaaaatactgaagttgaacttga

SEQ ID NO: 43788 - DNA, 174 bp, Oryza sativa
tagctcaaccatggctgagcttgtacgttaccaatgacatggtcacaccccggaatgttacaccggctgctccatctgtcatacatccgccgctgatcactgtggcggttgaacatggacgtacactcctgcgtaatatggttcatcacaacatgctccaagaaagactgctta

SEQ ID NO: 43789 - DNA, 442 bp, Oryza sativa
  unsure (1)..(442): unsure at all n locations
cttaagtgacctgcggcatgcaagcttcaccttcctataatccttacaacttgtatatttcatgttaattcagtcacttccagaattgccatctttcttacgggctctacagatctttggttgtcaggagagcaaacgtcatgactggcacaagaatgcacatttcccagatctgcggattgagcaagattctgcatcacagtgttcatatacatgggttaagggcccctttganttgtaagaaaagtgttggaaatctgaaggattctaatcctatggaaaaaattcctatgataacctttgaaacaaaggattgaatcctatactatcctttaaaattcctatggaatgactaatcctatagagattttggagaanagttagcaagagttccaacctcttggaanaattcctttgagtctatctctcttatacgattcct

SEQ ID NO: 43790 - DNA, 449 bp, Oryza sativa
acacatgaaactcagctaggcctgacgtactttgaaagtcaaagcttgtcttgttgctaaaggctatactcagaaagaaggcgaagatttctttgacacttactcacctgttgctagattgaccacaattcgtgtgctactttacctagcagcctcacatggtcttctcgttcatcaaatggacgttaaaacagcttttcttaatggagagctggatgacgagatctatatggatcaacctgatggagttgtagtgaaggtcaagaatgcaaagtgtgcaaattgttgaagtctttgtatggtctgaaacaagctcctaatcaatggcatgagaaatttgacaaaacattgacatctgcatgctttgcaggcgatgaggcagataaatgtgtgtgctatcaccatggtgtgggagagggagttattttgtgcttgtttgttgcgaccta

SEQ ID NO: 43791 - DNA, 299 bp, Oryza sativa
actaagcttagactcgcgattctgctaccatcctgatcttttttgacctgtggcgatactactattgctggacaaatgtacaaataatgatgtccagctattactctattgactatcgcaatgaatctacgaagacatgcactgaacgttatgtttccctatctgcgaaataacactgatagagcttctcctatatgatatatttatgaagaaatctcactgactagggcagagaagtttgtaacatgctcatcaccaaagaactcatgctgagtgcatttatactctgaactacaaaa

SEQ ID NO: 43792 - DNA, 441 bp, Oryza sativa
  unsure (1)..(441): unsure at all n locations
agcttgtggttgagccattaaaattatgcataaagtgttagcagccagattcaaaattacaattggtggagagaatgcaaaaaaaaaaaagtaagagattntttaccatataacatgccgatgcggtaccaaatcgtcgccattgagtggataggatccaacggctgtcatcactgagtatcgtgaggcacccacttgttcttgtggtggcactgcattangatgtggaggtggaagggtacttttgtactatcgcatggctgattcggtctcatccacttggattgtttcattagacaccgcctctttcatctccatctccgcgtaccaactntgcagccccgatgtatagcgagcatggtgtctccgcggtggccgccgtccgcgagaagaaagcgggcgcacaactgactgtcccggacgagcacgtcgagaaccaca

SEQ ID NO: 43793 - DNA, 374 bp, Oryza sativa
  unsure (1)..(374): unsure at all n locations
agcttgcattaaacacctaaattcccgtggcttgcttagtacgaaagtactcacccttactctatataaatatatatagtttccccccgcttgaagtgaagatgaagtgaagtgaagattanggtttcgtcctggttcccagccgtcgcctgtggtggtgggtgttagtccattggttccgctgctgctgcttgtagtggaggttcctcgtccgtgtcgtcgcgtgcattctcgggctggtctgagctgcaacctaagttaggtaaataagtcctctatttattttaaggattcgcaatgattcatatttgtcaccgtgggtaccagcactacgttctgtgactggtaccgagatcgcagtttcgtaagaagcg

SEQ ID NO: 43794 - DNA, 417 bp, Oryza sativa
agcttatagaacctagtgcaccatatttatatattaagtggtatagcataatggttcctaaggttaggaatgaggaatatggatatatgtggagttaaggtgataatgcaaataataggagtttatctaacaagtttaacaaaattttaatttattagtgtacaatcaacatgcaagatttgcaaacattttgaataacctccaaaagataggttcaaagtgatcaaagagagggaggtgggacttgccttgaatcatgaaaatgtcagcacctaaatcacttcttcaccgattaagcaatcatctatacaaagtacacgttatgcaataaaacaccgaaatatgcgaaaaatccaaaatgttctaaaatgcatgatttgtgcacagagaataggtacttatataaaatgaatttag

SEQ ID NO: 43795 - DNA, 428 bp, Oryza sativa
acctcattgctccatttggtcgggcaagaaatggttcggtcagaagacgcaggatctgaaaaagaaagtgccatgattagtagctctaaagatgaccgtaagcatggtctcaaggttgtatctgggctcatcagcgagcttggaaacgtcaagatagcggctaccatggacttcgatgtgcttcatggttatgtcaataagctagaaacaggtcttgaaaagatcaagtcagtcttgcaactcgagaaaaaatgcactcaaggccagcgattctttatgtcaatgcaagactttctgaaagaagctgaaagggagatagagagagtctcacgtgacgacaggagagctcttgtgagagtgaacgacatcactgagtactttcatggcgacaccgtgaaagaggaagcgcatcctctgaggatattcat

SEQ ID NO: 43796 - DNA, 341 bp, Oryza sativa
  unsure (1)..(341): unsure at all n locations
catcataggatattctgaagcagcacagtttgcattaacagtacgaattagaatgtagccacagcatattaaaagtgagaggtggctntaaagatatggcgaggtaaaattttttttccttaggcaaagtatcctccatgagaaaacaatactgaccttaacatcatcgcgtggatagatcattggcacatccaaacatatcatgacctgattctccacatcgttaacaaaaagtagactgttgagtattcctattgtgcttttcnagcaatctttcgcaatatgacctctttnttgcaatgagacagtcttgacctacaaaaatgataacaaatgtttga

SEQ ID NO: 43797 - DNA, 455 bp, Oryza sativa
  unsure (1)..(455): unsure at all n locations
tactaagctntccataatatataattcactattcaataaaatatatttattattataaattaattaatatcaaatgattagataatagttaacctaaatagtgtgccaataaataaaaaaatggatattgtacagtagcataattatctttaatatatcttgtcactgtagcaaccaaataaattaattataatcaatccttcaaattaatggatgtaaaggaaaatattagtgccatttactagcctatgtccaaatataactaattccatgacttataaattatttacataaagtttagcctcatattctgtaactaaactataaacacatatagatgaatctttaacttgtttacgagagtaatcacagagctagttgtatttggaccacttaaaaaaaattagttgataccatgtcatgtgaagtagaatatatatatatatatatatata

SEQ ID NO: 43798 - DNA, 419 bp, Oryza sativa
  unsure (1)..(419): unsure at all n locations
taatctaatggctccatgcttaggagatacccaaagaaaattataatctacagatgggcattccagattagagaattaccatgaagtttaagcaggttaccagatagattggacagctggccactcttgcatgtaataaaagtaagggagatgcatgaatgcatttttgtttagtcccttcaggaaatgggcctctaatctcgataagatctctgcnacagtgcaaagaatggatgaaactttcaggaagggctgaatatgtgtgattgacggtgcgtgaatatagagaagcatatctatgccatgcctttttgatttactaaattaattgggttaacgctatgtggggatatcaattcaaccatataccaatactggcatcagtaacagaagtacatttatggttcagacagcacaat

SEQ ID NO: 43799 - DNA, 434 bp, Oryza sativa
tcgcgttgctgtgaagattaaatatagttctctagttctttctctgcgtatgaagttatttgttatttttgaaaacgtggaactatatcaaattgtcatctgtgtactatagttgatgtctggacagaggttaaatgcacagatagccggtgattccggttattaaatccttgggtgagacatctccaccgcccctaattgttcttccatcgccctagtcatcactataaagccgccctgaaccccctcccccccccctctccctagtaacctctcaccttgaaaccctaattcggtaaagcctatctgagttcttagggtgtagtgatacgcttgcaatgaagttgggtcgcattgtcatactgccccacattgtactctcctcgctgtgactgagacttcatctagttatgaaatttggaatgtataaacca

SEQ ID NO: 43800 - DNA, 441 bp, Oryza sativa
  unsure (1)..(441): unsure at all n locations
gcttgcanagctattcactggctgcattatgagattgtttcttgtctggtccttggagggcaaaaaggcagacgttgtatacagttcaagatcacctgacacacaccactgtgagtaccggcttatcgacgcgggagccgttgacgcttttagatatgagaattttnttttttttttgcttcccttctgtcccggtcgatcttgaatcgatagagcaatgtagccttcagctagctagctagggttcggagttctccagagtgtttcctcttcagacttgaattgagtctctttctccctttggtctcaatctcagtagccgtggtactagctatatgtctgaggagtcttcgaggtttacaaaaccgacaaaaacagaatggttttcgcaaaacctcaagacttctcgggccagtttgagacacaaatcactcagttttt

SEQ ID NO: 43801 - DNA, 453 bp, Oryza sativa
  unsure (1)..(453): unsure at all n locations
tgagattacattattatacggagctcagagtatatgggttttatntgaacaggcaggtctatgtctcatgcactcatgccatcatgagaagtactcctatggtgtacactgtgctacaaacaaaaattaaactttgaaatgaatgaaatgttgctttgtattcgtgtaccgctaatacacaacataaatttcctgtatgatatgtttgaaacttcaaatctagtaaaacaaaaatactttgaaataaaatcaatcatgcactgtctagtgtccacgctgttccttcaaccaactgtgtcgcataccgttagttaaaccggcccatttatgagggccaatggaggcccggccctaaacccttttcttatcttcctcctccctcctgccgncaccgtcttcctcctccggctaaaaaccttctagaatcttctagaccnctcgcgctcctccatg

SEQ ID NO: 43802 - DNA, 273 bp, Oryza sativa
atcttacgtctcgcccatctggaaatcttgtcactgaaaatgcacgccaaccaagacaatgaagctgctggttgcatggccgacatctcgtcgcccctggagaagctacagagccttaaattggaccggttagttgacagggtggccgcatggatcatgcagatgtgcttgcagctctctcgacttgagaaattggatttacagatgaaaacgttgcctcagcaagagctggattttattcttactctaaaatatctaagaaagctacgtctt

SEQ ID NO: 43803 - DNA, 469 bp, Oryza sativa
  unsure (1)..(469): unsure at all n locations
taaaactatgagaacaattggtcttctctaaacactatatttgaccatttaaatatgtgatgttgttaactttntaatatgatatttgatctttcatgttattttaaaattttgtgcaagtacagaaaaatataagtatgcttaaacaaaagtacttattgtgaaccttattgagaaggttaaaatatttatgaccgggaagaatacattatactgatcttatccacattgcatatgagtacgtgatcccttccctaatcaaggcgtcacacactcccaacaaacaccccaacagtaagtgtgtggaacatatataggccccccacaagatcgttgtgcaagtgcagctaatgatcatctccttctaagtgagagagaagctaagatacctctctaaanagagatggatgatgaatcacacacaatcacccccaataatcacctgatctgctgatcctactatgtggga

SEQ ID NO: 43804 - DNA, 409 bp, Oryza sativa
  unsure (1)..(409): unsure at all n locations
gattcgagctattgagcggatgccgccccccaccaaacttagggatgtgcaatgcgtcaccggttgcatggccgtcctaagtcgttttatatcaaggctgggagagaaggcgctaccctcgtttaagctcctcaagcgctcggtgccgtttacttggacggaggaagctgaacatgccctcactcagttaaaggcatatctcaactctcccccggttctagtcgcccctgagccaaatgagcccctgctactttacttagcggcgaccccccaagtagttagtgcagcattggttgtggagcgcgatgaagacaatcctcanttcgtgcacccccactctgtgctaacttggtccgggagcgagcggggaggagaggcccccagtcggactgtgggctacggcccctga

SEQ ID NO: 43805 - DNA, 455 bp, Oryza sativa
  unsure (1)..(455): unsure at all n locations
cttgatgattcgttggtatcccgcaattgttcagaatgttttgtgattcgttgttatccttgtttcaagaaagataaggatccactacaactcattactaggtcatataccagcagagataaaatagaattctgatcagctgaccatttattttagtggggggcttttatcattccacacgtaccgtttctgtttgctaaaattgctctacatcagctgatcatttaatggtttttatgcttggngactaatcatcatactggccttgctcctcccttccttttgggttttacctgtgtttgatctatttcctttttcctgagtagtcctgtttgtttcattaaatactgatgatgtcattggctcattgctatgctctataaattacagactgcttcggactcatgtattcatatntctataattcctgcagtntcaggacacaccacaacact

SEQ ID NO: 43806 - DNA, 486 bp, Oryza sativa
  unsure (1)..(486): unsure at all n locations
gatcctctnagtcacctgcggctgcagcttgttagatggcgaagctcttcgattttttttatgctgctcataaaagaggaggcaccgggtttggattacagtatcgagaacacagaaaccacaagcttttatgatgaccataacagcacttctaagcaagaaacaggcaatcttttaaatcagcacttctctgataagcttaggttgggactttggtctgccatgacagagagcaatatcatcacgctaagcacgcatagctcanacgaagataacagaagccctcatgggtaacatccagagtgtgacatgatggggagggaatgtctcccgttggtgccgcagatgatggaactctccgataccggcacatctatctgcccctccaagagctctcgctttgcaccacctataagtgatgaaggcctcttaacatgccatctgagtctaactcttgcatcatgctcgatggatgtngacaaaagc

SEQ ID NO: 43807 - DNA, 162 bp, Oryza sativa
  unsure (1)..(162): unsure at all n locations
gcgggcgagggctccgtacccccccaaaggtgtctctgcaccacaaangggggacaccggggcagagaccaccattgccggcccgcccagagggaacgcggacgcaaaaacgcaccaacccgcgcgcagcggacaaacaggagaacacacgaggagcgcacc

SEQ ID NO: 43808 - DNA, 359 bp, Oryza sativa
  unsure (1)..(359): unsure at all n locations
caagagaatgtcgaggaccactgtatttattcaaagtttaagaatgggagatttactttcctaattctgtatgtggatgacattctactggctagtagtgatgtcagtctactgcaggaaacaaagaaattcttgtcctcaaactttgacatgaaagacctcggtgaggcttcatatgttttgggcatagagattcaccgagatagaacaaagtatgcattgggactttctcaaaagacatatagaaaaggtgttgaagaaattcaacatgtacagatgcagtgctacacctgctcctataatgaaaggcgaaaagtatggngcatcgcaatgtcccagaaatcagtatgagctcaatg

SEQ ID NO: 43809 - DNA, 441 bp, Oryza sativa
  unsure (1)..(441): unsure at all n locations
ttcgtcttcgtcttcgccatcgncgacttgatatcgcttgtggttnggatcgntctctctcggacgtcgtcggcggcaattgcgacattgagcacggcggtggtgagggccatctatggtcaagctggcgggccgcgcgaggaataagctgaggagacggctgtggtcgccggaggacgacgagaagctgatgaaccacattgccaagtatggacatggctgctggagctccgtcccctagcttgcaggtatatacactcactagctatatttaactatacatagcccatagctctagtagcactagtgctactacaaagatggacaatgtaatttagcttaattagtgccataatactagatactctctctgtgcatgatatgtgcgattgtgcttaaatacgaaatcttcatgtcacttaattaactgaattgagctga

SEQ ID NO: 43810 - DNA, 430 bp, Oryza sativa
  unsure (1)..(430): unsure at all n locations
atcaccgnctcatagacgtgctcttctcctgtgcttcttcctcctcttcgctcagctgttgcaagcacagatgctangtaggcaacatagacgctttcactcgcatggatcacgtgaaaatagagagaaacagagaagagtgcatttcatttggtagctaatttgtcattcactgacgaaacgcatcacgcattgaccatgtgaaaatattataacaatggtttgatagctaacttgtctgtcctacactgacgaaatttctcctgctgttttctcgcttcaagagaagcctactactcctatccacatcggatccggattaaatgcagtagtagtatggactgcaacttaagcagttgtagctgctacgtcggatctaaatccaacggttaggattaagccggttactgtagcagaagaccacggcgta

SEQ ID NO: 43811 - DNA, 268 bp, Oryza sativa
  unsure (1)..(268): unsure at all n locations
agcagctgcagagaagttcatggcaggaatgccgtcctactttacgcagcgctgtacatcaacgcttntggcgatggcttcatgcgtgcttgtatgcgcgccctcggagcaaaccagttcgaccatgaagacccctccgagtcccagcagcagtccagcttcttcaactggtacaccttcggaatctcctttggtggtttcataagaatgatcctcatagtttggctggagaacagcanagggtgggatgtccggtttgtggtctccc

SEQ ID NO: 43812 - DNA, 470 bp, Oryza sativa
  unsure (1)..(470): unsure at all n locations
tgcgcgcagtgcaaggaaattacttctcctaagcgaacattattaaacanactcatgctgctggtagagatgattgattagttattcttcggatcttcaggtgttgaatggttcaaagaatgacgagaaaatatgatttcgagttcacgtgacgattgtgctagttacagtatcacggaaactgcacgcactcgttttctggtttgccgtttccctccccacctatagctagcggttgaactttcagcaacaaatcatattggtcagtctttaccagtatgagtacgtacgtgactactacgtgtgggatgattagcatcctgtctgaatcattgatttcgtgatacgctcgtttaaatttggctgtgtttagatctaaagattggatccaagcttaagtctttgtattatatcaacctgccatacacacatgactnttcagtcacatcatctctaattgtaatccaaat

SEQ ID NO: 43813 - DNA, 376 bp, Oryza sativa
  unsure (1)..(376): unsure at all n locations
gacactaaaaagctggcttaaacttctatgaaataggtgaaaaacaaaactaagcttagctatgtgtattataaccttgtaccttccaacaggaatcaccgttgcctcaaccagcactaaattaattaatactggctagctagaatatatagatattcacgtcacaatttttttgcaaacacacaaaaggattatacgtcaatatattagaaatacacgacgcaaccggctaggcggccattgccaaaggacaaagacaggaaaaataagactgctagctaggttattaatattcttcttaaatgtggttagagttagaacaaacatatatacatcctatnttgttagttccacatacntgtatgagcatgtaagt

SEQ ID NO: 43814 - DNA, 444 bp, Oryza sativa
ttaagaaacgggaagagactagttattgagaatatactatatcatgcactgaacaaatggatggctgcagttggataaggtcgtcgcaatatatgaaaatagtgacaaaaattcctctaatcatatagatcgatgatgctggatcactgccacgtctgcacggcacgcacacatgcatgtgtacacctccgcaccacacaactctgactattcggctctcttctcttccttaatttctttctagagtatacgtatgtctaaatcatgcatgtacatatatactccacgtagtagaagatccctgaactgtacacgctgtcacgctgacgctgatgattcagatctgcatgtatacacatgctcatatgagtattaagcgtggacccacccactatggcatggtgcggcgtatgcccccacaccagcttcctgatggggttttgt

SEQ ID NO: 43815 - DNA, 455 bp, Oryza sativa
  unsure (1)..(455): unsure at all n locations
agcttacatagctacacattntagcttgcaagaaatttgtttcttacaaaacagaagtatactgagtctcaagagataggacgatcaccaaccggtttcccatcgaatggttcaagcacatttcctgcaacaatgcgctgcgcgagccctttcgcgaacgcttgtttccctacttcaggctctccaatcaggcangggttgttcttggtccgcctgccgagaatctgcactacacagtcaacctggttttgccttacgacaacaggatccagcttcccctacaaaaaaaaataataataaagaacatcaattctcgggttacttaaattgtccctgaaatgtcctcttgtatagcaacatgatacgtctgtcaaatctgatgtagaatgctacctcctctgctagttttgcagaatagtaccatactctaaaagtgtgggtatcttaagtggact

SEQ ID NO: 43816 - DNA, 457 bp, Oryza sativa
cgagctctttcttgtcttcatagactaggaacatatccttagttcttctcaaggacttcaagatattctttacaactatccagggactctcacctggatctgattggtatcggcttgttgcactaagtgcatatgaaacatctggacgtgtacatagcatagcatacatgatggatccgattgccgaggcatatggaatcacactcatcttgtttcgctcatcaatcgtttgaagacactggttcttgccaagattaatgccatgtgacatcgtggttcttgccaagattaatgccatgtgacatcggtaagaaacctttcttggaatcttgcatattgaacctcttcaacaccttgtcaatgtatgtactctggcttaatccaactagcctcgttgatctatctctatagatccttatgcccagaatatatgctggcttccctaagtccttcattg

SEQ ID NO: 43817 - DNA, 411 bp, Oryza sativa
  unsure (1)..(411): unsure at all n locations
accttaaatactcagcttgattagctgccgtggagagttgtganaagatggcagtatcttattacacgttacgtgccatgattagccccttgatgttgtctctggtcaggtggaggtcaccgagttcgacgccgtcggctctcttgtgtcgtccgccgggagcgtcgacgaggtacgcgatcatgtcgtccaccatgtcggacgccgacacgtcggcgttcctcaacttggccaggtgctcgtcgatgatccggtcgatgaatacgtccagcgcgtgcctcgccgccgccatcctcttaccgatgccgctgagatcgagccacccgaggcaagggatgtagtcttccatgttgaacgccatgaagatctccgagagctctaggatgatgtcgacgaacaccttctctgtct

SEQ ID NO: 43818 - DNA, 435 bp, Oryza sativa
  unsure (1)..(435): unsure at all n locations
aaaaaacttcccatctcaaaataacacagctggtattggcagccacanagccccatatacaggaaaatagggtcttcagcatcacccaagtcagcaccatcatcagggttgcatctgaagtttcctgagctatatcagcaacatgagaataagtaccacaagactgtaaaattgtggatcatctaaccgctgctattgtgccagaaggttgtgaactaaacttctgggcaatagcattaatgcaagacctgttcctaagttactcttcattgacaaagcttttactgtcgtagtacttcttctcactggcttctttcttctcgttccgtttctgcaaaagcaaaaccacagactataaatgaacaaaaccacagcacatcaatggaccagaataaataaatgcaaactacaccaagtccccacaccaaacaacat

SEQ ID NO: 43819 - DNA, 488 bp, Oryza sativa
  unsure (1)..(488): unsure at all n locations
acactaataatactcaagctctgctacttcaccaaccatgacgactacaagagtttctataccttggcatacgtcaccaaatatgatgccgtgttattttattacaacaagtggtgttccaatcttcaatatttatcttcactcaagcaatgactactcgacgacaagaagttacagttctcgactctatgttcagttgtttcccaaccaaccaaagagtcggnggctacacaaatacaagactctcaaaattcgacaagctgaagcaatcaattaattagccaacgagtcaattacaggagtcattatcttcgtctttgctttagggcagagttatcaaccaatcagctcagtttcgacgagttggacaacatcatctactttcctccaagtgaagcatctgtaacagctataacaccaatttgatggattattgtcactgacattatcaccagcacctctgcttcattggccctgtcatcaactct

SEQ ID NO: 43820 - DNA, 367 bp, Oryza sativa
  unsure (1)..(367): unsure at all n locations
gcttgcttaagagtgaagtnttcctcattcttcattatttttattgctcaattcctgcaacacagtattctccaagtacaagtgaaactatattattgtaaaacaaatatgtattataagcatagctaggtctcctttattattgtcatattgacggtcgaaatttgtctgtaacgaccgtcaacatctcacaacttcaccttctcttgccaaccgaagcttttatgtttccctgcaggttacataagtatatgtgtggcggtaaaagtgtgatggttaagcgaacagaagaccaagatgacgtatacgatgttttctttttggagctaggtgggggtaaaccaacactaagcaatctgaaatctag

SEQ ID NO: 43821 - DNA, 486 bp, Oryza sativa
  unsure (1)..(486): unsure at all n locations
actcaagcttgcaacggcacgggtaaagtctgcagcaagcctgtttattacaatgctcagagtntgccttttgacagacctcacaaccctgcacatatgtctgaacataattctttaacctagaccaagagaaaagagtcttaactctgttataggtggctgtgattcctgaatgtcctcccacaccgctgctatgcagagccagtaaaaccgcctgcttagcctcctcatgttgcccaagccagattttgccattgtgtctgattatgccttgcataagctgaaaatccccttgcttatcaaaatgaacactcagctgggttaatagttgtttagaggcctcatccttttcatatccttcttgaattatttccatccaccttggcacacttattgacattgagtgttggtcttcttcaacctgccgtgacaaagcatcagctgctgtgttctcaagtcccttcttatacttgattntgtattgca

SEQ ID NO: 43822 - DNA, 418 bp, Oryza sativa
  unsure (1)..(418): unsure at all n locations
accctctacagggtgagggtcacttatgattcgtggatgaaaaatttcacaaaagagcaggagcaggcacttcagctcctcacctccctccgaaatctagaattctatgagtgccaccgtctgcagtcccttcccgaagggttgcatctcctttcttctatctgcacattaggcatcgtcggatgtcctgaaatcagatcgttgcccgaggagggcatcccagcttcactgaaaaaactactagcaatgcgttgcagcgtcgacctgaaggatcaactcaagagattagaagaatcanaccaagatttacaagtattctacatctgatcacccaaggtaagacgtgatgtcccaactcctttggttttactctgtcatctgcagntgttcatatttaaactcttntttacctgttcgg

SEQ ID NO: 43823 - DNA, 428 bp, Oryza sativa
  unsure (1)..(428): unsure at all n locations
agttaaatgtccacactactcaatcactcactcattattttatgggcttctcaattaagagaaaagtacaaagaatcccttgagagacacataatagggatgaactcacagatgctttctatcatatatcattataagagcaagctttatagtggagatggcgactatatctccagttntagttgcatcatccactcactgattaagaggcaacatgtaaaacaatttaccttctacacacaaactccaataatctttattggttcactctcacattatctcactttattattggcgtgagataaaggttgctctgagcatgagaggagtgtcacactctattctcacttctcttctgcatgctatcacataatgctttatggcatntctagaggcggcatttttagaggtagcacacacatctgatc

SEQ ID NO: 43824 - DNA, 416 bp, Oryza sativa
  unsure (1)..(416): unsure at all n locations
ctaagctgcaggtttgctctctcacattcccatattccattcttctctttgtcaagttctctgttaaccctaatatttaatgccccctctccctctcactaatactgaaagtggcatcaacagcggatatggaaacaactccgcacttgctcttgggtacagtacccatcctagtgcacacacgcgcactagctttttctccggtgtngagtgattgcaatatgtggcgatgccccttgttctaaccattctgaaagctatcaatttgaggaagcattgctactgttaggtggtgtgaagaagcaagaacaataattctgatgagaatgattgctactgcttattggtgttaccaagcaacaattgtcagtcccatacaataacaacaaatctgacgcacatctatttgcacatat

SEQ ID NO: 43825 - DNA, 370 bp, Oryza sativa
  unsure (1)..(370): unsure at all n locations
tgcttgagcagntgggtctgtgtgatatgcacctgtttctgcatccaagaagccttggcggatggtggtagcggcgcaagaattgatgctggaatctgcccagagaaagtgggcatccgcttggaggatgcggcgcatggcttggtggaaatcttttttttaaaccccaacgaggtgtatttgtattaaataagggggaaacactgtacaatagccaaaaggctaggacttacaaatgaaaaaaaaaggaagagagtttgcggcggnggacggnggagcgtccactagaagaacgtgtggagaggctaaacaaaattaactacagattatgtgttgtgctaccacggtcatctggcattaaagattgaat

SEQ ID NO: 43826 - DNA, 456 bp, Oryza sativa
  unsure (1)..(456): unsure at all n locations
agcttcgcttcaatattgggatgagcatgtgacaattatcttatcttggctgccttcatctccagaaaagaaagccgtcatcaatttggcacccactggtgatgccagactgatatctcttgtaagaatgacggntagtgtattaaaatcctataaattcgtttagactttctggattagcatttcagcatgacattgactggtacccctaaatgtcaaccgacaaccggcacaatttgattaagcatccatcaattcatttctcttctaaaaaggagaaggcaaaccgcacccaaaatgaatcgatacacattttcagcttgcatattctatggacanggtatgtacagtggtaaaaaaaacaaaacaacaatatgctttacattctcaagaaactagcatgaactcgacctctatgntatggaaactgtacaggctatgtactggcactgcaac

SEQ ID NO: 43827 - DNA, 463 bp, Oryza sativa
tctatagaaattattatgatgtctgctgtatatgctgattaactagaacctggctccatgaaatcaaaacacggtaaggaagtagaagagttaaggctttaatgaactcaaaacccagtaaacggaacatagtaggtgccaccatgcgtcagtgcaacaaagaaaaaatagaagggaaagaagctcaggtcagtacagaacaaaactgagaaagcggagtttcatcgccatggttgtgagagtgagatggcactgtccgatgaatctgctcctcgacctctaaagatagcagatttgagcgcattatactgatcaacgactgagttgtacaatgactctgagaatttctctctgcactgtaaaaacaagaagaaccaaagacattcaacttcacaaataaaaaaaggaaggcttaaacagatgaggcaatatcaataagtaacactatcagtgagcaagtctg

SEQ ID NO: 43828 - DNA, 259 bp, Oryza sativa
atgaagagagaaaggagaggagaaatgctggaggcgtacttatctagcgccaaccactctggccgcgcgttgccatcaacgctcccgcgtggacacccgaatctgcaacagcacgtctgaccttatggttgtaacctcacagaggtgccggaggctgcggatggactcgttcctccaaccacctgaggcgccaccccgatagagggactgtgttagtactccctctccattaagcaaaccgtagacatggcgtgatata

SEQ ID NO: 43829 - DNA, 455 bp, Oryza sativa
  unsure (1)..(455): unsure at all n locations
tggtctctgttattttgtgattgagaggtcatatatattcctcctggaatgttctaagaccatatatatttgtagctagctatcgagctagcgtgttctgatcttggcaacgatgaacacgagccacaagcaaaagtacgggtctctgtctgcaaaaaccgtgtgctgctcgcagctgataccatgcattgctggtggcgcttgcactgcactacagatttattcttnctacacagattcgtcagacaagagtactagatcgagcagtagacacgaacagatgatgaacaatcttggatcgacttggagtcgtcagagcatcgatctgggccgaatgtaacatgggctcgtctggtgggctgaagcccgtaacgtaacatgggcctcaattgaagcccagtaatactgacacgcatttgagttcaaagntcagagttgcatcatgggatacgcat

SEQ ID NO: 43830 - DNA, 482 bp, Oryza sativa
  unsure (1)..(482): unsure at all n locations
cttgccgcggagctcaggaagagcagagcagagagggtgattagattatgcgcactgcgaacagcggtggttttttttcctttttttttgtttggcagagagaatattggcagtttggcacacggngattttgtactatatgtatatataggggagaagagggcgagagggtgggacccacctgtcagcatcagagagtggtggcccgcgaggggacggctggggatgggcccaccgcacagtgagacgcccgtgaaccgagcggggcttggcgtcccccgagaaattgcaccacaaagacgacgctcgctcgaaccgcgtgcttgtctccaactgtttggttgttactcctagctatcagtatactcccccgtaaaaaaaaaaacgatttccgtgtctaacatttgacccgttcatcttatttaaaaaaattatgataaaagttacaaagataagctatgcataaagtattattcatggtt

SEQ ID NO: 43831 - DNA, 486 bp, Oryza sativa
  unsure (1)..(486): unsure at all n locations
tactaagcttgagcagagaaagctaatcagcaagaaggagcagcatctataggtgtttagcttgttatggagtaaagtgattctggttggctgtatactaaaatcgagtgaattgcattttggaccccttttcttactataatttcactttggacccctattatttccttttgcttcattttgcacccccccccctttntttttgcccttctcctcaaactcaggcacatatccactgccagtattatggcagcggctgcagaaccgcggaagtggtgtgacctaggagataatgctatttccagagctggagaagaagaanaagggggttcaaagtgaagcaaaaggtaaagcggattcaaagtgaaactatggtaacaagagacagtccaagctgcaattcactctactaaatcctgaatgatcctncatagtctcaacaagtaatctgaaagtgggtatttagttacccttttgaggaattat

SEQ ID NO: 43832 - DNA, 485 bp, Oryza sativa
  unsure (1)..(485): unsure at all n locations
ggatcttgagcactgagctgcagctaggcagtttagatataatcgctaaaatgtntttgccctgtcatctgcgtcccaacgcctgggattgcaagacttgaacttgaataatctacactctcgaaattcgatttcaatgagagaatcgtggatgcaatacaaaatccctccaatcatgagtgctttaactcgccgatgcagaaatcttcaatgatctcaaagactctgaagccatgttgagggctgcaggttcagaggtaagaatgtcaataaacagattgaaaagggcagaaagtagcagaaaaatgaagatattagtagaacaagtacatgtatatgctatttgcattaaaaaaaatggcatagtatatgaagggcgagatatatggtccaccaatatcattatttcagtttgtgtcacaacttgctggttagaggagataggccatgtccanatcaatattctttggaaactttggatttgt

SEQ ID NO: 43833 - DNA, 426 bp, Oryza sativa
  unsure (1)..(426): unsure at all n locations
ntctttctcttccgccatcgattntacccgaatgcgctgatttgattcgagggatggcttgnggaaggtgaggaattgatgcggtggatcacgggaaggattttgattacttttcgaaggtggatttgggtggaatggtgaaccctagtttgccggcgcagctctttactgtagcagggagtggggaaaatggcgagagttccggcggggaagacgaagcgtcgcttggatctcgggatttcttgttaagggtatcggaggtgcgaatgggcctangcctgaacagtacctcagcccaatacttttaacagcgtggcccattagtgtccttatggacttanngcatttttgctttggcaatttatgcacacaaatagtgtgcccaatgctgataaaatcctttttacgcggncatataattctttt

SEQ ID NO: 43834 - DNA, 482 bp, Oryza sativa
  unsure (1)..(482): unsure at all n locations
ctgcagcttttaagccaccaattcttactgtgggatggtattttccagaagcaagattaatatagcgaagtgaatcttcagttccactagataaaagttcacatgggaacatgtattttgcattcattgatgacagattaacaatcagctcttcaatccctggtttaacagcacactgaagccaactatcgagatgagcaagatgactactgtcccgactgtatacactgccaacctgaatgatgangttctttatgccaatgcctgagtgaattttcagaatccaatcaattttgctggtcaaatctcccagtttctcatnctttttgcatgtacttctatntattcctaatgattcctcactgaagtcgaggttgggaaggcatctccaggaacgtgcaaacgctcgagacacacaggcaacacgagcagcatcccgcatagacatcatggaatgtatatgacacgagatgtcctgcatg

SEQ ID NO: 43835 - DNA, 481 bp, Oryza sativa
  unsure (1)..(481): unsure at all n locations
ttgtacaaagattntgaagagtatccgttcttcttattctagcccatttcaattcatcccacccttctttgatttccactccctctaacaaactttntagttctacccaattatcccaggaaactccctccaaattcctcctaaaggttaggcaccactctccttcttgccaaatctcccttacagtaccaccttgttgctcatttatcttatacaaatcctcaaaatacaccctcagagacacttgtagtaaccaaacatcatcccaaaaactggttctcctcccattattcaccgctctctttgtgtatagctgacagaattttttagcaatctgcaaacctttccaaaactgagacatattccctttntgttccctaaagaaactctctcctttcaggtattttntgtgaagcagctcagtacacaaatcatgaggttccttttctaacttgaaaatccactttgccagtaaactcac

SEQ ID NO: 43836 - DNA, 364 bp, Oryza sativa
cgatagataccacgcctgctcctatcaacacacattatttcataccgatgcacttgtgtgccttgagcaacaactctatgtcttcgcgcctgttgtgatttatcttccatgtagctttgcactacgtagcccaacactatgttgctatcggccatggacggaccaattttcttagatcgatccctaaagtactctcgcgtgccgtgaaggatgaattcaacaatagcaaccaatggaagtacccgaactcctcgcattacccagttgtacacctctgccaaattggttgtcattatgccataccgagatccatcggtgtcgaacaatagagaccacttcttcttaagctcattctcaatccact

SEQ ID NO: 43837 - DNA, 469 bp, Oryza sativa
tggacacaagaggagcacaggcgagcgcttatgtccttagccactgcgaaaagcggtgggaatagtacctattgtgagcacgtccacacaatgtgggggataagacacacagacatgtttgctcccactgtacttaggaagtcataccggataaagatgtatgacgcaggatataaccacacgaggctccatgttctattgcataaagatagcagttaaaatcagtagtagaaagcactaaaacacgctgaggaattaatcaatattaaccaatcactgtccaacgctacaccatgttgcaacaggcccaaccaaccacctgaactacaccagttcattaagctaaactaggggtgagactaatcacagtgaatctggtggatcgccataaccaggggcacggctatttgaatatgtttactctggtcagaatgtacaactgtacccacaagacaccattccacacatg

SEQ ID NO: 43838 - DNA, 403 bp, Oryza sativa
tgacttgcgcgcagcgtttgggaatcaaagataaataataactctatgggacttacggaactggaaagaaggtagcacctaggcgtaagaaagaaagtaaatagagacagcacctactacgctatctattgaagcttactatataatatataaaagaaaaaaaaggccatataagtgagatcctagccagagaagagcaacaggagctataaaaaaggaacttatggacttgaatcagagattgggttgacatccgaaacagagaggaaaagaggaagcaaacatagctagctcacgaaagaaagcttgcaactacgcgttatatattttattttcaactgcgctaataaaggcacatccgctttctctgtatgtagaattaaaaaatacataccatattttt

SEQ ID NO: 43839 - DNA, 399 bp, Oryza sativa
  unsure (1)..(399): unsure at all n locations
tactaagagtatcatgtccacatctagaccattggagctcttgcatatggatttggttggcccaacaacctataagagtattggtggtaataagcattgtcttgtgattgttgatgattattctcgctatacttgggtggtctttttgcatgacaagtctattgttgccgagctcttcaaaaagtttgcaaaaagggcccacaatgaatttaattgcaccctttgtgaaaatagaagtgccaatggttccaagtttaagaatacaaatatcgaagactattgtgatgatcttggattaaacatgaacttttcgctacctactcacctcaacnaaatggtgtagtggagaggaaaaatcgtacattaatttgagatgcaaggactatgcttgatgaatat

SEQ ID NO: 43840 - DNA, 439 bp, Oryza sativa
actcaagcttcaaagggactgagagatgaataagagtacgtactgcctatctcgtgtggataacccaaccatagtactcccttgcgtctactatcgatagaaccttcattctaaaatataacgcataactacccctaacctaaagactaagaaataaatattatcatcttgtagttgggatcatcctaataaatacaatacatgcatccaatagaattacagaacatgagagtggatgatttaaaaaagtaataatttaatgaaaaaggggccatagttaataggctacatgtatacatgtcttatattatgaaacatctaaacaaagtggttggacattatactattatggaatggaaggagtatatcttatcttcgcacacaaaccaacgataagtaattctgcttatcatccatgtaaacatactactccctccat

SEQ ID NO: 43841 - DNA, 473 bp, Oryza sativa
  unsure (1)..(473): unsure at all n locations
tcaagcttggacatattttaaactccctggatatgatgtttatgaaaaggaggatgggaaaactgctcatgcccatagttagtgacttagctgtttatgtgatttcctagcttatatttttctttttagacgaaggcgctcagcccagcttttcataaaaagcatacgaggttcatacaacaagaaaagaaaaaaaataaactggggaagccagttcgagagagggaagccagagagattacatctgatcacactaagagaaaaagaaactagattaagcctggaccacgcctacccctgtcctggagcttgccgcatccccttggacccccaacgagtgaatgctggcacgcagtaatacctgaaccgtatccaactccccatcagcttctgttgcgccaaacttctccactgcatcaagaacgacatcaccttatgaggtaatagcgtcacgtctnttaacaatntatcat

SEQ ID NO: 43842 - DNA, 461 bp, Oryza sativa
  unsure (1)..(461): unsure at all n locations
tgatctactaagtcgtgcttcgaaccataatctctagcctgcttcttgattgctaatgagggtttcatcggggttctatccggtgagttatctggacgttgcatcagctcataaggattgcatatacatattagttggattttgccgatgattacaaaggtttcactcgttaatctaatcttgtggatgtcatgacatcggacttccatccgatgtatgctttaacctttaaatcagtgcttattctatcatatcaatgctagccgattgggttatactggactatattactgttatatttcattatcagtagccgattgactatatatcattatttactaaaatgttagaatctacattggacgtatagccgattgctcaaaaccctatcgctgtcggctggtatcgcatatagctattatcggctatcggctggaactgctccatcngctcgtcagccg

SEQ ID NO: 43843 - DNA, 480 bp, Oryza sativa
  unsure (1)..(480): unsure at all n locations
agcttgaccttagcagaatatttcatttttctgaatttagagctcttcaaaaacacaaagtattaggttcatattcttagttttctcaaagtcatgatccataaaaaacaatgtatcatctagatgttgcagaatagataaaccatcatcaatcaaatgtggcactactccagcaatttgttcatcctcctttgaacgcttgattaggatagctaacatgtctatgataatattaaaaactagatgatgccccatgcttttctacgggatatatgttagatattggagaaatgataaaatgatttggattgaaatattatgaaaatgatttgagaatgatgatttagcatatgtctgtttagttttagaatgaaataaattgtagaaataattactatatgcttgcatgttaagctttatgtgcttgggttaatgtggcatgcttgtatgtaangtttaagagtactaataaatactatg

SEQ ID NO: 43844 - DNA, 471 bp, Oryza sativa
  unsure (1)..(471): unsure at all n locations
nggagatgatggagcgacgggcgtgcgctgttgtccnggaggtcctggccatgactgtggagaagagaacactggtggatcatctcacacatttcaggcgtgatttcnggctaccgaaccggctgcgcgcaatgctagttcggcacccagagttgttctatgttagtgtcaaggggttgcggcactcggtgttccttgtcgaggcgttcgacgatgacggtaggctacttgtggaggatgatatgcttgttgcgagggatcggcttgaggagcttgtccgcgaggggaagcggatgatgcgggctaagaagaagggccttcttgctcttgcggatgacagtgatgaagatgatgaagaggaggatggggaagaacaggattcggtacaggtcgatggtgaatcttgtgactntgtagaggattgtggcattggcgatgactgggaggaggtgggtgatctctgtgagggga

SEQ ID NO: 43845 - DNA, 439 bp, Oryza sativa
  unsure (1)..(439): unsure at all n locations
tagattaattntcataaccgaatatagtatgaatatgactatgggcgacttgataattcccatcggccgattccaggcctttgaaaccaatactgactctaggccgatgataactttggggcttaccaaatttcactgttaatagtaccgaggagagtatggagcctgagattgagttcctcctcgttgccagagacatttaccctcttgatccccggtcgcaaatagttgagccaccgcaactgatggaggtgggcacgaggaggacggcgatgcagatggagacagcatcggctagctcgtagccttggcgatgggatcagatagcgatgggcgacgggatttagcggccatctagatgggtacaaggaggacagcgacgtgtttaggaggagaangatanacggcggcccatgaaaatggataggagagactcact

SEQ ID NO: 43846 - DNA, 457 bp, Oryza sativa
  unsure (1)..(457): unsure at all n locations
cacctgcaagcatgcaagcttaagaataccaaagtccgaatatgcacttatattttatttatctaaagttcactggtattggttgtggtaggcttttaacatgtgtagataatgattgattgaagaatgcaaaagttcagacgacttccacctgttctgctgcaagttggttgatcaccatcatgcattcctgttggctctcgtatggatggcgtatttgtgtctgccctctgaaactaggaagcttaatgtactatctgagaagttggataatgaatcccatgatagtactatttgcactccggtttagacatagtgattaanatggaatttctccaaaactagatctggcccattgcaataagtagaattcacactgaacattaaaactttgcagctaactttgactgtgggacatgcctaatgtatctcctaccctttatctgctttaccatgc

SEQ ID NO: 43847 - DNA, 483 bp, Oryza sativa
  unsure (1)..(483): unsure at all n locations
ctctacgctttaacaagctcttacaacgtcttaccaaagcaagtggtatggtgacatacaccgactcaaccaagcaccccaatggaggttgcatgtattgatgccttggcaaccacttgctgtacggctgcaatcaaatttgtggagctttgggtaggcttaaatatgtagcaaaggtatagcaaatgctcaaatcagataatgcaagttgaataatggttcaaagtcaagtatcgtgctagtcctaggctagaacgtgccagagacgtgaacctagacacaagcgataccacgagatagcaccataaaaaactcaagtacactctgatatactaaagcaaactcaaagataagagctcattttccctcttttttttcttctttcttactctctntttttctttcctttctttttctttgtttatatttgatgcggcttttcttgtttttttgcacctttctgccatttgttctctcttttta

SEQ ID NO: 43848 - DNA, 346 bp, Oryza sativa
ttctgagcttgtgtctcaaagaagaaaaaggttctgtatccccacaggtcttaagtgcgcatgccattttacagtacaactctgtgtcataaccgacagctttatgtgctggcaatgcatgtttatgtttgctgagtaagccatttgtgtttttcttttccttccacattaagatggtgtaacatggaagccaaaaattggagttgttctttcagtgtacactttgcattgaaatttgaacaagacaagaataacctactgaaatggctcaggtttattctgtctggtatagtatacacgacacagccgaatataatagtaacagatggacatgctctgaagctct

SEQ ID NO: 43849 - DNA, 478 bp, Oryza sativa
gattctaaattctacaattacactaaatacacatatttttatttttatataagctgcaacggctagaatctctaagccactgatatctcatagctaatacgcccgactgcaggaagcgatcatatccggatcaccttttattcctatacctatatagagagctagatttaacctagctcgcacgaccaagcacgtgtacgcactacgcactctctaccgtgagttaattcacgcgcgtgcattaactgaagtatggaaatggtctctgctggcctggccagccagatcgacacgggctggcccgcgtcgcatcatgtaacaactgttacaagtcgctcgtatccccacctcccaaccatgtcttgtacgtcacgagcgcgcaagcacgtacatgtgagaaaataccatgtgctacgttccgattcctcaacacgcgcccctagaccggcctaaaccaatggacgaattatggtgggcg

SEQ ID NO: 43850 - DNA, 483 bp, Oryza sativa
  unsure (1)..(483): unsure at all n locations
tgaagaatggtggagagggaaagtgagaaaacaaggctctttatggatatcaaatcaatgtaagtcaatggcacgaaatattcaatggagcagtagccaaaacttgagggtggaggaaactatttataatcacaaccttagatctacccgttggaaccaaagattccctttttcaaaaattccaaaagttattttcaaaaatatataaatctcaaaaaacaaggctaaataaaattttggtaattacgaaaattcattntgaacatatccgaaaaacatcagtaccgaattttcaaattttttgatttcagaatttttgagagccgtcttcggaaaatccaaaaactcaacgaagagcaaagcatactttcggaagtggatcgttgagattgtcttgccctaaaaatgagcattgccactcataacctagaatcgtccacaattccttttaaattaatgttctaatgtatgggtaactaataa

SEQ ID NO: 43851 - DNA, 370 bp, Oryza sativa
  unsure (1)..(370): unsure at all n locations
agaatatttatatnccggcgttatccgagaacttgtcggcgctgcactttcgcaagaatcaactgcctaatcatgtgtctgatgcaatgcacgcctggggcatagacggccaccatctgacggtagaaatcaccgatagcatgatgatggaacacgataccgaaatctttaaccgcattcagaacctgcgtagaatgggcgtgggcttatcagtagatgattattggacgggctattccggattatcccgcttagacagtctttcgggaacggaaatcataatcgacaaaagtgttgtcgatcgttgtctgaccgaaaaacgcatacttgccttacttgaagccattaccagcattgggcagagcctcaa

SEQ ID NO: 43852 - DNA, 432 bp, Oryza sativa
  unsure (1)..(432): unsure at all n locations
ttatgactcatgaaattatgtatttactgaccaagttggcctttatcgtagcttgtctaataagcgaggaataattatcttaaccaccatatggtatatggtagaaactggtattcaagaactgattacagaacttcattgaatagattcagctaccactagaacatattagcatttgtttgcacaatagtacaaaactaactgaacaggcatgcctgtcacgtgcatagaacaaatgtgctttacaacgggaacaagtaatttcatttcaagttttgtctagattaactggaaaattgcacgaacatttttgttttatatctagcatttctcccagttgccctatctaatgtcttcttctctaacaagaaanatcaacaattcaacattctattgcactgtactacccagagcaactcanaggtattacac

SEQ ID NO: 43853 - DNA, 477 bp, Oryza sativa
tgtggatgtgaaccgggctgctcaaactgcttgcagtctgtgtggccagtctcgtagtcatcctggcttgcaaggctttgggggtatgagttcttgaagaggagacagtctcatctcacctcttgattcctttgtgccgctgtagtcaacactcatgctactcctaacactggcatttccgctggagctaagatcaccttcatgaccacggcgagcgtctactggtcggagaacagaggatgatgcccgagcttttgctgcagctttcataacctcatttctatctagctttgcaaggctccgggcactgattttgacaggcttcttagatttgtttgctctttcggcatatccagcagcatcaggatcaaccgttgaaggaccatcccagggtccaaatgtggaatcacttcatcctagtggaagagttcagcacaattaaatttagcagggcttcagaaagtgctacaatatcat

SEQ ID NO: 43854 - DNA, 339 bp, Oryza sativa
  unsure (1)..(339): unsure at all n locations
gttgttgatgccgtgttcggcgttcgcaacgagcatttggatagcatgaacaagaaccaggaacatggattccttggcttccggaacaccgtgaatttcttcaacacatggatagaaaagatgaagggtttcaagattgtcccatgatgcgttcaaattgtttttatattattgcacatcttggtttctatgccattcatcccaaatggctccgaatttaatttcattataaacattgctttcaaagttacatgttgttaaatgctgtattctacaaaanactagaaccgaataacattaatcaagtggagaatgactttatggatcattatttgctca

SEQ ID NO: 43855 - DNA, 411 bp, Oryza sativa
  unsure (1)..(411): unsure at all n locations
ctctactatgtgtgtatactccctctatcccattttaatcatcacataaggggtttaaagtctttccaaaatgatcatgctttaacaagtgcatctntgtttattcgtgcccagagtaaatgagcatcattgaatgcactgtacgcaactacccaagattaatttctattggtccaactacatgcaatatttaaaacttgatgtaattcacggagcacgaagcgacgtaacaccttaaccaatgagtattaatgcagaatgatgaatgttttattgtctttgtgctgtacgcttcttttttttgcttacgcgatgattaacatatataggatagagggagtattgtgatggtttacatgacttggtatagcatgattacatatgcatatgtgaaaaggtgatactgacaga

SEQ ID NO: 43856 - DNA, 262 bp, Oryza sativa
ataagtgcatgaatttgtgaagaaaatcaaggctatgaacaagctttctcatcaagtatcaggtccaattggaacccagatgcggagcttaaccattacctcaacacccatctcacagaacatgatccaacactacatggtgaaaatgttgatctgtttgaatggtggaaagagaaagaaaggactctttctgtgctagctcactctgcacgggacgctctattggttctggcttcctgtgtcttttagaccatgcattatt

SEQ ID NO: 43857 - DNA, 414 bp, Oryza sativa
  unsure (1)..(414): unsure at all n locations
actaagcatctcatgggttggtgctatgtcaagcaaaatagactaacaacttaatgcctcttacttagatgccaactataaaatttgctggatactaactctgtctttgataccatatgtagttttattccttgcagaccaaaaccatctttggatgtcaacaagagcgtttgtggtcttgatctttcatcggtgaaggataattcagccaaacctccacggaggcactcaatacagaccaagccaggtgttagccccaggccaactcctacaggaactatcactcctgtgtcattggntcgttcaaggaggtccgatagtcaaaggaaagttgataccccgatatcagaagttttcatgtccacagcaaggcgcatgttcagcactcttgtctcaacctcatattggatgaca

SEQ ID NO: 43858 - DNA, 451 bp, Oryza sativa
gcttgcttgagtgtgtgaaagagtggaagttgtgattcccttttatagcgtgaggaatgaccgttgtggtggttggtaaggtcggtaatactctccaacccccattgggaaagaattcccaccgtctgatcacagccctggatcaaatggcgatgggactagctcacccgaaccctaggatgggccaaccagcccattactcggcaagccgtctactcttctgctgctgaacacagaacaaccaattatcggcgcagatgattgcgtcatttctgagtttctggcccattcctccacaagtctaattcttgacagcatctgatggattgttcacgtgtttttgtagacggctctccttccattttagatctctttctctatagatagatagaatccgagtacaagtgcagactgatcatgttcaaacgaaatatagcttgctagcatagct

SEQ ID NO: 43859 - DNA, 440 bp, Oryza sativa
  unsure (1)..(440): unsure at all n locations
ttactcctggtgatgttaccgaccaggactaaagatctattactctccacgaaaanagtcgacataaacggggtggttgcacgcggatcggatcgatacaatctccttctctcctttntaactcatctcatgacacaggcacatccttatctctttctatccctcctccctttctctcctactcttcctacgccctgggtgcgaatattggaccatagaatcaaaccgcgccctcgcgtatggacaggcggatcttaacgtacccccatgtccggatggccagatgacatgggaagatctagtactctacttagccggcaccccgccagtaattatggcggcgttagttgtagagcgcgatgatgacatacctcatcctggcattcccactctgtgttggctggactggagagaacaggaggataggctcccgacccgac

SEQ ID NO: 43860 - DNA, 439 bp, Oryza sativa
  unsure (1)..(439): unsure at all n locations
agcttggagaattatagatagaccggagagtctgtgttctctagtgctgcaggctaaatatttcccatctggctcgctaagtgatactaaatgcttcacccggatggagggcaataaagtatggccttgagctactgaagaaaggggttatttggagggttggcaatggtcaacagatcaagaattggcgtgatccctggatgcctagatgccattctcggaggcccataacgccgaaaggtacctgtagagttaagtgggtctcaaagctaattggtatggatggcagatggaaccaacaaatggtaaaccanattttctggcctattgatgctgagatgattctgaaaattcagctaccgacgagggaagcagaggatttcctagcttggcattccgatagactgggcatcttctcggtaagatcggcttacaagct

SEQ ID NO: 43861 - DNA, 351 bp, Oryza sativa
ttcatgacatggcatttccaaagccgacacagggttatctatatgccgacgagaggggtcccagaccaacaacaggttaggtcccaaaccatactgtgccaggaagcccaggggtcctccccgacaccaccccggcgaatccacatgtctctcggcatcaaggctcccctgataagctaggtactcagccaggggtgtcccattccacctatgtggtcgtacttgtcttatgttcggatgaaattccaaggaaacgatccttaagtgcaagagcgggaaaaccgtacacccggtacgtttcccggttcgcggttttggaaattcatatagttcgcaagcaccgacccaggt

SEQ ID NO: 43862 - DNA, 432 bp, Oryza sativa
  unsure (1)..(432): unsure at all n locations
ntcacgccggcgagcaatccgacgcggcataatcgaatcaactccctccagcaacaagaggaacaaatacaatacaggttagcctccgacttccggagcagaggcgtgaagcccgaaaagaacgaatcaaatgcagagatggataccaaaaatggatcggagaggagccggacggcggcggccggcgaccaacggcggcgcgccgtttgccggcgaggggatcggaggaggaggacgacgacgacctgagccctgaaccacctgtgggccttctgggcttttgttcgctactataggcccacacgtctgtgcccatgggcctggttttccggcccacgatccatcggccccgatcaacggctgtgattcgacgagggtgagctatggcaggagtccccgccttccgatggaaaacggacggcgcagatcgcg

SEQ ID NO: 43863 - DNA, 419 bp, Oryza sativa
gagcacaccaactggagctgatcatttgtttgttagggtttactgcgtgaaaagcccaatagagatgtcaatctttatctccttactatctataggctattgctctctaaggacaacatatattgttcagaatttttttggttggttcatcttgtttgccatcaaattcatttgaggtttatctatgctttgacgatggccaaggaggatcagttccatttgagccaagcgattatagttttttttcctgtgcttcatgtaaaaattaattattatgcttgtttctttacaggaaagttgtgagatcatgaggagtggcatgcctaaagtgactctcttgagcttgatatgatgttctgaacatgcatgttcaagtgagcaaaattatactttaatgcaccagttttggaattaaactc

SEQ ID NO: 43864 - DNA, 459 bp, Oryza sativa
  unsure (1)..(459): unsure at all n locations
tctcgggttcttggtctctgcccgaggcattgatgccattcccgagaagatacgagctatagaacggatgcgcccccccagcaagcttatggatgtgcaatgcgtcaccggttgcatggccgccctaagtcggttcatatcgaggctgggagagaaggcgctacccttatttaagctcctcaaacgctccgggccgtttacctggacgaaggaagctgaacgtgccctcactcagttgaaggcgtatcttagctctcccccagttctggtcgccccggagccaggtgaacccttgctactctacttagcggcgaccccgcaggtagttagtgcggcgttagttgtggagcgcgatgaggacaaccctcattccgcgcatccccactctgtgttggcttggcccgggagagagcanggaggagaggctcccgagccgaacggtggcccaaggcccccgac

SEQ ID NO: 43865 - DNA, 304 bp, Oryza sativa
gacaactacactcatgaatgtcttacgtatgtccctccacctaatggaatggtggacaaaagtgtgatgcttaacaagccataagggcttagcaactttgttaaggccaaaagtatcattcctaatgattgtgcttctccaaattcatttgatgcttcatatgttcttatgaagaacgctaatgtgtgctgtttttttgttcaaaatactaccaggcactcgccagtagtttaatttattcaagcaaaatcaaaatattctgaataaaaatacaaggagaaaaccacagtcccagatattacaa

SEQ ID NO: 43866 - DNA, 353 bp, Oryza sativa
  unsure (1)..(353): unsure at all n locations
tgcacgccgaaggaaaaaccatatacatcaactgtcccaacgaaatgcgtaggcaacaatgcatgatgaacaagtgcatctaatcaatgaccatttcacatcgaatatggtgaggctggccncaagagaacgtgagcttatttggcaagctttgtgaatcggtccaatggagntgcgctaccttgccaaacccttcacataagaggagatacgcacagctattaagcaaattacctatagataagatgctagggctaggcggtttcatgatcaacttctaccagagttcctaggacataatcaaggacataggggcggctgttagctccatgtatgagctgccgcctccttta

SEQ ID NO: 43867 - DNA, 310 bp, Oryza sativa
ctccttagttgccttacaatcacccatgtcttgggattctccgtggagtcaatgaccgcaattcgactctatcgaagctgctcaagcgccaaccggtcggtcgcaagcaccaacaccaggcttctgagcaaaccaagcacctgaccatgtcaccatgacatggtcacatgcaactttctacccattcatggcggcacagcaagcatcaccaatcggggctgagcagacgaatgctatggtccatcctcacgcgcaagccgagaatgtccccttcgccacgtcatacccgtagcaaagtgccgtgaacagg

SEQ ID NO: 43868 - DNA, 481 bp, Oryza sativa
  unsure (1)..(481): unsure at all n locations
gcttcggcgcactctataatttgccggacaagaaataaatagtaaagccatggatatcgctgcaagactatcaacgattcctcaagaaatcgctgatatagaaaacactaaactcgaactaaagcaaatgctgggtggtctccgggagcctttatttctggctttcgtcgatccagcagtgatcataccagatgatatagntcttgttcagaaccaaatccgcattcttgaaaacaggaagaangcgctgctggaagaacagcaatcgctcatcgtgatggctgcccaccacggtgactaanatagaanaaggtagttactcgtctatctcaacgtaaatgaacgaagtcacttaaggcttcctactactactgctccttcttacttattttccttanatcataatatctgactatcaatacttgtatataatgaaataaaacatggtgtccaacttagtggtanggatatttactaatat

SEQ ID NO: 43869 - DNA, 485 bp, Oryza sativa
  unsure (1)..(485): unsure at all n locations
tcttttagatntcatattgttcagctagtttggttgtttacaacaaaatggaccatatccaaaactgcaacaactctatgcatggatcaatgatgctatataatcaggtaagtgtaattttgatcagtcttttgaattggtatccggaaattntgtgagcgctttagcatctttttaacctcataggtgctgctagatcaatagcattttttatctctctgtagttgtcgaatgaaacttcacaaatgtggatgtgtttttttttttcaaataatgagtggtagctgctacaagtatatcttcctatgtccagatccatcatgtttttcattgtcaatttgagtggaagctattctcaatatttttcttgactgcataggtcccttcttttttggcctcatagatactgctatggcaacttgattntgtaaattactcacttgacaacgatatggtgagagcttacaatatctttttttacatgt

SEQ ID NO: 43870 - DNA, 399 bp, Oryza sativa
  unsure (1)..(399): unsure at all n locations
atgcgcacactgctttaacagatgtgcttaagtccctagaagacacacggtttcaccacacctggaaatatatggcatatgtggtgtaaaatccgagtaaataaactcataaaggatttaccaaccgcctagaaaatgaccacaatatataatcagcctaagccataatattggtcaataaaaatgcacacttacgtggcaaaaagcaatgatattgtatccaatcaattgcttaaaaacccaaacagcaccttgacttatataaaanagtcagcgggacagctatataaagctttactgtttgacaccttttaagatgcattgtaccaactcctaaaaagttgagtaactgcggtataaaaaggatttaaggtattgggcacttgatcacgcgcactt

SEQ ID NO: 43871 - DNA, 391 bp, Oryza sativa
  unsure (1)..(391): unsure at all n locations
cagcttttattcatatgagcgctaccaaaaaagtagcagttcgttagcacttaatgcatgaattatgatgaggttctgcattttattatcattagctaaatgatgtgaaatatcattgcagtttctccaaaaggttcctggccttgatgaagactcaaattatgttggtgtngctcgtttacttagtggcgggttggcaggaattactgctgcatctgtaacttatcccttggatgatgtccgtactcgttaggcaacacaggtaatgctatcctttttccaataaaacattgcttattgatgaattaaacatcatctttaatatcctcaaaatatttaattttgtatgatgcacgcttcgggcttagtggattttactatatttcaacta

SEQ ID NO: 43872 - DNA, 352 bp, Oryza sativa
  unsure (1)..(352): unsure at all n locations
aattattcagaagatgttggctcaatcttccattttactctactaaacctattccatattgtttcttaaatgttaaatacttaaaatgggactgcagtgggtctctgatggttgcttgatagccataaggaaaagagagacaaaaataatgaattcatgcagagggttcagtcaattgcaaataatatgagattggtcgacttaaaattgaagatggtgtgatatgacgagcctctggtgatatgatcattntcctttntcatgtcangattgacatctttggattgcataccagaattttcatgttcttcagctcgcaataattcatcttcaagtaatatgatggtagtct

SEQ ID NO: 43873 - DNA, 493 bp, Oryza sativa
  unsure (1)..(493): unsure at all n locations
ctataaaactcagctngttangggtggctagttggcacgcacgcgttggctgttttagtcgcttagccgccgattaatggcactgattagctctaatggcattgattagcgctaatggttagtactttnttttgagaatatacatanaataattatttcaatgtttaaaaaatagttgagatttttgaatttgtagttcaagattttaaagtttgagttaaaagttttgaattctgagttgaaagtactaaattttgatatgaaagtatttaattttaggttgagagctttntaacatttatttgaaagtttttaaatctgagttgaaagttttaaaatcttgacttgaaagtttttaaatccaagttgaaatttttcaatgagggaaaggaaaggcaattagataaggcatgcgcttcttttaaaattgaaggtcccccgtgcgaaatacataataagaccataaagttttaaaaatacactgttctagaac

SEQ ID NO: 43874 - DNA, 418 bp, Oryza sativa
tatgctaacctggttgcaaagtactgccaggtatggctccagaattgttctgacttgtttaatgatatctgcaagagatccacggtccatgtattctagaacaagatatattacaccattatggtagaaagattggtggcaaaggactatatgtgcgttctgtggtgcttgatttattttgagctcttggactatttgtttgcgaactgcctcttgaatgttcatttgtatgccctgtggacagaattgcaatgctagttaattaaatgccacagcagtatgaataccagggacaatgcacagaattcttgattgatctgaacatcataacatgatgttcttcattagcatcaatattaattgaaaatcagagttcaatgtagatattgcatgcaacacgtaagctgacgacagatgc

SEQ ID NO: 43875 - DNA, 419 bp, Oryza sativa
aaacaagtcattggtaataaaggaatcaaaactgatgctcccaaaactgattaaatagttaattttctctccctctccgggttcgaaaaaggttaccacgatcatgtagggcatgcctgtcctgggtactcttcatgaatgaattagcataacaatttgctgaaatccaatgagtcaccacttcgttgggtgctgtctagctttcccttccattttaagtccattattggattatgaagtttgaaataaccatttttcttttgcctgaaaactatttctacaaatatctctaatgtgttgatccttattcttttatattataaatacatatcaggctatgtcgtgttgaacccttttcttatatttgtgttgacagatgaaattaagccagcatctattgataagactcaagctgggtc

SEQ ID NO: 43876 - DNA, 392 bp, Oryza sativa
  unsure (1)..(392): unsure at all n locations
aaatatatgaatacagaaacatggaatatatgaaaatacattcttgataaatntaataatgtcatttggatatatcagtattacacgataaggagtgagtaaatttttaaaatgctactcacaatttaaattgtttnttaattataagtccaatttaattgtgatatacaatcatatagtctataatgttaattattaatatttttttatggatgtttcaatgagatgcgctatttagaataaaacttaaaataacatatatttttacaacttanaacatatggttaacattaactttttagttnttcatctaatctaagtttataagaaggaaaaaagaaaaggacatagagggaggggatatgtacgtacatcggacataaagacgtaca

SEQ ID NO: 43877 - DNA, 465 bp, Oryza sativa
  unsure (1)..(465): unsure at all n locations
tgagcttccgaantaattctggcctttggtttgtcttttgttttaaaagaactaagcttctgtctattatatcgattccctatgtacatggattggcaacaacgacatggtatggttgattttatacaccctactacagaaacggtttttacatgcgggtgaaagagatttttgcatgcgggtagcacaaccgcatgcgccaaaaggtacgtcaaaatcggttttttcacatgcaaaaaccggccgcatgcaaaaataaatttggcgaaaaaaataaaaaacaaaaaacccacaaaccctatcacgctgcccaccgtcggagcgccggatccgccgccccaccacccgccatcgtcgccggtgtcagatcagccgcccccacctccagtagtcatcgcttgccncggatcgactgtccccaccaccggatcgattgtcctcaccagccacagtcgtcactagtcg

SEQ ID NO: 43878 - DNA, 415 bp, Oryza sativa
  unsure (1)..(415): unsure at all n locations
ttatatatgtgcgtaaatttcccttttttttaaggaaaaactggtagactcaatgactgtatataaatgcacgcaatgcgttcatcccagagttacttgttgtttaatacgagtcaccaaaattattctttcaatagtagatgacataactcgacaacgatgcgtctatggtgatctcgtgaatcttaacatataacggtacggttcagtttttataagatactcattgaattagaggtgcatacgtgtattcataagtataagcatacgcacgctgtgatagtttgcatttctactgtgcttttagaanaatagaagaaagaaaaaaaccacgatgcactcatgcacacatgtcatattaattttatggatgagtaaagtgcaggggagatatatggtataatcaattagcatg

SEQ ID NO: 43879 - DNA, 447 bp, Oryza sativa
  unsure (1)..(447): unsure at all n locations
taagctntgcataacagcctacaaattattatattgtgtgacagagtgagtatttcatatcagcgacttataagtatattcctccgcttcttgtaaaaactattatagtgtgcgacggagagactctatcatatcaatgactgatagatccattcctccttttctcataagaaagaaccacaagggtaagtaagactagaacaatgtacgagctctttgtctatgcaagctgtataatcttgttgctacttggccactatatatgactcaagaaaagagagagtcaaataggattggaaggtatctaagaattcagtttctctccaactcaagttcgaaggagccaagggcctatttcgttacgtgctcctctgcaagcctgtgctcacattctatcctccttgagattgcaagagattgcgagagaggatagatgatatgatcatc

SEQ ID NO: 43880 - DNA, 358 bp, Oryza sativa
  unsure (1)..(358): unsure at all n locations
cagtgagtggtatggttcatcatgcctaggcttggtagtatatataaattgcatctgtctctggctaaataatttatgcttagctatttcgtgggttaatttctggtgatctagctaatttctgtacaaataaatgcagatatntgccttatatgtcactggatcactggacactatcatatcaccagagcatcggcgggagatatgtcgctatatctataaccatcaggcatanttttttccgtatatatggacgactgaccatanaataattataatatgctcatgtattcatggtttaataattttaattatagaagagcgcgtgttactccaggacttgcagtacgaatgttta

SEQ ID NO: 43881 - DNA, 480 bp, Oryza sativa
  unsure (1)..(480): unsure at all n locations
tactcagcttgacagcttacacgccgatcttatcaaccctgtagtatatattaggcaatctctcaagccaatgctgaagaagctgaagaaactccgtgtgctgtccctctgctttttcagcagttacacactaccaaagcacatatgcaagttgaagcatctcagatacttgaatctggaaaggacgtccatttccaagttgccaaaatcttcgagcaaactataccacttgctagtactcaaaagaacaaaaaggtgcccacaacattgccaaagaaagcaaacaatctcatcagtttgaggcgcatcaacggccctttgaaagacgtatgtaatgtcgggatgcttacttctcttgaagatatgaaagaattccaagtgaagaaagagaatggatatgaaatacgtcagctatgcagcctgaccaaacttcgatgacnatctcatatcatgaatcttgagaatgtgcacaatatgaat

SEQ ID NO: 43882 - DNA, 403 bp, Oryza sativa
  unsure (1)..(403): unsure at all n locations
ataatcaaagagtgcttatagtttgaggtcttttattcgtttgtggctgtagttattttccgtgtgcttgttaagacttgttcatgtgtgtttgtctaacataaatttgtgtgataattgatggtaacttgttgagcaaagatcgggattctatttcattattttttttaaaaaaaggaaacgggaacaactggcatgtgctgacacatgttgtgggagcgaaaccagccgtgtactccgtgtgtgtatggagtgagctcgntgttgctgtgtgtgcttgtcagtcttctcgtgtataaaaaaaaatccgcacagctattatttagatatatatggtgttccctcacctctgtattctactagtactgtgagtaaaatggtaataaagatatatgtgcgtcgt

SEQ ID NO: 43883 - DNA, 455 bp, Oryza sativa
  unsure (1)..(455): unsure at all n locations
tctcagaaccctcatcgacgggcggcagttctctaaatattctcttcgccanaaccctggatgatatgcagattcctcgctcagagttaaaaccaagcaatgcgccctttcacggagtcatctcggggctatctgcaactccactccgccagatcaccctcccagtaacctttggcactcgggaaaacttccgcacggagaatatgtgttttgaagtcgccgatttcgagacagcgtatcacgccatactcgaacgcccggcgttagccaagttcatggccgtcccgcactagacttacatgatgatgaagatgcccggtcctcgaggagtcctatccctacgaagtgacatcaagcaggccgtcacatgcgacaaagaaagttgcgagatggcccanactcgcgagatggcgaccgcccgagaagacatccgactagctgcaaccatggcaagc

SEQ ID NO: 43884 - DNA, 378 bp, Oryza sativa
  unsure (1)..(378): unsure at all n locations
agccaatggtaacctggaactcttatttcggacacaatttgcacgaaaatgctggatctggcctgctccttgactctttcttacacgcatggatacgcacctatgttatgtacatcactttacatgtgtctagtgtctacactaatgcatggcatgtttgcctctcatctcaggacctctccaatgcttgctgggcataagactctgataccttcttaggttttagctcacactcttcttttggccgccgcatcgccatgaattgcagtgacttgctctgaacttggtaaacatagcatccccatgggtaggcatctgacgaagcccatacaattagcttctcgtatactgcatcttncgcaaatctctcactaacac

SEQ ID NO: 43885 - DNA, 485 bp, Oryza sativa
gcttatagtctgaattgtacagatcatgggattcacaattgtactgcatactgaataatgcttgaggttgaagcttcggatgactgacataggttaacttaaatgaatttttgaacattgaaatgcaggtggtagaggttcttaatcctttatcaagggagttcaagtcaattggaaccttgaggaaagagcttgcagaattacaggaagaattggcaaaagctcacaatcaggtattgtactttcaggagacaggagccaaatgaaaaacttcaatattatatggattctgatgttctacatgtctaatccaggttcatctgtcggaaactagagtatcatctgcccttgataagttggcacaaatggagacccttgtcaacgacagactgttgcaagatggaggctctagcgcatctacagccgagtgcactttccttgctccaagcacgtcatcagcgtcccgtgttgatacaagaaacctc

SEQ ID NO: 43886 - DNA, 270 bp, Oryza sativa
tacataccaatcggaggtgcctaaaagggttgcaacttcatcctccaaagttgtttttttgtcatactacatttgcacctaatgttgcacactgtttttggcttcaaaaattagttgtaagtgatgaaagagaaaatgtgtcgggggaagaaagaatatatagaaaattagttcaattgctaaacaaattttataaaataagtgagaacgaaaactctagtgcaagctaatcttacataatcgaaaacaaactactatgaaaattacaat

SEQ ID NO: 43887 - DNA, 480 bp, Oryza sativa
tgaatgcacatggactcatggagatggagatgctggatatgtcatggtgcattggtgccatggtccatgcagcaatggatgtgaggtgagaggtgaaggctctgcatttgcttttgcttctcttggagatgactgacttcacttcacagtgtgggtgtgatcagagatggcactgttggagagggagatgggaggccaatgaatatcaatatcatatataattttctgaatgattgtatatgcattttcttgcagcatgcatgcatgcatggacaggggagatgatccatactctaggtgagtccagatgagatgagatggttgcctcttgttgccaacttttatttctttacactgtgctggtacaatggccgcgcatggatgatccatcatctgcattattatatttgctgctgctgtagcacaacactgtgctacgaattttcttgagaagatgcatggtgaaatggaatctactcc

SEQ ID NO: 43888 - DNA, 408 bp, Oryza sativa
  unsure (1)..(408): unsure at all n locations
aacatggcctggaccagtggcgtatcggcattggcgacttcatctctagcttcttcaagcttcttgatattgttaaccaagatgtcgaattgagcctgggattttgatttgcgatctgtacaaataaattcacatcaatgactgggcatgaagatgagagtggtttttgaagtttcagctacaagtaccttcgacatctttcagagccgagtccctctgttttgccagttcgaccttgtctttctccagagcctggattcgcctttctagctaggatatcttggcagctttcactatattgctttccactggttaatcgcacatgaatagcagcatgaaacanatcagataaggatgagagttaccttttgatgaaccacttagctcanagttggagtcttggagctc

SEQ ID NO: 43889 - DNA, 457 bp, Oryza sativa
tcagatcagtatctatcgatcgaatagctgtcaaaattggcggatcagcgtaagggccgtagagagccaccccttggcgatgtagcggtagatggcctccgtgtagtgaccaccgtcccagtgcacggacgccgacgggtcctcgcacgcgaccgcgcccgccatgccgcagatggcgttgccgttccagttgtacgggccgccgccgccgcagcaagccttgaggatgccaccggcggcgaatcctgcacatcacaaatgtacaaatcacttaaccatatattgtagatggatataccatgtactggatgtgacacatcttaatactacgtctattcagatttcgtagtactggtcattgctttcttttttccttatggaaaactgaacgaaccatatcttgcaacgggacactgtacttgattagtaagcagctatgcaaacggatcgtctaata

SEQ ID NO: 43890 - DNA, 399 bp, Oryza sativa
  unsure (1)..(399): unsure at all n locations
atatatggtggaaactatgtagaacaaagcacgaatgttctcaaaacatcacaaaacaatcgaatatgtagctaagataataattgacaccctacaaaatctgaaggtgaaaattgactacgtttgatagataatgataataatggccaaaagacaatcaggaatagtttctttctcttcgctgtntgttagtctcatacctcgtgaatgtacacgagctttgatcttgaactttatatggttacctaaatagtataacattacctatatgtgagttttgtcttaaaacttctctgataagtttgtgcattaattccaagtttccaccttagtaatagtttccacttgcatgtnttccccatattttgtggtgtatgcgtagctaagaaatgccggagt

SEQ ID NO: 43891 - DNA, 376 bp, Oryza sativa
ctctacgccgtcgcgcgccaccacccggtcgatcgccgacgccgcagtcgctggaagcaacagggacgacggagaatccgagatggacatcgaggcgttcatccacggcggaagcggtggcggcgactccgacgccgaccacccgctcggcatcttctccgccgccgacctctccggcttcggcttcgcggactcggtgagtgattgattactgattattatgctgcctgctgcgactacgtagtatagtagtagtagtagggtgtgttttcacgccaaaattgatagtttggttgaaattaaaacgatgtgacggacaaactagaagtttgtgtgtgtaggacagctttgatcgatggaatagctgaaagtttga

SEQ ID NO: 43892 - DNA, 477 bp, Oryza sativa
  unsure (1)..(477): unsure at all n locations
tactaagcttcttcccagcatacggctntctagatgtatatgacgatctctatacagatggatcttatatgaatcgtatgatgaagtaccacatgagtggatatatatgaaaggaatccaaatctgccgaatcgctcatgttatgatcttctacatcctaagtctccgcgttccgtcatctggcttatgttcttcatgtagcattcagatcgaatgactctatgaaattacgtcgatacttctacatattatgggtaacgtaggagacatccctattntcccccggnggtcttaattaccactgcttagctttcaattcgcctctgaccatcaaattaaatgtgaataacccgtcctcctctctttaaacaaggagcgcttccggtctgtgcgtgcttcaacaattttgtcttctcatattccatatcttagagcaatatttctatgaggactactgactcatcacttgctgcgtac

SEQ ID NO: 43893 - DNA, 391 bp, Oryza sativa
  unsure (1)..(391): unsure at all n locations
tcttgcattttccttgataaatgcagtagcctcttcaagctaaaaccgttggattgagaagcaaaataaccatcaggaaaaacgtcaataggataggcaatattctgcagggattttgaactagagatttatatcagacctcgttactgttccgataaaggtccaatttgtttagtacaaatacaactttcttcttccactgctgaacatactggagaaatccgacctagaagtcaagaacgtttttagctccactgtaaaggacaaataataaaggaccaaggacaaaactgcatccttgagagataaataaggattatagaatcttcaatanaatatctgttaggtaaggaatcgcataaagataaaatcctaagcaatatgcaatcta

SEQ ID NO: 43894 - DNA, 472 bp, Oryza sativa
  unsure (1)..(472): unsure at all n locations
tgggctggatgtgcagaccaagtcggtgcccaacccgctggtggaagcggaggaacactactacaacgccaagcacaccaagctcatggagctcggcctggagccccacctgctgtcggactcgctcctcgactcgctgctcaacttcgccgtccagtacaaggacagggtcgacacggcgcagatcatgcccagcgtgtcgtggaagaagatgggggcgaagccgaagacggtgtccgtctaagaggaggctggttttgccatggcggggtataatgtcaaccgtgacattgacattataaatttggtgtgtagtaatgcaataattatgtgcgtttagtataatgcacgttgtagtgggtgtgggtacggtgttagatttcttntttgttcttcctcacgaatagatgctgcaatctgatcgaaggggatccttctgtatttctgttgaaacttttatccagctcttgat

SEQ ID NO: 43895 - DNA, 111 bp, Oryza sativa
ttaagcgactgagctgcaaccgggtgcaatgaggagctacttctttttgtgcctctgcccttcaggcgaaactgctgcactgcttagaatggcaaccaacccttgggcgcc

SEQ ID NO: 43896 - DNA, 450 bp, Oryza sativa
  unsure (1)..(450): unsure at all n locations
agcttgcccgcacggtcggttctgaactttctcatttcatggtggcttggccttgccttggcggctgtccttggatcgctggttgaagctggcgaacagcgagaggaggtggttcggcgacctaagcttgtgcttgggcatgggcagcggcgacagaggccttatcatactcagcttgaattgcttgccgttgcttggaatcctcttcgccccttgcgtacccgtcaatgatgcgaagcatgtgttcaagcgtttgctgctctttgttggcgattnttcttgtgagttcgccctcgagtagcccggctgaagcggcgttgatgacagacgcctcagttatgtcttgcacttagcaccgagcctgcgagaagcgacgcatgtactcccttnatgactcttccggcctctggcgaatgccgagcaaatgctgctatgtcttcggctcttcgt

SEQ ID NO: 43897 - DNA, 458 bp, Oryza sativa
  unsure (1)..(458): unsure at all n locations
aaacatttgattccatcatggctaccaagttataaacaaacagtacaagtgtttagccctgcgatcatcaagggatcacgaggtgtactcaaatggctggggtggcaagggctcctcgtcgacggccatggcggcagcgcctgagccttgctggccagccgtggcggctgcggcgttcgtcgcctgagttgtcggggcgtcggtgaggactagttcctccgtctcggagggcttgaggtcccgtacgaggacaaatacggagggcgccagcttcacaggctcgtacctgccgccctccaggaatattatgaacttctcctgtgccgggacaacccgggccgggttagtcatgatctggaaggtcggttcgggctcatgggctttcttctcctgcacaccatcgacctgaattcatggattgagaccagcatgagtgatntggagactataacatgtca

SEQ ID NO: 43898 - DNA, 369 bp, Oryza sativa
  unsure (1)..(369): unsure at all n locations
taccccctgcctcgcatagatcagattggcgactccacagcggagtgcgaccttttgtggtttctagatgcatactctggttatcatcaaattcgcatggcttgggaggatgaagaaaaaactgcgttcattacccccataggaacttattgttatacgacaatgcccttcgggttaaagaatgcaggtcctacttttcaacgtactactcgaatttctttgggtagcccattacgacgtaatgttgaagcttatgtccatgacttggttgtaaagacgcgcaaccaggaaacgttactttcagatctagcggaaacttttgagagcctccgcttcgcccgcatnaaactgaaccccgataagtgcgtg

SEQ ID NO: 43899 - DNA, 465 bp, Oryza sativa
  unsure (1)..(465): unsure at all n locations
gtattcgtaaataagcagcttctcatcttcatgaatacagcaaccaagaagtctaactaagtttttgtgttgcagtttggcaataagaaccagttcatttctgaactgctccatcccttgctcagaacacttgctgagccttttaacagcaatttccttgccatcctccaatgttccctgtgtgatttcatcattattaaagtaataggagtaaatgacatcgctattcctcatatcattgacagaatgacaaggtaaaattatatatcaccttatatactttgccaaaacctccttttccaagcatgttggtgtcatggaaactgtctgttgcagcagtgatgtcttcaaagctaatacatggaaattccagattttgatcccacaaatcatgaatagtgctcaactggtgaatgacaggtcttttcgtntttccttgtntgtcggacgccttatagtaaaatc

SEQ ID NO: 43900 - DNA, 431 bp, Oryza sativa
  unsure (1)..(431): unsure at all n locations
cgtacgcacgcacacccactacacgtatcgacgtataatgccaatatagacacatgcatttcaaaacgaaatatagatataaccaacgtattattgtgttatttaaattcagaacctaattggtagagcttaagcttcaactttatctcaactggagctggagcccaatcaaacagtttcaacttcacccaaaaatgagtggagtgggctgaagtgctctcacgaaataaactagagatgcggagctatgttctgctctacaactctatacagactcaactcttgtagttaattttaatntaatctatgctattgcaactttgttaaattaaagaaatactactactattcacgacatcggctagttgccgtcggtattttgtctaatttgaaccatgccattatatacgtctcataccaaaattccccta

SEQ ID NO: 43901 - DNA, 474 bp, Oryza sativa
  unsure (1)..(474): unsure at all n locations
tgagcagctgacacaacttcagcgcgggactcattcatggcccacagcatctcgaccaaatgtcttatggtagcatcattctcaattccttcaagatcaacatagctggcacggtcacttccctggggctgacgaggatggcaacgatactcagtgtcggccaacagatcattgtaacggtcacggagctctcctatggcgatccttgccgcctcctgacaagnctgaggatagcttccccctccagcctcgaacatcatcgatgggatgtcttcacgatcactgttcaaggtgaccatgacacggcacttctcttcatcacgatcatgaggaatctgggcatacaaatgggcagtctcgaatcctatggtaaaggacatcatacgcagctcctggacaaatccctcaataccgaacaagtgctcangcttgaagcgtggcatctaaagacaagtgaaaggaaggagtaagaca

SEQ ID NO: 43902 - DNA, 418 bp, Oryza sativa
  unsure (1)..(418): unsure at all n locations
caagctgcaagctaggagcggcgcttgccaacagagaaaacggctttttatctaaagagtacagagggataagaatcaatagctgctcaaatcccaacttacaataagcaataaaagaactcaagtaaggaaacgaataacaacgaaattttctgcctagatcatnttgcaatgagagcgaataaataagacagactcacataatgacaaaactatgagagattagagacatattaataataacaaacgaagcataaacaccttgcgacccatgttatagagctaggacctaatgcatttcacccatcaaaccccaactgtctgacgaataaatcccaataatattactaaaaccctagaccgacctggtttgaaaaaccccacttaaacgagccgacaaaattctcccttgaaccac

SEQ ID NO: 43903 - DNA, 467 bp, Oryza sativa
  unsure (1)..(467): unsure at all n locations
ctgcagcttncacacagtttccaggacaaagttctgcattattttgtaaatcaagtagtactaacgcgattaattaagtattaactaattttttntccagttaggaacccctccttccatgcacgcaaaacgatgcttgcattaacgcgtgattaattaagtattagctanttttttctaaaaatggatcaatttgattttttaagcaactttcgtatagaaatgttttacaaaaaaacgcaccgtttagcagtttaaaaagcgtgcacgtggaaaacgaggaagaagtgttggtgaaaatgggtgccgaacacattgcagttgagcatggtggccgtgtttagattcaaacttttttcttcaaactttcaacttttccgtcacatcaaatgtttggacacatgcatgaagcattaaatgtggatgaaaaagaaaaccaactgcacaggttacatgtaaatcgcgag

SEQ ID NO: 43904 - DNA, 464 bp, Oryza sativa
  unsure (1)..(464): unsure at all n locations
nttgtctggagaatacagtaaagtaagcgtaagtgtttacatattccagntagcttaaccaagcccctgtgattaccaattgcgtgggagtttgttaattcggacggttggtattagctgaccagcttgaaagagaggccatgtcgattctgaattcccggatgcgttaagaccgtcctctcctcgtgtgtgtgtgtgtgttcggcgccataagcagctgagattcatggtttgttaattgttctttgacgcgcgcaaacaattcgaacattccaaaacattagaggtgcaaattcggtgataccattggcatctatgagttgcggcctgccgtggttgacagagacgtgacaacggccagatacgttgtcaaaagtctctgcgtgtgtgttgggatccaatgtcgcgtatatgtgagtatgctcgtctgtgcggcacaaggtatgtgtcactattgctctctg

SEQ ID NO: 43905 - DNA, 388 bp, Oryza sativa
  unsure (1)..(388): unsure at all n locations
acgaagatagaaaaaaggatgatagattcaacaaagctgatgataaacatgataatgaagcacaggtgtgattatgatctatgcaatccatctcgctagccaacagttatagtcgtcccaatgctactgaatctcttttatatatttgcttatgttatgcagctgcaacgcattcaactggatatggaagcattacatgaggagaaatcttcactggaggtataatgttcttcatacatatgttacatgtccagcacaaccattagntacttctggcttaatattatatgcatgcacatttganaagctgatacctgcactacatggatggtgttgagcattctaccacttggctggcaattatgtttagtttaatataaatttggac

SEQ ID NO: 43906 - DNA, 499 bp, Oryza sativa
  unsure (1)..(499): unsure at all n locations
cggacctataaaactcagctgtctggatctgacaaaatatgggtcttcagtgtgaatattcttctacaatgcactgtgtgttcaacaaatagacattcctcttaagaaaatttggagtttcaaaattcttttgaaaattaaaattttcatttggattcttttgagaggcaagattctgactaaggacaatttgtttatgagaggttggagaaagggtgaaacaaaatgtcagatttgggacaaacatgaatcaattcaacaccttttctttgattgctctcttgtcagactaatttggaatataatacagtgtgcttttgatctcaaaacagctaaagactgccaacacctctttggggcttggctttctgctttctcaaacaaaaccaanaacttgattgtaactagtattgctgctgtaatctgggctgtctggaaaaccagaaataaagcttgttttgataaataaatgcctaatgatcccactgatgtaattttc

SEQ ID NO: 43907 - DNA, 355 bp, Oryza sativa
atcggaccttgaatctcagcttacagttggcccctgtcctttttgttccttgttgcgtacctgtagaccattctttatagcacttgtcctgattgttctgctgggaacaatgttgttgtgctgggagatttatatggagattatgctctcatgtggcctattgggccacatggtcgtgggtccatatctcttcatctgaagtgaacagcagactttctgccatctgtgtcaaaagtgcgttatcattggataagcattcacgtctatccgttattggacaaactacttgggtgctggaaagctgtattaaacctagtatttggcattgttgcctttttctgaatactaactacct

SEQ ID NO: 43908 - DNA, 477 bp, Oryza sativa
taattaatccgtcattagcgaatggttactgtagcaccttattgtttaatcatggagtaattgggttaaaagatttgtctcgcaaattagtcacaatctgtataattaattattattttagcctatatttaatactttatacaagtatttaaacgttcgatgtgacagggtgaaaattttttagaatgatctaaatatggccttagtacttcaatctcctttagatttcttccccttctcgttttctctatgttaatagagattagagaggatggtagtcttgcatttttaatatgcaagcaacagtccctctttttaactgagggatttttttttttgaaaagaataaaggcaccgacctttatacagtacgtgccatattcgtgatgtgccaacgcggcttttctccctgcaattcaattcacatgcatgcgatgaggttaatgttcagaaagtatatatatatatgcatgaatc

SEQ ID NO: 43909 - DNA, 491 bp, Oryza sativa
  unsure (1)..(491): unsure at all n locations
atccttaagcactgagctgcagctatgacatgtatggacctatggtgcttctctcttttccccctaaaatatgccttctggttctggttcaactattctgtcacgcagcttcttagagttcagatnttgcctaatctattagtgctttcatacctttcttgaaattttgcactttcttcacctggtgtgcaagcacaatcatctgtgttggtttcttgtgttgaaatgttgcctctttatatttggtatctgtcttcacaggacacaaagtgtgctaaattctatctggtcctcttttagtgaattatattcctaattgtttgaatttggcattntgcatagaaatttaacatttccactccatgttcctaattcatccagtaactctgtctttgataagtaaattcgttctttcttacaccccattctctatggtggctgtgtgtgtacgtggctagtggggagttgcttgtccagtggcatgcacatta

SEQ ID NO: 43910 - DNA, 447 bp, Oryza sativa
  unsure (1)..(447): unsure at all n locations
aactcagcttactaaagattacccatgtgcaccagcaaaacgcttggttatgaacgaatgagttgcaccagaatcaaacaatattactgccggtgtcgagttgacgggaaatgtgcccaatatgacctctggtgctgactgcgcctcctctgccgatgcataattgacacgggcctgaacgaacttgagtccggcacgtcttggcttcgggcacgtaccaaccatgtgtccgggctcgttacaattgaagcagagttcgggcttttcccaaacttcttgggctgttccggctaggctggcagagctggctgaactgactgagctgcattcattagtggacatggaatcggattgaggctgtgatgctcactattgctgtgattgccactgttggtgataccattgaaattacccangtggtaaggacgatgttgccggataatcatg

SEQ ID NO: 43911 - DNA, 414 bp, Oryza sativa
  unsure (1)..(414): unsure at all n locations
ttttatgaatcatacatcattnttcgttcaccttttctgatggtttacagcagcaggggcacttctaacgtctttcaaaccttcttccaggtacctgcatgaggtgtgcttgccatctgttgtgcatagaaactttaagtcctcaaacatcctactcgatgaagagcataatccacatttatctgactgtgggcttgccgccttgacacccaacacggagagacaggtcagtcataccaccacatttctaaacttctggttgctaaagttctcagatggccttgtttggctcctgtagaagtagttaattaatggactgaatatgcttggtttgccattccaggtttcaactgatgttgttggctcatttggatacagtgccccggagtttgccatgtcacgaaattataccgt

SEQ ID NO: 43912 - DNA, 323 bp, Oryza sativa
gaccataaaactcagcttaaaatactgcttgttcaaatgttcatatgtttgacaccgtagacttttattacgtgttgaccattcgtcttattaaaaaaagttaaataggtatttattcttttcatatcattagattcattgttaaatatattttcatgtacatatatagctatcatatctgaaaattattttgaataagacaaacggtcaaacatgtgcctaaaagtctacggcgtctaacattttgaaacggacggagtatgttcaattatcagatttagaatgaaaagaatactgtggaaaaagactcatggatgaatcat

SEQ ID NO: 43913 - DNA, 437 bp, Oryza sativa
  unsure (1)..(437): unsure at all n locations
ttaagtcacctgcagcatgcaagcntttcttgactgatattcttctagacttcttgtttatgtggtgtgttgataagaagagtacaagaggaagaggtcttgctgcatgcagctgacgaacaagaccaaccagtacgtggcgttcaaagtgaatgaatactctgttcttcttctcgctctgagctgatgctgctgtgagcatgtgatgcgtttggaggaaagggtgacggattttcgttctgcacaactgacaatccgtacgtgaaaacgacgaacccaaggaagtactctgtgcggcacgcctgcggtatactgtcgccccggagctcgtgcgatatcacaagtgaggttagcttgatttgctctacatgattacactattacagtgcttaattagttaatttgctcgacttgccgatcggtctgttgagttcatg

SEQ ID NO: 43914 - DNA, 423 bp, Oryza sativa
  unsure (1)..(423): unsure at all n locations
ctcctataattggaaaatcattattattgtggggccaacttgcattattagaatcacacactcaacttgcttggcctcagttcgcgtgccaaaccgacagacctacccagtagacgcacttattcctgtaggctgtactaccctgattccttgtcgccccacctttgtggcacctcggtatctgtgctctctgagcgcgtataccaaatatcccacatacaccagtgtttgtaaaaacttgggaaatgggtttgagaagcctttaaaacccgtcatgtggtgtcggcgtgttngaaaataaaataaaatgtgaaaacttgcgatgcggaggttgtgcctatgtggcactgtcccatatttgcatataaggacacgatactgtgggaaattcatccgagcatataacaagtgccaccacaccgg

SEQ ID NO: 43915 - DNA, 360 bp, Oryza sativa
  unsure (1)..(360): unsure at all n locations
agctagtcgagctcttctcgatggcttgtttcctgtcttgtgcaaatctccgcagttcttgtttactggcttggcatcggttctcaccatgagnttgtgctcaatcaccttcctggggacccccgacatgtcagacggctgccaagcaaacatgtctgcattgtcacggaggaagatgatgagcgcgagtacctatttctcgtccagtgacaccccgatcttgacagtcttgtcgaaggtggcactggagagcggaacgatcttgattgcgccgtctggcttcagcgtcttggttgtttgctcactttcttgggtggctcaactgtggcgggtgggttggaggtgtgctcgaccatgtcg

SEQ ID NO: 43916 - DNA, 459 bp, Oryza sativa
  unsure (1)..(459): unsure at all n locations
tactaagctcttggctatcatcgagctanaatgatttatgtgttatatatataaagagaggactcttgtgagtcgtgaccatttcaaaatgttccatgacattggtatgcaactcagagcagccgctagcacacatagcacacactgaatgcagcttnttttttatgtgaactgaatgcagcatctttagtggtacactggtacttctatatattcacgttgagaccattgctcaaagctcactgaggatcaacaaatgagtctataggaatatatcaaaggacgagtncgccttgtgaatattcttcctaacttgctgtaagttgacaaattctttaggattacaatcctatatctcaaattccaaaggaaatttacatttgagctctaaccttattgtatatttcctttgagaagtgcaatatgcatcttcttgtcttatctctcacatctgatata

SEQ ID NO: 43917 - DNA, 445 bp, Oryza sativa
agtgatcacaagttctatgaattacaagacaacctccataggtgcaatgaccacatctcaacacggtgactaggagctgcatgaaaatcatatggtaggggaaaaggaacaatgaatttaactgtcttatgttttcaccatcagggcccaaagcattcaacaaaaaaaaaagaaaaaaacaccttgcttttaatttaataaacatgttttctaaacaaactaagtctaactcctttttagatgatgatgaagattatagataattgcttatacagattaattaaatactatatagtatatagcatagagaaattatcaacgtgatgttcaacgaaaatatttgctgaggaaatgtatcttcaaaacatggcagaggctatctgataaatataatctcgtttcaaatgcagcacacgatacatgcctgcgcgaatgcgcgggctac

SEQ ID NO: 43918 - DNA, 410 bp, Oryza sativa
tctgattatacacttatatttatatcactagcactttacaatccatccttaacttcggcgggcgagttagcatcaaaaacaggcatagttacctcttcctcatcaaaaccatgatgagaaccaccactactttcagaacctccagatgtaaccatgatgcgaaatctgaaatttagcaaaataactcaacagtaccgtgatgaaccacgctctgataccacttgatgagcacccaacatcgagtaccctaatttatctctctctttcacggaaccaaataaaacagctatcaaattagttcagaaaatatgatgacgataaaccaaagcactcagaatctaatccacccgtgctttcacacatgaacaggagaggaggcacacacgtaccaagcaacaaaaccaggtaag

SEQ ID NO: 43919 - DNA, 463 bp, Oryza sativa
  unsure (1)..(463): unsure at all n locations
gcttacatataagatgcacatcatcattcactttcttttattacatttaaatatcatgcaagcatgctatattatctattaatttataatttactaaatttatagtttttagaatgcaagcatgttaaatcatcatcccacataattcacgttatatttcaatagatctctgcatcatttttttataatatcctcacttagtttatgtcatttccctcttttctcattaaaccatatcatagaaattgttnttagtccttatatgattattaatctatggtccanattatctccctccttttcttctcttattaagtcatatcacctcaattgtttttagctattagatgattaatctatggtccaaactatctcccttcttttcttctcttataaaaccacatcaccttactnttacatttgaatcatcattgtatatatacacgttacttttacttatagt

SEQ ID NO: 43920 - DNA, 370 bp, Oryza sativa
  unsure (1)..(370): unsure at all n locations
acctcatcaagcacatgtctaggatgggatctcttcgattggcggcgctagaaggtgacgagttcgaccattcctggaacgccgcctctctcaagcgcttctatgtctagaacgggtggcatccaaatcgccaacttgtaaaaatgtacatatcatcatgtaagcccttcgacactctgtaagcctttcggcnagaaaaaaaaaagaaaaaaaagaggaaaatgaaaaaagacaaaaaaaattggatgtagatctattatccaccacggaggcccgaaccagtataaaacccttgtgtcctccgccttctttntatttntgtgtgattgataatttgtggaaaaaccccaaggcatacacctgatcaacg

SEQ ID NO: 43921 - DNA, 407 bp, Oryza sativa
agcttctttgtggttccctaacacgtagtctgaacaacttgatctcataccatttcatcttactcaggactcggacgcgtctcctccaccttagcgaaggcaaaggttggtgacgatcggtgagaagtaagtaaacatttttgaggtcttgtcatcttcaaaaatccgatcacctcgcctcatggggaagagaaaaatcttacagggcggcgcgggcaaagacggcacaaggtgggactgatgccgctttcagcgtgtcccctgcggcgacctcgctactaaggaccaggaggcggcacggagtggccctgctgtcagcctcatgcctacccgaggcccgtccaccgatgccctcacctgtgaggagctccaagcggagatggagcgcatcctctaggccggtgctc

SEQ ID NO: 43922 - DNA, 400 bp, Oryza sativa
agctgtggaaagcttctgcagcaaatccatgttctttttcttttactaccgcgggagatcatatatgtcgtcttctacaacatcgagtattttctgagtggtataattggcaaattgccaaataatttgtttgagtatgatttggttcttgcgtctatgatatcttttgaaaaccaaatcatatatggttttatggataccatattgaatatcgattttcttaatattgcaccctggaggtttctcgtcttagtaatatggctcatatcaatgacccggatgctaattttctctaatattaccttgagttgttttttttttttttgcaacatatggcccattagaatattttacttttatgccttgacttgaatgcttatgtttgttttagacaaaatcc

SEQ ID NO: 43923 - DNA, 403 bp, Oryza sativa
agcttgcttgctaaaaaatgtatgtaataaacatggtaatgtttttaatcaatccatccggcacagaacgtcagcacttatatctgctcgtaatttctataaaaatagcagtattttgatgctaatcccctaaatattattatcccatattcctactttttatatggtatgttatttttatgcaggactcccctgaaatgcatgccaatgctgccgaaattctttgtgccgtgactcgatgtgctcctccatctcttgctgcaaagatatgcagcccaaggtttccattttataaccctgttacaaagtcacaatttaatccttatcttgtgatgtcaggaaacctttctaaaatgaactttgtgcatggatattctttttgcaatggacagaaaaaaagatg

SEQ ID NO: 43924 - DNA, 399 bp, Oryza sativa
  unsure (1)..(399): unsure at all n locations
agcttgcaccggttggttcagaggtttcggctagggggctgcctagacaacgcctccaaggagataaatgacgaaagcaccgccgccgctgtctgtcaaggtctcaaagagaaccgatactggtttttcacccggcagcctcactaaagggcatgggatggcacgacaatgcccaaaaaaaggagtgatgctctgaaagccatcgttgccggcctggctaaagccgggctaagtttttacctgccgttcgcagcctgcttatccatcgctaacgcaccaatgctccaaccgccgtctaacctccgccggcggatgggcacccgcgccttcttgcacacaccacaccggncttcgccgncggcccgcactttctcgcgtgccgatctctgtctctgcagt

SEQ ID NO: 43925 - DNA, 403 bp, Oryza sativa
  unsure (1)..(403): unsure at all n locations
agctntgagccctcttcttaaggtctttagcttagcattcaagatgattgcatgggtatttcctctaacaggaatggaccaacaatgctgcacaacatctgaaaagcctgggacattgacccaaaagttctcaaacctgaagatagaagattttggcactgaagtctcaattgaaatttgacagggcacatgatctgagatgtactttgaggttgctgtgaccatggtgtgagggaacttaagagtccaagctattgaggtaaaaacccaatccagttattgcagaagaggctgctcttgcatattgctccaggtgaagtttcttcctttgagagggatttctactaagcctgcattgctgattatttcattaaagatgagaatgtcattcatgtctcctcct

SEQ ID NO: 43926 - DNA, 198 bp, Oryza sativa
agcagcactaataaaaaccaattctttcactaaaccgagatcaaccgcaacaaccgaacacctcaagctcaaggtgtaaccaaagaacccggcttctttagatataagctcttatagctgacttgctggtgcaccgaacttgcgtccgagtcccaacgggtccggcgccccaagtcgaagcgtccttgagcaggcagc

SEQ ID NO: 43927 - DNA, 401 bp, Oryza sativa
agcttatagagcgtgctccctaagattccactgacattgaaaagatacggtgggtactttggtatcagctttcctgttatttttatcaactaaacacatgcagcccaataattacatatgtgagcacgcattgtttggaattctaattctaaccaaccttcgcacaagtacttgaccactgtcaatatcgggttgaccaaggggggttttgtggccggtcttgtttttagcattaacgtgcgagcagcccaatactctctccatcatcgatagtcatatttcatcttaacatatagaccaaggataagtacttctacttatcatccattcaaacatgctactagtcattcctcgtaaacaagcgatacattaatatttacatttctcaatttccatgtagc

SEQ ID NO: 43928 - DNA, 399 bp, Oryza sativa
catgcaagcatgcaaaacgcttatatcgatgttcattcttatttggtgcatgagaaccttcgaatgagcatgccctagtatatactactacctacttagatgtgttaattacgatgtcatacaggcacacatcaggatgatgtcatcttgacatgtatatatgtgctcaacctaatagtataataagagataccgattatacggacataatatgaaatatatctaaagaatgcaatgagattgaaacaaagaaatatcaaaaataaatactccgtttctaaatattcgacacagctgcctttttaacacatgtttgaccgatcgtcttatttaaaaactcgcgtgaaagatgaaaactatatgtatacatataagtatattaacaatgagaaaatgata

SEQ ID NO: 43929 - DNA, 395 bp, Oryza sativa
  unsure (1)..(395): unsure at all n locations
agcttgtatttggttntcagctgcttcatgttgactagaacagcactatcttctgactggatcataacctccttggctttggtagtttgattattatatccagcatcacttacggctttggttacagaatcaacaacatcaaatcctaatgaatttgccataaatacagcattctgcagtacaaaaggtttgatcaatgtaaaaagctccactgattcgggaatattttaaattggtccaaatatgtgacaagaatgaggaaaatattattttacatatacatatatagatatatatggtacgaatgtaaaatatattattactaggcaccacagactttcgaaaacaggctgtgttaataactcatgtttggcttacaaatattgaaagctaac

SEQ ID NO: 43930 - DNA, 444 bp, Oryza sativa
  unsure (1)..(444): unsure at all n locations
atccttagagacacctgtggcatgcaagctttgcaactataaatctatgttgtatcttctttctgtaaaagacaggaaggctgcgttgttgacattcggaccccacttgtcaaactaaaggaccacggtataccgagtacacagatactgtccaccgtgtcgacttgtagcggacacccgtgtgtctaactcgaggcagaggtggtcctactaaacttgacctccatctagacacncacgatggtgctgtgcactgtggaacaccacgttgactactcgagcgggcacactaatacggtctccacacgcacatgcgaatgactaccgacaccggttcacgggtactctgggtcgactactcgtcaataggtttgtgtgacaccggaatgactatgacggtgctaccaaatgagaaatattcttatcttcacgcgacgaggcgtg

SEQ ID NO: 43931 - DNA, 394 bp, Oryza sativa
agcttgcataaacactgaaacatccataaatcaaaatgatgcagataactcagtaaccctagcctccgcaggcagcaaccggtgctacctcctgctcagaacccaagcttggtgcggcgccagtgcctgcgcttcgcgttgtacctgaacaacacaaaccaaaccacgacatctcagcggatatgcctaagccgaatcgaactcgggaggagcaaagactgagcgcgaagaataaatcacctgatggtgttgtcggtccgcatgcggatccagtatgggatggggcggttctggcgcatcttcttcgccagcttcttcttgatgcggaaggtcttgtgggacggctgcggcgaaacgaaacaagcaagcaatcacatcaacgaaacgtcggtcg

SEQ ID NO: 43932 - DNA, 400 bp, Oryza sativa
agcttcgtggtctcggtgagctcgcggggtcataaatgataagaaaatgaaaaaaaaacaaaaaagaaagcacgaagcttcgtggtctgggcgagctcacggcggccgtgaactcgggaccgccggatctggctgcctggccgctggagggaaaacggatggtgttggtgaggggatggatggcgatggcgaggaggggattaagggcgacagtgcgacacagaggaagaaagggagcgcaatggcggcgactgtggcacgctgttggccaccaaatctggcaaagaagagaggaggaggaagacgatggcggcgcgctgttgaccgccgaatctgactgtggagattatggataccccatacctacacggcatgtatagtccgactgggtatggagtgc

SEQ ID NO: 43933 - DNA, 400 bp, Oryza sativa
  unsure (1)..(400): unsure at all n locations
tgcttccccctctttatgactcgggcggcgattgttttttgtggatcggagcgaggcggatgcggtgacggacggtgttgccgccttgcgggaaaaggatgctggtgcgggtcaatcaaagggtgatcacacccaaacactaccaggtttgcaatttcggtttttttatttatgttgtggcgtcaaaatatctttggaaatttcggatttttttggaacaatattttcttctgaatattaaatatttttttaaaaagtttttttaaataaacttccgacaaagtattgtccggctgtgggtgggtgggggaattgtaaacatgacatcgatccggccgaggtcccgggtcaccggtatattttaaanataattagactgaatatatttgtatatactttc

SEQ ID NO: 43934 - DNA, 405 bp, Oryza sativa
agctggtgcgatgtattggcagcttaccttgttttctatttttatcttatcatgcgaaatacctcactgtattctcgcctccgctcagcaatgacaaagagcacatgagcgccttcagaagttttttgaacaaaaaaagggcaggacaattcccttatcggccttcagaactgttagtttctaccatggtgaagcagatcatattagaagaaagatgctcccccatgtagaaacttgtactactgcctgcttgtattagctccaggaagaagcatagtataaaagtctatttgtattagctccaggaagaagcctaccgatgaactacactgtatattcctctgctgttgtataagtgcattagcgaattggttgggcttctccacttagggttgggataaacca

SEQ ID NO: 43935 - DNA, 405 bp, Oryza sativa
  unsure (1)..(405): unsure at all n locations
agcttctacattgtgaccgacctgacgggagaagcatctttcaatcatgcgaagatcggtcactcctgtattgttcaatccaataggcgtgctgatgcaacatgaggccacccagggtgtaatatatgacgttttcgatctacccgatccttttattcggatctcaccatatgcctattcacagatctgccaagctgaataactctcactcggtcgttgaatcaaccacctggtcaatgcgaggcaacccatactgtgctttgggacaagaaatgtgacgtttngataatctatcaacactgcgctattgtcctgtctttatcccacccactactggcgtatcttgccagacatgatgaangacttgctttgtgatacctgctgctcacagctatgttaactcct

SEQ ID NO: 43936 - DNA, 400 bp, Oryza sativa
agcttctatttcctctcaagcagaacggaggaccgataatacgttctagagaatagcacagagattaatagtgcgggtagcattcatggtacaattccaaattgggcagattctgctatcagcatatacctatacggctatacccaaccaagtcctttgttttccaccgtcggtatctccacagatatgccaagtcaaagaccatacctttattactataccaaagaatctaataattgggagcataacttactctgcttttgtacaaaagaacctggctttatgtaaatcttttatgactatgctactttatcatcgtaagtaccggcctactccacaatattcagtgacatcatttgaattttgatctggcctacaggcctagctagctaatgtcaac

SEQ ID NO: 43937 - DNA, 402 bp, Oryza sativa
  unsure (1)..(402): unsure at all n locations
agctttcatgacaaggcattncgtatgccgtctcatgtttaccatatgccgacgagaggggtcccaaaccaacaacagggtaggtcccagaccatactgtgccaagaagcccatgggtcctccccgacaccaccccaatgaatacacatgtctctcggcatcaaggctcccctgattagctagatactcagccaggggtgtctcattccacctatgtggacgtcttgtcttatgtacggatgaaattccaaggaaacggtccttaagtgcaagagcgggaaaccatacacccggtacggtccccggtccgcggttttggaaattcatttagttcgcaagcactgacccaggtgtctggttctccaagccttttgtaaaacccaagttgtacccaagaagttt

SEQ ID NO: 43938 - DNA, 398 bp, Oryza sativa
agcttctaaggtatcaatacaaaatttatttatttaatacagcaggatggcagagaactatatttatgagaaattaaagtttcttaagatttttaagaaaaaataatacaatgagcattcaattaagaagggaaatacataattttaatttaaattcattctgttagacctgttttcgaaaagaaataacaagcatgcccgtgcgaatgcgcgggctaccttcctagttggaatataaagtagatagagcactaaaaatctcgttgtaaatatagaagtaagcatagctcaatcagctagtttcttgtgatgaaatctactcatacagggtctcacatttacggctaatcattctttcaatcgtagatgacatactccgtttacaaccatacgtctac

SEQ ID NO: 43939 - DNA, 399 bp, Oryza sativa
  unsure (1)..(399): unsure at all n locations
agcttgccaacagcaatcgggnttgttttctttcttatgacaagangaccaggcatcagctccgtcggttgaacttttttgttgtaagttgccgaagtgcttgtggtatactggcgcatgtgcttcgactcttaccccctccaagagttcgagcgacacctcgcgcccctcttcgcccccagagaacatcacccttggtgagttagcctctagctccgctggggtcattgcctcatcgccacaaagaagcataaacgggttaaacttggttggtcttgtgggggtcgtccgaagggcccagagaacagatagcacttcctctggccatttgcccttcgctgccccctcgagccttttctttagtgcttctaggatcttgccatttgtacgttcgaccgc

SEQ ID NO: 43940 - DNA, 378 bp, Oryza sativa
agcttaaaacagaagatctaatttttatttgttatatctcaatataaaattgggctagataaaatcttgttaaatactatacttgattctatagttcctagatttttctgggatttatttgagccgagaaagtatttttaataaatggaattgcatttcatgaataatttaaattgaaaaaggtttttaaaagtctcttttggctttgggccgaaagccggcccaaaacctctctctttctctctccctccccggcctagtcggcccagtccgccgagccaccgctctcctttttctctctcgctgacaggtgggtcccgcctgtcggggtcgtggtcttcctccggccgacgacgtccgaaaccctaacgccgcgcc

SEQ ID NO: 43941 - DNA, 394 bp, Oryza sativa
agctttattgctatctctagaggtaacccacattgatgtaatgaaagggaaggacccacaacaatgacagaacgccccgagtaatcgacccgtttcccaagcagagtttcgcgaaacctcccctctttaccttcaattacatctgaaagtgatttgtatactttattgtgaccatccctcgttggttgcccgcgggacccactatcaagaagtgtatttcacgtccccattcattttttcattggttgtcgtgagagtaggtgggcctatggtaggtgaaatgcataggctcgcgcgaagagccagcgactaaatagtcgctcgtttttctctctccaagttttctttctcggccatgtataaaaaatcctatgtaagcatgctattaacccat

SEQ ID NO: 43942 - DNA, 213 bp, Oryza sativa
  unsure (1)..(213): unsure at all n locations
agcttcctttaatagatgaatntccttaaccgaatatagaaggaatccgactattggcgacgtgataattctcatcggccgattccgggattctgaagacaatactggctctaggtcgatgatgtcttcggggcttaccaaatttcactcttaataggtccttttgaaaaacttatttcgcaaatagaccactgaaatggtctttttgggggc

SEQ ID NO: 43943 - DNA, 404 bp, Oryza sativa
  unsure (1)..(404): unsure at all n locations
agctntagaagtgcaatggtaaattctgaagcacaacagaaggttctcttaaagtcatcactaaaggtgcttcagagactcacaagcattgaaggggaaattggcataacactgcggtacaagatatcaaaacatcccttcttattgagaaaccttgcagagatcttgggagacagcagcagcaacaaccaagaactgaggaggctcatggcaggaatcctcagaaaccttgcaattgacaaagacacaaggcaggagattggacaaatgaaaatgctcattaccaggctgatgaaggcattcctcgattctaacggatcatttagttcaaatgttgattgcttgctgccaaaggtcgctgggcaagcactggtaatgctgtcatcagaaaattcgcataactg

SEQ ID NO: 43944 - DNA, 324 bp, Oryza sativa
  unsure (1)..(324): unsure at all n locations
cggacccaannacgagctgcactcaatcagcatgaccgcattttttggctgccgaaacccaagcttctaataaacagacgcatgccttcaaggcccccacgaacatcaagactaagtcagacgaaaccaggaatgcctatgttgacgtcatggcaatactaacaacgtgcccatgaatacgccacggacaagtctccgacagcagagaacaacaatagcaaatacaaggcccggagagtacaaatacctcagccaactcattagatctaattagacttgcggaaacaagcaaaaacgcacgagctagcagagtatgaagcacta

SEQ ID NO: 43945 - DNA, 403 bp, Oryza sativa
agcttggtgtgcactataagtgtacagtacttggactcacctttgcatattgcgcagagatagaatggacatcctccagctttacattgtaaggcaatggtgacgcagcaactgtccttgagtccacttgcttgatgatttcatctgccttcaacagctcactagctcgaccaaccatttttcctgcatttgaaaaatacagcaaatcagcaatgataaaaaagaaaccaatttactagagaaacttaactcacataaaagtagaccagctctagttcccaaactaacactgtatttgagaacatggcatatttatcattactaaagaaggaaaacaaaagtttattgacaacattgaatagcaggtcacaaagcagagtatatgtacactttacatcgttat

SEQ ID NO: 43946 - DNA, 400 bp, Oryza sativa
  unsure (1)..(400): unsure at all n locations
agcttttcaaagcatcaggacatgaacttttgatttatgtgttcactagttaaaagagcagacaactgactaatagttcctgtatctgatctgtgaatgagatgattcaatgttttagatgctatctcctttccgttgtcactttcatttttcagaagccatagtaaagcgggcacagcatcagcactttcaacacatgcccgtatgtcttcactgtggttgcacaaattgccaaggatggntgctgaatcttctttagctttgaatatgtcacatgatgaatgatgaatgagtaaaaccatttgttcaactatagggtagatatgaaacactggcaaatggaatcaacttggactgttatacaagtcaccaatcaaaatacctgttgacaaaataattg

SEQ ID NO: 43947 - DNA, 401 bp, Oryza sativa
  unsure (1)..(401): unsure at all n locations
agcttcggttggtttttatatactgatcaatgatatgtgctagagtccctcctgctggattttcttcaccaatattatatcagttcggagttcataattgaagtaatagtagtatgatctcaaaactatcttgaaataagtttactgtttattcaccacattcattttgattcatctaccattttatcttcctttntatgtattgagaaaacgccagaatgagtcaataatccatgaatccggttttctcatgtaggatctatcaccaggtcagccaaacaatatgctgaaccttttctccagattttgtatgtatattgcgtgactcatatttttttattttntattatgctgatgatcttccatctgtgatacatttgcacaataagcttcatatcatt

SEQ ID NO: 43948 - DNA, 399 bp, Oryza sativa
  unsure (1)..(399): unsure at all n locations
agctttaataatatgaaaatatntttttcttgaaaaacaataccgttctaatttttcatgatagatacaaatacatgcatattattggttgaagttttaaaggttggtcaagtgtgatttggttacaacttaaaaggttttcattagattaggtctgagtgtgccttctgtgggtactcggtagatgagatcttactcttttagctatcctaatgtccacccctcataacattttgcatttatgatctatttattcgaaaatcccttaaataatatatgattgaacatttgtaggtatcaaggacaactgctagggcaaaagctgcagttgaagcagctggtggaacggtaagactggtgtactataataaccttggattcagggcacttctcaagccc

SEQ ID NO: 43949 - DNA, 402 bp, Oryza sativa
agcttgtaaggaggaacttgaatcgatccatgacaggccatccgataagaccataatgcttcgtccaatcttgtatgccattgccgaggaaaatcagaaatctttctcttgatcaatttaattaagctcttgttagatgcctcggcttgcccattagcttgcgcgtaatatggtgaagaattcaacaatttgatacccatgctataggcaaactggacaaattcatcagatacaaaaattgatccctgatcggttgtgatagtctgaggaatcccaaatcgatagatgatatattcctttacgaactgtattgcatccccagaatcaacttttttcaatggaactgcctccacccacttggtaaaataatcggtttccactaatataaacttatgtcccttg

SEQ ID NO: 43950 - DNA, 401 bp, Oryza sativa
agctttgttgttcatgcttgatgttcttctcggaatgatagagagaagatggatgtgatgcagatattaatcaatttgtgatatagagtagacaatggtaatggtacaaatataatttcctgttttgaaaataagcaggagtgatcattcaacactagtttaaaaaatcaaacccaatagggttgatgaggcagtttataaatgaatatagtgctcgctatcaactgtttcaaaacaaaaaggagagtaattgttaagattatttggatgagactgaaaaaatgatagaatattgttccacatgatattttttaattaaaatatagctaatatgggttgtaatactttttcattgtatatcatatattagaatatatcccaggcaacaacctagtaaaaaa

SEQ ID NO: 43951 - DNA, 398 bp, Oryza sativa
agcttgttttggacagggatattgacatgatgacaactggacagaggcacagtttcctagggaagtacaaggtaagtggtttcaaagagtatgctttttcaatctcgctgctttgacatctgttttccagtctattttgacaattgtctctgatgagtgatgactggagtttgattagctcagagcaaataagttgatttgttctggacagttgaaaggcctgtacttgcaacagccatgcattgttaaagataaatttgaatgctatgtgctaactggtcaatattttgcactactgtcatgtaacgtggatataaactgtggaggcttggcctgtctatagcgaacactaaactttctctggccaaatactttgaaatttacctgacttgctatta

SEQ ID NO: 43952 - DNA, 400 bp, Oryza sativa
agcttgaatacactgacttctgaggtacagcgtctgtacaagttatgtgctgagtggaaagaagcggaagattccttgaagaaaaagtggaagaaaatagaagaatttgatgctcgtagatcagaacttgagtgcatttacaatgctcttctgcgggccaatatggttagtctggagcctttgtacttttccttactagctctttacttagttcgctattcaattttttaaagaaagttttagatatagacatgaatatagaaatagaagcagttacttatcaacattctttccagcatggttactgggtgccattttagtaactttccatctaatacagcagcgtagtgagctcaagtcataattatgttcattatagtggcttggcagctttatgaag

SEQ ID NO: 43953 - DNA, 385 bp, Oryza sativa
agcttcaattgcagacactttatttgtcattagcatgtgatccaacggtagaataacacagagggcctctctggagtcttgattcgttgaatatcccacaaattgcaccctgtggattcctttgtgaaccctgaatgtagttcgatattcttcctctgtgaaagagtgcaagagtatcaacaatcatatgttgaggaggaaccaagtaagatggatttctaactaaaaatagagatagacatggaaatatgagaaccttatttctatgcttaagataaattgagggcttgatgcctcattgttttctcccatgaaatttactaataggtaaatctgaagcgaatagaggagccgagctattgcaatgtttaaagcaagaggtcat

SEQ ID NO: 43954 - DNA, 395 bp, Oryza sativa
agcttaaatatatccacctgcaaccacattatttcttttagaaaagttgtaccatgaagttacaacaaatatgtgggtttcacgacaactattttgtaagttttcttatgattggcgtgaaaaggggggaggaatatgtgtattttgcaaattcatttcagaatatttgcaataaaggagcataagaaattgtggatatgtggcaggctgttataggtcaaatgctagaagcaaaaatagcccaaactattagcgaatcttatttgggataattatgaattattgtcacacaacgaagtgtgttatttattggccattgaaaattgtatattcatcaaggaagtatgaaattgtatatagctatttgaaagcaattggtttacttgtagtaaaca

SEQ ID NO: 43955 - DNA, 408 bp, Oryza sativa
agcttcacatttgcgttacgtatataaacgatttatttcccactaccctgcactccaaaccagcaataatttatcatctagatacacaacaacaatcaccagtcaaccatatattacaccatatattacacagataacaactaaaagtaaccagaagtaattacaagaattgcatctaaccaccgaatcgaatcgagatctaagcagataccttgcaggggcggttcttgataacaatatacccattcttgcggatggttccggcctgctggggataggtcttggacgccccagcgtcggccttcgactcgaaatggtgctcctcagagtccgacatgccgatcttagcgagcccctgataacaaaatcaaatcccaaacatcaaatcaaacaagattgcacaaaaaa

SEQ ID NO: 43956 - DNA, 401 bp, Oryza sativa
  unsure (1)..(401): unsure at all n locations
agctngcttaggagtgaagtttttcttcatttttttctttatttatgtgctaatctctgcaaacaaataatactccatgtacaagtagaaatatattattctaaaataaatatgcattgcaatcataactagttctcctttattttaagtatattgacgtcgaaattggtctataacgaccgtcaacatgagccatccttgatattgttccccttatatatccttgtttcctgagtctattacttatgcgtggtcaattatcgacactgcttagctttgcctatatagacatttgcaccctccatactcatgctatatggatgtgattgtgatcactaaatgggagtgaatgtcgggagtcgggtggagacatgagtgccacccgtatcacgaaaatcttg

SEQ ID NO: 43957 - DNA, 222 bp, Oryza sativa
gagcgggcggcctccaacaccaacccagcaaagcacggagagccgacacaacattttttttttacttttcgaacttacaaaaatcctaactgcaaaaataaacctttagaaaactcatctcctatatacgaatcgttagtataccaccaccaagaatcccttatgtacacttcttcatagcctcaaaaatcgcaagggtgaccattccataagttgacacat

SEQ ID NO: 43958 - DNA, 404 bp, Oryza sativa
agcttaaagccatgaatcccttttatgcatatctgtatctggatcctgcagaacaaacatataggatgagtagtatctgatataaatataatactcgagaaaaaatcaagtattttaaaatattgataaatatgtatttctcctcttgtcaattttgatttccccgagcagatgactctgtacgtttaaacactctgtccgactagtcatagcccccaagcatcgggagtcggcctaggcatttcccaaacatgcatatgagtgacatgagttcgtcattaatggaacaaagtttcacggatcagaatttactacttaggtacttttgcaattattaagagcagaaaataaatttatctcatctctatgcttttgatttattccgaataatacttagcaccttg

SEQ ID NO: 43959 - DNA, 404 bp, Oryza sativa
  unsure (1)..(404): unsure at all n locations
agctngggaattnttcaattntgtagacctttccagtcctatacaacagagttgacaactcagaaaaaaaaacagtgctaaactgagtaggaacaggataaaatcttcctaacaccatagtcaccggcacagttaggattggtgaatgttacggatagccgcatttatacttttacagtcaaaatccatgatcttcatccagttctcaaaatctccaatttcctataacataattaaacaacagatgtttcagcaacaagaaatggcatatgatcaactaaggaagctgtaaaaattgtctagcactattgaatttattagcagtgctacacatggatacttttggggaaaatgaactacacctaaataactgcaatctatccaatgtcgtctcattttccaag

SEQ ID NO: 43960 - DNA, 357 bp, Oryza sativa
agcttgagcttcgcacgcgtacgtttgtttcttttgtctgatccgagagaccggctccccgctgtgagcacccgtacggaattccggtggcgctccccccgacacgacatagggagtgcatcttacgactctccgagaacagcaagttgggcacaccaagcaccatgatgacgaaaaactctcgccttcagacagccattcacgcgagcgaaagttggatcatggatggtgacaaacttgccgatattcacgctgtacactagcggagcaacaaagctaacaatccctaccacagtctccgatcattgaggtggggacggtgcatccaccagtgcatgctcgccaaccgccatgagc

SEQ ID NO: 43961 - DNA, 399 bp, Oryza sativa
  unsure (1)..(399): unsure at all n locations
agcttgtacctggatttntcactggatatagtaatatgggaccattgttactgtctttcaggattttcccaaagacctccttcgcaaatttatggatcatgcttcttggaatgatgatattaagccatgggtgtgggacttcccacatgcccttagctctcaacttcatctcagaagagtgtaccctatccaagaactctatgtatgttacatccgtgtggaataaggaggaaggcatatatctaagttgagacagcagtgtgttgacctcctgtaaacatatatacatacagaattcaaccactcaaacttgacctcattttacttggtttataaacatctttagtgacataagggtaatggttggctcacctgttccatgacatcagcctcgtcagg

SEQ ID NO: 43962 - DNA, 399 bp, Oryza sativa
agcttcgatgagtgcgcggccgagtgcagtcgcaactgctcgtgcacggcctacgcttacgccaacttgaccggagccgaccaggcaaggtgcttgctttggtcaggggaacttgctgacactgggagggccaacattggtgagaatctgtacctccggttggccgactctactggtatgcccaatttctcttgccctgcggtgaaaataaagctcttaattagatagcctgctcatcgaattaaaagcaacatccatatatacacttgcaaggcatggtatagaatttctgaagaactgaatatgcagaggtcttgccaggccaagattttccacgaacaaaaaaatgttcactacttgataggactcttctgaagaaaacaaaaaaggaatatatac

SEQ ID NO: 43963 - DNA, 398 bp, Oryza sativa
  unsure (1)..(398): unsure at all n locations
agcttcagttttatcagattctgtatttctgtcctcgctttaattactaccattccaagatgctctgagtggnttactaaaatttacactggaataaagatccgacaagcatttgctacggcctttttgggtcaatgcgagcatcgatgctgcaacaatctctgccttatctttaaatgcctctgattactgcttttgatttctcggctactcaactgtttgaacaagtgatatgagcatcaaaagctttcttaatgggagtgctgatttaagccccattcagcaagtaccccccatcttcttggattccagtgggatgccctactggtttctctgagctgtggctcctttgtattctcgcacaacttgattagaatatggagtcacactgtcacaca

SEQ ID NO: 43964 - DNA, 390 bp, Oryza sativa
agctattgaggaagcaaacaacttccttcctttgttttctgcactcaaacattctggaggaaagttttcacgagaattctctccgatttccttgagcacagaagtattgctagatttttcaaacctacacaatggggaaaaggtagaagaaaatacagaggcagggctcctagttgccttcacttgggagccagtaagcatagaaagctccgtgtttccaaaacgcctgccagaagcatagaggtttttcaggtgccggaagcaacttataactgtgaaagaaatctttgtccttgttcagtgaaaaaagcacgattccatgccatgctttttctgagattgaacccccctgcatgcttggtcgtcctcattttagaggtagccacgcct

SEQ ID NO: 43965 - DNA, 395 bp, Oryza sativa
agctctgtgaaagaaacatttgattccatcatggctaccaagttagaaacaaacagtacaagtgtttagccctgtgatcatcaagggatcacgaggtgtactcaaatggctggggtggcaggggctcctcgtcgacggccatggcggcggcgcctgagccttgctggccagcggtggcggctgcggcgttcgtcgcctgagttgccggggcgtcggtgaggactagttcctccgtctcggtgggcttgaggtcccgtaggaggacaaatccggagggcgccagcttcacaggctcgtacctgccgccctccaggaattttatgaacttctcctgtgccgggacaacccgggccgggttagtcaggatctggaaggtcggttcgggctcaggggct

SEQ ID NO: 43966 - DNA, 393 bp, Oryza sativa
  unsure (1)..(393): unsure at all n locations
agcttgaagggctntccgatcaatcagtatctattaataccagntaaatcataacggacagggcctacatgagtttatagtactaagttttcactactgtcacagggaggtgttgtgaggtagagtgttgtttactattgtcattcatctcatgtgttgttactagaggggcttttagcaagctagctcagatgatttagcttcaattaatataattctgctgtctacaatttaatccatgttacttgttactaagctcctaatctggtcacattttttttccttggtagtgatgaagtcctcattgggtggagatggaatgacaggaacatcaactttaaaagaaatagatttgtgaccatgtgttgtcaatagagcaatgttatatgcaag

SEQ ID NO: 43967 - DNA, 406 bp, Oryza sativa
  unsure (1)..(406): unsure at all n locations
agcttcangtgatgaatgcgtgattacaatttattatcgcttccccaaatgatacctgttggaatgaagaaggcgaagcatgataaacatctgaatatgtcaggtgactcttgcccttgtctttcaggtacagtctgatttgaagtattagcagaaggctctgcaatctgtgttttctttggtggttcatcaggtgatgtttgtcttactgtcctttttctcttccgcagaatcaccctttgagttatgcatgagttgcaattgggacagaacaggtcatgagtttcttgctcatcaagaattttctcaaggtcatactctctaatgttcactctgcccttaatgacatcttcatccttctcagcttcaatttcatggacactagttntgttcatgctgacattgg

SEQ ID NO: 43968 - DNA, 403 bp, Oryza sativa
  unsure (1)..(403): unsure at all n locations
agcttcacttgtccgcgcattcgcttccgtttagtcttgtattatcgncggctttgtgggggtttgctctgagaggcaattcgccgctgtaaaccctggtcgcccgcccagccgcttgtcgtgttagcatctggctatactcaacgattgacacatcgtcgatcatcctgcgggctttagtttcaacctggtcaaagatcaacactgcaaaattagagagtgaggctatgtcaaaagtcatatttggcgaaataacaaagcacagtagtatatagcagaagaacagtcttactgttcgccccctcatgaagtatcaggttcggcaaaccgtcgacctcttcgtcttgatcaaccgtgacttgccatgactgggagaggggaaagatgcgaagcatacagaatt

SEQ ID NO: 43969 - DNA, 400 bp, Oryza sativa
agcttctttatagctattttgctatgtgaattttcaatgatgtagccaactttaggttacactcatcatattttacaaagcagtcggtatatcacttggatcatattattcgaggattcacaccgcatatgctatatattggtatcaagtcacttggttgactacgattatcaaaaccactcgtcggtgcacctgactttattttccagccctccacagtcttcaaatttggtaaaagtactcgggagaccatgacaaagatgattgaagcactcggctttggagtaatctggttcgagagaagattatcttttcgactgcgaaggtctcaggggctactgtggatattatgggtaccccatacccatacggcatggttatccgactagtcataggggat

SEQ ID NO: 43970 - DNA, 405 bp, Oryza sativa
  unsure (1)..(405): unsure at all n locations
agcttgcagcccagcacaaactaagcctgatctaattcangcccagtccaaacttcaatacagctaaagaaatgtttggcataaatctatcgattggatggatgattaatggaacagttgttactaatttgacaacccagagatcgggttgccccaaaaattggattcatgagataaaaataagatgaaaaagtgaccaaccttgaccatacacccatgaccttgcctttcttgacctttatacacttgatgtgcactaattagaaaatttgtatctacgcatgatactaatggccttgaaataatattgcaaaggaatgaacttacagagtcctagttttcatatacatagtactacataaagagccacgttgatcatctacaagactcgcgggaacaatacct

SEQ ID NO: 43971 - DNA, 403 bp, Oryza sativa
agcttcatataaagattaaaacgcatacattctaacatagcaacaaatagacctcaattattttgctagcatgcacaagaatatactagaggtataaaacaaagctcttctttttcttatttttattaattttcagaattagagcaaatgcataaaaataaacatgaatgcatgaaaaagcacaaactccccctcaaattaacctccaattctccccgaagaaaaatcaagaagaaattaaagatttcgagaaagacatccaattgccaatgatatcaccaaggttatcatgaatcgacatatatccacttgtattaagaaaaactactacctcaaacactatcatatgaaaagctaataatcgagagagtagaaccaaaaaatatgtcaatccaaaagtaaa

SEQ ID NO: 43972 - DNA, 400 bp, Oryza sativa
agcttgtgaaaaccggtcggtttttgctattttctgatcagatacgacccagcaaaagtcgattctctgtataaataaatctcatagtatacgcttgcgttttgacaccctagctagaatagaagctgcatctatcgcttgcgcgggcggcggacggagtccatctcatctcgcctcgccgcgccgcaatttcctctcccagctcccaataatttattggtttgttcgatcgatcgatcgctcgctcgccgtaggtacagcaaatcatcgattggttttacatcacatctatgtttgtttctttgctctttttttcccccaaatatgattggcagattaattaaacgagattttgccattagaacgcatacatacatgcatgcagcttttatattccctt

SEQ ID NO: 43973 - DNA, 391 bp, Oryza sativa
agctttggggaatatatgataactatattttttctttctgctcagctgatgaacctatggaggctgaagatcggtttaggattattgagaagaagctgacccttgttcgagtacgtgaagccgataaagtgatctttgcggcgaaccaattggaagaagcccgataagaagatgctggagaaccaaactgggaagaatttaccacagtcttccgtaacaacttcttgcctgccgcggtgatgcggatgaagaaaaatgagttcaggagactacggcaaggaaataccacagtacaagagtacctgaaccgtttcactcatctggcgcgctacgcgactggagatcttgcgacgaggaggaaaagatcgacaagttcatcgttcgcctgtac

SEQ ID NO: 43974 - DNA, 400 bp, Oryza sativa
agcttcaattggaaagttagtaaagttagtcctaacattatgatagccagccctcataaaagagtgagacacactgttttcgtggagaatacttatttaattataaaagggtggatgatgacggaagatttcgataagtaacttttttaggacaaatgatgaagatacccaattactacaatgctagctattgactagacaagttattataggcttgtaattataggcagcaaatgtttggaaagtaagattcaagcgcactaagaagaaatccaatgtcattgcagtgatctctgtttgccctgcaaggtcccctaacctgaatgtaaaaataggtagcagatacaagcacaacaataaatgattagatatacatttcatttttttactctttgtaagt

SEQ ID NO: 43975 - DNA, 396 bp, Oryza sativa
  unsure (1)..(396): unsure at all n locations
agcttggcacanagttgttattttcaaccacttgtcatccacaaacggatggacaaacagaagttgtcaaccgtaccttgtcaaccatgttgcgtgctgtgttgaaaaagaatttgaagctatgggaagactgccttccacatgttgaatttgcttataacagggcagtccattctacaacaaactcttgtccatttgaaattgtttatgggtttataccgcatactcccatggatcttttgcctttaccattacaggaacaagttaacttggatgctacgaaaagatcagactttatcaagcggttacatgcggagacaagaaagaatattgagaagaaatcagcacaatatgcaaagcaagcaaacaaaggtaagaagaaggttacattccagc

SEQ ID NO: 43976 - DNA, 395 bp, Oryza sativa
agcttagccacgtctgcgagtctggataagtaaactcggcaaattgaagcagaacagtgtaatttccattctcgagtccaaggccataatacctcaccgacgacgccgacatccttgcagtttcaaataatcttgaatcaaggacattctgaattttctgtggactatttattatgttcactccatctgtagccagaaagtagttcccgacattgcttacaccccatcttgtgtcactagtaacataatatgatgcagccccaaggtttgcagcatctggttcgtaaatagttccatctaagcctctagtcgttctattattgccgcagtcaaccgcaaaggaatagtctggaattaagatttgtaaaatcaatcattcaaatttccatgctcat

SEQ ID NO: 43977 - DNA, 405 bp, Oryza sativa
agcttagagctagccataaggaatataaaattactttatatgttttcagtatctatgttggttttgaatcttcatgataaaaggatgaatataaattcttccttttttttggtgagctgcaacgtaaggtcaagaagaggctttcaacattgtaacatttgctacaagtaaaaaaacacatggatgtgggtctcagcttacaactattgtgttcctcaacattgaggttgctctaagggtctatcgcaaatactctgctcttcctatgaaacgcgtgatacaatacgtgcatcttcttgtttactgatgtacccaactttatgaaagactaagcaatatgcaaatggacaaattctccaacatctcaaagggtctgtcacaaataatctattcattctgtgaaat

SEQ ID NO: 43978 - DNA, 425 bp, Oryza sativa
  unsure (1)..(425): unsure at all n locations
gacccttaagcacctgagctgcagcttaaaanttcttcaaaaaagaggggatgtcattctaaaatttttattgaatatattttgatgattacatacaaatcggaggtgcctaaaaggtttgcaacttcatcgtccaatgtttttttttgtcatactacatttgcacctatgttttgcacactttttttgtctccaaaatttagttgtaagttgatgagagagaaaatgtgtgtggggaagaaagaatatatagaaatttagttcatttgctaaacaaggttttataaaatagttgagaaggaaaactctagtgaaagttaatcttaaataatagaaaacacactaaaatgaaaattaaaagaagtaaaacacattaaaattagtttaaaactttacaaatagtttttaagaattatttggtgtaa

SEQ ID NO: 43979 - DNA, 402 bp, Oryza sativa
  unsure (1)..(402): unsure at all n locations
agctngtacacaaaatgtatacagtaatcatgacgtaattacaataaagtatgatcaactttattaattataaaaaaggtatgccactgaacctcattaattaacagctcccaattcaagtagccaacttcttaagaacataagagcagctccttgtcagatgcagatagccgtcactctccatgacgaccttgagattatcaggatccgccatgaatttgaagcaagcatccttgagcccctcacagtgatgctgctcagccaacgtcaacgccgtatccgccgtgctggcgtcgacgtggctgcacagcgtgtcctcgcacatcagcttcagcctctccatgccgtacctgtccgccgcgacgagcagatgctgcgccatggctaccacctcgtcgtcgt

SEQ ID NO: 43980 - DNA, 382 bp, Oryza sativa
agcttgaatggtagcagcagcaatgtgttcccgttccgtggagttaaatccggcgtttgtctccttcttcagttcctccgttatactccctatgtctcgtcccagctgcccagatcttcgcgcggtcggtcggcgcgttcgttctgtggcggcggcggcggtggaagacgatggttgagagaggcgaggcgaggcgagggtttgcttttggtctctctctgtgtgtttgtgtgtgtaagtagagagagagagctccctccggctccctagataaagcacagcaccgcaccgctcaactccagtagtccactggagggagtggagtacttccctaattaatctctctccccgatttcttctcctctctctggagtctggactg

SEQ ID NO: 43981 - DNA, 404 bp, Oryza sativa
  unsure (1)..(404): unsure at all n locations
agctttaggttntattatagtaagagatgatacactcatcacatgggtagacacagaagcgtaggaaacaaagcccaatagatccaacaatttttcacgaagtatatgtgatcttggtccaagattccatgggtcggcctgggcctatgaccaaaccaaatcccaagctgatcagtttacatatacatggccaaatttgatggacgaatgaaaatgctagatttttttgggatgtccatgatttgttccattggtgattgttcgagtctcctcttctctttagctntatgacatgcctgctatctataatctatgtgcatgttgtggtagcagtctacggtaaggtcccatttagtttagcttattgaacggattattgtgtagatggtctatttatattataa

SEQ ID NO: 43982 - DNA, 400 bp, Oryza sativa
  unsure (1)..(400): unsure at all n locations
agcttangtagaagagtttntgacatatatatccaggtacaaattgagtgcattttacataatgtgtttctactgaatcttgccattactcatctaaaagtattactgatatttacatagggtgctctaaaagaaaaggatttcgatataaagaaaacagcaggtggaaaatcttttcgcgtagttaataggagtttcatggtaactgtgtctaaaaacttccttgagatccatctattctgggctggcaagggcacagatgccatacctattaaaggttactatgggccaatgatctcagcattgagggtcactccaagtaagaaccacactaaaacgacaacaggaagtgttatactggctgctaataaataatatntntcctttgcagattttactc

SEQ ID NO: 43983 - DNA, 398 bp, Oryza sativa
agcttaggatgtgcatcgactacaccgatcttaacaaggcatgtcctaaggacccttaccccctgcctcgcatagatcagattgtcgactccaccgcggggtgcgaccttttgtgttttctagatgcatactctggttaccatcagattcgcatggctagggaggatgaggaaaaaactgcattcattacccccataggaacctattgttatacgacaatgcccttcgggttaaagaatgcaggtcctacttttcaacgtactactcgaatttctttgggtagccaaataggacgtaatgttgaggcttatgtcgatgacttggttgtgaaaacgcgcaaccaagagaccttactctcggatctagcggaaacttttgaaagtctccgctccgcccgc

SEQ ID NO: 43984 - DNA, 396 bp, Oryza sativa
  unsure (1)..(396): unsure at all n locations
agcttcaactgcaactctctcctgattaataggtataagcatatcactggtaagtaaagaaaataagagataacttaaacatcattaaataaatgagctactcagtcaatggaaataaaatcacctgaaattggttaaataaccattcaataagtaccgagggaacaagcaattcttcggcgagatgccactgaataaggcggaccatataccaccatttgaagtgcaccaaaggctcgtctatgtctccaacagctgggggtgcttcgctnttcatttttacttgtgtgaccccagcaataagccctggtgatgactgttctctaaaagatggaggtacctcttttaaacaaaattcatccaaaagctgttgtaaatattcaacgacatcgtttg

SEQ ID NO: 43985 - DNA, 398 bp, Oryza sativa
agctttgagtataactcaaaaatgtatcttttgttttataccatgaatgaattactctctcagcaaatattcttgaggtttctttactttgaagtctttatatacttggcctaatacctgatgtgcaaacttaagtagaactcaaatagatgtaatttttattatttggtcaaaatgagacaagataccaagaacgaattccactttcatgaaatgttgacataatcgtgagttccttaatgaattgcttacatcctctgctgataacaatcggtgtgtatcaagcagttatatttttagttgagaaaatatgatactctgcatggaatttccactctttcagatcaatgatgcatatgacatctattataaaataatgatcagctgtaacaatcttt

SEQ ID NO: 43986 - DNA, 398 bp, Oryza sativa
  unsure (1)..(398): unsure at all n locations
agctntatttcttttatagcatcattagtgccaacttaagtccacagcacagtgcaacatagaatatatttaacatgaaactaaacagaatagataatcacggaatttgtgaccagcgtgaatattccacaacaagcggtatgcaaggacttcatgcagcagtagtcaaatatcatcacattacatttcttatgacttaacgagaaacatttttatgcatgcttaaccaacaataaaccacatcttgacaataaagagtatttagcttaacacaaaagaacacagtaaacacaggacgacctgttaaaaagatattctaaggttgcctaacaacaggagcttctggctggctacaaacaactgtccaaattagagtcgagatctcaatcacataacct

SEQ ID NO: 43987 - DNA, 390 bp, Oryza sativa
  unsure (1)..(390): unsure at all n locations
agcttcccacgggatntgcgatgcctgtattcgactnttggcttgcgatgtggagatggagtcttccagccagggctgtagtcagtgtttgcatcatacggctaggacttgtcgtttgggaggaagacgggggaacgtggtggggcaacgatgtagtggcaacttgttaaaagctggagtttacttttaggtgttgggatgcgggttcttttaattaagtttcttaaattgcatcaatttctttgtgggataggattcaatagaattgtggaaaatcctagctcatcttgtgtggttatcatggtgtggtctactttggtacagcatagacacatatactactagtttatttgcacaatgaacttgtaagttctcccggcttgtgatcta

SEQ ID NO: 43988 - DNA, 396 bp, Oryza sativa
  unsure (1)..(396): unsure at all n locations
agcttcaggaagatacagntaatcttagtttttctccataatactttatcgatcaattgacttgaaaacgagaagggtaaaggacagccaatcttgttttgaactcaggtgttagaattcagaccactggattttaaatcttgcaggtgaggtcaaatttagcatttgtggtggcattgtgccataagttgtattttttttaaaaaaaatcctgcaaatgcctgaatgctgcaaaattgctcctgagcaagcattaacaactcgggcaattgctagtctcagcggtaagatgttttggagaaatttgcaaaatatacaatccagctaagcaatgaaacatcaggccacacaaaattgaggataaactttaactatacaaatacataagctgatgat

SEQ ID NO: 43989 - DNA, 397 bp, Oryza sativa
  unsure (1)..(397): unsure at all n locations
agctngatcgggaacaattctttntctgccagttgtgctgacacctgccaaccttccttcatggcgagacgtangaactccgataggatcagtctcggccacgtaatcgatacaaaactcaatggcttcctcggtcgtgtcaccttcaatgatgctcccctctggttttgctctgttccgaacgtaagacttcagaattcccatgtacctctcgaatggccacatttctctcataaaagctggcccacatatttttgtttgcttcactaggtgaacagtgagatgaaccatgatatcgaagaaagctagtggaaaatacatctccaagtgacacagggtactgacaatatcggtctgcaacccatctaggtcttctggatctataatcttctgaccg

SEQ ID NO: 43990 - DNA, 405 bp, Oryza sativa
agcttaactagtatattggacttaaccgatttagttctaattcctcttatacaagagaagttgacgaaacatactttatagtcggagatcgaaaccgatgcagcccaaactcaaaaagaagaatttgttgaaactaaaactagggttggtgatgcactgaaagtcttttattaaactattgttcgattacaaagaacaagcccgactcatacacgactcgatcggctatcttacagaacaaggaaactaactgagtccaattctaacacgacctcatcggtttaacactctatctatggaaatggaaactaaaacaagaagagaatccatggtttggcaccaagacaagaggatgcaacgccggcaacctgtcgaactgcacaaacaattaaaaaaaacaaagaa

SEQ ID NO: 43991 - DNA, 404 bp, Oryza sativa
agcttgccatacgctgcatatctctcgaatctctctacttcttttcttcaccgatcggattctaagacgtcacaggaagtaattaagcgtcagcaatatggcatccatacattcatccatcctgcaattacacgacgagtaataatcctggttgatagacagaggtctctaattcgatggtcataatctatcactcgatcgtcagctaactgagctgtctgatctccatggttttgcagtgtccggagtgatttcagcacaaacatcaacagggtatgttctttgtcgggcattgggcatgaagttgatcagtggttgaaccccaattattttttctgaatattttctaagaacaaactgttgttctcaccggcgaggatgcggcggaagcagcatcatgcatg

SEQ ID NO: 43992 - DNA, 405 bp, Oryza sativa
agcttaaaagcatttgtaggatgtttagaatgacatagcgagagttgatagacctagcgagtagagatctattttgtggtatttcaatgtaaaaataatatttattttaatttctcatgaagatagctcgttggtacgtacgtgatggggaggttttagatgtgtgtgtttttttaaaaaaaaggatctaactttcaaaaataaaataatagatccaacgatttaaataaaaatcgacggtcggattagagtgtcacttggcggtctgagagcgtcagtaaggtgttacttggaggcttagaagtatttatatgatgtttaatggactcttagtatataataatctttttctaaaatttttaagattttatttaatttaagaatgtcatatagtagcttagatgt

SEQ ID NO: 43993 - DNA, 393 bp, Oryza sativa
agcttcatccgaatcattccaagtgtgttactttcttctcgttgggattattgggggtataagccaaacagtatatttacaaataaaaaataatttgtatataaaacttttatatactgtttttagcgatctaaaaacaaaaaacaaagtttaaaaaataaactacgatgaaaaaacatctaaaattaactccaaatctaagattaaaaagacaaatttaagtataagaaaaagatgaggctggaagctcctcacaattgtagaaaatctttttcacatgttttctatctcaaaaaatgtgttatatatttttgcgtgattattgagggtgcctattatgaatatgggcgaattactaaacgtttggtcggacctaattatattttttgaaac

SEQ ID NO: 43994 - DNA, 399 bp, Oryza sativa
  unsure (1)..(399): unsure at all n locations
agctnttcgattaccccgcattgttatttttcctccatgaactttagccctcatgcactctaggcgtcatacgtttctagcagggagaggagttctggcgctcccgggaagggaaaaacacacacattcctacgttgcttcttgtcgttgaacccagtccatcatgattgttctcttatgggtatcctcatgtagtattgccaagccagcctctgaccatccggaacgggcatccgccatccacctggccatccgaaccgggcattcgccagcagactgcttgccgcatcacacacctaaaagaagaccactacgcatggatactcccttcgctcagctatctactccgctaggtctatacccatacgagaagtgcggttgtacggcgatcatttcatg

SEQ ID NO: 43995 - DNA, 399 bp, Oryza sativa
  unsure (1)..(399): unsure at all n locations
agcttataagaggatggntgatgtgagtaggagaattgatgattaccatcagcatccgcagttcggcgtttttgcaagttcagttgtcacaagtcgtgttatggagtgcttgaaatcatccaaggcaaaatagctaatatcttgttctaattctaatgcaatacctatgtagcatagtgcactttgtcctgtttttttttctacttatgtcatattggcatcaattcattggagtagtactcttgaatgcaatcaattcttttttttcctaaacttttctaaatccatgaaatttacccataatttatcttactgtttctggtaaatcatagtatggaaacttcaagtttggtcggataacttatgatctatttaattatatcttgtctgttgtgttta

SEQ ID NO: 43996 - DNA, 400 bp, Oryza sativa
agcttagtcgttactattgagtatgtggtatccataaccatgacaacaggcgtgcactcaaggcagccgggcccaggaggccacaagcgacgagcggcggtggtgcggaagagggcatctgggacagaaggaggatgggaccctcaccgtgcctgcaaggcagcgagagagcggctggtggtgaggattggcggcggcacctctcaagcttgacgaagacaatagcctccagcaagcttcggtgaacgagacaaggagaccgaggctctccgacctgtggatagaggaagagcatttatgggagctcggggtatctcaaagtggtggggaaaggtggccggagaccgccatggatgtaagaatggtgtttcttatctaatttgcaccattggttcggatt

SEQ ID NO: 43997 - DNA, 400 bp, Oryza sativa
agcttagcataatcatagtaaattatttatttttatgacaatacacgtttattacagatcaagataaaatatttgtgttgcacctagacttctttgccaatactttctctgaacattaatttaagtatgtaaaacaaaattatatttgtgaaaagcaggaggataagtagaaaataataggaagataaggggttgtgcaacaaagaagggaatatttaaccatttgccacatttagatgtggcaattaactttttgccactggacccatatgtcatagacacatgtggacctacatgtcattgagatagagaatagggtggcaaggcggcggctcaagtggcaacaataaaggtgctaagggtctggggaatcggaaggaggaaacggcatggagaagat

SEQ ID NO: 43998 - DNA, 396 bp, Oryza sativa
agcttgtacagtttgggaaggggttttttgatagaaaagaagaatctacttcaaccgatatgcccttaggcacggccatacataacatagaaatcacacgtggaaggggtgggcaattagctagagcagcaggtgctgtagcgaaactgattgcaaaagaaggtaaatcggccactttaagattaccatctggggaggtccgtttggtatcccaaaactgcttatcaacagtcggacaagtgggtaatgttggggtgaaccaaaaaagtttgggtagagccggatctaagtgttggctaggtaaacgccccgtagtaagaggggtagttatgaaccctgtggaccacccccatgggggcggtgaagggaaagcccccattggtagaaaaaaaccca

SEQ ID NO: 43999 - DNA, 379 bp, Oryza sativa
agcttgatacgaagatactcttgggtattgccccgccgccctgactattgccgggagagggccaacaatcttgctacgacttaagaatcgactgtctcgaatactctactgttctgattatagcgtgctcaatccacagggcacccctaatatagatacactgccaagatgaaacatctagaacgctctccaaatctcataattgacttcaaaggtacagtacttgaaaaatatgacgttggaagctgcacaaaagagcagaacatgcatatcacatgcacactatcacaaaagaggttgtacatgtttctgtgctattatagggggagcggaatatgaatatgggtgagttaccagacgagtggtatgaccttgttgt

SEQ ID NO: 44000 - DNA, 404 bp, Oryza sativa
agcttattgtccttgccttaccaggaaccctgtttgtccgaccccgccccggcgttcccaactattggcatgcgaggtttccctgaaccgactagttaattagccagggtgtcccattccaccttgtggttgcactttgattatgttcgatgagtttcccacaggaatcggtccttatatacaaatacgggacagtgccacataggcacaacccccgcatcgcgagttttcacaatttattttattttcgaacacaccgacaccacatgtcgggttttgaaggcttcacaaacccatttcccaagttttcgacaatcaacggtgtatgtgggatattaggtatacgcgctcagagagcacggataccgaagtaccacaagggtggagcgacaaggaatcagggt

SEQ ID NO: 44001 - DNA, 314 bp, Oryza sativa
gcatttttttttctgtggctaatgcctgggcgaactcttgactgccactaatcgcgccccaccgcgtagcgtggcgactatccacttgcctcggaatacataccagcgggccagcgccttctatcgtgtgggaacggtctctaagtgagacgacgcacatataccgtacaccccttctatacaagcagggcataatatgtgcaaaaaaatcgtttcctagtagcggatcttcctacaaagaggaacagtataatgaatatagacaagaaatattatagcgaacatgagtgaccatattaagtatagagacaata

SEQ ID NO: 44002 - DNA, 168 bp, Oryza sativa
cgagagaacacgcgccggagaaatttttataaaaaagcggggatcgcagaccgaaagcgaataacagtagttagaaactacacgatgagaaacggttagaacacacaattaggacctgaccagaagccccaacaaagaatgagctctaagaagcacccgaccctcaag

SEQ ID NO: 44003 - DNA, 406 bp, Oryza sativa
  unsure (1)..(406): unsure at all n locations
agctttacacgatttcaatataataaagattatttatttaagagataaaaaaagtaatatacgagaattattaaaaaagaattcccggagagttactccgggaagatacaataaattaagattaagtggtaggaatcaaccagcatgttgcaataaataaaaaaaaactattttttcttccctattgttctttcttataacaagcccaagaatctaaattggattactttctttatatatactctggccctttcgaataaaacaacaacaatcggaacttaagtaccgattgttgtttcttaaagtctagttagagtttcttaagtttccattggaattgaacttttgtgttaattgaggaatatgtctattntttctatgtctaggacctgtcattattgaaact

SEQ ID NO: 44004 - DNA, 388 bp, Oryza sativa
agcttgtgtaatccttagtgtgttgtatctctattacctcgtttatgcgggttgtagactaatagcaagctatatagcagtaactattcgagtggacagttgtgttcatctggagtgatatataatggctatggttctgggtgttctttccttcataacgggcattctcgcaaatttaacctatgttgatcacaggtttagttaattttgacaaaaaattctatgcacatgacgtgaattcatatgcagtgtttgtaagttactcacctgttcttcactgtaactcggcctatatcatcaagccagtccttgtaccatcataggccggacaggatactttattagatgttctacccagtatagtccttgtaacatcaaaccaagttcg

SEQ ID NO: 44005 - DNA, 400 bp, Oryza sativa
  unsure (1)..(400): unsure at all n locations
agctttcatcactgtcaacttggttttctttcttatcaagatgaaccgntcgttctcgtcaaacaagttgttcaagtgttatacatagttgacccgtgtaacaagaaactacatgttgttcgtgaagggaaaaggagaattgttggattggacaatattgcagacgaggatgattacaaccagcacgtccatggcatatgtcaagaaatacctctagaagaggaggaggaagaagatgaagttcaatatgcacgtgtcgaccatgaggaaggattatttttgtaatttatgtacgtagtttatgtctacatgtctgttatctgtatgactctaatatgttcggaatgatcaatagtatattgcttatgaaatagtcaaataaaataattaagtgaaacac

SEQ ID NO: 44006 - DNA, 393 bp, Oryza sativa
agcttcccagaaagagctcattctcctttttttcttgagaaacaaaaactacgatgatctatcggactagaccgttttgaaactgaactggctcgattttgctggatcttttttactgtctgatttagcatcctcttgttgcatattcctaataacaaccaaagtagaacatttatgtaatataacattctcatctatagatgcatcaaatgtagcaaggagtgagttcacctgctattgtagttttttcacatgacttcgcgtaatcggactttccattacttggtcgcatgtaactgtaattgaacttggtatagtcatgactgggatgtcctcatcacctatggcttttttatacaacttgtgaggagacaatatgggagactccgatct

SEQ ID NO: 44007 - DNA, 399 bp, Oryza sativa
agcttgtgttagatggttgcaaaaatctctataatcttcctccactgtggcagctgccagctctagaagttctttgccttgaaggactggatggtttaaattgcttgttcaactgtgacatatacacctcctttacattttgcagactgaaggagcttaccttggccagtatgagaaattttgagacatggtgggacacaaatgaggtaaaaggagaagagctgatatttcctgaggttgaaaagctgataatcaaaagttgtcctaggctaactgccttaccaaaagcgtcaaatgtgatttcagaattgtctggcggagttagcaccgtgtgtcattctgcatttccagcattgaaggaaatggaattatatggtttggatatctttcagaaatggg

SEQ ID NO: 44008 - DNA, 386 bp, Oryza sativa
actacattaatacacttgcaatcatattttaatatatatgtcactacggtagcgtattctatattcacacctactataatgcgctcatatattcagctatcatgtgagccactaaaaattggctcttcccctatatgctattggcccaaatttacgcactctctcatgcctcaagtaaaaaagacgtatttgctcccctgagttgtcagacatgtcctatacttagaaggataaatatgttttttttacttgagagctaacgctcaacccaccgtaaatagacgggagtgagatacaagggtgtgcaaattataccaatggcatatacaggaagagccaattttaggggcatattacggataaaaccaattttcagcggcatataa

SEQ ID NO: 44009 - DNA, 222 bp, Oryza sativa
agctaggatgggaagacgatccatctatctcctcttaggtcgacaaccaacccagcgtctcacaaatacccatgttctctatgtaccgtataaacagattgggactacaatctaccttcctccagattgcatcttaagagctctcgataaagcaccgattcatatcatgcatgatcagctagcggacattctatctaaagcacttgggcaccacaagttcat

SEQ ID NO: 44010 - DNA, 383 bp, Oryza sativa
agcttgtgggctgcaaatccagggatgattctaactttgagaaatctggtaaaagatggttgggctgagtctgcctgagtgcctggcctgagtcctgttattatcatacagtggaaaaaaccggaccggaccggcggttcgaccggaaaaaatcggaaccagaggtgaccacggttcggtttcctttaaagaccgaacatgctatcgaaccgctctgaaccagatgaaccggtcggttttcggtgaaccggacactaaaccggcactggttggaccggctagccatactaatgggccacagtcggctgtttaaaggcccatttggtgcagctggtggtctttgtttttttttggcaaaaatagcaagaaatggtgcgctacgt

SEQ ID NO: 44011 - DNA, 296 bp, Oryza sativa
cacggcgtcggcaccaacaccgatgcgcctacaactggctgactcgcaaacacacccaggcagaacggaagatacccgcaagaacaggaaccttcatacctgcgaccctagagctgacaaggacacgaaagaaacacaatatttgggggctcgtccttacaccgcacgagccacttgacgtggaactgcaagatccgaatcataacacgcgaaggaggaaagtctcatttcaactaagaccaacaatactcgacggcaaatcaagacacgctcacccgcaacaataagtggacaag

SEQ ID NO: 44012 - DNA, 440 bp, Oryza sativa
  unsure (1)..(440): unsure at all n locations
atcagtagatgtattgtacagctctaatttattctctcgccaagtactaagtagattatagaactggcccagggcaggtaggattttgaacttgtatatatatttgaagtaggaagggtaattttttcctatagctaaaaacctaatatgtggctcgtacaatattacacactaataattgtataatatatagcatatataacacagaantgagcataagttcatatatctttatgggggatactaccaggcatttgcctagtagaagaattctgtagatcaaaaaatgaattggacaaaacgagaacaatatgggaaccacaaaacaaaattacaagaagtgtaccaatctcaactaattggcatatattgtaacttatcatcattgaattgttgctttattcttcattacaatatattaacaatttactatcatgctc

SEQ ID NO: 44013 - DNA, 413 bp, Oryza sativa
  unsure (1)..(413): unsure at all n locations
actagaaagtagcagtactctagtgcaaactccacagaacacagggtactactctgatggaacgagtagatattgtatatttcctcgcgtatgctgacagtgagaactgtcttctncaaaataacatgcacaaaaataaccccatgcattattacaatccacatattaaagcttgaactntatacaagcacacggtcaccacaagtaactgtattctgccgtattacctcagaaagcagatcaccctaatgcatttcaatctcctgcacaggaatatctgtgtggtcagagcgacgagtatcagatgttccagatgagctcgctatctcagaattgcacaatgggcagagtgcattaatcttcagccatttatcaacacattccttggtgaaacaatgtggcaaggaagtcac

SEQ ID NO: 44014 - DNA, 165 bp, Oryza sativa
tactgatatatgcagcctacagaacgtggaagttcaccctgaggctgccatatcccttcagctcgtttggatggagtgagccatatgtataaaattttatatttataatctttcttattaaaagttttaccaaaacaattctccattctgaaaattgaccgaaat

SEQ ID NO: 44015 - DNA, 470 bp, Oryza sativa
  unsure (1)..(470): unsure at all n locations
tggcagatgaaatctactatgctcatcatggatggagttccaaagacaatgaaattacaggacgggttaaggataaagttgctggaggttttgctcgatgactctgatctaggtgggattgttgtatcaattggcttcattttgcagctattgatcagtacgatgtaagatagctttgtttctgcctgaaggaaaaatccttactgtaaacttcttccctaaccatggtgggacgtcgcttggttagggggagggcttttaagctccagttagaaaaaacattnttgtaaaaaaaaacattggaccacacatataataaaaaataaaaaaacactcattaaataagtcctaaatggcaggaaaaaagtancaagttacgcggacgcggacgcgcaaggtcggcttatacgtatgtataaattatatatgcgtataaactttatatatataccctattattttttcaatat

SEQ ID NO: 44016 - DNA, 339 bp, Oryza sativa
  unsure (1)..(339): unsure at all n locations
tttgcacatgtccgcccgcgggcgacgactcactgtcggggcccggagcaggctttcggccgcagtcgggcgcttctcgccggcgctggcttgagctgcttcctcgtgctcattacttcacgacacggttcgcccgtggttcggcatggccccaggggctcggacgcggccctggctttggccatgactgccgcttctgccggtgccgcggcggcggtggatgatttggaggagatggaggcttcngacgccgatgctgtggagggcttggtggaagtggccggtttggaagcggatgtgcngcttgaagatgcggcggtctaagacgatgatgtggta

SEQ ID NO: 44017 - DNA, 381 bp, Oryza sativa
catggcatttaccaccctaattaatcacagaagcacagcagctcttgtttgtttctacctgcaaagccaatgatcatttcagattctgcaagaatcatgcaaaatgaattcacagagaaccataatctgtacgtcttgaaaaaatttaagggaaaactgaactctaaagatggatttgtttaaaaaaagtagaatgatacagaatatgagcaacaagaacaaacagagaatgaaaaaaaagcagagaagggccatcactgcaatctactacaaagtacacaccctaccactttgatgacaaaagctgtagacctgcagaatgaaacaacctggagaagacagtgctcagatcacaggaaaaataccaagatagagagatct

SEQ ID NO: 44018 - DNA, 394 bp, Oryza sativa
cagaatcaatcttcagttcttccaacacattaagctgtcgaatttgcactgtaattgcttctcggcctgaatgtaatagctttctttgctcttgcagcttctcccgttgattattcaaggcttcaatagtgccttttatctcagacaactctagctctctcctctcacgttccaaagtagcttctattctctcatccttaagtatctgcaattcaactgcaacatgttctaattttgtgttgatcatctccttctgagaattgatgtgttcgagttccttggcctttttctgctcaaactcttcctccctttccctcaaataagaatctatttccatctgccttgccttagcagaattatcaattccaccctctggatatcaatgtctctcttc

SEQ ID NO: 44019 - DNA, 401 bp, Oryza sativa
  unsure (1)..(401): unsure at all n locations
atgcccactactactttgctcttatttctttttttaaaaaaaattttcctctactttggcgtgctgaanaggagagccttatctaaattacaccaactcaagtgtgatgagagtagcagcagcagtaggaacaagaatgaaaagtggagcatgaaaaaggagggaattagagcacaagtagtttggtcatcaagctctttatcataactcatcagggcaaagaggagcagcagcagcagcagcagcagaggactggtaaagctntacgctttgcactttgcattcagtacaatgagaatttcagaaagccacatattaatcataggaatgatccattccaagtgcaaaatgcatcagaaagcagcttaagaaatatgtttatacaaagtgtaaggatataa

SEQ ID NO: 44020 - DNA, 445 bp, Oryza sativa
  unsure (1)..(445): unsure at all n locations
cgagtgacaatcactgagcatatcatgagcacactgtacagncatcttgaaggccttctcggacatcataaagtgttctgggagcagtatgggctttgatgccagcatgatcatacaagaccatgataagcaatagacactgtgtaagcctattgaagctcacctgtaagagcttcttcatccatcagatacgatgagaatcttgacaatgtngtaaagttgattctatggtcattggcaagcttgatctcacataggcttgttgcgatgtgcaagaccagagatacacgggagcatgttggaacctctgaaggcatgccaccaaaacgctctgtctgtactgaacgagacaagaagctctgacaaagagaccctgagaccaggacgagtcttaatactgtgctcacattctgcatatgcattattttctttgaccaacatctga

SEQ ID NO: 44021 - DNA, 457 bp, Oryza sativa
  unsure (1)..(457): unsure at all n locations
gccgacgacatgttctactcttattcctgcgctcgagctatgccgccaacggcaaaagagaccgccttcgccccgtctacctccgcccgagagccggccaaggcttctgctccttcatcgccgtcgccggacgccaacgcggcgaaaactctagctttcaccggctccaccaaatccacgaaaattcctcccgcactcagagtntactatcgtaccgagattgaggtgaccatcgctcttctacacgcgatgaatctcctttaccctctcttttactggcaagatcgccatggctcgctggagcgacttcaggtcacccgttgcgccgtcgggaacggttggaatatcacagctaagatgcattgttagattaacgccagcggcaagcttacgataacctctattactggtgatacatgtactgaaattattctgaagactataatacaaaagtcct

SEQ ID NO: 44022 - DNA, 434 bp, Oryza sativa
agagtcacctgcggcatgcctagcttggaatgtggcacccacacaggaatttgttctgttgttttgtactacaagctctagtacagcatgagtatatgatgttgttgaatttgaccctgtcgtagttgtcgaaactgcacattcatctacctgacgagaatgattccttcataaagctgtagagttccttcgcgactggtgatgggaattcctcctgcggcagaagggcacctgtaacctccacgaattatgtcacgccattggcgcctctgagagcttccatctcagccttcgacctcttcggggcattcacggtcgatgcaaccagaactggagcgtcacccgtcaactcggcaaacagctgaaggaattcttcccttgtttggacagggtcaagaacgcctgtcaagaatgcagccgggactaaccgtgca

SEQ ID NO: 44023 - DNA, 304 bp, Oryza sativa
  unsure (1)..(304): unsure at all n locations
gttcgcttggagaacagcgtgtgtgtgctgcatcagattgctgatgttggtgaactgagcatcagcattttgcttgcattcttgcatctgggctatgtgttcctcgaggctgtgatggatctctctcgtncgtatgtcaagggtatccaacctcctcgtgaattcacccatgtcccgagaggacattgagcgccactagttggagaatggaggcataccacttgagctggatgaacgggcgttcataattccccattgtatgtacgtgatgaggcacctgtcaccggttctcactggcactctg

SEQ ID NO: 44024 - DNA, 331 bp, Oryza sativa
  unsure (1)..(331): unsure at all n locations
cacaccacgctgatctatgtttgcgcctgtgctataggagctganatcatccttcaactgggaaactttggagaggctcgacgtcngcgacataatgtcctgcgtgcggagcctcaaatatctgtacttgagctctgatgggctccgcatcggcttcggtgatgtgtccggacgcctttctcggcgatgccacgtcgtcgaatccctcgatgccacctcgcttgtaaggatctcatgccgatgatgaatgcgaggaggaagaggaacgcgtgattgatgacgtgatgatgatgaacgacataccacatttgcctcttgtcacatctttgac

SEQ ID NO: 44025 - DNA, 402 bp, Oryza sativa
  unsure (1)..(402): unsure at all n locations
acgccatcaatgctctttttctatgctctttattaaaaaggggtagacattgctctgtcatgtttaatgcttccattctagactcaaaggtagccatgctaacttacagtgcactacccccttattctgcatgtggaccatacttattggacagaaatcttatgtatatgtaattatgtatttcaagcacctcttgaatttatcatttaggtcatangatcaacactggccataatccttataacatttgcataatctgtcagatcaatcctgttagtattggtgttcatgatatgtacacttatattattggtgcaaattttgacatcgctacttttggcctcataaacgctcgaagtttgatatttgaacattgaattctaactatactggcaagcatat

SEQ ID NO: 44026 - DNA, 324 bp, Oryza sativa
actgctgactgctatacgatttttaaactaggttttttctttttttctgatgctgctttcactgcatatctcttgggtaaccttctacaagagtaagggagggaacttggttacttatatgacaacaccaaacacgacagactgggtagggtaatagtttggttggtgccctgtgtactatactataaaatagttaccatttaaaatgctcaatatcatggaactcgtatataatcataatgttgaaatttcccacatttggtgtggaagggcacaggatctactatataagtggtggagcccctcaccttaatggctagcttt

SEQ ID NO: 44027 - DNA, 435 bp, Oryza sativa
  unsure (1)..(435): unsure at all n locations
cctgangcatgcaagcttcaagcaacttccaatttgatatgatgttttatgttatgcttgcataaactatccacagtatatgtgtggtgtgagaagggaccacatgtcctaatatatatccaattcagaatcacanggcatgggcatggcaagcggccatagccgcatcgtgttttctttcatcacagcccctcgcatcgagtatatccatgggntggaaagcaagtcgttccaaaacagcaagtaagaagcatcatgtgggcccactggtctgacagcacgggccagtggtgaacaacggaagaaagtcgcttgagctgaggaaagcgtgtggtaaacagctgcgcctgcccacaccacagtgagacgtggtaaaaatgatgatgacgtggataacaacgggatcaaacacgccatgctgaagtcacgtgaatc

SEQ ID NO: 44028 - DNA, 506 bp, Oryza sativa
  unsure (1)..(506): unsure at all n locations
atctctaagtcacctgcngcatgcaagctangttaatctgagtatatagtgtataatgttcattgtactcgactcatatatgtcttgctctatgtgtcaattctatgttacacttaanattatatgtatgcactgctatccaccaatcattaaggtaagaatattattatatactaaaaggccactgaacatgatagaaacgcttctaagccgtcacgtgacccattcattttaaacattacataacatgtgtaaaataattcctccatattaatcccacgtgtacgtaccaaagaaaagtaagtactattcatccaaaaaaaacacctggaaaaacatacgtacgcacgtatgattaaaanataatacctctgtttcaagttataagactttctagcatcgtccatattcatatatatatagatgttaatgaatctacgcacacatatatgtctaaatntattaacatatatgtgaatgtgggcaatactagaaagtcttatata

SEQ ID NO: 44029 - DNA, 463 bp, Oryza sativa
  unsure (1)..(463): unsure at all n locations
tcgacccggatctctaagtcacctgcggcatgcaagcttnccttttgtctgaaacctgtgtacactcttcaatggcgtgacccgaagatacacataatcgtccactgcgaattctatgttacggtgacggctatctgcataacttttctgccgggactgtgccacctttagattatcccgaatggttctgactttagcttcagcttctctcaggatatcagtcccgaacactaggctttccccaacttgatctcacaggagcggtgtccggcatttgcgcccatacaacgcttcataaggtgccatttgtatgctggcttgatagctgntattgtacgagaactcggcatatgggagactcttatcccaggtcttcccgaaatccaggacacatgcgcgaagcatatcttctaggatctganttagacgctcggtctgcccatctgtctgtnggtgggatgcg

SEQ ID NO: 44030 - DNA, 400 bp, Oryza sativa
  unsure (1)..(400): unsure at all n locations
ctgcagcatgcaancttcactcacctcgccttcgccttgttctgctttgctgaggaatgcgccggcggaaatgggctctcggtggcattgcctaccaagtgcttgatgaaatgccacgctgatgaacatcttgggtaggctgttcccggccacataattagcactccttggtgttgagatggcaccaacaaaaggtaaattgtgctatatgtcgataagcacgttgcgtgaggtttcttgaaagtttctgctagttccaattttttccaaggaacaataaaatggggggaacggtactatagtttctcatttcgctctcttttcattataaaggtgtgcaaggatcccgaattaccctacaattgcatatgcttgaggaagctaataaaatcttggggag

SEQ ID NO: 44031 - DNA, 478 bp, Oryza sativa
  unsure (1)..(478): unsure at all n locations
tgcagctgatttaagacagatactattgtactttgtcctggtcattctggagcagntgttactataataaacagcaagacatcttctttaatgtatatctcaatagatgaattttaccacatctatattattgatgaaacagaagttgttcctctcgcaacatgcatataattcatactacaaaacattgggactaagtgctgatgacatggtttggaacaaaactcatatgcttttttccttggatgaatatgggatcttatgagtaatgtcttcttcatctctcatatttattcagaagtgataaacactatcattactttctttttattgctgccataagacatgattaagctagatggtaggattactggtaactatcagttcttacataaccaaaacatggagctgaagaaggttactctaataccaatagtgtataggagatcatatgaacaggccacaatatgacctaata

SEQ ID NO: 44032 - DNA, 351 bp, Oryza sativa
  unsure (1)..(351): unsure at all n locations
ggtgataaactttcttcacaaatccgcttatttctgtgccaaatccaagtacgagactgtattttctcgtggcaagagatgaacagatctctggcatgttagtacattatataatcaagtatgatggctggctatcattagctcatcactatagcagccgtagtcaccatgggtcaattctttgcaatagtgtgtcatcaaggtctccaaaacctntataagcatgccttggataagcttgctgtttccaaccagtgacaatatctattgtctgttatattgcccctgaattgctcgttgcgcaagactctgaatgtctatattattctgacagtgaggatgcaatgctgc

SEQ ID NO: 44033 - DNA, 450 bp, Oryza sativa
  unsure (1)..(450): unsure at all n locations
agctntatggcagaatcgagacagatattatggtcaatgatcaattaacagtggttatacagaataactataacacatatagttttggagggtctaaagcgttggtcctttcaactacttcttggattggaggcaaaaacaacttcattggtgttgcatatctgactatcggaggcctatgcattttccttgcagtgggcttcggagatcttctctacatggntaaaccaaggtacgccatgttattgctgccttgctggtataatgtgctcgctactatttcatatgcacacatgcatgttttgaggattacctccctcgcacatgatcccttcatggggagcctgctattctgntatttccatgtatttttacctgattatgtatgacgcgcttcatcattgtgctaattttggtacgaagatgcgatatataactatttatttccat

SEQ ID NO: 44034 - DNA, 303 bp, Oryza sativa
  unsure (1)..(303): unsure at all n locations
cacatcaactagcttgggggggggcatctggcgtcagcgtggttccaggttgtgtcgttgtgtgacaacccactcccgccttggttggaccgactacgatacctganggcgctgatgtgctgtctcacccctcaaggtgggtgccgggcgaaagcacagtcttggctcctttgagttctgacagacggcggcggcagttttccgtcgcttatcttcttgaagacgtctgttttggcatccccataggggcgatgtcgtctgtgtcactttattggtctagtggcggtcggtcacgcttagctg

SEQ ID NO: 44035 - DNA, 56 bp, Oryza sativa
ctgcagcttctggttgccttttccgctttgttctccctctcaacaattagagatcc

SEQ ID NO: 44036 - DNA, 298 bp, Oryza sativa
tcatatagaaaggttttgcatgaaacacaccgtctagcagtttgaaaaacgcgcgcacggaatacgaaagagatgggttgggataacgggaggaagaacacagccttaagatctgggtattagggaaatcatactacacttatttatgagagtgcatgcaggacaacatacttgataaaaagaattgatcgaacaacactgcaatttagcccatggcacttaaacctttataaacgctttacacatactaatctaaattatatgattgcgctattctttcaaatcaattgtgattttc

SEQ ID NO: 44037 - DNA, 402 bp, Oryza sativa
  unsure (1)..(402): unsure at all n locations
tgcttatccactattgaccgngttcaatgatgattcgctcttggcagttaactactaattatgaatagtttgacagttctcttctatctctatgaaagcatgattagcgtcctataaagactttatgttatcctctcattctttaagaaagtctctttcttatcctacaaagactaatatctacccatgggtataaatatgtacaccgcgcgtcattcgaatatctgcacgatcaacacaattcggtggatcgccacctcttaccctttctactttatttatatatcacggtggaacttgacacctgacgcgcggctacatcgctattcgatctccggagaatgggtaagtccaatgttctaccggcctagtcaattgtattggctacattggctgtcgtca

SEQ ID NO: 44038 - DNA, 436 bp, Oryza sativa
agctttaaagtaatgtatcaacggcaatttagtgttttgatgatgacaatgacaatgatgaagtaccttagcagaatacagaaggacatcctctttggatagtttaagggcatgacttcctccaaaagatgcaagatttagagctgcacgtggctctgcctgaaaatatttgaaagaattataacgtggtgcatgggctactgaaaattgtagatctcttaggctgtaagacttacttgtgaacctgtagtaacaactagaagatcatttggggcataggcatccatgtcctctaccttaacctgcagaacgactactatgaaataaggaggactacattccgtgatatcatcacacgtcatacccacagagtgataccggaaaataacttcactcttagactagtgcattacagcactactcacaatcattaaga

SEQ ID NO: 44039 - DNA, 463 bp, Oryza sativa
agcttgaaaccagcatctactcataggatcgcctggatattcactaccaattccgaactatttgtaataaaatcctcgtctcagaatcagccgagatacacaaactgacaatttaatatacaaatccatcataataataacgttacatacttacaaaagaaaagaaaaaacagcagcggaattaacggtctagcgatggcttcttgctcactcccacaggcagctcaactgtggtataagccaaacgtcttcttcttctggatcctttatcttcaactgaggtttgatgattattgcaagaatgagcatatgacatactctacaagccacacagctagtatgcaagtgcacaaggataccaaagaatggcatattatatgctcatttgcacagcagcatttatcaagattaagagagtaaacagagagtattaatcagaattttatcacactgacagacacca

SEQ ID NO: 44040 - DNA, 485 bp, Oryza sativa
  unsure (1)..(485): unsure at all n locations
atgcggctcccttcaacacaactagaatattctaccacataagacggagtcagcctcttgcaccataatggagtattgaagactctcggcctatcatgtagcctatatgcagagtactacaatggggtcataatggcgcatttaatggctcgactacgtgctagcgtattgtaggtcagattctcatgataaccatcctctccatatgggaataaaagaggatattgcattgacataaacttgcaatggttttcatttatctgctgcaaaattgaagaacgcgcttgattataatatcccgtcctacatcaggtgatccaatatcacccacaattagaccaacaacttcagaagcacacggagcactgtaatatctncatgtgcatacctcttgccagataatcttatctgaatctgatcagatgtgtctatagataatcgctcacgtgctgcctgaatagctaacaatgggatatttgattgac

SEQ ID NO: 44041 - DNA, 371 bp, Oryza sativa
  unsure (1)..(371): unsure at all n locations
ctcctgcgttcttcaatccaaagggcatggtgatgtatcagcaggccccaataggcgtaataaatgaggtcttcaagcagtcggattcttttagtcggatctgatgatatcccgagtaagaatccaaanaactgagtagctcgcatcccgccgttgagttaactacctggtcaatgcgaggtaacccaaaaggatctttgggacaagacttgttgaggtcggtataatcgacacacatgcgccattgccccgtctttttccgaaccaagactgggttagccagccagtctggatgaaggacttctttaatgaagcccgctgctaacagccttggtaaattctccttgatcgcatccttactgtcttgtgca

SEQ ID NO: 44042 - DNA, 432 bp, Oryza sativa
  unsure (1)..(432): unsure at all n locations
ctcaagctatataagcaccatttncattaatagaggcgagcaagaactcaactactatcttatttctctttctctggctttaccggctactctgctcgtcgccaccatggggctacggccgactcagtagccgcgaactcgccctcccaccgtccactcgtattccattagatcacttcccggagctcgtgacacctaaaatataagcgattntgggtggatgtgacacatcatattactatgaatctagacaaccttactgaccaaattcgtagtactagaatatgtcacatccacctaanatccctcatatttcgggacacagggagtagagaataattccatagctgtgcttgtagactacatttgaaaccataactctctggttacttggagaaaaggcctcttaaggtgcacaatttctgagtgaaa

SEQ ID NO: 44043 - DNA, 427 bp, Oryza sativa
  unsure (1)..(427): unsure at all n locations
agctngcgaagctggattatatttggggaagaatatctattccatggtcaaatgggtatattattttgaccagccttgcaccatacaacttcgtagtattactccctaccttcatgaatattcttcattgttgactaccgctattttgctttaatcaaaaattaattctaagtgattatagaatagagcaattttatagccctggatgacataccctgaggtaccacaaatttagtggtaaatttgatacctcctattacctagggaccatgagataccaattctataatagaaaaagtgatatctcctcaagaactatatagattatcttatattatatcacatgaaagttgtatgggctatattacgacaatacaaacttcgataatatggtttaagtatttataagctattaaaaaaattaagc

SEQ ID NO: 44044 - DNA, 249 bp, Oryza sativa
  unsure (1)..(249): unsure at all n locations
actcaagctaccaaagagaagagagaagctactagagccatactcgaactcttttttaggttttctggtactccgannncnactctatncctattccactagctagatactactaaactaaacttgagagaaatgagagagctattgcttgacgtgtgtgagtgaagtgagaacgtatagttcttctatagctgaactatgatggctgtgatggtaggaatggttggtaataccctccaaccatcattg

SEQ ID NO: 44045 - DNA, 412 bp, Oryza sativa
gcttgctaaaatacatgcatatatgcatgcatgatgtgtatagagagtagtagtaagcagtttcaggaattctgtgaaacacaccgaagtcatatattgaaacatatcactatcacgtatgaaacattttgttttaatgggttgaaacatacacctttcttttgacataatataatcatgtgatatcttgttgtaaagaattaattgccacaaattacaacggtgtggtccgttcgtagatcggataagtaatttagaagaaaaaatattttaagagaggagaaaagaatgaaaagaaacagctaggtatatgcatgcatgttacagtacgacagtaccaggctgctgatctacagcattttcttgacgtcaacagagagaaaggagaaattagcaagcacggactgagctg

SEQ ID NO: 44046 - DNA, 350 bp, Oryza sativa
  unsure (1)..(350): unsure at all n locations
tcatagagatggacttctacactcgttngagtttgaatcattcgagacatgcttatcttgtntacctggcaaaatgacaaaggcacctttcgcgggtcaaagtgaaagggcaagtgaactattgaaactagtacatactgatgtatgtggaccaatgagctcaactgccagaggtggntttgggtacttcattacctttaccgatgactttagtagatatagttatgtctacttaatgaggtataagcctgagtcctttgaaaagttcaaggaatttcacaatgaggtacaaaatcatttgggtaagacaatcaagtatatacgatctgatcgtggtggagaagacttga

SEQ ID NO: 44047 - DNA, 423 bp, Oryza sativa
  unsure (1)..(423): unsure at all n locations
agctttggtcaatttcttgcttgttcgttttcattatctgcgtacgttcaacaagacccaatacatgagtattttttgtcaactctgcattacttgtgtcgaactgacctttgattcgttcgagctcttagaattcttgaattagtgctattagattcacgctttctagaactgatatttcattcctggtggtctttgatgagtgtcctgcgtagaacacgtctttatagtgcaaattgctatgctgacgtgtcttcctctgattgtatggacttcagtgatagaaatcttttctagataatgattatctgataggatatatcatgctaagtacagtatcatcgttaacaaactaacaataccatacatanacaattgattgatccacttgcctcctaattaaaacagaaatgggctgctttc

SEQ ID NO: 44048 - DNA, 360 bp, Oryza sativa
  unsure (1)..(360): unsure at all n locations
gcagcatgcacttcaaaatataaacacttctgtttttatttctgtcgcacgagtgatccaaaaatcactaactgattaacaagggatctaacagcattgtgccacaccattgtgagcacaacatgcttaagcaaaaatgcctaagtccctatggatcacaaccggccatgctgataatagaattgggctgaagtactggtttaggcccaagcacattagtacctttgataccctaataacgccacaaagacaaaaacgcctctttgtcttcccgccgagactctcgccactnttcccatttctcgctacagtgcaaaactgcgccggcgaagctagggttcagcaatctgctccaatcca

SEQ ID NO: 44049 - DNA, 490 bp, Oryza sativa
  unsure (1)..(490): unsure at all n locations
cacaaaactaagcttgagtgtgtgtgaaagngaagagtgagtcctcaatatgctgtttgacggngcactatgctaattgtcggatatgccccgcatccgccattaagagagcatctggagcatccataccaaaacctagactcaacggtgatcaccaaggttcgcaaccagggctaggccaaatggcctccatattcggtctgggcctactcctcactctgacttatccatttctacngtagtatggtccatctacttgttgtttgatggagtttatgagctcaactcttgtatggacagaattcttcttcacttagtatataattcctgccaacttcagtggttattgcctgtatcaaatatcactaaaactcgtggaaatatagaattgatcctatcactatgtggatgttgatatctatattatgaagattgcggataaattggctttaaaacgccacacctagtgccttcttctatgtgtggtgta

SEQ ID NO: 44050 - DNA, 334 bp, Oryza sativa
  unsure (1)..(334): unsure at all n locations
ctgcggcatgcaagctcgcaatatattcttggttctctatatgtttattgcgcacttacgtaaccttgtcaacgttacactggttaatttgagagggcctctggaacataatataatttctagagtgcatgaataataaaaagcataagatcatattcgttgatacctcaaatcttatgaattgattacaaaataaatgatagtttggatcgacagtaggaaaanacagatgaatcacagttgagggatagacttgaagaacactttccaagagatttggcctcacgtgggaagtcctctcacattcttatgatttgagacgttccaatagaat

SEQ ID NO: 44051 - DNA, 412 bp, Oryza sativa
  unsure (1)..(412): unsure at all n locations
tatgctagagaatcgncagcttagcaatnatgctttcaattgcgttattctgatgtatcaaagcaagatgtcaataatatgaagcgtctagttagttgggtatataatactgctgcaaaatgcgagatgcacacaccataatgctttgtatacagcacctgtttcaagaaaccttttatattgtctgaaggatcagcttgcatatccatttcaatgtgcccatctcttgaagagctctccccgatggagctcaaacgaatcctgtataactggaatgttataataccgacatatgtgcctcactgcttacaagaagaacgttagactataaaacaatacaataagccatctgtgctacttgcacccgcttacaataagtaataacaagattgatgtcaatgaagaatacaca

SEQ ID NO: 44052 - DNA, 465 bp, Oryza sativa
  unsure (1)..(465): unsure at all n locations
gcttactaaagacctangagtatgacttatactcttcatccgatgggtagtctacagacggtctagtaccagattagactttgagtgaaacttgctcgcacaagactngcaattcaaggcgtagtccattgttcaagttgtgagtaagtgtagcttggagttctatgtggatgttcaaccttaattggtctccatcgaaccgctggtataataacagtacatttgaaaaggcatatctcaatgggattttgagattcggtgggggattgttggaatcaatgaatgggccttagcccactcgaagattaattctttggaaaatcacanaagcccacctcatgggatggcatgcatgtggagtttagtaccaccttgcttattctatgagagggggacctccttataatggaggatgtncttctagccactttgagcatgtgtggtggagagaagaggtgaaacaca

SEQ ID NO: 44053 - DNA, 520 bp, Oryza sativa
  unsure (1)..(520): unsure at all n locations
cttgatgctcaagtggatagacagaagtactcctatttttcatgctataaaatgttgnaacaagttcctttatgaatacctgttgttacttccattgtgaaatactctctagatatattagacactgcaattaatgatagtgagaatgatgaggatgatatgctcatctgatttcttacggaacttctttgtaccaattcttctatttccaaacacatgagaagtctgatgatatatcatctgctatgtcactgaatntagatgtcaaatcagctcttgtcccttttttgcttcccttttggatgattcaagattcgtcaatatgcagaacctgaagatttgcaagcgtcaacaccatcaggcattgaagtagagcagctgcactgaacagtctggcgttattgtacaatctgtaggtcatcttcattaggatattcataatggcctattatccactcacataatattgtaaatcagaagcaatgcaccgtctggactatgcatctattgcatctcaaat

SEQ ID NO: 44054 - DNA, 427 bp, Oryza sativa
  unsure (1)..(427): unsure at all n locations
agcatgcaagcttggtaatcatgcaattatgataaattcacatttatatgtttccttctatgcaacaagactataccaatagtgaaaagtcccagaattatatcttacaaattcataatataactaccccgcagaacacgcggtgaatcaactaggttatactattatgggacctaacattgcgcgattatgcatagtataggggtgaagatatacggtattgtgcactagggatgtgatggcaacctcgacggagagttgcgggataacaggagaacttattccgcagcattaccagcacaagataagtgggcatgaatatgggccagaagagctggcccgctagccctgagttcacttctccattggtcgatctcccacaagagggcagtcangcgccagctctggcagggtacgcacggcgcgc

SEQ ID NO: 44055 - DNA, 236 bp, Oryza sativa
atgcacaatcctcgctctgagctaaaacaagtcatgcgcctctccttacgagtaattccaggattaattcgaactccattcggcacgatcactctatcgaatacttgtggctcccgggaacactttctcacagagaatatctgctctgaagtcgccgatttctagacagcataccatgccttactcggcaccctgcggagccatatcatgtgcgtgctccactacacttacatgat

SEQ ID NO: 44056 - DNA, 353 bp, Oryza sativa
acagaagcgcttgcatgctatagttcgttagcacagcatagctattttctaaatcagcaacaaagtcatttgctcttgacactccactggtcaagcaaagtccacttattaatgatctataagtgtatctatcacggttgaaccccacttccacccattgatcatataactggaatgcctttcttataattccaacaaggcaatacccttctatcataacattaaaggtcacttcatgtggtattacattgctgtcaatcattttatcaaacagcctagcagcttcatccatttttttatctttgcagacaccattgataagtgctgtgaaagataattatccatgcgatgcc

SEQ ID NO: 44057 - DNA, 403 bp, Oryza sativa
tatatatagattctcccgcctgaagctgaagatgaagtgaagcgaataatatggtttcttccttggccccagccgtcgcctgtggtggtgggtgttagaccgttggttccgctgctgctgctgcttgttgggtatctcatccccgtcgcctgttgattcttcggctgttcgagctgcaacctaagttaagggaataagtctcttatatttaaggattgtatgattctatttgtaccgtgggtccacactatgtctggactgtaccggatccggtttatagaagcgtcacccgtttcctacacacctcttcatggccgtgaacgggattaatgtggggacacactctgtatacagtcattgggtcatatcacatggctaaatttctcaccaaaagatgatatta

SEQ ID NO: 44058 - DNA, 443 bp, Oryza sativa
  unsure (1)..(443): unsure at all n locations
aagtcacctgcggcatcaagcttctcacaactcctagctcatctctgtggtcggtgaaagaagaagttgctaatgtggagagcgngatcctgataccaaagaatctgggtccacctgcctgctcaggattgcctcaagctcgccgcgaaggtgggcgaacaatcttctcgcttcctcgagacggcgatcataatctccacatgttgccaacacaatgcatttatctcgcctgtcgatgatattgttgatgatgttggtgaagcgcgcgatggagtcacgcactgcgccgagcagggcgttcaattccagcagccggctctggctctacatgcgcgccgagctcagaatgtcgatcaccctctgcagatctgctgcgacatccatggctccctgatactcttaacgctctaacacctctcttccagtctgcttctcggctgatc

SEQ ID NO: 44059 - DNA, 368 bp, Oryza sativa
cctataaaactcagctaagcgagaacgacgaaatgtcaatgtccagagttgtttctattgtccatcttcgcgcttgagtcgataggaacctggccgggtgacttcagagatgataaatggcccctcccatagaggagataacttgtgccgatcccgtgtagtttgtaatatcctcaataccaggtcgccgactaataaggcacgggatcgaacattgcgattatgataacgccgcaacccttgtaagtatctagccgaccgaattatagctgctttcgcgactatcttcaatcggtgcaagacattcactcggtcctcatcgtagcgctcttcacggaaatttcgaaagcgcaaagactcgaattcaa

SEQ ID NO: 44060 - DNA, 461 bp, Oryza sativa
  unsure (1)..(461): unsure at all n locations
cactctcatttgctggatagatgatgtttgtattgtctgaaccttgccaatgcttcggtggacatgtatggcaagtgtggcgatatgttgatggctcatacatgcttngacatgatgcccttcaagaatgctgtttcatggacatctatgctttgtgctctggccaaacgtgcgtctattgatgccgtaagagattggtttgaacagattccagagaagagcataatatcttggaatgccatgatctcttgctatgttcaaggtggccgattccatgaagcgctggatctttataaccgtatgaaattgctaggcctcgcttcacacgagtttaccttggctgctgtcctctcttgctgtgggcaacttggcgatttggctgctggaaagatgatacatgacctgatcagagataactctcataatccaagcggtgctctatataattcacttcatgacat

SEQ ID NO: 44061 - DNA, 340 bp, Oryza sativa
tgcaatgaattgcttatgcaactacgacgcctcgatcatatcagtcgggcgaaatattgtcgagcgatgcccaccgtgcgcgttcgcatcgtggggatactcatctcgaacgatcatacatgggacaaagaggcccaaagcgaaccgcttgaactctaccgttgctgtatattgcacgtgtgatatatatgtcatacagacacttccacccacgctagatatataggatttaagaggacgatatgagaacctatcaattactaaaagtatatgatgaaagtgagttgaataattgatgtgtgctggatgttgaaaatgtagaagactattaattgaaatc

SEQ ID NO: 44062 - DNA, 315 bp, Oryza sativa
tccccatgaactgatacattcactgcgtagaaaatcatgccatcatgatggcgaccaagtacctcaccctctccgagggcgccctactgccaacatatccctgcctctctaaaacctgtgctgaacacaatatggctccattgtgtctgagatacttcccacagttaaagcatggtgcgctggtgctacggaaggcgcaacgtggagaaagcatgtcaagataccccatggttgaactctgaccactggcaacacaacctccacaaactttcaatttttcaaaattcgtgaatcggcaattcaccaaatatataa

SEQ ID NO: 44063 - DNA, 449 bp, Oryza sativa
actcatcccctggttactggtatctggatattcttccacgaaaggcactggctttgcccatccgaaagaatctgagagaaccgccctagcttccgtcaagtgtgatcttacaccgtcctataaaccactatttcttctctcccaagaagagataacagaataaagggcggagctcggatgggccgtctagcgttgaggtctctttaataagcgtaccgggctacataatctccaggcaacgggattgcagatgagccacttgagttcctcatcttggcttgacacagaatgggctagccagcaccatggtaattagggctggtcttgaggtcgaaatccacatctacgacgctgaccctacgcctgacatgcacattgtcagcggagggagcggcgaactcacggagggtcttctcatccatagtcgcataatgttgatggtgcggtaa

SEQ ID NO: 44064 - DNA, 243 bp, Oryza sativa
ctagctaccgaagcgctggccgatggttgtgagcgcgccgacattttcggaaatcgacatctcatgggcgttgagaatcaccagcatatcatgacagatatcgcccgcgtgattcatcgcttcaaacgccatgcctgcggtaatcgcgccatcgacaatgacacaaacggtgcggcgattattgccttctttttcggcagaacacgaataaccattccgcactgatggatgttgatgaatgcc

SEQ ID NO: 44065 - DNA, 412 bp, Oryza sativa
  unsure (1)..(412): unsure at all n locations
attataggctggatgctttagttctgtgtttgatgtcaatctacatgctgactggtggcatgtttgaatcaatacaatgcgttgtcactgtgacttgtaacgactgatcgacaaatctttgcatgtcttatatccatgttaagattacttgtaaaatttggtctcgcacttatcatgtgatggtgatctttatcagctatctggaacttgcacatgctcactgaaggagatcaactactaccgataggatatacatatcaactatataaactgaagactattcagtacttctcatatatacgaaatatgtaaaccaaatggtaagctcctcatgcatgcactggctatatattcttactggtgatcacataggctcggaggaatctancgaatcatgcctctggaacatata

SEQ ID NO: 44066 - DNA, 350 bp, Oryza sativa
agcttcatctacaaccaccacattatcatggagaacacataatggtacagctaacagtagggatttattctcaatactacaaaggtcgtgacagagcaaagttacagtgacactgacacatatttctggaaagtgaatggtgtgctacaagcaatggttgttacaagcacagaaaccaaggaagcaaaagtcgcaccgtgtgaactcttgatgaggaagacaatgacgcctcggagtgggaatcacaagacatggagcggctgaatgatttggtctggaaccctctatgctgcctgctccttgacctctgtggctttggtgattgtgcgtcatccgatgctgcaagaatg

SEQ ID NO: 44067 - DNA, 353 bp, Oryza sativa
  unsure (1)..(353): unsure at all n locations
ttagatactcaactgtcagttgngaaggagttntcgagagataagaataatctacttctatcgatatgcgcttaggcacggncatacataacatagaaatcacacgtggaacgcgtgggcaattatctagagcagcaggagctgtagcgaaactgattgcaaaagaaggataatcggccactttaagattaccatctggngaggtccgtgtggtatcccaaaactgcttagcaatagtcggacaagtgggttatgttgtggtgaacctaaaaagtttgggtagagccgggtctaaatgttggctatgtaaacgccccgtagtaagaggggtagttatgaaccctgtggaccac

SEQ ID NO: 44068 - DNA, 427 bp, Oryza sativa
  unsure (1)..(427): unsure at all n locations
gaccttaagnaactgcagctgcagctcactaaaataacccatgtgcaccagctattctcttgtaatgaangaatgagtcacaccacaatcaaacaatattactgccggtgtcgagttgatgggaaatgtgcccaatatataccttggagctgactgcgccacctatgcagacgcatgattgacactggcttgaacgaacttgagttcagaacgtcttggcttcgggcatgaaccaaccatgtgtccgatctcgttacaattgaagcacagttcgggcttttctccaaacctcttaggctgttctggctgcgttggctgaactggctgaactgactaagctgcattcattagcggacttggagataggttgagggtgcgctgctcactgttgctgtgattgccactgttgttgataccgctgaaatta

SEQ ID NO: 44069 - DNA, 485 bp, Oryza sativa
  unsure (1)..(485): unsure at all n locations
ctgcagctgagctcctgcgatttggggtagccccacgtttaacattgcagatttaaagccatatttgggagaagaagatgagttagagtcgaggaccactcatatgcaagaaagggaggatgatgaggacatcccttccaacgatacaaccacgcctattgcacagcaaggaccaatgactagagctcgagctcgtgaacttaattatcaggtaaaagtcattcctagctaatcatacaagttcttctcagaaatgggtgctactaaatggttattgtgatctacttgttgntaggaatatgggagaggaaccaaatcgcaagcagcactagcagcgctgattgatgaagcaatgctcttcactccggagggaaacggngcaaatgagtacttgttgaaagatctcgtcgtctactacagctatgtgtggcctcaccatcaactttgaccangctgctcagaatgacgaaaataggtctttacat

SEQ ID NO: 44070 - DNA, 124 bp, Oryza sativa
  unsure (1)..(124): unsure at all n locations
tcgcatcgcagttgcaagtgacctcgccaccccttcgtgccttcgtcgncgccggaaaacgttgccgccgtgacagtacctcgtcgcccttcgaagctcgtcgccggccatcttctgtcggcgt

SEQ ID NO: 44071 - DNA, 423 bp, Oryza sativa
  unsure (1)..(423): unsure at all n locations
agctntgagtgggcattttcagagtttattaacctattgtggtggcctccgcccatgaccatcctgacttggtcgttgatctgtcattgcctataattaaatttttatatttattttgggaaacctttgctgcacttctttggttatgtggtgctttttgttatgcagatcaagctcccgctatggcagctgcaataaggaaggtatattcccatccacagacagtgcacaggtggtgcaaatggcatgtactgaaggacacacaaacggtgattgatcaagtgtacgtgaacgacaaggaattcaaaaatgagttccagaagatagtaaacgaaatgatgactattgaagagttcaatgaaggatggaacatcactaattttgagatacaatctctagaagaatcctttcctgagtcgtgcc

SEQ ID NO: 44072 - DNA, 498 bp, Oryza sativa
  unsure (1)..(498): unsure at all n locations
ggatcttaagcgactgaggctgcagcttggcatgagaagtcaacagcctttttatgcgtatactaaatcattttccgcatctgatcaggatcaacaggttatcctgcttcaatcgggagaatactgcaccccaggggccacgcgactggcggcttgagaaaaatcggtactcttttatctctgacgcggccatataacaacctttaaatactttttctcaaaactattcattcgatcaaggatctgattatttcgttatatatgttacaattaaatctttacaacaagatctcacatgatcatattttgagaaaaatattcttcttttgttttcaatacatctgcttgtaatgttgcatacaatattatctcgatgtctcgatcagcactttctaacggtttactatggcatttacacatgttgcatggcatattctttttggatggtgncgtaaatattctgcgacattcaacggtctacacttatgcgtgataaaa

SEQ ID NO: 44073 - DNA, 391 bp, Oryza sativa
  unsure (1)..(391): unsure at all n locations
aaaagatcaccatgcaacacgtctttatatcagcatggtgtaaacatatcagccattccagcaataaataatgcactacaaacatggctgtgaatattataaataatttactctntttgaacgactatgcacgtgagagaactatgacaaacgcctcacaatctgcatgctatctgcaagggaaacactgattaaacgcaggaccaagtgagaatgagagggagaaagaatctgaccggctgacctttgaaatgtgactatcgtctccacaaattcatatggagagaacactcgatgaagcacttcaatggtataggggtaagcaatgatgaatggtactaacagaattctgttaggatcttctgaggcccagcatccgactagctcccgc

SEQ ID NO: 44074 - DNA, 408 bp, Oryza sativa
  unsure (1)..(408): unsure at all n locations
agcttggcgagattcggaacactgcggatgagttctccgtcgctgagatgccgcagccgccgccgtctgtgtgcacgaggagcgtcacctccgtcgcgctcccgacgcatggagatggcggcggctgctgccgcgtgctgctctccccattcgacgcgtactgggtcgcgctcctgctcgtccgcccccaccaccattctgagacgttgtccacgcactcatggactccctcgaggcgttgctcccggcgttctaccgcttcgccggtgcgctggtctactcgccggaggaagaggaggaggaagangangggtcgctgtccatcgtcgtggacgccggcggcggcgtggcattcctggatgccgatgcgttcgtggcatctgtggtgcgctcgccgcggaggatgat

SEQ ID NO: 44075 - DNA, 424 bp, Oryza sativa
  unsure (1)..(424): unsure at all n locations
ctatgaaactcagctctctgaatgttcctccatganccaatagacagtcgtctcttctatgganntanaacncggtgttgaagcagtgttgtggtgattggaatcagcttaaataggatgactcttaataaaatgaggagcagccatacgaggacagatttgaagaatctcaactatatctaaacattattagaaagaaacacatacattaactcagntagtgtctttcgtattttaaagaaagtacatgtccttgcgatttgacactattggcccatcatagactgtttgtgattgaaatatcaacttcggctcgttcccctttggattagcaaaatggatataatagcagatctatgtcaaattcaattagagatttgactttgtaacaaattgtttgaatacatgatctacacacagactc

SEQ ID NO: 44076 - DNA, 450 bp, Oryza sativa
  unsure (1)..(450): unsure at all n locations
catgcaagcttgagattgtagtcaagctcaaaagttgtgattgatgctttgtccttcgtggaaagaatacatgctaacgaatgaggagtattctggtgttagagggagtatgctacagtgctggtccctgcagttcagtgtgtttttggctgagctagtcatgtactccgtagctggaatgatccagtgggtgtaaccctcggcgtgtgaaatgggtttacctctttgttgaactactgttggctctctgaaaaagccaggtcactatcaatataatgatctttcctctaaaaaaatggcgtcgcggattattttttcacagaaaccatctgggaattttagtccagttcaactcagggctgatgtgtgcttcagtacccttgactgaaaagacataaatgttctatgggctgagaacttgtaangaaccgggtggattctgaatttgtg

SEQ ID NO: 44077 - DNA, 174 bp, Oryza sativa
attactccagctacacttgtataatcatctcctgcctgtcttgttgaacattcagcactgacacgaggtaatatggtgatttaccttattaatatgcattttaacaagagatcaaatctcttcctgatatatagaacgcaagcctgacgatgtaaccacatacaattctatttt

SEQ ID NO: 44078 - DNA, 180 bp, Oryza sativa
gcacccccctccgacgtgatgagcccccggtagtgacacacccgcggccttgcgcagtttatgagcgcctgtccgtgaagaagattacctgttgcaaccctcaccctggtaagtgctacacttgttctgagtgaaaagaacatcccccgataggattgcgccaagagaggctgttgctca

SEQ ID NO: 44079 - DNA, 376 bp, Oryza sativa
gaagcgatccattctgcaacgtgcatttactgcttatcattacatagagtagcatgctaccaagtacgatatatttaacaagagagatgcctgattgtttacggcatttggtggtcctgctgattcgattgtatcttggtgtaaattgatcgatggtaggcttgcgattaagattgcgtttgctagttagtaattgtgtgaagattgctaggcttgtacatctgtgctaatttgacaaatgtagtgtatggctggctatcaactatcgcctgatcactgcccgatatgccgtatgagttattaccactgctgtatagtgccggcgtaaatgttggccccgtatgcagggtaaatatatctagtgcatacagatgtg

SEQ ID NO: 44080 - DNA, 417 bp, Oryza sativa
  unsure (1)..(417): unsure at all n locations
tctgagtcacctgcagctgcagcttgcgggaactggataatgaccttttgtaatgatctggtacgngttgacaccgctagatgagtatttaatcacatccctatgagttagattgactataatgaccattaaatctaaagtgaggtggatatgagggagaatgacgttgtgactcaccgggcagaagacactgtattgctagacgactatggtacgaacatgcgtcgacgggatctaactcacaacgaatcggtgacgctatttcggttgctgaggacagatatgccgggtcatcctctcttatctacatgcgctgataaagtcgtaattatactgttcaaaactatcatctttctcgactacataggatatcaaggagattgtctatggaggccggtacatcgatagtgctctgct

SEQ ID NO: 44081 - DNA, 474 bp, Oryza sativa
taccaactacaatgcccgcgcgccgctacatgaagccctacctcttcatctaccttgaggaggatcacccagagaggcaacttgccgacaaaacccgcgccgcccggacgaccgcatatagtgtcagcaagagggtatacactacaactgacacatcgagcatcatctttcgggcttcggtataggcctgattgaaggtcaacactgcaagaagaagaaggtgccgacacactaagcgacgaacgaagcaaagaaacgaagcgcaggcatgcatagcgaaagtgcacacataccattcgtccgctcacggacaaccacatttgggagaccaccaaactattcaccatgggcaaccgcgactagccatgactaggacaggggaaaatgcgtgggcatgtccaactgctccaccaaggcacgacagctaacgcgggagcaaccttacacagcagagcgaaacgcgcctacatagcg

SEQ ID NO: 44082 - DNA, 455 bp, Oryza sativa
  unsure (1)..(455): unsure at all n locations
ctgcagcttcggctaaaacaattaccattatgtagaaactctttctttgancactcataagaaatgcatatcaagagtaacaaaaagaaactcagaaatatatgttcgtaagattatatgcttcattacttcagaacttaaataaaactatcattagcagtttagcaccattagaaacaccagcgcaccacatggaatcattgtagtcatgttagcaatagaagacatgactacaaaacagcaagagtacagttattcagctcaagacaagtatctgaatcctagaaaagatcatctaagaaaacatggttaattagttgatgtcttgatgaattgagttaacaagaaagaacatgctcatatatgcagagatatattcatcctacaaacatctcaagttctcaacatgaaagcggattagagacctataaaagatgctggcttgatatcaagag

SEQ ID NO: 44083 - DNA, 420 bp, Oryza sativa
  unsure (1)..(420): unsure at all n locations
accagctgtgtggcaaggaataccccggcacagcaaaatgcttgattttatgcaagctgcaccgccagaagnatcattgaggagatacatgcgatcattcgtcggagacttggcaacggaactcgtggatcaaaaaaggaatatacaaaggaacttcgatacagaatctccctcaggtgcagcaactaaattgaagcaaaattaacacactactgctatactcggattgaggataccgcgcacgagctaagataacaaaccatgaatattagaagctatgcatgccaatggatacattggtgcacagatgatacaagctaagctgctccataggatccagtgggcatatgatagtggtaggccacatcgatgcgacccatttgataatgacacagaaaggcatcatgacaagaaccttac

SEQ ID NO: 44084 - DNA, 444 bp, Oryza sativa
tcacctgcacgctgcagcttatgttgacaagtaggcattttttctttttgctcgcttctctactcgcaggaatgtgaaaaaaaccccgtcaggaatagaagcataaaagacatgattctaacggacaccatagtgttaaataaatgaagtgtaaaacacataatcgaccgcttgattggaccgtagataaatcacaaaaattcgagtatagataaagatttagatgatattttttccatgaagctctaccttatgctaaattttcttcaaaacttccatggaaagaggcattctataggaactttatatgaatttataagattcattcttttgatttaaaggctacagagaaaaataatctatgaatgaaatactctaaaattcttacgaatttgctttgaatccaaggggggctgattacttagctacttttctatgtcaact

SEQ ID NO: 44085 - DNA, 449 bp, Oryza sativa
  unsure (1)..(449): unsure at all n locations
ctataaaaactcagctactaaaactagagttgactatcgctcacccttgttgtatttacagacggtctattaccacataagactttgagtgaaacttgcttgctcaagacttgcatatcaatgcgtagtccattgttcaagttgcgagtaagtgtagcttggagttctaggtggatgttcaaccttaaatggtctacatcgaaccgctggtatatataacagtacactggaaaaggcagatctcagtgtgatttagagaattggtgggggattgttggaattaatgaatgggccttaacccactcgaaaattaattcttnggaaaatcacaaaagcccacctcatgggatggcatgcatgtggaatttagtaccaccttgcttattctatgagatagggacctccttaatacggaggatgccctcctagccacttgaagcatgtgtggt

SEQ ID NO: 44086 - DNA, 191 bp, Oryza sativa
agccgggtggctgtatcgccacctacccccattattctgattggatagaagcgcgatgtgcatatcgatgtcaaatgagtcgtcaaattacctcccggcggcctacgacgacgaatggtacattgggcgcttcgacgtgttctttagtgcgctttggtgatacaccttggcatgcatctatctgtaggcgc

SEQ ID NO: 44087 - DNA, 436 bp, Oryza sativa
ttcacagccacacatcatcattaatggccgacctatatttgtctcatggagaacatcatacaatgcgacgcctctacgttatagcacacctatgactgtgtgcgtaacacacagaccagggcaagattcacaccaccaccacgagcaccgaggaatactccacctgacattgctccaccaccacaatacaggtgtagcgagaagagctccatcttctctagaccaagagacttgtgctacttaacgacatctatcttcttcattgcggcagcgaatctactagtgaaacatgactgctctaaatcatctgcgacacctgatcactagaaatgaaacggaagaagcgcacctacaacaaatatgacagaggaaagaacagagaccatgcataatgtagctcacaatacagcacgttggggacaactatgatcaatac

SEQ ID NO: 44088 - DNA, 445 bp, Oryza sativa
  unsure (1)..(445): unsure at all n locations
atcctcttagtcacctgcggcatgcaagcttcattaaccaagatacttttatcatatgctcgaggatatgtactcaaccaaaggccaagcgtccaacactgtgagttggccaatcccttctgcaataacaaatattcactacattcttgcatctgaatgttactttcatacttttgcagggcaataccaatggacatgaagagactgcaggatgcacttatgaaaatggaaaacgctgtttttgtcattttagctttagctccagagacattttgcagcaaaaaaactgtaccagataacatcccgcgtctctctgcgtcttgtgatagatatttttccccttgcgcagtttgatctaagctttggtcactgcatccatttaccctaaggagcaaatgtaggtttagaagctttccttgtagaagaagttactangtgagtcatc

SEQ ID NO: 44089 - DNA, 442 bp, Oryza sativa
gacctataaatactaagcttggtccatgtctgacatctgtagctaaattatctttttggaccttctttttaagaactgatggacgcttaggctagacaggatccatcgattcttttcatcttttacacagctattcggtcctcaatcagtctactatattgcgcggaccatgatgtctctgtaggcaattaccatactactatagctactattcttcataacatattatatgaaacttatattaagagatcatatttccatcgccagcgccggaattcctgtggaagcatcagcataatacaatatcgatcagaattcataaacgagaaatgagacgattttgtcttatcatctgtcaactatcaactacagaagatcatctcaacacatcgatctactctaccgtcgcacaaaaatgctacgaactcctatcagattcgac

SEQ ID NO: 44090 - DNA, 431 bp, Oryza sativa
agctttacagagatcaacagatcagagacttcttattgagaaggggaaacctaactgactgccagagcaaaacaaagaactcagcatcactaaactcctaaacttttcattacaagcgtcttgtataaattctccatccaaatctggaactgaagacttcatttgccacttgtctcgccagcttggctcccaacattaagcttctttgtcttgcctccgatttctgcaagatatcccagctttcaatcaaatgacatgtaagatatatcagctcaattggatcattaagccattcttttttatcataacacactttgtttatggatttccaaatagcccataatacaactgccacccccaccatcacaagttgtttagaatgtttgtcacaattggaaagcatatggctgtattcctagcaggtgttatat

SEQ ID NO: 44091 - DNA, 442 bp, Oryza sativa
taatgtgctaaggtcatgttatgtatatgctgcgacatcattatcacgtgatgaaagctaaaaaacttccaactgatgttctatatggaagagccaaagtgatagctgaacaacgtccaaaaagcgtgtttcaaggattaaggccaatagcatcaccggccgagttgtaagcatgctattatttcataatttacttatcttgagtaaattgcattagtggtacacaaacttgctaggtgggagcaatgtaaacatagactgggcaaacttcagaaaaccatctctgcttctctatattgaatgaaaaacgatggaagcaccttgacagaggactatacaataatcatacgattgagtagagtacttgctctgcagctgtctcagtatcacacaatcctgatactagactagaaagtatcatgaatcagaaatcttgcagaag

SEQ ID NO: 44092 - DNA, 455 bp, Oryza sativa
  unsure (1)..(455): unsure at all n locations
agcttgactgaatattntcttaaattctcatatgtttcctgcaaatccttgccatgagtgaacgcctgtttgcttttcaccacaatgtcatccacataagcttctacattgcggcctaattgctttgccaatactttgcctattaaccttgcaaaagttgctccagcattctttaaaccaaatggcattcgaataaaacagtaaattccaaacggagtgatgaacgacgttttctcttcatcttcatcataaaaacttaatgataaccggagtatgcatctaagaaacccatcaactcgcagccagctgtagcatctactaactagtctattcttggcaatgggaaatcatcttttgggcatgctttgttgagatctgtaaaatcaatgcacattctccactttccatttgcctttntcaccaagactggattagccaaccattcaggatgcatc

SEQ ID NO: 44093 - DNA, 433 bp, Oryza sativa
  unsure (1)..(433): unsure at all n locations
tgtgttctggaatcatacatgaatttgtctgatgcaccttcanngncaccaaggaggcagtaacaatttaagaattngcatgatagttataatgctatgaaatcttgttgctacttttacctatcctctgctcagttgtgtttactggttatatatgtgcacaggatcttcgaaggaaacatcccgttactcgtactcttttcccatggcacaacacattatccctcagccttacaagagacctcaccaaagaactggctataggaaaatgaagcttgtggaggtcagctcattagattagctctgatatggatttctttttatctccatgctatgtgttgctctgtagatcctgcaattcatatcctgtagccagcaattctcttgttatgatttctgggcttccacatatcagtgtaaatcaagaacatgc

SEQ ID NO: 44094 - DNA, 290 bp, Oryza sativa
  unsure (1)..(290): unsure at all n locations
agcttatcttactggatatgggaacgcatgtgttttatattatgtctacgacactactctactagcctaatcggcagattccggatttttgcaaggggggatcgaagggatcaacatcccgtatatggtntcttgtcgacatcgtatgtagccacctaactcggcattaacatattgtatatacgatgatttggttagagatgggtcttaatcactgccgttaaccctcactaacctcacttagtcctgaggctaccaacatatagacggtaatgtcaaccccacctgtg

SEQ ID NO: 44095 - DNA, 433 bp, Oryza sativa
ctgcagcttgcaaagggaagattaatcgcccttttttacacgactttcttgtattctaacccaaagatctcgccctttcttaacacagaagaatcatggcgaaataattgcgtgggggaacgtatcgtaaacgaaccgagttcttgtcaaaagctgcagccatatataactccaccaggatgcttttacacatttttatcatgaaccctaacctaccacgcatgcacatcgaaggaaaataaaaagaaccaaaaagactccaccttgactgactcgagattattggtagtataattaacaacttaaccatggtttagctacgaaagtaaatgaaaaaaaggttaagaatgaaaaaaaggacgggcagggcccacacgtcagtggcggccaccgcgcatgcgaccttgcgattacacggcgccttttcgcgtca

SEQ ID NO: 44096 - DNA, 446 bp, Oryza sativa
tggtctcgcgctgagcacgctgtaacgcatactcgaagccttctgttactaattggaggccactgccggcgccgaactcgcgctcgaactccgtcacgaagttagccgcctcggacgtcgacggtggcagcattagaagccggtcgtctactccgtcaccgccctgtgcgaggccgaggatggagagggagctgagacagcacaccttcggcgacccaggcaccgatacggatcgaaccggcgatgagcccaaccccaccggagaccacgtataatgggagcgtcacgagcttccacgcgatccccggctgctgctgctgctgctgctgctgcggaggcggaggcaagtgcagcgcgaccaaatccgcctccctcggtgccaacgtgggcacgggcgcggagggggccgagtcggtggaagaggcgctgtaattgttaaacacact

SEQ ID NO: 44097 - DNA, 414 bp, Oryza sativa
  unsure (1)..(414): unsure at all n locations
agcttgccagaataccgatcgaggtggttgtttttgatttgtgtatgcctaanatggcctatatttatgtgaggatttgatccttctatgtggcatgaggtatccctgggtcggcttgggaaaggctttgtcgcgaacctctgacaccggccagtgtctagagtaagttcgtgtcttgtgggtaaagtgtacccctctgcagaggttaacaaactgttcgaacagccgtgcccacggtcatgggcggatgtgaggtggttcccgttgcgtagatttgtttgcctgtgctttgtgaaaagttgttgtggtgtgggaatcgtaaccagaatcagcctatgtggcagatggatgacctgagtggtcaaaaacgaatctgtgtgattcaggatgtctgtgggcatcatatactacgct

SEQ ID NO: 44098 - DNA, 473 bp, Oryza sativa
  unsure (1)..(473): unsure at all n locations
ctcagcttgctgaatttctatgcttgatccataagcatgatattacatccctaccatattttactattcatgtattttcacaattctacgttntaaaggatcagatctatagagtctacctataccaagttggatgataacatattaaatcattcaaatttcccaccgtgcaatcaagaacgagcgactggtgataaaaatcagatgcactgctcggcactagacgggtcgagtagtgcatctgtgacatccaaacaggaaacaggacgtgtgtgatttcctgataggcccatctgctcctacacttcactcctggcattctagctcattaattaagcaggtctagccgattatggcctactcgatccttttgtcagaaaaaaatagtcaaacttttatgttgctagtgcacgattacttaacaacctatttgcaactggtccgactcatctttatcaatcgtcaccactgga

SEQ ID NO: 44099 - DNA, 368 bp, Oryza sativa
taaaataaccatcacagagatgccacttcatgtaacacatgggtgatttctttatccacactatgagatatgctacaggccaacaaaaagtacctcaaggtgccgatacatcacgctgatccaacgatcggaaacggacaatttggtaccatgaagtaccggtaccttgagatactttttattagattggagcaaatctcccacactattactcttaacctcatgtttgcataggaatataaacttctagctcttgcttgtttaagagtattccatttccaaaatttgtgtggtctggcctttctcttctctctcaagacagcgttttggccaattcaggatgtgatatgacatgagctaatcggagt

SEQ ID NO: 44100 - DNA, 391 bp, Oryza sativa
ccgacatccagaccgaccatgcatgctggcacacgcatgcggacacgcggaactaactgtgactagatagcgcactactcggcgacacgttcacgttaattaatcactcccaactaccacggagaaaaggtcatccgtaccggatggaaacccacaaagagtgccggtttttccacacgacaccatgaagaagacacatattacaacactcaaaggtggcggtatcagaactggcatctataagttatacaatatgcagagacaaatttacccgagccgatgcatcaaagcaacccaaaaaatcatccaggaatctaaaaaagactacacatcagcatcacacacaccaaaattgatggatcacacgattaacaactacacatgggagctc

SEQ ID NO: 44101 - DNA, 426 bp, Oryza sativa
  unsure (1)..(426): unsure at all n locations
ttttttcagataattggggttatgaacaatgtttttttttaaaaaaaaggtactaaattcacactatattttctcggggcagaggccggtttatctgcatgtgggtcccagccactgaaagcaatttatttttgaaagggaaaagaccaaaacacaggtccccaaagccacaatgtacatatatgctccttcgcggacaaacaaacaaccacatatatataatataagattaatactcctatcgagggatgatcatcgttgttagagtaatgaanaatcgtatagatctctctgttatttgtggactggatggtgggtagtctttatttttttttctttctgatgaanaacatagtaaaaatataggtgtccacaacgcatccacactcaccactatgaatacacacacgcacattctacccctat

SEQ ID NO: 44102 - DNA, 486 bp, Oryza sativa
ctataaaactcagctacgggctacaagcaccggagaataaacatcatgatcacctgtccaagaacatgaggtacgtgagttcctacttcctgatattatttctagcaagaccatcccatagctgtaaacatcaacttttagtgtaataagaacaccactaatccatttaggtgcaaggtaacctgcggtgcctctcaccatagtcaaaactcggctaaaatcccttcccaaaagctgtgccatcccataatctgcaatttttggaatgaatgaagcatcgagaaggatgttttctagtttaatatcacaatgtatgatacaatcttggcagttttcatgtaaataggctagtcctctagcaattccaatggctatttggtacctaatgttccaagttattgtagttttgctctgagataattgtagatcaagagaacgatttggcatgtgctcataaacaagcaacctcgtgccagcctcacaaca

SEQ ID NO: 44103 - DNA, 404 bp, Oryza sativa
  unsure (1)..(404): unsure at all n locations
atactaacgtcaaaactacttgcgaaacgctcatgcttcttttagtttctttatctacaatagnttgtttcttagatggggactgacctttctccctccttcgaaattgtagatggcaatgaacgccagccatcagtcccacaggattggtgagggtcaccaacttcgccagctgtctgacctcgcccggttacttggcttctcttgcaccgagtacacggggtactccgaggaccgtgttccccctcactgtgagctctctgtatacctttacccccgtggaggtatacacggagctggacttcgccacaccacttcaccgtggccaggcccactcaccagatcgagtaccaggacctctactggactgcgctttgtcgcctggcccacgactacagtcaccg

SEQ ID NO: 44104 - DNA, 466 bp, Oryza sativa
ctccctttggagccacatacaaactgcaatagaagatttatgtatattatgcatcgcattcaatgtacctaggaggcttggacagagaattgtggcatggaaacacgatacatacctggcctggccatatcgttcggaaccaggatgttgtatattccatcgagacgacgagtgatgtccatgtggttgagcaccgagaagagcttgaagtttgaatatgatctgctctgaacatccctgaacttatcagtctgtctcccagacattgtccaactgtacacaaccttgacaccgagctcttgttctgtgacgccagcacatgcatgagcgcctcccggagcgtgtcggctagcccgggcagcggacgtcggatctcatgccgtcacagtacatctggatcctgcaggtgctgcatcagatctgagatggtgaagacacggcggtgagctgtacgcactctccttgt

SEQ ID NO: 44105 - DNA, 371 bp, Oryza sativa
  unsure (1)..(371): unsure at all n locations
ctagatcaaaatacaaatatatactcccttcatgtcgctactctgcgagtactttttgctcatatattgagctgagcggtctgacaaatagagttcatctctccctcccccctttctctcattcatccacagcngaaaaaaaaataaagaaaaagaanaaaagattgtgtcgtaaatcgctactgtttgggtggagtttcctcaatagatgatgtgtttagttcgcgctaaaattaaaagtatggttaaaattaaaatattgtgatgaaaaagttaaaagtcttaaaaaaagtttggaacttaaaaaaaaaggccaggagtcacatctttaaagaacgaatgaacgaggctcctgactcgctgaggtaacc

SEQ ID NO: 44106 - DNA, 424 bp, Oryza sativa
  unsure (1)..(424): unsure at all n locations
actcttcttcgataccacacatctatttaaacatgtgaatatgctattcatgtctaacgagcgatctaacatgcactcaagctccatagctccatactacagagatttaacattgccatccaatantataggctgatcttaacacataacattaccaccatactctggcatgattggcattgccgcagtaataatagtttcactcattcatgatgaccaaacttcacgctagtaataacacctaatcatttttgaaataccggttaccaagcaactacatattaacaaatgatatttcacttaccttggagaattctcccatggccacatctagaaccccggagccattctttctgtggaggagacactgtcaccgtatgctntagatcaaccacttgtttggcatgatccacgctctaaactg

SEQ ID NO: 44107 - DNA, 351 bp, Oryza sativa
acactgtactgctgcatccgccgggatgacgatggcatatggtagcgtaatctccggaccaacctacggaacatcgcctctggaaactgtcatttgagagcaaggacaatagcaggttataagcaagctatagacacatttcacgagataaaagagaagatagaggaacagcgggctatagatttgtagccaactatagtacggactctaaagtgcatatttgtatgataggtgtgactagatattaattatgtagtatatgtggataaataactattgtataaattgactattatattgactatatatgatttagagcccgaagttggctatactatttaacttgctctc

SEQ ID NO: 44108 - DNA, 362 bp, Oryza sativa
  unsure (1)..(362): unsure at all n locations
tcagctcaatgcttacctatacttgatccgcatacagttcatttgtactacatggtangtgcatgctaccacttccaagtaactatgctactgcacaataattgtcattttaatatgctattcctacgagatgaagatcaaataagtgggctatacgccatcgctcgtacgctactttgagcgacgtctgatatatgtatgagtgttttgaacaatttcatacatttggcaaaaccatgttagtgcatgtatatgccctagatacatgcggttacacattctgttactgcatgtggagggttaaagtccaaagtgcctatctttcgaaaagaatgcctcacaagacatatattagtttttta

SEQ ID NO: 44109 - DNA, 426 bp, Oryza sativa
ggatcttaagcacgcggcatgcactgatgacggacaactttttactctcttaatgggcaaccaccacgcgcacactgcgtttacggacgtgctttattttctataacacacacggcggcacctcaccggagaatttatggcacatgtggcgtgacctacaattcaataatcctaggaccgtgctaccaaacgtgtcaagaacgaccgcaatatataaccaatctaaatcttaagcttggtccagagcagccacacttacgctaccaaaagaatagatgctatatgcgctcgatgtggtaagcaaccctgacgcgacttggttatatagccaagtcagcctgacggaataaaagatgactgttcatactttctgaacaccgccgctcgaagagaccttctgggagaaagattagagattaccctctc

SEQ ID NO: 44110 - DNA, 426 bp, Oryza sativa
  unsure (1)..(426): unsure at all n locations
caattctcttttctctatttgaactaacagaacataattgctgtaataataaatgatagaattaagacattggcaaactttgattcaacattnttaaagtagacattccagaacctgcacattatttggtatagcattctcattggcatgtggttcctcacggttgtgaacaaacccattcataatatcagtaccatcttgttcagaaacataagcctgaataaaaaatcaaacaaatcacagtattgccaaataaatttactaattgatatttgcgtgcttagttgtatatacctcattggtcacattctcacgtggcaccattgattccacattcatttgacttgttatggaccttntgcctaagctttccccacttagttgctgtaattgaaattcattaaaattaggtattgttgttaaatc

SEQ ID NO: 44111 - DNA, 81 bp, Oryza sativa
taaactagcttcactcattgttgtgagcctgtctccttctttcttgggcgaacacaacgaccgtgcctcttttaactgacc

SEQ ID NO: 44112 - DNA, 442 bp, Oryza sativa
  unsure (1)..(442): unsure at all n locations
agcttgtcacggaacaagggattagctncattattcttctttagttcaacaagcattattgctctggcagattatgtatcaccgcattaggagagttgctcattttccctatcaagacaaaataaaaaaccatatactgagcaaccaagtaatagttacagccacaaaattaatggccatgctctaatgtacataaataaagtgtcagaccaccattttggtacattacattcatacctaaagttttccaacgtcaaaagctgtgtgatctccttaaacaactcctcgttaaaggacgcgaagaccttcatgtccttgaccaagatttcaaccgccttcgaacgatcatgcctgcagagcagcaaacaaacccagttagcaacgctctccactccagcacctaagattcctgtagggacatgttcccttccatacttactta

SEQ ID NO: 44113 - DNA, 446 bp, Oryza sativa
agctgaacagagcacctgctctgaaccagtgaagactttttatcagaggcgggaaaggcgtcctgaaatatcccaaaatcgcagcagccaaatcgacacggcccggaacctcctgatgatgaacaccgggacttccgggcacgacgagtaccctggaacttccggagtactcgagccaccaacttccgggcagcatagataaagttaatcagacatgacaaacacgtcctaccaagagaagtttatgcacacagaggaacaacatgaagattgcagaatatcagcagatccacacaaagatcaggcacaagagagacaaagacgaggttttcccgaaggccggatcacatgaatcctactctccgaagaggtgctacaaagagccgggactcgataaccccacgcccactttgcacagacccagagagggcacaaccttactcaca

SEQ ID NO: 44114 - DNA, 61 bp, Oryza sativa
tactagcctgcatgccgcagtcgatctacagatcccgggaccatacttaattcgcctaaac

SEQ ID NO: 44115 - DNA, 457 bp, Oryza sativa
agcttatgaaccgaatgactctgccgagtttctttatatcgtgcataaaacgccatgcacaaagcatctatctgaaaaatatgcaaaaagaaaaaaagcgaaattaaaaaaatacaagcaatctgaacttccatgtattgcacaaattgttgttctagcaatgaaagacatatcaggagataggataagagagttcactatgtcatattgcttcaccaggagaaactaaaccaattaatataaaattatgcttaatggtcaatatttagggaaaaactgactaataaaagcagaattgaaaggtgtaacatataaggcataggaccccaatagatgaaatttgcgtgctatcattggttctagttcaatatgttagcacaatataaagtgtagagttgcatgatatgaggagtttgatgagcgactttcatatcgatagaacaaacagtaattccat

SEQ ID NO: 44116 - DNA, 386 bp, Oryza sativa
cgcggttgacacagcccaccgcacgttcaatgcggcatttattcttctatcctgcaattataattcacaagtaattctatggtatcttggattaggaacactaatgtattattgttgacttacctatggaatatcacatatccggactgtctcgtgatcatctaattctttgatatacagtagaacatgaaaactgcaatcatagctgataaaattagcccctaacgtgggaagcagcagcatcagaagaagcatagaatattttggtaaatgacgacatacttgtttccttgacgctgcacgtctagtacttcacagatgtattgagatgcacccattgattctttcacaacttctgagtgactctagaaaccacaatcactgct

SEQ ID NO: 44117 - DNA, 445 bp, Oryza sativa
  unsure (1)..(445): unsure at all n locations
agctnttgaatgttactccctctatttacaatgtaagtcatnttagcatttctcatattaatattgatgctaataaatctagacatatagcatcaatataaatgtggaaaatgctagaatgacttacattgtgaaacggagagagtacatatgtactcccaaaagaaaaaccgtaggagcttattcatttcaaaggaattgtaaaggaaaagcacaggaataagcaatcctttggaataggcgttgtactgtcattcgtttaaaggaatgcaccaaaggaaaagttcctacccctccatttttaaagggaaaacaaagggaaaaaaataatccactccacccaatgttttcaatcctttggattgtgtgctacacaaccatatgctaaagagtaaatgatatgttgtaccaagtttttaaccttattttcacattggactaccca

SEQ ID NO: 44118 - DNA, 376 bp, Oryza sativa
  unsure (1)..(376): unsure at all n locations
tttggatgactatctttctangttttattntttttttgagtgagcggccagaccggccggcgctgtgtccatttcggcttcgggtcgtttgaatggatatacccgaatgtttcatggttatggcttctagatggatactacacgtatgtaatactgatggttgctaacaatgagtcaagttggagatagctttggctcacaatatggtttctttgtttgtttcatgtctaggtgactccatgcctcgggagagtacttgcggtgatggaccgggagtctgcttggtggtaagacaatgtccgtggtggtcagatatcaatccggatactaaggctacagatgatcacgtggttggtgaagattcatatggatacat

SEQ ID NO: 44119 - DNA, 327 bp, Oryza sativa
tcacttctcaatctacgttactccggcattctgagtgccctaaaattcatccaagggaatgtactatcattcgtacacgcaaatattcgggttatccaaccttcttctttttcacataagccttgtgagatgtatgaatggtaagcttccgaatcaacagaactattgtgggtacagaggtgacaggacacatacccatcacaacgtctggatcatcctgagccgtctcatcattgatgtggttcacccagcctttacccaaattgttggaagcacgtgaacccttgacacttggccgaaaactaggacgaaactgaactggcactg

SEQ ID NO: 44120 - DNA, 475 bp, Oryza sativa
  unsure (1)..(475): unsure at all n locations
ctatanatactcaagcttgcgaatatactcctcctacaagggtgtacgagtggctatatctttcttgggatcctcaaattgacggtcagtggctatcaacatcatcatggacaggtcaaagttagtataaatacatcgtgaggttgctacactcacacagctcatgtccacattgaaggacatcatggtataccatctggtggaacacactagctttgtactatagtcagtatgtcatatccttcgatatgaactagaacttctatatttgtgtttcttgtcgtaatgaactaccgtatctatagccatggacattatattgtgaactctattgtttgagctacatgtggacatcattatgctttgaaatgtgtgactgttgaatagctatgctatgaattgttgaattgctttgaagacaaaatatagaaatatcatgccgaatctttgatttcacatcccaaagtaggtttga

SEQ ID NO: 44121 - DNA, 309 bp, Oryza sativa
ttgctattgaatcatggtagatagaagctcttagcagctactgaatatcaggttatgacgctgactcatgtggggcatttcctgtctaaatttggcacaccacgcatcgccatttattgatttcttgtagggcaccctcttgggacagtcatgcccacgcgatacttataacatgcatgccaatgtaatgcccatcttactcatacacaaaacaacaaccattggtgacctcattatatatataatgcaagcttttagtctggagtacccttcctttggcttggtcgtcaaggttatttcatagccaac

SEQ ID NO: 44122 - DNA, 326 bp, Oryza sativa
  unsure (1)..(326): unsure at all n locations
agtgtgggtgcaaagatcgctgacaagaggctaccacatatgcagaacagacatttggaaggagatatnttgtctgccccaatgtatacaacatatttcgttgtatgtctaacccgttccaaaatctgctatgatttgcacaaaatttctacccaaactgaataacattactattttttcatggcaatccaaggatgtgtggatttactcggtggatcgacaatgtcactccatcatatcatggccaaaagatagcagagtcagaaacacaagtagagtatcaacgagtgaaggaccacgagaatgcaatgcatattgaccaacct

SEQ ID NO: 44123 - DNA, 433 bp, Oryza sativa
cgctgagactgtgccatcagcgggcgcggagctggattactgttgttctgatatccaccattggtgctcccactactgttctagccgaaatttcctggttggtagggcctgtgctgacaaacgatcatagtagtatgaccactatgctgttcggaactgaaactgggcttttgttgtccaccttgctgagttctaaactgtagattagataggtggatgaatggtaatggcaacaaccataacacggagagggattactgattactagtgatgcaacggcgacggcaggaggcggcggcaccagctagcggcggtgcgatagtatgcggcggcgcaccgcggtggctacggtttgtgtaatatgaaaaatatgagggtggaagggattatatatgagaaaaaaataaatagataggtgggtcctacaacgact

SEQ ID NO: 44124 - DNA, 387 bp, Oryza sativa
tttgcccataagtaatgccataggaaaataccgcttattgtgctacgcattgtgaggggtccaagaggctttcaggcactggagctggggtagctttaatctcccctactggagaaagaatgagctacgtattgtggatacatttttctgcgtcccataaccgggcggaatactaggcgctacttcacggattaaggattgccatctctctacgcattccccgattaatcgtccgcggagactctcaattggttgttaattcaatcatgaaagagtggcctgcatagatgataatatgactgcttatcggctagaggtacgcatattggaagataatttgatggacttgagctacacatgtcctctgacatacaatgatgaaccgac

SEQ ID NO: 44125 - DNA, 373 bp, Oryza sativa
atgctcacatcgtgcgtgggcgctaccgagaaaaccggagggaccgcagttctccgaacgctttcgtcagaaggtacctgaacccctcctctaactattatatctagtgcttaaatgatagtgtaattagtatattgtgatcggaacgacttcctttatcagtactgcagatttaagataccaatctgatatctaatggacgtggtgattttgccagtatttgcaattaccttatctgacatatggccaatatctttaagcacgctaataataaaatctttagtgtgctattctattaagtaccattcagctttagtcaaatgaccggtttcttaagaagatctcattccccacttttatatctgaaaacact

SEQ ID NO: 44126 - DNA, 473 bp, Oryza sativa
gacacttgaaactaagctgaccgtatagtttaaaaaatcggactccatcacttatgtgtctgtctggaaaaagcagtccggcttttcaatctctgtcatttttctcccaccggcacagacaccagacagtggtacgatcgacaaggtcgcgtattgctgtcaccaccacgtgctaaacctcaagatttgtgcagtcggcatgcaaaactcctctagtcaatggagcggctatgctagtactcctacattattccgtcgtcactcttatacaaacaaaaaaacggtgcggtgtacgcaccgtcgcggcgccgaccgaccggcagtcgtcgaagcatgtgcagtgagccgcgaacatacacctaaacctaacacgcagtgcgtaatctgttcggtttcagctcacagctgacatatcatgtccagaatctgaaagcctgaacactgatcaaccttactactgtgttgtggtgaac

SEQ ID NO: 44127 - DNA, 470 bp, Oryza sativa
  unsure (1)..(470): unsure at all n locations
ctctgagtcacctgcggcatgcaagctngtaaaggtgcctttttttaagatatatttttcatcagtatctgggggaaaacattntaaaacaaacttttcaactctaatattgaatttatttatttgtgctcttaaacaattgtcacaaactcaacttaatccatcattcatttgtatcaacactttaaacatgtccaaaggcaattttttttatgaatgtagtggaaaaagaatacgtgtcatatatatactcatttactcccattntaaattgtttcataatgcaactctgatccataattcgacatgacctcaacagttacaggtacagctgataaggcccatagattgcaccaagtcaccaactaactactgttcaacaaattgtccactcatatatggcatatagcacaggagaatatgcagctatatattggcgattgttgagctttatatacgcgattgtattg

SEQ ID NO: 44128 - DNA, 473 bp, Oryza sativa
actcagctttgtattcgacaatgatggaagagagcatcatggtgaatctttgtttaatgaccctagatggagaaacagcaagttttatgatctagagcattacctattgagcttcttggatggatcaacagaaaatgggaaggaaagggtccggctgaaacttgaaacgccaattggaattgcagatcgtttgctaacgtcatgtcaaaagcttgtgaagctagaatatgaaaaggctattgatgacctaacatccatcaaggatcttgtttctggtgcagacaattatgctgtgaagattgaggctgacagtgattcttggcaaaggcagatttcatcccttgtaagttctctgaagatgactatttctgttttacccttatgttcttcaattctactatgatatattccctattttgaaccataaggcatacatagtagttagctttgatgcaaaataagagaaaacatac

SEQ ID NO: 44129 - DNA, 346 bp, Oryza sativa
actatttacacattgatggacgctgtgtgcgagcggacttattgatctagatgcgctgcagggcgcagagcatatatacacgattgaaaactggaagcatcttactgctgaattgacatctctatattgcacgagctcacacatattgtttatgccacatcactccttgctcagatctgaaaacacaccgacttatcactctagtgcattccacgaaatcgccctagctcagatatgagcgcactatgtctaccacatatgactctgatcatacacaaatgactcatgctcacatatgacaacacactgtccgaggaagagatatagagaaacattacttctcatt

SEQ ID NO: 44130 - DNA, 472 bp, Oryza sativa
tgacatatgcatactatcattattattgagacaatgaacactctttgatcacgtaaacacacatggtgttcatgtgccacaatgttaggagtacaaaagaacccacgtcatggcatgtttatacgctgccggagtttcgccttcacagatagattctaaactcttgaggcatactcattatttacatattatgtaaacagttaagaaagtatttaaatatacagtactaatgaattactaatgaagtgcgataaagcactctacatcccgtcatacataacttatacaagttgcaaaaagaaatctaactgttactatagatatacgttacctaactatagcttaattggttgttcataacttgtagaagttaaacctctatgtttgtatagtaaggatgtgttcgaatgcccctgttcccaacccttatcattcgtcttccatgtgcacgcttgtcacacggcctaatgat

SEQ ID NO: 44131 - DNA, 279 bp, Oryza sativa
atcatctgccttgttcgtatgctcacattgcatccgcgccactagagagaacacactgacagatcatttcccagacttgctccaaggaagcgtagcgagcagcatcaacaaagtacacgtggctggtaaagtcacgagacggacagcatacgtgtcgtcggccacggaccatcatctatgctctgaccgtttatgtatttggggcaaatcgattcggcgtctgacttcaaatattctcttccatacatgatggcaaaagaatcacacatagtccttaca

SEQ ID NO: 44132 - DNA, 443 bp, Oryza sativa
  unsure (1)..(443): unsure at all n locations
ttttaccaacttctctataacaatatgaaccattttttttccataagacggaacacttatacaaaagttttggacactgctataagagaattatgggtgcttctgactagcgctaggcttatcaggtactgcatttgctccactgaccacttggcgattggcatgtctgcttccttaacaagtactacaggttgtaacagacaataactttcttacgctcgggttcttcatcttgtacttgatttctttggctgctgtgctggaacatccaaaggtacaatgccgatactggcctctgtcttgtcaactgatggctggggctgaaatnnancattgacaccttgtggtaatgcactcgctagagttggagctgttgcaacgcggtctatatgactgcttctggatgcatggatgacaattcgctgtagagcaagcttctgatt

SEQ ID NO: 44133 - DNA, 455 bp, Oryza sativa
tcacttgctcgcgcgtactctatcgagaatgacctacgtcttcttcgatcttgtgggggctcgtctagagaggcatattgccgctataaacccggttcgcccggccgaccgtatatattgtcagcagttggctatactcgacgactgacacgtcctcgaacatcttccgggcttcggcattggcctgattgatggtcaacactgcaaataatatagggtgcagccacattaagcgtcgaacgaagcacaataacgaagcgcaggcatgcatatcgaaagtgcagtcttaccattcgtcctctcatggactaccaatttcgtgagaccatcaacctcatctgcttggtcaaccgtgacttgccatgactaggagaggggaaaatgccgatcatgcagacctcctccaccatgtacgacagctaatgcgggagcaaaccttacacacaaagcgaacc

SEQ ID NO: 44134 - DNA, 408 bp, Oryza sativa
gattctctccgaatcacaaagctccttaaaatagttactcccttcatcccataatacaagatatagtcaaacttggtgcagtcttcaaaactaatctttgacttaaaatttctcatatacaataaggtttgttgcaacaaatttataaccatcttaaagtaaatttaaatatcaatccaatcatattaattttaacagataaaatctatcttattctataataattattgatcaaacgtttttaaagttgaatattaaaatgtgtgcaccccttatattatatgatagaggaagtagtaagtttcttatccagagtaaattctaacagacttacagatcatgccctatttagttcccaatatctttgttccacaaacatcacatagaatatttggacacatgcatgga

SEQ ID NO: 44135 - DNA, 342 bp, Oryza sativa
  unsure (1)..(342): unsure at all n locations
ccaaagaaaaaaagaagtataaaacaccaagctcaatttattatactgcagcaagaataaataaaacaacatgcgaaaactcttgctgggaaaatgagccattactacaacaatggatgtacagcactaataacactggaataaacttctaatgagaaccatgtaaaaagattatgaagtgcatgtgccatcactctcgggtgattaaaagagaaagggaggagaacagatctacttttccaatattctaagaatgctgctatgggtaaccatntggcataacctacggtcaaggaggctctgataccaacttgtcacgcccggagattctatccaaaattc

SEQ ID NO: 44136 - DNA, 342 bp, Oryza sativa
  unsure (1)..(342): unsure at all n locations
gattctccagncactccctgccagctttaagccgttcataatgaatttcaacatggataggaccttggccgaattacatgggatgctaaagactgccgaggaaagcattatgaaaaactctaactatgtgatggttatgcataagtgcaagcccaataacaagaagagtggtcaaaagagaaagctaaactctgatgagatcaccagtactagcaactctaagaccaaggttcaaaagacagggcccgctaaggatgcacagtgcttcttttgtaaggagacaggccattggaagaggaactgtaagaaatacctagagcagttcaagcagaagcagtatga

SEQ ID NO: 44137 - DNA, 453 bp, Oryza sativa
  unsure (1)..(453): unsure at all n locations
tatcaacggataatacaattccttgataacaacaactatcttatcatntcttcttctatcctctcagccaaggatgttggcggcatctcatcacactttgaaattctaacctcaattcattttaaatagtggtgttaccgcatttgcgtttcatacaaaaaggttgcttggaagtcttaatatcgctgcctagcatatcttcaagcaaagaaatggaaagatatttcagaatgagcgaccttcctttgaaggctggacaattttgttcaagaaagctcttctgcagcatatgtgcaaaatgaaagatcctctatagaaaatagatttttattgattataacctttgtaatctcttcagtgctctacttcgaattatttcttgcaaaatactttattcttttaatgaaaatcacgctgttaggcaaagtcctagtagtactccacataaaaaag

SEQ ID NO: 44138 - DNA, 435 bp, Oryza sativa
ctgcagcttgttacaccgtctagttagtactacttgtttatccaatggatcgagtagtcttacctcatcggaggatatactccctccgtcccatgatacaagagaatattaacgtttgcttatactcgttgttcactcgtcttattcaaaaattttgtgcagatattaaaaacgaaaagttgtgtttaaaatactttagataataaagtaagtcataaaaataaataataattccaaattttctttgaataagacaactggtcaaacagtgtaagaaaaatgtcaaaatcctttatattagagtacggagggagtagtaagcaattaaaagagttaaattttgcgtacgcacgcacctccactgtcttcttcaaggcaggtctgaaatcggtattgccgctggccttgagcttgtctaccaaattatccagcttc

SEQ ID NO: 44139 - DNA, 466 bp, Oryza sativa
tactcagcttccactagacttctgtattctgtcgcatcaactagcgattctgttctattcttgctcagctttagacgtggttccatcggtggtgcacaggggttgcagtcggtgagcccagccttctccacaatacgcgacgcatacactgcttgctttatagtgatgacaccagcttctcgatgtacctcgatcccaagatataaactcaaatgaccaagagcactcatcttaaattcagccttcatctgctctttgaatcccttgatcatgccactgtcacccccgacaattaccagaacatccacatacacaccgacgagcagtcgcccactgccatcgccgcgcgcgtacagcccatgctccaacgggctctgctagaagccaaggttcttcagtgcgcaatctagcttggtgatccaagctctgggtgcttggcgaagtccatacagcgccttatcaagcc

SEQ ID NO: 44140 - DNA, 440 bp, Oryza sativa
  unsure (1)..(440): unsure at all n locations
agcttgcttgaaacagaattaccgaaccctgcatcataccatatatggcagagcagctattagctcagatagcaagttgtcatgaaccgaaatcatgatgaggccaatgtcagctgggaggattgctgaatggtgcaggctgctactgatgagttgagggcttaaactgggatcatgaacattaggggaaaagattaacagtttaattttcttcattgaatcctctccggtagaccagctcattgcctcttatagggccagctcctaacagtgtaatctaactaatttaaattgattntatcagctaattaaaaggaacaacctacataactatggctgctgctgctgatcttcttggtccatgcncatggtaaccaatattatagttttatcttttaagatataatatgtgattgtgagttatatccttgctgttcttg

SEQ ID NO: 44141 - DNA, 388 bp, Oryza sativa
aggatattgttgtgccattgcccaataagctggatcttggctaaggcgctcaatagctcataagcacatcagcccgaattcacattgggcatgccattggtcggagacgatgccttattcaagaacggccctgcatgcaatgagttgcacaggtactacatggagaagtccaatgcaaggaggaagaataaagagacctccatgtagggctagcacaataatcaagcgttcctcgggccttctaccttcatcgtcgtagacttccaagatctatgggacctctacagggtgcgagcgaccgacaccaacctccttatggctattccttttaagtatgtctgggtacgcgatatggtagtaactatccatacattacgcataccctgac

SEQ ID NO: 44142 - DNA, 439 bp, Oryza sativa
gcttgagtgtgtgcgattttatttctgcctctacctagtaggtaataggaacgcacatatttttgtgtatgtttcttgttttctactaacaatggccgggatacgcaagataatttgggatagctgcgctcaacattgacatcttcgtcgagacatgaggagggatcaacatgaccattatgaggtaagtgatgatgttctaggtaagatcaaatctgcactgccttatttcgagggagactatgatcctcgtgcttacattaattgggagctagcggttgatagtgaatatcaaaagcatgtcttgtcggagaaacaaaaggttatgtgtgcctctagtggtttaattaaacatgcttctaatgattggaaacatctttggatgcataacaaaataccacaatcttggaagacctgaaacatatttcagagatgttat

SEQ ID NO: 44143 - DNA, 441 bp, Oryza sativa
tgtcacacatattcatacttgcaagactatggctgttttctacatcaacgatgaccttgcacacctttcctgccactatagctcgggactgaaaaagatagattctcttgtccattttcaacaccactaagttgtacactcagaactcgagtcacaacaagtgcagcaccttattcaaactcacattgagtatactctcttaaacaacatcttcttttctcatcaagaacatcttcttacacctcactacgtgaacaaactctgcatgttcaatcacaataatggcacgattgtttggacattctctaacaacatgcccacggactccacacttgaagcattggatatctcgactcctacaagtagagccaattgacgtagtagatgagaccgctggtttactctcacactagaaatgacagcctcttgccatagagaact

SEQ ID NO: 44144 - DNA, 442 bp, Oryza sativa
  unsure (1)..(442): unsure at all n locations
agcttaaataaagagggccatactatctgttattctacgtcgaggttaattagcacccctaaaccataatagaggaaatctctaaccctcaatgaacaaaaccggattaaattacgtcattggcagtatatatggctagttttgatgactcggcaagtagacctaagacaccagtcctaacttaggctgcgttctttatttctctttaccaaatcacttccctcgtttgtcgcacgcatgctaatcaaattgctacacggtgagctttgagctaaacatttctatataacagtttctttaaaaaacatactaatcattntaagatatatggtcaatatttatttaatctcactataatcgtgtgcttggttttcatgccggatcccgaacgcagactaagcgtctatgtggcaaaataaaaaaagatagtgggtcccacatg

SEQ ID NO: 44145 - DNA, 435 bp, Oryza sativa
tctgctgtgcatcgactacaccgaccttatacaggcatgtctctaagatccctaccccctgcctcgcatagatcacattgacgactccactgccgggtgcgacctcttgtgatttctagatgcatactctggttaccatccgattcgcatggctagggaggatgaggaaaatacttcgttcattacccccatatgaacctattgtcatacgacaatgcccttccggttaaagaatgcaggtcctacttttcaacgtactactctaatttctttgggtagccaattatgacgtaatgttgaggcttatgtcgatgacttggttgttaagatgcgccaccaggaaatgttactctcagatctatcggaaactcttgagagtctccgctaccgccgcataaaactaaaccccgataagtgtgtgtttggtgtacctgc

SEQ ID NO: 44146 - DNA, 451 bp, Oryza sativa
  unsure (1)..(451): unsure at all n locations
agctntgcaaggggtgaaagattaagttatgttgtgatctaacagttaaatagacaataacagttgttaacaattttttcacacattattacagcaaaataggagtaagatctttacctgtccccagatcatgaccatagccgatcgagtttaccgatctcacctttggtgctccccctcaccatgcatgcgttttcttgatattagatacttcttgacaatgttnttgaacctaaatcagagggacgcgactcccgctcgggcgcccgatgggaggaggttaaaatcgggcgctacatgcaaaaactactttaaactgatttgtctcttaaattacttatccaaatcatgatccgattgcaccattaaattcgctgcaattaaatattcagaacaagaccacacatggatatattccaatgaacaaaattagcttattattgaattatta

SEQ ID NO: 44147 - DNA, 380 bp, Oryza sativa
accaactgcaggcaatagattggcatcacagagacaaatatttattccattcaacgacatttgtgtaataacaccagataactgccatttgtaagcttaaccagttcttatacgaatttaatatactccactgtaggagcgcacatgtaataaacatcagatgcatgagaccacctcatatagtagtcaccacaagatgagcattataacaggagagaaaactgctcgcatcatgggcagctgatgaagttctcatcctaaaaagactgacgcacaaagaaatctatgccgggataaacgtataaggttatatgaacacatttctccttcagacagctgagcagtgtatacagatcactatcctgctctcttgaatcata

SEQ ID NO: 44148 - DNA, 452 bp, Oryza sativa
  unsure (1)..(452): unsure at all n locations
agctatcttggtaaatgcagcgtctgaatattatatgcatagtccatctaattattacaagaaggggataaaagatggtctataacactataaggctataaactgacatgacgctgcttacaaagagaatatctttattttctccataaaaaagaaaaaatcagggagctgttcctctgaatctagacaaacccttttcttcaattcaagcagtaatcatcattcataaatgccaacatgcaccggttcatcaaccataaatagagcacatgaaaattcatccagcctctacagtttctagaatattcctatctgagaatgtgaaatattaatgtcaattgtaggctacaaacatggtgtatgtgagtcaaatatggtgactgctgcgtcttaatgttctacaatctccgaaaggaccatgagtggacanaactaactgcttgagaatcagt

SEQ ID NO: 44149 - DNA, 349 bp, Oryza sativa
  unsure (1)..(349): unsure at all n locations
ntatagcttatggagatattcatgagctacataactaaattctcttgtactgttcggttggtattaatagaggtgtcttgtactccgaagagctctctacagacatctcataagcagtaatgatcttagtacatctgtaaatttatactcgattttatcttcttattcgatgaagagacacgtatggagaaaccactactatatatggggtcggatctcgcacaataataggcctttctctcacatgtaaaaaatatagtcacctcactgttaataactatactattgccacctcacctgtggagatctcaataattaagcaagttaccactctcttcactaaattcta

SEQ ID NO: 44150 - DNA, 395 bp, Oryza sativa
agcgcatattatcaatctcgtcatctacatttattctgtatttggaggcacttctattagataatcttcctataaagactatgcttactagcacatttgttcctttaaattcttcgtatccctttgtttgaaaaccaacaactcattttatctataaattcttttataggcatcgttatatctggggctatatatgttatcaacatattctcattcatatcaccttctaaaaatactaatgctgctttatctattgtgacccacctctcatctaacagagttattaaaactttagctcctaagctctttcttgtcataccttggagtcctattgtatacctaccttggtgaatatattcataccctgaatactttaatccatcttcaaaatcctt

SEQ ID NO: 44151 - DNA, 420 bp, Oryza sativa
ctgatgaggcgaagagaatgatgcataccatgggcatctgggtgctttgatgccctgagagagacagaaacatcacgtttatccggttgattgggatacttcccagtctgctgattcatgagtaaaaccacgttttttggcttctgagggtgcacacaggatactattcgcacatcattgcatgcctcaactagctccttgtgttcgcaacacgtggaatttgtgatactacatgaatcaagatcataccttacattgtagatgcaacaagtttttttttaagcacgctctattgatgcacagtttgcactacaggctcaacactcttaactataggaggacttgcctatcttatgtttcactcttagacaccagatgttctatgctctggtcattttactgcacctcagaaaccatttt

SEQ ID NO: 44152 - DNA, 432 bp, Oryza sativa
agctttctgttccactcacacgaaggccgcgcttgtttgcgcgctgactgtcgctccgtcacgacggcgcgaaccgtcagaagctggatcatctctgcgctgacagaagccttacttaggagaccgcctgaagaagtggtatacctgtgacattgggctacaaaccgctccactacgaccacaaagatgaggatcctcatggagtgctgacgcctatgggtatcagtgcttctaggaccgaagatgccggtcgctataatgatctggttgagtttctgatcaacttgggcgatgactgtcaatgaccggcggattatttcagatgtgtggatcgtcctgatatagtctatcaacattgcgagctatcgaagagagaagcgccatgcgatgctgcctattgtcaccatgggccttcttgactgccgactatca

SEQ ID NO: 44153 - DNA, 427 bp, Oryza sativa
  unsure (1)..(427): unsure at all n locations
ntatgatcactagctcacagagcgagcctatatcgacgtgtttcctcttacacatgtcgtctacgcgacagagggagcggcttatctgatgccagatacctatggacatacatggcgagacagatgatctttggaatgttgagcacttagtggccggttaaccgtaacctgcgcaatgctatgtagtgcctgttccgggttcataataatagaatcaagcgtaaagctgcacacatttgttggctagacacgcaatataaagaatcaataatgtagtgcgtatatgctatacaacgccttataacacgagactgctaattctcaatagtcatctgtgcatatttttggctaaatctatgaagtatgtgccaatatgattcaagagtggcgacaaccagattgatggctagtccacactagttatcac

SEQ ID NO: 44154 - DNA, 445 bp, Oryza sativa
  unsure (1)..(445): unsure at all n locations
agcttgagtcatatcagccncgttggacgtctcattttcctacaatgtcgcgtttaacgcctcacatgctccaaagaagagaggtgtctccgcagctccccaatctgagtgcgtgacgcaaagagcgacccataaacctccttacttgggaggaagcactactgccttgaaacagagaagagaacctgaataccgatttctcatatgggccgagatgacacaggaaaagtgatatattgcaacacagagccatatacacctcagcgaggcggccgatcactatggatgcgcaattacatggtgctccatgaaagacactatgccatttcagggatgagtaaggcgaacccatcagggatgaacaagtggcacggaacagacttgctccacgtgaattcgatgcggccagactatacgcttctggcgacatgcttgtagtcgaatg

SEQ ID NO: 44155 - DNA, 81 bp, Oryza sativa
catgaagcttattgcgctacgttgcgatttttttttttgtttgctgtgcacactctgggtggggccactcgtggactcttg

SEQ ID NO: 44156 - DNA, 466 bp, Oryza sativa
ttagagtcacctgcggctgcagcttaggaaagatcacatgtcctattatcatggagaagatggtgcatcagaggagcttctgaaggtgacaacattactagagtaattcatgatatttttgaatttcctttctctcatctcatattcatggttgggcgacagaaaagcgaagccagccaattggatccttcacaagcctccacttccaatttcatttggaacacatcattcaaaggccatgctgcttgtatatcctcaagggatacatgttgttgtgcacacagcaaatttgatacatgtcgactggaataacaaaactcaggggctatggatgcaagatttttcctggaaagatgcataagatgtgaatagaagtgttcctttgagaacgatttggtgattatctgagtgcaattaatgtatcagctagcagggcacttcgtcttgcttctgattaacgtatcac

SEQ ID NO: 44157 - DNA, 315 bp, Oryza sativa
actcagctcgaagaggaaatacaatacccggcctacttcttcagttcttcttatgaagtctgctcgatcgagcttaatatgctgtgaaaagctaagtgctaatgtgctactatatatagatatactggactagaggtagctgaggctaataatagttgcatcgacttcttgacttaaactacctgtggagcttctcttatattattccgaggaaaatcgctgacttcacaagtgtataaaatactgtgataacacgtggtacgttcctgaaacaagataagagaatcatgacccacattgcctttcatagatatg

SEQ ID NO: 44158 - DNA, 354 bp, Oryza sativa
aaaccaacagcacccagctatcatggttagggaaaaagaatcgtacagacaatcaattgtcatgccttaaacttgactgaaggggagtaattaatttgtagcctggtcaagtcctcaataattgcagtgccactcagtataagctgatcgatgtgctcagctaatgggaagtggactgtccctcgactaaaattttttttgatcttacaaattctttgtataaaaactcttgtggaggaagaacaatcactctttactattgtaattactatcatgagttctgtgcaaaaatatacttgtataaatagttactataaacaacacagttacatgttcatcgatctaacatagatg

SEQ ID NO: 44159 - DNA, 172 bp, Oryza sativa
tgtggggagccatgatcttaagacgacaagtggccttccatttaaatctagccactcctatactactaagacatctccctacatattgttggcatgctaggttgatcaaccttataaacgctcggggttcatcagctaacctcacaatggtgcggtctttcctggctgagtt

SEQ ID NO: 44160 - DNA, 366 bp, Oryza sativa
  unsure (1)..(366): unsure at all n locations
tgaccggttacctctgacaggcggtttttgttattatattatngcatggacatctagctctttggatttatgcccgacaattatgttaaatattgagggtcaaaatggaggaattacaccaagacagactaatgggggaaaaataattgattttttaagtattatgatcacatgtaatttttaatgatcaaagtcatatattatagacataaaagatcaaataatattgtgaacatataccattatcagaataatgatgctaacagtataaaagaccaatgaaatgataagttgcagaagggctaccattcatattatatctactttagctatgattttattgttacggaggcataaaatattttt

SEQ ID NO: 44161 - DNA, 396 bp, Oryza sativa
  unsure (1)..(396): unsure at all n locations
gggctntctctcacggaccttgataaagatcgaagctctgttatctaagtacgcctaaaggttatcatgctgntgctgcatcatgtcgttgatgtcggcgaactgagcatcaacagattgtggccattcttgcgttagaaccatgtgttccgtgaggatgcactggatcttccccgtctgcgacatcaaaggtgtccatactcctactgatttcacgcacactcctacgagaggaacatgaacgccattcacttgtagaagaagacacatcactcgatctgggaggttgattcgcctcccctttgatgtattgatgcgcatgctacccggtctcacttgcgcttcccaagttgagactccgatgcttgggcgtggagcttggtacatccggtgcat

SEQ ID NO: 44162 - DNA, 431 bp, Oryza sativa
agcttgcgcaagaattagctggtgtttgatcgtatttatgggcgaataagagtgttgagaggcgaggaaatggtcaatgtgaacaaaaagaagaagaagaagctagctagccgccaacacaggccggcatttgagcaagaaagaacaatcaagtggaggccccaaatggagtaagataacgatcatttgcattgcacattttccaacgtcaagtgatcatcaagtaggcacccaatggaatgagatagcgattattgcattgcgtatttgcacgttttttgaatcaaacaaaaccaaggaggtaacggacatggttttggactttggagcagataatctctggtttagaaggtaccgaggaaacgtggtttagaagttactgaggggaaaaaaaagactaagagaaagataagaaggataagagaatttct

SEQ ID NO: 44163 - DNA, 448 bp, Oryza sativa
tggtctcaatctgctgcctcgcaatgacagtttatgtcatgatgtaccaatcctcaatgctagctctaccgatgatctcaactccctgattcccactgatacaagctcagataaggattcaaactcaaatgtagcagacaggttatgccactgtcctgcacaagagtagaactggagtccttgttgcggagaaaaacgaggtgcaggcctagtgtttctgatcaaactcttgatgtgaaacctgatggtgaattctgaactgcagtaatgaagggtggttcactgcgctcctacattttgtgttttgtctcactgatgatggctctttgattcattggtcttcatattcatcggcttgacgtgaaagacatgatctttgtctattgcatataactacaggctatttactctactatcttattgttcctaagcaacacatgacatacct

SEQ ID NO: 44164 - DNA, 340 bp, Oryza sativa
  unsure (1)..(340): unsure at all n locations
agcttgagtgtgtgcgattnttgagctgccactacctagtagntaataggaacgcacactattttgtgtatgagtcttgttntctactaacaatggcagggatacgcaagataatttgggatagctgcgctcaacatcgacatcttcgtcgagacatgaggagggatcaacatgaccattatgaggtaagtgatgatgttctatggaagaacaaatctgcactgccttatttcgagggagactatgatcctcgtgcttacattaattgggagctagcggttgatagtgaatttcaaaagcatgtcttgtcggagaaacaaaaggttatgtgtgcctctag

SEQ ID NO: 44165 - DNA, 425 bp, Oryza sativa
  unsure (1)..(425): unsure at all n locations
tgtcacacatatncttacttgcaagattatggcagctacctccatcaacgatgaccttgcacacctttcctcccactttagctcgggtctgaaaaagattgattctttgtccattttcagcatccttaagttgtacactcagaacttgagtcacaacaagtgcagcaccttattcaaactcacattgagtatcctcttttccaacaacatcttcatttccatcatcaagaacatcttcttacacctcactagctgaatcaaactctccatgttcaatcacaataatggcacgattgtttggacattctctaacaacatgcccacggcctccacacttgaagcattggatatctcgactcctagaagtagagccaattgaggtagtagatgagaccgttggtttactcttcacactagaaatgaca

SEQ ID NO: 44166 - DNA, 446 bp, Oryza sativa
tagcttgaacgactagtgcattggcagagcttttgttctccttttggcaactagattgggtaggcatagctaattatataaagaagcacaccgttggaagcactcgccgccaacgcagtggatagtgtttacgatggtaaattgcctgataccggaatgaatggagaagtacttgaattgttggctacagaaacccagtcatttatctccatgagaaaaaaagcccagctatgcattgcttcccatcgcagtatagattgccgttgcacaggaggctcccagtgtgaattgattttcatgccgggacagatatgacattgtatgttctaccattacttctttctcccaagcaccaacagctattttgtagtacaccactcatctgggcagtatcgcatgtgcctataacacttctaatttcctgctagtgatttgagatatacttt

SEQ ID NO: 44167 - DNA, 439 bp, Oryza sativa
agctcacctactcatgatgtcctacatactattgttgtaggcatcattcctcaaccatttatgcattggaatcctattcagctttacctcgcgcaactaacaactagcagcatctgcaaatcatgggtgctaaatgctaataagaaaatcatccaaatgttaaaggcgactaagctcactgctagacataaacaggaagcagcattcgttctgagaattgccctctcactcaaagaaagacaataggttgttttattatccagattcatacttctaatatcctaattcctaaattgaccataagtattattgagctgtctgtatcaataacaataacactgaacttcagagataactgtcgtattttacatatgctctgccctttctatctctactagcagatcccgactattaaataaaaatcgagtgctgctatgat

SEQ ID NO: 44168 - DNA, 441 bp, Oryza sativa
cgatgagggaaaactacaggttttactatatgtttatagatttgtagtcaataatgatgaaaatagttttgaactaaagcaactatgtcatttgatggagcttaaaagacttggtatttataaccttgagagaatagacacataagaagcagcggcagatgcaaaactttttgatagaaccacttactgaagttggcattaagttgggacaaatgccaagcaagtaggtatactgacaaagaagatcaagttcttgataaccttcgaccatgttacaacctcaaagagctattcatcattgaacatggaggatctacttgcccatcatggctacgtgcagagctctctgtgaaatcctttggagactctttatctttccaatgttacactgcaaaacttaccgccgatacgggaggtgcgtatggtaaacggacttggtga

SEQ ID NO: 44169 - DNA, 449 bp, Oryza sativa
agcttctctgaatagaatacatttccttaactgtttcttttcaagaatctgacaaacggcgactgataatgcccatcagccgattccaagactctgaaaccaatactaactctaagccgatgatgacttcggggcttatcaaatttcactgttaacagaatgaaaaagttcaaaaagcataaaaacatgattttttgacatattagaatggattgggcgcattcttttagaaaatatctctgtgacccgctcagtgacattttgtcatataatgacaatattggcacacgttggtgcgatgtgttcgactgaacgaataacttcaaatatctcttaaacatgaactttcaacatattagagtggttaggggcgttcgttcctgaaatcatgagttttgcgggactcgccctacctgattatgtggtgatgcaacattattatgtgtagt

SEQ ID NO: 44170 - DNA, 416 bp, Oryza sativa
ttgcaccatgctaataccaagagtgtaatctaacgcacatatattatctctcaccatataaggaaatgtggactatatatacatgtggaaatttctcaataacaaatttactaacaaattgacccttgagcatccatcaaaaaacaattcggcatgcacaatttatataattttgaaataaaatgactagcttatattctctgaaagcatctttgtctaattgagaacaaactgcatcataaacttttgggcattttcatctttcttcttctatagtcaataactatttaatacattgttggacctgatatatttcacacaaattgcaacacaatccactctccatgagcatattcaagcctgctattgcgtatacttggctgaactaaagctacatgaagtatatactcctgaat

SEQ ID NO: 44171 - DNA, 408 bp, Oryza sativa
  unsure (1)..(408): unsure at all n locations
agcttgctcaatggatggatctagggtatgctatatatcggtcagcctggtcttctttgacttagctttcttctttggagccggagccgatggatctacacccgatgctctagttnttttctttttaccggcattggctggttctctaatgagcccttggagaagagttgaagtcttgggggcatgatagccgatgacagggggagatggcccacctccatttggaattagacctggggcatactctatatctctgccactattgctttggtgtggaggagaagattctgttgtctgcaaaacaaaagggaagattagtcaagttatgaatcggctgacaattggtcaaataaaactaatgaagtcaggtgtacctgatggatatatcatgaaaaagatctgtcatgt

SEQ ID NO: 44172 - DNA, 458 bp, Oryza sativa
acactataatactcaacttctcaatgcttcctctgataaaaagacagcacgtgttatttattgaataacatgaattactaagagtcaacttgatctgtacactgacatgggttattaacgatttgttccatccttcgaaaactaattatgattctcaagataattaaagataaatggaggttaaattgggtgcagtagtagtaccccttatgccttcttgccgaggagttcagaggggactttgtacaagtcctcgtcaactgccctaacaaccctatgcctcctcgatccatggacaactaccccaccatcaacaacaacagatggcccattcctccttctcgccgcctgtgtcatcatcccaatctttgtgctcctcacctgacaaatgcaatcttaacaccgtcttgacaaaaacaaatcaagatagaggtagtgcttgctatttatcaagatat

SEQ ID NO: 44173 - DNA, 452 bp, Oryza sativa
agcttggtgattttggttgtgctacacttattgatctgagtttggcaattgaagatggagattcacgttatatgcctccacagatgctgaacgacaagtatgagcatcttgacaaggtggatatcttttctcttggggcagctatctatgaacttataagaggtacccagcttcctgattctggacctcagttcacaagtcttcgggagggaaaaattgcgttgcttccatgatgcccaatgcaatttcagagtttaataaaggtacaacaccgtgtaacttggctgtccctgcttattttgatttgcctctatctatatcagaggaaacacatttaattgccacgatcccagtatcttccccatgttggagtagaagctccatctccaggagaatcttatcgtttcatttcttatatttaatatggtcgaagggacagtctctctctcatc

SEQ ID NO: 44174 - DNA, 407 bp, Oryza sativa
atcagcttcatcaccttccatgctcacacatccttgctgctgccagtgattgtggcatatcacccaatgtgtacgtcgcataatatttcaagaaagacgcaatctcccatacatggagtgaggagatatatgggtttgggactcaggacttaccacgctgatgcccagttttatattcacatcctcaagtaacggtgaaaagggtcactccaaactatacgcatcagaaatgatatggatgagtcactaacacgtgggaggactttaccttgcagcaagtgggatctgcgcggccatacttacaaaaaatgcccgaagaatgcggaaatttcaagcggcgctgatgctaagtcatctggacaggcaagtgatggtaagcgaccacttcgggaaggaacaacaaacaa

SEQ ID NO: 44175 - DNA, 469 bp, Oryza sativa
tgtcacacattacacagaaggtagccttgcatgaacaaatgtatgtataggctaggaaaaattctaggaaggtgaatcatgtttgcccttatatgtatggatcggatgatgaggatgatgattctgagatagctgcagccgagtgggtaaggagtaagaaggttataccatgccactgggtaaaaagctcacgtaaagaggagaggtatgactttgatataaccaacgctgataaaatttttgacttgctactccgagagaagcagattcaacttcctgccggtaacacaattccatcggctgaagaattgggcaagaaaaggtattgcaaatggcataattcttggtctcatatgactaatgattacaacgtcttcatgcagcagatccaagcggctattgaatgaggcaaaatcaagtttgacgactcttataggccgatgaatgttgatggcaatcctttctctat

SEQ ID NO: 44176 - DNA, 442 bp, Oryza sativa
agcttggctaagcattttctaaactattatctagtcattgtaatacccaagttatcaatggcataatgtaaacgacatatggctgagtaatatgacccatcccacgtgacattgtgaaataatgcaacatttaatagaaatgcaggacatttataaattgggtacaatatgatcaattgtgatgcatgacttaccttgctctcgcactgatgagaccacaacaacatcttcgaggaaccgcggatcaacgaaacggtcgaaatctatgcgacaaacaaagcacacaagcaaaacatgctataagtctactgaaacaggaaataaaaaccattttaaatggattattttgcattttctcgatttactgagacttgaatggacttaaacggagctcggatgaattagttatgacttttagaatattctctgtgttgttactaat

SEQ ID NO: 44177 - DNA, 467 bp, Oryza sativa
  unsure (1)..(467): unsure at all n locations
acacataaaactcacttgggagcggacctttcgcgggctcttcagtcattataagaagctgaaacatggtggttgaatgaaatgcacaatatcccggaatccaccagaataaaangatggtatctctgcttgtgtgattaaacatacattgtcctgccattttcaagttgttctgcttgtgtaacaatggggaacacaacgtgtaaccttgtagtgttaaacaatttacatattatctntccctgtatatcagaaccctttacatgggcatttgtcatccagtgtgaatgaaataaagcatcatatgatttgtctcatgttttgtgatctcgtctgaaccataatatatctataagagaacaatgccctgtttagatcacaccaaacttcttcccacttttcatcacatcacattccataccttcttgctcacataaactcctaactttttttcaaactattaacta

SEQ ID NO: 44178 - DNA, 400 bp, Oryza sativa
  unsure (1)..(400): unsure at all n locations
ctactcctactactaacttaataataatcaaacattntcactcgcctagtccaacacattacaacgactaatcattcccctccttaaccataaataaataaataaataaataaacaaacgtacgctccctcctgtctttcttccaaccaaatcatttcgtgtcgcgtaatataaccctcccaaaaaaaaattaaattcaaacccccccaacctgccttcactcgaagcaaacctcacctcacctcgcgtggtatataaccaccactccaccaacgagtcagaaagagagagaacagaaaagggcaagaattccacgaaaagatcaatcaaaaagccatagcgaagcgagagaaggagagagagatccaaatagctcgccactaacctctagctgctcccc

SEQ ID NO: 44179 - DNA, 463 bp, Oryza sativa
  unsure (1)..(463): unsure at all n locations
nggtgactaaacagtntaaattgaatgcgcattatctatattatgtttttctaatacactactgctaccttgcgaaaaggaccagccattcatgtatatgtccaatggaccaatgatgcaattttcacgtggtcgataccaaattatcatttgttttgtttatagcaaacaaatccctagcttaattaaatgctaatcaatccagcccctctgttctctggatcattctacatttgtcaacttattaaaggtaacaaatagaaaccaagagtactctcatgtcacagggttcattactcagccagtttatcacaaatatgcacgtgcatccttcaattgcttgaagtcaaccatttcattcactttgatgttaaaataaatgttagcttgagaaataactggatggttgctcttatgaaaaattgaacattatagattggcataatgaaacatgcttcaacac

SEQ ID NO: 44180 - DNA, 385 bp, Oryza sativa
  unsure (1)..(385): unsure at all n locations
gacactacagaanacataagcttggcgcctgatctagattccggatagctcatgcgccacgttgtttctcgctatatattaccctaactgcgagatgatagatgacgctatccagggagactcatcagtgacttggaagagcctgtaataaggtcatcaattgctgaacaaaggtctgcattggcgcattggagatggcacaaaagtgagaatctggtttgatcggcggacaccgagtgaatactcgctaacgaacgctgaggtcggtggaaggtggccccttccgttgggtccccagttaataaagcaagatgatcactcttggatgctgatctgaactcgcaaatatgcatccttttgaggccctataattatgaaaaaaaac

SEQ ID NO: 44181 - DNA, 476 bp, Oryza sativa
  unsure (1)..(476): unsure at all n locations
ttaagtcacctgcagcatgcatcttaactcatgccagaaaaatattangaatattctactacttggaaccagcagcataagaatatatactaaaatgcactaaagccaaaaataagaaagctccaaagaacccatattgttcaaatattaagaatgaaggatcatcccaaaaacctacgtataaggaatgcttgactaagggagtaaatcctttggatggcgaatatatcgattggaaaataattgaaaaatttgaagaagcatccccccaaattaaaaaagaattgaaagaagatatacttaaagaattaaagaaagaaatgaatgataaattcgaagaaatgaaaaaagcatatgatgaaaaacttgaagtctccttttctgatgtagatactatggatttaggtggtcatgggcagcctgaccaataaagcaatataatataaattgataataaatatctactctttgggcgt

SEQ ID NO: 44182 - DNA, 463 bp, Oryza sativa
tcctatatagaccctgcatgcagcttgtagattctttgagagcgcgcttttctctcttgcaagtacgcatctcctgctcacagcagaaccaagtaccaaacggcagttagtgatattgaagtacaatacataataaactgcacatagtcaagaatgtgagcatcacctcacggaggctgtcgttctccacttgaagagatcgcaccagctgctgcacgtccggtagcctctgcatatcaccaaaacaaccaatcattaacacgaattaatcttcaccagcaagagaacatgctttggccccccaacagttcacaagatttgatctttgtgatggctagtacacctttgtggctttgccctaagattccactctttgttcaacctctcacgctctcaatgggcaggccgagatgtagcagcttctgtttatgcttaactagtacaaatatgggtcaaccaccac

SEQ ID NO: 44183 - DNA, 368 bp, Oryza sativa
  unsure (1)..(368): unsure at all n locations
gatctcttagtcacctgcacgcatgcatcttgtcgattcccctctgaacatttttttttggaccggaggtatcanatctatgccgtggctgtcatccgacgcatcgactatagatatttcatatccccccttttctatacgcagtaattttcttactacacctgttgacggtgcattatagaccgtattggtactcttgctaccatcaggatagatctgtacccttcctcggtttcgcccacatatatgggatgttttaagaaatgaacgtctttctgtatancatggttcggggaaagaatgggaaagactatttcactatattttttaccgtgaacagggcctatcacaagagtatattttttatt

SEQ ID NO: 44184 - DNA, 287 bp, Oryza sativa
tctgctgaataacgcgatgagctcttgagcccccacaatatcctttattattcgaaataactgggcttaatatggacaggtatgctcccttcatgagtacctattaccaaccaatatagctggttctcgatacggatttggtcagaccgaatcaaggatgtactttcttcgacgtaaacatagatccctgttctacataatatttaaccatgcgcctatgtttagaggatctaaacatgctcctatctataaaagatgatgtattttgtgacagaggggaggtcaat

SEQ ID NO: 44185 - DNA, 69 bp, Oryza sativa
aagcccacaacgggacccgacaatcgcagagaaaccagacacagacggccaaaacagacgacaccacaa

SEQ ID NO: 44186 - DNA, 432 bp, Oryza sativa
agcttatttattctctcttcatttctatcacatatttatggactttacccaggatgagaatggatcagtcatctaatcttggatggaaactccttttacctatttccctgcgcaatctcttattaacaacttcttcccaacttgtttcactataaaataagataatacaataacagtaagaatattttctacacaaaagtcctcttcaacaagagaaagaaacatacctttttcatagatatttcgaatatgttccctatggtaactgggatcatgagttatggtcaacaaacaatacgcgcagcaaggtacattggtcaaagtttcataattaccttatcccacacaaatcgtttacctataacgattcactacccctatgaaatatcaattacatcggagcgtttccggcggcgaatccactcttaattt

SEQ ID NO: 44187 - DNA, 447 bp, Oryza sativa
  unsure (1)..(447): unsure at all n locations
agcttatactggaggaacaatctattatgtgtacctaaatggnccgagcgtccaaagtgtgggtgccgatatcgctggcaggtggctacatcctttgctgaacaaacatttcgaaggagatattttgtctgccccaatgtatacaacgatttcgttgtatgtctaaccatttacaaaatccgctatgatttgcacaaaattactacccaaactgaataacattactatttttacagggcaatccaaggatgggtggatgtactcgatggatcgacaatgtcactctatcatatcatggccagaagataacagagtcagaaacacaagttgagtatcaacgattgaatgaccacgagaatacaatgcattctgaccgacctagaaggggtcgataggttaccgcatgcctgattcgtccggatcgacatatttgtaccgtgtatcgat

SEQ ID NO: 44188 - DNA, 433 bp, Oryza sativa
tatctgaagccacatctgagccaatgcacttattcttatattatactctcaccacagaataaaaccatctaaccgaatattgttacaccaacaaactcaccatcttcctctcaagaagaggagcgagcgtcgctctccatttcatctaaaatccttcgcgctaagcacccgatgcagagcagaataaaatatggcagcggcggtggtacatcatgcatcacatagattaacaaatgtgtgatgtcctatggtgatgtaagctgtgtttcatgtacttgtgataatattttacttcaaactaattctgcttttgaaccgcgtataccatctatggatctgactataccattctatttgatgcatctaaatctttactacaagatctcatatgattatattctgagaaataaacgcaaatgtttcattattgaga

SEQ ID NO: 44189 - DNA, 446 bp, Oryza sativa
  unsure (1)..(446): unsure at all n locations
tgcttgagtgtgtgcgattttttgtgctgcctctacctagtagttaataggaacgcgcatatttttgtgtatgtgtcttgttttctactaacaatggcagggatacgcaagataattggggatagctgcgctcaacatcgacatcttcgttgagacatgaggagggatcaacatgaccattatgaggtaagtgatgatgttctangtaaagatcacaatctgcacttgccttattttcgagggagactatgatcctcgtgcttacattaattgggagctagcggttgatagtgaatttcaaaagcatgtcttgtcggagaaacaaaaggttatgtgtgcctctagtgttttaattaaacatgcttctaatgattggaaacatctttgtaggcataacaaaataccacaatcttggaagacctggacgatatttagagatgttatgt

SEQ ID NO: 44190 - DNA, 217 bp, Oryza sativa
aatatcgcttagagggcgtccgcccgaccgtttcttgataagtctatcgccctgcataacgccgggggctactgtctgtgatatgggacccggagtatctcgaccagaggcttgatgcagacacaatcgcccacgtggcctggcaccttctgggacgtcgggcccgaaggagatgtgtccgccctcctcctgatttccccgatggggggttacctta

SEQ ID NO: 44191 - DNA, 448 bp, Oryza sativa
gatcttccatggaagttcatcctttatactctcactacgtccaagaaaatctggtgcccaacaattacgatcaggacttgggaaccaaaaccatggttgatttccagaaattgaggcacacaaattgtcactatatgacccatgctcaagcctaaatcctcgattggagactgccatattccgaccatttttaccaatctctgcaacaaactttgtaggagcaggctcatatgaggtatagttcccagaccgaaacctttgacctttcatgttgtcactactgccacaatggtcagtggaaggctgccacttaaaaaaaatagcaatgagtaaaaaaaagtgaaggaactcatgacatatgagcggttaaataaggggttcacaccccatcaccaatgtgtcaatgcctatgatagctattatgtgttatactgccctaatatgatta

SEQ ID NO: 44192 - DNA, 364 bp, Oryza sativa
taagcttgccatctttcacctggcgccgtggcccatgccgctgctttttcttttttcactcgcagccgagtgctgtctctcttcctctgtagctatgccgcacgcacggtacgacaatacgttgatgtgccttaccccatgtgggaccttgccaacgcggtctatgcaaactgcctctcctagtggctgcatcgccggggaggaggaacgagcggctcagggagccatcgcttacacgtgggaacatatggagcccactgattgtctcatctttttcctaccaataatatacagcgttagcttcactttcttttgagggggtaacgggcaggagctctgccaatttcatttaagaagaagagag

SEQ ID NO: 44193 - DNA, 450 bp, Oryza sativa
agcttgctgaactcatggggcctcttatgttgctctcgatacttaccttgtcttgtgaactaatactaaccatgcttctataatgggccatcacaccacgccctgattccggcagcacatcagcaaggctagtaatgaaactagcaatattgctgtaggtgcgagcagcaaggctagcaatggaactacttccgggtgcccgtgcggcggctgacctgagcgcccatattctctcgccgtacttgactgctcccaacacgaacacgagcaccatgggagccaccagcaatctatcccctttccactgcttgcccaccacgtacacggacatcgtcacctgtgctgtcaggtccagcagccgccgcatccacagcgtgttgttctccatggagaaggccgtgatcgtctcctgcccacccaagtggagcagcaagaacggcgcccacaaca

SEQ ID NO: 44194 - DNA, 416 bp, Oryza sativa
ttgcccctctctataaagcaatgtaccctgatacggtatatttctgtcgtatcagtatctgatacgcctgcggatacggatacatgcgggatacgtccggatacgtatcccatacgtatccctcattcttcttattgttagataattaaaataaatatggatactctgccgatacggagggatacggacctgatacggtgtaaccctaaatcgcatctgacatgatcaaaatacgctctccttttccacccgcgccgaccctcgctctcacaagtcacaactcacgctgtctctctctcctcgcttacccgatccccagtttacggccggctgctacaccgtcgctgcgccgcctcgccgccgttagcggatagcgccgcgctgctgtctacggtcggcacagtgcaccctactat

SEQ ID NO: 44195 - DNA, 363 bp, Oryza sativa
cgggaataaagttactaggaacaccaaaatgctgttaataacacctgtcatttattcctttctttatattgaaattaagggactttatatttccactcattattgtacctacattgctaccacagatctcaactatataattcataatagttaatatgcttcctccatatattagaaacggatgttttaacagaatataccataatcgtattgctattaattctctatgcttatcatgaaagatacagattccactattgtcactagaagccatatatgaaaagctttgatcacttcccgaactcataactaaatttaatggagtaatatgcatcatcaatatagtatactagtatatatact

SEQ ID NO: 44196 - DNA, 363 bp, Oryza sativa
tacaagcttccacaattatatcgaatcttcgtatataccccctgatgcaaactatactggacttggccgagaagcgcaacctagccggaccacgccaagctgagagcgccagtgaaatggaccttttgatcatatcggggcttaatattccgtcactctaaatggaaaacggatcatagcagtatgccggccgtgaaaggcatagaccttggtgatggaatatacccctctaagaaaacataccatataaagatcggacaactgcccgcacatgacgaacgccagaatgttgatcatttgatttgactttactggcacaatgatttttaggcgcacactatatcaggacgtaccaccctacga

SEQ ID NO: 44197 - DNA, 429 bp, Oryza sativa
tagctggagggtcggctcatcataatggtatgtggtttattatggacgtcctagtgcccccggctgaagccgccaagaactatgtacgtcacagcggttgggttgtgcacgataacgtgcctgtcagtacggagtactagcgaaaaacaagggcacgcggagatcatgagagcttttgcccacattcggagaaagagatgctgtataccacaatgctcgagacatttacccttcctgcgggtacagaggacaaagtgaaaaagtggactctgaagaaaatggcagaacagtttcagagcttcaagggagatctgtaccaaaagtatatcttgaaggggcagacaccgaacttcgacacattcccaaagctaagggatcattgtgacgagttcgttgcatataagacatgtgacaaaggcatgcgatgat

SEQ ID NO: 44198 - DNA, 473 bp, Oryza sativa
ctaagcttagcctggatagaaattgtgaagtatgaatcgaatctttatcattggaacgagagacatcaagaattcagaggttatatttcttccgcctgcacagttaataattaatgttcatcgatcgtgtggtatatgcctactagatgtgtaatttattgccggcatttctaggcatgttcacttctgctaataagctttccccaactttcttgtgtcaattcagcttcgtgtatacgattcgtctcacacgaaataaaatggctattgacgctgcaggtagaggatgtgagccgccctctccttgaatcaaagacagacacccggtgctggtggagaatccatgcgttcgagcgactataacatgctgcttaggatctatcacaaacatcttggtttacctgggtctacgcagttgatctgcacatctaatgtagactagttgtgaaagtttgatgatcctaaatcattca

SEQ ID NO: 44199 - DNA, 414 bp, Oryza sativa
  unsure (1)..(414): unsure at all n locations
tttactaatggtgggaaaatgtttaacttgctactccaaataaaatttgacctcatattttgaaacaaataaattaattctcatatagcttatatcactaacangaataagcacttaatgcaacaacaccagtatttggaacattgtgacaacaggacaaagcagcataaacaacatgtacaaccagctattctcctagttcggattttagtctccagttaatacaaatatcatttttcgtaatttgtaatacaaatatctaactgcacacatgggaacaagaggaccctgnggtcatctctatgatcctgaaatccatctccctgtgcccatctcacacatatctatagttttatcaccactattcttgtcttggaaagatcatataaagatggaacctctcccttgaacaat

SEQ ID NO: 44200 - DNA, 209 bp, Oryza sativa
gccctaataccaagtatgctgtagggtaatggaaccaacacctgcgatttagaaaccacatgagagttctcctaaaacattagatctttaccaacgctgtgttgcactcatatatagcctgaactggttcagaaacaccatcatggtacattggcatatcactgggcttcaactggatcccatcttatgggacatcttcctcttcttat

SEQ ID NO: 44201 - DNA, 475 bp, Oryza sativa
tcttaatcacctgcagcattgcagcttacccaaattctttacaaactgcatttttgtggttaatccatgctatagaccttcatagcagggtatatccacaggtcctgcaatgatgttaggataccaattaaaccagcaggcaccctttgtcccacatcaacacgtatgctcaacagttgtgtcaataagcccacagtgaatggcatctcttctaagtcaagtttcatacaagtccaatgtttggagaaactttagatcctgacctatttcttctgggagccgatgaaaaccgcgtgtccgtgttagcccaaagtatctcaggtgcagtaacttcccaaaatgctccaggccattgcttgtgtaaccttctatgaatttgcaatcttctagagctagtacacgtaaaacttgaaagcttggagataccacatggatatcggataaaatggcaacaaatgacctcacttgttacatg

SEQ ID NO: 44202 - DNA, 345 bp, Oryza sativa
tgctgagatacatacatcgttgcatgcatgtacgtggagatgatattatttttcagatatttccaagaaatttgtgaaacacaccgaacacacatattgaaacatatgattatcactgtatgaaataatttattcttacggttggaaacatatgtttttatttgacataatataatcaagtgatattctattgtagaagataaaattgcaacgaatacaaccgtggtgacgtatctgcaaacggataagtaatttaataggaacaaatatttataatgaggatgagagaatgagacgaaacagctatgcacatacatcacatagacatggttcgttcccacatgc

SEQ ID NO: 44203 - DNA, 449 bp, Oryza sativa
gcttatcttgatgcaatgcaagcctgttgtttcttgtgagatactagctgaaaagactttgattaattgagcagcaggagccaggcattattaagaggtgagtgagtccatgcatgtgacattccaagatctcacgcattaccgggagcgatatatagtttaacattcagagttgacaattttcagtcagggtcttgtcagataagatcgaccttcaacgcctacccaccaagcagatatactcccattgcatctgaatcctaggcagcgatgatagttcaccacacatcttggctttatcatgcgaatgctgaacctgtaatgcagtaattccttggaatgagcagaaagctagcacattattatgggtcatgatcagcaatacgttgcgatgcaaaaatgtcattagcagcagcactgcatgcatgcataagaatctgcataatttt

SEQ ID NO: 44204 - DNA, 447 bp, Oryza sativa
agcttacccagattctcagtgattcacttgttattgtactaatgatctctttttttctgaataactcgaagtatcaaaagttcttttggataaaattttatactggtgaatttctgaatcaacaggtgatgggtcaaaggttctgatggtagtacatatcagcccttctgatgatgatattggtgaaacagtctgtgcactgagctttgcgaaaagagcccggtcaatcgagtccagcaaagaactttcagaagtaagtaatggagattcaatgtgcaattgtcttcacctcgaggaaatgtgtttttcctgatatgtaaaagatgtaccttttcataattcaggacataaagaagctgaagcagaagcggatcgcagagcttgacaaggaaatatgcgacgccgagcaagagctcaaggatctcaatgaacagataaagagagctg

SEQ ID NO: 44205 - DNA, 103 bp, Oryza sativa
tttttttatggaagaatccgaaagaacctgacccctttctctttgttgcatcacggagtagccttggatgagagtccacttgttgcgggtatgaatctactat

SEQ ID NO: 44206 - DNA, 432 bp, Oryza sativa
  unsure (1)..(432): unsure at all n locations
actgcataaaccaatggcattcganttactcactcgcgtncttattatcacccgattcgatagcgataatcgccgtgatcaattgtggatcgacgccccangctgcaccggctttctggcttattggcatccactgcatcgcacgttgcaccggaactatcgcgttccacggcgggttcgtatagtcatgccttgatgaacaacccgctcataacacaatcaaaaaggcaaaccatctcaatttcacttcttctatccttatagcctgnaatcgccgttgaggtgacaactgcacacctaagcggcatgatatacatttcgtttctgttgtcagcaaggaattgccatgtctctgtttcacttaattgccccatcgggttactgcattaaacagcacgccgcgctgtgtgggattcagcgccttaccgacgc

SEQ ID NO: 44207 - DNA, 368 bp, Oryza sativa
  unsure (1)..(368): unsure at all n locations
agcttagagcaagtgcatataccgatccactgattgttctatgaatgatcaagccataacagggtcagggtagtaatccaatcaaattacacattacttcatttttgtaattggtactctctctctctctctctaggatagncgccttttaaattttgctcatgtgcaacatggtgatttaatacagaatgaccatttaagcttctgcaacactttatgaacgtaaggaaattttataacaatgagcgtgctaattgtaatttacatgggtccattgacaacaaatatttgagtgagatctcccacaattcttgaaattctcatgaagttttgctattttttaaggctcaattcccatataatttcat

SEQ ID NO: 44208 - DNA, 452 bp, Oryza sativa
cctgcggcatgaagcttggaaattgagtttgcaacgagcttgcttttgttgttttttccaccgagattgggatccatcatacaaggctgatacttataggtatgatctgttgtgcgagagtttgaaggatttgaggttggcgcatcttgtaacagagccagaaggcccagaaatcggacttcgttttctgttgtgcaagtgcaaggcgttagagaggctgtgcctggagtatgtcagtggtcttattgacagtgacatgattgcactatcccagacctgcaagaatcttaaaagcatctcactttggctgaatcccgaacactacaatgttggtgatgatatagttttcagacatcaatatgaatgtgagaaatgctagaatgacttacattgtgaaacggaggaagtagcacttaattcctgtggtcagctctagagtaagagcatcttat

SEQ ID NO: 44209 - DNA, 481 bp, Oryza sativa
  unsure (1)..(481): unsure at all n locations
ctttatgataccttgtgtgtaacagntgccataatttatccagcatatgtggatctgggaggaatgattatcgtattctcaataccttaacacaggcatgccagcactgttggaaaggaatgttgtattttcttgactgttccatttagaaagttaagactatcaatgtgcgagagaaatatatatatagttctgattctttgatttgacaatacattttagtgatgctgataatttgaccatgtgttaactgacaatgtaaatggagatttatgtacaagggagagaatacacaaatctccaccaaggagcaaaactacactcgcgctagttaagaatgcaatagcaactgctttctgtcattctttgctcggaagtgatttttttagtgttggaacttaacttcttcacaagcataagtcatatgtactattactgatgttagagaaaacactaccttgatacactttcttatctaatg

SEQ ID NO: 44210 - DNA, 460 bp, Oryza sativa
  unsure (1)..(460): unsure at all n locations
ggaacttaagcgacgcggctgcagctcgnctctagtctctgcgtcgtcgtccttccgtccccgccatcgctgcctcaggtcatccctgccgtggccgagcggcggtggttgggcaaaatggtggcagatccgcgactagatgccggtgaggaggttgcggatcagccttctttcatcccatcacacaggaggtaacgacgcaacgtcctggtctttcatttactctcatgcagatcagttnttgccccattccgcgttgaatggtgtggatgaatgttttgttctcaattatcagaaattagaggcaaaccagatgcatagcgaggtccaaggagtgcaaagcaaggtccacaggagtgctgtcccatattacctttgtgcgttctttgatgttggcttgaaatctgcgataaagttgtaatctctgtacataagatgcgaccttgaattatattgtgca

SEQ ID NO: 44211 - DNA, 377 bp, Oryza sativa
tctagtaagtacctaatacggcggattagggcaaatgtcggaggcacacaaacgaaaagaagaacagacctatcccaactatctggccatctccactaatagagtacaacctaacatcgacaaggcatcactgatctctaactaagacagatatataggagatccaacaggttgactgcacatgataacatcgaagcatgtgagcaacagagcgtgcacagaacagaccctgaatagtcgaatagactataaacactgaaaaagagcaaatgtgccgatgcctgtaggcaccatttaacgtcaacacatgacacacgtcaaaaagacgctttactttctcctgaaggaaccaactctgtgaatcatagtgataccaa

SEQ ID NO: 44212 - DNA, 415 bp, Oryza sativa
  unsure (1)..(415): unsure at all n locations
agcttcaagctcataccctagccggttttttgtcttaagcccccagatctgccgctcgccgccactgtcggcggcgagaaacacctcgatcgatagccaagaaagatgcggtggtgggtggggtgggtatctnattttttttagtctattataattttaacttctttattcttatattttgtttattcttgtttattttttgtttgttaatattatattttcttctataatactttctctctgattttttttttctgtctttctttctttcttttatctttaattttgctgaatatcttcttttcttttttatatatttatatttattctttttttttatttctatattattgatcatctatattattattatttttattatatacttttcattccattttttttttttttttat

SEQ ID NO: 44213 - DNA, 435 bp, Oryza sativa
agctaatatagctgtcccgctgactttttttatatgtcacagtgccgctcgggctattaagcaattgattggatacaatatcattgcttcttgccacgtaagtgtgtatttttatcgaccaatattatggcttaagctgattatatattatggtcattttccacgcggctggtaaatcctttatgaggttatttactcggattctacaccacatatgccatatattttctggtgtggtgaaaccatgtgtcttttaaggacttaagcacatctgttaaagcagtgtgcgcatggcgtatgcccaatactttggaaattactttattcacagcattcaagcttttctataggtgttctgctatgtgaactttcataaatgttatcaactttacggttgacgcattatattttgcaagcagtcggttatcacttgga

SEQ ID NO: 44214 - DNA, 383 bp, Oryza sativa
  unsure (1)..(383): unsure at all n locations
actcaagcttcagacagcactgcttctcgccgaggtttacgtctcctttctgtattcttacacaaacgactccgaatttgagcagaagtacatgctgtattaccatacctggtcaactaccaaaagcatgcaacacgaatacatgatccaatatatatttgtaatgcatcatgcaggtttcaggagtggggactggagaaaggctgtggtgacactgctgaaacatgcaaagaaacactaagcagtctctcggaggtgctccaagcaccggatcccatcaacatggaaaagttcttcagtacggtgccctgcgtgttcaccgttgtcatcttctccatccatggttactntggccaggagaaggtcctcggtatgccagacac

SEQ ID NO: 44215 - DNA, 374 bp, Oryza sativa
tatttgagcgatttaactcgatctaacacggctctgattgatttgatcatcgatctaaacctatatatatgtgtacatatactttacagtgtccactctctagtcttttcatgatcatcttcttatcccaaccgagtttcagggccctctctctccttacttctggatctaaatctgattgcctttcttaatgcatactgctgcaagcaacgtgtggatgcaaagcatcatgcccctaacttatctagctattcttctttctttgttcttcttcccccgatattatttctcaacgattatgggacatccgacaaaccatgatcacaattggattctattcatcgaggggattcctattttatgctttccactac

SEQ ID NO: 44216 - DNA, 447 bp, Oryza sativa
  unsure (1)..(447): unsure at all n locations
tattcggaactaaaatctcagctgctattatacaagagnnctattgtattagctgtatctggaaaaataaaaagagagaaaattgtgcgaagtgtattctgccacacaacagtcttcgtgcgtccttccatcatctttcgcctcctgcacgtgtgtttttgtgttatatgggtccaataaaaagtgcacccatgtgtatccaactaattttagaagttgagtccatatgatagtgttacggcaggtacaaactcttctactacatcctctgtccgtgccattaaaaatcaatctaatactacacattgacacatcctaatactacaaatacgggaatatctagattcggagtaatatgatgtgtcaatatccatatataatacgataagatttatcataatactatgacattacgtagatcagatataatatatgctaacactacca

SEQ ID NO: 44217 - DNA, 298 bp, Oryza sativa
tttttttttctataactacggcgtgaggcttattcgacggtaaaagaacctctctaaacctcagtattgctggtgattctcaaacttgggactgacactcttgccactaaaaatctacttatagagagtcactccgagctgttggatcaatcttaattgaaaaacgatcttggtacaaattccactctcctggaatctagagatgaacattcctccttatatctagggaattgccttatatataaacatgtataggcggcgcacacaaacatttacacccctcgaaaattacttaatg

SEQ ID NO: 44218 - DNA, 376 bp, Oryza sativa
  unsure (1)..(376): unsure at all n locations
tgcaatctgcgactcctaccttgtagttntacctggattttcatcctgcgcgtcacggtcgcaatactgctcgttcatattatgcgtgtttgtgtgtgtttttgtattcccttctcgtgatcggataattaagagctttaagacgtgacacggcaggctaaaaaggacgttccggaccggtcaaaaactatttttcgttcgtggggatggcattggctggcccatggaccagtctaaacagtgtggtacagttacacacatgggcgtgttgcgttaggcttgtgtacgcgttcgtgcggccaagcgatacgtgtgggagtggcaacggtttgatgtcgatattgttcgtacactcgtactaccgaacgcagcagta

SEQ ID NO: 44219 - DNA, 396 bp, Oryza sativa
  unsure (1)..(396): unsure at all n locations
agcttccccctctntntgacttctgtctgtattgcggaatggggatcggagcgaggcggaggcggcgacggacggtgttgctgccttgcgggaaagggatgcgggtgcgggtcaatcaaagggtgatcacacccaaacacaaccaggtttgcaatttcggtttttttatttatgttggggcgtcaaaatatctttggaaatttcggatttttttggaacaattttttcttctgaattctaaatatttttttaaaaagtttttttaaataaactttggacaaagtagtgtccggctgtgggtgggtgggggaattgtaaacatgacatcgatccggtcgaggtcccgggtcaccggtattatttataaataattagagtgaatatatttgtatatac

SEQ ID NO: 44220 - DNA, 471 bp, Oryza sativa
cttcgcatttcaagagaccgagcgtctgttcatccacagattattcagacgaaggctggagaaggagatgatcaactgaagcttctcggattgtgggtgagcccatacactcaccgagtgaagcttgcactcagcttcaagggcctgagctacgagtacgtcgaggaggacctcagcaacaagagcgagctgcttctcagcaccaacccggtgcacaagaaggtgcccgtgctcatccacaacggcaagcccatctgcgagtcgcaggtcatcgtgcagtacctcgacgaggagttccccaactccggcgtctcgctcctcccatctgactcctacgatcgcgccattgctcgtttctgggctgcctacatcaacgacaaggtaatcggcaaattgcctcgttaatcgatctgaattgcatcgattgtgtgatgttgtggccgtggctccgtgtgtcgtcatgcactgatg

SEQ ID NO: 44221 - DNA, 432 bp, Oryza sativa
agctcgccctgtttgcaaagcactacgactctttattatacgagacgatccaagagaagttgactggcagctaacaaagaagagaactcctgctaaggtgatgtggtatttccctataataccatggctaatgcgtttgttcacgaacaaggggaatgctagaatgatgtgatggcacgctgaatagcgtcaataggacgggatgctgagacaccccgccgatggttcgtagtggcgaaacattgacagaaaatttaaagaatttggaaaggacgcacgaaacatacggtttggtttgagtacggatggcatgaatccttctggagagatgagcagcggccatagcacttggcccgttacgatgtgtatctacaacctccccccctgtctatgcatgaagaggaagtacataatgatgccgattattattca

SEQ ID NO: 44222 - DNA, 364 bp, Oryza sativa
  unsure (1)..(364): unsure at all n locations
tggggggatagtatttcttantcttttgttcaactatgttcttctactgtgtgcttatcgcgcactttatagtttatacataattgttagcagaatttcgctgatcggaactatgggtttgttttggtggcgaggttcttatggcggaagttggggataatctggggactctgtgtaacaacgatttaatttatttacgttcggatccatgttctgggatagtcatatggcgttcacggatcgagtacctccatgattactctttaatcgtaacgccattattgaattctcatgtctctgatgatagactgataatatcttactgtattgctcatacatacgaactgagagtgtcgtaccatga

SEQ ID NO: 44223 - DNA, 450 bp, Oryza sativa
agcaactgcagcatgcgagccaacatataggggaataacttatttttttattataagcatgactccagcctgacattgtatgaacacgggtacatgcttgctgaccggagggtttcctggccttatgaatcgcaatcaaatggcatagatagactatgaagcactgatacggcaaagcaggcgcgtgtctgtgttcgacacgcgatcggataccgacatgtatcggacacgggcggatacgtgtccaggacgtatcggtatttatcctgattttaaaataaataaaataattcctaatacgttttcgatacgttctgataccgtcccgatacaattaacccttatatatcgccggtaccaaaacccgcgcgcgcgtggggagcatattcacccagcctgcgccgactcttaacttatactatcgcctctctttcacaacgctacaacgcc

SEQ ID NO: 44224 - DNA, 459 bp, Oryza sativa
ctcaagcttttgtttcttcctacggatctcttattctctggcttcttaaactgtatcattccatctggagtataagagtctgatgacatctttgctgcggaagtaagatcttctgtctttatctgcacaaaaccacctgcaattcttttgcggagctggcaaaatcaaaatatagttagtccacacaaagatgcaaccaaagtatttgcaatggaccctaaaaagtaccatggcttctaaggatgaagttgaattacctcttccagtttcttttcagcttcaccactgaagcgtccaccttcatcaagtgtcactccctgataagtgcaacaataaaaatgactaccaacagagggatacaaagcatacaaaattgaacatcgcattgtactttacctcatcttccattgggtcatcatatcgtgagagtatagacttctttgaccagggatcatcatt

SEQ ID NO: 44225 - DNA, 452 bp, Oryza sativa
  unsure (1)..(452): unsure at all n locations
ctgcatcanaccaatggcattcgaaaactcatctcgttcttattactttccgantcgatagcgataatcgccgtgatcaattgtggatcgacgccccaggctgcaccggctttctggcttattggcatccactgcatcgcacgttgcaccggaactttcgcgttccacggcgggttcgtatagtcatgctttgatgaacaacccgctaataacacaatcaaaaaggcaaaccatctcaatttcacttcttctatccttatagcctggaatcgccgttgaggtgacaacggcacacctaagcggcatgatatacatttcgtttctgttgtcagcaaggaattgccatgtctctgtttcacttaattgccccatcgggttactgcattaaacagcacgccgcgctgcgtggtatccagcgccttaccgacgcggngcatcaagtcaataacgtc

SEQ ID NO: 44226 - DNA, 445 bp, Oryza sativa
agcttgtgcaagcgaatactccagtcaagaagtggttatctctgccaactaatggtaaacacaatatcgataacttatacatatttttttttctcggttttgtagtagtcttgttattggcaataattcagaaatctgttggacattatttggaacccttctctcctaaggaaaccatatactgtagactaccaagtagtgtttgctgcgagagttttttttttagtttaaatatttttataccactaatttaggtgttcaaatggtgcaatttttttccatattccattggcaagtaagcgtcatattacaaaaacattttttctgcaagaaggttgtacagctctttagttgatcagctgcttgggcccttgccgccttaggtttccattctcattctgattgttgtatgacttccatgtttgctatgcatcattctagaaac

SEQ ID NO: 44227 - DNA, 468 bp, Oryza sativa
  unsure (1)..(468): unsure at all n locations
tctcgggttctgggtctctgcccgaggcatcgaggcctttcccgattttatacgagctatagagcggatgcgcccccccagcaagcttagggatgtgcaatgcgtcatcggctgcatggccgccctaagtcggttcatatcgaggctgggagagaaggcgctacccctatttaagctcctcaaacgctccgggccgtttacctggacggaggaggctgagcgggccttcactcagttgaaggcgtacctcagttctcccccagtcctggtcacctcggagccagatgaaccgttgctactctacctggcggcaaccccgcaggtggtcagcgcggcgttggtcgtggagcgcgacgaggacaaccatcactccgcgcatccccaccctatgttgactcgacccangagagagcaaggaggagaggcccccgagccgaacggcggcccgaggcccccgacngccggagc

SEQ ID NO: 44228 - DNA, 451 bp, Oryza sativa
  unsure (1)..(451): unsure at all n locations
agcttgtgttaaggattggtatctgcgatgcatgtggtatgtaacgacttggttacggaattctagttgaagtgtagcaaacatgagaaagaacatcttttttttagtgccatgatcatgcaatattgtgaagttggttaaggctccgtgatattagctgtcaagtcgtgtctctacacagtgaagcttgtgttaagaataagaatgtgataatttgtaaatgaagcccagcgaacagaaagttatggaatttagaaaagtgtaaagctagttaaatgttgttttgaccaaaaaaaaaaactacacaagcatcattcggacaaatttcaagtaatattggagtgtatatggggaatgccatgagctatccatagattccattcacaactggattgnggtgtatatgggaattttattgaaatatgcaaagaggtgcgcccaactaaacaat

SEQ ID NO: 44229 - DNA, 497 bp, Oryza sativa
  unsure (1)..(497): unsure at all n locations
tcttctgatcctgcagagtcagcanacatcaaattagtttaactataaccacctatttctgtagcataacaataccaacaaaagtgcttgacagtaacttacttgcaacgatgatggatcctggacaattcttcgcagcagagcaccaacaaacgcatcacctgcacctgttgtatcaacttgctgtactctgtaggatgggacagctccgcggaaatcctataatcatagtaacttcaggtcagtactaaagcataagccttaaaaggactgggtggtgactatgcgagtntaacagtaaatgcaaatttatagaagccaagaactcaatgggttctgctttgaacgataagaaaaagcaatcagcagtttagcaactttattacttcgaatacagcttaccctggcatagtacttgcatncttgatctnncagagtcacaaggaggagcttcatggtanggcgccataacttcatgacaacatcatcctctactg

SEQ ID NO: 44230 - DNA, 429 bp, Oryza sativa
  unsure (1)..(429): unsure at all n locations
tcgggccaattggcgaagaaaaactagtctgataaataacagaattaanacaaatacaggttaaactaagtatattaggcataacaagcgtttcgttcttgtagagtagataattggattttgattgagttatttttctaagggaaaaaggaaaaggaggattcaaaatccttttttcttcggactttcccaaacacaaaatacctccttgtattcgcactctcaaatgagagtggaagaaattcgactttcatataatatcttaatagaattccatgtaatgatcaatgcattntttggattctatattattcgcatgtctagaatcctaccaagagaataccccccatttttatgtaattgaagtaggattgacgaataagaaataaacataatactggttattagtgtcgcataaaacccgaaatg

SEQ ID NO: 44231 - DNA, 390 bp, Oryza sativa
tcagccaacggaatttttttatttgaaaaataaattactatgcagacaaagagaaggctaatgaattgcctctagaacttgctgttctacagttcttccttctactcctgatcgcccacctaagtgtgccagatatctcataagcatctttgttgtttcggtcttgccagcaccactttcaccactgaccaatatagagttgcttttcccttcatttatcattgctctggttgctcgcattaataggtcatatcagggaaatgtaggtatataaaaagtacaatctgctgacaggatcatatatatggcaatattaatattatacaacacgtcacctgttagcaacatctgcaactgcgaagacatgaggactcagctccccaaaatctg

SEQ ID NO: 44232 - DNA, 372 bp, Oryza sativa
  unsure (1)..(372): unsure at all n locations
aacaacgtatgagtagtatataatatctagtgctagttgcttaaaaaaagtttgtaaaaaaatgaagctaacatcatattttgcaaccaaaccgaaatcgaaactaaaaatagaaaaataggctagggcaacagtgagcactatccataaaacccatttaggcttgcttgaggggaaaatggatttggcaaaatttgttaaacgacatccaaaaaacatgtaattagcatatggacaccgcaagaacgtgaatttgctgtcagataccaccaaaaactggtaattagctggcagataatcgtggtcttaatttattatttncggaggagatatacatannagcattcatagttggatagaactgggatgtat

SEQ ID NO: 44233 - DNA, 430 bp, Oryza sativa
agcttactgactagtctccaggcagcatttttaatatgctcctgttcgccatctgaatatctcttatacctaaaccaccatcctgaacaggtttgcaaatatcagaccaggatttaaggcagagaggcttcttgtcctgaccctccctcactcctgtccaccagaagattctgatgatagaagtgagtttggcaatgatctttttgggaaggagggtggtagccatgtaataaacaggaagggaggcaaaaacagttttgattaaggtaagcctaccagcatgggaaagtttgttagcctttagattagtaagcttggctttgaatttatccacaatgaattggtagacaaaaatttttgttctattagtgacaaagaggggatggcccaaatgtttggtattggaatcaacagaagccacatggaagat

SEQ ID NO: 44234 - DNA, 424 bp, Oryza sativa
  unsure (1)..(424): unsure at all n locations
tcctcaaaactctattcatcatctcctgctgtatgacattgaattctaatgtgttggagacctgctcttcctatcctcaggtgcataccaganagcaggatggagtagtcaatgtgcgagaccgcagcacaatggaaatggcaaaaccctagattgcttgtcgcttctggcacgtcaagatggcctctcggtatttatagagatatcaggatacatgaccaagatgcctacatgatatccataacttggaaccaaaccagaaaggtcacgcataactgattcggattttccaccactctttgcagcagaacaaaactaanaaaaaaagtctatgcatgcaactgaagccacatggccctggcccgagcttttnttntttcattttctttcagatctagaagctaaaactagccaaacactttta

SEQ ID NO: 44235 - DNA, 270 bp, Oryza sativa
tataaaaaagtactggagtatctgcgcactgggactcttgagaacaacctgcagatcatgcagtgctattttctcgggagctagtttacaccgcaaaattggccttgcaatatgacgtatcttgtgatattcttccgcaagatgcttgtaacactacgccacctctcatcaactagagggagagaatctcatctctgctgtctgagcaatttgctcatgacacatgtcgtattactggacacctcccgttatggattgaccagtttcttg

SEQ ID NO: 44236 - DNA, 368 bp, Oryza sativa
tgcagagggagagagcgaccacgtgctcatacctctgtttccgtcctgcgcgaggcggtcgcagtactggctctccatatctctctgggtggggagcctcttggtgttgccgtcgtcggatccgaggatctagagcgataatactggactcggcttgctttcaagcacatggcggaccagactcaaactcttcgtcgttcgcggtgatggctttgtgtgggccatggaccactgctatacactgcggtcagatacacatcatgggcggttgatcaagctatgtgtccctgccgtccccacaatcgatgcgagcgcgcatgccagcactttgatgatatgggtgtctagacactctatctataccacgc

SEQ ID NO: 44237 - DNA, 438 bp, Oryza sativa
  unsure (1)..(438): unsure at all n locations
tgcttgaacgtacggttcatttaattattttttcttanaacatacagcttcgtgaaacagatcgtaatacatgggatattacgttatgcatgccccaaaacctaagattctattaaatctactcttttttataaggtgctcaagtttgtttggacatatttgatgtaatctattggcttatataataataaagaaaaattatttgccttagaaataaaaggtaatagttgataataatgttagtggagtaattagtaaaatcactaaatttcataaagcccaaggtttcgagatatccgtaacgtaatagcccatatattggatttgtttcaaaaattccatatgtatggcaaaatatttcaagatgccccatatttatgtacaaataaagctcatattccatatgtatacatgatatttgcgaaacatattcatatt

SEQ ID NO: 44238 - DNA, 350 bp, Oryza sativa
  unsure (1)..(350): unsure at all n locations
nganactcaagggaagcggctggattcggtttatagctttgtggatttgtccatgtcttctctcgggcaagttcagcatgagcaagctcaggtcgcgcgggctctcaaggcggtgacgtctgcttcttcgtcaccaactccaccgccgactccacctctgccgtcgcaaccgcctccacttcttcctccacctccgaagccgcctactaaggatggggcctcttcttcatcttcggcgccaccgtcccctacccatgtgcactctgcaccgtctcatcaggtattcactaccgcgcctactccacctgttcgtccttctgatgagtcgggggggcgtcgtcactggacac

SEQ ID NO: 44239 - DNA, 442 bp, Oryza sativa
agcttaaacttctcttcggccacggcctgttcacatgtataacagagtatgcagttataccctctgtttagtgtttaccaacttaccatccgttgttttgcacattgatttgttacagaccaatcagtacattggctgcatcaagacaatgtcgtatgctgttgtttactccaaatcaaacaagaaagaaagggttacctgtgatgagcctgggtgcttgtcagggtgccacctcagagcagatgcccggaaactgcacaccgaaagtaattcaggtgaacgctagtggagcacctacttgtagtgccatacagaaatggtagtgatagcaagacaataattcgaggaatggtacaaaaattcacaacttacgcagttttgacagcatctagagttagtggaccacaagctggtagtccaagaatagcccggtgtgcatgtg

SEQ ID NO: 44240 - DNA, 413 bp, Oryza sativa
  unsure (1)..(413): unsure at all n locations
tgacttccgcatgcnctaaacagttgtgcattgtacctcatatcataattaaaaaaacactagactataagcgaaacaagaaaaaagtagcatgcagtccaacagtcgccgatctcttcgtccaagtagtgccactacccaagttgccctagtcatttaagagaatctccatgaaacaggggacagtcctagataacaagggaggcatctgggataacttttccttggtaacagggtgtagggacaatacaatcatgatccattattgtgctttaaaagagcgcgagttagacaagtaaatatcacatattataccagcaatgcatcatcgaagaattgtgttgctttgaaagctgggcaggatcttcagctccagcagatgatgtttaaagaaattgatttcatcaagcgag

SEQ ID NO: 44241 - DNA, 436 bp, Oryza sativa
  unsure (1)..(436): unsure at all n locations
agcttgcattctttgcggtgagaaccattctcgtttagattgcagcatgtacaatgtagggcaagatgccacaggcgctgatgttcgtcgcgttccaaaggagaagtcgaagaagaaaaataatccttagttcgctattatccttggtggactccctactttgaagatcgttatcgttcaatttatgtttagtgcgtctgtaattntaatttgaactttcttgcacttttattacccgaatctatttgtaatggccttgtaattttcattttgaactgcactacacttttaatatcgtcatgtatttgtattggaattgtaatttaaatttcgaactgcactgcacttgtaatatcataatatatgtgtcgtgggcttgtaattttaaattgaaatgtactgaactgttcttatctgtatctatgtgtgctggtac

SEQ ID NO: 44242 - DNA, 366 bp, Oryza sativa
  unsure (1)..(366): unsure at all n locations
ntatatatatatctctatcctgtattgcacgaacaaaatatatccttgaagtctgatgaactctgacgatctagctgtgacctcgaggaagaagacatgcttataaaccacttgcacatgcaaccggtttaaacctttggcttgaaaagttattctttttggcgagttcttaaaacgctatttacacatatgggtagattaacggcctgtgaaaatatttcttttctaatcgttaagttgtctgcgtgagtaaatggtgttcatttttcggtggagacccctgtttagttgggactaaaacttttaagctcctatcacatcggatggttggatactaattataaatattaaaagtagaatattaat

SEQ ID NO: 44243 - DNA, 445 bp, Oryza sativa
  unsure (1)..(445): unsure at all n locations
agcttaaggagttagtggtggataactntatattttgatatgatatgtgagaatgatcgggtgcagtgtgtgattggttgaaaagagaaagtatggatgtgtttagtttcacgccaaaattggaagtatgaagaaattgaaacgatgtgacaaaaaagttgaaagtttatttgtgtangaaagttcgatgtgaaggaaatgttgaaagtttgtttgtgtaggaaagttcgatgtgaaggaaatgttgaaagtttgaagaaaaaagttaaaatctaaacaaggcctatgtgaaaaagaatggttgtgatggttgagagcatgaggtagatagagaaatagctttattntaagataaaactagctgggtggcccgcgcaattacgcggctagcacccaaacaaaatcatatatttttttaagtatgagttcacttaaagtttattaa

SEQ ID NO: 44244 - DNA, 434 bp, Oryza sativa
tgggtgttctttgaactctgagaaattcttccgaatcatttttctgtattttttctagacatggagccataagtgaacatgattctttctgaatatatccgcaaacacattcactgcgacgaatgagccaccgagcaacactgacagctcatttgctatagacaccatttgaggatgctcctctgggttagtgcttccaaatgcgagaaccttgaagaggtagctatactcctcatgtgacaaactgttaagatgaattggccttacggttccgaaccttgatatcctctcaatcctacttacaactataatcttgcttcctcttcccatatgtgtgcatgatgcataaaacttcttccaattctcatcatctgtatctgctgtgaactgtaccacaaccaaatccctcttttactaaaactttcacactccat

SEQ ID NO: 44245 - DNA, 444 bp, Oryza sativa
  unsure (1)..(444): unsure at all n locations
atgcaagctnggagacagcatctccgagggagagtattattatattatggtgggtactagtacacagggcgtatctctacacaagaacaaggcgcgacgcatatgatatatattctttcactacaaaaatacctcactaggatgccaacacttggactgagatataaaggatcggattgcatgaatgcacgaacgcatgagattaactgagcacctcataagaagcttcacatatactaagctaagtacccgtgagcggcgaatactgagtatgtggatgtacatgcatggtgaaacccttgaaaaaagaaattactcctatcgtccccaaaagaatcaaaccataagaatgaattcaaaccataaggacaaagagagtacatatgaagcgtcttataagacaaaatccagatgaatatcgagcctctatgaattaaaccataa

SEQ ID NO: 44246 - DNA, 494 bp, Oryza sativa
  unsure (1)..(494): unsure at all n locations
agcttcagtttccaaatctgaagagctccagattgcggacacttataaactatatgttgcacatgatggagaaacacggcttccccttacattcaatcatctggaattttgtttcttgcaatacagctggttacataagtacatctcatgagaggactctaactcatgtcagctcctgacagttccagtgataatgttatagtttataagccaactactttgttccacaggacccacaatttttttctcaagtttatttaaatcactgcttcttgtttagcaaagataacctgctatatttagcttgaactaaatgagcaatacggctcatttatgacactcatcctaatgaagaattctttttatgacatatgtggtataaataaccaagtttacatcttctgttgcattattcaatttctgngatattggatagacatatagagcttgaagctgaaacggaaaatatctaataattactacctcaacaccat

SEQ ID NO: 44247 - DNA, 375 bp, Oryza sativa
  unsure (1)..(375): unsure at all n locations
ccgggtggaccactcggtcatgatgatccgagcggtcaaacttgattgcaatttctgaccatcgaagatactggggcgtgtcgggctgaacagcattgatctcccgttcagacaacttttgcttccttttagactcataagccagggggccgccgaagatatggntgagctccgtgcggtggtcttgaaatcctgccggggtgtcaccgtcgtccttcttcctcgacgtgctttgttcttcgtcagagttcttccgtgtagtcttggtgtattgctccgcaaactgcttgtagacgaaacaatctttggccacgtggttggagttatgatggtgcgggcattgggagttcatgatcttgtcgaacgtgttgacgc

SEQ ID NO: 44248 - DNA, 362 bp, Oryza sativa
  unsure (1)..(362): unsure at all n locations
ttagtgtatgacacactttaagacgcattgtgccgactcttagaaagttacgcaactgcggtataaaaggatcttatggcattgcgcactggatcacacgcactctggcctaagcgcaaagtgcctaagtacctaaaagaacgtgacaggccacacctganaatatgggctgcagacatattatgcctaggccataacatatgccttcgacaccctttagaggatgacgcatattacatgctcccgagtaataaattttacgggtaatatacaccaagcgtagcttatatgaatagattctgatctgaggggatatgccttatgggatactcccaaatagatgtaacaattgaatcccgact

SEQ ID NO: 44249 - DNA, 443 bp, Oryza sativa
  unsure (1)..(443): unsure at all n locations
agcttgtttattacgttgnggtttatatgtatgctaagaagctaaagaattgaggtttttatgtgggcttaacaaagaaattcaggacatgcttgattgtcaaagatatacatctctttctcatttgttacaacttgcttgcaatgctgaaagtaaaatagaggaggacatgaagaagcaacatgctatgtttttgtcttctattactaaccatttgcaggaagtgcataatcatgaaaaggaggagagagacatgaaagagccgccagtcccattgatcacactcaaagtcgaggcacctccattatctgaagagggcatcaaaggtaaacttaatggtgctgaaattaataaaggtgagtgtgttgttaatgaattgaatntgtccacttttcatgctatagcagagcaaccattagtggaaccaactgctgagatttctt

SEQ ID NO: 44250 - DNA, 426 bp, Oryza sativa
  unsure (1)..(426): unsure at all n locations
tcggtgtctccgnctctgccccgacgcgcgccgacactccgggcatcgtcgccgccgtgttccgcatcctcgccgcgcacccggggccattccgctgcgtccacctcctctgcggcttcatgggatcgtaccaggcccagctcgagcactggctccggttcctcgccgccaagggcgtcgacgacctcatcctcgtcaaccgcccatggccgttcgaggcggctctccctgccgccatcctccgcatctccaccctcacccgcctctacatcggcatgtggaagttccccgacattgccggcctccccaccaacaccgccttccccaaccttcgcgagctcggcatctacgccgtcgccatggagaaggagggccgcgaggtcgagttcatcgtggcgagatcccccgtgctggagaccctcaaca

SEQ ID NO: 44251 - DNA, 450 bp, Oryza sativa
  unsure (1)..(450): unsure at all n locations
ctgcggcatgaagctttaacatatgctattgcaatatctctatctgttacataatncaactcccactccttctgacatttgcggccatctatatatctttttaccataagacaattcgtcctgctgtcctcagctacatccaacatccatgagcactcttctttacatttagcctcaatttttttcttggtatttcttgtaaatttaattgcgactctattcttcacactgtattgttttattgcttgcctaacttcaatagcatcagagaacaacatcccaaccttaaagattggtgactccatgtccacagcagccacaaagttcttaaatatcaacttaatgccttcattatcttcatcagatgactctggaagcaacaagccttcatcatcagagtcatgttcaggaagcttaacaaccatcttgcttgtagccacttcttctatc

SEQ ID NO: 44252 - DNA, 466 bp, Oryza sativa
  unsure (1)..(466): unsure at all n locations
ntgacatataattatagcataaaaacagatcaatcaattctctttgttcataactaagagaatnatatgtataacaaaggcacttgctgtgaaaaaaagggaaatttccggtttataatacccaagcaatcaccattttaactttataccatcaaagattccttgtgcactttaaaatgataccttatttgccatttctgtcaacttccgctagtgtttccttattattcaacatttcctaggaacagatggacatgaaacaaatagtgctatgaatataagcaaccaaacattgcatcatgtactggctcaaacatcacatgactgcttgaaggcattctctacttatgcaacaatatggatgcatgcatcagattcatcaagcaatgcgttaagaggttggcagaacatcccccgctaccgncatatacatctcacaccacttgcactcaagtcacatgcaatg

SEQ ID NO: 44253 - DNA, 441 bp, Oryza sativa
agcttgtaataagagtcctagttgataatttctaattaaaagaaatatctcaaatatttaacaacagtgttgaagcggattgatatcttctcttaagagtttccaactgttcttgagttgatatttttaaatatgttaaccagagataagagacaaactctagacagtactatacagaagccactggaaaattcaccagtcatgcagtggaagaaccacagaattccaggaatgattatggaagtgtgcttttattttaacttcacaagcacttctattcactactaatcctaatgggagaggaagggaagttcaagaaaatgttggggcacgagaaaatgggaaaaaccttctatagcttatgataccatattagcatagcagaagaattatatatttaattgttgcaatgaagacaagcgggatgacaagtaaaagcta

SEQ ID NO: 44254 - DNA, 348 bp, Oryza sativa
tgacaaactcgcaatcaacaagggttctgcgactggcctattgtattccatcaaattaagaagagaacgccctctttgcctcatgacagagcacaacgaggctctatggagcacatatgtgtcaaccacaaagcctgatacttctgttctaaatacgcttattgatgcgggcgtatcaccgaagattgatgaatccatgtccgttgtcaacaatgagatattgcggcgacatttcttggatctaacaatcaacttccttgcacctttcaggccatatgtgagaaccacctcgccatcactaagaagctatacttttgtcgatccaccattattgactccatttcatgc

SEQ ID NO: 44255 - DNA, 418 bp, Oryza sativa
agcttctacacttcatcaatatctttttttgtttcatcaatatcgctctttgcagaccgatattcttgcaccctcttttgttaccattctaaatgagcctccttactcattatacaaatttatatggcttagccgtgctacactagcaggctttacagagataggtacaaatttgccattggagatactaatataatcatagctagaaagatccctaactgataagcattggatattcccatgacgccactcaaaagtagcatcggccattgcaacctcggctaatgtatccgtttgaacaatatcaacatcatcgctgtcccattgaattaaacattgatgcaaggcagaaggcacacacaaattggcatgaattcaacaacgacccacaataacattgtagttaccttgcacatcg

SEQ ID NO: 44256 - DNA, 407 bp, Oryza sativa
gaccttaaaactcaacttatcaaatgcaccgtacttaccgttatatatatagaactgagcaccacccaagcactctgattacctatcccgtcaatttgccatctttttatgaatgttgaaaggggcgcagatgctctctttgatcaaaattttgtttctcttgtctgtaaaataacatttaaagaagaaccgactatattccaacagtgtattatataaataatgataaatgtgtaacattttccaataaggcgcagatattgtgaggttatgagggtataaactttgtaactaaggtgtaacacttctcaaggtgataatatatatatgctcaaccatttgtaccaatttatccacccatcttgacacatgcatgcccacactcttcttttcacacacaataataa

SEQ ID NO: 44257 - DNA, 412 bp, Oryza sativa
  unsure (1)..(412): unsure at all n locations
acatgggctgcggatctagaacattgtctaggcatatgtgtatgctagcggagcttgagctacggatcttgcaatcacgtacatagcaggctcctcagtgctctcactgccttgagcaccgctttcagctgccacagcggatcttggttgagagctnttgatgcacgtgatctcctctttccgtttatcctaaaatcggagcgaattatagccgaattgaaagaggaaatcgagaggaaaataatatgagaagagtgaggaatcgatttttgcaatcaattggaaaataaacatatcgacgtggtggctttcgtagggtttgggcggtttggcccggcggcggcgggaggcgtgctctgcgcacatgcagtatgcaacattcctgcgccgctccgcgcgcgtgctacatatc

SEQ ID NO: 44258 - DNA, 440 bp, Oryza sativa
agcttactaccaaaactagtggcctcctcatacttacataagaggtttatatatctttcgaccacaatcactaagagattcagaacaacatcagactgacaatgctaacaatgccaagcagcagcccaatacttgccttcaacccagcagctccattcaagccccagacgcgcacatcatcgatcactggcccacagagcgagctgtggtcgtcgcttctcgtgttgtaatacacactgtagaacgctacccgcgtcctctcagctcgtgctgtgaatgtcacattcgcagcctggcttgtggcattacccatgggcgagtagtggaagttctgggcctggtcacctgcgaatgccatgacagccattggtggctggcatgaatcccctgctgagcccaatgtgaatgtcaggctgtactctctctgagggggtgtctcg

SEQ ID NO: 44259 - DNA, 496 bp, Oryza sativa
  unsure (1)..(496): unsure at all n locations
ccttaaaactcagcttggatcttatggaggatgcgcagatcatcccttatctttgcagcccgggaataatcttcttcctggatggctgtctgtaaattacgctgcagggtttcctcgtcaattgacaaatcttcagtcggtgggtaaccatcagcatctccacttttaacatgagcaattttgcatcggcccaaattggatgatgcaacttgaagccctgcactgaagataacatattagacattctgaagaaaacacaggtttcctttttatagtgaaaactgaaaaaaatctatgatgcaaatattatcaatgatctttcttctagcctcgaatttcagcaagtagcttcaatacctggaggttgcaactngtgatttagaacaactaactgaatatgcactaacaactgatatttgatttgcaagctacaaaattcacttctataggcctcaccacatatcatacggtccttagcatctacctaagcgcgtat

SEQ ID NO: 44260 - DNA, 422 bp, Oryza sativa
agcttgctatggtgttctataagttccaagtgactttgtttctgtaagccctgcaagatcaatacccaggacacagtaagaaaattcaatttcagagtagtttcatttaaggcatttaatagggcatgatgtaaccatgtaggccagaacagccatctttgtgcttgcagattactgtgtgcaagcactcatagaattttcactgattcttttagggctatttgtagaatgaagcttttattgaaatcaagataattacatcaaggtgatacaaccatttagggatacactgctggtatagatgtatggacgctgcactagcatggaaaatacttcagtcaaaattaatcttactaacactaacatcctcattgttagatacatttagtagtgattaattgtatatcggtatctctttacgt

SEQ ID NO: 44261 - DNA, 451 bp, Oryza sativa
  unsure (1)..(451): unsure at all n locations
ntgaatgtatctttccacccgagtgaagatggtagtctatatcccattttcccattgtcgcctgaagaaaatgtgatttgttgtcaactctggaaatctcatcatgaattagcagaatcagtttcagaggcatgatgtgtattcattaatttgatggcacatgagcgcctactaataataatttattggtattgatgctaaacaatgtcacattgggaaatctctgtgctgcagnggtactgatctgattatcctctacttcaatcttgccggttaacttatgcctttcagaagaattttaaagcccacctatagtgttattatgccattcacaagaatgttaaagcatacctgtgttgataaacatggttacatatttntgaatagcgtgtaggccccanatgctggaggtctaatctaatctttgagtgtgtcccaagcanatgtcatg

SEQ ID NO: 44262 - DNA, 441 bp, Oryza sativa
agctatgcagagggctcaagtatcagggtatctttatttgttatggcatctggtaatgccaactgcaagtcaatctcttcttcaagtgcctctgcagtttctttacctgaaacatgtataacatctgaaaaaattagctcttagtccttactcaggtgaaaagcaaatattgtttcgtcagagtaacttaatttttagccaacatttagggagcaaatattagacttcatttgaggaccactctatgaataaattttcaatgaagcattggataatgccacagcctatactagctaaccccatcagtaccaactttcattgaacaacaggaacaaaagtcgtcagatctcaaacacgagcagaattacccaagaaaagcactcacttcttgctcgagctccgatctgtaccgccgcatacttacccttcttgcttcatccc

SEQ ID NO: 44263 - DNA, 471 bp, Oryza sativa
  unsure (1)..(471): unsure at all n locations
tcactttcaanataaaagcatnnttttgggttagcacctatctcaatcagctcccaaggcccatctgccattgagccaagagaaacagtactccctccgtactcgtaaaggaaatcgttttggacaacgacaaggtctccaaaacacaactttgacttcttatttctataaaaatatttattaaaaagtgatatatgtatactcttatgaaaatattnttcaagacaaatctattcatataatttttatattttcaaactcaacaacttaagagntatttataatttatattcctaatgtttgacttaaactttgttctaaacgactttctttacaagtacggagggagtagttagtgatcgaatcgatcggtgggccaaattntaatgcatntgttagtctaaaagctgccaatatctaaatgggcttattgcttcggacgacaagtatgacatactcatcactcatcat

SEQ ID NO: 44264 - DNA, 204 bp, Oryza sativa
atatcatacaattattatggtgggaactcatttgtaagtgagagctaattaagggtaaaaaagaattaagtggagattaaactcattcaacttatataccaattaagtataaactattatggcaaaccacattaaggggtatataaacgggactataaaaattagggagttaaatattcagtgttaaatattcagttttaaaat

SEQ ID NO: 44265 - DNA, 462 bp, Oryza sativa
  unsure (1)..(462): unsure at all n locations
tgtcaattgatgtgaatgtacgtgatccatctctgatatatatatttatcttgcgaacatagctcaacttagacaccatcctactgtgtttagtacttctttgtacttgttgcttgcatttgcatgagtaccaatgtctattccagcgagacaaagttgacactattaggcttacattatcaaaattaacgtgatacaaacagtcattttaaatttaaaagtaagcttactttatcctaactatgctatataggagtagatgtacatacttctgtcagttgaattttcagagtacgaactacctgtgcaaatatgaccatacatagtgtagtttctatgatggaagtaccaaggccctttaccgtattgttgaattgaattgtcttggaaattagcatttgctctcttctgggagaatgancagtaccaattttgtttaaaaaaatcatgaagaatatatat

SEQ ID NO: 44266 - DNA, 319 bp, Oryza sativa
gggatcaatagctcccgcgagacgctgaacgcattcaaaccaaaatagtactactggatatgctgcattagagaacagagaattcataccctcaacctgcagacgacaatataactcctgcatgatgacagcagcaccaagaacggaggtcgatgatgtagatatccataactaagcagcaggaaccaagcagggtctctgagagagagagagactaaatgtactctacttggggaataaaatgggatggagaaaattcttgcagggagagacatcaccactaactgaacagccattagcaattaagcacaaccatttc

SEQ ID NO: 44267 - DNA, 463 bp, Oryza sativa
actaagcttgagaaggagaaatgctagcttgcttggttttactaaaatacctttttattcatgataggtcctacagaatgctatgcgtatgaactaaagtacccacattttgataatcatgataactgactatttgagctcaactaacatatatttacttgataagaggctgtgtacttaactatatcaggtcatatgaactatgcttgggttgattctaggactcggcatattttagactccatttggttctcatcatcaacaattatgaacacaccatgtgttaatctggcatgttgcccatgttatagggtaatcgataaaacctatataactgaatcatcaccgacaattatcaagggtgtcattaattaagggactatgaatgaagaacattatacttatcaagcggtcacgtcttctcaattagatactgaactaaatataccattactctctacat

SEQ ID NO: 44268 - DNA, 451 bp, Oryza sativa
gcagcatgcaagctactctttctactcatcctctttatttattattaaaaagtataagaaaaagatagcgacatcacaccaattagaatggaacttcatgagttggtggctaggaagttctgcaaactataataaaattactacacgcaggcaaggcgtgtttcatcatattggtttccagacataactacaccgtgaagcttccgatacatcgttaattcattactcttacaactgtatgtaccacaaaacaccaacagattggattcactactctttcacagttcacactagtgggctaaatacttccaacgtataggattcctagcaatcacacgacgtaaccaacgtagaacgtatcggttccaaagtagcaattcggatactgaacagtgcagtaacacagggataagggttacgacctttgaacctcgtgggcttccctgcgccc

SEQ ID NO: 44269 - DNA, 345 bp, Oryza sativa
  unsure (1)..(345): unsure at all n locations
ggctccttcatgctactattcactgtcagtttatgctcttatgctatgtgcttgttccaataggtttgtgcgtttaaatcctcatccatccgttatgtacttgacaatgtgttcttaagtntatatccacagtgacagtctatgacacgacaagcacttcggattacagagcaatgtaagcaagtatacaaagaatagtggtatcatgcttgcgagtactagctaggtgtttgtttgtgacagtaaatttagggggcggtgtggagcatgtagttttgggatttacggtgttttgagtgtgaatgaaatgtggagcaatgataggattaactgatttaggggggg

SEQ ID NO: 44270 - DNA, 436 bp, Oryza sativa
  unsure (1)..(436): unsure at all n locations
agcttcagaactcagaggcacagattattttacatgggagaagcagnggtgatgatgccgtcagatctggagcttgctggcgaggtaccaggagtgcattgcaaggctaccgaacgccatgatgttggccagagacgacaggccatggatcatcccgaacttcttgttcatggccgccagcgttgggttcgtcctcgccacctccgcgttcttcgaaaacccgacctcgctgccgatgccgaggtctttctcgatcttgtgccgcctcatcatcatctgtagaaagaagcctaagtcaaaactcaaaactgtatattgataggtactacaaaagagcaccctgaagtgaagcaatgttgaggctacaggatgattgtttcagcaatcatcattcgctgcaacttgtcaagagcataacagaagacgaatgttgagc

SEQ ID NO: 44271 - DNA, 424 bp, Oryza sativa
  unsure (1)..(424): unsure at all n locations
ntnttaggctacaaaagctgtntgggttatctaggaatgacttgtctttattataatcatttccttggcgtgttatatgcctgttttcatggtaaatagtcatggcctaggctattcgacttatttattaccataatctttataatacttgatgggtaatctttagaatttttattcggatgcctgtcaagtgtgttcattcgtgaaccttttagagtgtaaaccactcggatttcttttattgtggctaaaaagcagtcggttagcatgcctattttggcgccgcatatgcttttgtcatataatgcacaattgtgttggtattntgtctttcaactatatgtnntagttggtaactaatcacatagttgggggctacacctaattaggtgcatctattcgatgcaccatattcttcttcttt

SEQ ID NO: 44272 - DNA, 442 bp, Oryza sativa
gcatgcagcttgcaagtattgaccaatactctatctggtttcccttattccgcaggatatcaaccactcttcgtccaacgccaacggtagctccagtgaccagcaccacatcagaagattccattttctttggcacctcaccaggagcagaaccagcgaaactgctaagaatggactctacaatctacagattgaacagacaaaacatgagcacaatgccaaatgtgaaataactgtaacgagaagaggtgaaaaaaaatcccaatacagtgagtaaaccttgagaggattcggtggcccgttgaagaaatacagcgtcctgacaaatctgccgatatcccaagattgctggcctggcaaagctatcacctctctccgagacagccgtgacgacgcgcggcgtgctgggctgtatatgatcggagaaaactgccttgaaccg

SEQ ID NO: 44273 - DNA, 430 bp, Oryza sativa
  unsure (1)..(430): unsure at all n locations
cgtggctgctgcgcaaaatctgaagaagcacaagcagtacaagccccgccttcagcttggagctccctgtgctcctagggcggcgccctcctctcatcctggagctagctcaagctcagcacctcttcctcctcctcctcctgngtatgatccacatactttcttccatccacagtatgcttattttggaatgcaacccaacgagtacttcaacccggtacttggagctattaataccctaagtgaaagcattcaacgcttgtctaccgggcatgaagctntgcatgaggatgttcgtggcttgcgcaccgatgttggagacttgaatgcttccgtggggagattgcacactatagtgggtacattagattctcgagtccaaatgttggagagctcccaagcattngtgtatcatcgtagtcatgatgct

SEQ ID NO: 44274 - DNA, 393 bp, Oryza sativa
  unsure (1)..(393): unsure at all n locations
agctatgcgatggtacagacaccatccactgatgttaagtactgaagtgcagncaggaggccgccgtagatgaacttggtcatggcatacttgttgatgatcgccacccagctctagcacagagaggcagccgaaccacggagccctatcagctacaaacgcctctcaccaatcggtcgagatgcagataccgcaagtgagattcggattccgatcgcattcttgaagaaaggggaaatgcagagcactcaccgatccgacgaggggtcttaccaagaaagctcaagacagtatatatctcgggtggacggattcccgccggaggcggagggagagctccgacgctggcggacggccggcatctgtcgtgacactcacgtgggcgaagtagat

SEQ ID NO: 44275 - DNA, 402 bp, Oryza sativa
actcaagctgcgggtaggatctctttgttctgcaatacaatcattataactagtcaatcatgtgtgttatagtatcaaagagcttatatctgtagacctggtgacttatagtgatgaaaaaataaccttgcgagtacttgtaactttgtgtgcgttcaacatataatagacctgcgtgtcatgtttattgttctacagtggaaagtaacaaatataatttacacaactatatatatatttatatatcgaaattaagctacttataaacacttattgactatggcatcgagtttgaaggataaagagagaacttactaacttaccttgtatgcactagaaatactcttccctggttgcatagctcattctggccacatttctttgcctgaatggataagcata

SEQ ID NO: 44276 - DNA, 438 bp, Oryza sativa
  unsure (1)..(438): unsure at all n locations
agcttgatgaaatatgcaatatatgttatatcttcagcactagaaagaaattaagaatctttcaattactacaataagcaaaagcgcaacactgaaaggaccatcttacctgtcgaacaatagataccaatgtcccaagctctcaggtaatgaactcttttataccaccatcctcacacatgcgaacagcgcggaatagctcaaggagaaccttcacaagaaagggtaaagcatttcagaacaactgggccttttcccacaatgacaaattgtcttgcattcaaaagcataataattatattgcctcagttcacaacttggcaactaccatcagaggaagcagaaaatatggctaacattttgaagacattntctcataaaaaacaggatccagtgggtaaagttacaactcctcattctttataccctctaacccgc

SEQ ID NO: 44277 - DNA, 421 bp, Oryza sativa
  unsure (1)..(421): unsure at all n locations
gacctataaaactcagcttcccnaacatgaagatagaccctgccgatcatccaacagcactcaataatgccattggtgaaacaaaaatttttgctatagggatgaatactgatacatcttctaagttccctatcagctatgtgcttaagaagagtttcacaattgagcctactatgtcggtccctatgctcacagatagagaggttagtaaatactactgttccatattacttcagatatcctgttccatattacttcaaatatttcaaactaattaaattaaaatataaaactaatcaagcctttgaagaacaaagaggtactacagcttccaccacctgcaccacatacagataacccaaggtttgttggtctatcaaatgttctattcattacatttgtacaacaccccatatttttt

SEQ ID NO: 44278 - DNA, 431 bp, Oryza sativa
agcttagcagagcttctaatcaaaatcaatctctttctcataggatgaactcaaacattcactggatctggaggtaggaatgcaagtgggtagtcccgctacccgaataaaaatcgcttactagttcatgtcctatatggtagtacaaaatatggaagaaaaattaaactataactgagataagcgggctaaaaaaactcgctttcctgccccgcttacatcgctatctggaggttggcagcgatgaagtcgaccgtgaaggtggagttggcgtggatgccgccgaccttggcggtggtgaggacgacgtagcatgggagctctacggggaagaaggacttgacgtcggcctgctgggagaggtcgagctcggcgtgagtgaggatgaccacgttgatgaagccgagggagatgaggtggtggaggatggc

SEQ ID NO: 44279 - DNA, 483 bp, Oryza sativa
tgtcccgtacatagacccattgactgattaagattctgtttaagcattactgtaacaccctccttaagcacaagtctatgcgtggggaaattatttgcatcaattgagtttaaaagttcagttggatataaaaggtcgaaatctgggatttgctcagaacattttgagattgtatcatagctaagatactccttttcatctcctggaattaaactcacaacataattgttaatttcatcgacaactgaattgctaggacatacaattgcacgcgaggccaaatattcgggatttttgtaacacgccaagaaatcatggtacacttcgctaacaacagcaactattttatcgccatctgtcatgacgagtaaatcatcatgtattgttatccatgaaggctggctctcaccatctcttttcgtcgcttgtaaagtgccgtcaccaacagccaagaccccattactaaaatcactaagctcttct

SEQ ID NO: 44280 - DNA, 443 bp, Oryza sativa
  unsure (1)..(443): unsure at all n locations
agcttgcgttacataatataattggtcatttcatatttcttcactntctctcagaagtcattgaccactttctgattaagttactaccagctcgtcaagcatggatttcacaggtttgcagcacaaatagtttgttactagcttgcataacctaatgacaaactgacaatcgagtgatggtgtgtctcttgaatcatttcacaggtaaatctgacaaatgccaacttggaaggggcacttgccacaggaaacacgacgttcaaaggttccaacatatatggagcaggcaagttactggtcctgtctctctgatggccatgccaaactaaatgactccttttatcttgcaactatcggattggtgacatattaatatgatcaattattattctttcaatctctaaccaacctcttactcatctancaaatgcttcaacagagtt

SEQ ID NO: 44281 - DNA, 306 bp, Oryza sativa
  unsure (1)..(306): unsure at all n locations
tttttttaagacatgcccaaggagaagatagagtattggactatgcattttgacgggtcgaagaggctcttaagcactggagcgggggttgttctaatttccctgaatggagaaagactgagctacgtattgtggatatattttnttgcatctcacaacatggcagaatacgaggcgctttttcacggactaaggattgcgatctctttaggaatccgacgcctgatagttcgtggagattctcagttggttgttaatcaagtcatgaaagagtggtcctgccttgatgataacatgaccgcttac

SEQ ID NO: 44282 - DNA, 371 bp, Oryza sativa
  unsure (1)..(371): unsure at all n locations
ntctcgatatgttggccatggagattggctgntcagtttttcacctatcatgcaaccacaaacaacaggtaccaattataattgagtacaaaatatattatttccagtatgtgtgcgtacggtacaactttgcattcaatgttttgtaagaatgtacagccccaaacaaaggatggaatatgccggcagcacacaatcctacggaaaaccatgtagctacggtggggggtcgtccacagcacatcacgagatatgaccgtcacagcttgatgaaccgccaccaataactcagccaacccaagactacagccacgttgattttaacggtgttgaggtggtccgtatgtctgtccgtgaaagacattcacctg

SEQ ID NO: 44283 - DNA, 396 bp, Oryza sativa
  unsure (1)..(396): unsure at all n locations
agctttgcccatcttttggaatgccttccgtttgtttctatcctttgcttcggctggaaatgtgaaccatatctccattgccgtccaagctcgctctttcatctatacaacagcaccaataatcgaaacaacaaatcacatttcattcatctaaacaatgcaattcatccatcggaaaaaaggaagaatgggggagggtggcggcatacttggagaagcggcgtacttggagacggcggcgcaggccgtagtcgtcatggatcctggtggcggcggcggagaggcagtggcgaataggtcgaggcggtcggcggtgttcggggatcccggcgtcggggaggtcacggtcggtgaggtcggggaagtctatggacggacngcggagaggactaccgg

SEQ ID NO: 44284 - DNA, 478 bp, Oryza sativa
tgccctagttgcaggcgtgtcatgcaggatgtcgccgttgtccaaattatcgcatctgaccggcgccacttgcgatttttgcaggttcgtgcataatcctgataccttcccaaaacgatttagcagatcggcgaaggcgctcacgttctctttggtcggattaatgaagacggccgcatcatccgcgtacatagatgtgcggaagcgcacagctctgcctcgcagcttacttagaattcctatgtcggtagccttgtctaacaggcgctggagggggtctatagccaagatgaagaggaggggggatatggggtcaccctgccgcatacccttccagtgtctgattgtttcgccccggattccattcagggtgatctctgatgtggaagtggacagcagtccggatatccagtcacgccatttttgtgggagacctctattctggaggagcgcaagtaggttagtccatctgaccgag

SEQ ID NO: 44285 - DNA, 441 bp, Oryza sativa
agcttgctgccaatgacaagatcctatattttatatttgttaagttagatggctttccttccacttttcaaaaccagctaagcttcaataaaacgatagaaacccagctagctcagttagcatctttagtccctgcaaatgaaactgggaggattccaaggcagaccgactcctccgttgaaaatgttaaggcgatcacgacgaggggaggtaaatccactcgtgatccgccgtatcctaaccctgcaggaactaatgggatatcaaaagaagcgccatctaatgactcgactgacaaagaggttcagcgagaaaagacagtgcctcaggagtactgcgacacacggttgctgccattccctcaacggagtagaaaaccgtcagtggacgagcaattcgctcgttttgttgaagtaatccagaagatccacatcaacgtgc

SEQ ID NO: 44286 - DNA, 463 bp, Oryza sativa
  unsure (1)..(463): unsure at all n locations
tatcgggtgttntcgatgatagaggctagttgatagagcttatatgacgagatcaatctagattataatatatgataacttggcgatttgcgtagacaggattagagtgtcatgaagatgtaagcactaatcccgagagcgcaagccgccatgacaaaatttacctcttcgtcggagatcgaactcgatgcagcccaactcgaaagcaaaaactcgtagaaacaatgaaaatagaaaagagtggcgatgcgccgaagtgtattgaaccgtcgtcctcttattataaggtgtcgggtcatatttatacccgaagtacatgatatgtccttactggacatgactcttatttctaacacaatttataatacgaatgagtccttcatgtggacccttaccaaaatatctctaaggaaactagaaaatgttctaattaatagatccattgcccttttaggactctatc

SEQ ID NO: 44287 - DNA, 365 bp, Oryza sativa
atggcgtgaatgctcgacctttcaactgatgctggagcggctctgctagatggaggactcctcttgagatggttacttctcatactggaggagaacaaacattggtgctgactattagaggatgcggacacctgtatcttgtgggatggcaccttgctaaaatgtactcaaaccctgctgaactatgtaatatgcagtagctggttcgccaatctctttcacaaaaagagaaaaaattctgacgtctgctggataaagtggagcttactggtaacatttgattccgactccctgagagcttttctatttaatccatagaatctctctgaccggacagactgagttgaacaaagaactattttttt

SEQ ID NO: 44288 - DNA, 418 bp, Oryza sativa
gcttatttcttgtcgcctcttatcttctagcttctacagtatgtctacttgctcccctgttgctacagtgtggtcttcaaccttcagccgtttctctcacgtgcccgctcacagtagcgctgcatcctccaccaaatccggccatgccggtgctcccaatctaaaattgatcgcggaaatagaaccctctcaatctcctctaccttgtccccaagaaagaccccatcaaattcgcgcttaatcccatgaatttcgggcccgttcttatcctaacaaatcgggataaaccctaattttcggccaccagagtccaccacatccggatcgatctctacctccttcgcctatataaaggatgcactgcgtcttccctttgctttcccctccttttcccgaagctccatgtccaagccactct

SEQ ID NO: 44289 - DNA, 445 bp, Oryza sativa
agcttcttccacaatgccaggtaaatagaccggttttagtcctttttttttccacttgtcatttgcaaagattctatcaacaaaagggtttaagcatagaagaaggggaaaaaaaacaatacgatatctgcagcatgtgatgtttcgcactatcacccactcgagcgcaaagccaacttgagtttggcagcagtacattatacagtgggttgctttatcgtcaattcagctctcagatgcaacacgccgtcgaggaagaagaggctgtcgtcagccatgaacgtcgaccatggtatcgcaaagagattcctgtaaccaaccgccttcccaccggtgaacgtgtagttacccttgtacttgctcacacactcttctgacggtcttgtccttgcaacaaactcataatctactgtcacgctcattgagcccttctcttgcattccta

SEQ ID NO: 44290 - DNA, 412 bp, Oryza sativa
agctgtggctttcgttcagtatcccctaattaactggacaatataaggcttggtcccgtttgcttcttaaaatgagacaccttcttcttaatgtaaaacatcagcaacggtctgaccgtttaaaaaatacaaaagtgagatgttttactgcttggccctgttcgaatctagaattaagtataagacatataaaatgataaagctattagcgtatgattatttgagttgttacaaacttagaaaatagatttgctcgatattctaaaacaccttctataataaagatgtcataagacatatatcatttaacaatttaaaaaacgtgctaatggaaacggagtactctataagaatttgtattcagaagctatataaggattataacaggatattgtgtacgtatggatggctc

SEQ ID NO: 44291 - DNA, 387 bp, Oryza sativa
  unsure (1)..(387): unsure at all n locations
tcactatagtgagattcactttcttgttaagttctggggctgaaaagaagacttgcgtctcaacatcgacttaaagaggtgcttttcaacaactcaattggtgatgtaccgacctcccgggtcagatcattacctctcggcttccagagccatatcacttgattaatcggctcccagagcctttctcattatctcggactcccagagtccagctgcccagcagcacaacaatccgctttcactcgggaagcctagtctatgatgcccgctgacatcctgaatcacacagattcgtntctgaccactcaggtcatgcatctaccacttaggctgattctggttacgaatcccaatccacaacagcttnttacaaagcacacgcaaaca

SEQ ID NO: 44292 - DNA, 474 bp, Oryza sativa
  unsure (1)..(474): unsure at all n locations
acacttagaaactcaagcttaacggtatcggagtggtgggatgctaccgcaaacacataagacgctccatagaaagctctgcgcacactaacgctcctggtagcctgggaaatctggaatgaaaggaaccgcagaacctttcagcacaaggagctttcgatgggtagccttctggccaaaatcaaagaggaggccaaatcgtggtccttagcaggcgtgagagatctgagtacttgactttctttttaattgctcggaccgaaggtcctgagctttgcttttttgtttttcacttgtaaagtttactcctcctaaattcaatgaaattggcagcttgccgattctttcnaaaaatacatttccacttagaaaccattttgcagaatctggcgtgaccaaacttaggcagtcagaaactccgcaaatttacaagctaatcgtttggctacgtctaccacataatacaaatttata

SEQ ID NO: 44293 - DNA, 436 bp, Oryza sativa
agctggctcaatccagcacgcgttggacgctgttatgacgaggtcgtcgacgcagagtgatcgggcccggacgtggcgctgattttagcgccgcaggctctgctggtagcacgcggctcggagggccgcgcgccgccttcgctcttccaagtagtcgaggtcatctctgcgaagctgattttgatcagcctcgcaatacatggtagcccgaggagacctcagggtgagctcggatgggagaaccgcttccgcgccgtagacgaggaagaaaggcgtttccccggttgctcggcttggtgtagttcggtttgcccagagcaccgctggcaactcctcgatccatgaatcgccgtgcttcttgagtatgttgaaggtcttggttttaaggcctttgaggatttccgcattggcgcgctccacttggccattgcttctg

SEQ ID NO: 44294 - DNA, 448 bp, Oryza sativa
  unsure (1)..(448): unsure at all n locations
ttgtcccaagctccaccaaaatcaagagcgcaagctcttaacatattctccaagatttgattgactcgctcggtctgaccatcagtttgcgggtgataggccgtgctgaaattcaaacgggtccccaattcttcctgcagtttctgccaaaactttgaggtgaactgactacctcggtcggatactattttcctgggtaccccatgcaaacacatgatccttgcgaggtacaattctgccagtctctttcccgtataggtggtatgtactggtataaagtgagccaccttggtgagtcgatccacgactacccagattgaatcgtgacccgatgatgtccggngcagtcctgttataaagtccattccaatctcctcctatttccattccgggatttgaagaagttggagtatacctgctggtcttttgtgctctgctttcacttcgt

SEQ ID NO: 44295 - DNA, 374 bp, Oryza sativa
agcttcacactgtgtcgctgacgtcatccttttgtttcttctcaaagctggcacatgcggcgcggggaactatgagaggaacacatcttcgattcgatgtgaacccgttgaaaaaaaaaagaattaccgctttgaccgtggttgttaaaacggtgattacggacgtaatccgggtttattagagggggatgaatagtgaggagtaattaattaataccttcttggcgttgtggaggacgaagtgggagttatgcgggttgtattggctgaagacgatggaggctgctgccattgccggagcggtctcgcccgcgacgtcagatccccggcggttgtggatcaccttgtacgcctgcctcaacagtgtcatgttc

SEQ ID NO: 44296 - DNA, 440 bp, Oryza sativa
agcttcacaaagcgaggttgagtccgcgcctaagatgctcgaagatgacatcctcacaaaggcgctcggaaccaaagaacatcctggccgaactcggggaattggtagcgatgtgccctggaagcatggactccctcagtacagctcccaatacaggaaacggaaagtctccaaggaagagagggacgctcgtttgaaggccgaacttaaggttgaggtcattcaagaactagaagctagcatgaatgcaagggtggaagaaagggttaacaaggtgctcgccgacatgaatataccccgagtcacaacacctgctgtgcaaccaacttctcgtgtacaacacgacgcgagtccgtcacagcataggagtagttgtgcatccacagaggtgccggcccctggtcttccgatcgcaccactagctgcagtggaccacatcg

SEQ ID NO: 44297 - DNA, 420 bp, Oryza sativa
  unsure (1)..(420): unsure at all n locations
ggcatctggaatgattggaatcttgtcgactccttgttgacggtatatgcgaacgatattctttagtgtcctaaagttgagaatatccatcaccaatctctgtcaaaaccgtcaacttctgcaagtagccaaatcatatgagcaacatttacagttccgcttacgtaggtgatgactaatgaccacaggatattgtttcatatttaaatttaaccactcatatttaagctacaagtctataaatttttttaaaaatacttatattgtgaaagtatgttgtacgcttaataatatgataatattaaaactacttatggttaaaattaaaaattactcatcggtgacaagtacagggaaatggagancatgactcgcatcgttggcgccaagcagcatggaaagagatcaagaaagcgagaa

SEQ ID NO: 44298 - DNA, 442 bp, Oryza sativa
  unsure (1)..(442): unsure at all n locations
cttctgcggacttnatcttgcgagcggcccctctcgggggcaggagcgttacaatagggctggttagaaaaaagagtatgctaacgttgccaactgtggagatgccagacccttcacctgtgtcgcacttgaacaactcttactgtgccatattcggatcttttgagccacccaccatggacctcagaagccatagcggcatatgtgatctggtcggctagaaatactcctactgggcagcgagatcctatttgctatgagatcgcgttattaaatttatcattgccttaccgaccgatcagatgttcttctatgtttcccagcatcatatgaagactctggctgtgttgggtcagtgccaccaccgcttgtgtacaaaagtggttatctttagatacccantatcatggtctatgctgttcagaattacattcggggagca

SEQ ID NO: 44299 - DNA, 418 bp, Oryza sativa
aacctaagcataaggcaaaagactttcacctttttaacctgaaatgaggaaaatgtaacggtgggcatggaaggacaattgaaatttacggtagggcatggaaggacaaattgaaattacgggtatagaaggatcgggtaatttataggtaggccatggcgaggacaaattgaaatttcagggtataaagaatcgggaaatttatggttgaaaggattagtgattttcagggtacacagggaattactctttagatgaaatgaactccttcgtttttaaagatacgccgtaatttttttctcacatgtttaccattctcttattaaaaatgtatgccatgttaagatataatcacacttgccggatatgaccgggagatatgacagagctgagcaacgcatcgccactggctgccctt

SEQ ID NO: 44300 - DNA, 216 bp, Oryza sativa
gaggagaaaaaagggagaataaaagagaaaaaaaaggagaagaggaagagagagaaaaaagaaggaagtagggaaaaaagaaagaggggggaaaagaaaaattaaaaagggagaagagagagaaaaaagagaaagaagaagaaggaaaaagaaagagaggaaaaagaaagaaaaagaggagaagaaagaagaaagaaagggagaaaaagaaaaaaa

SEQ ID NO: 44301 - DNA, 409 bp, Oryza sativa
agcttgttcagcaatcaagcccaactactttatattatagtcgttacacgaactcgtactttatacgaactgaaattagttaggttaagtagtgaactcaccagctcctgattgacgacggcatcacttttgttctcaaatgtgacagaaccgtccgggttgaccttaccccttgcccgcgcccagttgcgagctctttgttcagggatgtctgaaaacggggcagggacattcgctgttgcagcggctgcatcttcttgggcccatattgcctccttgccgatgtaccctgcggtgcccaaacgatgcgggtgctcattccgctgttgcagtatgcgatgtgccttgcttgataccacaccacccttgctgtgcctccactctttgacttacttccctcacaaatcac

SEQ ID NO: 44302 - DNA, 398 bp, Oryza sativa
  unsure (1)..(398): unsure at all n locations
ctataaaactcagcttagaggaaatgaccgaaagccaccctcccattgctgccgccggccgcatcgggagctcgtcgtcacaccgcctccactccaaccgagcatggggtaagcctcctcatattccctaagtgctcccctatcacctaatcgatccctcgttcgccgtagcatgctagccgtcgccgtcccgaacctaccgccaacaacagccatggcgctcgccgcctccagccttccccggccgcgccgccacctctagggtgtgcgaaaggaccacctctagcttccctggccttctgccgtgttagagnttgtgtcgaatatgtgtacgtagtcggttacagtttaagacttggagttgtactacgtatatgactaaaataagagtcggactc

SEQ ID NO: 44303 - DNA, 432 bp, Oryza sativa
agcttgtcgtatagctgacatttgtttcctttttatatgacagcaacagtaccattctgatgtcatatggtgaatgcaatgtcagtgtaaaaagggacgttccacctagtggagggttgctcgtggtttcagtagaaaatgcataagacgtctagggaaagcgttatactaatccgtatgccgtggttcattttaagggagaaaggaaggaaacgaaggtattttatttttggaattagctatgccacactaactttatgttgtagttccacgttataccccaactaaaagcgcttaagaacatagtagtactacctaatacttttatgtgaaccttaaatgtttaacttggcatttcatattattcagaaaacaagagatccaagatggaacgaagagtttcagttcatggttgacgaggctcctgtggat

SEQ ID NO: 44304 - DNA, 392 bp, Oryza sativa
tcgcagaactctcatcgacggtggcagtgtactcaatatcctcttcgccaagaccttggatgatatgcggattcctcgctccgagctaaaaccaagcaatgcgccttttcacggagtaattgcaggactatccgcaactccactcggccagatcaccctcccgggcacttttggtactcgggaaaactttcgcacagagaacatcagcttcgaagtcgccgatttcgagacagcataccatgccatactctgacgcccggcggtagccaagttcatggccgtcccgcactacacttacatgatgatgaagatgtctggtccccgaggagtcctatccctactgagtgacatcatagcaagccggtacatgcaacacagagagttgcgacatg

SEQ ID NO: 44305 - DNA, 450 bp, Oryza sativa
  unsure (1)..(450): unsure at all n locations
agctngacacagatgaaggtatgaaagatgtttatctactatctcgggatgaagatgatacagaggaactatatgaggatcaagacatttctgacaatgatagtgaagaaaatgatgatgagctagaattggactctgatatggatgaggagaatgatgtatctgaatctgatgatgatgaggaactcagtgagaaattggatgattctgatgaaggctctgatcaggatgatgacagtgaccaggatgataagtcaaaaaacagcagtcgcaaggcaaataagagaaagttgagtgattatatagggcaacttaatgctgcagatgcaagccttcgagctctgaagaagttggcaggagccaagaaggctgaagcttcgtgcgatgaagctggtaaaatcttatctgatgaagaatttaagcgtattaacgagctaaaggtatgggagt

SEQ ID NO: 44306 - DNA, 385 bp, Oryza sativa
gtattcgtaataagcagcttctcatttccttgaatacagcaaccaagaagtctaactaagtttttgtgttgcagtttggcaataagaaccagttcatttctgaactgctccatcccttgctcagaacacttgctgagccttttaacagcaatttccttgccatcctccaatgttccctgtgtgatttcatcattattaaacgaataggagtaaatgacatcgctattcctcatatcattgacagaatgacaaggtaaaattatatatcaccttatatactttgccaaaacctcctttttcaagcatgttggtgtcatggaaactgtctgttgcagcagtgatgtcttcaaactaatacatggaaattccagaatttgatcccaca

SEQ ID NO: 44307 - DNA, 468 bp, Oryza sativa
  unsure (1)..(468): unsure at all n locations
ggacctataaaactcagctttgcattgattgagcacagaacatctgggatcaacctagctttatatatttggcttgacttgagtaatcttccgaagatgaaaatgttatacatgaaggttggttatgcatcaccagtggcctggttgtgcaatcccaaatttttagttttctataataagtagatatgtaagcacagctgccattgttgcatgctaattaatggccgcaggatttagcaacctagatcgatgcattattaagcacttttagtgcaaaacccaaatgattgcaatttgtttttaggaattctccaagaaacaactcanactacattattatatatgacaactntagcatatattcacatcagtaggcttgaaaagttggcacacatagctccccgacctactatctcccttctcaggctttacattgtacttgcaaaaatcacaatggcatgcaatctt

SEQ ID NO: 44308 - DNA, 400 bp, Oryza sativa
agtcacctgcggcatgcaagcttcttaatcagtaatcactatcaaaaatattctcttatcatttatcacaaaaatcgatattcaatttatgagccttaatttcttaccacatacttactagccatgattgtgacatgaatgtactctgccaaaacgatgctaatatatggtgaggtatcatgtttagtacagggaagggttagcatgtgttactctcggtgccatatgtgttcctgttctaacaactggccacagccaagtggaccggcatgaacacaaacatacacaaaagctgtatgcctcagggcttaaacccccccccctcccccttcccggtagtttagccaccaccatcaccacgatactacatgcatgctgctttcctcctcttgtttaagca

SEQ ID NO: 44309 - DNA, 396 bp, Oryza sativa
  unsure (1)..(396): unsure at all n locations
tatctcttacgctccangaatggatcagtcagaacattatcaccggttcgccgtcgtcgccgccgactggtgtcttcgcctatacgggtcggtggtcacaacaccgttgtcaggcgtctacattttcaccgccggtttgctttcgccgccgccgactggtgtcaccgnctacacggctggcctattatgccaccgttgttgggcgtctatgtcttcaccgaccggccgcctcgtccgccgccgactggtgttttcgcctgcacgctggcttattatgccaccgcttgtgggcctctacgtcttcaccgaccggccgcctcgtccgccgccgactggtgtttccgcctgcacgctggcctattatgccaccgttgttgggcgtctacgtcttcaccg

SEQ ID NO: 44310 - DNA, 469 bp, Oryza sativa
  unsure (1)..(469): unsure at all n locations
ggaccttaagngactgagctgcagcttacaaagcgaggttgagtccgcgccttagttgttctatgatgacatcctcacaaaggcgctcggatccaaagaacatcctggccgaactcggggaattggtagcgatgtgccctggaagcatggactccctcagtacagctcccaatacaggaaacggaatgtctccaaggaagagagggacgctcgtttgatagccgaacttaaggttgaggtcattcaagaactagaagctagcatgaatgcaagggtggaagaaagggttaacaaggtgctcgccgacatgaatataccccgagtcacaacacctgctgtgcaaccaactcctcgtgtacaacacgacgcgagttcgtcacagcatatgagtagttgtgcatccacagaggtgccggcccctggtctcccgaacgcaccactagctgcagtggaccacatcgaggtaatt

SEQ ID NO: 44311 - DNA, 466 bp, Oryza sativa
ggcatcggaattgattggaatcatgtcgactccttgttttctgtatattcgaacgacattctttagtgtcctaaagttgaaaatatacatcaccaatctctgtcaaaaccgtcaacttctgcaagtagccaaatcatatgagcaacatttacagttccgcttacgtatgtgatgactaatgaccacaggatattgtttcatatttaaatttaaccactcatatttaagctacaagtctataagatttcttaaaaatacttatattgtgaaagtatgttgtacgcttaataatatgataaatttaaaactacttatgggtaaaattaaaaaatactcatctgtgacaagtacacggaaatggagtatcatgactctcatcgttggcgccaagcagccacgaatgaaatctagaaagcgagaagcagacgaagtcgatgggtttgcacttacgtccatgccagtgatg

SEQ ID NO: 44312 - DNA, 413 bp, Oryza sativa
agcttgggcattgttgctcgggatggtgagtatgtggttgctgaactcatgatgtcctgtctacgttccttctcatcagtaaatggccgttgggaggagaagcctctcgtatgccctcaattctccaggggtgacatggtattctcctctggtgggatgcttcattgggttgatctcaactgtggcatactctcctgggacccatttgcatcagaaccaactgtactttttatcaacctgccagaggccagtggaagacccacccgtggcctggatgaatggatccacatgaggtatgttggtgtctctgctgggcggctgtgcttctttgacattgatgaagatgatggagaatctgggtctatgagcttgtgggcactaagtgtgaacagtggtgagtgggtgttggaata

SEQ ID NO: 44313 - DNA, 468 bp, Oryza sativa
  unsure (1)..(468): unsure at all n locations
ggactacccaatcacaagcacaccgactatgggtttacttcattaagttctcatcctagaagaagcaatcgaaacccgcatcactcatagactaagactaaacctgcaaacaaaaggttatatcaaacagcaagagtcagtacattaaacaagttaatgtactggcaagtacaagtcaatcctactatactacatgtaaagcatatattcaaaggaaggcaatatgtagttcattttcagcataaagcaagttttgtttcacaattcttttgtaaaagagttgatgcttcaattaacaaagacaagttntaagttntcattattaacttcttcataattccatcataaacaatctcttattaccgtacttaacaataagtcataatgtatcaccacatacacaactcaacacatttatcaatttcaaaccaatgtcacaagatcacattnttaanacatagtctatac

SEQ ID NO: 44314 - DNA, 441 bp, Oryza sativa
  unsure (1)..(441): unsure at all n locations
agcatgcaagcttataacatactggcatcgtatctttttgtcgtangacctcccctacaagatgcgcaccgcagtaaagtttaaccaccaaatccacgacggaatggtgtggatcctctacgcctacgacaccagaatatcgaaccatgaacgacgaaaggcatgagagaaatattggctagtaattgagaagccccaattcttgactggaagggacaccaaaggcctctgccctccctctctatctatccaagagatggaagggcagagctcttatttgggttttcatcttttcatcaaagagttgaacaatgaagatagatggcaagtgcctgatcgatatgatcacgtcgtgtaggaacaaggtacaaaacgctcgttcgtaggaggcactaagtgcatacatcactgcacttccactcgacacctattaaacagctc

SEQ ID NO: 44315 - DNA, 440 bp, Oryza sativa
  unsure (1)..(440): unsure at all n locations
agcttatcgattagacctgctactgtgttttcagcctttntctcttctttaatcatgcgagcaagggcatcccaactcattccatttgcaagggaaacgcggacagctacaattgcagcatccacatcctctagattatactcaattaattctgccattttgatggaatggtcaacctcctttctcaatgtatgtacacgattttcctgcacgaatggttggaccaatgaacatcaggctatcaggatgctgatataaagaacaaactccaagttatgaatgcaagaacctgatccaatttaattttattaagcctttgtgccgctgagtcctcttttgatttttgctgttgattcaccctctgactctctantttgctgtagaactcatctagagcagcatcaaatgtctcaaaatcattgaattcccttgacttaaat

SEQ ID NO: 44316 - DNA, 355 bp, Oryza sativa
tcgaacccaggccagctagccaccaccttgtatagctagccggaagatccctgtgtgtttctcgaatcttaagagattgcaatgaacttcaaatggacccttgattcgttcagttccaccatctttcatcagtttgcatagtgaatcaatgtaccacaattattgccgtcggcttgcaacgtctgggaatctaatggaaatatcatgagtcatgtaagagtacagctagagcaacgatgctaagtaaagaatatttagaagacgacctcagccgtaattcttcttttatcctctcaacacacatataggtgaccttgtagcctacggaaggaataaaacaaatatggagaggagc

SEQ ID NO: 44317 - DNA, 392 bp, Oryza sativa
taacaaatgcataacctctggtggtagatgttcataaatatcattataagagagatcaaggctaactaaagacgtcaagtctcctatccctggtgatatactttcaataagggttgtagaggagatgtcaagcatgcgcaagctcgtgaatcttcgtatcgaatttggcaaggctccagtgaaattgttgtaactcagatgcaactccagtaatattttccttgcaacacactgtgacgacaaaccgtcaatcaacattgtcatatctccagttatctccatgttggtgagatctagtatttccaaactgcatagattgttcagctctcctgccatcactagtccttgttcagattgttggatgaaacatcaaggacttggagagatgtcat

SEQ ID NO: 44318 - DNA, 437 bp, Oryza sativa
  unsure (1)..(437): unsure at all n locations
agcttgtactccactgttaggcacctaggttatattggtgttccatagtatatacattgactgttttacactangcaaattccacacttggccgtcatcacattccatatttccagcaccagcagtatatttaaaagtaggaatcttctgtttcataaaaaaatacaaatattaagctgacgaagccattataatattttaactggaagtcgcttaaccttttgttcctttatttatattatttcaggtgaattctgctgctgagatcatctatgaccttgttgatccaaatgctaatctgatatttggtgctgtcatagacccatcactcaatggccaagtaagtcacagacaaatntatcttgatatagttctcttatcaaatatcttgaanatatggttcagctggtgcataatgttatacttgcagctggtat

SEQ ID NO: 44319 - DNA, 459 bp, Oryza sativa
tagtggctgcgaaagaaggataaaagggtggcgcgtgtgtttgcgatagatgaaggtggctctgctgacttgtctaccatggatatatggaggacacattgtaaccgggccatctctagggccctccacgaccaagatttgtaggtggtgaatgaagtcgtgaggagggttatgacgaggaggttggagtgtcaaaatctcttcattgtgagctagcctatccctgttgctgtcatgagtgccatcgataattgtcccccgcgagctttctggctgatgtccttatagaagagggggaagatggtggaggaaaggtctagtcaccgaactctcgtcacgatgggctggtctcactagagcccgtgtaaaaggctatgatatacaatacattctataatggagggattaacaatgattaattgcactgtcataagttcttcttataaaaatactttaaaa

SEQ ID NO: 44320 - DNA, 420 bp, Oryza sativa
gcttcatttcctcaagatccaatatgagactttctctatgttgcctcatgagagtgtgaatgacatgtatgggaggctcaatgtcattgtgaatgatctcaaggggcttggggcaacctacaccgatcttgaggttgcccaaaagatgcttagtgctctaccggagaagtatgagaccctaatcgccatgctcatcaactccgacatgtcaaggatgacacccgcaagcctcttggggaagatcaacaccaatgacatgtacaagttgaagaagaaggagatggaggaagcctcaccatctaaaaagtgcattgctctccaagccgaagttgaagactagtggaaaagcaaggtgaatgaagccaatgatgacttggaggaagagattgccctttctgctaaaaggttcaatgatctctt

SEQ ID NO: 44321 - DNA, 404 bp, Oryza sativa
  unsure (1)..(404): unsure at all n locations
aaggatttgaaagtctngaatagaaacgtattctaattaattagagatataaatttgaaaaggataaaaataaagatgtccaattttaaaagaattcaataaggatcaaaatgctccaattttatagaattgtcacaaaagattttctttaatatttaaaatgtaagattgtaataatcaaatgggaggaaaaggaacacaaataattgatcttctaactttggataaattttgggatgacgtcaaaaatagatggaggtaaacaactaggattttagcctccacaatatgtggtatggattcttgatgcaaatattgtggctaaaggaagttggactttgaatagaacggattggaaataagtttcttagcacaagagcaatcactcaattatttgtgatagt

SEQ ID NO: 44322 - DNA, 140 bp, Oryza sativa
aagaaaaaagggaaaaaagaaaacaaggagggcagaaaaggggagaggggaaggaagaaaagaagaaaaaagaaggaaaagaaaaagggagagacaaagaagaggggggcaaaaagaaaaaaatgggggggaaagcaaaa

SEQ ID NO: 44323 - DNA, 418 bp, Oryza sativa
gcttgagataacaagctgctactcctagatctgtatctctgaataggaaaaatctaggaccaagtccaattgaataaataaataatgaaataaatgtagaggagaagatgtgaccttgttgatggcgacgcatccggcagtgttgtcgtcgatctcaacgatctgaacattagacttgttcgtcttcttcttctcctccttggcagaagtatccttgttgtgctgcttgaccttgttttctgctgtcttgtctgccttgtggtggtggtcgtcgtccccgaagacctcctcgacggagtaggcgtgcgaccatgggtggaggaagcccttgcccttgacctccttggcccacttgagcttggtggtgccggcggcggaggccttggactcccacttccacttgcggtcgaagccatcg

SEQ ID NO: 44324 - DNA, 427 bp, Oryza sativa
  unsure (1)..(427): unsure at all n locations
ttattgctntaattgtttctttggaattgaatccagtgagtgagattatatgaagaagctgagcacactgctcacattgaaattacagatacctgcagcgagttacctgatggagcttgcggccattgactggtttaaggacagcaagcgtatggataacgtacgcaggcagaaaggctgtgtagcccacgtaaacataataaatcttgtgatcgatgatggcttatcctatctgaagttatcaagtagtatcatcacagaacttggcggcttggtcgatgtttgttttgtaggtagctgctgagaaagggatgcatacatttgttgccaacatacaggtaagtatgtttgcagattcagagctagctagctagctaggaggaaacattggcaatcaaaagtatangtatgggtgtgtatatatata

SEQ ID NO: 44325 - DNA, 431 bp, Oryza sativa
  unsure (1)..(431): unsure at all n locations
agctngctcgngggatgctcagaattaattatcttcattatttaaggaccacaccaaaatagttgtttatgttagaatgatttgggggtgtgtccaggtactcgttaggggtcttctcaatacgtcaaaccaaaattttcttaaaacatcaaagaaaaccattctccgctagatggttttgttctgtagggaaattgaatttatttcttgaaatatgaaaaataaccaaggaatatccatttaagtcatcgtggctttcaaatgtatgggggaaaaaacaggtataacttgtgaaaagagttaaaaaaaacactaatatctttatgctagttaaattttaacaatattctataaaagcaaaagaaaatcaaaaagttgtttacagtgtactttttcttggaaacttccttctgtattcttcacaactaaat

SEQ ID NO: 44326 - DNA, 420 bp, Oryza sativa
cactaattaattatgcggtagtcgagatgtatatgcctgagcgagtgatgcggcaatttgggcttcgccaatccattccaccaccttatcgacctaccctacaggcgctgcatcgtattactcgacgcggcagagaacatgagaactgggaagagacacattatgagtacacttcagaatgggaagccctccggtagcgcatattttcagagacagagcattatgacccatcttcttatgacgagtacccgcactggtactcacgagttacaccgcgggatcctgtaccatcaatcagtgatgatgtggaagcaagaccttcatacagcctgatgattcattgacatcagtatcgagctaagcgtctatgaccgcaaagcagaagactatatatctattcagtgctatgacagattctat

SEQ ID NO: 44327 - DNA, 407 bp, Oryza sativa
accatgtgtgagtatggttcttttgtgatggaaaattgacaagtatcggaagtgcatgaaatgtgtgtatggattaatattggtcacgttgcgatatctgtgcccaaacagcagttgttttggttcatgtatgtgcaggtgatcgaagtcaacattgccaatggcgacgaccatgactacgctcagtgaggagcataggtctggtacggtaaagaggccatgtgacaaggtgggactaacgtcatgattcctgatggtcaacgtgggtctcggcggatcgggactagactcatggggagttgaggtccagaatgatcgacaacaaagttgagaacaaggtaatgcacggtggacaaacatcgtgttgggaaggcttcgcaaggtcaagtgcaagtgtctgatgtcgc

SEQ ID NO: 44328 - DNA, 449 bp, Oryza sativa
gtccaggactggccaggttcacaaacgatactggtgacatacagattacaaatgcagcgggaaagataaaagcgagctaagcctgaagacttgactcctgcagcgggcgactccattccacaggcatccttgacggcagcgacgaaaccaacttcttcgagacagctccaactacgaaaatcttcagctctggtgtgggggaaaagagagcaagactgagtactacccactgtactcagtaagtcataccggaagagaaggtatgatgcaggatatatccaaaagaggctagaggttcatttgcatatagctagcatttataagccagtattgatagcagtaaaacacgtgtagtaattaatcaatattaaccaatcactgtccaacgctacactacgttgcaacaggcccaaccaaccacctgaactacaccaggttattacctaact

SEQ ID NO: 44329 - DNA, 443 bp, Oryza sativa
gcttataacacattcggggggtctccttttattcaaacctcgcaacttacgaacggttatcatgtgggagcatggcaagtgatggagctgagggaactgacaactacatgtgttatctctcgcaaccacgacgtagtgacgttcaccccattgcaccccagccgccgtgactccgccttgctcgctgacctcatacttcatcgaagggaaatcgaaacatgctgttctttgccccacagttcgtctttgctgctcctccaacatgtccttaacttttgtgggccacttctttccactcaggatatctacagttgcctctttgtgtctatcaacaaaccaactattgcacttcgaaaatgtgtatgccacaatagctgtaaccggcagttttcgaatgcctctcaagacattattgaaactctcggccatattactggtcatta

SEQ ID NO: 44330 - DNA, 474 bp, Oryza sativa
  unsure (1)..(474): unsure at all n locations
tcaactttactcccacatgcagctcaactagaatcttttcttcaagttcttctccttcttgatcatttttcttcaactgagatttggtgtttattacaaggtgagtacatggaatactccataagccagacaggaaatatgcaagtacacagggataccaaaagaatggcgtaatatagggcttatttgcgaaagcagcatttagcaaagagttgaaaatatgtaaaacagtagagaaatcaattaaacagtattaatccaacaatatacaacatacccgttgcataggtccaaccaaacctgaacaaccaaccctggtcgtacagatcaaacctccaaaccaggaattaaacattccaaaccaggagttaaattaattaccatcaattatcacattattaccattaatgagtagtgtgggattaatcaccanaacattgttagacccacccataaccgctgacacgagtatat

SEQ ID NO: 44331 - DNA, 429 bp, Oryza sativa
agctagctatataaccactcttttcttctttgttagaggcctaatttaagcatagctagcatgagagagtgcctctccttggaaatctaaaaagctgcaagcaagtggcagttctaatattgcttgcccaacgaaggttcctgggacaagcacagggaggggattcccttcttggcccctaccattcgctttggaaacctccatatctttgccttagctacacctgtagctacgtatctctatagggaatactctctctcttctatccttttctctccaagcaatggcatggcactgtatgtgtagtagtacggttgcagcttacctatacttctctctatctatgcatgctactgtataactatgcagactactgttatgcctcctagctctcaatacctttgacttggctgcatgccatccctgctc

SEQ ID NO: 44332 - DNA, 271 bp, Oryza sativa
  unsure (1)..(271): unsure at all n locations
ctaagcttgngaacttattttgaaatttggtagtttatatctttttccactgcatgtgttgggggttctttgggatatgatagaaacgcgttcatattatttgggtttttctgccgcgtaggatggacgctacctcagcttgcagagttgctattcgggtttgtccataccttgagtttcatgacaatggtagaccagaatcttactgctctcgtgacctttactgggtattatacaacgttacaatttgttggagtaaccttttaatgat

SEQ ID NO: 44333 - DNA, 396 bp, Oryza sativa
gcagcagcagctaacaaagcatcaataattattcttgtagatcatcagccagcaaaaaacccagattgtcaaaatgagcctccatacattacattcatgatcagccaccaaacagaatctttcatcataagagtcttcaatactacgctggagggcgttgctgcgaaaaagctctacaacatcacttcgcaaaatggcggaccgattatgcgcactgctgataagaacaaaggcagattcttcactctgcccgactgcaaatacaataatggtggcgacatcaatattcgggtacaaggattattggatagacaaggacaagccaactcccatactttcagctttcttgatatttttgaaatatacttccgcagcaacactcagctcaggaaatat

SEQ ID NO: 44334 - DNA, 370 bp, Oryza sativa
ctcaagcgttatcacaccattatggaacttctctgtcttctgtgttatttgggtgcgatatgaaagcactccattctacagagaatgtacattcactattagctttgacatatatcaataatctacaagttggacatatcgcacatatctgacatattctgagagaacacatgaacctttaaattcaaagtctgtcgaacccataatgcttgctgagctaccagcatccacaaatccaatctttgaagtgtctggcttacttgaaccatcatcatttgatgattgactgaccgcacgaatcattcttgtagagacaaacattatcgactgtgatatgttggacaaagacaatcatagctaactgatgtct

SEQ ID NO: 44335 - DNA, 439 bp, Oryza sativa
agaccctatcatatacgatggtcagctgagagagtattgtttgaacattgtatagaatagaagggagtttctgacggctgagattcttccgtgaagtctgtggaattattagatgtatattattcttccgctaagttttcttgtttatggatattatagatgtgtattattcttcttgttctatgcaaattatatgtaaaattttgaatggagaactgaatggcgaataggacggttaggttgcttcatatttgtatgcctttaatttgtttatttaaacttctgctatcctatgggcaaaacagcaggtctagtgcgatagccacttcatggatattagtgaaatattaaggctaatgtgaccaatattattttggagaatggccaaggtgagtacagctttgagtctaaaatacttatctctaaactctgagtgcaa

SEQ ID NO: 44336 - DNA, 220 bp, Oryza sativa
gcacgctgcctgacaggagggcaatgcacaggcgcacctacactgccacaacggtcattcgaacagcgcacgggctggcggccacccctgcgcgccgaaaaaatgaggtgtggcgcgaccgccagaaccaccatacaaacagttaggggggcgttgggcgcacccactatgcacgcacaacactggcaagtgtgtggaggggaacggagcggccccaccc

SEQ ID NO: 44337 - DNA, 449 bp, Oryza sativa
  unsure (1)..(449): unsure at all n locations
atacggacacataaaactaagcttaggttcctctccgaaggttgtgacgagcttacagtctcatctttttcgcttatatttatacttatcagccaaaatttaaatttttaaccttgaatttgaagttgattttgggattttttttcatcgaagtttattataatttcacgttttgcttttaaatcattattaagaacatgtatataaaaattttattcataaattatatctcgtttgcaaatatgatatttgtcttatttccaaataaacaaaacgatgggaccttaatctccctcaccattgatttagttcgatgtaccatgtgctcagatttgtaattacaacactgcatgtgttaatataaaagaaacaattcngagtccgttaggtgaaaactggtacaggttaattcaaatgccaggccacgtctgcatcatgggtgggcgggc

SEQ ID NO: 44338 - DNA, 425 bp, Oryza sativa
agcttagccactggctggggtatctggctcttacgaaagccttgatgtgggcgagcatctcctgcgtccgcggctgcgaaaggtggtaattgttgagcacctggaacgcgtgcccgacgccgccgtacgtggcctggtccacgctatggtcggccctgcgcaacgcgctgcaaaacttcaggttgcggtcgcggaggatgtcctgctcggagatgcacacgatgaagtccgggagcggcagggagtctagccgcggcgcgccacgcccggtgacggggttgcaccaccggtggtcgcgtgtggcgccggcggggagcgacatgcgccagtatgtgtccgaggtcgaaagcgtcaacgccgagcctggtggctggggcatcgtcttttggaggcggtgctggtctctccgccaaagaaaggctgga

SEQ ID NO: 44339 - DNA, 463 bp, Oryza sativa
  unsure (1)..(463): unsure at all n locations
ntacctgctagttngccattgatgtagatctgaagaacatgtccatgtgagttgacaagcagaatggactggctgccgtttagatatggttcatcacctttgacaacgatgctgcagaaagcacgattaattgaaactggtgagtaaccttgtgactgccagttttcttatatatatatataggagtatatggacaattacacctgaggcgtgtgagtgcgaaccctgtaccttgttgagtaccacaggagatcactggcatcggctgtggtgtttatctgctccatcagaccaggtttcgtcaaggcgttctcctttgtaataccaacaggctctatggcataactccagccagctgtagcaagttccggtgtgattaatgaatcatcagtatcttggatcctcgatcccacgcttctcatttctgaagtttgtacctgagaattgatctgcaagggggcaa

SEQ ID NO: 44340 - DNA, 315 bp, Oryza sativa
ccggatcttaagcgacgcggctgcagcttcgggacatcaattgtgactcttgttcaaaaatgacggtgaaaacagggcctattaagggcaatgatgatatctattcccatgaacctgtccgttatggcatcgtgcaaaaacactgctgatgctgaaaggccttagctgttcaagagcatgcctatctacggcaactccggtacacgtctagagaccactggaatacatttgtgactgacaccgctcccaaaatattattgacggcctgcgcaatgacggctgtgaagacaaggagcatgggatgcgaacagtggt

SEQ ID NO: 44341 - DNA, 407 bp, Oryza sativa
ttccccgcatacaactactcgctgaagtatcctcatacaccaatactccgcatgtaatgtccactagcccaatattacttgcggttgataagtacttacagaaggggcctcatttaccagccttaatccaagattctgttactttaagctggattggtttgatatgtcctataagacggctcaacatttcgccatttccgactcctatatacattgacacattggtgaaccgcactgcgtggcttttctactactaaggctactacaatggcaatacggtcagaccacatgatgctaatggtgcacagaggaatgaaccgggcttcttttagaaacatgtatctgcaattcgtcgtcagaatatcacatgcttctgtctgtagtacacactgaatagatttctcttg

SEQ ID NO: 44342 - DNA, 420 bp, Oryza sativa
agcttagaggactggtttggaaaatttctgttttagttgcatgtttatgcctagcaacgttatagagacaaggatattgttctcttaaacaggcattccccaaccatttatcttcccaaaaccgtacttgagagccatctttgatgttgaaggagccaaacccgagaaaatcaggcttggccttcattagactagcccaaaagtgtgagtcttctgctttccactgagcttgagacaaaggctgtgaccccaaatatttgttccttagcatttgttgccacacaccatctgtagtgagtagtttatgcaaccacttgctaaggagagccttgttcttaatttcaagatcttgaattcccaacccctccttggtctttatgacgacatatgatgtcccaccttgctagtctatattttctt

SEQ ID NO: 44343 - DNA, 463 bp, Oryza sativa
gcttctcaaaaacctgacaaaaccatcgatatccattgaagatttattatctttgatatggttccatatcggcgaacctttatgagcaaagaacgacaactgttttataagcatggaaatcctattcaagcacattaccatattgtacatagcagcatgtttcactgcctacgagcaaaaaggtgaatattcggagggccagccaagtaaattgccaacaaacaaaactttgaactaacagggaaaagtggaatatggaatattggaactgtaaatgcgcatatcaacaactgacatttggtatagatttttagaactagcatagatgaatgatattgagacttacaatgcatatatgaatgcgatagtctaaccattcctgaatctggacacagctggccagtaaggaagactgatcatgagagaaacagaacagactaataattttgggatcaaatatttt

SEQ ID NO: 44344 - DNA, 427 bp, Oryza sativa
  unsure (1)..(427): unsure at all n locations
agcttcatggattaccacagaacattattttttttcgtgataagatttttactagtgcattatgggagcaattattcctgaggtctggcactaaattgcatttatcttcagcttatcacccgcaatccgatggacaaactgagcgagttaaccaatgcttggagatatttttgcgttgttntgttcatgccaccccagctaagtggtctctttggttacaccttgctgaattttggtacaactcttcttaccattcggcattgaataagactccttttgaagtcttggatggttatcctccttctcactttggtattcgagctgatgcctgcgtcatttctgacttggattcttggcttgctgaaaggcatctgatgactcaactgcttcgacagcatttgaacaaaacacagcaaggtatgaaaac

SEQ ID NO: 44345 - DNA, 341 bp, Oryza sativa
gatggctctacagaatatatatagcgctaaacaccaacatcgaagaaacgagatgatctcaatcctaattagagctgtactagttgggtagaaacaacaatggccatcaattagcaaaacatgctggactcagcattattcactacattagcatataacatgacttgattggaacgaacacataagaatagggacctatgcttacacactcgtttgctgtttgtttgaatcgtacctctaaagattcggagcacagcgtctcattttccctatcttgagagatcatatgaccatgtggtttctaggaccatcacaccatattgtaatactgaggccctatt

SEQ ID NO: 44346 - DNA, 334 bp, Oryza sativa
atgaaagctcttgtgttgcactgaagaactcaacttctaatcatcctatagactcaaaccgatctgatgcatccatgtacatgataccacgcaacaattacaatattgctgctaaaaacaacctcactgctcaatgccaaaataaaagtagttagcttgcatactaacagtacagaccagctctgacacaatactgggaattaaaaacctacatgagaataaaaggcatactcacatatcttaacagagctcactgaagcagatatttgacaaaatcaatcccatgcacagcaagaattaccacaaagaactacttggtgtgtaatattattcc

SEQ ID NO: 44347 - DNA, 292 bp, Oryza sativa
  unsure (1)..(292): unsure at all n locations
actgaccatattgtcattaatctgcacaaagatagagcacgctgaataaatgcaccatactgcataaatacacactgatacccggtgcttttaaacgaatggccccgttaatgcaaaaacacacacggaagtggatgcatttcatatcatcagaccatatattacacagtactgcgatacctgttgacattgacacagagactattccaggatgttgtaccatatgtttactggaagacaacagactcatccttaatgcatangagcacactatatcccgccgggatatatt

SEQ ID NO: 44348 - DNA, 421 bp, Oryza sativa
  unsure (1)..(421): unsure at all n locations
agctngtataaattatgtcacgcaatgtgcaatgtctttacctgctttatcactccatattggatatttattccttgaacaaacaaaaccattatcccatatatcttagtagataattgggtgccagactatatatatatatatattgctaaatgcattgtcaaaataaaaatatttcattgatggttgctagcatcactgaaccgatggaaaaaccacccaaggttatttgcatagggatgagaccatacatgtagaggtcttataattacaggatgtaagagtaagcacactctttctattctttcccgcgcttttgttgtatttgaaattgtggaacggtttttttgtcgctttcgatggaggttgtcaatctattttagtatagtttaaggatatcacacacaccaccttataatat

SEQ ID NO: 44349 - DNA, 420 bp, Oryza sativa
  unsure (1)..(420): unsure at all n locations
tatctctgctgaactcaccattctggatctatcacccatggaacttcagaattntatttacaccagatgaccattggtgatagtccaaacctacatttaagtccagcaattttgatttatttatttttcttaatttgcactaattatgttctgaacacctctcaggctgtgttcattcaaaggtgttgggaactaatctctcgcacactaaaacatagctatccattaacacatgattaattaaatattggtaattttttttaaaataatttttcttaaaaaaacttttacaaaagatacaacctttaactgttctgtntgggaagcgtgcatacggaaaacgagtgatgagttataaaaatactctcttttgtccaaaataaaccaacttcgtatgaaatatgatacatnctaatacta

SEQ ID NO: 44350 - DNA, 384 bp, Oryza sativa
ttatttaaatagcataaggccacatatagcagacaaacagcttgaaccttcttcactagcattttttttaaaaaaacaacagtgcattcattccatgaagttggggttcttttctctgagttggtttggcatgctctattatagttttctagttctttccccccaaactagcaacttcgttattaccctcttcaggagaaagacttgagggtggaacatcatttgcaccgtggtcgagcactagctgctttcaggcatcttcttggtaaaagagcttcacagttaaaatcagccaattgcagccaagtgatctcagtgcagtctagtgttcaagcagatgtacaattgatactagctcctttaagtcaaactgaacgacctatt

SEQ ID NO: 44351 - DNA, 422 bp, Oryza sativa
  unsure (1)..(422): unsure at all n locations
agcttcgaccaggtctccagatgcagtctatttggataagatgaaaacgatgaaagctgggtttggggtgtttgtgatttgtgaaggttgaaatggaagtgcaaaggtttcagctaaagccgtactgggtgcttgtgtagagaggactcagttgcatgggaaactgaaacgctcctttcttagcccttccaaattttttcttcaaacttccaattttttccatcacatcgaaactttcctacacacacaaacttctaacttttccgtcacatcgttccaatttcaactaaaatttcaattttaacgtgaactaaacatgcccttattcagtattaattgagtattaatatattggaatgttccccttcccaagggctccacaaatttctggattattccattttttatttaattntttacat

SEQ ID NO: 44352 - DNA, 412 bp, Oryza sativa
cagtgaccacgctttcttgcgtggtaagcctactgagggcattgttgaggtaccccctccttccttggaaaggagctcttggtgaaaaccttatccagttctttggatggatgacgacggcgtctttccgcgtcacgaccctcgtgagggtgtcgttgtagagtcttcgcgccgtgggtggttgttgtcccggtggtgatcggtctctcatagcgacggccggttccgtgcttggcttcctctctgtagcgtgtatggacggttggcacatggttcgaagcgtgtgctctggtgcacattctttcttacagccagctgttgatgtaaactatttttgtacatttcttctatcttattatatgaatgactcttcataattcggcaagaagcaaagaaatctgagttcaaacat

SEQ ID NO: 44353 - DNA, 457 bp, Oryza sativa
cggatcttaagtcacctgcggcatgcaagcttagctgcactcctgaatatgtatatattctgttgattaaagctatttttggtaggttcggcttctctgctttggaagattgcttcaccatcgggcccggccagtgtgtgcatttttttttcttcatcatctttgcgaggaaatgatgcgcgtaattaattacgaattaacggttgtgggttttagatctgcggcatttgcatctacctgtgctcccactcacggatcactctggcatgccgatgggctgggcccaccgtgtcttctctttgacagatttgtgtcgcattactgacgatcgatgatgcctgatcccctcctctggtattgcatctatgatccagtacccaaacaaaaattttcaccctatcacatctgattagatatatcatagagtgttaaatatagaaaaacaaccattacatag

SEQ ID NO: 44354 - DNA, 428 bp, Oryza sativa
agcttatctggtgactaaaacacatatcttatagcttttcttatagataaactgaaagcactatcaagatggtgcataatctggaattaaaaatgtctcatttcagccatatcgctatttatgtagaaccgcaagcatattcttttttttgctatcaaaacttatttcatcgaatatatagaaaaggtacataggcacaatttcttttatttagacgctcaatttgaaaaggcagaacacagtattgccctaaaaagataatatgtctattctacagagataactgagtattttttagtaagtctcaaaatttataatccaagaccaaattgtagaacaaactaacagaggtattaatagttaccagcatgaaagctggttatattgaactgctttccatggttgcagggtgcaaatcgaaaaatcag

SEQ ID NO: 44355 - DNA, 424 bp, Oryza sativa
agcttgcttatgataaaataaaagccctatttcaataatttatctaataaaaattagattatttgatgggaactgcaaaaactagcaagatatagtttacataagtaacaacctgtagtgccataactacaccatctattatctctggttcaataagaggctcgtctccttgaatattgacaacaatatcataatgctcgtttagcttttgaagagcctcacagcaacgctcagatcctaaatgaagcatatgccaacgaaaaacatgtaggggttaatcaagtaatcatggaaagggcaaataatgacaaaacaacataagctgtaccatttctgcatgattctgatgtcattattacatcagctccgaatcctctacaacattcagctattctttcatcgtccgttgccacgactatgacac

SEQ ID NO: 44356 - DNA, 373 bp, Oryza sativa
tgagctccctgccaatctgctctacatgcatacaattactgtactccacacggatgcagctgttctcctttaactgcctacaggtcgtcttacggaaatcatttcatgggaatactcaacaaatattgtgcgccctgagtataagcgaccttgaatggcattatgcgcagcgactgcctgtactttctccctgaactggacatacgcattgtctatcatgtggtcagcaaggatatcacagacattgatggtatcaatcttaccaaacttgcgtaggttctcatagatatactcatagaaattctcaccgagcttctgcctctttatacgagcaatacgatgggcttgagcatccactcctggtgtgatcata

SEQ ID NO: 44357 - DNA, 434 bp, Oryza sativa
  unsure (1)..(434): unsure at all n locations
tgcagcatgcaagcttgtgacgaccaaggtgctattatagttatctgctcaatgaggactgaatcggattttattaaccattcttgtgcttgcattgcttcaccataactcaccttcttttgcatgatcataatgttactcatgtctctgtatgccgtgagttaattatgtgtttaactaagtcaaatattggtattagcattagagcgggattatcttattttttactatgatgctctattcaattattttggttgttcttgttatttaataaggagcactataaagatgtgatgtaattattgtgtattaagggtttcgatacaacaaacaaacactcgatgcctatttaaaatcattttccttagtgtgtttgaattcatatacataatttnttctctcgttgacgacacccaattataaaggaagaaaaa

SEQ ID NO: 44358 - DNA, 251 bp, Oryza sativa
ataaaacttcagcacgcacacctgcaagccaggcggaatttcatctatcacacttcgcagaggtccgatggatgcaccaccatactaggtctgctgtaagcacacacatactcactgcgtctggcatgcgagagctgcagcctaacaccacatactcccagcagctaggcgatagtgatggggggacggaacccgcataacatgcgactatggtgcgttcgaggaaccgctattgacactaacataccaac

SEQ ID NO: 44359 - DNA, 431 bp, Oryza sativa
  unsure (1)..(431): unsure at all n locations
agctnttgtgaaaagaaatgggtggtaaatccaaaatttacgtgtaccaacgatagtactttcccctgggaggaatataagggcgactcgaatatgcccggaagttaaccataaaattgaggaagttgacttcctagccaaaccgatagtcctagactcacaaagcttggacatcatcctatggatggattggttggctaagcacaaaggacagatagatcgtgccgaaaagtccatcaccttgcaaggacctggaggaaagcaagtccgctttacctctaacacccctaccgcaagtcggtctatcctaacctgtttacaagtcaccaccttggagtcggtgcccatagtctgtgaatatcccgacgtatttccagaagaattaacgagtatgccaccagaccgagagattgagttcgccatagaactgg

SEQ ID NO: 44360 - DNA, 439 bp, Oryza sativa
  unsure (1)..(439): unsure at all n locations
taagcctcatatgtattgctaaggggtggataacatgtttgaaactntgaattcgtaattttaggctcaagaattcaatatttgggttactatgtcctagtattcgatgtacacccaccagctgttttttgatggatgagtgtacacccaccagctgttttttgttgggcaagggcatatagctatcagatcgagagtcgaaactctgtgggatgacacaagatgacgagcaattaaacaagaacatgtcgaatagtctcacattagttatgaaacggtaaaggaccttatgtgggggagcccctcacctcattggttagcttttgggctgaaaaagaccctttacgatcctacagaacaaccaatcaaacaagcagagcaagtctggaagtgtgttctactatgtcatacatctgcangattctgatttcatctgatc

SEQ ID NO: 44361 - DNA, 383 bp, Oryza sativa
gctctttccccggatctaagcaccgagcatgcacttgctgagtaagttttttttggatgacttttttcagaaagtttgaaattttatctaaaagttcaaattctacgtatagaaatttctaattagcagtaataacaaggaaacaatgttcatgggaaaagagaaaaagaatagtcaccgtaattcaaatcgtgagtaatcaaaacctgattacgctaatctgatcttatctgctgcccatgcgaacgtgagtatgtcctgatgtccccacctccctgcactgcgtagctgtgcaatcacgtgatgggctgggacggaaccgcgcgcgaacttctgtggcgcagacgcgcgctatacgtaattcgcactgggggaagcgaatg

SEQ ID NO: 44362 - DNA, 460 bp, Oryza sativa
  unsure (1)..(460): unsure at all n locations
tgacgcaacctctacctggcgcgccaactgttataactatatttcggcaataataaaaggggtggctatcaagctggaaaagtgtatgggtttggagacaaaagaattatacaggttcaggccttcttattcaagaagtaataccctactcctgtccggggatgaattcgccgagggtcttcttaattgtatgatttggagaaaatcaacatgtgcccctagaggcacccggaccccccttatatatgggaaggagtccgtgttacaaagataatctatatccctaacggaatatgcagatacagataaaatacagtcgtaaccgactaagtctcaaggtattttcttgatgtacaagttgagaaacaaacccgagacacaaataagatattctatctatatntggtatcctgcattcagtccaaataccatcgccgtgtagatatgggatattcataat

SEQ ID NO: 44363 - DNA, 423 bp, Oryza sativa
agcttgcatattataatctataatatatttttcataatagttgacatcagaccctcagattatgaggcagcaaagagcaaaccttgtttcgctggttattgttctcttgacatgacctccctctgcagtattcacgcctttcatgtgaacttgtgtactctgattgccaagttccacatcatgagagtcaccctcaatttcctgggccatgccacttgacccttggctttcaccttgcccttcctcctatacaaataatcagcggtttgtattacaatactacattgggaggtaaataccaagttaacaaaataaatgcagcacatgacaattaggaataaggaatcagtcagtaacaaaacatggcaagcaatcagaatgagtcgcagtgcagcaccattatcaacaaatgcacagcaattc

SEQ ID NO: 44364 - DNA, 368 bp, Oryza sativa
cttggccacctacaacaaaacgggctgtttcttcttcacaatcttcatagaatagcaatctgcatcttcagacttgatcccatctatacatcaaatgattacacatgctgaaaacttcatgttctacgactaccaattctgactgaaagatcaatatatgttcattgtaatgcaggggccaaactacttcgagaacgatctcgatgtccaccgattcatcttcatttcaaagaaagggctcgaggccttcacggaacgattgaaacatggagttcttgaacttggcctgacaatcaggtacttttcttttgctcttggcctgaaaaacaacttgctcttgactgaaattctgactcaagcatgttctg

SEQ ID NO: 44365 - DNA, 378 bp, Oryza sativa
  unsure (1)..(378): unsure at all n locations
gcttttaataataatttcctttttctaccgagggacgaatctccgctggagcatatttttcttttttttacgctctaattttcttttctttttttactctctaataattttctccattggttctatataataaaaacttccaatattttttatcattcctttcttttacgctctaatcaccaaaatatgaattagagataataattcataataggttgctcttttgttataaccagtctaactgcatagttgggctggcttactcgagaagcttacaactcngtggtcctgtgttctaatctcggtttgtacgttatttattggtttttcttttctttcttaccataccatagtatttcacaactcacttatgttctc

SEQ ID NO: 44366 - DNA, 290 bp, Oryza sativa
acactaaaaaccagcttatactgtacgacgacccgttcttattattagaacgccaaaaaatcctaacgccatgcatgatctagaagtacccctaaagctaacttccaaactgtcgcgaatgatcacttacagaaccttctcgactctcacatgtaggattagtctacctgcacgacacggaccggataccctacgggacaaacgacacctatacttctaatccccaaaaaaacttttaatcaatcccttctctgaccacccatttctcctagctacaaaaattttcgcac

SEQ ID NO: 44367 - DNA, 432 bp, Oryza sativa
  unsure (1)..(432): unsure at all n locations
agcttgntggtagtaatggatccaaaaacctatattttgactttgataaattagctgaggcttgtgtttaatatttacttactttatgcctcttccccactagcctgaatgctactaatatttgttggttattgcagattacttcaattgtcacaaggaatctcaataaaataattgatactaattattaccctgttgagactgcaaagagatcaaatatgaggcacaggccaatcggaatcggtgttcagggcttggcagacaccttcattttacttggcatgccatttgattcaacagaggtaaatttttccaacctaaaaatgtggttattccaatctatatatacttcgctgaaatgcgatgcaatgatcttttcacgctcagcaattgaacaaggatatttttgagactatctattatcatgccttg

SEQ ID NO: 44368 - DNA, 430 bp, Oryza sativa
tatatgcagttggttctgagaaataaaaagagaacacaaagagttgacatggcttctctcaaaacaagctttggtgcctcaattccaaaatttcaacaaaatattttttgcacaactattgtatttggatcagctgtccagttccatgtatttgtttagaaaacaaaaaagatagtgatcatatgatgctatgaattgaattagtgatttgactgttccttttttattagagggtaagttgacgaagtattcttaaagtggtctgatggatccctgcctattcttgaatgaatatttaattatatgctgtcatttctcatttagttactttcaactaatactacgtgcacattcactttttcttctagtctagtattccacgcggcaaagcaacgtgtactttctagttaaccaaggcctagtttagctg

SEQ ID NO: 44369 - DNA, 434 bp, Oryza sativa
agcttggtcagtgaaatgcctagtaaaaatgttatctcatggaatgcgattattggggcgctagcgatgcatggacgtgcacaggatgcactaatgttcttcagatctatggtatttgatgccttcccccctgatgagataacctttgttgctcttctttctgcatgtaaccatgggggcctactggaagctggacaatattactttcaagctatgagacatgtttacaatgttaagcctggcgttgagcattatgcctgcatggttgatctgcttggccgtggtggccagctagcaaaggctgttgatctgatcaaagacatgccaatgaggcctgatgttgtggtttggggtgcgttactatgagcctgcaggatccatggacatatacagatcggcgagcaagtaatcaaacaattacttgagctggaggg

SEQ ID NO: 44370 - DNA, 297 bp, Oryza sativa
ggaccttaaaactcagctattaccttttgctttgtaaaaaataaataagagagcctgacttgtcattcgctctgaaaacttgcgaaaatattgtcatatatatacagggtgagaatggccttcacaaatcacaatggtttacaagtgtacaacacggctcatggccattatacctcttcttcgtgaaccaatggcatatctatctctgcaaactacagagccgctttctatttgagcactatgcaacacttctccttttcttttggactatttaccctctatatgatcctacatctt

SEQ ID NO: 44371 - DNA, 426 bp, Oryza sativa
agcttgggggtttgtgacggtcattattactatattgaccgtcaatactacccaattaatgaagactagatatgcttgcaatgcaaaatttccaaataaaatatctactcccactatatactatgctactaacatgtatgcaggagaagcacatattaatggaggagaatcaacagaaaatagacgaacgatcaatcaaacgctgtcgagaagcagacttgtagatagatgggctcataacacagaattaacacgagcaaacaagcccaaaattcacaccactgggctgaggatccaccgagagatacacctgccaaaaagtgggccaattgggccagtccagggttcggccgaaccttgtgtttggtcaaacccaaaacagcccagatggcctaaaaaatccacaggctggtagttatcgaccat

SEQ ID NO: 44372 - DNA, 452 bp, Oryza sativa
taagctcagcttaattagccacggtacgtagattgtactttaatggcggtgaagaaacacaacgtcgccatgcaattacaagtggtagtactgtggcttgtacgactagcattattttctgtgatggtgtcgtccgctccggcggacgtatcggtagcaccgccgcccgcggagtgcccgagcaagtgcggtgacgtctacatccccttccccttcggcgtctgcgacgactgcgcatggccgggtccagatgacttcaacgtcacatgcaaccatagctttacccctcccagaccctactacagcaacatggagatgaaggacatctcgctgccgaagggggagatgcgcgtctacacttacgtgctgcaaaactgcttcgacttgtccaacaccagcagcagctccgagtccgacgtaggctcgtcatggctcgacctcgctcggacgcc

SEQ ID NO: 44373 - DNA, 422 bp, Oryza sativa
agctctaagcaaataaaccaagccattcttgtattcttgtgtgcactaaatgcattctgtagtggtggcttgctgagtacgtttgtactcacccttgcttaatttaaatcttttagaaaggagttggagtcgaaatgggcccaaccatgatgccaatgggctgagggcctcaaaattagtgtctgtcacgtcccaaaacgaccctaaaatacatcctctaaattatgcctagaataattaaaatctgtgtgaaagcctccaaaaattaaaatgtgcaaagttaaaagtcaaataaggcttataggatttttgtttattttctaaaagcctaaaatgtgtaaataaattttagtggaatttttagagcacaaataataattattaagaaataaacaaagtttaaatgattctataaaaagaaa

SEQ ID NO: 44374 - DNA, 413 bp, Oryza sativa
  unsure (1)..(413): unsure at all n locations
tggtggacttgggagaagctcaggtcatcaagccgaatgccattggaccatccaatgatgaagcctagttttgttagacttttaaggctgctagtggcactctntaggggcatgtgtacatccctttatcagcccttctattntgtgtttaagatatgtaaactctatgatggtactaagtgttggtgtgcttgggaactgcatggattattcctgcttgttatctttctctctttaagactagttgtcaaatgaattcggctatgagaaattggaatgtcctctgctggaatgttaagggtctgaattctgatgacaaatggttagccactagaaataaaattgaggaaagtggttgtgctattcttttgccttcacgaaacacaaagatcttcttttgatcattcttacat

SEQ ID NO: 44375 - DNA, 430 bp, Oryza sativa
tctaagcacctgagctgcagcttcaagggttgtcaagacacacaacttttccattgaatgggctctcgatggagatggtaatatatgaggaggaacttcacctcctagatagtctgctcctccatttctctttttgttctttgggccatcacattaatctacttacctgaacttttgccatgctctaatcttctatatcatagtacgcaagtgatagtagtctttaagaacaaattacaggagccttcatactgaactgtttgcaagttctcatgtgcacgatcctttgtctcaacattggacgctccttttttctattccatattgcaagcccgccaggaaggttaaaataattggaacaaccccttactcatatggaaatgaataaacattttatagttgatttcaaaggtacaagactcatttgctc

SEQ ID NO: 44376 - DNA, 238 bp, Oryza sativa
  unsure (1)..(238): unsure at all n locations
ttattaactttcggagacaaaaatatgagatctnttactttcctcttgtaccacaaatcaacactaaaaatcactacttatgttccattttaattgtcgttttggatatggatatggtctctaatcttatgtttcattgttatatatatagatgtttataaaaaggaaaaagtacgaattaccccctgaattatcgtggtcgaaccaattatcctctgaatttcaacaacagatattg

SEQ ID NO: 44377 - DNA, 417 bp, Oryza sativa
caatgataaattcatcgcccccgtagctgaatacataatcactactgcggacgttgtcataaaaggcctgagagactttacgcagaatttcatcaccagtgttatggccccacgtatcgttgatctctttgaatttatcaacgtcaataatcagcactgacagcggtgtaccggtccggttggcatgggcaatttcacgtttgaagatagtcggtaggaaacggcggttaagtaatttcgtcagtacatccataccgacttcgtggcgcgatacttcttcaaacaattcacgcagcaaggtaataatttgcgatacggtatttcttatctgtaataaaaatttcacccgcagacttctgttattcaaattactggtgttacgcatgggttgaatgaaaaacccgccaaatcctgaat

SEQ ID NO: 44378 - DNA, 431 bp, Oryza sativa
  unsure (1)..(431): unsure at all n locations
agcttaacatgcaagtatatagnaattatatccataatttatttctttctaaaactaaacatatacatgataaatcatcattctcaaatcatttttaaaatatttcaattcaaatcatttcatcatttcttcattatataacatatatttgcagcaaagcgcagggcatcacctaatatataccaatgaagaaatttttagcaaggaaatatagggtgtgtttagttcacgtcaaaattggaagtttggttgaaattggaacgatgtgacgtttcgatgtgatgaaaaaattgaaagtttaaagaaaaattttggaactaaactcggccacaataccattaggaagcgtgcatgcaataatcaataagaaaaaaaaatgaacatgaccttagaccggagcatggtaattccataaaaatttttgaaactca

SEQ ID NO: 44379 - DNA, 415 bp, Oryza sativa
  unsure (1)..(415): unsure at all n locations
tattacgttntataaatatattctaacacgacttttgttgtttgaattttgaaaaccatactcatctgattaagatcaacctactactagttcttctaagaatttcaagaagtatttgcattacaaagtaagtgatgttatctttttttttttgaaaggaaccagcacaagaatgtgcttattcattgaatatagcacgagaaaaatacaacctctaagggttaagaaaaagcataaaacaaggaaagctgtacactatacaaactgcgggatgatctctccaaaacgcttggcgcctgctaaggcccacatgccagcctcttcttttatcttttaaaggagatacgaagatgcggcttccttatgatcaaatatcctcctatttgcttcttccagacttccatacgatgagtat

SEQ ID NO: 44380 - DNA, 415 bp, Oryza sativa
  unsure (1)..(415): unsure at all n locations
agcttcgctatccgntttaaatctcacctgtgctggttcaacgctttgccttctgaattacaaccagaactttttgcaaggggtggaaaccgaatattcgctggcatttattcttgcggtgctgatttcctttagcgtttgcctgctctatatggtgcgcatttatcatcgcagtgaatggcttaatcgccgctggcatttgcaggcgctgacagatccgttaacgctcctacccaactttcgtgcgttggaacaagcgccggagcaagaggcgggcaagagtttttgctgcctgcgcattgataatcttgagtttatgagtcgtcattacggcttaatgatgcgcgttcactgtatccgctcaatttgccgtacgctgctgccgttgatgcangaaaacgaaaagttgtatcaa

SEQ ID NO: 44381 - DNA, 422 bp, Oryza sativa
  unsure (1)..(422): unsure at all n locations
agcttatatactttattttttgcgattcttgttagtagcaatctgcgttatgtctactatgaccattgaccatattactgtacctaacgatttgaacattatatcctgnggaaccaccgctattgttttgtccctctcctgagaacctcttcaccaaaagcttgattcaatctacctgttaaaggtgaacttgaatagttcatctgaaacctgaatttcgtctttgctcaaaaagagcttaatggatttcaccaataaaagttcacgcagataggaattattgtgcaaattgttccataggtcataatcgaaaattttgttgctagatagtcaccttcaatggtagttccatgttttctttaatgagtatgacattatgcctctattgcagttatgtaacatgcggattcttgaaacaacat

SEQ ID NO: 44382 - DNA, 346 bp, Oryza sativa
  unsure (1)..(346): unsure at all n locations
cactattaatactaagcttctgccacggcacctgtctatacaccaccgttgtactttcttcttctatcgacctaancttccccccaggcgtcccgacatctgggctcttcatgccgcggggcctttcttaactcccactcgccacggtctcctacttctacttgacgatgcgcggtcagcgctgccaaccccccccccccccccaatttggccccaagagggctagatccatttccagcggtgtcggaaccactatgaccggcctcggcggcgctgaacccagtcttctggttgtctgccacccctccgctcaatgaccggttgatgccctatccgccaaaccttg

SEQ ID NO: 44383 - DNA, 425 bp, Oryza sativa
agcttaagaccaaacacaaatacattgcattgtgatgatgatgttgatggactgatcaccaataccttggttggaataaaaaataaccttgacaaaccaatacaaactgcagcccccccagatccaaatgctcctctatggaacatgctcaaaatgtcctataacctgatgataagatgagactgggactacacctttgcaagccagaattccaagctcatcgtggttttcttataagcatgggtcaagaaaaccttgagcgttgggtctacaagttctgatccggtgatgatccaagtttctagtgagttacaagtgcatattgggtgcaaaaactattccggggtgattaaggtctgatttttgttgcacccttttgggtatgcaattgctgcactatgtgtgtttaaacaattggtaaatat

SEQ ID NO: 44384 - DNA, 450 bp, Oryza sativa
tgaatacatctcgtttagaatcaagccacattccacagagtatgcatgtgccaatcgaaatctgggcatccaccacctctcaacccttaaggaactcagtgtttatatattcactgccaaggcgcgagggttgaggaggtagaggcagttgaggccgccatcaagaacgaagcaagcctacttcccaactgctcctcacaacatatggtcagattggctgggaaaatgatggtgacagaaggacatgaggaacggggctactccatggagcaacaagaagagatcaccagtccccccataccgagcacaaaataacccctgctatttagttcatcatctgcaatttcatctattcaaggtatataactatagtacttgataataatcaatggcttcccagaggctcatcgaatcattatgtatcttattaactaggtacgtatacttctg

SEQ ID NO: 44385 - DNA, 437 bp, Oryza sativa
tgcaagcttttgcttgatatatcatacctgttttattatttgatatagagtagtatcggagtattagccgatatatgctagatctatctgatcggctatgctataaacatatatagtcctattattaatatatatttcgatctaagtgatttatactgtctcagcatggcgaccgatctatcccaatcacttgatttaaatatatatcgatataagaactatatattggtaatatctacagccgatcgagtaggtttagttctttattatttatttatacccgccgatcgattcacgtatgacatcggctcaaagataaatgatatgtcatcggcacatagccgattggctatcatttatagatttaaccgcgggctctctgtctctattttcttggtgattgcaggatcaaatcaactggcacgctaacacacccg

SEQ ID NO: 44386 - DNA, 469 bp, Oryza sativa
aactaagcctttaattgatagacaaatatactccactatctcttctgtatggatatgttgaaagggcaaaacagaatgctctggatataattaatatgaattctccacgcaagtctctggtattgactactccataggaaatgattaaatgttggggtagtacttttctaatttatactgcaacgtgatctggcaccgatcgatgtcataaatcataagagtaaatagaaacttgaaatattgttatgcatggactattagagtgatcttttaccttgcaaaaattaagaaattggaaataagacattcttgtagtagtagtctggtagatgtttatgttacaaaaatttgttctctcctcgagctatttattttttgatgggttaaatatttgatgatggcacatttacttgtgagcagagtccacttataacgaacgaggtggatagtctaatggttgcacagaaca

SEQ ID NO: 44387 - DNA, 371 bp, Oryza sativa
agctctacaagtattgaaactcaacaaatgtttataatatgaccgaaaccgaaattacgatcaatatgacctatgtccagaagcgacccttcagcaaaactatcctcaacacaaacgtgatcaagccagcggaaagaagtgactttaatacagcagagaagagtgactgctgaagcccaaaactctccagatgaccaaggtttccatcaagcttcaattcttctggtgccaggcctccatccaaaacttgagcttctattcttctggtgctaacccttcatccaaatcttgagatgtatttcacttgccacctaccttgaaagactgccccccaactctgcgcccaactgatggctcggataatggtcttg

SEQ ID NO: 44388 - DNA, 311 bp, Oryza sativa
  unsure (1)..(311): unsure at all n locations
ctatacacaactcaagcttctcgccagaatgcaatacctataaacagaacacttttctttgttcagtactgtaaagcatganactaaaccaaaccagtccatgcagtgaatgagaagctaaagcaagacaatactattatttctttgaagtaagaaaatattgaaccattaattacttttgtcggtgacatgggaccgggagtatcatgacttaaagacttgaggcagacacgatcacccacgtggcctaaccccctcggggggtcgggcccgagggtgatacggccgcccttctctttgtctccccgagg

SEQ ID NO: 44389 - DNA, 425 bp, Oryza sativa
  unsure (1)..(425): unsure at all n locations
agcttctttatagatgttttgttatttgaattttcaaagatgtagtcaactttaggttgctcgcgtcatattttataaagaagtcggttttatcacttgagtcttgtttactcgggggtttataatgcatatgctattattatgctacttaggtggcttaaaaccactcagttggttgatttattcattatctgactatatatttagtttgttcaactaaccacataggcggaggctacacctattatgtgcatctagtcgatgcacctgngtatatatttaattggtttttattcttttcagcctttcacaaccttctgaatagataaaagcactcgggagactatgtcaaagatgatagaaacactctgctctggagtaatctagctcgggagaaaattattttttcgactgtgaaagtctca

SEQ ID NO: 44390 - DNA, 431 bp, Oryza sativa
  unsure (1)..(431): unsure at all n locations
cggggcgtttgttgacggtcattatcgaccaatnttgatcgtcaatactacccaattaatgaagactagatatgcttgcaatgcaaaatttccaaataaaatatctactcccactatatactatgctactaacatgtatgcaggagaagcacatataaatggaggagaatcaacagaacatagacgaacgatcaatcaaacgctgtcgagaagcagacttgtagatagatgggctcataacacagaattaacacgagcaaacaagcccaaaattcacaccactgggctgaggatccaccgagagatacacctgccaaaaagtgggccaattgggccagtccagggttcggccgaaccttgggttnggccaaacccaaaacagcccagatggcctagaaaatccacaggcttggagttatcgacattccatg

SEQ ID NO: 44391 - DNA, 423 bp, Oryza sativa
  unsure (1)..(423): unsure at all n locations
agcttctaaatagattacaagattatattattagtatatacgattacattgtcagatgtgtaaatttttcttgcaaaattcaaatgataataaaagtagctttaatttcctccaagcctgttttgtttgatattgctaatgcaatgatatgacaagaccaaattagatgcagcacatattcattggtagaatgaaaaagcaatggaagttatgtacaagtccatatagaaaactaaataaaaaggtatttattaattgctagtacgtcataaattctggtagaaaatcaagaagcataaactcaaaaaacaaatctgctagagatcttacgataagttgcaaacactttttttcaaaagtatatcaacacttactttagacagaanaataaaaaggaagtgaagcctgtgtaacaaatttgat

SEQ ID NO: 44392 - DNA, 467 bp, Oryza sativa
  unsure (1)..(467): unsure at all n locations
ntcgccatagagagaaatcgattgattgactangagtactcgtnttttaaatatatgatactgtttggtcaaatttttactttaattatcactaatcacaactaaaaggaattttacaagctataggtttatcttttcagagatggctgaaatttttaaccgcctatggagatggctaggctgccataggcttaaaaaccgcatgcgaaaacctaacaaccgccagggaaaataaatatcaaatcataattttgagagagcttcttccgaaaatcgtttgtaaaaataggttcattnttatagttatcttaaggtcaaagctttaaaaattgattataagagcccgcacttgaaaatataagcaatactatcttgataaaaccataactattctatatgaaatcgaatgataagacgttctatatgaaaattatagctctcgacgagatatacaacactatagctga

SEQ ID NO: 44393 - DNA, 431 bp, Oryza sativa
tgcaagctggatgaatcagaaacaaagttgttatctttatgcattctccctctgatgagtaccatcagaatgacacccaagctgtacacgaaactttcgttctttgcaatcccggcttgcatgtaaaccgggtcattgcagcgagtcatcctcaatacaggaacgatatgatccttgtccttggtaatgcttctcgaggaaagaaagcatgaaaccattggcatgaaattttcatccaacagtacatcgtaaggtgtgagaggtccatgtacgatgcctccaactgttgaagaatggatgtgtgccagtgcttctgaagtctcagatgcaatcttcaggcgtaatggtagcgagaaatatccaggctgatgatgtacaatgtcagagagactccccttagcagtgtactcatgcactaaaattggaatata

SEQ ID NO: 44394 - DNA, 440 bp, Oryza sativa
  unsure (1)..(440): unsure at all n locations
tggaataagaacactaatgcgatgatggggtcttttacttgtttacagcaaggaagatagtgtctatgttggaagacttgttaaccaataatgcttantgcttaatcatcactactacgggattagatatcttggtgtagagctggactccactgtgcaggattattataagaagtcaataattcagtgttgtacttttcaactgatcttaccctgcacattttccaaccgtggccatcttattcaaccattctcagagacaacttatctctggaaatggttgaatgtgtggatgatgagaggatggctaattaagtagccgactagtcaagttattgtcttgaagtcttgaagagatgcttgatttgcgtaagtgtgaaccaataggagacttcatattgaagtactctagttatttacagaaaaatcatgccaaactc

SEQ ID NO: 44395 - DNA, 429 bp, Oryza sativa
  unsure (1)..(429): unsure at all n locations
agcttccgctgttctctaataagtctattttgccggtcggcctatgtaattattaagttgttgtaagtcttaagtttctttcatcttagntgtgtttgctatgtgtaatcatgcttaaaatgaaagtgtgaatctagtgcacatcctgggaactagattcacatgagtatgagttatgaatatttgagaggttgtagatctttagccatttttgtcaagtctcctgaatgtgtaacacatctggtcgccgccttcgagtggtttgacgggcacatctcangctgaagttgactggcaggctaagggcccagcaatgtctccaatattcctctctcgaggtgtcggatgtttcattatgcttgtttgatgatatgaattattcacttcatctctcgaatataatggaaggtccggagagcctacgacagc

SEQ ID NO: 44396 - DNA, 410 bp, Oryza sativa
  unsure (1)..(410): unsure at all n locations
ccacaggactcaacaagccacactggccaaagcatgattaatgcaacgcggcacaaggggtaataatatccgngttaagttatgcagtaaacagcatttaaaagtcacttaattgcccaaagccattttataaagacgatcctagagctacacagtattaggaatcaatgccgcgaacccacacgaacctgccttaacccaaggcctacgatgattcacaccgaactggcaacccgaccctgggtaccagctcgttccaagcccacccaggccaaccattccacatattagttattaagcacgtgttaagaatttaaaccataacttgggtacattgctatgcttgcccataaccgacggcgcggctattcgaatagggtttactctgatcataagtgtacatctttacc

SEQ ID NO: 44397 - DNA, 312 bp, Oryza sativa
cgcaccacacgccgacgaggagggggccccacaccaacaacaagacacgatccaaaccatactgtgccacaaagcccaggggtgctccccgacaccaccccggagaaaacacaagtcgctcggcatcacggcgccccagaaaagacagacactcagcccagggggcccataccacccacgaggtacaactagacacacgcaccgatgaaaaaccaaggaaaccgacccaaatggcacagcgggaacacagacaccgggtacggacccccggccccggttttggaaagaccacacaaccgcaagcacccacac

SEQ ID NO: 44398 - DNA, 345 bp, Oryza sativa
cttttcacgctctatatgcatcgttacatgaagccattcaccgtccagacagcaccaccgccaggtaacttatgccagtgtgtgcaggtttgaggatgataaaaccctatcaatattttcttttctcttttaatggtattaattgatactgcgtcacatttaataggttatgtggtagtacgtaattaacctcaagatataagcacgttatatttcaattatatgatactcccttcatttcatgaggtgaagtcattctagcattttccacattcatatagatggtagtgaatctatacgaatgtggaaaatgctaaaatgatttatattatgaaacggaggagt

SEQ ID NO: 44399 - DNA, 314 bp, Oryza sativa
agcttgaatcagttggaagtaatcgttgttattacttgtgtacaattaatattgctataatggccaatttatcatcgaaagacaaacagttctcttaaacttggacaaaaataataaagtaattactccctccgtcctataatataatggattttggagggatgtaatacattctaggaccatgtatcccctgctttgattgtcaatattgattttgcccctatttttagggttttcgttcttacccctacttttttttaaatgaatcaactcgttgcccctgtttattaagttcaggtaacggcgtttaatat

SEQ ID NO: 44400 - DNA, 444 bp, Oryza sativa
  unsure (1)..(444): unsure at all n locations
ttacttactgatgaacgagacctggtctccgtttatcaccaagtcatcttggccggaatcatggcacgtaagttttgacccactgttataccaagtaatttttttgaaggtcttctcattaaaaatttggtaaaattaacagtacatgaaggaaaaaaaaaagagaggtacagccattgacttgtatagcttaaaactttagaaagtcggcgcgttcatttatttatctggtgatgcttcttaatggtagcattacctgtgttggaggattgaaattgacctttttgtaagaacaaatgagaggcaggtggtagatggccacctccagttcgtggagtatatgtaggaagttgacaaatctcgagctctgatttgtntgaatacaacaagtaggccttagcttgataatcatgctaccagtacaataatatatatctatcctgc

SEQ ID NO: 44401 - DNA, 413 bp, Oryza sativa
  unsure (1)..(413): unsure at all n locations
agcttgaggtagagggatcgtctgcttgtgttgatgtaagtggttctacttgtgttgaggaagaggctccttgttgtggctccctaggacgtacgtccccaagagccaatcttttgattgcttcgctcggatcctcctcttcacctaacacatgtgattcaacttgctctacttgagagccattagtttcgtcaaatgtcacatcacgcgcgatctcaacaatactggaggttttgttgaaaacgcggtatgtgcattcatttgacccatacccaagcaagaatccctcattcactttaggagcgaacttagaggatctagcctttttattaagaatgtaacacttactaccgaaaacacgaaaataagagacanttggtttgttaccggtaagaagctcatagggagtcttc

SEQ ID NO: 44402 - DNA, 371 bp, Oryza sativa
actttgattttcttactttattcagattaatccaagaactcgtactatttattggataaatatcttaactccctcctttcacttgtctttagatgccgcgctacaagcctaagtacttgtttggtactgagggatttgtccaggaattgcgtacgatgttctttcttataggatttgggactgcccctttgtatgcccagattcctcatgatcgtgatgaaaagaagtgccgtgtcaaagtcaccttgaacagtaatcatgaagatattccattggtgatgtttacgctggagggggaagctacatttatgcttgccaggaggtggcaaggatcgctatacgaaagctacgcgaaagctaccatgatcggg

SEQ ID NO: 44403 - DNA, 367 bp, Oryza sativa
ccccaatgccccaacgacagacttatccgagactgatggagctcgatcgatcgccacaccgtaccttggcccttggacacgggccaatttgtcagctgggatgttctctaatcactcaaagtgaacgcgtactgtacctggctccactgattttcagtaaggtttatcttttacggctctagtttttgcttaaataagccaagtcctttcgaaaagcaatcacaagtattactgtgcgctaaacgctagccactaagcccagggatagcggtgcacgagcacgagtagccatcaggccgacgcggcagcatcccccggacccgggacccccaccaccgatccgtcccctagcaagtgcggatccctt

SEQ ID NO: 44404 - DNA, 467 bp, Oryza sativa
  unsure (1)..(467): unsure at all n locations
tctgaggctgtctaaatatgattcgtcaccctgcatatattcttatttttaaatatctctcgaagtgaacagtattgaacagttatttaaacagtaaactgaatagtgtttttgaatagtaatcagccgaataaacagtaaactgaatagtattcagccgaataaatagtgttttgaacagtgtatattgtctgaagcataggtttgtctgaagcatacgtgtggtgtatattgtctgaagcataagtgtggtatcagagcctggtaatcatagagaagctaaatntagaagctaatattggagagttaataaataccaaagataatatcgacataaggtgtagactaagccatactgaagaacatagttggcactctaataatagccaactaaattaattgtagatcaatatataatttctatatacattggagttagagacaagaagaattatagcataagttat

SEQ ID NO: 44405 - DNA, 341 bp, Oryza sativa
  unsure (1)..(341): unsure at all n locations
acgaccggcggcatgtgacccacagaccccttcgtgtatgtcgaggaggaggtgtttgccgttgtcggacgagacgcatttgagaagtaccccgtttggcgccttcttgtatagatcgttgccgatcatacagtagatttttgcttgacgggttattttatcggcttctgcattgtcctcgggcaactcgtcgctgcttatgaatttaatgagtggggtccgccagtcgtccgtggtctcgatgtcggcaacggcgcgctctgcctctgtagcccttgagctaatgtcggnggtgactgggctatcttcgtcgtttgcctctatcactgatggctgtatca

SEQ ID NO: 44406 - DNA, 421 bp, Oryza sativa
ttttgcttagcgaatcagtggttttagcttgcgcaaaaacaagatccttcaaggagggctggttagagaagttaccgctgttgttacctccttgataatatgggcgtggttggttccacccctgacctccttatggacggtacccgttgttgttgcccatgtacatcgcctcctcacgggtttccgggcagtcgttcccaagatgacccgtgccgccgcagacttcacacgtgacgtgtgagtccaaggccttgacggtgccttgtggccttttctcgtggtcgtccaagtgtttcatgaggagttccagcttggcagcaactaactccgtctccttgacggtgtgcatgcctcgctgacgggtctggagtcgttcctcgctccaacccatattggagaccatcttctctatgagttcaac

SEQ ID NO: 44407 - DNA, 387 bp, Oryza sativa
gccattgccgccgccatccgtgctctgttcgtcgtcgccggtcgacgttgcgcgtgtcggaggagccgacacgagcaaggacgcggaaggggactccgggcgcgccctctcctttctctaccccgtcccgaggccggagagattactcccgcgccgacggcctctcgtcactgcgcccgcccgcacggtagagcatctccccgttctccctcctcgctccatctcctccccttagactcgggtagtagcttgagtagcctccccgtaactagccggcgccgccccgaccgttgccgccgctcgccgtgtgctcgccgccgtcgccgcccgagctcggaagcgccgctcgtcgccggcctcgctctgcgcaactccggccaatccaat

SEQ ID NO: 44408 - DNA, 435 bp, Oryza sativa
  unsure (1)..(435): unsure at all n locations
cgactgtatcggntagatattgacaaaaaacgagtttgaattttccctaaagatggcattggaaactggaaagtgaacttttcatttcaaatatcaacaaagagaggtcaaaaaagtaaagtgaaataaagcacacgggagatacagatccatattttgaccgagactgacgacatataccactctagtatggatagagagaacaaatcaaagttctgcagaagataaaactagacatagttgactagtaacagaagagattcctgaactttctcactgtaactatcaagcaaatagataaaactcgtggtgatattttatccacatcagcactgagaacagaacagcaagcaagcagtttgattgtgatggagggagctcctaacacatcatcatattatgaagtaatatctaataatcatggaagtatgatga

SEQ ID NO: 44409 - DNA, 261 bp, Oryza sativa
cagcatggagagcactcggcacagccatgaccaccgtgtgacccagctacacaagacgagtataaagaaggaggaggagaacaccaagcatgaggagagtggagaacatgcccatcttgcagcttcagctactctaccaggcgggttgggccctgtgctgcaccagaacgacagcttctcccaggaaaatgtgcaaaagtacacaagcatcagaacccgaggtgccccgggccaccgactgccgaaaaatgggatttacac

SEQ ID NO: 44410 - DNA, 434 bp, Oryza sativa
tagtttgaggcgctattgtattccgatgaaatctcgttaccgtattagcgccgatttctgtttcgacaatatatgattccgttttcgtatccggggtatacgattctgagaaaaaaaatgaaaacgacaatgataaaggtgagttctatccgtttttgtaccgttttcatccctagttgtcagcctgtatatcttaatttggattcacagtcagttatcaacagaatcaattttgtaccgtggaatcaatggcaatgtccatcttctttctgacataattgccataaaactttgtgctttcccactaaagagaagaaaaccattttcacatcagccaaattgtctgtaaatattacacttgacatgaaatttagaagcatcgtaccttgtatttaatctaactccagagctttatcatctgtaacctaaacgca

SEQ ID NO: 44411 - DNA, 250 bp, Oryza sativa
cagggaccaaaaacacaacacgcacccagcaacactaggtggatacgggaaacagccacaaatgtgcagacactcgatattcacacctaataaaggatcttaatcactgaaagaaatagggcatctcaaataaaaaactcttcaaataaaaagaactcgaggttcccgacacgagtagtgagtagaacatatgcatatttagactgattcttgaatgcatactggcacatgacatggataagcggatcat

SEQ ID NO: 44412 - DNA, 375 bp, Oryza sativa
aaaccactgtttactcataacttttttattgatctacagactgcacacaactgcgaaacacagatggcattcgatggacatactgttatatcccataaaaagcagtagtaataccttctcctctgcaagttctgttagaacaacaatatactggttaatgagttgaagccttgtgtaacaataatgtggatttatcagattttctgcagctgctgattcatgggaagtagacaatggggtgcatccattgctatttatagcaacccctctactgactgaatatctgttttggtttcaagcagaccgtttacagtggacctatcatagctggcaggttatgcacctgtaccattcttcattgacttttcaagtgaa

SEQ ID NO: 44413 - DNA, 394 bp, Oryza sativa
  unsure (1)..(394): unsure at all n locations
agctntgcctcgtggatgccgcgtggccctctttcacaccgtcttcctcgggccccggaagtttttcaaatagagggagccgttgcgcttgcgcagcagccacacggagagagaagggaagcagagctgcgtgcgatctgagtgggtaggcggtgacgtcngcgagctcgctcgggagtcgcggcggcgatggcggcggcggcggagggcgggaggcacgatcaggggatggcgctgcgcaaggccgaggaatccggtgagcagctgttcgtctcttctccctctccccgtctctcgggtgtggcatttttctcgctcgcgcgatctgcgccttgcaatgcgctcgtgctgtgcgtgtgtgtgtgtgtgtgtgctggcgtctggatcattggat

SEQ ID NO: 44414 - DNA, 438 bp, Oryza sativa
tagcatgcgattggtggatgtgacactgccgtattattacttgtggtggaacgaatagtatgggttgttcatctttacttgacacaatcatgtatggatccggagtgctatatatcatccctcctgaatcttattatttaagagtctaaaacatagattactgacaaaagtcattccataatctctatgccaatatgtgagacgaatctaatgagcctaactagaccatgattcgctacagtaatgctacaggagttattcgctaaacatgaattaatataccccgttagattcatcttgcgaattaccccagagattctacgtagactttattgaataatcctacatggttagattctggagggctaattattagccctgtacatacaaacacgacgccatatatgtgaaactatgacagtcatattttctaaaaaa

SEQ ID NO: 44415 - DNA, 417 bp, Oryza sativa
  unsure (1)..(417): unsure at all n locations
agcttatnttcagctttaattaactaattttatcattgttctgctgctaataacaacaaaggtgagtggtttatgattattcactttaatacaccaggtgaattccttctgccatgcaggcagggttggacagaaaacacgcgaaggaattaaaatgcctggaacgggaaaaatgaaacatgtcagtttgactctgcaggttgagaacgacctgaaacatcagcttagtattggcgcattaaaacctggcgcacgcctgattactaaaaatctggcggagcaattaggtatgagtattacacctgtgcgtgaagcattattacgtctggtttcggtgaatgcgctttctgtcgcacctgcacaagcatttacagttccggaagtggggaaacgtcaattagacgaaatcaatcggat

SEQ ID NO: 44416 - DNA, 410 bp, Oryza sativa
  unsure (1)..(410): unsure at all n locations
agctngaaagagcaagagacgaagttttctttgttgtctcaccacttgtccaagctatgctccttaatgacagtggtccgagtgcacttgacgcaaccgaaatctttgacaagctgagagtagcaccggatgtatacttcaagaatatcaagaaagctggaagtatgggagctagtatggcattggcgatgaccaaatccttgtacccgaggattgaaattgacgccattgatggctctgcagacgggacaagcgaagaagctgctcttgatcttatcagtaatgctcaaagagcggctgacaagattgcatgtgatgttgtaaagcaattctcaaaacacgacgctcacgcgcacataataactctgatgatgaaggactgattctgactgagtgataatgtagcaaat

SEQ ID NO: 44417 - DNA, 371 bp, Oryza sativa
aaaactaagcttcaccaaggggaggtccgaacgaggtgttgtgttctcctgacgggctccatacggctggccacgggcgactgcactgaactgcctaacccgtggaacatcgaacaccttcggcgcttctacccctgagggggggtcgggtgttacgtatctggctcgggccaaccccgcacccccctcgggcgtgcagggttggacggcggctacaccatatgcatatgctgactctcttaatctgaagttcataaagcagtttcaattcctaaggctgatctgtgttggttttcttttgaagaacttgactgaaatagtactcgtgctcatctgcctcggggctcggtgggcaaaacacaaacgggccc

SEQ ID NO: 44418 - DNA, 429 bp, Oryza sativa
  unsure (1)..(429): unsure at all n locations
tccgacccggatcttaagcactgngctgcagcttttcctctcaccatttttttattctcttctcctcctcattacatgttcccatccgctccctcttcaccaacgtcgtgcccaccacgtctcgtagttgacctcaaccttgagaccatgatcctcctcgtcgatttggatggacgaagagctcgttattggtgcgtactggcctgcatcctgcaggagaagagtggaagagagagagaggggcaataagtgtagggatatttttttcctaatatgtgagttccacattatttaatttttttctctaattataagtgtgacgtagatgtcacatcacctaacactgatgtcaatattgaagaattagctgtagaaactcgataatccataggggacgccaattggactttgtaaaagaaaagaagattg

SEQ ID NO: 44419 - DNA, 398 bp, Oryza sativa
  unsure (1)..(398): unsure at all n locations
agcttagtgctcgtcatatattttatcttttatatatccagccgctgatttctcatcgaagacataattaaaattgtttgcacgctgatctgatcacagaagcgattgatgcatgcaaggtgtggcgacgtggagagcccaacacggaaccaccaaggatggggggcgcacgcagagcttgctgtgctgcgtgctgctgctgcgtatgcgtgcctcctgggatacaccgtgtgatagatctggcagccccatccgacctctcgccctataaattgggctaccggccggcgtcttttgttcatcaccttcacctcgcagacagaaccagtactttaatttcaccttgcaaattcagttgaattcggctcgttcaggttcantctgttgatcatcatggc

SEQ ID NO: 44420 - DNA, 408 bp, Oryza sativa
caattgaataaaatgtcagcacgtataatcattataaaatactaaaacacataaggtataactaaagatacccataacacaaactaaactacccggccactcccactcccacgcacaacaagcattagctttcacatacacactacatacatatattatacgtgggaggcgagccctactggtgtatcaagtcctagctaggattaacggaataattaactatttgccactcttacaagtggtgctaaataatttgccactggacccacatgtcatagacagtgaatggcaaataattaattgccacatcttaaaagtgcaagaagataaatgtcccatgattaacccatagaggcaatcccaaggagtacgaaaaaagattcccactgacgcacaaattcaatgaat

SEQ ID NO: 44421 - DNA, 306 bp, Oryza sativa
gggactcacaatggcatcttggttagaaacataattctaaactttattaaatactattgcatctaaagcatcacatggtttcttcctctatattctcagccttctgcaagtaaacctagctgtacacagatattaccatttcatgcattcattgttgattaatataatagcttgctcagtatgttgtactcacccttgcttcaaccccctttttcagagttaatttggagtcttgccgaagccgcgagttcgatcatataaattagtctcattctaacttaattctcaagcatagaatagatagat

SEQ ID NO: 44422 - DNA, 451 bp, Oryza sativa
acactatacagaactcaagctttattaccatatagggaaatagctccgactatcatcggtttcattgccgtcatggaagatatcgaaaatgttgctgccgatatgggcgatgaacctaccaatgttactaatgaagatgaagatgccacctatatccctgatgacaaaagcatctaattcagtgagcaacctcctcctctaccttctcgtcgtcggccaaccccgagcaagagtaaataatgcatccctccactctatctggacaacattcatatcttctaacactttattatctttctgaagacaataaccatattagcttctactcatcggcaaccaactcctcgactgacacctcctccataggcaagatctctttgaactctccatctttcattttgatcaatactatctattctaacatttaacacttttcagcctaatgctccat

SEQ ID NO: 44423 - DNA, 432 bp, Oryza sativa
  unsure (1)..(432): unsure at all n locations
ttaatcaccgcggctgcagcttacaccgtgacctgccgatgttttttttggcggntggctacaaaaatccatgtcgaaaggcgtttccaaccaatgtacgaccggcggcatgtgacccacagaccccttcttgtatgtcgaggaggaggtgtttgccgttgtcggacgagacgcctttgagaagtaccccgtttggcgccttcttgtatagatcgttgccgatcatacagtatatttttgctcgacgggttattttatcggcttctgcattgtcctcgggcaactcgtcgctgcttatgaatataatgagtggggtccgccagtcgtccgtggtctcgatgtcggcaacggcgcgctctgtctctgtagcccttgagctaatgtcgggggtgactgcgctatcttcgtcgtttgcctccttcactgatggct

SEQ ID NO: 44424 - DNA, 419 bp, Oryza sativa
  unsure (1)..(419): unsure at all n locations
ctttgcttatcgaatcagtggttntagcttgcgcanaatctatattcttcaggagggctggttagagaagttaccgttgttgttacctccttgataatatgggcgtggttggttccacccctgacctccttatggactgtacccgttgttgttgcccatgtacatacccttctcacgggtttcctggcagtcgttcccaagatgacccgtgccgccgcagacttcacacgtgacgtgtgagtccaaggccttgacggtgccttgtggccttattttgtggtcgtacaagtgtttcatgaggagttccagcttggcagcaactaactacgtcttcttgactgggtgcatgcctcgctgacgggtctggagtcgttcctcgcttccacccatattggagaccatcntctctattagttcaa

SEQ ID NO: 44425 - DNA, 202 bp, Oryza sativa
agctttgaccaaacgagttggggtggttatattcgaggggaagtcactctccaccgtatgaagataagcttctattggcctctacgctagaatgacgtggtgataattgcctctgaacgccccacttggcagattacccaaacggagcatgttgattcactcgccttcctataacctctgcgaaatacctgactggcttgga

SEQ ID NO: 44426 - DNA, 179 bp, Oryza sativa
actacaccctcttattgctactaccttcttgcaacgaacggcggttcattagactgacacggtatacaatactctttggttgcgcgtaatcaacgagaggaacattctgtcataacaccaaatctctttcggtagttctcactggttcagatgagactagcacacatggatgagcctca

SEQ ID NO: 44427 - DNA, 420 bp, Oryza sativa
ggaccttaagcaccgcggctgcagctcggaggggtgcattcttttattatttatgaaaaatgtctcggtgactctgtgatgcggcaacactcaaccgctcgctggatcgctgcggttcgatttccatgcgttgcgttgtgttgcctccggtgaggtgtcgtcgccacggggcagcatcaaccaacagcgttcagagcagccagcaccgttggtttcgcatccttcttagctcctaccagggttttccataaccgcctggggccgaggctaccgcgccccagcggtagacacgattaccacggtaaccgtgaaatcatacaaaaccgtgtaaaatttatcaaacatttaaattattttttaaatctatctgaatctaaaacagctaccacgtatttatattacctgtctccgccggtagcc

SEQ ID NO: 44428 - DNA, 326 bp, Oryza sativa
caacatactgtacacggaggaaggacgacttaactaattttatatcacacgctatcaatcattattctggcacagtgtatcaccataaaattacatgaccacgtatgcaccagaaaaaagaaggggggttcctgggtataatggctatagtgcattaagaataatgaatgaactattattcttgggcaacgatctcatacattaaataagtatactacaagtttctgcgatatggctcttaccagcttcagactgaagatgccatatgaaaaaaacaaacagttatatacctgattctgccaatcctgatgaacaaacctattatt

SEQ ID NO: 44429 - DNA, 372 bp, Oryza sativa
tgctatatatagagtccagcatattcttattttttttattggctgaccgaatctctgtccagaagcgtagtccgacgcaccaccaccatcaatgacaagaccatcactaatgatgactgatcagctgcggacacaaaggcattgtcttaatgatggattggatacatcaaaccacattttatgctgtaaatataacagtgcaatctcctgactgctttctctaataagacaaactcccttgttgccgagatagtctctgcacaataacatgctatgcgaaaatctatgggatggagcgttcccatacggttatatttgtacacctaaatgttgatgatccaaactatagaaatcattcttgccctatgacca

SEQ ID NO: 44430 - DNA, 421 bp, Oryza sativa
  unsure (1)..(421): unsure at all n locations
agctnttaactgcatcaaacctatggcattttatttactcaccgcgttcggattaccacccgattcgatagcgataatcgccgtgatcaattgtggatcgacgccccacgctgcaccggctttctggcttattggcatccactgcatcgcacgttgcaccggaactttcgcgttccacggcgggttcgtatagtcatgctttgatgaacaacccgctaataacacaatcaaaaaggcaaaccatctcaatttcacttcttctatccttatagcctggaatcgccgttgaggtgacaacggcacacctaagcggcatgatatacatttcgtttctgttgtcagcaaggaattgccatgtctctgtttcacttaattgccccatcgggttactgcattaaacagcacgccgcgctgcgtggta

SEQ ID NO: 44431 - DNA, 416 bp, Oryza sativa
  unsure (1)..(416): unsure at all n locations
agcttcagtcaaaacaatgattaattcatcgcccccgtagcggaaaacataatcactactgcggacgttgtcataaaaggcctgagagactttacgcagaatttcatcaccagtgttatggccccacgtatcgttgatctctttgaatttatcaacgtcaataatcagcactgacagcggtgtaccggtccggttggcatgggcaatttcgcgtttgaagatagtcggtaggaaacggcggttaagtaatttcgtcagtacatccataccgacttcgtggcgcgatacttcttcaaacaattcacgcagcaaggtaataatttgcgatacggtatttcttatctgtaataaaaatntcacccgcagacttctgttattcaaatttctggtgttacgcatggtttgattgaaaatac

SEQ ID NO: 44432 - DNA, 449 bp, Oryza sativa
  unsure (1)..(449): unsure at all n locations
cttaagtcacctgaggctgcagctgccccagagcttatattgatgtcttgtttttcgggatctttggaggcaagaattgccgctgctgtcgccgggctttctggcttgataaccccaaccaacaatgttcttaattgcactttgccagaatctacccacgggcgcgcctgctgccagaactgtttacaatatgggcagaacggatcggcgaagacgtagacaatgaccggcgcatcttttttaccgtcgaggagccagtgggattgttccatccgttgccacatttcgcgtccggctggtgcgtaaatttctttttcgataagtgtgttactcacgttttcacctttctcgttgtacatgtaaccagagatagcgtgcttaccatctggagtcaagtagatggtgacgcccatatcctgatactntccgagataacctttcattcctcc

SEQ ID NO: 44433 - DNA, 464 bp, Oryza sativa
tgcgacgtcattaatcgatgagtacgccctgctgggctggcgcgccatgctgactgaagacaatctgtcaccgaaaccaggcctcgtggatcgcattaactgcggtgcgcacaaagatatggcgctggaagatttctcaccgcagcgcgctggcgattcatggctggctaccccgtttcattgaatttggtgcctgtagtgcggaaatgtgaccataagcggtactccacggattacgcccaattggtatggcttgcgaaggtgatatgttccgcgccactgtgggcgtaaacacgcataaaggcagcatttcttctttatggctgctatgtgcggcaattggccgtttgcttcaactcaaccaaccggtgacgccaacaaccgtttgttctactgcggtatgtttctgtcgtggcctgaccgatcgcaacttgctaccaataattacaactgacggaggtcac

SEQ ID NO: 44434 - DNA, 420 bp, Oryza sativa
agcttgagtgtgtgtgatttgtgagctttctctttctattgttgataggaacgcatatattcttggatatggttcttgtttgctactaactatggcagggttacataaagagtttggagctgttcgtgctcaatgtggacattttcacctgggacatcacatggcaagtgaccaacatgacgcaaataatgtacatgatcataatcttgcaagagtagagtctgttttgacatcttttgatggaaagtatgattccgctgcatacattaattgggagctagcagtagaaaaacaatttgataagtatgattcttctaatgctcaaatgattaaggctgctaataataagtttaccggttctgcatctttttggtggcatactggaaataagcttgaaacatgggatgaatgcacaatact

SEQ ID NO: 44435 - DNA, 407 bp, Oryza sativa
cgaaggagcaagagacgaagtctccaatggtgctacaccactcgttcttgctatgttcctcaaaacagtggtccgagtgcacttgacgcaaccgaaaactttgacaagctgagagttgcaccggatgtatatttcaagaatatcaagaaagctggaagtatgggagctagtatggcattggcgatgaccaaatacttgtaccccaggattgaaaatgataccattgatggctatgcagacgggacaagtgaaaaaactgctcttgatcttatcagtaatgctcaaagtgcggctgacaagattgcaagtgatgatgtagagcacttccgcaacaacgaccttcatccgagcaataataactctgatgatgaaaggactgattctgactgagtgtaaatgtatcaaat

SEQ ID NO: 44436 - DNA, 412 bp, Oryza sativa
  unsure (1)..(412): unsure at all n locations
cagctntcgcctagaagattaaggtcgctttatttttattttgaactttcggtggaggacccaagagatttttcttgccagtacaggctgactactgntgattacattttaataatgctatatggacacaattcttgcaaaagtgttacaaaataaatatctgaaccattagaattaattagggggtagttatggaaaatcaaaaatcactcataacatgtcaataagtgtttgtaaaatgtttttaagattatttttacgtatataaccttttctctactgttttgttcatgagcagctgatgtatgtaatacataacaaaatgcaattatgataaatttacttacatacttttagtctggaatggttgtggtgatcgcgtgaatgaaatctttggctacacaggctgact

SEQ ID NO: 44437 - DNA, 379 bp, Oryza sativa
actatacaatactcaatcttgacagatcccttcatacgattatgataaggggtgaatctgttctatctttttcaagaccagtgccacatacaagcattagatgctgatgtatgtgtatcaattcatcgagcacatacacgtatgtatacatatgcatgaatgaatgaagtgtttaactagtatggcggtagcccagaattcgtggcaactggcattacgaatattattctcacataaacgcaaatatactttgacaatttatcatgaaaagtatatgtatgatatatagaaataatgtctatgttcaagaaacaaatgtgatggagtattactttaataataccatagatcagcgacataccagagaccttgcagataa

SEQ ID NO: 44438 - DNA, 394 bp, Oryza sativa
ctcgcaccatggagatgcttatcttctttttggctttactttgtccttgaattggccaaggtggagacacctctgtacctgcgcctttctttttcgccgaaagcaatattcttcacagtatttttaacagtcaaatgtcattcactgtccttgcattttggattgattcaaattcaattcatactttggtcattcgcaaatatagtcttcccacgcccaaagaattgatatttattattgatttatattatattgctttattggtcaagctgcccatgaccacctaaatccatagtatctacatcagaaaaggagacctcaaatttttcatcatatgcttttttcatttcttcacaattatcattcatttctttctttaattctttaaatattt

SEQ ID NO: 44439 - DNA, 439 bp, Oryza sativa
  unsure (1)..(439): unsure at all n locations
tcaagggcattggttctcttggaattcggctatcatcacatgctgccattctgtcaagaaggccctgtctctcttctgctttagcttctacatttatggcttctccttcttgggcagcctcacaagtgtctttagatgcagctcctttgttatctggtgaactctccagcacttcaaggtactttacatgtccaccatcagatttctctgaggaattctcagatgctgagttcttctttgctgcaaaatggaccataaatgcagtaaaatattactttcggatattgcaactttaatgtaaattttgactaaatatgcagatcgaaaagatttcaaaaactcttcgaagatagagagaaattaatgcaactgattctgtagactatctgtacnaaaaaatagtagactttcaagtacacacttaattcttgcatgacat

SEQ ID NO: 44440 - DNA, 423 bp, Oryza sativa
  unsure (1)..(423): unsure at all n locations
agctntgggtgactatatagaaagtatttgtttgctgcaactactctnttaatatcgaaacaactttacagatatttttgaaactatgcaattcttcacctcgtcccatttatttccactcttgtaggatcagcgtgctcttcttttcttttcttttttttaaagaggatcagccgtgcttagttggtgggaatacttaccaaataccatgtattaaggggtgcttagatcaaggggtgtaaagttttcgcgtatcacatccgatattatatagggtgtcgtatgaggtgtttgggtactaataaaaaaactaattacagaatccgccagtaaactgcaatcattgaatgatgtagcaccattttgtcaaatcatggagcaattangcttaaaagaatcgtctcgcaaaatagtcgcaatctg

SEQ ID NO: 44441 - DNA, 456 bp, Oryza sativa
tgtgatgaaaataaagtctttacacatgatgatatagacctctgcataaacatggatcaaccgaatggtcacaagtgttgatgttggcttaaacattgaccccaagttggatggcacaaggcaaatgtataatcaagctaagaatgttttcttagtcttttcctagtcccggcgtttggtgtagaacggatttgttagataagcgtcgtactatcaagaggggtctactaagcgagcatgtggatgatcttgtgccatattagttcatatgcatgtgggtgcatttggtgggcttgtctatccaagtgtgatgagttttctccagtcccaaacaaagagagaaatgggcatgttcaataagagtgacattttgtacgtatgtccggtggatgtcttttggagtgtgagccctttatacttgaccaaaatgtgtttcttggatgattaatcatggtt

SEQ ID NO: 44442 - DNA, 418 bp, Oryza sativa
  unsure (1)..(418): unsure at all n locations
agcttggaagagaggcaaggttgttttgtatatcttttgntttgaaatcattttgaaatcactaagtgggttacttctttctaagtttgggccgaaaagaggcttgcgtctcgattcgactttaagagatgtttttcaacaactcaattggtaatgtaccgaccccccangtcagatcattacttctcggctcccagagccatttcacttgattaagcggctcccagagccttattcatgttctcggactcccagagtccagctgcccagcagcacaacaatccgcttccgctcgagaagtctagtctatgatgcccgtagacatcccgaatcacacagattcgtttcttgaccactcaggtcatccatctgccacataggctgattctggtaacgaattccacaccacaacaacttt

SEQ ID NO: 44443 - DNA, 168 bp, Oryza sativa
gaatctgtccggtaaatacttagccgtctgttcaacgtcatggaaataaattctgtgcgtcaagggcagtacataccgaacgaatatgagcgacagatattttgtatcattacatttagcatgcagggccacaattttcatgccagcagaccatcccatcgcagacac

SEQ ID NO: 44444 - DNA, 431 bp, Oryza sativa
agcttgtataaaattcagatgagattcaattcttactaatgcaagatacaattggtctgaatattgattaagggtgaggagccattgctgtctgtacgttgaaaagatggttcagaggtatttacctaccatcaatgattcaaaatatacgattattccaattaatcaaggccatctaagtttggttatttttcgcctgcttttgcccactgaacaacatgtgtgcctgtggaacaactcaaaagaggataattaagaacataatttttttttgggtgcaacaaataatacatacgcagcgacaaaaaactctgctcccaaaccactctgaataattgctctgtcaagcaaatctatgggctctgttccaaagtatacatgcagagatatttgagattaaggtctgttaactaattcagtaataatgtaat

SEQ ID NO: 44445 - DNA, 480 bp, Oryza sativa
  unsure (1)..(480): unsure at all n locations
tgcatacggaccttaaaactagcttattttaccttagaaggatcgtcnaacatcatccctgcttgccgttgccgccgccgagtggtgtcctcgcctataaggttgggtggtcacaccgccgttattgggcgtcagtgtcttcaccgaccggccgcctcatccgccaccgactggtgtcttcgcctatacggttggatggtcacatcacacgtgttgggcgtctacgtcatctacaccatatgcttgcttccgccgccgccgactggtgttttcgccggtcgtctcgtctgctgctgattggtgccctcgcctctacagctggattatgccgctactattactgatggacgtcatcgtcttcaccgccggtcgccttgtctgacgccgactggttcttctactaccgactggtngttttatcttcatcactgcgcatcttctccaccggtttgtttctgttgccgccgactcctgttcacg

SEQ ID NO: 44446 - DNA, 233 bp, Oryza sativa
agcttcttatattaaaaaattgtagggttgttttaccatacttacttgcatgccatatcattcaactcttcaaccagcaaacctgagctcttgctgtcatggcagggcttagcaccggagcaggtgctccagttgtgaaattataccatgagaaatccatgatcatgcctgatgtgtccagagtgcttgcatgcctgtatgagaaaaacatccaggttgagactgtcaaggat

SEQ ID NO: 44447 - DNA, 138 bp, Oryza sativa
gcagctttgatgctgtcatatacaccttgtttgccaaagatttgcatctcattaaccttcgtgtcaaactgtgccaataccgtcattagatgatcctccatgaaaattatcatagatagcaattgtcgaacttgtatg

SEQ ID NO: 44448 - DNA, 415 bp, Oryza sativa
agcttgtatactgcacatgctctctctattgtgtcagaaacatttgtgatcaaacttgatgatgatgaagacaaaacaaggtgagcttataatctttgttaacgttgtattttcataagaacacacttatcatctgtgaattttaactgaaattttgggcgtcttaaatttgcaggacaaaaggagttcatgaggtcacaattcagttttataaaaggatagacttacaagatctacaaagctaccatactagaaggaatgcctcccaaggtgctatacaagcgattgacgctgttgttagagtgctgctttctaggtaaattatcaacatatagaggttattgtgaattataaaccaacatttgttataatatcaagcgctacattaaattatcaatattgcttagccatattg

SEQ ID NO: 44449 - DNA, 271 bp, Oryza sativa
  unsure (1)..(271): unsure at all n locations
gtatttattcggctagctagctnctttccgcccctgcttgtattggtacatatatatggatcgagcgagctccttcatctacatgatatgcatgtcgactattgtttgggtttcaaatcatactaattaaaaggagaacttgatccatgctatatagtcctatatgacaataaatcaacaaaacaattgccatattccctatggtttatgaatgcctgaacttcttttgatttgggtggaggcaaattgctctccatatgaattaactgac

SEQ ID NO: 44450 - DNA, 465 bp, Oryza sativa
  unsure (1)..(465): unsure at all n locations
atattgactatttttagatcgattctcagcaactaaatgaaataaggtgctacttcccgatgtgatatttttattttcacaagagattacatagatcgagagctcgtgtgtttattgacctcatgagcttagctccatgtaaactgcatgcatatccaagatcccaaacccttttatatagagaactgacactgtaaccatccttcctatctnttgaaaaaatcagcaagtatttcaggttgggcatactttgacatttctaactacgacctccaccttcatatatatatatatcatgttccagcttgaaagttccattataaatacaaagctaatatcatttccattctgagatccattcccacacacaacttaatgaaacattacttnccaatgtggtggtttattttcacaagaaactatgcctatatatagatcaagaacttggattcttattgatctcat

SEQ ID NO: 44451 - DNA, 471 bp, Oryza sativa
  unsure (1)..(471): unsure at all n locations
gagtgcaacatggatcgaattgtttatagaaacaataatttattaggaccagttttgaaattaatggaacggaagaaaatatatatgcaggaaattcacgtaccaccagcgtcgacctaactaacctacctagaggattcatgttgcaaaatttctacgaaggtacatcgatcttcctcctttacgtacattattttctcagaactaccttaaataaacaacatttagcttaactataacttctactaccttatacggctacgtcgtacgcatgtacgtatttcatcatttcttccaaatgtaggatggcattcatgcatcttaatttcgacgcagtttctatcctatttctagggctcattccctagctagctaaatatatattttacacatacaggatagtagtacatacttctnttttttagatcggtatcgtgggtnttagcatagggtttcaacacttatcttatt

SEQ ID NO: 44452 - DNA, 496 bp, Oryza sativa
  unsure (1)..(496): unsure at all n locations
tgtcnanaggacggcgttcattctcaaaatgtcaacccacaggctctctcccattcattgacatcaatcttcatacatagtactatcatagtaaaatgatgtatatgtatatatatgtgtagtttacaaacgaggtaataaatagcttttgtagcggtcattataacgatagtggatttttacactggagtatatagcaacctctattgcaaccactacaagtagcacaacaaatatagcattttagaacttaatggccgttattgctcttaacgaccattattggctttgttgggctattattacacttaaacaatgttcttcacatatggataggagaaacttgaaagacaaagaacagctatagagggggggggtgaatatagcaattcagatcttgcccncgaanatactcatcaagccggatttctcacaatccttactagaaccgcggtattagagaagcggatctaaaaagaagagagccaagaagaga

SEQ ID NO: 44453 - DNA, 483 bp, Oryza sativa
  unsure (1)..(483): unsure at all n locations
tcaactgaaagtgaggtaggctcttaggtntatttccatagtgttttcattatggtcttaagctgaacacgataaaattctattagagtgctgaactcatcaggttgaaaatcttaaatctgggacaactgttctgagatacatgccatgtgggaagatggttgctgaagtacttacctgtttagcatgttttggttgcaaagggcattgttcctttttacttgtttgttgttttacttttctgtcttcaagatgtgactttgaccatttatttttatacttttgcattaagtataataataaaattatattattatgaaagtattcctaattacaaatttaatgatgtgattttcagtagttccaaatatattagcagtaaaacttttgaaaggttgaagatgcggattgtanggtgtcattaaaaaagaaacatagtagtataaagtaacagatttctgtagattgaactctattgattat

SEQ ID NO: 44454 - DNA, 358 bp, Oryza sativa
  unsure (1)..(358): unsure at all n locations
cctcccgtcgccggcaaggaggtctactcgaggaggatgcgctggcagcatccgtacgccgccgcggcagcggcggcggaggactgcgacngcgagcaactcatggcgggtaattgcattcgcggccgtggtggtggagagcgcgcggccttatctcctcctcctcacctcgcttcggattcggagggaaatagaaaaaaaaatctttcctgcggccaggatcccacccctgcacgaatctcanagccgaagctacaagaggggcatttccgtcaatagctaaatatatatcttcctcgactccgacaagaatagggttccaccgccgccgccgccgctcgccggagagagagagatg

SEQ ID NO: 44455 - DNA, 232 bp, Oryza sativa
tcacaccatgtataatatatatcttgagctggaaaggatcggtggtcttcttgcttgctgaattacagatccgtacgttcagatcctgttatttcagggtgcacaagacagagtctatctcttgcatgtagaactaagctctatgttactttgatatgataagcataaatgaaatgagtcaacattctgagcttgagctcaacttgtgagcattacgtgagacagtgtcatt

SEQ ID NO: 44456 - DNA, 385 bp, Oryza sativa
  unsure (1)..(385): unsure at all n locations
ctaaacccccattgaattatgctgtcggcagggaatcccaggcccttcaatgtgttctcctccggccattatatgcaacccaccagaaaatccctgtcatcttagacagatcatcacagactgactctgggaacataaaaagccccatcacatagactggcatggcctggataacaaccttgatccagatttcttttctcccactacaaaggaaattntcaccccataaaattacccttttcgcgatttttgcttccaaactctgaaacctccctttatgcattcttccctcaggtgtaaggaagcctagggatcatgtctcaaaggtatacctcttcacctgcagagtggttcttatatcctcactgatgagggagaagcttca

SEQ ID NO: 44457 - DNA, 201 bp, Oryza sativa
tttgactttgtctgtgcagcatgctgtggtttgtggatgggcttttcctgaaaacctgtttccacaaaattttttcctaaaagcaaaacttgtgcggccaaacaaaaactgtcttacatcccaataaaaaaagacctaaatgcttgccaatcaatatgctgtatacaaattcctgctccaaaatcgtgactaagactaaag

SEQ ID NO: 44458 - DNA, 410 bp, Oryza sativa
tcagcaagataccgcacgccccatgcatatgaaaggcgtatttcttaggatggctatagctcttctgcgctaagccaattttgtgattcttttcacaaaactaagacctaccattgactgatccaattctagtaccagagtttgatgtaaacaacgacagatatgttcaccatgcattgagatcccaacgatagcattccgccattgagaccttatggatgtgtgaggacgcccacctttccccttatcatgaagtggcttccacagcataaaaagttcgacatgccgccacccatcccacacaagttgagagtttagagactatccaagtgtgatacatgtcctggtgctcaataaccgccagcaccgctattctaatagattgggtctactcacactgcagaggatgt

SEQ ID NO: 44459 - DNA, 291 bp, Oryza sativa
tggtatggcaggcgcccgaatgtgcattatcttctcacttttgtctgtgtggcgtatgtgaagaatgtgagaccacacttgtcgaagctggaggacagaagcaaggcgatggtgttccttggttatgatgacggaagtaaggcttacagggtgctcgacctggtgactaaccgcgttcatgtgagcagagatgtggtgttcgacgaagaaaccaagtgggactgggcggcaaccgggaccggtgatgatgaagctgaccctgctgatatattatctatctcgtacactttt

SEQ ID NO: 44460 - DNA, 439 bp, Oryza sativa
  unsure (1)..(439): unsure at all n locations
tgactgggnactacacaatggaaagtctatttcttgctgacatgcgggcccacccagagctatctgctgctgaactgctgataccttctgccaggtgagcatcgacgagcgtgggcacgacccgctcacatgatcacatccagccgttgcttctaaatgaacggctgtgataaaagcaagaaaccaggcccgtggatggccatgtgccatataggcaacacgccccccttcttttaggccccatataaacatgaaggtccacttcagctatagcaatgtaacacaaattcctagagacgggtttacaagaaacgcttcagtgctcctcttcagcactagtcctcaccgagggatgtgttttatccctcgaagtggatcctctcgttnttgcatgtcacctaatcatcttactatataaaaattgagatgttttgcggat

SEQ ID NO: 44461 - DNA, 491 bp, Oryza sativa
  unsure (1)..(491): unsure at all n locations
ngaatcaagagcaccttgctctgatactaattgaacacgcagatgaagtctatagggcgggtgaataggctggccctgaaaacttaaaaacaaatcgcggcggtaaaattcaaacagacccggaacttcctggtaaggaactccggaacttccggcctcccaggcccggaactaggaggattaatgcactttcaagatagactaaaatttgcattttgcggtgaacaaagatgtactaattattaattattagacagggcaataccatctatccatttgctcgccatacggccaatcggggatatgctctgcaccatcgtgacactctcgctccttctgtccagtacacacagaanaacaaaaaaaaaaatcagaaaaatgaggattgcagtcaagagagatgaggaaagaccaaaaagctagattagtaaacaggtcacaaccgatggaaatatgcacaccacagcagtagttgaagcacanacatgggt

SEQ ID NO: 44462 - DNA, 498 bp, Oryza sativa
  unsure (1)..(498): unsure at all n locations
tgagctatatctgccaagtccatatcagctccaccgggagaatgttgtactgacaatgccggtccacggagagcctcaattgatagcttacccttgggaggtgtaagctccgtcggtcgacttggacgaggagtcatcttcacaactatgtcttctttgggccattgtatgaacgtcttgcgcgcatcgcccaaagtcatgatttcatcatttgggggcacgggtagcggatagcctgaccaggtgtcctttactgtatcgatggacaccttggcatacccagctagcatgtctgcgccgtggaccttgtctgtaaccgagggcttgaaagccatgccctcagcgacttcatgagcgaaagttgggtggactctcgctagtaggacacactgtgctgcgccctgcataacggggaaagttgaatntaatattggaatgtgtagacgtctttattagatatggatcggataacaacaattacctcgatgtggccactga

SEQ ID NO: 44463 - DNA, 295 bp, Oryza sativa
  unsure (1)..(295): unsure at all n locations
gctagatctgagagtaaagtctcttggttgcgccgttttacaaccaagtcatcgacatacgcctcaacattacgtcctatttggctacccaaagaaattcgagtagtacgctgaaaagtaggacctgcattctttaacccgaagggcattgatgtataacaataggttcctacggnggtaatgaacgcagntttnntctcatcctccctagccatgcgaatctgatggtaaccagaatatgcatctagaaaacacaaaaggtcgcaccccgcagtggagtcgacaatctgatcta

SEQ ID NO: 44464 - DNA, 498 bp, Oryza sativa
  unsure (1)..(498): unsure at all n locations
tcggaacatntatcaaatgcacctggtgaagtcgatgtgatgactagacttccagcacgcacaaatctggcaagtgatatagtgcgaataattcaagggaggttaggccaccaacatgcaaggacgcagagcttctgcactggcataagagaatttccctcatctgcggccaatcaccacagaagaagtcggctccaacaacgcacctgtatatacatagtctcctaagggacaatggtataaactctgcgccacatgccaactctaaagaagggcaggaaaacaatctcatttctttaatagagacagctcgcaagccccccaacgatctgatacaccaacaggaacgaatggccaagaaattgagattggccagatgttggaggacctcttccgatggaagcgtagttaaagtcataatggttggtaagctcaattctctaagtgaagtgaggccaccaatgcanagagctaaagctccatctgtaatactgcatg

SEQ ID NO: 44465 - DNA, 410 bp, Oryza sativa
acttattagaatctacacgagctgagtttcccaacttctggcttctaaatctttattataccaaaagctgcttgtggagtttctgatccctattctacgagaagctgtagctatggaagcaagcatgctctttatccagattatctcacttctagtttatttgtcttataaaattagtactaccatgtgataaataaatgaacaagcgggtttctatacgggtagtgtgactacccacttggatatgtactgcagctagaagctactccaaacacgctcctagctgtggaggccgatgcccatatatagtaaggcctcatttgagatttcgcccaataaatccatacatgatgggcccggaaacggagcaagttacagcctttctatatatggccataatttgggcctac

SEQ ID NO: 44466 - DNA, 463 bp, Oryza sativa
tccagtctcttttggtataagctcacactgtgcccttattactttatcaatcacatccgcccacgggtgctgctgagctgctccctgtgactgatggtgcatgggctcgaactaaccgtattgaggcgcagactgacgatgagtcagtccccctggctgatattgagctcgcggggaaggacgctgatattgataattcaagttgcccccttggtaattatgaaggttcggttggatattacgtactaagtgttcaggaacaacttgaggcattactgtgccatccggctgtacgtggtgaaccaagtgttctgggacaacttgatttataaattgttgtacaggctgaccacaaggcgttggtgaaccagctgatttgatcctgtgatcaacaacatatatagacagagaattcgcggtaatactataaatgatagccgatcggctatgagccgatgacata

SEQ ID NO: 44467 - DNA, 328 bp, Oryza sativa
  unsure (1)..(328): unsure at all n locations
tgcctgtcatacctgtactccnttctctattaggccttgctgggcaagctgctgtaagttttcgatgaaatctttactactctgtctgccaacatgaatcatgtattcattctaaaaaaattccacaaatggataagagccgagaagtcttatattatgaaccttcgattctaaaattcacattcttctacattgaatgtatagctgcagccataaatttggatcagcctttctactccctgcatctacgatgagcatgtatctttaggtaaccgcacaatacctaacctaatttattgataagagtgcttattatagatcaattctt

SEQ ID NO: 44468 - DNA, 440 bp, Oryza sativa
  unsure (1)..(440): unsure at all n locations
tgtgcttcttgtactgccacacgtattgtggaaacccaaacttccatggaacattggagccaatgccccttgttcgtccacggtgttcttcgttttccaacgctttcgtgaggatgtcatcctcgcgtttttgtgagcatacctcttatgaggcctgtctctcagcattcagttcgacctgtggtacacttatgacactttatacgaagaacaagatacaacataatgaaacttattctatgtgttcaacttacgattntctggtacaccacttgatcttctggatttgggaacgaaagagttccgtcactattcttcttcacccttgcccttgcccagntccttgcccgctggaccgggatattatcaagcacttgcggngtggtagattccgctgcagcttcatcctccttgtcccattctgcctgtntccccgcgta

SEQ ID NO: 44469 - DNA, 468 bp, Oryza sativa
ctaagcttaggcgttcatacctttacctacctaccactcttattactttttttaatgattaaggatattttagtcattgtcgctctccactattttcattttggaatgctaggaatggttttttttttacggagggagtatatatttaaacggttgcagtactctacaacagtgcatctcgtgtgagatttcagacttggaactaaacaagtgatcctagtcaggcttcacctcagaccaaaagctctaaataatttcattcattattaattcgtcaacaagaacagaactgtcattgcagtaagatctccagaagaaatatccatcaagtttaattaaatcagtggtggtgatgctaaattaaagcacatgcatgcatgcccaaattaaagaggataaacacatatctacttagtgacatgatgtcatttatctagtaatcttatgatcttatctgcagtactcact

SEQ ID NO: 44470 - DNA, 481 bp, Oryza sativa
  unsure (1)..(481): unsure at all n locations
gctttacacataaaactattttaatggagcacttaacccataagatattattgtatcaatatactcctttcgatatagtgaaacatagctcattttacaacataatgatattttattctttcaatttctttatatttgtcttcatacaagtcatattaagcaatccaagagacaaaggtcaataataaatcaacaaaattcagtaaattcctatccttcaaagtagctccatgggtttctccacaaccttcatgtataagcctctaatgcggtttcaaaatcagtagtttttcttataataatatgattaaaatctatactttntcctaataaattattattttaagattcatattgactaggtcttttctttataataccatagagtctcacatattacagagaagccttanataagatatgcatatttgatcaattaanaagagggctaagcacgttggtaaaaaaaattactagcaat

SEQ ID NO: 44471 - DNA, 456 bp, Oryza sativa
tgcccgccgtacaccaaacacacacttatcggggttcagtgttatgccgtcggagcggaggctctcaaaagtttgcgcttaatctgaaagtaacgtttcctggttgcgcgtctttacaaccaagtcatctacataagcctcaacattacgttctaattggctacccaaagaaattctagcagtacgttgaaaagtcggacctgcattctttaacccgaaaggcattgtcgcataacaataattttctatgggagtaatgaacgcagttttttgctcatcctcccgtaccatgcgaatctgatggtaaccagagtatgcatctagaatacacataaggtcgcaccccgcggtggagtcgacaatctgatctatgcgaggcacggggtcaggatccttaagacatgcctagataacgtcggtgtagtcgatgcacatccgaagcttggccgtcgcctt

SEQ ID NO: 44472 - DNA, 497 bp, Oryza sativa
  unsure (1)..(497): unsure at all n locations
tatgttacgcagagatttagccaggctgcaggcttagtgcacgttaacctgngcttatgttattcggaaaattattnttctattcccatgacgtgtagacgagctgttcaacggctcaacctctccaaggctttgcttctcttcaggtacatctacgatcaagatatttaattttgttgctcaatgtcaaatttaaaggagagaatcgttctctttgtacgtcaccgtccggcagttgcataatctctaatagcgggcagggaatttaatcgtacaggaatcagttgcaaactctttgctgtttgctcttcaatcaatgtaccagccgcaaacaaaattgaaatattagaatttcaccattaaagttgattattggtatctttcatcatgctttatttcttacattgacctttagatcactaanaacgtactccatccgggtttgtaatattntcattntagataaggatgaggtcaaactntagaatctttgatat

SEQ ID NO: 44473 - DNA, 475 bp, Oryza sativa
  unsure (1)..(475): unsure at all n locations
tgccgacctcatccgtgcgccgggccgccgccgtgcgtcatctccttctgtggtgaaccccggagatgcgccgccgccgccgccccaccgtggccgagccatcctggctcgggccggccgccgtcgcgaggaagaattgggaaaagaaaaggagagagagaggaagaacagtgtccaagggcattttagtacttacacaactctctctctccattnttaccggaaataataaaataatgggaggagtatccagcagctaattaccacttttttgcagtgtccaccagcaaatacacgatcttcaggtgtctcacagcanagaccgcaatctttctgtgtcctgtagcaaattntgcctaanaccaattaatttatgtccacatctacattaccaagcaaacactccattttctggtcctatcgaatgatcaatgtctntatgtacccgactganaagattacagatcactaaaca

SEQ ID NO: 44474 - DNA, 429 bp, Oryza sativa
  unsure (1)..(429): unsure at all n locations
aaaccttggctcccggtaatgtgtaagattcactttcctttttgaatctccagactgatggaaacaagattccctatagaagatatagccgccaacctttagccatcttaccattctctttactagcttctcaacctacagtaacagtatgaggtagcaaactcagaagacatagccaagacataccaagtttcaacacaaagtcgatttatatcatccagggttcatttcccaagacatattcagatgtgcaaagaaggatcgcaacagatcttaaatatgcttatttatttgaaatgagacacgatatgaggcctatttngtactatctgctcattacctcctcggctgaaagatacatcagtaaccaagttgaagatatcagatcaatggagttatcctcaatcatcaggtcttgacatgtgacat

SEQ ID NO: 44475 - DNA, 448 bp, Oryza sativa
tgcacctggtgaagtcgatgtgatgtctatacttccagcacgcacaaatctggcaagtgatatattgcgaataattcaagggaggttaggccaccaacatgctaggacgcagagcttctgcactggcataagagaatttccctcatctgcggccaatcaccacagaagaagtcggctccaacaacgcacctgtatatacatagtctcctaagggacaatggtataaactctgcgccacatgccaactctaaagaagggcaggagaacaatctcatttctttaatagagacagctcgcaagcccgccaacgatctgatacaccaacaggaacgaatggccgagacattgatattggccagatgttggaggacctcttccgatggaagcgtagttaaagtcataatgcctgttaagctcaattctctaagcgaagtgaggccaccaatgc

SEQ ID NO: 44476 - DNA, 453 bp, Oryza sativa
aaactaagcttgtcgcatatacggcgcgtggttgcgaactatcttctttagttgcgaatggaaccgaagaggtgaacaatgaacgactcataggccttccttcggatatttgcgggtcgtgcaaagggaatgaaaccgacctcgaaaggctcatcgatactgtgttccccaacctaaacgataacctgacggacccaaactacatcacatgtagggccatattgtgcactccgaatgagttcgtcgatcgaataaacatgaagatgattgagcggtttataggggatgagatgacatatcatagttttgaccgagcagatgatgaccctcataactattacccgccggaattcttgaactctctaactccaaatgggctacctccgcatgtgcttaagctgaagataagatggcccatcatgcttttgaggaacattgacccagccaacggac

SEQ ID NO: 44477 - DNA, 462 bp, Oryza sativa
actcagcttgaagagaagttatgtttaattaataaactcccatatttatggtgcctgataaaagttcattaaatactctgcttaattctataagtcctagatctttctgggatttatttgagctaaagaagtatttttaataaatggaattgcatttcataaataatttaaattgaaaaaagttttaaaaagtctcttttggcttttggccgaaagtcggcccaaaacccttctctctctgctcagtccagtacgacgccgagcgcgcgcgcgtccgcccgctgacaggtgggccccacctgtcaaggtcgtcgtcaacctccggccgctgccgcccgaaaccctagtttcgcgccgccgccgttcctttctaaatacggccgctcctttccttctccggccgaatcaatagaggggaaacaatctcccggatctcctccgccttttctcctttggaaacat

SEQ ID NO: 44478 - DNA, 490 bp, Oryza sativa
  unsure (1)..(490): unsure at all n locations
tcacactaccacatgtttcanaatatagtgaacctaattatttatgatgtattaagcggatattgatcattaattgtgcatatgccaatttatgaacgaattaattgacactgataaacccctatctcaaaagatgaactaagagagacgacgacaaccatgatcgatggcatcaggacagcactgagatcaatcggagagggagagattagcatctcagcctatgacacttcgttggttgcccttctgaagaggctagatgggggtgatggtcctcagttcccatcaaccatcgactggatcgttcagaatcagctaccggatggttcatggggtgatgcctccttcttcatgatgggagaccggatcatgagcaccctcgcttgtggtgtagcgttgaagtcatggaacatccacaccgataaatgcgagagaggtatgtgtatatcactagatttcctttcttcattgtctcttcttgtggcacaat

SEQ ID NO: 44479 - DNA, 417 bp, Oryza sativa
  unsure (1)..(417): unsure at all n locations
tcgggtcggacatnccttctntgcagaagtgtggagattatggatatcccatatctacacggcgatgatatttggactggatatatgataccgaatatatatagaatatcttatttgtatctcgggttcgtttcttaacttgtacatcaaggaaacaccttgagacttagtcggttacgactgtattttacctgtatctgcatattccgttaggatatagattatcttttgtaacacggactccttcccatatataaagngggtccgggtgcctctatgggcagagatgttgattntctccaaatcatacaatcaataatacactcggcggattcatccccggacaggagtagggtattacttcttgaataagaaggcctgaacctgtataaatcctttgtttcaaacccatacact

SEQ ID NO: 44480 - DNA, 391 bp, Oryza sativa
ttaggacctattaaactcagcttcgcatcgagctgtgtcagtgtacaccgtttgtttggctacttatagataggtatggtgaaattaaaatgcctgagtgtggatcggatcaattggccagaaacacattgtcagcttctggcctttttgttactattattttctggggtctttggaacattggatcaatggtatgtcaaaacaagatttgttgtgactttgacttaagatccgttttgttcaagtattctgatgataatgcaacaagcctaacgaaaataaccatatacttctttcttgtacgttacccaccatatgattccccatgtgtgtgttctgctgttttaagatcacctaacaaaaacaaagaattcctttgttcaaaaagaat

SEQ ID NO: 44481 - DNA, 316 bp, Oryza sativa
  unsure (1)..(316): unsure at all n locations
tcgccatggattccttcaatttattggcggaccagaatctctcgacgcctatggctcaaattataagctaaaactgtcaacgggggatacctgtagaccggatatagaaggtattgtggtacgctggtacgaggatctacgtaatacgacatcaagcaaatagaagacaaggattatactggttcaggccccttgacaggtaatagccctaatccaattggtatgggattttatgaaggaagtcacagattacaaaggaaataatggaactcgatgataccgacgagatcgtnagtgaattggttcgactagatca

SEQ ID NO: 44482 - DNA, 496 bp, Oryza sativa
tgcccgcggtacaccaaacacacacttatcggggttcagttttatgctggcggagcggaggctctcaaaagtttccgctaaatctgaaagtaacgtttcctggttgcgcgtctttacaaccaagtcatcgacataagcctcaacattacgtcctaattggctacccaaagaaattcgagtagtacgttgaaaagtaggacctgcattctttaacccgaagggcattgtcgtataacaataagttcctatgggagtaatgaacgcagttttttcctcatcctccctagccatgcgaatctgatggtaaccagagtatgcatctagaaaacacaaaaggtcgcaccccgcggtggagtcgacaatctgatctatgcgaggcagggggtaaggatccttatgacatgccttgttaaggtcggtgtagtcgatgcacatccgaagcttggccgtcgccttgggaacgaccaccgggttcgccagccactccggatagatg

SEQ ID NO: 44483 - DNA, 500 bp, Oryza sativa
  unsure (1)..(500): unsure at all n locations
ntagctgaagtaacttgtcaatcaatcaatatatatatatatatatctcatatttatcaacttacaaacacacaattgttaactacatataagcaaattaagagacatttgatcggaaactcaaccagagtaaagagctaaaataaaatggaaatgaaaatgaaaaaaacatatgcataaatactctgaatatttgagggctatttaaatgagaaaatagatntcaagagcttaccttatattgcttatatatgtaattaaatttcagatattttgagggttcatattacttatatttgccttattatcttacaaaaaaaatataatggattttcttttgttggaaactcggtgcacattgttttttttttgacaagtcaaattccaagttcaactttcataataccccgtacttctcaaattaagttcttgtaaccactgtttattatgtaaaanaaacacatttatatcctgtagaaaacttatatgcaaacttagat

SEQ ID NO: 44484 - DNA, 344 bp, Oryza sativa
tgtgtagtggctatgccacacattacgaatgtgtagtcctgtagaattacaaccatccaacgacctatcctttgtgccagaccatatagggtaacttcctctaaactttctcaccaaaaagaaagcagaagaaatagcttcactctataaccattgtattcatggtgaccaaacacaactatcatgcactcttaatagcatcactacacactctagccaactaaataaaatagagtaagtgaagtttaaagaaaatatgattgttcaacaggccacaacaataaataaaccttagtcttggtcatacctgattgcatccttggaacatgtttagtttcttgaca

SEQ ID NO: 44485 - DNA, 492 bp, Oryza sativa
  unsure (1)..(492): unsure at all n locations
tatctagaagagntcgagttcaagaaggataccacatgacagttatctattaattangnatagnttgctaggttccttttatctttaagaaagaatgtttaacgtctgataaagactttatcttttcctttctagattctttcttgtccgacaaggactagtatctccctataggtataaatatgtatacccggggtcattgtaatctatcaatctacgatcaatacaattcggcgcatcgccaccctttttacttctacttttgttttttacgtttctgtggaacttggcacccgacgcggngctgcatcgtcttcgatctccggcgaagggataagtccaatggtccgtcggcccaggcaattgtctcatctacatcagcgtcattcaaagctgcatcagtacattcgacctcttggattgctctggtttggatgatatatttgcctacctacttatcatatgtctctattaatctagtcctagcatatc

SEQ ID NO: 44486 - DNA, 226 bp, Oryza sativa
agctggtgtgccacgcattactgcattctgtttgttgtcagtttcacatgatgtgcttgcacttcatggcttgggtgtttgcagagaagacaaacatgaatatcaacttacccaattcacaattttcattttttttctttagattctttttgggagaggatgcggggcggtggccctacctcaacttaacataaactctctctaccacccaacaaagatccaccct

SEQ ID NO: 44487 - DNA, 447 bp, Oryza sativa
acacagggttcaaatgtctagatgtttctaccggcagggtatatgtatctcgtgatgtcacctttgatgaacaagtgtttccctttgctaatcttcatccaaatgctggcgcccggcttcgagctgaaatttctttgcttcctcctactctaatcaatgagaaaacatctgatcaagggggagaggaacatcatgatcatctgtttaatatctctatgccaaatgctactgatatttcatgtgcagaatctcccagaaatgtgaattcagaatataccggggcatttggccggctacatggagcaaatggcgacttggcgggagaatccgcctcagattcagcgtcggtccacgcgcagctgcagcggcaggccttcggatctgcgacgcatggggagtcggagcagcagcgctcggggattcaaccagcgcgcgcgccacgtcgct

SEQ ID NO: 44488 - DNA, 485 bp, Oryza sativa
  unsure (1)..(485): unsure at all n locations
tgtcacttcaagaagaaatgctgagaagtatgagatcctgatctttgtctatccacaatggagattgaatcacattcagactactataagtgaggagatgtttgcccatgttagtatatcgaagatcaaaagggcaaaagctttagtgatgaagaaaatgtttgatgataagaagggagaatacagtttggtgtttaattatcaagaagaattactgagaagtaatcctggaagcacagtgatggtaaaactagacttatatgaagtagaacctgtgtttcacagattttatgtttgttttgatgcttgcaaaaggggcttccttgctggttgtaagaaggtagttggtttaaatggctgtnttttcaagggagcaaccaatggtgaacttctttgtgctattggtagagatgcaaataaccaaatgtaccctattgcatgggcagctgttgagaaagagataacgactcttgngactgtgtttg

SEQ ID NO: 44489 - DNA, 309 bp, Oryza sativa
tacataaatggtccgagcgttcaaagtgtgggtgcagagatcgctggcaggtggctacatcctttgctgaacaaacatttctaaggagatattctgtctgcccccatgtagacaacgagttccatgtatgtctaaccatttacaaaattcgctatgatttgcacaaaattactacccaaaccgaataacattactatttttacatggcaattcaaggatgggtggatttactcgatggatcgacaatgtcactccatcatatcatggccagaagataacacagtctgtaacaccagtagagtatctacc

SEQ ID NO: 44490 - DNA, 420 bp, Oryza sativa
  unsure (1)..(420): unsure at all n locations
atcaaaagcagagcactccaagtcaaaagctaccaaccagttcacctaccaacaatggaatttcattatgaaaaccatacaccgaaaccaaaaccttggttaggacaataaagcaatacctcatacatagtttacaccatcatcgctacagatctaagacacaccttgtgcatcacatgacccatccaacccacggacaaaagcatcataccatcataccactaatgagatcccatagcacagaggatgctccgatgatcgcacgttgcatcanatatgcgaaaagcttatcagcagcggaagtgtacgattgctgtaaacaattgcccattctcattttatccaatatanatgtattatgcccaatcacccaaacagatatcgttgcaggtactaaccattctaacagatcacatatac

SEQ ID NO: 44491 - DNA, 489 bp, Oryza sativa
  unsure (1)..(489): unsure at all n locations
tctctccgaagtgcccaagtacaagcagatcattctctcctttctcttcgagaggctcagggtatgtatcccccctatgtcttcctctccatgaatctgtagcagtatctgtaacaatttggaatcgagtcattggaaggtcgtaaaccatgttgtctctgaattgcttcacaggctcacaatgcgatgattatattccctctttcttttccttntaaaaggggttaaatggatttatgctattaagaatttgcctgttttgaaaaaaaaaatgtcattacaattcgtctagttggaacgatgccattaaaatcagaaatacaattaggacaatatcttatccttcacccttagaatgggatagtgtgatgagacaatctctgtctctcatatatcaccttttcacacaccctttcctcatagccctgtcgtctacatgagccccaatgtcacatcgngcaccttntatcgatgctggtgagtcacatg

SEQ ID NO: 44492 - DNA, 503 bp, Oryza sativa
  unsure (1)..(503): unsure at all n locations
gcttgtggagtgcgtctgaaattcactaaaccatcttgggaattcactatactattttgagtagaatatcacggtgaccgtatgattaccgtacagttacccgaaaatttactatggtttcaaaaactgaaaaagttatcgcacatgctgaaaaagttatcgcacatgctaattggctaggctgtgaacactgttgttatatggggttaaattgcgcaagcgcaactgggtttgccgatactggtttcttcaatgatgcacgcctggtttagagactacatcttcagacaaacacgtcaatatgatgcgctgcaatacggngcaggcaccgcgagcatcatcccgtgctgacaatcaactcagaagtcaaaacacacagcatctgatcacatataggagaaagtatntacatggacccttncgggttcggacaaacacacaagtagagcgaaacgtaggcatgtacaagaaccgtcgtttcagttntccccatgagcaaaaca

SEQ ID NO: 44493 - DNA, 468 bp, Oryza sativa
  unsure (1)..(468): unsure at all n locations
tatgatattttattaatgaaacacaatcgttatgaagacactcatatnaactagatgattcccccacgctgctgcgggaattggtataaaacttttgtttgcaaatttcatgataagaaatttagaaggcattgggtatatataaaaatgctagctataacttaagtcaaaatagaaatacacaagattataatttataaaaaaaacttgacatatagaaaaacaaagatgatattatgatagtatatatgttgatagcgtgaataatcgattattgaactgtcttgtcttgtgatcgaaacagacatgccctatataggcatagttcatttttctttaatataatttagagacaaccataaatgtatatgctagtctatatatgatatatgttcattaattaagaatatatgtacacaaaattaanaagaatatgaaattggtaccataccgttagcttcatgcatg

SEQ ID NO: 44494 - DNA, 499 bp, Oryza sativa
  unsure (1)..(499): unsure at all n locations
tgttgctattagacaaccctcaccgagaactagactctanaatttatatactttgatatgtttcctattggcacctttgttagggaggccaaattccttctttgctgtaactttatcgagtttgctgtaactaactgttcttatgggtgtaacttatgccttgtttgtttcagcttaagattattgaaatctagattattaaatcagatttctctaaactagattatattaagctgacataaaataagctacgagttgtttgtttctctggattattagaggcatctaagggtagtgggtctttagacactcaataatctggaaaaagctcctctagaggagattattggattatagtaatctggcttatagattgtaataatctagcataataatctacttgtttgtttcagcttacttctaataatctagattataataattctaagctgaatcaaacagggcctaagtagctcgtgaacttgctcactttggtgtg

SEQ ID NO: 44495 - DNA, 483 bp, Oryza sativa
  unsure (1)..(483): unsure at all n locations
tggccgatcgagtggccagtgttgtactattcttggtgattatctcagcctctgggcgatatacatttaacatttctagggtgctgaatagtaaattccaagtgaaggatctggacagagatcttcacgttcagtggggcatgcatgctcaactctgaattaatcacaccgacaaccgagtatagtacgtactttgtactcacatgcacgtgtgctagctactagtatagtatatatatacgttgtactagtacatcataaaacatggaaaaagttcagtaaaattatgttcatttgtgatagtttagtgcttaattaataggattatcagccaaggatttcttcgaaactcaggattataaaaatataggaacaaagaacatcgtagaaatatgaatttggttagaggaagcaggcaggagctctgctatttcatattaggaanagagacacagaaagaattgtacacgagcagcaatccct

SEQ ID NO: 44496 - DNA, 494 bp, Oryza sativa
  unsure (1)..(494): unsure at all n locations
tganagggtctccagtagtaagcggattgtctcaaagacagctctcttcagacagtccattagataagttgtctccgtctgcacggagcttgtctgcaaagcgcttatcatctgttagcccgcttgacaaacagtctccatttggtagcagctcgtcgaagaggctctcatccagatgcccttcttctaaaaaatctttctgcagtaaagccttgtcatccaagcggatgtcatctggtgatgcttctgctggagtccgtgatcttaacgaagtgaatgcagatatggaatttgactgccctgcatcangtaactcaacatgtccaaagcttgtactttgacattgtccctaagattacttattttctgattgagagcaccttgcagatgatcagctggaactgaaagaacatggngattctgagggtgtgttaaagcgtttatttacactctgtgagtctgcagatatgatatgatggatttaaatatagctt

SEQ ID NO: 44497 - DNA, 416 bp, Oryza sativa
  unsure (1)..(416): unsure at all n locations
acacgcacttatcgnggttcatgtatatgctggcggagcggagaatttcaaaagtttccgctagatctgagagaaaagtctctttggtgcgcgtctttacaaccaagtcatcgacataagcctcaacattacgccctatttggctacccaaagaaatgcgagtagtacgttgaaaagtaggacctgcattctttaacccgaagggcattgatgtataacaataggttcctacgggggtaatgaacgcagntttttcctcatccttcctagccatgcgaatctgatggaaccagagtatgcatctagaaaacacaaaaggtcgcaccccgcggtggagtcgacaatctgatctatgcgaggcagggggtaagggtccttangacatgccttgttaaggtcggtgtagtcgatgcaca

SEQ ID NO: 44498 - DNA, 450 bp, Oryza sativa
  unsure (1)..(450): unsure at all n locations
gagagaggtaactattcgttgaatcacagntntattataatgtatcatttatacttattcgtagtgaaccaaatccattggttaggctaggctcaaaggaaaaaatatacatatatgatggtctttataagatcgaagaagagtacagacaaacaacaaaatctcgttctaacttaaagttcaacaagttggtcagggaactatgccagcctaatggcattgtagtatggaagaatactcagaaatggagggaaaatccatcttgtagagatcatgtcataatgcctgacatgtcaaatggtgcagaaatagctcgtgtttgtgttgtaaacaacattgatagtgaggatgctcctaacaactctacctattcaactaaacttgataatgggaatcatatggtttcagcaaacaagatgtgtgtctgcaaatgcacaagctcatgccttg

SEQ ID NO: 44499 - DNA, 481 bp, Oryza sativa
  unsure (1)..(481): unsure at all n locations
atggctactcgtgcacaaagcgcaccacctttatctgttctggtagctagaccaaaaatgctagcattgtgaacgatgttgccaccggctggcgaggccatgtgcatgccatggccatgcacatccctatgagatagaaattcattcttgctcatgctatctagattatcgtcatcgatgtaccaccgtgcaccgataagttttcggttgcaactntttgcctcaaacgaggggccgacttggcaaattcctttccatttggatggaggagggccatatccatcatcagcgaagctgggtgactcgggcgtaatacctgccagataatagaagatatgactatatacccttgagaatttggtcaatctcttgtgtgccccttgaatttacctcatcccttacatatccctaagatttcaattttgatgctcattctgttaagtgaccatgagttgactcaaaaatggttttgaattcacta

SEQ ID NO: 44500 - DNA, 495 bp, Oryza sativa
  unsure (1)..(495): unsure at all n locations
actcaagctggagtttaactcttacatatgggtgttgcgcttgtgtaattgtgttgcctctagcacctggccacctgctacgagaaaatggccctgctccttttataatttttctcaagatttttaccacggattatttgctcctcacttcttaaaaaatatgatttcttaaaaaaaaaaactttctctccactacagcgattagacaacctattctaaactatntttaagtttagtcttcaaaatattaatcattatattaatcaaataaacaatccgtgacaataatccaagcaaatgtatatgcatctcatgttggtgtcatgattggggatgcgtcacttagatttgtgttgtgttgatagcatgttttagattggtgggttagtagtatattagatcgccaaaagcttggatgtgacataagagttattgcctgtataaactatgcatattagcatgctcactaatttggatttcctctcttgtatgtct

SEQ ID NO: 44501 - DNA, 433 bp, Oryza sativa
  unsure (1)..(433): unsure at all n locations
tctcgttcttgccttaccaggaacccgcgatgtccgatcccgtctctttgttcccaactattggcatgcgacgattgcctgaaccgactagttacttaaccaaggtgtcccatttcaccttgtggttgcgctttgattatgttcgatgagtttcccacacgaatcggaccttatatgcgaatacgggacagtgccacataagcacaaccncccgcatcgagagttttcacaatttattttattttcaaacacaccgacaccacatgtcaggttttgaaagcttcacaaacccattttccaagtcttcgacaaacaacggtgtatgtgggatatttggtatacgcgctcagagagcacgaataccgaggtaccacaatggtggagcgacaaggaaatcagggtagtacgacctatggaaattatagcgactact

SEQ ID NO: 44502 - DNA, 457 bp, Oryza sativa
cttgctgcatatattctttatccatggccgcacaatgttgatggcgagacaacggcgcaatgttgatggtgagacaacgcaatcaataatctatgaggggtccaactatcaatccatatatgctaccaccgcacatgtacattgtatacatgccaacggctgagatgagaaccaaatgcggatcaaacaaaaatggaagagataaagatggtctttctaacaagaggatctgtgcatattgcatctttggggaaaaatcttcccctcgtgtacaatttcagactttcagtctctcatcaaccgcatcaattttccttttcgccatattggtgtacaatagtagaagctacaaactaacatcttggaagcacatcatcaacctctaaatcaacataacccaaaaaaaaatctcaaaatggcgccttggcttgattctgaactgtactcggactgctgc

SEQ ID NO: 44503 - DNA, 487 bp, Oryza sativa
  unsure (1)..(487): unsure at all n locations
agaacggctagacgatggagacaactcctcctttctctgatgactataananaacacgagctggccactgctcatggagcccccacatcactcgaaaatcaagtcatgcgccgccagaccgactcctcgccttcgagaactccgtgccgacgccatcttctcgcaagctcgaggcgtncgcctcctgggcccatcggcctacaccaccacgctggggacgccgccagcaacctacttcatgtcgacgccgccgtgcgctcctcctcccttcgccagatccgatcgctgcacggcagctaccaccagatcggaaggcagcgtggagcttgtattgagtagacaggtaaatcgacgacgaggtagtgagaaggacgaagacctaacccgattgaatgttggatcgaccgactcgttgtcgacgtactgagcctctcaccattgagctcgagctcgagctcagcggcaccggcagcaatgagagagagag

SEQ ID NO: 44504 - DNA, 480 bp, Oryza sativa
  unsure (1)..(480): unsure at all n locations
gagacaaaggccgcatgccattcattgatttatctcttcatcacacagtatgtgccggatgtaatccggtattacagaacggcgcacagttcatgtagacagctcggcattccgagctagagaatgagccgccaaatgggacaaccggtgaacatgcataaaagagcatataacaaacgtggacgccaacttcttgatatcttcgatcacgcactccacccctgagcgagcccttcctgaagtntggatgcgtctgattacagagagacaatcagatgccatgacaatgtgtgccaggccctctttctttggtagacccagtgcccgcctaattgccagcgcttctgcaagctcatgtagcaccacatcgctgatcatcttcgagcaagcaaccaggcatattcctgtattaacaccaatcagaggcccgacccacatggtcctggacgagctgaggatcgcagcatcagaggtgatcat

SEQ ID NO: 44505 - DNA, 495 bp, Oryza sativa
  unsure (1)..(495): unsure at all n locations
ngactatgttccaccccgctcttaaaagggttccagactggtcattcgatcataaatagcttaccatagctttcggctcttgaacccaatgatcctccataatctcataaatttcacgctttttaacatcctcaagcaggatttcatgaacatcaacaacattgcggtggtctactttgctgagatattctatggcaactctatacccattcaatcagtaaacccctttagtgcgtaccatcagcgctatatgaggacgagtgactactagccttgcaaaatatgatggcatattgtataactttacaaactcagtggcatattatagaatagggacaaagtcaacggcacataatggattctctctaaaaaaataatctagtcaaattgtttctttatctcatttaaaacaaaacattctttcaccaaacacattagtagaaattcgaaagaaggtaagaaaaagaggaggttaatcactatctcatacacacg

SEQ ID NO: 44506 - DNA, 489 bp, Oryza sativa
  unsure (1)..(489): unsure at all n locations
ttcccgaaaattagccttttatgattatattggtaataatccggcaaaggggggattattcagagcaggctcaatggacaatggggatggaatagctgttggatggttaggacatcctatctttagagataaagaagggcgcgaactttttgtacgccgtatgcctactttttttgaaacatttccggttgttttggtagatgaagagggaattgtgagagcggacgttccttttagaagagcagaatccaaatatagtgttgaacaagtaggcgtaacggtggagttctatggtggcgaacttaatggagtaagttattctgatcctgctactgtaaaaaaatatgcgaggcgttcccaattagggggaaattttgaattagatcgggctactntgaaatcagatggtgtttttcgcagcagtccaagggggttggtcactnttggtcatgctacctttgctttgctcttctttttcggacacatttg

SEQ ID NO: 44507 - DNA, 487 bp, Oryza sativa
tgtacatgcattcatggattcctacttcccagcagaatcaggggaaccatctccatacgaaaccaaacctttcttcccttcagaactggcagagggtgaccgggactttgcattactctctcgctttggggacagggaagcaagtggggagcgattgtgtattggtggtggagaccttgatcttgacccagacaggctcctgctccttgacattgaacgcgagcgatcaccatgcgaccttagtttcccaccagcaggagagcggctgcgcacaggactcctgctgcgtccacctccccttcctctgtctcgataaacaggacttcgtgagatgcttcggctcctcctcctgtacctgttaggcctcaagggacaaacaaaacagaatcatggaattgaaccataaactagactatggcagtgcatacctacaggctacagcattggctcaaggatgaacattacattaacaacaataacatgtaaa

SEQ ID NO: 44508 - DNA, 494 bp, Oryza sativa
  unsure (1)..(494): unsure at all n locations
tgcatatatatcctccaactgagaagggagaaaatattatctatttatatttgccttaccgaagcagacaaacaattagtgttaaaaaatacatagtaacaacaagaaatataaatgtgaataatttcatgaaacaaccaactgaaagaagtagagatgcactatgagtttggcttttttttttcttttgcaaggatgcgatgcacaaataatatcaacttttcgtatttgacaagttttttaaaagaatagtgagttgataggtttatttcactaagaggaataattactattggacacccgacatagatttgggttatgggaatattagctaacatgtatgaaagaatgcacatacaacttaagaagtctacatacagaactaggtactaataatggatgtggacaaactaaaggagcaatgctttaaaaatgaagtgatatttaacataaagctaatatatatgctacagacctgatanatgtctactact

SEQ ID NO: 44509 - DNA, 419 bp, Oryza sativa
ttggcgaaaaaaactagtcggataaataacatatttaaaacaaatacaggttaaactaagtatattaggcataacaagcgtttcgttcttgtagagtagataattggattttgattgagttatttttctaagggaaaaaggaaaaggaggattcaaaatccttttttcttcggactttcccaaacacaaaatacctccttgtattcgcactctcaaatgagagtggaagaaattcgactttcatataatatcttaatagaattccatgtaatgatcaatgcattttttggattctatattattcgcatgtctagaatcctaccaagagaataccccccatttttatgtaattgaagtaggattgacgaataagaaataaacataatactcgttattagtgtcgcataaaacccgaaatg

SEQ ID NO: 44510 - DNA, 436 bp, Oryza sativa
  unsure (1)..(436): unsure at all n locations
aactaagctgcctcctctnctccacttggcatcggacgcttatccttctgccccaagggagatggtacttcttcttggaggcataatctttgtttctttccatcatcgactgcccttgttgacctgtcttgtaaacaacgaactcgtcccactgatcccttagcttcgggaatacttcgaagttcagtgtctgccccttgaggatgtatttcacggacagatctcacttgaaggtctctaactgttctgccattctgttaatagtgcactgcttcactatgttctctgtacccgcaaggagcgtgaacgtctcgagcattgtggtccacagcatctctctctctgattccatgacaaagctgtcatcacccccgcgtgcccttagtctgcgccagtacaccttgctgacaggcacgttatccctcacaacccaacc

SEQ ID NO: 44511 - DNA, 403 bp, Oryza sativa
tcagctatgtgagcttcatcataatcaatatgagagcctatgtgtttgtcttagcataccatctgctatgcttctgtgtacacctttctgtgtgagttgcccaatgctcgcaattgatgttgattgatgagaggctacacggggccaccgggtttacagagtgataaagatcacggtgtcgtggtatttcttgctgagctggacttcatctttaacgaaatatgagtgctcccttgtgattgctactagaacatctatgtatgcctctttatacctagctcccatgggcttacttgccttctgctcctctacatggactccggctgctattgctttgcttgctccacacttcagaatgatgtgcttctgtgctgaccatgtacaactgatctttatgcgtggc

SEQ ID NO: 44512 - DNA, 487 bp, Oryza sativa
  unsure (1)..(487): unsure at all n locations
actaagcttgacaagctgccacgtacaggtacatctctctggcgaacatggtgcgcacaaactaactctggattctctcttgagtttaatactgtgatttgtttttggagcctgtacgtgcttataggattatgaactacaggaattaacatacatatctatgactaacaacatctaccactaagtttagcaatagtcgtactaattatactatacaaacagnatattactaagatactactttcatattttaatgtatgacaccgctaaatttttgtctaacgacggttgacattcgtcttattcaaaaatatttatgtaattatcatttattttatggtgacttgagtcatcatttaatatnttttaagtatgacataattnntttatatttataacaaaacaaatgaacaatcaaatattaattaaaagatcaacggcattgtacattaaaatacgatgggagtattaantaagaagataacat

SEQ ID NO: 44513 - DNA, 391 bp, Oryza sativa
  unsure (1)..(391): unsure at all n locations
ataaattaatagaatatttttcttggaaaanaacttgtatgatgtatactgggtaatggctactttattctgttccagcaaagggaatactgatctttgtgatggacaattacgacaatagccacaatactagttaatctatagcctgacttatcctgcagatgagaagaagaatgcccttcttgatggatacatttttagtggtttatctgatgaattaaagcaaaagattgttgtaagtgatgggacaagatgagaatatgaattgcgcgtgctcgtgtcctttattctgttgtcacccatttccttataaataccacgttgttgcatctgggagacatgatgttacagaaagaaccgggcaattcttctctggtaattccaaatatgt

SEQ ID NO: 44514 - DNA, 340 bp, Oryza sativa
gagctcagacatgttgaagatgccacgtggcagatgaccccataaactgttgtcttgaagaacgagtagcgtgagaccggacagagatgctatgctgtctggtatttttcccgagaggctattgttgccgagggtgagtacgcttcacaatggtgtgatgttgaaaacgctgttccgtattggcccgcttaagtagttggtgtcaagacggatgtatcttaaggtacccaaaatttgcagctcccgatggatctgacctgacagatgggtatggtacaggtcaagttgctggaagctcgtgaggttgcccatagcaccaggaatagtacccgacaagcta

SEQ ID NO: 44515 - DNA, 491 bp, Oryza sativa
ctcagctgcgaggtgtacagtgatgttgaacaagaactggtcaaatgttatgcgtgttcaaagctcctcatagatgactagtactgaggggtttgactgacagaaactgatttgaccatttgctagacgatctgtctttttttttttcaaaatcagtcattatctctaaaagaaatatttaactacagaagaagttaccatatcaattgactaagtccacaatggccttgtaagtaattaagtgatatagtaaactcactagctgactatacatggaactattgttcttacacttatactccagtactgctgccatgaatatgatagcatttcttttttgtgtcttgaaaatttatttacatatatgctactcaatgctaaaaaagtatcatctgattcattaatctaattgaacttgcggtcaactcaatacagtcttttaagtgctgatggttgcactctgctatcaattttattaactaatatacatg

SEQ ID NO: 44516 - DNA, 443 bp, Oryza sativa
  unsure (1)..(443): unsure at all n locations
ctaagcttgtagaattatgatcccattttgcgtcagacatgctcttcaattccaatttattaaatcaaggtgcaagactggcaattcattttgtctacaaaaatgtcatgtgtttttgtaaaagcgtacgatccatttcatacaagattctttcaggaggcaatcatgcctttggaggaaaactgccaggaaggaatcatacaagaaaactatcaacatgaacaaccggctcaaagatcaatgaagatgacaaaagaatgcaccttttgcagttccataaaatcaaataaccttgcaaccagaccagataaagaatctattctgatttgattgcacaacaaggaataatcaagctggaattgtgacgcttatggtagctctctgtatattgcctacctttcaagataccctngactgaacanaacatgtgtgaacttgtagct

SEQ ID NO: 44517 - DNA, 500 bp, Oryza sativa
  unsure (1)..(500): unsure at all n locations
tangagtctgatacaccttatgcgccatgctcgctcgaccatctctatgtacaatttctgcattactcattatattgcaatgcttctgggaaattatcttgcgtacccacctaaaaaaactaacataagtctccttttagtttccccattctcgtcaccatctagatggcaccagcgtggcaccaaggggctatgatatgcaaccctctctgcaacttcattaaggttaagcacaactcgcccagtgaaaacatccttagcaaagtctttgtcgttgaaaatggcctcaacatacgagaattggatatgttccttggagaaggcaaagacatcgttccactttgggttagtactctattcgaagtgtggagtggtgctctaattgccaaaacatatgggtcacacctcccagtaatttcttttgcaacgaggtccctgcacgcatatacaaatattgaatgtactccataagatcgaaatgtactttcgagtatatcatt

SEQ ID NO: 44518 - DNA, 414 bp, Oryza sativa
agctccatggggagcatgctatccctatcacagcaatagtcgaacctattatttatataaacaccgctcaaccactgtcccgaaatgaacaaagccactcatcatctctctgaaactgagagcatcaacttgaaccatggcttattcaccctcaactcctatactatgcggtcgaacaatattaaacgacgctaacccgctatacgagtggccctgacgcctaaattaacatctacaacctgaaatctaagtggggggatcacatcatgtgaataacgcacaccattatcgagaggcataccagagataggcaccaccgaaatttcagaactaattaatcaagcaaatggacataagagtgctacgcataaccacatcctaacgcacatgaagagaagagaggctacacctgct

SEQ ID NO: 44519 - DNA, 484 bp, Oryza sativa
  unsure (1)..(484): unsure at all n locations
gttctatcctagtgatgttgatggtgaagaaatgaaccttcttctctttcaactgaaccgctatatattattgatgtgggtaaggatgagaatttcacaaatttgagaagtttagcagatctatctatgatgcttgtcaaaacaaacaaggtttctcgctagaccttgtttacagacttctcaaattggtgttagttctccctgctgcaactgctggtgttgagagggttctctcttcaatgaactatatcaaaaacaagttaagaagcaagatgggacaagaatatttgaatgattgcttggntacattcattgaaagggatttcttcttgcgagtcaaggataaacacatcatcaatcattttcaaaagggataagtccattntacacccttgaactcttcattntgtctaaaatacacccaaaactctaaaaccggatatttcaaaccctcaactttaataccttcactttacccctcgag

SEQ ID NO: 44520 - DNA, 424 bp, Oryza sativa
  unsure (1)..(424): unsure at all n locations
cgacactatagaaacgtgagctggcctcagaatctcataatacaaccatgtgagagctttgattatttttctactggtcacctcgctgctgaccagtgcatgctaaatggagggtcaagttccgtacagaccatatcataagccgcagaaaacaatatggaagaacctacaccagtagtctccgcatctccacaaccagaagataactctggattccagccgggatcaaccttatcagtcagaccaattgggtgtaacaacagaaaggccaaaagttgtatctcataaattctagaatggttaaaacagtaattntagctccattgtgaaacttacctacacttccaagatgaaatcatctcgccattgtatttttaataaaanaaaaagggcggggggggggggggggataactctttactga

SEQ ID NO: 44521 - DNA, 478 bp, Oryza sativa
  unsure (1)..(478): unsure at all n locations
ctcagcttatgtcctcttgtcaggctcctaattcanataaaatagctcttgactgtagcattgtcggctcgagaatcaaagtacggtggcctgctgatgaaatgtaagtgtgataatcatcaaatatgtttcttatttgaagagatgttctaaaacatgcatctatattataattagtgctcaatggtttgttgtttattcattggacttgtttatataaaacttttggcgacttacacctggtgtatggagctatgtaccaatgttntaccatttgctatattgttcaattgttaatgctggttcttattgaacttccattgctttagtcctctggttttataacgaactctcatgagttatactggagttatgtgtgtatgttctaggcttctcttattaattttgaattcattgcatgctctgcacgttctacaatggattggttaagtcatttgatgcttcttcagaaacacac

SEQ ID NO: 44522 - DNA, 410 bp, Oryza sativa
ctagcatcgatccacatgcagctatatatccatggccatggcgatgagttttccttgtttttacatgttgcagggctgaacaagtgtggcaagagctgcaggctaagatggacgaactacctgaggccagacatcaagagaggaaagttcacctctgccgagaaggataccatcctgcagcttcacgccgttcttggcaacaagtacgtactgcagtgcactgcacctcctcatgaaatccatagcatacatatgccttacttgcatccatcaactggctcatatatgcatctaatccatatgaatcgaccatgctaggcaattaggatgcagttcactgacacgctaactgatactgactgctgctaactagatagtagctcaatctgctactgatgatatttaattct

SEQ ID NO: 44523 - DNA, 473 bp, Oryza sativa
  unsure (1)..(473): unsure at all n locations
taacctctaagagtaacaaacacaatcgaagatntgcttgctatgaatccaagtgctcaaagattggagtaaagctcactagctcttaacttctcttctcaaccactcaacccccaaactcttctcttttcaaatcccttctcaacttctaactcacaacacaaaggtataatattggggagtggttctttttgattttggatggatatactcttgcacaaagtcagcaaccatggatggagagggtggtactctntcattgcgtttgcctatcgggaagaacaatatgcatatcagcacaaagtcatcaaccatggatggagggtgttggtttattcagtgtaacaacctgcatacacttaagtgtatgagcagtccctaaaacttgtgagagtgtcatctaagtctctgaaatctcaaaatatacttttttttgtctccgaacttgtcgtgagtgtcatatagatctaaat

SEQ ID NO: 44524 - DNA, 358 bp, Oryza sativa
  unsure (1)..(358): unsure at all n locations
ccgcgccgcttgttatgtcactgcggngatcctcactaactcttccgagaggacttcgttggcagtcaccgcgggcggagattctttcccgccacttgccagaacgccgcgctcctcgccatcggcactcttcaccagcgctatccggacgagttgcagcactcgccctaccgctaccaccctcgtcgaggaggagcccgcgactacgccaccttcagggatgttagctcggaggatgacgctaccatcatgcacctagcgcgcatggtggaggcgtacgacgcggcccgtattgacttccatcgtatggtgtgctgtgggttggtcgagaacaacatgaagatcctggagctgcgtc

SEQ ID NO: 44525 - DNA, 192 bp, Oryza sativa
  unsure (1)..(192): unsure at all n locations
caacttgcggagcgncatgtgtggacagctatgagtgtcctttttattgggtaaggacatcctgagcgggtaaacaaactatcaatagcgtgctccgtattgacccggacagtatacactggctgactctaactctaacgtggtgggagggtattgctgagaatttatgctgtggacccttcctggaagggg

SEQ ID NO: 44526 - DNA, 469 bp, Oryza sativa
  unsure (1)..(469): unsure at all n locations
ctaagctgacaaggctttaagaaataacagctaagcaagaaacacctttcacagtatatatacaccggcattgtacaaaatgtgcctccatcattcgtcatcaaatatatttacattcaatcagtatcagttttctcatcatcaaagttgccgctgcctgtcggccgaaggtcggtatcttgaaaccgatctactacatcacccgcaattntgtcggctgctttttgtgcgtcgttgatgagatcaagggcagcctcttcgctcgtcccgtccgcaaaaccgtcgatggcatcaatgtcgattttatggtacaaggatttggtcatcgccagggctaaacttgctcccatgcttccggcttctttaatgttcttgaaataagtgtccggagcgactcttagcttgtaaatacttcggaagcatcgaatctactcggaccattgttattatataacatttgctggacaag

SEQ ID NO: 44527 - DNA, 433 bp, Oryza sativa
  unsure (1)..(433): unsure at all n locations
gctttggataatgtccgatcagtgagggtgtgcacatctactaattgatttgtgctggtctgtcttatcgatcttcaatgggtctctcgtgttccagtctggaaacttcacaggttgatattagaccataaccattctagagtttcttttgattatgctcttgattgaatttcaatagcatgtgccgctgctttttgtttgatgctgcatattctaaacttgtctttggagccaatgttntatgtcaaacttgagagctttcttaacaaagctgaattaatggtcattggtctcaaattgcgcacttcactgcatgccaaggaggaatccacattctattagtgcacaattatattatcttggttgtctattaatatttcagcacggacatcttgaataaatttatttacaggtttgacaatctccttttgta

SEQ ID NO: 44528 - DNA, 492 bp, Oryza sativa
  unsure (1)..(492): unsure at all n locations
tcgatgcctcgtcgagcatggactcgttcaatgatatatttttcttattgtatatccaatttgaaatttatttcatattttattataaatataattaatctcattttgaattttagatggtctgtgtaaaacttataacctataagccttatattttaggcttaactacattaattaacactaaattatgctccgaggtgaatacagctccgagctgaatacgtttaaaataaatttacacgattatgattataatttgttgtcagctgccaatgtggccggacgcttctgggtgggttgcatgcattgctggtctggaatgctgtgtgcagctttgctttgtttgctttacctattgngggcgatggtaatcaactttgcttgtcactttgtctgccgcagcagcccaagtatatctacttcatactatctgcgtttatatgtgcggtaacaatgcatatatactcgcgttttggaatcataacaaattct

SEQ ID NO: 44529 - DNA, 352 bp, Oryza sativa
  unsure (1)..(352): unsure at all n locations
gctgtcacgtacacgtacagagatctggctgtcattgtgcgcacaaactaaaanaggaatctctcttgtgtgtaatactgtgatatgtggttggagcctgtacctgctctgaggatcttgaactacagccattcacactacatatctatgagtccaaccattccactaactacctaagtggtctccttatactatcgaacggatgtatctactntatacccatgttggccaatgcgacacaaccatatgataaatanggattgatgacagctgtgaggcctacagtctggagaaaatctttgggaaactatgcttaaagcgtatatgctttataacccatcacctcaaatat

SEQ ID NO: 44530 - DNA, 431 bp, Oryza sativa
  unsure (1)..(431): unsure at all n locations
tggatgacctcacggatgaatccggcctccagaagtcgcgccacctcctcgcggatgaaggcttgacgttccggggcctgccgccgcactttctgccggaccggccttgcgcccggccgcacggcgagacggtgctcaatcacctccctggggaccccgagcatatccgccggtctatatgcgaagacgtcagcgtttgcccgcatgaaggagacgagcgcgtcttcctatttgccgtccagaagaccaccgatccgtgtggtcttggacgggccgtcgcccaaggcaaccttcttgaccgggacctcatcgcacgtgactatccgctgcctcggggcggcgggggcagatgagccaagcctctcgtcgcacccttcggcttggacacgacagcgaggcggtccgcgcgctgctncatacaagcgagcgcg

SEQ ID NO: 44531 - DNA, 495 bp, Oryza sativa
  unsure (1)..(495): unsure at all n locations
ttgcgagataatttgatatagaaggagacaaggtcatatatcttgttatattgaataactggtttcacaagagatgaaagacaattataaaatcgacatactacatctattttattgcagcaagattaaatacaacattgtcaaacttttgctgggaaatgagccattagtacagtaatatatgtacagtactaataacactggaataaaattttaatgagaaccattatgaaaaaattatgaagtgcatgtgccattagtttggtttaattaaaagagaaagggaggagaacagttctacttttccaatatttttcagagggcttctatgggtaaccatttggcataacctacggtcaaagaggctctgataccaacttgtcacgcgcggaatttctatacacaattgcaaacgcttacatgtgtgtgaaccctctgncaggaatcagccgatgcacacaataacatagtgataatagagtacaaatattactc

SEQ ID NO: 44532 - DNA, 468 bp, Oryza sativa
  unsure (1)..(468): unsure at all n locations
gattatcacctaatcgtnctagcccatattaattcttgtttggatgttcgattctaggtacttctcaacaaatttacaaggttcaatccatatattgttgctttgcaactgcagagtatacataaatattccacaagaacatgcagggtgtcatctggtaacctagatacagaggccaccacttgcatgaaaaagttgacataaaaaaatatcttgtgcacttgtgatgcacaagtcccttgccataacttcaaattaaatctggagaattgaacatctaaattttagcttgtggaaaccatcccctattagaaaagtatgtatatgctcagaagatatatcagtaaacaaaatactacagatatgcatgtgtgcaatacatcaacatgcatgacatttattagttgatgtaatcaggtcaccagttcaccatacatttcaaggaaggtataacgcaagccgtatgat

SEQ ID NO: 44533 - DNA, 422 bp, Oryza sativa
  unsure (1)..(422): unsure at all n locations
ccatattcaacctgctgaactcatatatttctaccctccttaaccccatttcgtgaaggatacgatagtactgtgcattccgatcatggtattcacttgagcggagagcatgagtcactccttccaatgcgtcgacaaatggacaagcaaagtcataagttggatagaccttgtattttgagccaatacgatgatggggatcagtgttgcaacggtagtatacaggatctcgaagtgatttgttagggtcctgcatgtcaagtttaccccgtacacaacactgcatacccctttcagttccattgatcatctctttccacaatgacaaattatcctgaacagtattatttctacatttagatntcacaccatccattctctcactcctcatttgctccttttgtggatcatcaacataagcc

SEQ ID NO: 44534 - DNA, 476 bp, Oryza sativa
  unsure (1)..(476): unsure at all n locations
ntgngcgcgcgacgtcagggagctctcctacgactccgacgacgttctcgacaccttcatggtgcgcgagcgcgtcgacgacgacaaccacggctccaaagggatggtgatgaacaatgtggccggcttcctccggaaggccaagacgcgccacgacatcaccgacgagatcaacggcatcatggacctaacgagcgatcagccgcgcggngggcgaggcacgtggcgcgcgcggagggggccgcgcggcancgcatgcgttgggggtggggcccacgttttttcctgttggtttttttttttctgtttttgcttctctctttagntatttccgggtttctttccggctttttcttttcggtcttttagcacttacatatacctataaaaagtttgtatatgtgtatacaaactttgtatacgtgcatataaactntgtgtacgtgtatgcaaactntatatacaacacgtataca

SEQ ID NO: 44535 - DNA, 488 bp, Oryza sativa
  unsure (1)..(488): unsure at all n locations
cgcatgattnttcgaagaactntntggctccatgatcgtgctggacgatgcacgatgttgaagcgagcttgcaacaccccacaagcacgctcaatatctttccgtttcccttcttgttcccttgcaaacagcttgtgcttctctagttgaggagatcttatagactttacaaaggctgcccattccggataaattccatcagcaagataatatcccgtgttgtattgtgtcccattgacaataaattggatttggggagcttcaccttttattgcttcaataaacagaggggactgattgagcacattaatgtcattgttggacccaggaataccaaagaatgcatgccaaatatgaaggtcatatgaagctacagcctcaaggataatagttggatactcttggtcacctcgggtatattgtcccttccattgcggtgggcaatntttccatcgccagtgcatgccagtcaatgcttccaacatccc

SEQ ID NO: 44536 - DNA, 143 bp, Oryza sativa
cccccacccccaccccccccccccccgccccccccaccccccccaccccccccccccccccccccccacccctcccccccccccccacccccccccccccccccccaccccccccccccccccaccccccccacccccccccc

SEQ ID NO: 44537 - DNA, 261 bp, Oryza sativa
  unsure (1)..(261): unsure at all n locations
gctgagctgaactgctctcatggtcatggtgatggtggccaatccaagccagcataactctcgctgaagccgccgccgtagaacctgaccttcaggttctcgaggccctggccgtcgtcccaaatggcctcgtcgtcgctcccgacggcgtagtagtcgtcgtccgcgtcctccatgagctcccacgagtagatggaggagtcgtcggagtagtcggagcactcctncaggtagctgttctcgaagcagtcgtcgacgccg

SEQ ID NO: 44538 - DNA, 405 bp, Oryza sativa
  unsure (1)..(405): unsure at all n locations
caagccagtctgagttacagaacaaaggaacaagctaacctaagctatctctctagggaacgttccatctcggcacacaaatgatagcaaacaagtgcagaaccgctggatagctaacctaagctatctctctagggagacattcatctccgcacaaaaatgatagcaaacaagtgcagaaccgctggatacttatagctagttggaaaaatcatcttcttgatcattagttgagacttgatcctcacatctcgtggaatttggaagcaagaatcctctaagcatccagtaccctgcagtttnaagggatgaaggtctcattgtgcnaagggaacactctataggcaatgcatattgaagcaattgtttacaccaatatttnggtagcgaatggccatgtctaca

SEQ ID NO: 44539 - DNA, 370 bp, Oryza sativa
  unsure (1)..(370): unsure at all n locations
tgaagctcgcttcatactagttgcacataggactagcagcaaatgcagagatgtgttcttttattcatgcattctttgtcttctctcttttcttcatccatgcacggtgccagcagcanggcttgacttcttcggtgctgcccaccggacctctncactgngcttgcactgngaagtcagatctagagagaataggaggaacaagaatggcgagagaagtgggatggaggaagaagataatgtgcaatttggtccaaaaatacattctactgtatggaaggggtatgttgcggcatttcttaaatctctggtaaattgcaatggcatgacntcaaattngtactcccttcatngcacattgatctacata

SEQ ID NO: 44540 - DNA, 351 bp, Oryza sativa
  unsure (1)..(351): unsure at all n locations
gaactatgtacgtcacagcggttgtgttgtgcgggataacgtgntgtcagtacggtgtactggcgaagaacaagggcacgcggagatcatgagagctttgtnccagaatcggagaaagagatgctgtggaccacaatgctcgagacattcacccttcctgcgggtacagaggacaaagtgaaaaggtggactctgaagaatatggcagaacagtntcagagcttcaagggagatctgtaccagaagtatatactgaaggggcagacaccgaacttcgacacattcccaaagctaagggatcactgggacgagttcgttgatataaacaggtgaacaggtcaggcgatgatg

SEQ ID NO: 44541 - DNA, 304 bp, Oryza sativa
  unsure (1)..(304): unsure at all n locations
gagtcagctgcggatgcagctgtccatcgtgacgctcatgnactcttcgtggataagtggtgcctgcgatgagaatggtgtgtttatttacactactttgaaccatatcaagtattgtcttcccaatggagatagtgggatcattaaaacccttgacgtttctatttacataacaagggctattgggaatatatatttctgcctagatcgtgatggaaagaacaagctgatcacagttgatgcttctgaatacattntcaagctggcccttctacggaaacgatacgatcatgtgatgagtatg

SEQ ID NO: 44542 - DNA, 258 bp, Oryza sativa
  unsure (1)..(258): unsure at all n locations
gatgcttaatgatgggagaacttatgcgccctagaattaacaaaactactgtcgttcttgcaagaattcttcagtgctctgtatgtaccgcctaactaatactcctgggcgaatctgactttgggcatatatatcaaccgggcagggcctgtcacctgatatgctcttcttaggctactgatgtgtgttnttttctggccatanatgagctattattgaacagtcatattcaatgaacctggaactacaacaaatgga

SEQ ID NO: 44543 - DNA, 362 bp, Oryza sativa
  unsure (1)..(362): unsure at all n locations
acaccacaaggtaatcatgagcgggggttcttctggcattgggataccttgcagctntcaactgaaccatcgatctgtgactttaatacaccgtctgtgctcttctctctaacactgaccatcttctgcaaggcggaagagaggtggaagagaggggttgctaaagataagaccttataccacttgactaatggtctggtgcgagtagatttttattgattcaagtcgcttaagcaaacaacctagtatggtcgcatccccaccaatgacgcaaaccatacccctacacacaagctaacaacacacgatctagaagctaacgaaactactcttctgggacagattgggtttacgtcatctct

SEQ ID NO: 44544 - DNA, 248 bp, Oryza sativa
  unsure (1)..(248): unsure at all n locations
gtaatatttattgcaggctgcatagcgcacccaacaagaagaaagagttcttgtcgaggaaataattaatttaatcaataagatctcaaggaagatgttactactangcaataggcatggtgagaatttccttgttcaatgttcgtgggtttacttttaggttagaatagtagatgcctttccgtcgtccaatgcacgtgcacgaagtcagattattctcaccttattccctttccacttcattttat

SEQ ID NO: 44545 - DNA, 299 bp, Oryza sativa
  unsure (1)..(299): unsure at all n locations
tttgaagcaacactgcngcataactaatgatctactgctctgagtgagtattatttcaacgacttctggtgcttatactgtttttcccaataaattcttttctaatctgcatttgctacatatgatatataataatgctgaagntacattatctggtcatangctgatgtgaaatagcttgtataatgacaaattcataatggtatattctatatgatagggctttgtcgtctacaactagctaatgagtaaaatgttgacatgtatctatgttagtcttgctgactgtggatgacact

SEQ ID NO: 44546 - DNA, 129 bp, Oryza sativa
attgactaattgaaaaaaaagaaaatacatttatgaattaaagacaggtttatagacatcataaaagtggactggtccattataaagctcattagacttttaaaaaaacgatttattcatataaaattt

SEQ ID NO: 44547 - DNA, 354 bp, Oryza sativa
tttgctcaaccatgctcatcataacaaaagcaccttttggtcatgttaggtgattacttttggcctttgctctccaacatcatatgagattgattcttctttttataacatgcatcataaataggatctctgtattcgtatgaaaataacaagatcattttttcacctgactgtcatactcactaaacaacggggctggtaaagcagtgtacaactgcaaagcccaaagagtggatcaatcttttcattataataatctggactcatgtttaaatgaaattataatataatggtagtctttttaaggctatcctataatcgatggatgatgttttaccatgcatatttggatag

SEQ ID NO: 44548 - DNA, 343 bp, Oryza sativa
  unsure (1)..(343): unsure at all n locations
ataatctctgcgnagntgtgaatgagaaccttgtactcttcaactntgcacaggcgatcactctggagtaaataaaattccaataggtaaatcagataacagggagcctgaattgctctatatttgactctagaagaattcttctgtgcttctggtaccttttctcnttaagcctttgcagttcactntggtgctcctcgagtttctttagtgacagatcttcttgattcactgtgatggcttcattctcagggcgtcctgctatttcagaggcaattctttgtatctcagtttgaacctctctgaactgcttcagtctggcttcttttctcatctgcatttc

SEQ ID NO: 44549 - DNA, 382 bp, Oryza sativa
  unsure (1)..(382): unsure at all n locations
acaaaattcatcagcactgtctctcaacatcaagggaatggaatggtgtaaaatcgctaagcacgatttcttcaacaatgatgcanattacaaggacataacacataaaanaagagccgcataattcaccacatcagtcgtacaaaatggaacagatttactgctcactaccttttgctatgaataatggctaatcaattgcatcagctacctctggtttctttcatctctggccttcaccaactatgcatagtctactcacatttgatggatntgtatatatggcgaacgaacagcaaggcggcacggaaaccaaccatgcccagcatgaggaagaaggcgtagcagatgcacgccatgtaaccaaagaagaatgatgtct

SEQ ID NO: 44550 - DNA, 340 bp, Oryza sativa
  unsure (1)..(340): unsure at all n locations
ttcatgttacaagctttcctcttctttggnnggcgccctccgtcgncgcactagtaacaagtttctcaggatcctagtatggatggcttatatgggagcagaactggtagctgcttatgccctggtagcgtccaggtgtgctacagcctgcagatgagccaagggaggtagcttagacttgtcggacaaggcctataagagcgcttaagagtaattcgttggtatctgggccggactgggccanatgagcactagctccagctgtcaacatctgtattacgtgagagagagagatagaactctatcttgataagtactctgttcttttctgagatgaact

SEQ ID NO: 44551 - DNA, 440 bp, Oryza sativa
  unsure (1)..(440): unsure at all n locations
agctntcttggtattcgctaagngttttgtatgtctgtttgctttggaatcttctattggtaatatgatacttgcgtgctgctaatgtttctaataaatatttgttccttttcatgcttgtggtctggaatcccanatgaacagattgaaatataagttctaaattgatttcttgtcttcaatcctcctgcagaaatttaattcagctacctgngctgcacctgtgaagaagggatctttggccagtggccgcaatgtgggcacgaatcgggtctcggcggtgaaatcagcttccaccaagccagcttcggccatatcccgccatgagagcgccncacagaaggagtcagttcttcctcctanagtgcttaaaaaatgtccaactgctgcacctgcacctgtcactgtaccctgcagcagcttcgtctccctatgcattc

SEQ ID NO: 44552 - DNA, 180 bp, Oryza sativa
acacgtgagacacacattgaacaacaaagaagagggagagatggagatggccatgggcatcgacacgccatcgccgacagcctcagcggtggcacggcgaaggcagacgcgggcagggaggcggccgacagacgaggaggaggacgaccggcggcggcagatcggcgacgaagatgagcg

SEQ ID NO: 44553 - DNA, 314 bp, Oryza sativa
  unsure (1)..(314): unsure at all n locations
aactactaattaggtcatagactgacaaaagaacttagtctattacaatgatccatacattattcataggccataacagtgacccatacaacgacatactgagtagatagttagaacacaagttctgttttgataaaatcgggggattactgaaaattatgtaataagtagcttctcttgctgaagcactgccaaaacaagcagccaaaatgagcatcttcgatacctgcgtcatgaatgggtcataanaaacaggagcatgantattatataaaaattgcagcacataaactggaagtaaaacaactaagatg

SEQ ID NO: 44554 - DNA, 240 bp, Oryza sativa
tgtctaattcttcctgcctgcatatttgtcttaagaaaaccttagtctaacaatctattaattcaatataacttgtgttgatctgttaattttctaactgtgctcattgaaacttttctaaactgttgcaccaaatcttacatttgcacgtgttgacatcgaacctctaagaatcccgtgtcaatgaacttcatagccattttctatattatattacatgccgctgctttgctaatagtg

SEQ ID NO: 44555 - DNA, 334 bp, Oryza sativa
  unsure (1)..(334): unsure at all n locations
atgacagngccttatccttnctcctcgacttattcaacagaacttaatgtctgcattctgttatgtgattgacctaatgatcttagctgtctggtaataattcgcagtttcagggatctcacgattcaatagtcaatcttcaattaaacacaacaatcaacactatcggactaaaaaagtcatactgtttctattaggcactaacatccacatgataacttatttgatactaaacaatcaatcaatatactcaaggacaacgtcttggtacttcaaacttcattgcaaggcggtgctttttcttcacgattttaagtagcagttatctatgact

SEQ ID NO: 44556 - DNA, 363 bp, Oryza sativa
  unsure (1)..(363): unsure at all n locations
gtagcttctataaaanatcaggacccacatgtcgttctaagaactagtcttgggtttaccttaacgggattgttagcattagtttctaaatagaaagatagcccgcgcatatacgtgggcaccttcttatatattataagtgaaattttattatgaatatttatgtgtaggtgaaaacgacgtaatataacgggctaagacatttagggttagctttctcaaacagctatagcgaaagctatatcgagctaaatggacctantagcggtaattgtatacgagagcaaatagctaagaactcttttaaacttcattagccgaagatagcggcaactatatatatgtggagaattaaaacactac

SEQ ID NO: 44557 - DNA, 258 bp, Oryza sativa
  unsure (1)..(258): unsure at all n locations
tattaccccttcagtggtatctaaataatcataaaaatttaataatactaattaatatatgatggatcacttcattaaaataataacacataagtctaaattcgatctaaacaaattggtataaaactaacaaatttaacctctactagtagtatacgtgtgcttacatntaatattttttaactctgactacctacacctaanaaataagtctattttttacatatcacacacatgcttatacaaaccaaaaaaact

SEQ ID NO: 44558 - DNA, 350 bp, Oryza sativa
  unsure (1)..(350): unsure at all n locations
agctngagcataatgcatagcctatcacaagtctgctcgntttgtagtactgnttcgccataagagtagagtgaaaacctgcaatngcgtaaatatcagcaaaatattcgtaaacctgcaattactaatgcacgatgtttgaatgtgctatattttccaaagtatttgtggtcgatctggctcctanagaaaataaaaacaagagtatatgtatatgctttcaagtaagtcattcttgactagtaattataaacaggcaaggacatgtgatgatgtgaaatgactacctggctactgcaaactctcaagatatccaatatatgcgaattagataaagaatggttacaact

SEQ ID NO: 44559 - DNA, 296 bp, Oryza sativa
  unsure (1)..(296): unsure at all n locations
agatggccctgcctttcaaagctgcgagaagatgtatatgaatcgcataagaggaactgaaaaactacacatacctgcctatgccctttagcattgaatggngactgacgaacaattctgtgtgtccctttctccccagagagatacccatacgcatatctttcttctaagtgaatgggagctgatcttattgcagcttattcacaactggatatctcaaccactcttgtcttgtaccgattgttctctccccacctagcatacatcctcagtaacatgtgagcccaatcctacaa

SEQ ID NO: 44560 - DNA, 253 bp, Oryza sativa
  unsure (1)..(253): unsure at all n locations
aagtcgacctgacgcatgcaagcttctgaggctgtctaagtaggatccgccaccctgttctgtttctaaagttaaaanatctctcgaagtgaacagtattgaaccagacattgaacagtaaactgaatacgaatcaacccaataaatagcgttcttgaaatattgtatattgtctgaagtataattatatatatatatgtgtgtgtgtgatgtatatgtgcatgtgtatgcatatatatatatgcatatgtgt

SEQ ID NO: 44561 - DNA, 381 bp, Oryza sativa
  unsure (1)..(381): unsure at all n locations
agatgcatcaccagcggcttggattagcagcgtccagtccagggacaagtagcactgcgtctgcttgaacagacgccggcatcgatgaggcttctgtgaggcgtagatgaatcggccaccgcgacttccccggcgacgacgatacgtgcagatggatccccatgcatggatgtgtgcgtgctgtagatgaaagaaaatganacaatcttgctagcttttaccttgactagccatcaagctcctctcctgcgcttgctgatgatcggatcaccgcgcgcgcnctctcctgccggacgccgggactccggcccgagtcgctcgccgccgccggtgcgtgtcgtcgatggatggatcgccgatgagaagtgatggatggatgtg

SEQ ID NO: 44562 - DNA, 424 bp, Oryza sativa
  unsure (1)..(424): unsure at all n locations
atttgaaaggtttaaagngacaacaaactaaacatgccatanaacatttttaaccagtgtaaaattttcacaacatggaacaagaacagaaatgtgatcgcacctcatgatgagcctctcataccccaagaacccctctgactcgagattctctgacgtgcaagtggccagtgtctcttcatccctcccggagaggaggaaaaccttgaaccccttggcttgcaatgtggcgaacaactcaagaaccgcaggtatcctcgggcaagcccctttgctagcccacgtcttgaaggccgagggatcataggccctggaataaanataccaacaagtcacgacatcgctggatatattaatctgtacttgaaagactaattgcacattccagcattatatttttactgaagactaagtttctgtttga

SEQ ID NO: 44563 - DNA, 343 bp, Oryza sativa
cagctgcagagcttcagctggcgcgtccgcgctctgcggaggcgatgactcgttcttcgttctcagccctctgtgctcgagagtggtgtgaagctttcacgaagcttctggcgcgctgccacgtgggccccaccgcggggcaaaaaggggaataaccatgggtcccagcgcggcgaacgttgtggtggcccacctgtctgtctctggagggaatgaggattgtggatggttatgtttgtctggcggcggaggcacgctgtcacgtttgaaatgggaagtgagggaggttcatctctagccgttggatcggcgagatggacggttaggtgtgaaccaccgtaag

SEQ ID NO: 44564 - DNA, 420 bp, Oryza sativa
  unsure (1)..(420): unsure at all n locations
gcagaatgacattcatgagtattctccattttctagaagcagaanaatgacactagcaaaaggaaaatcaaataanaatgaagagctcagaagagaagaagccacctatatagagcttacctgataaaccctgcaagatatgcaactctgctgctctcttcacttcctgagaaagacctgcgtctatggtaatggtatgggcagaacatatctaggggctcatagctatntataatcatggcacaagctaggtaaactctcacctaatcctttgtcacctctttgtcattnggctatggaaagaccacaaattttccaagtcaaggatggactaattagtgcanatgggtgctanaaggangatggccaagttagatgtatccagctcatgtgatggacatatttagcatatattaatcc

SEQ ID NO: 44565 - DNA, 381 bp, Oryza sativa
  unsure (1)..(381): unsure at all n locations
gcttgtgggttgccatggctcgggcaacagtntttgtctatggtgagacaatcgnagtattctaagtagaaacatatgctgagttggcgaacagggatctctttggctctgaaattgagaacattgtccgttgcatcggccacggcggcgttcatcacgatagtctccttaaaagtgatataatcaggatctggcgcgaacganactactccctccatccaaaaaaaaagtcaaatctgagtttccgtgtccaactttgattgtccgttctatataaacattttttataattcgtattttcattattggtagataataaaacatgattaatattttatgcgtgacttgtctttctaattcttttttaatntttttaaataa

SEQ ID NO: 44566 - DNA, 286 bp, Oryza sativa
  unsure (1)..(286): unsure at all n locations
aagtcacctgccgcatgcaagctngtctgggtgtgaggaggctggctagctatgtttgttctttaaaccaaaggaaggcgcttctgtggcatatacccatggacaattcagggcatagtgtccttgttctctacaatcatgacaaaaggggacatcctcttctggcgttggaagctcattaacctgggtggcaaatgctcgatcaaacacatactgactttggtcttgactttcaaccaatggtagctgtgaactcagcaccatgcttggaatggaccaacggtgt

SEQ ID NO: 44567 - DNA, 457 bp, Oryza sativa
  unsure (1)..(457): unsure at all n locations
agcttggccggtcggtctcgtcaccaagataaccgtgtatgtgtcttcgccaaccttacacgggtcgggaccgatggtcganatgagtgccggtttgcgaggagccatagatggaaagaacggataaatcaaaaggtctgggaactagctagcgagacgtcgaaagctcttgaccgcggatgggcacaacgggcggctgggaagatggcganaataatcaacggttaaagtaaaagtgacaactggggggaggggggtatatatagcccaccagcgcggcttttcgcctaccacccaatcagaacctgccacgtaggctangggtgtatggaatggtaatntcccatcggcacaggccataacagtgaaagggcgaagatagcaaacggtcagcccaagaggccaacactgttcataggcgcgaaaaccaagacaacagcttcgtcacaccttaatc

SEQ ID NO: 44568 - DNA, 169 bp, Oryza sativa
tctctggatttacttgcttatagtgctactttgcagattgctcctattcctgcttataacgtccgtcacgctcctgatgaccatatttacccgcccaaccctaactctaccacttgaaatggcatatcagaagccgtgctatatgaatataacaaccgttctttcttat

SEQ ID NO: 44569 - DNA, 500 bp, Oryza sativa
  unsure (1)..(500): unsure at all n locations
tcttaagtcacctgagctgcagcttatttgagccatcggaacttaatcgtttttttctatggccgantgaacctgtcatcgaaacacattgcaatcattactacaatgagaatgagaatcatgccatttacaatatgctcaacgtttcaactcttcttgagatggtatgacatggcctttaggtaatctaatttggttctcttgcagaagataatcgaaaatcttatcacacttggccacatcaaaactatatttagcctcactttgccgatctttgtgaggtgtcggcattaggttagagcgaacaaaaggcttgtttttgttagtccatgaccattcagcaacatatatatcatgatcactctcctcctcactatcactagcctcanggtaatcaatcacattaacattanngcttttgtcatatgatctaacaagtttntactaatcttaaacccgctttcttgagccagagccctttgcataagttgactaacatc

SEQ ID NO: 44570 - DNA, 311 bp, Oryza sativa
aagcaccgcagctgcagctgtcctattacccaaaaagtttctattatttgtgagccagatgttgaaaaaaacatgtagcattggctgctgtgctgattataagatgaatgtacatatagtatatatggcgggcaataatactaaaaatctgacatattgcataactgactatatacttttgctgcagtgtaccctcatttttgacgtttgaccactcaccagagaacaagtgactctcaggcgtgaaaaatgctcgcaacatatcaaatacttgcaatttatacttaaaaattacatattatctgagtcat

SEQ ID NO: 44571 - DNA, 440 bp, Oryza sativa
  unsure (1)..(440): unsure at all n locations
cggctcgagaaggattgctctccaagatgagttaacagccgatgattatcacaatctcatggtggacgagtcaaaagagttggttcagtctaggatgcgtgttgtggaaaaagtaacagaggataaggagataattgctcgtcattataagaagaaagttgtgcccaattcttttacagaaggcaagttggttcggaagttgattctgccgatatgaactcacgacaataatattggcaagtggtcatcgaattacgaacgacctttctggatctacaagtcctgttctagaggagcttacatgttacaaggtctcgaatgagaagtttacggaagagcactcaacgganaatacttgaagaaatattaccaagtattgcgtcaatgcatgattggcgggtttgtgccgactcatgatagccgatgtgtggagcatcacc

SEQ ID NO: 44572 - DNA, 449 bp, Oryza sativa
  unsure (1)..(449): unsure at all n locations
ctctcgatatcgnnntctggccatgatgttaccgataggcaatagtgaggtgttctatgaccaattatccatcgacagcacgattgctcctccaagctatgtttcttttagatcaaacgcttatgcgcagctttttactaacaaagcataacgattgttctcctccaagctatgttggaattctattggcctttattgccattctatttgccttcaaatatcgtcatgatgttaacttatatcctacacatgaaattaaaatataagccgcttttgctgtntggacttcctccgtttcatactataagactctctagcattgtccacattcatatatatgttaatgaatctagacatgtatgtgtgcctagattcattancatctatatgaatgtgggcactgctagaaagtctataacttgcaccgaggagtaattatatctatctct

SEQ ID NO: 44573 - DNA, 454 bp, Oryza sativa
  unsure (1)..(454): unsure at all n locations
agcttagccagctaccatatctcatcttctgttgattcttattattattaattaaagctatgtaccatctggattctggacttctggagttcatgcactctgtttctagatcttttgatcataaataaataaccgcatgagtttcaaaaaaatgacttttggagtggtaataattaatttggtgatgttgtaggcgggtctattcaagacgcattaattnttgaatggtttgccttagggcacccgcaatgcttatctataagctctctacaagagatctatgtcaacatattttcctacttggaagaaattaaatgaagagagatagcanagctatctactaacctggagagtctatagagaaaagcgaggcaatacattagagagctatagatacccatgtagacatactattgaggnggttactattaattagtctatcgctaagatgaca

SEQ ID NO: 44574 - DNA, 417 bp, Oryza sativa
  unsure (1)..(417): unsure at all n locations
gagaccttcttcggccacaccgctggccgtgccttcaatggccgactcatcatcgacttcatcggtacagtacatactntgtttccaattaatgccggatggcatggtggctacctgatcgactgtctgacgaactaattatcgatcgtttcaagcagccgggcactttggagtccctttcctccccccatatcttggccaggtgcagaacttcagccatggcgccaacttcgccgtcgtcggcgccacggcgctcgacctcgccttcttccagaagaacaacatcacanacgttcccccgttcaacagctcactgagcgtgcagctcgagtggttccacaagctcagacctaccttgtgctcganaacccaaggtacgtgtaaattgtaatggtatacgtaatcttgggtaattga

SEQ ID NO: 44575 - DNA, 386 bp, Oryza sativa
  unsure (1)..(386): unsure at all n locations
atatcttgatcaccacagctgacctcctgaatcgacactaaactctttaaatatcaggaatcagccataatgatgaagttgatactgctgcgattgctccttttgtaaaagatgttctgaactctctattttattttctgtcacgtcagatgcaccttgattngttaaatagtttccactntagaattcacctgtaacgtcctagctatggctgcacttncatggatatggcatgtgagaaaactgatactatctttactgccatcatagtagtgttccatcttttatctttgcatatctaaatattaaagatcctaagaatgtaactgcatatgatgtgtctcattgaatgatgctaaaactctcgccttattntctcactattg

SEQ ID NO: 44576 - DNA, 120 bp, Oryza sativa
  unsure (1)..(120): unsure at all n locations
gttccttggtctcccgaacacctcaatcaccattgctatctctctctagtctcaacatctccttcntagactatgcgcatcgtncatctctacctaatcngcattgtgttcctacaatct

SEQ ID NO: 44577 - DNA, 315 bp, Oryza sativa
  unsure (1)..(315): unsure at all n locations
taaacaatctttctgttgattcaactgaatatgcacaatagaaaagtacaattcatgccaatttgctagattctgaccaactaaagccttctaaaagaaacattcggtggaacatatctcataacattagcaattgaagagtttttccttcgaacaatagcatatagagatgcatacttatctttaaaagctaagttacctaaccatttatcttctcagaatctaacttattccctattattcanaatctaggaacccatatttaataaagtattcttaacttttttttatgaggcctaacaaaaataagaatct

SEQ ID NO: 44578 - DNA, 439 bp, Oryza sativa
  unsure (1)..(439): unsure at all n locations
atcttaagcaccgcggctgcagcttaaggtgaggacacacagccatgtttctcnttcttctccttatcctaaatatgaataagtggaaatagaatagaaatgtctcactcatgtacttctagtatacaacatcctagactattctagctagtatactctatgtagtatattccctttaacaatgcagcatagctaagccggaactcagctattgtcacgcncagaaattcacgaaccagaatntctaagctgaatgtgcattaaacccctgtccaggaccagccagggtacacaaacgacaattgttgacatacagatccacgtcttacacaaatataaaagattacatatgcagcggacaaagataaaagcgagctaacgctgaagacttgactcctgcagcgggcgactccattccacaggcaattcttgacggcag

SEQ ID NO: 44579 - DNA, 468 bp, Oryza sativa
  unsure (1)..(468): unsure at all n locations
agcttcgtcacgacgtccagaacacttgctcatagtatcgcactatacgagcccttcaacanaaatcactaacctgactcaacaacgtacttggagaaagaaacgcaggtggaacaaattatcagtgccaactgccaacaatcaaacgcgcccgtgacgcctgtactgctgtacaggccgncttggcagtagactgctgcaaaggacaacggataaaaggcaaagtgtaccagtctctggctcttggatctcatgttctttggttgtctacttcccaaaagccaaaggagaaaaacaaaagcaaatgtattatactggcgagtcgcatatctatacatacttgcagagaagtatantctgaacttctcgacaacaaagacaggttgactgcgaagctatgagcaaccaaacaaaaagactggatcacaccagaagaacataaaggcccttcttgctagggaaaaaata

SEQ ID NO: 44580 - DNA, 280 bp, Oryza sativa
  unsure (1)..(280): unsure at all n locations
gtcaatatcactacaacacgagagaattattgatgcttgcaatgcataaatatgttagagtaataatattccactagtattaggtctactaacctttntgcagagaatgatcataaagtgaaggagaatcgacatcaacgcccacgataaatcaatcggacgatgtcgagaaccagacttgtgtatgaatgggccaagaactcagaattgacacgataaactgcgccaaaattcacaaatccgtagagaagaacaacagaggaggctgccagctgaaatt

SEQ ID NO: 44581 - DNA, 482 bp, Oryza sativa
  unsure (1)..(482): unsure at all n locations
agcttcaacacacaaaattatcaaccttatgttgncttcatcatcctttcncatatgaagccaatataagccattctccaactggagcttttggagcaagtcaagctggttgatcgtactcacctgtaaaagctaggattttttgtttataccaaacgcaccanaaaaatcatagagaaaanttggtcttaataatattatattatacatgcatggcccacttctttcgttatatgggtttgttcggcagccaggctgcactgcacgctgctaattttgtgagtgaactattattcgtgttggttctactgtagcaaacacgaataatacttattgtaggcatgctttcttaagcttccaaatgatgaattttaatataaatctatatttatatcttctctcgtagaanagacaactcttcaactntgtagctcttactcaattcatttggcactattaaatattatctattcatatattca

SEQ ID NO: 44582 - DNA, 480 bp, Oryza sativa
  unsure (1)..(480): unsure at all n locations
gtcagctgcnggcatgcaagcttactgtttgacaccttctaagatgcattgtatcttacttctaaaagnngacgaactgcggtatatgaaggatttaaggtattgggcacttgatcacgcgcactttggcctaagcaaaaagtgcctaagtccctaaaagaacgtgacaggccacactctgaaatatgggctgcagacatattaggcctaggccaaaaaatatgccttcgacaccctttaaaggatgacgcatgtaacatactctcgagtaataaatcttccgggtaatatagaccaagtgtagctcatatgaatagcttctgatctgaatgattactccttatgggatactncataataaatataataattgaatcccgactggcgcaagtattccgttgatagcccttacggagaataataattgcgccagtctttgagcataganaatagactcatgacctatgaatcatgtggaat

SEQ ID NO: 44583 - DNA, 403 bp, Oryza sativa
  unsure (1)..(403): unsure at all n locations
gcttcttgtcttggtcatcttcttaggggtcttttatccatgtagncgagccaatcttctagcctgttaaatgccatggtgcagcatgttagtaggaagaanattatggagaaacagtaccattagacagaataaagacagatattacagagagaaaaatccaaattgcatacaaccaaacacattagatgctaacgaaattgagtataacatatgttgacatgtaaagaaataagcaccagggaaacaaacaaccacattntaagaaatggtaattcagtaacactacatgtgttcaaattgagaaaatactacaataatgtaacctgtaaagtctgaattaaacaaaatggctacaacatcatatcttaccttctcgacatgctgggcatcaccaagcatg

SEQ ID NO: 44584 - DNA, 189 bp, Oryza sativa
atgtctcatatcctcatctacaatgagttctacttggaccctgtcatatattattatcttttttgaattggtcaccggcgggagacctctcccacctgtattcgcattacaaggaaacaggaaagataaggtacatagctaatacaaactcagagatcgaagggaggaagagaatatgtctttccagac

SEQ ID NO: 44585 - DNA, 424 bp, Oryza sativa
  unsure (1)..(424): unsure at all n locations
agctngagctgaattataagaggctctattgtactatattgtatactagaatangaagagagtagagtagaagaagtcggaagaattctggagttgncactaatcttctctcatttcttggattctggtcattactctgatttcaatataatattcttcttgagtaacttagatttatcttataagaattaacctaaatagcatacgggattattgttcactataatcaactgaaatatagtgattgctctggtgagttataaacactgaagtagatattaattgcttagacgtggtgtttaggtaattggtatccagtaattgctgcgtatcccattgtacgttngangtangtgtagaggtggtgacagccctcgagatcacttaagtcctccctgnntcggtacgtaatagagcgacatct

SEQ ID NO: 44586 - DNA, 464 bp, Oryza sativa
  unsure (1)..(464): unsure at all n locations
agcttgcattgctcaccggccggaggagacgcctttgttggctggctagctacttcctccgtctcaaaataagtgcatgtttacactattcacgttcaacgtttgaccgtttgttttatttgtaatttttttattagtatattttattgctattagatgataaaacatgaatagtattttatgtgtgactaaatattttcaaatttttcacaaactttttaaataagacggatgatcaaacgttgggcacggatatccacggctgcacttattttgggacggaggtagtaattaactagctgtctatccatgaatccgtacgttgtaattggcgtgtgtttcatcgtactttgcttaaggccatgaactgtttgtaataacgcttgtgtggcatgcagttggtcattanttgatgatcaatgtactggtgatcgccagcttcgtgtatttatttcgagtaataa

SEQ ID NO: 44587 - DNA, 387 bp, Oryza sativa
atccacccctagtagttgtgtgcccatgccaatgactcaagatataaacaatgactgactctaatactacggatggcttatcagttattttccaccattaagagaaaatggcatgagctgacaattatggcctgctggtcagcgctacacagaaaattaatatagaatcgccaatcaacttgattcaccttgctggtggcgaggatttgttggggctcaggatgactagagggaagggaagctgttcagtgttcacctgtcacgcggaccaatgctcactgaaacaattgaatcaatataattacgaaagttatgtggaaaccaacttgtaataataacaactgtttcgataaaactagcacggtggcccgcgcaattgcgcgctag

SEQ ID NO: 44588 - DNA, 80 bp, Oryza sativa
agcttaataaggggagagagggccggacgtggctctatatatgctggaatcgccggccgacgtggggagtggggagggag

SEQ ID NO: 44589 - DNA, 346 bp, Oryza sativa
  unsure (1)..(346): unsure at all n locations
aaaaacgggcgagaaggcngaacctctgccgatgatatattctcattgctgctctcaacgatgacggcgaactcgtttagccggaacatgtaanggcgaagataccaccgcactgtgcgcgctggctaggcttcatgggcctctcaacgtggacgaatggaagcacgttagcattcacatcaataacttaatgtgggaaagtctgcacgagcaacctatttatccgtctgggtcggagtcaattggcccgagatttgcactgcaacaaatgctcatacgtggctacagtggaagtctgatatggacaccaactatatttacaagaattagacttcatttgaagaat

SEQ ID NO: 44590 - DNA, 287 bp, Oryza sativa
agcttgtgctgagataccactctctctgtcgctgtcttagtgtaacaatatacacttcacaaagacggaaacaacggagctgtgcagttatctctcgattacctcatgacaaataatgttatcctaataatgaataagccctcactgggtgtgatgatgtggggcccacttggtgactagtcactgctttctctttttgaccactctatacaccggctgctaggtgcacctcatactataatatgatctgtggagacaccgaaccaatgctatgatggatgctgtgg

SEQ ID NO: 44591 - DNA, 466 bp, Oryza sativa
  unsure (1)..(466): unsure at all n locations
ggatctctaagtcacctgcagcatgcagcttggcagnncggtatgtnnnttctctctttcttgatttcctcttcttctttacatgtcacataattaacatttgttctctctgcccattcctaccttgcatccagattcttgtagctcactattcgacagagtgaaccgtgcgggcccgtcttgacggattcaagaaccgtcttcgggccaaggatgacgaaatacgccgcaagaacttgcaggtggaggccctcgccaacaccctgaaagaggcgaaagccgaanacaagcggcttcaatccgagttagagaaaggaaaggaagctagggccgaggtcgatcgcctcaaggccgaactggagaaaggaagagaggccatagctgaggttgatcgcctccacgccaaattgaagaaagaaaaagcccattccgccgtgctgacggagtattataatcttactgagcc

SEQ ID NO: 44592 - DNA, 336 bp, Oryza sativa
  unsure (1)..(336): unsure at all n locations
ctatcagtcgatagtgttctattactttactgcagctgcaagtcaggatggtcatggttcatccggcaagattcttggtctttgtgatgttagtacaatggctttcacctgtgttgtggtgactgtgaatctccgacttctaatgtcatgcaactctataacaagatggcactatatcagtgtagctggcaatataacagtctgcttatgttcatcttcatctactctgcaataatgacatcattcgacagacaggtgggatagttcatagattactgaagaatccagngctcttgtatgactaatttattcctataactgcattaacttcgcgct

SEQ ID NO: 44593 - DNA, 476 bp, Oryza sativa
  unsure (1)..(476): unsure at all n locations
atctaaatcagcctccctataccttatacgtgataagcaatgctcataatactctaccanaaggacaaggctcattttacgatccaaatacctatgaagtttagaattcagactttcactacgctggttgcttttcatcccaagaaaaaacaaacctttagtgtacgcagcagcccatttcttcctcaaattgtacatactcgcaagccattggttgtcttcacaacctttatgcttcaccttaaactcgacccactttctctcaaactcttcatgatcatatggcgcgtggacaagtgctcgaaaatctgaaagcatatcacgacgaagatgtcttgccatgttctgctcaatgtgccaagtgcacaaccgatgctcataatccggcatcacagctgctattgctctatgcatcggactgtccccatctgtgatcaatcctctaggatgcttctgatacatgcaatctacacact

SEQ ID NO: 44594 - DNA, 331 bp, Oryza sativa
catcgatcgtttctcttccaccttgtttctccgtgcgcgcgggggctgcgcgctcacccgtaaagacccgggttcttaccgcgcagcctgcttgcttcgtgcgaaagttacgccgggcctacttgcgcgcgcgcgtcaccggcccgcgcgtcagcgtgcgcctcggagacgcgcggctgcagcgcgcgctcgcgccttgtgcgcgaacgcgacatcgcccgcgcagcaaaggcgcgttacctgcgtgcgcgcgtgcctcgcgccttgggcggagcgcggcgcgtacggggctcgcgttcggcgcgtcgcggactgaccagccagcgccgcg

SEQ ID NO: 44595 - DNA, 360 bp, Oryza sativa
agcttatcaatattagtggagaaaagaatatggttattcttccaatgttcttttattcggcagagctcccgctgtcggttctttaaagaaaaactcctatattaggccacccatcaaatataaatgtaatactccattacacaaatttaattttacataagggttcacaaatacattatagcttatttacactacgaattacatctgggtcaatgtttagaaatttggaagcaaaaccgtgaacacgtcatcaaaaactggatgtgggctccaccagttcagaggatgttccgaacccgttttgatcgccacggcccgccgtcctcccgtggagccgatctccgccaccgtccgcgaaca

SEQ ID NO: 44596 - DNA, 386 bp, Oryza sativa
  unsure (1)..(386): unsure at all n locations
gatgccgtatgatgttttcattccgctctgaatatataacttgtgaagattctcgagtggcttgtgaatatgttatangtttacacagttacaaggaacgttgaagagaaactaaatgcgagatgatcatctgcggttgagaacagaaagtgggtggagaatttgctaacattgcattttcttattggatttgtatattcccacacggatgggcaatgtatgcaagtgcatctggaggtgctacacgtcgcgttcggcggtgtctgtatattatctatagtcgtcactattcgccatctgaatgagacatttgctcgtcaccgngctggactctcctctgtgatatctgatgggcacaagtgctaatggagagggcaaaagtgact

SEQ ID NO: 44597 - DNA, 480 bp, Oryza sativa
  unsure (1)..(480): unsure at all n locations
agctggtcagataaaccagcgacaatattgtttggtggctatgccttgagaaaggatcaaaagccaagtcctccaatgggcagcgggaatgccccgtttaaaaacgccgcatcatttcgtagtatcaagttttttgatgccggtggcaacgcccatccaatcgattttcgtctcggatttatatcaaattgttacactatttctgttattgaaaatgatgggttcttttatgggggacctggcaatatttgctagtagtttgtaatcgagcttcaacttagtgtaatgaatatcctgcggactgcacccacagagaaattgagcttcaatagagttcatcacaactgttgtgccactcttagttgataagtatttagcctcatcgcttgacgtattggaggaaaaaacgaaatggcatatttgcaaatgaaaaataatttgtgaataanacttttatatacatgttcttaacgatctaag

SEQ ID NO: 44598 - DNA, 494 bp, Oryza sativa
  unsure (1)..(494): unsure at all n locations
tgtaataaggcaggtagcgcgcatctcgttcgtcgcggatttaacctttgattcttcttcctacttcaaagnttatataaatgatatttattttgctgtgacttgttctattatgaaataaactgtaagcttaacttatatttttacatatttacataactgttaaataatatgagtgatggaaaattatgtgaaaacgttaacattgttatataaaaaaacgaaggtaatagttaacttgtcagtggccaatgtgccatagcatgttcatgtacaagatactactcactatgatgatgtgttttgctctgctagggtaagactatgaccgacaattactctgtcatggtatactttttatgacatacnaaatacatggtattatctcgtatncgacactacttatcgatagtatttctatgactcgtatttttatcacataaacaatatattaatgagacaactgttatcctaactatagagaacacaccttg

SEQ ID NO: 44599 - DNA, 397 bp, Oryza sativa
agcttagaaagagcctcaagtttctcagccaaagtccatttctgatcctccaatatcaacgagagatagtatgaagcttgagagtatggttggctgaacttgaaattatggtagtccttgacagcagtttcctgtggtggtaggatgaaataaatcaatgaaacaaaatgacattgtattcaaaagatcctaattggtccatggcagagcctgttatcctatatttatcaacagaccgagaacagagctcattacaaacaagtacaagttatctgactatcttggataattttctggcaggtacaaaacaatacagcatgcagaactgaaaacattaataagattactaaattatgatatggagtaagaactgttatttgtgatgtttgctctcacc

SEQ ID NO: 44600 - DNA, 488 bp, Oryza sativa
agcttaattacaatcaatcggtgtatggaagttctgtgaagctatgtgaaaacagaagaatgacatggcaaaccacatctacaactcgcaagtgggaagttcgttgtctactgcactgtagcagtgtacggtctgtcgatctccgcagctcaggaagccgacgtatatatgagaaggacgtacggtagactcactcacggttacaggcacgggagggagttggaaggtcacctgtaacgttagattgttaattaacccgccagcactaccgatcaggctcataataagatatagtgattgtaaagaaagatatgaaaaccgagctatgatgcaagggatagagagatatgaaattcatcatttcaatgacaaaagagagtagagaccacaattataaatatagcatgtcttatgcatactcattgtgtacgtcacaatctaatcacaactatcttggtaaaatcactttgctaagccattttgatact

SEQ ID NO: 44601 - DNA, 386 bp, Oryza sativa
cttctgcgaagcgatgccctcaaggacgacactacgcgtaacaccgtcgccgctcgtccgatagccggaacaagggtttcaccacgagatttgtgggggatatgaaagaacaccatgacaacgcctgcaagaagggaaacgacgccgacgagcgccgtcgtcatctaaccggccataggcacggcaaggctttctccagtatcttcacatcatccacacaagcacccctacatcaacggccatataatagtctatgacgtctcataagcattcatacctcgaccataacaaatggcaaagacgagcccttggtcaccctttaaattctatcaatccgtcgcaaactcctacagcaagccgaagcctctgccctccccctagcattc

SEQ ID NO: 44602 - DNA, 357 bp, Oryza sativa
  unsure (1)..(357): unsure at all n locations
acaccaaaactaagctggctctggctctcanggacctaagatcgccgcaatgtcttatttacatgaagtcctgcacctaagaaaatttcagcctgatggtaagccaaggatatttcttttatgtcccatgctactagtcattattctgttgagcttggatatgcatttctcctcttagtctactactgaaattatgtgtgaataatgtctataactagccagttgtaacaaatataaaatcactatcagctctctatctgctcgctactttctgtccgggaataatcatgaatatatataggactactcgcattatataccaccattaactgtaagaaaaactatgaaattgcatct

SEQ ID NO: 44603 - DNA, 488 bp, Oryza sativa
  unsure (1)..(488): unsure at all n locations
gctatccactttgtgaagttcatcttccccatatttgttgttacattcactatggcattcgccatcttcatcagaagcccatccatattcttctgcatcgtagtaattgctatctgtgtcaaagtgccttccgaattcgtcttcttccgcttgatagtcattctcaggataggtgtctacctgtaagtctgtttgaagtatctgttcttcanataagttgccatcataatatttccaatgtccattggtttgtttacaggatttgcactgtgctagatgttcacgagattttaattgtgctagcaaagaccatagatgtgtttgatgcttcaattcccagttcatttgaccgcatgattcattaagaaaccaaacacacacgtggtagtcatcatgagcaaatgcacacactccgtctttcgacttgccaagttggagaaaagaacctttgcccatgcgctccacacctatcngcgacttaattactt

SEQ ID NO: 44604 - DNA, 301 bp, Oryza sativa
atgcataacctcatattcttggctacattgcggaaatgaccatattgtataactactcatggctgagaacacaaacttgggcactctagagaacaatagctgtatgacgaagagagttcttgctcctgattctcatggtactgatataagcataacctctgcaattctcaatatgacatatcctggaccactgaatgtggtatgatggaggtactctatattctgttcaaaatacaatagagggatatgacattgtctacctgaaaggacttgaaatgcatcaaaagaggatggtgtattg

SEQ ID NO: 44605 - DNA, 459 bp, Oryza sativa
  unsure (1)..(459): unsure at all n locations
tcaagcttccagntgagcttagccttgtctgaggatgcgcgatatctgctgaaagaatacaggacacatggccctgctgaattttatgtcctccttcatccagcccatagcaatcctgtccagggtgcccaacgacgagtactgatatgaccattcaccgccaccaggttggtctacccatgtcagggtgaaactgtagcctacaacagtttaaaaaattcagctagaaatgtaattcgttccttacacttgattatgatctttacaaatcaaatgttctaacattggtgacatgatcctcaggttctgcacccaacatgtaactacactgtatgctggtatacaagttctgctacaaacggctaagctccaaagagatgtgtacatgcttgacaaagatattaaagcattaaaatatgtattcacacaactcttctggtggtttaaaggacatttttc

SEQ ID NO: 44606 - DNA, 406 bp, Oryza sativa
  unsure (1)..(406): unsure at all n locations
tctcgggtttttgtctctgcccaggcattgaggccaaccccgagaagatacgagctatatagcggatccgcccctccagcagacttacggatgtgcagagcgtcactggttgcatggccgccctaagtctgttcatatcaaggctgggagagaaggcgctttccttgtttaagctcctcaagcgctcggngccgatcacttggacggaggaagctgaacatgcccttactcagttaaaggcatatctcagctcttccccggttctagtcgccccggagcctaatgagcctctgctactttacttatcggcgacctcccaagtagttagtgcagcgttggctgtggagcgcgatgaagacaatcctcattccgcgcacacccaccctgtgctgacttggctcggagc

SEQ ID NO: 44607 - DNA, 428 bp, Oryza sativa
  unsure (1)..(428): unsure at all n locations
atggcctgcagcagntgggtttgtgcagccataaccccagccaaagtggtcatatcggcctctggtgggttctcatttgcacggcgccgcccagccatctgttgaagcatgctaagtaagtaaatatttaactatctctaccctttttattatattcgntaatgtgaactttgtatagcaagcatggtgaaacaaactcatgaacaacataacatatcattactaatatcataacatgccacatagttccacaatcattacacagacaaatgatgcactggactgcacatatacgcagttcaacaggatacaacacgcaagctaacatcgaaccaatgacatactactcttcaactcatagccatctatgaggagaggngggtgtctcgctgtccaaaagccaaccacagcgagatcgaagtcacagt

SEQ ID NO: 44608 - DNA, 495 bp, Oryza sativa
  unsure (1)..(495): unsure at all n locations
ctatanaaactcaagcttagctagcacgagcttaagaacgagtcagtcaggttcgcctatgttatcaattgcagctctagtcaagccctttaattttccataccagcagtagccttcaagtgattatctctgtcgcatttcatcatgtacatagaagtttatggcagctatctaatgaacagggaatattgaataaagtatgagtcaattagttttgctctccacttatatggtccaatttgagcatgccacagctagttaacctgtgtatctgccagtgctacaagaaactaagaggttctcttctgactcatcgcaattttggtgagctcccaaaaccgattngcgagccaatacacgaatgtgttaccaacggagtgaatatgattatacacttaacactctacatgatgagatctctcttaaggcagcgtcagtggtactcacatgagaagagtattggatatttgacaacgacatcatataagaatcttg

SEQ ID NO: 44609 - DNA, 417 bp, Oryza sativa
ggaaatcacctccctcctttgcatacctcacgtttcttcgggcacttgacttgtcctcaaatcgcttctttggtcggttccctctccttaaccacctacagcatctgggttttctttacatgaatgacaactcactcgatgggattatttcggacacacttacaaattgttccaaattgacacaaatagacctctctaataaccagctgcagggtgcaattcctcctagaataggatccctagagtatctgaaccttggcaataatagtctcactggaatcatccctgcaaccattggaaaccttgtcaaatttggatatttgaaccttggtatgaataatctcactggaatcatccctgcaaccgctgaaaatctcaccctgttaacagttctcacgcttgaatacaatcagtttg

SEQ ID NO: 44610 - DNA, 503 bp, Oryza sativa
  unsure (1)..(503): unsure at all n locations
tctnctcgtgcttcacatcgtcaagcggtcaaacgaataatgatgtatttgaatcatacacttgagtttggaaattggtcttctacttcatcttctatatgcttaagtggatattccgatgctgattatggaggttgtagaattgataggaaaagtactagtggaacatgtcattttcttggtacatcattgattgcatggtcttctaggaaacaatctagtgttgctcaatcaactgctgaatctgaatatgttgctgctgctagttgttgttcacagattctctggcttttatctactntgaaagaatatgatcttacttttgagaaagtacatctcttttgtgataatactagtgctatcaatattgctaagaatcctgttcaacactcacgcacaaagcacattgatattcgntntcacttttttgagggatcatgtgagaaaggagaaatgtgaatgcagtttttggacacaaagttgcanattgctgatattttcac

SEQ ID NO: 44611 - DNA, 439 bp, Oryza sativa
  unsure (1)..(439): unsure at all n locations
tctctcagncacctgctgcatgcaagcttctcanataagccaattccttgatgtatattgagcangaacaacaacaaagaagacagtcagtggcccatctttcatgggtttcctgaactctcttgtcagcctgaactcgctatacattcttatatgtgtcttcgctcttcttggtgtcatgatatactttactgggcaagatgatactcctcatgtaagacgagctcatgaagagtgaaagaagcttaccaaaagaggctatccaccaagagatacatatatatatagttcagaggtcaggtttcaaacttccaagtgatgcaatcctgaacgacctggttntattggttgattctgacattatatgatctctgtcggcaattatctagttgtgccttgtgcagttgtgctctcctgcggntcttgcctctgntcctct

SEQ ID NO: 44612 - DNA, 350 bp, Oryza sativa
agttatggcgacatttgtgttagaaattagcacccttgtaatgtgataattgtacaagacacatgaatattttgcttatgcatcttttgatctttgcacgtacgtagctccagagtatgctggtactggcatgttaaatgaaactagtgatgtctatagttttggaattcttatcatggaaataatatctggtcgggtaccagtggattacaacagaccaccaggggagggtagttattgtttgcctttgtataatgattctaaattaagatctcgtcgaatgcatctatgagatcagcacattaatcctttcacggtaatcttgctgaatggatgaagacaatggtgag

SEQ ID NO: 44613 - DNA, 460 bp, Oryza sativa
  unsure (1)..(460): unsure at all n locations
catgcaacgctctcgtcgactcgtctccaagctcataatttttgaattaaaacctcataatctctctcgaacgaactgtgaacccaacacaagtatgaatatctaaaactctctggcacggatctaaaaatatcaatcttgatgtcattcctatagttgcattcgaaagttttctactgaaaaagcttacgatacttttttagcaattccctataactccagcacgctcctcatacccagtccacgccctctcgctccgtctcctctcacacgccgctgtcgttccagcgcccgccgccgccgccgattcngcgcccgctccccgcatacngggcaatgtaaagaccgaagagaaagggggagagagaggaggaagaaatggagagagatgatatgtacgccccataaattattttttgtctgaatgacaaagggtcctcacatatatgtttgttgaatg

SEQ ID NO: 44614 - DNA, 464 bp, Oryza sativa
cctataaaactcaagctcggaagacctgtacaggcgagtcatcctttgaccaattgctcctataatcgtataaatcattattatcttgtttgctactcgcattattagaatcacccgtttaactagcttggcctcggttagcatgccaaaccgacagacctacctagtagtcgcactaatttctgtaggctatactaccctgactccttgtagctccacctttgtggtacctctgtatccatgttctttgagcgcgtataccagatatcctacatacaccgttgtttgtctaatacttgtgaaatgggtttgagaagccttgaaaacccaacatgtggtgtcggtgtcgttgaaaataacataaatagtgatactcactatgtgcgggttgtgcctatgtggcactcacactgtatacgcatataaggaccgattcctgtgggaagatcatacgagcatataac

SEQ ID NO: 44615 - DNA, 446 bp, Oryza sativa
  unsure (1)..(446): unsure at all n locations
agcttnatgatgatggagattatttatagaatctctacttaatacagcaagctattgctcaacatacaaagttcaagtcatcaatatagaaatttacatgtcaaaagttcatcttgagcatcgacactacaaaatataacactacnnncaaagaagaaattaacatgtaaagtaaaagacctctagattcatactacattctgtgtgtgcgagtttcaagacaaacttaagagttccttagctccattatttaactgcttatttagccactgacccacccattgcaaaacttaaacatctatttgtgactaaggtggtgtttgattctcctgaagatgaagatgaagatgaagattaagtgtttcacgtcaaacgagnngataataacgtgtgattaatttgagtttacttattaccaactctgaaaatgattaatatgatattta

SEQ ID NO: 44616 - DNA, 359 bp, Oryza sativa
  unsure (1)..(359): unsure at all n locations
aagtaggaggtgctgttcgtgtntctctttctacacgtgacatcagatgaacaaaatggaacctctacgcgcagtatctgataacttgctaattcgcataacattaatttttcattcaccaaacacctaaatatcacaatcactagtaactagatatcttgatcagaacagaataacgtgaatagtcaaatggactcacctccatcccactgcgtgttattctgtctgtcaaaacgtaccatacatgacaagcaaacgacatcagaaccaaatcaacccacacaacagattaaaagaaataactccactacgaataggagaatcacaagctctgtgagatcctctcggctacacaacct

SEQ ID NO: 44617 - DNA, 453 bp, Oryza sativa
  unsure (1)..(453): unsure at all n locations
catgcaagctngactaaacttgtataaaaatattntcattctaagataacattattatacaaatatatttaattatcgatttaatgaaactacttatttataaatttagtcgaatctaaagtagtttgattgtaatcaaagtcaaagcgtgttgtaacctacaacggagagggtatccctttaattattcttttacattcgtccaatcctatcacagtaattaaagtgctaatctcctttctacctgaccgggctcacctggctctgacgaagcatatacctccttttcatttgccatgatacttgataaatactcccgactggtgtgcgtgcccgactgcccgcatgcctatccttctttttggtctgccttaactgcttgcaagatcgcgttgtcctctcgttgaactctacaaacgcgaagctaacaagtaacaactcacgacgtaacgc

SEQ ID NO: 44618 - DNA, 468 bp, Oryza sativa
  unsure (1)..(468): unsure at all n locations
ctaagcttcgcattcaccagtagatgaagaaacacaaccaaattccactgctatatatcttgcgttngtagcacaattccacacacggccttctacatattactgttggtgctcctcatatgcagcaggtgctttatatttcccttaaccaagtgtcctggttaaaagcataattaagacgccacaacatctagtcatatgtagataaatatatcattttagccaactaaaggtttggataaaatatcaagcttagcctacttaatcatggaagaagatttcagaatcacgaaacagtgtttcttttacagtgagcaattgtgaatntagagagaacatgtaagcagagtctacttgccaagagcacctatcttatcataacagaagcgagtatttcagaacatacaacctgttacacgctagaacacctatcttatcatagtagaaatggtttgtgggccaacagtc

SEQ ID NO: 44619 - DNA, 479 bp, Oryza sativa
  unsure (1)..(479): unsure at all n locations
gcttctcctcgtgcttcacatcgtcaagcggtcaagcgaataatgaggtatttgaatcatacacttgagtttggaatgtggtattctacttcatcttctatatgtttaagtggatattccgatgctgattttggaggttgtagaattgataggaaaagtactagtggaacatgtcattttcttggtacatcattgattgcatggtcttctacgaaacaatctagtattgctcaatcgactgctgaatctgaatatgttgctgctgctagttgttgttcacagattctttggcttttatctactttgaaagattatggtcttacttttgagaaaatacctctcttttgtgataatactagtgctatcaatattgctaagaatactgttcaacactcacgcacanagcacattgatattcgttttcactttttgagggatcatgttgagaaaggagatgttgagtttgcagttttggacac

SEQ ID NO: 44620 - DNA, 316 bp, Oryza sativa
  unsure (1)..(316): unsure at all n locations
ctaagctanggcattttgagcgagtaacaagcacgcattctggtgagagtattgacatataatgagttaatctattccataaataaatcatgacattacagatgaaaactagcacgaacgcatcattagatctatacatgtgaactacacagtataacatgaacagatcaaatatgcgcatcatattgaacacgtaccgaggtgacggaaagaccggctgcttggtcgaaactnttcgcaggtgtctacgaaggcacgaaacacgcgagcgaagaggaaggcgagccgtcgtgaacaaacagggagcagtcgcgcg

SEQ ID NO: 44621 - DNA, 509 bp, Oryza sativa
  unsure (1)..(509): unsure at all n locations
ctctaagtcacctgcggcatgcaagctntccatgaaatactcgcacgccccaaaggagtccttatgaagtcgcagcttcaaagttggctctattctgcagnccgaaatccgcccgggtgaatctgtttctttcttagtcttgtccatcattcctaaccaaaacaagagtgcgaacattttcatggtctaaataagatggaaaagaaaataagaacaaactcatctgacagnttattnnatgtgcacgagcgcaagtaatcggacataaaacttgctattggtgtgtaggcatggatgtatcgatcgacgtgatgtcctcatcacaacccatgctgcagttggntataaatctataatctgcttttcttctctctcatctcctctttcctccacctaagcataaatctgatgtattccattcgtcccaaaatagttgtatttctagaattcacaacttatttcacaatagttggtactctagagtagtacttataatcaatcatctctca

SEQ ID NO: 44622 - DNA, 258 bp, Oryza sativa
tcatggagaggatacctctgctgtctctggctaacctccactacccggatcttgatgttctggatttggatagtcaaccggtagcgcgccggcaatgtgctgactaaccggtggagaccgcgcacgtggccccagaagccacccggcgagcggtggctggtggtgccgaagcactcttagtactggtcgacgcaatactgggaatgggtggcgaggtccttgacctggttcatcacgcctggagctggtggtccatgc

SEQ ID NO: 44623 - DNA, 399 bp, Oryza sativa
  unsure (1)..(399): unsure at all n locations
acctctaagcacctgcngcatgcaagcttancttagctatctatatactccatctatctcatattataacaatctactactgaatacgatattncatactacacggaattcagacaggacgatgtctaaattcattgtgctatgaaatatcatatccgatactatattgctctattataagacggaggaagtatgtgagtaaaaaaaagcacgttttcgtgacaaccatacttcttgaactggttctatagcaccaacacacacggtttccatccagtacaaaatagcacaactgctcttcatattcttgataaaatttgaccgggttatatcagcagtcaatggctctctcgaacattgacaaaaacaccacatttctttcagaaacagtttggtgaa

SEQ ID NO: 44624 - DNA, 326 bp, Oryza sativa
acataaacaatctagatatccacatactctgctgtcttcttgtcgccgacgctgctccgtcttgccttctccggcttgttgaagcacgacgatgagcggtccctcaggccaaggtctcactcgcagtctctccggcctcgccgctttcggtggcctacggctatggttacgatcagcccacaatttgggaattgtagcgtagaactgggctctcttctcaggtagaaatgggctctgggcctatatgggccagtcttggaaagctcactctataactgcgccaagatattcttcctttcttctttcacaaagtggaataagttcat

SEQ ID NO: 44625 - DNA, 342 bp, Oryza sativa
attcgaccggatcttaagcaccgagctgcactggtatctgtacaaatttttttttatcgggattgccgtggggcctacgacaactttatcgttccacgtatgaaccatgccccctgctgtgcttaggagaacgtataatcaagtcatatccccttatttatctttaaggaacgaagccgataaattatggaatgtttcttcgagatggcgattcagacaatatttataaatacacaccaccaactgttatatgcaaagaatatgcctataatacatttctttttgtacaaacgaattggacatgctttgaaaacttgtaacacttgtcttcacgggagtttt

SEQ ID NO: 44626 - DNA, 448 bp, Oryza sativa
tcttaagcaccgagctgcacttttcgtgacctcgtgccgttgttctctttgtctcacggaggggagactaccactagccttctccttctggatcccctccacatccctttccacgtgcccctgctgggtcccctgcgcatacctctccacgttaccttcctcgttcaagtactgaggtggatcctcgctcccctcttcttcattccaggactggctgcttccctccgcgatcggattcgacaatatctgtttctcatctggggcagccatctgatgatacaacaaacatctgctaagtcacgagacatttatgttctaacaatctaaataatggatgccaacgcgaaatgtcgtacattataaccctacgcaaccctacgggctaagtctaattaccaatcgcgatataagcctagtctatgtgacggatattataccactctagcta

SEQ ID NO: 44627 - DNA, 439 bp, Oryza sativa
  unsure (1)..(439): unsure at all n locations
tttcataggtacacatagcagaatctagtgctatcttctatcagtgtcatgaaatatntctttccccctttagtcaacacgccattcatttctcacagatcggaatgaacaagttctagtggtgccaaatttctcgcctcagatgccttgtgaggcttgcgaggttgtttcgattgaactcaagtatgtcacttagagcctttgactaaagtgagatttggaattaaactcatgttggctaagcatgtcatacaaccaaaattcacatgacanagttgcgaatgccacacattggactcatcatcatcatcgcttacatggttcacaactntattacacatatcatccaaggaanagcgaaacanacctcccgctgcataaccttttccaataaaccgttcattattagatatgacacatttattggattcaacacaag

SEQ ID NO: 44628 - DNA, 478 bp, Oryza sativa
  unsure (1)..(478): unsure at all n locations
agcttgaatcatggcatgactcanatgtctgtcttgacaaagccaaatctatcagttctttctctcccaagtgctgccatgtcagaggtaaatattctcaagcacttcaaaatatatttatgtgcagcataaagaacctcaatgttagattgggttcatttgcaaacacctccagaaaatcaggttctgccttggccatacagaagaagtttgagtttggctgcatccagaagaagataggccttcccctgaaacatgatcgatggtgtcgtgtactcgtgttactagctcaagctatattattagtgcttggtaaaattttgttgtgactggcagactntattcaatgtgtctgagcaaaattaaacccaaaaaaaaaaaactggtggaatgcacctttcagattatttggtactatggtcatctaacatagtagttattcatttcacggcttatgactttggaaaatgctaacatg

SEQ ID NO: 44629 - DNA, 346 bp, Oryza sativa
agctggtctcacaataggagctctaatcttgaagtctggcaacttgagcctcgaactaaattcaacctccaattctatgtaccgtctatcattgaccaatttcttaagatgcttcaagaacgaaataatatctacatcagatttcaaataatcccgaacgtcagaatgtagacgttcatttaattgcgtgttcttcatcccagctgaaaatatccactttgtgtatgggctagcccacttctctctttcttcaaataccttctgcaaccacacgttgttgtgaaggttatatttactgatcatagcttcccaagcagtaaaaaactccacctcctcctcataatca

SEQ ID NO: 44630 - DNA, 493 bp, Oryza sativa
  unsure (1)..(493): unsure at all n locations
gctatccagactctcggcgtaaccaattatnttgatcacatgtgtgctcactggattaccttcatgcagcctgcacgcatacaaggactntgaggtattaaacctctcagcccttgcttggtcctcaaacatgttacgtagtcccgtgattatcgtatgagcatccaatgcctcatattgcctttgaagctcaggggacatagtagcaagcatcagacagcttatatcaaggtattcattgcatcgcctttcatgctccctacgttgagcggcaggagcattgttgggaaagtcagctggaaaaggctgtgtaagcacaaactntntgtgctcttacctgagaacaattcttaggttacgataccaatccatgaagtttgttctagtcaacttctctttctcaagaatagaccacaagttaaatatggatggtgcangagctgccatgatctacaatagagatatatgtatgcagaatcagcatcatnattac

SEQ ID NO: 44631 - DNA, 460 bp, Oryza sativa
  unsure (1)..(460): unsure at all n locations
tgcaagctngaacagtacatgtggagtattttattgtgtatatctcaattntagaaaaatntagagactcgaaccaactaaatcggagctaagatgaattagttatgaattcttaaagattaaatcggattaaaacacttaaatcggttaaaattgaattatgacgcaataatgaattatttttgaaaaggaaaagaaggtttattgcgtcagcggctatggtttcggtggaccgggcgcacgggcggcggttcacgcgaacggacggccgagatcgatccaatccaaaacggacggccgagatcgaacggtccacgaccggctcacggcggacgaccccgatgacgttagcgatgacgtcaccgacagcggcggcggctcggcggagcagacggctcggacggcgcacgctcgccggcgaacggcggcactacggcacatacggagggcaccagcacgt

SEQ ID NO: 44632 - DNA, 405 bp, Oryza sativa
  unsure (1)..(405): unsure at all n locations
gaagcgaagggtcctgcttcgtctgactccgacgccgacgactaggatgatgccgaagaatgtgatggcgaggaggaaggagaggaaaaagaggaggtggatgctgtggctgataaggccgcgggtgaggcggtcganaccgcgccgacaccccagggtacactcctaccccaagtcctggtaacaacgaaaccggggtggagtcgaacagctcctcccttcgtctgaaggatttggaaggcgcgaaggccctagttgcgttctcttcgggcgcggcggcgaagggaggctctatctaataggtggctaaaacgataggactcgtcgatgtcgctcgcgtctttagcgacaacgagtcctccgacgggactccgacttctgccactggtcgcagactggatcttt

SEQ ID NO: 44633 - DNA, 400 bp, Oryza sativa
  unsure (1)..(400): unsure at all n locations
agcttctcgggnntttggtctctgtccgaggcatttatgccaaccccgagaagatacgagctatagagcggatccgcccctccagcaaacttagggatgtgcagtgcgtcactggttgcatggccgccctaagtcgtttcatatcaaggctgggagagaaggcgcttcccttgtttaagctcctcaagcgctcggagccgttcacttggacggaggaagctgaacatgcccttactcagttaaaggcatatctcagctctcccccggttctagtcgccccggagccaaatgagcccctgctactttacttagcggcgaccccccaagtagttagtgcagcgttggctgtggagcgcgatgaagacaatcctcatttcgcgcacccccaccctgtgctgac

SEQ ID NO: 44634 - DNA, 450 bp, Oryza sativa
  unsure (1)..(450): unsure at all n locations
accggaccttaagcgactgcggctgcaactcttccnagcatctgcttttagatgttatgacganctctagacagatggatcttatatgaatcgtatgatgaagtaccacatgagtggatatatatgaaaggaatccaaatctgccgaatcgctcatgttatgatcttctacatcctaggtctccgcgttccgtcatctggcttatgttcttcatgtagcattcacatcgaatgactctatgacaatacgtcgatacttctacatattatgggtaacgtaggagacatccctattttcccccggtggtcttaattaccactgcttagctttcaattcgcctctgaccatcaaattaaatgtgaataacccgtcctcctctctttgaaacaaagggcgcctccggttctgtgcgtgcttcacacaatattgtcttctncatattaccatatc

SEQ ID NO: 44635 - DNA, 465 bp, Oryza sativa
  unsure (1)..(465): unsure at all n locations
gcacaatgtgcatganaactgactttattaaataaagtatttttttttctacctttaggtatcgggagaggtgtcaagaaggaatattgctatgggcaatcttaacgcctattcggtttgaagaaaaaataaaggattatgtaggaatgtcgtacaagaaaaccaaagggattttttttcttttctacaaattgtagagagaaaatatatgaaatcttttgtccactcaaacctctcggaaaaattccaatagattgatgtgtgcattcatttatatttctttacgcttcctatttctatgtattaaaattcctccaaacagaataagccctatagctagagcataggaaataaaagaatatatttatgcttttgcaacatgcatgtgttatctgaacccaagtgagtagagnttntntttcttcgtgtgccccanaataacgtcgactggtcgagagcagagac

SEQ ID NO: 44636 - DNA, 401 bp, Oryza sativa
  unsure (1)..(401): unsure at all n locations
agctntancatacagagggcgcttataagnacattttatatgcatcatctntattagataaaagataagaataaacactagctagtattatttccctccaacaacagtagctaaattactttcatgggagcaatagagaaacaattacctgctggatatcatcgtcaaatagtgcagggttgtgggcatagtctccatttctcatcttggcgtcgattttttccaagtcgatgacatcaccaggtttattgacatggaaggtcccaagtagcaaatggcacaacaaggcaaatttctgggagaccaaaatgtcgaagagggcattattacacattgccttgttagcttcggaagaagctgcggcagccgcatcttgtatagcagcatctgcagaaaccacc

SEQ ID NO: 44637 - DNA, 296 bp, Oryza sativa
  unsure (1)..(296): unsure at all n locations
cttgattatcttcctgggtgcacctgagtctcagattcatcatctttgttcatgcctttgtccctccatgcatgtataatgttctggccttaaatctgatgactatcgctcatacagtggcatcttcttctatcctatgtcaagttcctatgattttgcctctcacttttaactgctgctgtctctatgaccattgattgcagctagggtattgttngtctcaagagcacattgatactancaaacagtagcatgctccataagagataatggatgagagaataatcatgttcatg

SEQ ID NO: 44638 - DNA, 376 bp, Oryza sativa
  unsure (1)..(376): unsure at all n locations
agcttatttgcaaatagctaagccgtctctctatgtgtggtctgtaatattaaccgcgcganaaccagcggcgagaagtccctgtccgcgtcatggatatcgaatctgtctacttaataacgtgtgataccacgcattgtgcctgtattttaacaagaaaaattgggcacgacgtgtgcgtgtgatatatattggaagtggtntacctcagctggatggagtaccctacattcgcattgtactgcctacgttctatattacacgtcatcttaacatttnttttgacactaaaccttctatatgctttaatcaagtgtatagaataacatagtaatatatgtaacacacaacaaaaaagaaccaaaatatgtctaat

SEQ ID NO: 44639 - DNA, 536 bp, Oryza sativa
  unsure (1)..(536): unsure at all n locations
ccaactggatggaacaccatgatgtaatgaagggagaccatttgtcttttattatggnggcaaagacatggtcaatgaggagtggatggagctcatggaagtagataccatgctcaccactatgtatttatgcttcagagatccattgttgatcatcaatgcaattcctcccaggaactggagttggtgcttgagccgtgactactatggagttgtcagtctctctttcgtttcattgagagtggaagtactctatggatgctttgaccggagctcataatacacagttagttctccaccagtaccagcttggagagcagcaattccacggaacaaagctgagatgacctcangttctcggacgttaccatggcttgatccacagctttgtcaaagcagtggaggcgtggtggtataactcttacaactcatggccggcacttattcaaacaagtgtttgagctgatattgaacactgaattataggtgagtctatcatacttcttgaactacacggtgcctactcatgagtagaa

SEQ ID NO: 44640 - DNA, 486 bp, Oryza sativa
  unsure (1)..(486): unsure at all n locations
agcttgaaaagaaaaaaataaatctactactagctctctgttcttcatggatgggtgatcggacttactctgtactccaccaactaaatgagatccaatggagtatcgcttacgcctcatataatgatgaatcaaaaacatcacgaggaataaatagtttgaatcaacgcaaccaaatagacggtgtgcagccattttcctctcgtagaatcgatactcctatgttccattcactaaggcgcgattaaatttgacataattcttaatactaatctcacaacaaaatcataatttaaatgacaatctactaatatttttttcagtaaaataatatttagctataataaattatttattaattaaatatttaaagagttgaatattacaatacttgctacctctgtcctacacagatacgagntctgtattgtttatgtctaacgtncgaccgcctgtcttattacacaattttcatgacacatattt

SEQ ID NO: 44641 - DNA, 424 bp, Oryza sativa
  unsure (1)..(424): unsure at all n locations
ggaccttaagcgactgagctgcagctgagctgaatataagaggctctattgtactatattgtatactagaataggacgagagtagagtanaatgagtcggaagaattccggagttgtcgggaatcttctcctatttcttttattctggttattactctgaatataatataatattcttcttgagtaatttagatttatcttgtgggaattatctcttggttagttcctaaatagcataccggattattgttcactataatcaactaaaatatagtgattactttggtgagttataaacactaaagtagatagtaattgcttagacgtggtgtttaggtaattgttatctagtaattgctgcgtatcccatagtacgtttgaggtgggtgtagaggtagtgacagccctcgagattacttaagtc

SEQ ID NO: 44642 - DNA, 261 bp, Oryza sativa
  unsure (1)..(261): unsure at all n locations
tttctgtagacactggttctcaccggtgactcatctctatcccttgtctatccttaggttcgngtccttggatgaacctgatctggagttaacacacacgtttcctgtggaaaatcgatacctaagaatactcccgggtgaagtgctacatcggtattttccgtgcgcttgcggatcttatctgtaaagttaagaaatatcaacagccacgacgacggggtggctggatccgcctgcgcgacgacggggtggctggatctg

SEQ ID NO: 44643 - DNA, 424 bp, Oryza sativa
  unsure (1)..(424): unsure at all n locations
agcttcttaattggtggtaccaaaanattatttgtggatntagtagcatcagctgcaataagggctcgttgtcattatgttaataaaaagcggttcagtgggatgttaacgaattggncgattactaaaactagactttctcaatttagagacttaagagcagaagaaaagatggaaaaattccaccatctcccaaaaagagatgtggcaatcttgaagagaaaattatctaccttgcaaagatatctcggcgggatcaaatatatgacgaggttgcctgacattgtgatcgtcctcgatcagcaaaaagagtatatagctcttcgggaatgtgccattttggggattcctactatttctttagccgatacanattgtgacccagatctcgcgaatatatcgactccagccaacgatgacacta

SEQ ID NO: 44644 - DNA, 519 bp, Oryza sativa
  unsure (1)..(519): unsure at all n locations
ctcagctnntttcctgacttgctgcatcanacactaaatcacaagcttcttattttaaacgggtggttctagcgagatntgtaatatgagtacctttacgctttgccgagatgtaaggggccatattaggattccatttcttaataccatgaccaaaatgaactcccgcttctatcatctctntcaaattgatgttccaatatcttcttgtcattatttccacactatcttttgattttttctttattttcatcctaccttatcattacgaaatgtctttcttttcgaagattaagaaagagccgaaatagcttgaaataaataataattgttccgatggaaccttctacatggtataagcataaccttaatgaattaactaaacttctttttaattataataaaatagagaatctaacctttagcgtctaacgtcaaaatctagtacagacacaatctgtttatgatccttaatatataatgggtaatgggatctgatgctatagaaatgttgtactc

SEQ ID NO: 44645 - DNA, 467 bp, Oryza sativa
  unsure (1)..(467): unsure at all n locations
gcttctcattatgatcangggatanattatatatattatatgcgtttggangactacagggataatcatgatcatgctacgaatagtcatatgacagctacgagacacattcggtgaattataaatacccgtgcaagcaggggattgcaatgtttaattgtgttacaaatatagccattatgatatatatcttttgcagggttaatgaatcttcatttatgtcttgatatttgtgtcattttggtgaggcctaagctaagttattggtgtacattcatgtgcgaccaaaataaattgtgaagagaatatttcttcgcgggaacatacaaatcggagaaatttgtcaagctttcaagctgacgatggtacgaatggtccctatgtggtcctctacgatcgtacacgcaaatcccttcaaatnttaccgatatattggtactagacgacaatctttcacgggatatata

SEQ ID NO: 44646 - DNA, 489 bp, Oryza sativa
  unsure (1)..(489): unsure at all n locations
agcttatgtaccatgagactccttgatctacgctttgtgcacacaggaatngcacccagagtatatcgtgtttctgctttggttcaagcaaatttataccacacagctactccaaaacacccccatagagaccaaccttaaccttatacatgccgatttgctttaaaccgacacctataacattttttccatcatatttcagtgtaaaattaagaaccggtacctataacaactcattgactgagttagttggtacatgtttataataaaatccggtaccaatattcctcaaaaatcatatatgctggttctcataataaaccgatacctatgaacatcacatagatattggttcttataataaactcgcacctataactacggcagtatcatatgtaacggtctttatgaaccggcacatatgtgtatcgcatatgtgccggctgggttatcaataaaaccagcacctatgatgacacaactcatata

SEQ ID NO: 44647 - DNA, 241 bp, Oryza sativa
  unsure (1)..(241): unsure at all n locations
agggaggaagaccgcgtagcgcgagccttctatatgagtatttctgccggcagtcccgcaccggcgccggaatcggcgcgcattgtcctggctagcgccancagtagcatagacatcggcgactgcccatttgatcatcagagtggcgtccgcgattatgtcatagtgcgggagaaggcgagaagacccgagatagcacaaaccctaaacgggaaggtacctcacacgagagctcacccta

SEQ ID NO: 44648 - DNA, 262 bp, Oryza sativa
catattgatctaatggagcatggaaaggcgagtatttatcctcaatcccagagatggcaagccatatttttttctaaatatggccatcatcccaataagagtccaaaattatatatcaatagtatcaaaataaaaatcccatatactttttagattaaaaaaatctaacaataattgattaaaatagcctttacctcgaacatgcattattagttaatgagtaataataataataataaataaataaattgttgaactacag

SEQ ID NO: 44649 - DNA, 287 bp, Oryza sativa
gcatgtaatattacactgatgctgtttaagcgtagggggctgcagttgtttttcggtggggatggggattagggatgctggaattgttatttactgcacttgtggttcaatctttgcttttttttgctaaagatacttctatgtgaaaaatcttagtttgaaagacttatatttaaaagggtgtgcgttgagaaaacaatgccttaagctgagcttatttcttttctaacttccaactttctcgtgacatcaaatatttacgtacatgtatggagcattaaatgtgg

SEQ ID NO: 44650 - DNA, 272 bp, Oryza sativa
  unsure (1)..(272): unsure at all n locations
tgcataccatagactccgtggctcaaatgtactttttgtcttttgctgtccatagtacgggaatgcccatcaaagcctcagcanataaactgtcaagggaggctcaacaatatggatattctnctgtgtatcctgaattaaactcaagtattgaagttgctgatgatatccaccctgaccagagggtttctgttgccccacataaatttaagagcaagaaatctaaggctgctntcaagggtggcttacagaaatttcattgggagatcatg

SEQ ID NO: 44651 - DNA, 383 bp, Oryza sativa
  unsure (1)..(383): unsure at all n locations
ctgcggcatgcaagcttctaagtactattctattataaaataaatactccaagcttctaagagatgcatgattgtgctgcttgatggtcatatacacatgcatgcatacatggtaacatgatcaaaataactatatatggngtgcttgctagtacttggtgataaatcccatatactttctagagagaaaaaatctaacaattatcgattaaaatagcattcacccgttgcaatgcatgggtgtttttctagtaatatcttatttggaagaattattggtttatttgatgtagtatttaatagagaaaatttaacaaaataacaaaaggttttatggttaaattaataaaagttgtagaaaaccttggtattatggcattggc

SEQ ID NO: 44652 - DNA, 253 bp, Oryza sativa
  unsure (1)..(253): unsure at all n locations
agcttcatgaaaggcatttcctaagccgacatttgtttaccatatgtcgaccagaggggtggcagaccaactacacgttatgttccacaccatctgtgcctgaagccactggtcctctccgacaccaccccggcaaatacacatgtttttcggatcaaagctccnctgcaaagttagttactcagccacggcgtgcccattccacccatgagggcgtacttgtcttactgcttggatgaaattccaaggaatt

SEQ ID NO: 44653 - DNA, 298 bp, Oryza sativa
  unsure (1)..(298): unsure at all n locations
atctatgtgtataatgtctacttgcaaatcttaacacggtgactacaaagtcctctactttctttaagctccgaatgctgctgctaagatgggccaatgggcacccactccactctagtagcccatggtttaatttatcagaacaaattaatggaccctgcatacatcagctgcacacattcctcctcttctatcaagcattntcttatggacaaatatactaaacccatgctcatatgatgtattattgggaatgaactaattggttggtgtatgtaactgcaatcgaacttctggt

SEQ ID NO: 44654 - DNA, 468 bp, Oryza sativa
  unsure (1)..(468): unsure at all n locations
gcttcgatccaagaatcgcacgaaccctaatggttcatatccgtcgcccatgctnggggtgttccaatcagggacgaactggttcatggcattaacaaccctaattaatcacagaagcacagcagctctgtcttgtttctacctgcaaagccaatgatcatttcagattctgcaagaatcatgccaaaatgaattcacagagaacaaaatttgtatgtttggaaaacatttaagggaaaactgaactctaaggatggatttgtttaaaaaaagtagaatgaaacagaataagagcaacaagaacaaacagagaatgaaaaaaaagcagagaagggccatcactgcaatctactacaaagtacaaaccctaccactttgatgacaaaagctgtagacctgcataatgaaacaacctgcagaagagcagtgctcagatcaacaggaaaaaaagccaagatgagagagatc

SEQ ID NO: 44655 - DNA, 428 bp, Oryza sativa
  unsure (1)..(428): unsure at all n locations
tatttatcctaacatgcaaacttaatattattttctttgccacttaagctcctaaggtgccaatgaanaacaatcttgaagagaaggaaattgacctgttctttcagttgatcaatacccaagcaagcagtcaatagactaagtgcaacttccgctgatgaacgaaggtcattctcaaactgtcggcgcctttcaggacgagctgctattntatgactagaacattcctgagaggacatcattgaagaaaaatgaagaatatgctatagaaatctgagtagctggcagtgtcctaaaaattggctctaggaaccacgtagccgcagcaatttggcatttgatggtgcattatgcagctgctctgcattggnggatctagttttgcaatataaatggtgaacagtctttcttttatgtcatatatgctc

SEQ ID NO: 44656 - DNA, 424 bp, Oryza sativa
gcttctaaagtcctcatagactccggagattattggtttgtatttcatcgtcgagcccaaacaaaaacttctcctgcttctcagcatcggtgcgcacgtcgtcaggagcgtatcgcgcaccgcggttgaactcgtgcatgtactctgtaacagacatggttccttgctagagcgcacggaactctctcttctgttgtgccataatcccttcaagaatctgtgccttcctgaagcttatacaaaactctgtccaagtaacctccgttgtatctagacgggtcgccacgtagttatcccaccaggcacaagcgggaccttgcaactggtgtgtatcaaaagcaactttctcttggtcgttgcattgcagtaaggtcaacttcttctcaatagcacggagccagtcattcggctccatcgggttggt

SEQ ID NO: 44657 - DNA, 430 bp, Oryza sativa
  unsure (1)..(430): unsure at all n locations
acttgatcacgcgcactttggcctaaacaaaaagtgcctaagtccctaatagaacgtgacatgccacacctgaagatatgggctgcatacatattaggcctatgcccacacatatgccttcgacaccctctaaaggatgacgcatgtaacatgctcctgagtataaatcttccggtaatatagaccaagcgtagctcatatgaatagcttctgatctgagtggttatcccttatgggatactccaaaatagatgtaacaattcgatcccgactggcgcaagtattccattgataacccttaccgtgaataataaatagtccagtctttgagcatataanatagacccatgatcatgaatacatgttgcatgtatccggacaagtcccatttgaggtatgatacttgtgttgagctagtaagccctgagca

SEQ ID NO: 44658 - DNA, 372 bp, Oryza sativa
  unsure (1)..(372): unsure at all n locations
agcttgagtgcanatacatataatctctgtgcttctgaatctatccatattctacatgngacgatgtgacacaaactatcttgcattcacaaattgattgcttggccgacacaattacccgatatagaacgaaacgcgcacaatattcgctatagtgggttctaatctgggtctgatcttaatacaggcctgaacaaccccaaaaacagatacggcaaacggcttctctaaaatacactatcctaaatctcgcctaaaccctgtctcaactcgttaacagctctaggtaagatccattcttatctctaactntttgcaaatgcacaaactacacaatatatcaaacaaggacaagaaatattctgaggagca

SEQ ID NO: 44659 - DNA, 455 bp, Oryza sativa
  unsure (1)..(455): unsure at all n locations
agctctgtacatacacataacgaactgatcttttctctcataaatgaatcncgattggctcctattaactacaataaccactactagcagtattacaggataaaataatatggataccctcgtgtacacatcgttgcggagaatcgctcgttaagttgtgtattgcactaaatatctcgaataataaaaaaggaaaattgactttgacatgtggaggtccagaactagatcggcatgtacttaacggctaaacaagggctagaaaacacaacctcataagtgactaaagtgactgacaatgctatgatgggggcatgacgggtagaaacatgaacaacatactacaactgttattcatgaaccttaggtagaggagtagtgctgctggaaataacataccactcagttgccatttgataagaaacagcaatcacacggtgtatgagggtggagga

SEQ ID NO: 44660 - DNA, 263 bp, Oryza sativa
gattgcttcactacgggccttctcttcacctaacacatgtgaggcaacctactctacctgagagccactattttcgtcaaacgatcacatcacgggcgaacttaacaataccggacgatctggtgaaaacgccgtatgcgcaatcatttgacccatacccaagcaagaatccctcatccactttaggagcgaacttagacgatctagccttcttattaagagtgtaacacctactaccgaacacacgaaagtatagacatttg

SEQ ID NO: 44661 - DNA, 340 bp, Oryza sativa
ccctaactcctgctcaaggtattagatctgtctgctcatcccttgattatattctaattattagtacatcaggtcaattgcttttgaatacacaagaactttattcgattcatataaggagtgaaacgtttcctgtgcaattaacacggtttaaaatttcagatcaatcggattcatccgatgcgtaattatattgatccagattgctgtgcattcggaaaattctgttcaaacttcagtatggcggacgaaataccgaaatttggtgaaatagccaaacataatatgacccagaaatatactgcaaatacttgttaaaacttttgatgttgtcgaagaa

SEQ ID NO: 44662 - DNA, 464 bp, Oryza sativa
  unsure (1)..(464): unsure at all n locations
atcatgaaactcatgctctctttgtgaccatgtagaaactgaattacgagcaagtcaactataccatgtagatgcaaagtttgacaaagaaagaggaaacaattttaacttaagcaaatcatcactaccggccttaccacattgttcaataaattggccgacatgctcctttgttggtctagtatcctcacctatgaagtttgtgaagttgggcacctcaaatccttgcggatatgggaccgaatctacatgttcaggatacggcctttgatacgtatgcatagctactttgggttctatctcactactatcccgcaagacattgtcatcatcttttccaacatccacataaccgattagtgactcgcgcttaggtgataatgctatgcttgtgatataacctgaaccgccacttaatttcgctatattttcaatgatgctatnttctaagctagcaacacaat

SEQ ID NO: 44663 - DNA, 446 bp, Oryza sativa
agcttctaaatttgatttcttaaagcttcatctttatcttgtggttctccacaagcagaaagaccagcatgcttgtatctaacagtgccatcagtgtatacctttttttttgaatcccactctgtaagcgggttgatctgggtctgatcacatcttctaccgtcggaggcgccggcacagcagatcccgtgctctgcccatctgctgccgaggacgggcccgttgctcccggcgactgcatactggcagacgcacccgcgccttgtgttggcgacgtggctgcacggcgttggctcggcgaaaagaatgaagtcccatcgccatcctcctgcgtctgcgcctccattctgttgctgctaggactgacagtacctgcatcatcaggatcagtgtcatcggaggccgtgtcattcctgccaatctacagctcgtcatgcccatcatcg

SEQ ID NO: 44664 - DNA, 384 bp, Oryza sativa
  unsure (1)..(384): unsure at all n locations
acttgcgcgccgcgaatactctactggtgccgtcgaactacgcactacgcctaggaggataccatgcacagtaacgccaccaccgtacacgcacgcacgcacgcacgcatatgtgtgtgcaccgcatggggaaccggcctgcccggctcaccctccctcctcctactcacgtgcaccgtggaaaacaccaacaccaagcattccttatagataggaccatgccttgcatgtgtcaaccgctgcatctgcatgaggcaagacagtgagttcagcagccagtcagcgtgagacaatctgcatgctgtgctcagcaaccgacatttatctctctctgcagggcagagtcacggaagctagccctgtgtatntacattgatcaatgct

SEQ ID NO: 44665 - DNA, 486 bp, Oryza sativa
  unsure (1)..(486): unsure at all n locations
agcttgacgccaagaccatatgatgacccatgaccaacccgtctgaagaactctgtggggttccctttcacatgcttggaactgccaaggtcagtgccatgttcaacaaatccatacacatatgtgttcctcacaggaatacgcaactcactcgcaacctgcaggattaaaagatacataagtcaccaacaaagcaaggatcactatatgttgcaagtagccatggtactggcatcaattatatctagtagctctttgttttataattctaaaatagagtaaatctaagacattgtatcacaaaactacaaatttagcaacaaatttatcacaaaactacagatttaatattgaagttatcacaaaactatagattctagagtttgaatccctagcactaccgctatcttagagctagtaaccgttgtagtttgtgattaacatgacactacacctgtagttntgtgaaatatntgctacttaata

SEQ ID NO: 44666 - DNA, 355 bp, Oryza sativa
tattcaaagggatatctcaacccttgaacaatccattcagagacgcatatattctcaaggagaaagggctcacactccagaggatacaccaccggacataaccacatgaggctacccacacctataggatgtgcctacttctctgtttgtttgggacttgataaaactcaccacacttggctagacaagcctacaaaatgcacctatatgcatattaactaatatggcacaagatcatccacatgctcgcttcatagacccctcttgatagtacggggcctatctagcaaatccggtctacaccaaacaccaagaccgagataagactaagaaaacattcttagttctattatac

SEQ ID NO: 44667 - DNA, 61 bp, Oryza sativa
ctcttgttgtgcgcatggccacaggtgcgctctgtaggcagaagatctgccgtgacaacct

SEQ ID NO: 44668 - DNA, 433 bp, Oryza sativa
  unsure (1)..(433): unsure at all n locations
gatgatagaacctgacttctagataacttctcttgcannnccatcatcttcatgcgtgttgtgtgaatatcaaataggacttggtctaacttgtatatctcttcagcatcagaaatatcggtggactttcccttgctttcacgtgcagctcttttagcagccttttgtccgattggccgcggggtttcttcaacatctgttattagacgacttccttttagatctctcttgagtgcatcattatatgcattccacttatgctgatcacggcatgcgtaccatacatctattagaacgaaccatcctcaatttttgttatcggcctcattgaacttatgggccatgtcaatccacatttggtcagagtaaccactagtatatgtgcgcttagccttcaaccaacagccttggaacagaatcgtccgtgtgttga

SEQ ID NO: 44669 - DNA, 485 bp, Oryza sativa
  unsure (1)..(485): unsure at all n locations
agcttctgcgttccaggataaacgggaaaggaactttactgggaatgaatgtaatcggacctcggaagaggtaaataccgagtgggagggtatactatgataccacccacaacaccagatgctcagcacaaaattttgcatcacttgtttaaggtcgaactatctcttaaatatgcttatacgttttcttgcataatatataaatacctaaagggcaaacctctcatttcaatgtctctcaatattcgaatagtttactgagagtgaaataatattttttccaatatggatttttccgatgtaacactggaacaaaaagagattnttttggaggatatgtggttaggatcatgtcctctccaagattaatgctctttgctcgataatgcgactcgaaagacacattctgctataacgaaggttatgaatacaatatcgcttaatatttcaacaatatctcatttccgcgagcgattgtctgatct

SEQ ID NO: 44670 - DNA, 162 bp, Oryza sativa
atttttgtgttaccctctaatactaatctccattagttttcaatattttatttctattcatccctaacaaaactccttagttttcatattttattgttattagtcacaatgcgtccgctctacccgtcgataacggcgtccgtctacgggttgattaaaatg

SEQ ID NO: 44671 - DNA, 430 bp, Oryza sativa
tcatcaagattcaaaccagcagctcgttctttatcagcttctacaatttcagcaggggtcaaaggtagcaaagtaattttctttcccttatgcacaaaaatgtatttattactcctaccatggtgtgtagcatcattatcatgttcccaaggatgacccaacaagagtgaataagcttgcataagaaccacatcacaatcaatagaatatgcatatgagctaatggaaaatgaatccctacaaacctgtgttatctttgctcttacggaatcgcttaaccactgaatatggtaaggatgtggatgtgtatatgtggtcaagccaagcttcctgaccaaatcagaactcaccatattgttgtagctacatcctatcatgatcatacgtgcacgaccgctgttgatgacaaagaaaatctgtacaaattatg

SEQ ID NO: 44672 - DNA, 430 bp, Oryza sativa
tcagggggaaaaaaaattacaaaccttctcaatgtgcttaatggtcttctcatcagtcaccttctgcccttgcttgtccaccacatgaaacactgcatcatgttgtaacagacatcatgaataaaccggcaattgatgtccgcgaaccatacatgagtttgcatatatatgatataattgcatagcataggctgccttaccatccatgaaccatccaccatcagaggtgatgtacgccttcgagatggcgagatcgagatcgctcagaacttgcaccacctccaacaggatgccattcttgttcatgctgtcgacctacctccaaacgcaaacagacggtgctcgaagcaatcagtgaaacggctcttgaatattggaagcagtgttcagtaagattatccagtcaagttctgagagagagtagtaagta

SEQ ID NO: 44673 - DNA, 469 bp, Oryza sativa
  unsure (1)..(469): unsure at all n locations
gcttatagacactcgtataaaatcattggcgctaggtgatacctcatgctctgctacgaaaagtatggataaatatatgttaaatattacagaaatgatttaatcgggacggatgtatgcgtataaataaatgctgtcaatttttttgtatgttcactttttttttcaaatctaagtcaaatctatcaaaaatatatcaaactaattcaaatgggtcaaaaatatatcaaatctaagtcaaatttcttaaaatgctttcaaatctaagtcaaacaaatgaaaactaagccaaatatgtcatacctagttcaaattcatcatatataatgagtagaaaactgcgtcaaataaacaaaaactttgagaaaaaatatggtcaaataagcatgggcgtagaacgtcttttttacctatagtaacaccgttacattgcattcacaaaagagggtcagatctgatnnttcatttc

SEQ ID NO: 44674 - DNA, 463 bp, Oryza sativa
  unsure (1)..(463): unsure at all n locations
cttcgtcgaactcattcagctcggtgaatatgcttatagtgccgacaggagagacaagggtgcttacctcctcaacanagggaataagttccgcccgggtctcgaaatcgccaggggcgaagtggtgcgctccgagagaatattcatgggcagatgtttcgacggccgccctcttccccttcggcttcactagcagcgaaacaatcggctgacgcaaagggcttcctaaaaccctagctgcagccttcacgacacgatcagtggaggctgaggccctggcggcggcactgccacccgctccgctagcgtcgatcggaagaacgcgggcggtcgaaagatctaagctactaccggtgggtgaagtcggtgatttgtcagaagactcgtcgtcgctaaaaacacgagcaacatcgacgagtcctttcttcttggcggcttttaactggacacccttcgcaccttt

SEQ ID NO: 44675 - DNA, 281 bp, Oryza sativa
  unsure (1)..(281): unsure at all n locations
agcttgtnggcatgcatctatcatacacaagacatatagatatgcagagcaacttgttgactaattgtgcataactctctctctctctctctctntatctctctctctctctatctatctcactgtctcactgtctcaactctccggctgctgctgttcacaagcatgaatagctacgccctaccataaaaaattctgaaagcaatattaagctaccaactcagcggccggtgcatgttcccgccgggaatctcaccgcttaacctttctcctgtgaaaga

SEQ ID NO: 44676 - DNA, 442 bp, Oryza sativa
  unsure (1)..(442): unsure at all n locations
cgaccggatacttaagncacctgcggcatgcaagcttggttgatctcgagagatcaaatatttgtttactatcactggcggagaaaccctgtgtagtcccagttcgtaatccctttttagtcccggtttctaaaccgggagtaccaatccgggactaaagatcgctatctgtagtcccgggtgaaataaccgggagtaaagatcaaccagtggccggctgagccatctttagtcccggctggtgttaccaaccgggactaaagatccagctgacctttttttttttgcatggatattgtgactcccggctaaaccatgcctatatatgttgcaatacgtatatatatgcctacgtctatatatataggcctatatatatagtatattatattagatggatatacacgcatagtatatatggctttatacaaaatatgtttgc

SEQ ID NO: 44677 - DNA, 388 bp, Oryza sativa
  unsure (1)..(388): unsure at all n locations
tgacacttcattctacgattcatgtcatgactactcctctctgtactttaaatcgcgtctagcagctaattgacgactgattcacatatagatatttatttaatcatcagatagtagctatgtccttgtatgcatttgcagtntgagcatcagttgcttaacatggcaaaacgaccaggagagtgttccctgctcctaattcatgtataaaatcatgcttttcattgaatccttccaaggtatatggtgtggtggcggcggtggtaatagcataatgttctgctgatcggcgtagtctgattgacatatatttctacagattatttacattgacatatattcctgcagctgaacaactcacgttctgccttgcatgatgtagtttcat

SEQ ID NO: 44678 - DNA, 474 bp, Oryza sativa
  unsure (1)..(474): unsure at all n locations
gcaagtatagactttggaacctagccttaccatcttgtataagctgcttacaagtagcaatagtggtcgatggccactagcccgttacttacgatgcaacaatatttatgatttgtaagttagcataatagcatcacgtacttcattactccaataacctagaatttctacaaaataggtctctgggtaatactccattcagaactcagcacgaattagatgtagaaaataaaaagcagcaacattgattngacacatacttcaatattgagaagagcattcaaaccatcctctagtgagttcaatatagatgaatcctgtanaagggatggaaatacaatcattgattnggaataagaacaattgccatattntagaataaaaatctcggcatgatcgcttcaacttacaggggtgcaatgtgctccacagataagaagctntaagtgcacatcttcatcgtatatctntatg

SEQ ID NO: 44679 - DNA, 491 bp, Oryza sativa
  unsure (1)..(491): unsure at all n locations
ggatcttaagtcacctgcngcatgcaagcttcattcggacccatgtgttaattgaaatattattagacttgctctgaacagagagtacatcagccacctctcttataggcaccagagttacttttcttgaagcgaagatattgcgcacacctttgcaagcctgtaataaattttagttcccatcacatagcaggaatattacaatgtcaggtcaagcaccgtacctctttgacatgggcttctttatatgcttccacataaatgtaattcttcaggtgatctaatgcaagaacagatttaatctggagatctggcgtatcaatggacttctgcatcaaacaaatggctgtctcccgttcatgcccaatctgaaaatcataattggatatcagtgagcatcaaattatacagaaaacacattgtggagcagaacattattcgatagaacctgcaacataccgcacaatttaccatccaaagctttggatcct

SEQ ID NO: 44680 - DNA, 442 bp, Oryza sativa
  unsure (1)..(442): unsure at all n locations
ttatctcaattaatgactccttttgaaaagatacaacgaagntctttaatggtattagtaccttaatgaanattattcanagcaacccacatctcatgagcagtttgaagatgagcaacacaatcataatccgaacgagaaatcccactctaaaaaatattgcgagctctgcaattcagttcaaaagcagttttttcagcagcagtattaataacttcaggaatcacataaggaagagaaacttttctccaaatatcataattctcagccataatgtaagagtgcatcctactacaccaatgagaaaaatccattccatcgaaaacatgaggcttagttgagaacttattagaagcagccatggcaaanactntggatcgtgtaanatccaaagaaagcaacaaagctctgatactacttgtaggatcgaatcacaagaact

SEQ ID NO: 44681 - DNA, 399 bp, Oryza sativa
  unsure (1)..(399): unsure at all n locations
ttgggacaaaatggaaacatccctagtaacctgcagctcagaaatgaaacattgtagtctttcagaatggtgatcatgtcgaaattaacataagcaaaaggtagaaaaacgcaacacaccataagaatgtacaggaaatactagtgaatactgagaaggcataataaaacgaccaaattcaaatgtgtggatcttacttttgctgtgacattaggattcccatcacggtcaccacccatccatgaaccgaatttgattggtgtgcangtgagcggaagtggcttgccagtgttctataagaaaagcattgtangagggttatatccgctcgtgaatgagcaaacggaagtggaattaacnatgcaatcaatgtattataccttcttagagcatgctaca

SEQ ID NO: 44682 - DNA, 446 bp, Oryza sativa
ctagcatcaccggcgatcacacacatatacacagccactctattcatctgcagatagatttacgacttggtcatgacacttaatatgttagtaggtacacgcatgcttattactactagtagtataacgatgacacacatatacgtgtctctctcttgtgtgcgactaggtcactgtctagctagcaaacgtgtcgtgagatttgtgatgggttagcaagcttatatctcgcgttaacgtcattagatggtggaaataaacgtcagacggcacagaatgaggaggaggttgcttgacaatgttctgcagatcattcatcatgcatcctccattcatgaatattcaccagtactagttactagtttattgactacgcgtaatacttccttgattcttgaacttgcgctagtagtcaggtactaacaatatagaacttaattattctt

SEQ ID NO: 44683 - DNA, 363 bp, Oryza sativa
  unsure (1)..(363): unsure at all n locations
agctnttcaagctctgagatacttgcatgcttagtcctatctcctataacaaacaagcccaactgctgtgaacgaatcagatgcccacaacctgctggcaagccacacaatctcctgcatctctctagattcaaaacttcaagctttttcaaggcgcctatgccttcaggcaattctctaagctcagtacaacatgaaaggtctacatattgtatatgacccaataaagtgatgcactgtggcaggtgtttaaaagccgtacaaaatgttaaagtgatggtctgtaagttgcgaagcttcccatatggttctgacggtagcagttgctgcaaatccgtgcagtacacacaactaaagaccctt

SEQ ID NO: 44684 - DNA, 318 bp, Oryza sativa
gcgcgcacgtgcgaacgatgccaagtttatcgcagacaaattcatctaccagctgaagagttgcagactatcccgctgtcttggccgtttgcggattggaggcttgacatggatggcccgtttaaacaggcagactgcggttacacgcatatctatgtggccattgacaaattcttcaagtggattgaagctaaaccggttgtcacaatcacagcagataatgctcgagacttcttcatcaacattgtgcatagattaggagtgcccaatcggataatcactgatgatggcacacaattcactggcggagttttatag

SEQ ID NO: 44685 - DNA, 445 bp, Oryza sativa
  unsure (1)..(445): unsure at all n locations
agcttgagggtcggcacatcatatctgaagtggtataagatggacgtcctantgccccggccgaagccgccaagaactatgtacgtcacagcggttgggttgtgcgggataacgtgcctgtcagtacggtgtactggcgaagaacaagggcacgcggagatcatgagagctttgtcccagattctgagaaagagatgctgtggaccacaatgctcgagacattcacccttcctgcgggtacagaggacaaagtgaanaggtggactctgaagaaaatggcagaacaatttcagagcttcaagggagatctgtaccacaagtatatactgaaggggcagacaccgaacttcgacacatttccaaagctaagggatcactgggacgagttcgttgcatataagacaggtgaacaacggaatgcgatgatggaaagaacaaagaaatg

SEQ ID NO: 44686 - DNA, 399 bp, Oryza sativa
ctcttgtatgtgaaacattacttggttttcggtgtctctattcttcacatgcgcttaaaatagagttaatagtatagccaaatttctagctataaaattaacacgtcatctacaacaactctattagcctatccatacaataaggtatataaatatgcattacaccgttaatacttaacccaccttgcctacacacataatataggagagcctgtgctcaactagctataaatctaagacaactattcttctctctcctctcttatttagaagggggtatagctaacttgaacctgctattgtcttatatactctatagatggataagccattaaactgctctaatcctctttcaaaacattataatagcacgacgagaacattatacttcaccatgct

SEQ ID NO: 44687 - DNA, 428 bp, Oryza sativa
ctttctgtgcggttatgcttcaaacatagtccggtgagccatttttacattaatctagagagtactataagatacatgtggccattctgcctcaaagacagttattttatttgcgtgatatatgaaacaaaacttagctcaatggtactcttgggactcacatcatctgatctaagaatatgaatgttcataaaactcccttgcgaataagagaacatataaaaccctatttgtaaagcatattgcgactgccatatatatgaatattccatttattactgttcgcgggagttttaccctactcgaaaagtttgctgtagctcgaagaacatgtgtcgtccgatataacatccttgacaagcttctgccaaataaaataactgatagattaataaatgcttgtgatgcacaatatctgacacacattc

SEQ ID NO: 44688 - DNA, 462 bp, Oryza sativa
  unsure (1)..(462): unsure at all n locations
atcaatggactcctgacgtctacgaaggagtgtggttcgttcgacaaattcctacctctatatctatctctgaggtgtttgggttttgcaaaactccatagatatgcagaagagaaatgctatccccactccgaccaagacagaacttttaccaaaagtttattgtgatctttttgttcaaataacaattaaggtgaagcagggtcaggaacaacgaatctctttatgataaacagatccattntgcaagctcgttattacgggtagttcctacaaagaatcggactaatgacgtatacaatgcttgaattatcgacgtatatgctacatagtgggttctcatccttcacagactacgagtgtaataggagcatccgttgacaaaaggatcaccctaagatgatcatctcatggctattgggaacgaatcanatcagatcggtctatctctcaacctttctg

SEQ ID NO: 44689 - DNA, 493 bp, Oryza sativa
agcttatgtaccaggagactccttgatcaacgctttgtgctcacaggaattgcacccagagtatatcgtgtttctgctctggttcaagcaaatttataccacacagctactccaaaacacccccatagagaccaaccttaaccttatacatgccgatttgctttaaaccgacacctataacattctttccatcatatttcagtgtaaaattaagaaccggtacctataacaactcattgactgagttagttggtacatgtttataataaaatccggtaccaatattcctcagaaatcatatatgctggttctcataataaaccgatacctatgaacatcacatagatattggttcttataataaactcgcacctataactacggcagtatcatatgtaacgggttttatgaaccggcacatatgtgtatcgcatatgtgccggctggttacaataaaaccagcacctatgatgaacaactcatatatatgtgt

SEQ ID NO: 44690 - DNA, 152 bp, Oryza sativa
cacatcaatctaatcaggtttgacgcagaggagtcaattttccatacggcatcttcattgcgccaccgcgcgagaagactggatcatcctgcccaaatatgcgactgctctcccgccaaaaaccagaaaatgcacactgcaatgcactccat

SEQ ID NO: 44691 - DNA, 481 bp, Oryza sativa
  unsure (1)..(481): unsure at all n locations
agcttgtatagtacaacaaaaagcagctggcactgagagcctacgcgactgcgatcaatgacaagaaagaggagacccacagaaaggtggtgcttacattgcaatcctacttccgcttttgactatatggtgctacaggtttcacctggccctgtagtattaggccaaattctcttctatgtctgagtgtccgactctctgacttcattatataactcgcagttctatattgtgttggttagaaatgtcagaagcgtccaggtcaaatagggatagaaaccagaaggtttgcagctttgccatttggacaagacgatctttgtgtataattggatcgaaaaatagtttggaaaacccatttacattgtaacacactatcatttactcttgacatatgttaagctacactgaaatnggtctcgctgacatgctgagaatttatatatgcagaaaagacgagttctcactatacgccttgtta

SEQ ID NO: 44692 - DNA, 368 bp, Oryza sativa
  unsure (1)..(368): unsure at all n locations
cactggtctttgtcttgacagttcatgccacatgatggattgtcttgtgttcttggtacaatttcatgatgactgttactgaattttggcatatgctgctcgttgatgcacgatccgaggaagaaggagaaagaactcttggcatgggaggaggatttgagggcgaaggagctggtctgatcgcctttnttcctcttcaataaaattctattgaatcattatctttatgtccaccattttctagaanattgaagtggcttttgttagttttatgccctttctcccttttcgtttgttgctgtttcttcaaatcggaatgccatgtgttcttttcttttgctgcatatttcctctttttttatattcat

SEQ ID NO: 44693 - DNA, 393 bp, Oryza sativa
  unsure (1)..(393): unsure at all n locations
tgatcacgtatccccgtgacatgatacactcattacattcacttctccacacatggatgatattctgnttctacagccgttcagttgagaagattaattctatcgagaacaaccctatttatatccaagagctgaaccacgttattatcacaaggaggttactatccctcggtatcatcaaatttaatcaactcgaccacagcactgcatctagtatattcttccgtggccatagagaccactgttttagttttcttatatgatatatgcagctgctcgtgttgggactcgcaccttctgtttaagctatcaaactattgaaaacacaatggtttatcacaatagctagctgtcacatggtacacgaaaaacagcagtgtcattcttggctga

SEQ ID NO: 44694 - DNA, 414 bp, Oryza sativa
  unsure (1)..(414): unsure at all n locations
tatgaagaaacacaaccaaagtccactgcagaaatcttgcgtatgtagcagaattcacacacggccgtttacatattactattggtgctcctcatatgcagcaggtgctttatatttcccttaaccagatgtcctaggaaaaagcaaaattcagacgccacaacatctagtcatatgtagataaatatatcattttagccaactaaaggcttggataagatatcaagcttatcctacttaatcatggcagaagagatcagattcacgacacagcgtatcttttacagtgagcaatagagaatatagagagaacatgtaagcatagtctacttgcaagagcacctatcttatcataacagaagcgatatttcataacatacaacncgttacacgctagaacacctatnctatcat

SEQ ID NO: 44695 - DNA, 404 bp, Oryza sativa
  unsure (1)..(404): unsure at all n locations
atgcagctttacactctaagagaccctctttgctcttatcctgccatgcatgcgaaagcagntataaaaccacgaatctattacaaaaatggcgtagccctgtggagatgattacatacaacctacaaatggacattgtatggagcattccacaaaaataaagcaagattaccaactcttgctccctttgagggtattgatctctccattatgacctaatacacgcatcggctgagcacttgcccagctggggaaggtgatcttggagaaccttgagtgaacctgtttggatgcatgaaacttactaactcgtatatactcaactctcgcaattctacaatgttgaacaaaacttctaaatgaaacaccttcacacttgaaaaacagaagcatccgctgcttat

SEQ ID NO: 44696 - DNA, 347 bp, Oryza sativa
taggaatccgctgatatgagaattctgactcgaacgttatttatgttgtaattatgaatattgaacgtggtgaactgtgaatatatggctattgaatgtttggatatttgagatagttttgatgggttaactggattataaattaccctcttataccatggagaatgacatagtctgtgcccatccacatgaccaagcatttggacttcgcctaatacattgtctcactatctgaaagactgctggatggttcattaagaacagatttggcgtgaacatgtgtacggaggtactgggcatgtttacaacagcgtgcctcatgaaagtatgacgataaaactaacctt

SEQ ID NO: 44697 - DNA, 229 bp, Oryza sativa
atcgtattttcaacaacaaatgcgtactcatttcaaccttattttaattcgagcatataatgaagccatatgcttcagtgattttgaatagtttattgtgcataaggtctatttaggaatcacgacgcggatgcacaggtgattcatctacaatggttttggatgattgtgattacagcaggaatatgacgatgatagaccttcgttgaccttcagcgagacatctctt

SEQ ID NO: 44698 - DNA, 370 bp, Oryza sativa
tgtgttattgactatcttcttagctgaggagtgcacccaccagctgcttgagtaataaagctcttattatacccttaagaaaaacgagaacctgtctcatattctatctgacaaagactgtatcactaatgttactctgattatgtaagagactaacattaaattggtgcgtgtggctaatactggatctgaatattatgtgttacttcattattacgtcaggcacagaaccatatataacttgcttccagcaatcagaggcacctgcatcggcgtatcaaacaagaacgtacaatatcagttaaaagagtgcagtgcatgtgtaccagtaaccttattcaccgggtaccctgatcacatatcttaccat

SEQ ID NO: 44699 - DNA, 386 bp, Oryza sativa
tgcaagcttgtatacctggttgtgatattatgtatcctctatactctgaggttgctccacatataccagctcgtgtgaacgcaccgtgtggagggcgctggttacttccatttgatataactaataaatgatgctcgcatgctcagcacgcaatttgcgaatagactctcgactatctttcggtgctcatcggccactgaaacctaatacttccattggggagaaccctatggccactaacgatggcttggtccttatcacgacaccggtctcggcgctcttattgccgaagatgcactttgtgctaatcacattttggagaggcggctccacccatagccacactctaatccgggtgagattgatcaacttctatcgcatggaca

SEQ ID NO: 44700 - DNA, 428 bp, Oryza sativa
atatatgatgggtggacgtgggaaggttgtatggggaaacatgggaataaactttatattgaggtgatagatgagataaatagtcactggtttgggccaaagctttgatgggatggcccacaccttggactatctctcgatccacccttgtgttgacaggaatagactctatcgccttcgataaatatgttatgagtggacgtgagagagtatgtatgggataaaatacgactacatttaatacgaagtgatgatgagatcaaagtacgtgaattggccatagctctagtagacgaccccaccttgcccattcttggccaccctgcatagaggataaacttatgccctattcaatgtattatgactgaagggtggtatgataaatggaatgatttaatggagtgttatgagaaatgttggttggcacc

SEQ ID NO: 44701 - DNA, 452 bp, Oryza sativa
agcttaccgataattaatgtagctgtagcatatgtatcggataaccgcaatttctttaccctcaacacaaataagctgctgataaaggaaactaagatgccaaatgggacaatcatccaagctacctttagtatctcttcatcacttatcgcattgccactgtaatataaatactttaaccatcatcatttatagagtatattccaatgcaattgctagaaagacctttacaatcccagagcatgtttcaacatgttcaagtggttgaaaattgacaaaaaaaattaatagtgcatactaactactaatagaaagcaattatttgcttcaccgttgaacagtatgctgagatgacacgttatgacttgtaagaaatgaatgatattgtgtaattctaccacaagtacagctctaagggttatctagaatatgtatatgagaatagaatttca

SEQ ID NO: 44702 - DNA, 432 bp, Oryza sativa
  unsure (1)..(432): unsure at all n locations
ctcagcttactctctgacctgtgatttagttaggggaggttcttttaaattcctatggttatcctacgctctatccgaacgcatgtttatatagtattcctatgtttttcaattctctgttttacacgtgcattcctatcatattcctatgagtttcctattcctgtgtgttttcgatcctacattccgaataagccctaagtggttgagctccttgctaccctatcaagctcgccggctttttccagtgaattctccgagtattcaagcttggagaatatcttgagctcatctttcacgtagcttctcccaccatgcataagacagacagtacacaaaccagttaaccaaaaccaactctttgngttgcctttgttcgtcaaaaaactctttgcgttgccttctgtaacataaagaagtcaatcaggtgat

SEQ ID NO: 44703 - DNA, 355 bp, Oryza sativa
  unsure (1)..(355): unsure at all n locations
tagcttcatcgcaccacataactcatcgtgtgttctcttgttcgcgtgtgcttttccacagcttgtttgtcgatcacttatggaaacctgacaagtggtatcagagctcggttcagagcgtggacgcgagatcgcgctcttgagggtgtcttcatgcctcgaggacgcacgcactctccgcgccggcggtcggtgttaccgtccgtgcatgtttcaagttcctgcggccgcgcctctggcagcggcgggagcgaccgcgggctggtgatccaccgcgtggtcaaggaagcangaggtgcggcgaactacccgctgttgacaagaaccaactacaacgattggtctttgctgatga

SEQ ID NO: 44704 - DNA, 450 bp, Oryza sativa
  unsure (1)..(450): unsure at all n locations
ctcagcttatctggatcagaccgataaattatgtgtaataatattgatgtgttcttaagagaagtagtaatataatataatcctaattcagttcggagatatacgtattcagctgtatttacagttttacactcatgacatcaaatcaagtaactaatcaactaatagcacatttggttggcaacaagtatatacagatgacattctgtatttcgaacacggcaagtgaatgcaagagaagtaatattgcgagtagaatggactaaaccaaacaatacatgtatttgttaaaacgcctctataaaatgtctctacactataaaactcctgatctaagaggcaattngcaaaatgcctctactaaagtgtgcttatataagggttttcgtgtagtgacaggatatgatcacacgtccgaattcaaacccagaacataccataatgtcacac

SEQ ID NO: 44705 - DNA, 249 bp, Oryza sativa
  unsure (1)..(249): unsure at all n locations
gtgggcttgtggcataggaacgggttgttcactttttgatgcctaaatatcaacattgccaaactttgacagtaccaaacatatcaatatttggtaaagttaacaactgaggctatgtctagcttgcttctttttaaattntttgtgagaggaagagtctaatatcgccaaactttgatagcggagcaacttttcggaatgcttggattgttacctcccccaactttgagaaaaccaaaactctgtacc

SEQ ID NO: 44706 - DNA, 332 bp, Oryza sativa
  unsure (1)..(332): unsure at all n locations
tggtcgatgatgatgggcgttcagacattgtccatgaccatgttctggaacactatgttcttcgctgaaccctttcctccctgccatgtcttgatgcgagctccagtggctgtgccatacaacctgacattgtcgacggtgacatttgtgacatgagcttcagaattatgatcacctcagctaccgatgctgatgccgcngtcccggccacacaccatgttcttgacatgcatgatctcggtcccgtcctcgaatgacatgcagtcatcctcggtcttgatcatgcagtctgtcacctcaacatctctgctgcgtgtgatatggattccatc

SEQ ID NO: 44707 - DNA, 406 bp, Oryza sativa
  unsure (1)..(406): unsure at all n locations
aacttgtcaacggcttggcaatgttctattggtgcctgccgccatactgaatcctatcatcaaaccatggccgttccgaggttgggctatgaatttcattggtcaaatttatccttcgtcatcaaaggggcataggatcatgctagttgctacggattactataccaagtgggccgaagccgtgccgctcaagaatatgactcatacggaggtaattgactttattttgaagcatattgtccatagattcggtatcccgcaaacattgactacgaatcaaggagcttcttttatgtctaaggaagtgaagagttttgttgaatcttatggtattaaattgttgagttcttctccctacaacgctcangctaatggacaagcagagtcgagtaataagacgttgttg

SEQ ID NO: 44708 - DNA, 434 bp, Oryza sativa
  unsure (1)..(434): unsure at all n locations
tatacaatgatggcgggttcacatcgtctgtctttggggcaaagagcaaacattacaattgcactcatccatgcggaccatgccacatcttattatcgacggccgtatgacactaatcggtagaatattagttatttcttcctcggaaaaatttaacgaatacgccgtagctaagcacatgaaaagattagcacacgctttgataaatcacatttgctcttgtttgagagtatccaacttattctaccgccacatcgaataagtaagcaatacaaggatgttnttcctcgtctgatgtctcgtacagagacttccacttccttcttttctaagccaataattttgtatttttttttaattcagacctatatactaccccatgccattggtcatatttgaactattttattgacttcttctgcgctgcgatctac

SEQ ID NO: 44709 - DNA, 507 bp, Oryza sativa
  unsure (1)..(507): unsure at all n locations
ttaagcgactgagctgcagcttgtcttggaaagatgcctgcggagaggatgtcccataactggtccgtaatttggtttagttatgtatttccgctgcggagaatgctattctttgagaggaactatccacctctgtaataatntattatttgcgaatattaaatagctatttatttgtactctattatcaatttgntattgtgtgcctcggctgattcctggacgacggtttaacacacatgtaagccgttggaattttggatagaaattccgggcgtgacagctacgaccttctaatttagtctgagattcactaagtaaattataacagagggagtatcattgttcgaagtaccctaatttactgttttctacagcaaaacaatgcacccaattattattgacatgcgcagcactaaaatttatgtttgcaatagtcatacagttgaactatatgtctcacgctgatagagctcatacgacaccgtgatttcttttcagcacgct

SEQ ID NO: 44710 - DNA, 411 bp, Oryza sativa
  unsure (1)..(411): unsure at all n locations
ctttcatcaatttcatgtctaacagctatccgccgccgcttcttgttagtgcattgatccttcattgccttatcatctgaaacaaattgcgaacttctctttgcaggcaacaaaaggatctagagaatcagaaacagtaacctctgaggtatgcatcttcagatgggaaacatctatgttttcttgtgataggtgtcataatttagagatactatgtgtgattttatccaagagcattgcttcagaagttgtttaattatattttacagngttgctgtgctcttcttatttactagacctctgcatgacacttgttttagaactctgatccaacagaactatgtgtgtgctgctttatgctatgcactctgntttttccctgacgaaaactatgtacttttcttgatatat

SEQ ID NO: 44711 - DNA, 346 bp, Oryza sativa
  unsure (1)..(346): unsure at all n locations
agcttacttagagattgcaccattctatngcaatttgcacctaaggtcttgattagtgtgctacatganagaaaggagatactctgctgtagaaagctccttcttgtgcctttttgccttatggttctggaagataggttaagccctgatcaactataactactagcttgagtacataactgtagattgaattcatagataaacctatagctagccatgtatatataaacgatagggtttttttttttttcgaggagatcaggntaatttaggttttcaacatcatgtaggatgtatcaacatagaaatatttctatccagctcattgctatacctaacatatgct

SEQ ID NO: 44712 - DNA, 487 bp, Oryza sativa
  unsure (1)..(487): unsure at all n locations
agcttcaccttggtgctaccatttttctacacctatttatgtgactgtcgtgcatcatcttcgtatggcaccttgccattcatatgatnttgatgctaggcaacaccttaactggggttatggttccaaatcattacgaactgactcagtatgaaatgtcaccttcaactgtcaatgaattccatgtatatgtcatgtatgagctccataatcccgtatctattgcgctaaagggagcagaaacttaaactggtgtaacttcttttcccaccaaacgaggctgttggagctgctgaaactctgcatggagaatggtcagtaacaagattgcgtcctgctgcacatggcactgctagcattgagagcttgagcttgngtattggaccaaggnggggactnggagatcatggtgattccgtttctcgacagctcgttcttacaaacacttcacttgtcgaaagacgaccggagaattatgatgtagatg

SEQ ID NO: 44713 - DNA, 481 bp, Oryza sativa
ccggatcttaagcacctgcgggtgcagcggggcatgtaacaaagaaaaaaaatctttcgggatgctcatcagccgggataacaccagataaaatgtgagatgctcacagccatcaagaaagaatgttgatggcagcggcatgcatgccaggagatacttaacgatcttctgcaccaagaaatagcacaacccatgtcataattaacatgcaacatggatctggctaggtgtcacgcccccaactaatcccgaccggaaatagcccgtgacgctccaaattaacctgttaatcgataccagtcccaggaaacagtgttggtatcatatggagatagaatgtcacagcaacagacgtctctttattatatagtagaggtacagtcatgttgtgctgcggacagatcccgagctcacaactgcattacaaaagggaaacggaagccaggacttggaccaatcaacacaggcgcgacttgggaac

SEQ ID NO: 44714 - DNA, 465 bp, Oryza sativa
  unsure (1)..(465): unsure at all n locations
tctcggcatcnctaaataagtctattcttcaccttaataattatctctaagaagtgtagttttagatggtccactatacctctntaatactactttatctgctncttcttggctttaaccatcgaaccaataacagaccctccttattctcttctctgctctttttctctccatattaatgaaggtcatacgaatcttttaaccacctgcttaatatatcttcgaatagctaaaattatactcactatattatttagagacggcgcctatcactatatttattttagataatgtataaaatctagccccaattttaaaagaagctacttggttgtatccgatagcatgaatgtcaattagtaactaattgatctatatatgcatattgcaagcttgatgtgagtcagttttgcataaaatcactgaaacaaaggaatctctatctttgttgtctatatgggtcat

SEQ ID NO: 44715 - DNA, 344 bp, Oryza sativa
  unsure (1)..(344): unsure at all n locations
gacttctgcttgagcaattcttatgctcgtacttctgcgcgcctgccttggagtcatgaggacgtcgcccagtgatacaagaggagggcgatattctctctcaagctcccatcaccatgcttcggtctttaatccctatttaacctcactgacaggtggtgccagtggcaaagccatgaatttatgtcgatggtgtcattctgcggctctaattgacgatcatgtgttaagtgaaacacaaatacatatgaaaaatacaaaanatttcctcgcatagtggttggtcaacctatgtctcaccaaatcactcaagagaacctatgatgcacgaactctatttacac

SEQ ID NO: 44716 - DNA, 245 bp, Oryza sativa
attttaaagtattgtgcacttgatcacacacactttggccttagcaaaaagtgtctaagtgtctatatgaacgtgacaagccacacctgacaatatgggctgcttacatattatacctacgccgaccaaatatgtctatgactccctttcaggatgacgcatgtaacatgctcccgcgtaatatatcattccggtgagacagaccatagagggctcatatcactagcttctgagctgagtgatta

SEQ ID NO: 44717 - DNA, 409 bp, Oryza sativa
  unsure (1)..(409): unsure at all n locations
gacaccttntaagatgcattgtaccaactcctaaaaagatgagtaactgcgggataaaaggattntaaggtattgggcacttgatcacacgcactttggcctaagcaaaaaatgcctaagtccctaatagaacatgacaggccacacctgagaatatgggctgtagacatattaggcctaggccaaaaaatatgccttcgacaccctttaaaggatgacgcatgtaacatgctcccgagtaataaaccttccgggtaatatagaccaagtgtagctcatatgaatagcttatgatctgagtgattatcccttatggatactccaaaatacatataataattgaatcctgactgacgcaagtattctgttgataacctttacggggaataataaatagtctagtctttga

SEQ ID NO: 44718 - DNA, 434 bp, Oryza sativa
  unsure (1)..(434): unsure at all n locations
caccagctccgatcaagttctttctactttcatgctggtatggactcaagtcggtgaagtcatttactcggnttacaccacaatgccaatctcaaccggtcccccaatgaccagaaacgagaacgctggggctacgaaccaagatgcctctacgtcgaanaatccacccgttgaaacggaaagcggattaatgactacatccaagttcgtgaaggattctgatgcggccaggccttgttcctccgacacanaccacgggccagcaaagatgacttccgaaactatcaagtcttggtgccctatccataagaagaagagacatactcttcaagattgctgggcatttgctaacgcttgtgctgaaatccgcgcctgcaaagaacgtggaattcaacgcacttcttcaactcggagcgtctattgtnctatacata

SEQ ID NO: 44719 - DNA, 417 bp, Oryza sativa
  unsure (1)..(417): unsure at all n locations
taatcttgacacacagttttctttttcccttgggtgtgcatttactctgtttgttgggtctttggatgaacaggaccaggatggtgacagaatccacatacaaaggcatgcaaggaagccaaggaatcagtgagatgaggactactggcacccagtactgcattgatgattacatgcaagccatggcaatggagaggagaataaaggaggagggcctcagatggcagagggatgctgctgctgctgctgctgcacatggtggtgctgctgcttccaacctccaaaccgtgggatgttcggtgcaagaatctgacccctttaatgtacatcagctgagaagaaaagttaaaagaaacattgtgaaaacttaatcaaaagtatcacatttctcttggaatatttaactggnttcacacg

SEQ ID NO: 44720 - DNA, 434 bp, Oryza sativa
  unsure (1)..(434): unsure at all n locations
acctgcggcatgcaagcttgactctacattgactagcgaacaattgttattggagaatgcgcactattgctaaagagtgccatttttccttactaggagcctgtgacgacattcttcattttacaaacttcctaagagccaactgcaggctccaaatcatctatagctaatctaatagtccattcatacaatagttaactataaaaatataatacaccattaatacctggtcccacctctcatacacacataacgctntggagtctgtgttacagttggctataaatctacagatcggtttcttctctttcttctattttcttctcgattagtgaagatttcaccattcccaacataatgagcttgagccgcacggtctatatataggcgcttttatcgtgctatttagaggacggtcggactatctttntttt

SEQ ID NO: 44721 - DNA, 375 bp, Oryza sativa
ctgttcttcccctccagaaatatgcagcgatgcctctgtctgtttctatatactgaaacggaagatgtttcttcttctatagcttcaattaaccccatcttaaaccctcatttgacacccgttgacgaagcaagatcttgtaccttctggtgttttcaactgcacgaggctgatattaatgatcagtactcgtactattggtcttatcaactgcacaaggctgaactcatattactgattagtactcgcttctaacaatgatgtggcattcttaattttctttctccttaatcaatctttattgttgtaaatatgatcataaatgcatacttttatatttctgcagtccatattgtcgggatatactgtcacatc

SEQ ID NO: 44722 - DNA, 431 bp, Oryza sativa
agcttggcatacaattgatgttcccgcaactttttcaacaccacacggagatgttgctgatgggcttcctctgattgcgagtataccacaatgtcatcgatgaagaccacaacaaacttatccaagtattccatgaatactttgttcatcaagttcatgaagaaagcaagagcattagtcagaccagacgacatcaccgaggattcatacagtccgtatcgcgtggtgaatgcggtcttcgggatatcctcttcccggatgcgcaactggtgatatccggagcgaagatcaatcttggagaataccgtggcacctttaagctgatcgaacaggtcatcgatccggggaagagggtacttgtttctgatagtaacttcattgagagctctgtagtcaacgcacatactctgtgtcttgtgtttcttctccac

SEQ ID NO: 44723 - DNA, 445 bp, Oryza sativa
ctaagcttattggaggaacttgaatcgatccatgacaagccatccgatttgaccatatacgctttgccaatctagtatgccattgccgaggataatcaaaaatctttctcttaatcaacttgatcaaactcttgttagacgcctcggattgtccattatcttgtgcataatatggagaagaattcaacaacttgatccccatgctatcggcaaactgaacaaactcgtcagacataaagattgatccccgatcagttgtaatggttgggggaataccaaatcggtagatgatatgttctttaacgaactgtatagcatctcatgaatcaacttgtttcaagggaacagtttctacccacttggtgaattaatcggtcacaaccaatataaatttaagccccttgctggatggtggattaatttgaccgatcatatccatgcccca

SEQ ID NO: 44724 - DNA, 114 bp, Oryza sativa
  unsure (1)..(114): unsure at all n locations
gccggacgttttcttttatgcgggaatcgccggccgacgcggtggagtggtgatgagagacaagcggttatcccatnccttgacctcattctctccaagcacggcacccatcct

SEQ ID NO: 44725 - DNA, 439 bp, Oryza sativa
  unsure (1)..(439): unsure at all n locations
tgctaataatgatggttgtactttgattaactccccaagtataaaaatgaactgcagttacctcaccaaaacattgnttatgaagcacatgatctgctccggtactatcaccaaacaagcctaaaacaaagagtggcattggatctatgcccagaaccccataacttcactagagaagcctctcatttgataagacagtgattatgaaaaactaaactacctcaccatccgatgatatagattatgccgatctaacggtcagaagtgttcttcatgtatggatagccatgtctttgtttttaatctagctttaaatgttctaaaatttaagcagggtcaactgatccacatggtcttttgatttcttctagttggctgttcccctgtcttcctcccatggaaatgaccccaagaagaaaaactaaaatgaagtgaacta

SEQ ID NO: 44726 - DNA, 441 bp, Oryza sativa
agcttaatggactagctcgtgaaccgagataattttccctttcagcttgttaagactaatgagcatagctgaactggctcgttaagattaaatggcacgagccaaacctatggttttcctaaccaccggtaactgtgcttactgtagagtacggtaaaatattggtacgggttgataaaatttattcaaattcaattctttgaagaaaggagataaaacatagaagtattacagtattatagtagtttttctgttgttgttaaatgtgacgttgtgttttctcttcaagtgattttgttctttcgcatgtttatatcatgccttaccatgcggttacagtgaccttaccgtataaataaaaaatatatgaatttaaatttttgagataaattcacgcagtttttgactgttaccgtatatttaccgtaataaccgtcgggt

SEQ ID NO: 44727 - DNA, 484 bp, Oryza sativa
  unsure (1)..(484): unsure at all n locations
atcacggacactataaaactaagcttacaggagcgcttcctccggcagtgttttgccccgcctctatgtcatatgaatcttgaacaatgcattcaagacattgctcgtaattctcttgcagaagctctcgagaattatagtggcaatgttggcgactacaccgcggagatgctcaccctggacgggtgcttcatcattgagctcctcatccggtggaacatgggaagactcaaccatgacagttacgtgcggtcgatgcggaacatcatatactacgacctcctcctggtcgataaccagatacctttcttcattctctctaggctttttcacaagttgaagggggatgaagagctcgacaacgccgatgttgagaatgagttgctcacacttgctaagaaattcttcaaccacgagggtcaattctcttgggctaagtctccangcctgttagatctttctaatgcaagtgaggttcgtcatt

SEQ ID NO: 44728 - DNA, 426 bp, Oryza sativa
agcttgaagtggccgctgactgtgacccattctctttcatatgccatgttggtggtgtcgggtaagcctacacaacatttaatgcagcgatgtagagtgtggagatactcgtaatgggaggcaaagtggtcggtgtcgctaggcattagtaaggcccaacagtggaagcagtttgatgaagatgaagaaacagtgtagctgaggatacgatgggaatagaacaggagcccacgctttgatcgcacaagcatgaccattatatgttgaatggatttctcaattattgtgttgtaccgccaccacaagggatcagcgtatggtgtccaagcttttcactccaagtaattcctattatgcaagaatggcaaaagcagagttctgtcaatccgtctactataaaaaaagtttctgatgaaccggtgaacg

SEQ ID NO: 44729 - DNA, 450 bp, Oryza sativa
tgcatcccgctcgaatctttccaagcatggcgatctatctatctatctgcgcatgcactacgggtcgtccacggtacaaatattatctgctaatgccggcgccggccgtgccgggatctatatgcaccgatgctgtcctaccaaaaacgagaatccggccatcttcgtcttcatttgagccggcggcggcggcggctgcggcgcggtgccccgaggggggaacatcaagtcgtcggctttctgcagcttataaaaatcctatgcaacacggcgtgcccatcttgtgatgtggcagatcactcatgcagcgagctgagagcccactgattcagcggccagtatttgcagtggcagcggcagtgctgctcctactgctgctgcaactgctgctgctgggcctggacggggacgacaccgtggcacctgccccatggtgaatactgatgatgc

SEQ ID NO: 44730 - DNA, 459 bp, Oryza sativa
ttaagtcacctgcggcatgaagctttgcatcgatgttcagctgtattgtcttctacaggggaggatctacatggcgatggtctccacatactttccacatatcctgtccatcctgttctttcagcttgaagaggtcaatggcagagttatggtttcgtatgttgagcagtgtgttacagagacgctgcccccagtcgagggttgtgtagtgaatgaattctacattgttgaatggcgtgggaaactattgctgatcgttatgtatgctgaacatgtctggctagacactgagaaaattgggatatatgctctggacttcagcacaaaccctcacagcttgactgagataaacaacttggatggtgattgtctcttcattagttggcgcagcagcaagtcctttcctgcttgtcagtatgatggagccaaaggtgattttgtctacttcgttagcggcta

SEQ ID NO: 44731 - DNA, 446 bp, Oryza sativa
agcttatattataaaagatgctatgcctactttttatctttccaacacgtgtcttgcacgtgcacgattactagtatataatctaaccctaagtcaacaggtcaaactccaaatcctctacccatccagatctgcaccagccaccaaccaccacccgagtcagtccgccggctccgggagcccgggagccacgcgcgccgacgttcgccagtccaccgggagcccgggagccgcgcgcgccgccttttgccagccaccaccgacgccgttcaccagtctgccagccaccacgcgcgccgacactcactgccttctctcgccgggatactaaagctgtcatcgccggccgtcgccatggactgaagtcgccgtcgccggccgcctttcatcaatgcgccagcgggccggcgcggcgcctgcagtcatcttcaccgggagccgctatc

SEQ ID NO: 44732 - DNA, 423 bp, Oryza sativa
cggacacatagatactaagctttgaaccgactggtgcatctgaattgggctcttggtgttttgcccggtactcacgaaagcagtttggaacatggtgtatctgcacgtgagccggccggacatattccgggagctgatcctgtgcgtgtcgctggacctcggcaagagctcctacatgaaggccacgcaccaacctctcttctgcgagggcattctcaagtgcaacggcaacgcctgggcttaccagataaagctcattgcccccaagatcttccccgacaaggtcaacgtcggggtatcttttcaaggaaataaaatcactggctcgttaattaatctttcaaacaacatctgccagctcattttgtctatgatcgatcgatctgatgtattttcactaacaaaatagtgtctctaatatgc

SEQ ID NO: 44733 - DNA, 442 bp, Oryza sativa
agcttgtgcagaaaagcagatggagaatctttgtacctgtgtgcgcgccgctgcatctctccctctctctcctttcacccaaatcgcgaaagcaaagctggccgatatttgctcggagtaggggactactcctaaccccaagaggccaagattcccccgagaaatatggtctcggagagggaatccacgaccgtgacgtcggaagggtagctagggagcagcgcaaattcaatcttcccatggacgatcgatcgatcgacacgccgctagctcacgcgcgcggcgatggaaagcaagcgagccagatgcacatgcaggcagcctgccagcctatctccgctgatggccggccggtcacgcaccgcgcgcccaccaccaccgggccacacaccgtctcgcccacatgccccccaccacggcaccgcgggcagctgtgccatat

SEQ ID NO: 44734 - DNA, 436 bp, Oryza sativa
  unsure (1)..(436): unsure at all n locations
ntcatgacatggcatttccaaagccgacacatgtttaccatatgccgacgagaggggtcccagaccaactacaggttatgttccataccatactgtgccaggaagcccattggtcctccccgacaccaccccggcgaatacacatgtctctcggcatcaaggctaccctgataagctagttactcaaccaggggtgtcccattccacccatgtggtcgaacttgtcttatgtttggatgaaaatcccaagaatcggtccttaagtgcgagagcgggaaaccgtacacccggtacgttccccggtccgcggttttggaaattcatttagttcgcaagcaccgacccaggtgtcgggtcttccaagtcttttgtaaaacttcagttttacccaaggtgttacttcagattttaatgttgatagcgaccgtctatactg

SEQ ID NO: 44735 - DNA, 295 bp, Oryza sativa
atcaaatggaaagatgttggaatcggtggaacagtgaacatgggtggaaaaagcgaatggttggaggctgtggttggttaacaaaagagtgttggtggaaagttattatattttggaaccaattctgagtattataagatactatattttgagactgataaagtatatcttatagctattaatttaaatacgaggtcatatcttatattatatttgcgtatttgtgagaaggaaggagtattctcttgcagacattatttgagatcatatccctgtgacagaagacactactaca

SEQ ID NO: 44736 - DNA, 404 bp, Oryza sativa
tgcattatctaataaaaatactttagaacacattgttcacactggctggtatgtgattatctattccatgggacttacttacacttcaatatccatctaagaactaacctataatagccagtgataaggaatggaagcagaaggtgaaattcaggataaaactgtatgcagcatgaaaataatagtggtactggaatgtatcatttctgtactacttatatgaatcggtggtgatgggttgtgctctacacccccaatacttcaatcaacctttggtgaaacaatcatcatagacgtgtgtcattttactcatttgtacttctattgaaccaatatatatatgatttaattatgttcatatgtatgtggatgtcaggtgatccaagataaatattttaaatgtg

SEQ ID NO: 44737 - DNA, 464 bp, Oryza sativa
ggatcttaagcaccgcggctgcagcttttgataatgccatcgacacctgctcttatatcctataacaacgcatgaataaggcgtatttaatcaatatgccgacataaagaaaatctatggcagcaacgtattgaagattatatcatgtcttgctttcccgaaaaatttaaatacggattataactaaattggaatgtgcatatcaactaatgatgggcaaagctggaacttcataggaaaaattaaattataaattcttaaagaattacaatctaaaatatgtactagcagcatttttaaaagaatctacaaaagttcaaatatcatattacttcaacgagactaaactagctaacccatcaaaagtagatattgtacagttagaattcagaaatattgaaagcaaaatattggacagttagaattacctttggagaagatgatattttcataggagttttctc

SEQ ID NO: 44738 - DNA, 401 bp, Oryza sativa
tgactggctggtgcccttagtatctgacatctgtggggatcaatgccatgtttcaatgtgtgaccggcttatttctaggctattcctctgtctaaataatagaatgttttattaatcaacgaaaaaatttaatctatgcagtaacaacaacaagtgctcgacactttaaaagagataaatatagactacatgacatatgatgttgccctgtgacaccttactaaggctgtctaaatagatacagactcgtgagctgctcgagctcggctcgagctcttaacacaccgataccgagcctaacctcattcttgtgagctttttctagccgagctcatgcttttcacgatgatatatgtatatgtgctcttatattttatatgacagacaaccccgtaaaagat

SEQ ID NO: 44739 - DNA, 442 bp, Oryza sativa
  unsure (1)..(442): unsure at all n locations
aanatggcataagtatactaactcttgcttctttggatcnacgccaacttgttacaaatctcatatgctggctcaaggatgctcactctatcaaactccccttggctcaaagagttgaacaaagcattcatggcttgggcattgagttggaggttgcggtgatcaatctccgtcaagggcttgccggtgatagcaaaacctacatcaacaatactccaaatatggaagctcatagctttgaggtgagtagacattttaattttccaagtggaataatttgtgccattaaacatgggagccttccctacataggtcacctcgttcgacatcttctctctatgcggtgaagcccaatcaagagagaccaagctctgatacaacttgtaagatcgagatgtcgactacagtgtggtgaataggcgatttacaactaaatgacacc

SEQ ID NO: 44740 - DNA, 453 bp, Oryza sativa
tatctcagtaaggttcttgcatcccttatatgtctcatctatactcccggtcagattgttatcattcaatctaagtatctgcagaaaggtgccttgacatatcttggcagggatagatcctgacagcacggtggattctgcagagaaactaaccagatgtaatggaagacccggtagatgtccgtctaacatgttctgcgcaagcgatatagatgaaacattactccagttctgaatccaatcatgaatgtggcctgagagtctgtttccttccacatcaaacaagacaacggcaactaaatctgcaagttcttcatgtatagtgccagtgaagttattgccggacagaactagagtagtaagcttcttgcaattgccgagttctttcggtatgctcccagtgaaccctgcactcttcgccatcagctgcctcagattgcgtagctcaccaac

SEQ ID NO: 44741 - DNA, 424 bp, Oryza sativa
  unsure (1)..(424): unsure at all n locations
agcttatagattaaactgtgtgttcttcttggtcgnttagnctatgataacaatgatagtgatgattntgtgctgcaagtaaaaagtacaatggatgaagattcctttgaggagttcttgggtgaagaaaagaaaagagaacttgtgagagttgccactgaagaagctgaaaggaggaggcatgctgaagagcagcagcgaatgggagaacaaagggctgcagaacaagctgccagggaacaggctaagaaggagatagagttgaagaagaacaaattgcaaaatctgttgagttcagccagaacacatgttgataatttgtggcacatagagcctagcacatatagacaaggggacactgtcagattgtactataacagaaactcaatgccgcttatgcatagtactgagatctggatgcatg

SEQ ID NO: 44742 - DNA, 452 bp, Oryza sativa
gtgtgtgccactcttggttggcagcttcaaagtcacctgatctgtggcggttcgtggacatgacacgccacatggtgattttctcatagagaactggcatactgtgcgcgatggcaaaagcagcgatagatcgctccgatggacagattgagtcattctgggcccagaagttcgtcactggtgaactcttggattatattgtgagaaggtattgtttcccaaatactatattcggttctgggtttgaggggttgagcttttatcgatttacatggaccatgttgagatatcagaattaagtctcgtagcttaatatataaactgcttgcatatgtacagtatgatgttcaattatgctgtatttatcactgtcaagttagttttgcatgttcatttcttgcaaaaagataaaaagggtttagtgtttatcagtggcggagccaggaatttat

SEQ ID NO: 44743 - DNA, 449 bp, Oryza sativa
agcttgagctgaattataagaagctctactatatctatattgtatattagaataggaagaaagtagagtataagaagtcggaagaattccggagttgtcggtaatcatctcctatttcttttattctgtttattactctgaattcaatataatattcttcctgagtaatttagatttatcttatgagaattatctcttgggtagttcctaaatagcatacgggattattgttcactataatcaacaaaagcataatgattgctttggtgagttatacacactaaagtagatattaatttcttagacgtggtgtttaggtaattgttatccagtaattgctgtgtatcccacagtacgtttgaggtaggtgtagaggtggtgacagccctcgaaatcacttaagtcctccctgtcggggtacgtagtagagcgacatctgtgaacagcgg

SEQ ID NO: 44744 - DNA, 468 bp, Oryza sativa
  unsure (1)..(468): unsure at all n locations
ctaagcttccacttatattaattcgtccataataagatatgtttcataacactgaatacccttgtgtgtattctttgccatgatttatcctttgtatcgcctttccatcaagctcaaagtgatgcaaagacacagcaatggaaaagcatgagccagaaaagtctaatccattagacgagatagccgaccagctgatgcaacatgttcattgtgttatttgcagctagctctgcatacaagagtaagaataagtctaaagctgcaaatagcaatgtctagtntccacgtaccttccgatgaagaatgatgactcacctctcaccgtgcaagcatgattctctcttctctctcgggctcttttcttcaaagaagcgtcgtcatcctgtgttatatccccacaaagctagcgagggggcttagctagctcatctcctacgtgccaattaagatgctgagctgaatagtgat

SEQ ID NO: 44745 - DNA, 408 bp, Oryza sativa
  unsure (1)..(408): unsure at all n locations
agctggctgagctgagtgatgtcgctatatatgcttatccaaccgcaggcgatgaatatagttgtgtaatcttatttggaatgctttggcatcaagaggcagaggaggttgccaggtacaccggtgtccctcaatctgctggcatgagcaccgagcttgtcaagaagtgcatcatgtatcagttgatgctaagacaacaacatgtggactacacccaacactgggatacccacgcagctaactattgggtatgcagtggaatcatacaaacctcagacaccactagtagtacaagttgtcatagctcatcgccatgggagatagcccaagctctctataataactagatcttggagtttntgaccatagacgattacaacagcaacccaacttgtgcgaaaagaatac

SEQ ID NO: 44746 - DNA, 420 bp, Oryza sativa
  unsure (1)..(420): unsure at all n locations
atcatgttctatgtacggcaagatgccacatgcgctgtatgttgtcgcgctccaaaagggaagctgaataaaaacaataatccttaattcgctattatccttggtggactccctactttgtagatcgttatccgctcaatttatgtttagtgcatcagtaatgttaatttgaactttcttgcacttttattacccgaatctatttgtgatggccttgtgattttcattttgaactgcactgcacttttaatatcgccatgtatttgtactggaatngtgatttaaattacgaacttggctgcacttgtaatatcataatatatgtgtcgtgggctcgtaattttaaattgaaatgtactgaactgttcttatctgtatctatgtgtgctggtactgcaattttaaatcgaaatggcatgc

SEQ ID NO: 44747 - DNA, 425 bp, Oryza sativa
  unsure (1)..(425): unsure at all n locations
gcttgaacaanaagttgggaactaaacaatgttattctcatgaaatttctacatcattgatgggaattatatttctaggaatgccgctaagaaatatcaacaagcttttctaccgtcgttgccggggaagattaatgattaagagtttattacatgctaataattttatatttaccttcggatatattactgtcctttggaggcaaaccttgttcggtttctcttttatgtgaaaatagggtagtacaagactggctctgattcgccgaccaatttcaatccagaagtccttgtggagcgagttcaaccccatgacggtcctcctcaagttactctatcggcaggaaaccagccatcttttcgccaccaaaagtgaacgatttggctatgataacatttcacgagttcgctgctcctttagtgac

SEQ ID NO: 44748 - DNA, 380 bp, Oryza sativa
tcgtgcttcattcagcttcacctaatgatgttttcacgattctttggcattgctgtcactgctttggctgaccttccgtcaacaacaaccatctgcacggctgaatggggtgcaaccatttggcatatttgcattggtctgtggcgagaatgggtgtttcatctcctcgatatgagagataggactacctatattcaagtggacccaatatactgatgccgccctccatattcataaatgtacctctgcatgtccctggttttgactgtgcctatacccatggattcctttttgacgtatgtcactgctatccaactgatcctcaactctatgctcatggttgagcatgacaaatgagatatgaccgtctatcttgtcac

SEQ ID NO: 44749 - DNA, 444 bp, Oryza sativa
tctgtcccggatcttaatcaccgctgctgcagcttcaggcattagtacggcgatctatctatttattctgatgattcgaatctagatgaagaactctatgagaatgaccgttagcaacgccggggagtatccgatactgatatgactggagaaagaagaaaacagtgccattgcaagatgcgagcacaatatactaacacactgtctggtcaagcatgaatgcaacaggaatgtagacacatttttcgcatgaacaggaatgtggactcaataatgaagaaaggcgtgaaagcttgcgatcatgccaatctttactttgtgatactgtataatgcagacgctccgatcaagctatgctgtgtcgactctatactactaagctacactattcaaaggatagaaacatgttgccacattacatatctaagcgaatttgatcatgac

SEQ ID NO: 44750 - DNA, 425 bp, Oryza sativa
ttaggtgtcatgcatcgcttagttcgtgaaacacaaaatatatgtgttatattggacatttgaccggatgtccgatggggttttctgacacgaatgaaaaaactaatttcataacttgcctggaaatcacaagacgaatcttttaagcctaattaatccgtcattagcacatgtggattactgtagcacttatagctaatcatgtgactaattacgctcaaaaagatgcgtctcacaatttcccccttatactgccaaagattcgatgtgtcactttttggaaaaaaaaaaggaaccgagcctatgtataccatcaggtatatacaatgatacggctatgacatgatttaagtcctgtttgggggagcttgagattataataagctgctgctgagaaactacctggtgagaatctgacaaagctg

SEQ ID NO: 44751 - DNA, 444 bp, Oryza sativa
  unsure (1)..(444): unsure at all n locations
agcttgaatggaatgaactatgtagaggnnnaccgangacctgaatttgtttgtattgaagttgcgtctccccggcaataagtgaaaaacggcgatgattttgccatgacattacagtcgcatgaaattaatgtcttgatgacaaccatgaagggcatatgcggtttctggctttgctatgggtttggggagggggtaggggaagcaaagggagacgaaccatcgcggggtgaggtggggcaagggaggcgccactgggccatcgtcacggtggccgtgctacttgccggcgtcaagcatcagagaggaagcaccacatgtgggggaggagaggcggcgtgcggttgctcttccctggcggcaccacttctttgtcgtggggacggacgaagagaggttatgatgaatgccggatggtatttactaaggtgtgtattgggcttt

SEQ ID NO: 44752 - DNA, 459 bp, Oryza sativa
tatgacaatgcgaatgaatgtgatcaagaccaccacattctaagcaatgagctggaccatattttttcctgtacctaacattgttcatagcttgagaaatcttattagcagccaaagccaagtcctcgtcctcgaactgttcgagttgctcatcggacatggcatgaatcaaagcaaggacaatagaatttgatgaagaagcacctacatccaaagaagtcgatgaagaaaccaaagcgctagacttagaatcaactttatgagaaagaatattcatctcatgtgttttgagtttgtgtaaagcgaatccaaagtcaaagtagacatatcaacagactcttgaatagatgtgacttttatctcccaaatagacatatcaagaccattcaaaaagtggcgaaatccctagattgtgtatagttaatatcctaagcaaaatcaacatatcaaagatcactc

SEQ ID NO: 44753 - DNA, 461 bp, Oryza sativa
acctgcacgcatgcaagctgtactgaatttacttttatatgtctattatttaacttagggaaatctaaaagtgagttagacatatcataaaagtaatttgtgatttttcatcaaaatataatcatgtgagatcttattgtaaagatttaattattacgaacacaacggtgtaatcggattagtaatttaagagaaaattttatttgaagtatagatgataggaatatttctcctacttgcccaatgaattaatagcaaccaaaactcctaaagtactagcacgtgggtgtctctggttaagactaattggagtggcctctccaattagatttaccgtttatcatgacaagatgagaacgaggcttctgtttgttttatgggtagattgaattagattatgtttttcaatcacgatcgattaggtaccctttgaaacacaggattgttaaagtacaggaata

SEQ ID NO: 44754 - DNA, 436 bp, Oryza sativa
tgaccttctgaatccatgactatcatgttgccactgttctgaagctctgcacggctagcaccaagtggccgggtgttggtgctccatacaaccgtgccgttgtaatcaacaagggccaagcccccgtccttccggaatgtgagcttggagcccttgacgttcaccggaacatcacgtttggccgttcacgccaccgtcttcttcgacgatctggagaaccatatggagaatgtgaaggcgttggtggccaccttgtataatccacatgcgaagtcgccattaggcgacactatgatggtctcggtatcatcctctgtggagacagatgaacctctagcaatgtagctcttcttatcttctgcaagagcagcggtgagcatgagatggaaggagattaatgtggtgaatatgtgtacgcctctcatggccatgggca

SEQ ID NO: 44755 - DNA, 476 bp, Oryza sativa
  unsure (1)..(476): unsure at all n locations
ctcgtacccgagatcctcttagtcacctgcggcatgcaagcttnctttggatctgcagataagtttagatctgatctcatgaacattgccatgactacacttagttcaaaaatcctctctcaggacaaggagtactttgctgaacttgctgttgatgctgtcctaagacttaaggtattcacagggttgagtggaagttggtgttgaaatatcttgttattgcaactactatatctgggatgctgtctgatgatgtttgtgttgtcacatgatgcttttctaatgattgatatgcaccactgtgcagggtagcacaaacttggaagcgattcaaattctgaagatacctggaggatccctcaaggactcctttttggatgaagggtatgttcttccaaaagctgtactatcggaaatatttcaacatttgatgtccttcaatagattagtttctaatcagtcattagtgtgatagt

SEQ ID NO: 44756 - DNA, 419 bp, Oryza sativa
  unsure (1)..(419): unsure at all n locations
ngtttacacgagaattcaccacatcatcacatatatattattcgttgaataaagattctagataaacaatggccattggattaatagggttcatgtattaaaaaaacccacaaatggactaaacatatggaaatttccggaggcttcactacctcctcctaaacacatgatataaaagagagaggataaagagagaaagccacatcatcatcaatatattagccattgaataaacggtttggataaacaatagacattggatcaaaagaacatgtattaaaaacacaaatgggctaaacatatggaaatttccgaatgcttatgatacctcctcctaaacacatgataaaaaagaggggataaagagagaagaaacgtgatgcttctagtgattgctcttataaacatacagtacaact

SEQ ID NO: 44757 - DNA, 440 bp, Oryza sativa
  unsure (1)..(440): unsure at all n locations
agcttgccgatgtgagaactcggattatgactcttaatgactccatccatgaaatgagcagagaaagcaggaaagcacccgcatatataaacagaaacaggtgtcccctacattggggtagagagccaatgccatagctatcttgtatgaaccacaatttcgaattgacaatcgttaaaattcaagtgaacgtgcccccgaccacattacgcacaacaggaaccagaagaaaatctctaacaaaaacgagctcacatgatatatactgcatcactttgtaaattattagccgagaagctgatcatctcccacacattcagtccatgagcatctgatgaagttctgacccatttggaagtctgcacatcaagaanaagtgtgttttagtgcattatagttcaagaaaattgttgacagttaaatgtgtgtctggtcatgcc

SEQ ID NO: 44758 - DNA, 446 bp, Oryza sativa
  unsure (1)..(446): unsure at all n locations
ntgtacatatactaaagcttttcatatcaatgctttaacagtactatttactccagttgccagcagaagcatctgttattagtacatcaacattacaagtattcaagaatgttgatgacaatcaacattttgcccataggaatcaagcaattgtaacactgtacacttgtagaacaagtaacataatgatgaaaaacaaattgtccaacaagtaaaaagcaacagtaagttaaatttgggaactaaacttcagtctttgtttcctttctaatcagttttgctagcgcaaacgcatgttttttgtctctgtgaaacagacatgtgactttgaactttcagatacaaaaaacagatgaaataggtatatatggatgacttacatcagaaaagatgattccatggaaatcttcagaacctttcaggtcacttctgactgcatgaagcac

SEQ ID NO: 44759 - DNA, 457 bp, Oryza sativa
  unsure (1)..(457): unsure at all n locations
atcctatatattcacctgccgcatgcaagctngctactaaattgccgaatgcctatgatattgtttgaacagctgtgactgattgagctgaaaatacttgatctattacacaacaaatgatatgaacccgctgaagattgggcctattttctagtgcaaatgtttctttcattcagttttaacaaaaccaagatgattgttcgcatggtgggtcatcctcatccccacagctgcggcaggtgtgagattaaaccatgccggcaaggtgctcttgctgatagtgacatgatagttgtcgcggaacgtacatcgaggttgtcctgagtactactatagtttagagcaataagcaattctacggttcttgaggaggtgccatgaggtaccaaatatttagtgtaaaatctggtatctcgtagtactaggtactgtgtgtttaagaggtaccaaatttata

SEQ ID NO: 44760 - DNA, 457 bp, Oryza sativa
acttgctcgcttacgtcgcggctaggaaaaactgagcccgacatggattcagtttggggagattggagtgggccggcacgctgggtgcgtgagcaatggtatgtttttcctatctcgacatgatttacttttactattactcgtagtccgataacatatgcgtttataagtcggatgacgtaccaaaatctcggtaaaaacatatttaatttttataatagtggagatagagatagagatatggtttagttaagatgaaaaaaacatctttaatttttataatagtagagatagagacagagatagagatatgggttagttaatgtgaaatttattataagaatctgcttggatatatatatatatttttagaaaatcgtgagctgcagttagaagtccgattatctaaagttggcatgcgagttgttttaaagagatttcttatacgagtccttct

SEQ ID NO: 44761 - DNA, 403 bp, Oryza sativa
  unsure (1)..(403): unsure at all n locations
agcttgtacagttagagaaggagtgatatgtgagaacaagaaaatctacttcaaccgatatgcccttaggcacggncatacataacatagaaatcacacgtggaaggggtgggcaattatctatagcaacaggtgctgtaccgaaactgattgcaaaagaaggtaaatcggccactttaagattaccatctggggaggtccgtttggtatcccaaaactgcttatcaacagtcggacaagtgggtaatgttggggtgaaccaaaaaagtttgggtagagccgggtctaagtgttggctatgtaaacgccccgtattaagaggggtagttatgaaccctgtggaccacccccatgggggcggtgaatggaaagcccncattggtagaaaaaaacccacaacccc

SEQ ID NO: 44762 - DNA, 400 bp, Oryza sativa
tcttccatagcatacggctttctagatgtatatgacgatctctacacagatggatcctatatgaatcgtatgatgaagtaccacatgagtggatatttatgaaaggaatccaaatctgccgaatcgctcatgttatgatcttctacatcctaagtctccgcgttccgtcatctggcttatgttcttcatgtagcattcatatcgaatgactctatgaaattacgtcgatacttctacatattatgggtaacgtaagagacatccctattgtcccccggtggtcttaattaacactgcttagctttcaattcgcctctgaccatcatattaaatgtgaataacccgtccttctctctttgaaacaatgggcgcttccggttctgtgcgtgcttcaaacaat

SEQ ID NO: 44763 - DNA, 405 bp, Oryza sativa
ccttggacactagtctggcgaatgttgctccagcgttcctcaagccgaaaggcatcctgatgtgacaaaaaatgcccaacagggtgatgaatgctgttttcgtgatgtcgggcgggttcatatggatctggagatagctggaatatgcgtccaggaaactcatgagttcgtagccagatgttgaatccacgagctgatcaatccgcggcgaagggaatatcggtttctgacatgctttgttcatgtccgtgatatctacacacatgcgccatttgccggttgacttacgaccactactggattcaccagccactctgggtggacaatctcttgaatgaccccagccctgagtagttattggacttcggatatcgccgcctcttgacgatcggcggacatcttaca

SEQ ID NO: 44764 - DNA, 437 bp, Oryza sativa
  unsure (1)..(437): unsure at all n locations
tgtatgttgtgaataaagaaatttccaaggtattgtgcacacaccatgcgcacactgctttaacagatgtgcttatatctctaaaagacacatggtttcaccacacctggaaatatatggcctatgtggtgtaaaatccgagtaaataaactcataaggatttaccaaccgtctgataaatgaccacattatttaatcagcctaagccataatattggtcaataataatgcacacttacgtgacaaaaagcaatgatagtgtatccaatcaattgctttataaacccaaacaacgcattgactatataaaaaagtcagcggtgcagctatgagaaacttcactgttgggcaccttttaaaatgcattgtaccaactcctaaaaagttgagtaactgcgatataaaagggatttaaggtattgggcattngatcacgc

SEQ ID NO: 44765 - DNA, 160 bp, Oryza sativa
ggcgaacgtcgtatagcgcgatctgggttatcatggttcggagtggggtgtatagagtgcgcctccagcactccgagcgaagatgtacgatgatctgaacatgtaacccatgatactaaccgacttgctcgaatctgatgaaatacagattgcgagactt

SEQ ID NO: 44766 - DNA, 392 bp, Oryza sativa
agcttgtcaaggtggagacaaggtcttctgttgtgatttctattaaagtggggtctcattatataccaatacctactggagatgaaaccaaggtggtttgaagtgatgaaaccgaaaccgagattagcacagcgtaggacaccgatcggaccatgacctctagccggtctgaccggcgacttcatgtcggtctgacgcgcctcaaggcaatgatatgatagctacagagtggcggcgctacagaagggaggagcagctagaggcggctgccgtggttgccaccttcgtcgccggtggctgatccatgagtgtcaacaccctacaacacttgctgcccatgcgcacctcgctctgtcgtgtctacctttgtcgtcctcttttgtgctcccacc

SEQ ID NO: 44767 - DNA, 457 bp, Oryza sativa
  unsure (1)..(457): unsure at all n locations
tgattctactgtgcttcttaaacaagtgaattntcgtgaaagtaactaatatagatgccttcatatattttctccattgtacaaacttaaattactctggtccctagcttgtttgcagtttagatagaaacaaaattcggatacaagtaaatatttatcacaccattaattttgccagcaagaaagcatatatatgatgagccatagcgtcggaccgtttttgcagatcttcgctgtatgacgacaatggcgctcttgcttttcttcgctgcattcgcgttatccgctgcaactcatgccgtcggccagccaggtttgcaagatcttgatttttgcaagagcttgatttttcaccccatgcaagtgcaatcgacggcgtgctaattagtttgttaatctctgtatgacatatcaaagtgatgatgagatacttaattattatcgggtccatgcatga

SEQ ID NO: 44768 - DNA, 461 bp, Oryza sativa
  unsure (1)..(461): unsure at all n locations
taattcgtgtcacaatggcatggtgtagtgcaggatntattactttgcatagataaatgtgttatgcagaaaaggaaaataatatcttgggaaaagtattcttagcaacagcactgtgtttcgcatatttatacgaacttaatttactatcttgtagctcggatcaaagatattacgaatacgaagtgacatgaatgtactagatttacctaataatagttctttcttagcgaagcatttgtgtaactgtactgactcgtgattgatatattattagcaaacaacatgtactccttacttttcatcaaaatctcagcacaaagcatatagaaatatactactattttcttctgtttataccctcaagataaatgaatggaatgtcatctcagcaccagcacagcactatatggccattttcccatcatttgtcattgcagttgttctcccatattctaaac

SEQ ID NO: 44769 - DNA, 433 bp, Oryza sativa
  unsure (1)..(433): unsure at all n locations
agctntatatatnggttcagctagatattangtatgattgcttatccatgcttagaaacattagcacactattgggataacttatgactcattattatttaatgatggcttaatgatagttcacgatggtcaatcgtgattggttaattaattacttgccaactaaaacttgataatggtgggttgtgagcacatggttttgagagtcgtgctcatggcaattaaggaccggttcgcgagctactgttgtgaaacattaaccgtgccaaccacaagccagcgtaggcaacggctttaccttttgtataacatgattcattgcgaagcaccagactgagaagtggcggagataagcccacggtggtcgctggggagtccatgccttgttttataagggggtgattatgatccangaatggtgcactgtggtgag

SEQ ID NO: 44770 - DNA, 447 bp, Oryza sativa
tctgcgcggtgtaccgtggcaatctgatagagctcggcctaaacgttgccataaagagggtcgccaaagactcctccaagcaagggaggaaggagtacaagtcggagatcaaggtgataagtcggctgcgtcaccgtaatctcgtgcagctcatcggctggtgccacggccgtgacgagctcctcctcgtctacgagctcgtccccaaccgcagccttgacgtccatctccacggcaatggcaccttcctcacatggccaatgaggtaattaattaactctcattaatactccctccgtcccaaaatatagcaatttttagctatgaatctggattttgggacggaggtagtatatcagaatctatttttttccaatgtgcaatcaacaaatgtcaattgaaattcaactgatcaactagcttggatattatcataggatcaacatt

SEQ ID NO: 44771 - DNA, 459 bp, Oryza sativa
  unsure (1)..(459): unsure at all n locations
atccttagagtgacccgcggcatgcaagcttctntaattatcaagaaagaagtgcttattcaccagcagacagcgccgcgcgccatgtcgattgcttaacgtccaccgccgcccgcaccactaccggcaccggcgccaccgccgaaaccaacgccgacgccgacaccaacgcctatgccgaagccaccgcccccaccaaggccgccgccgtgctcgaggccacctccggcaccaccacccaagccgcctccggtgccaccgcctccgccaagaccgccgccgccgccttgaccagcacctccgccagctccaccaccgaaacctccaccatgccggcgccaccaccaccaccaaggcctgcgccaccgccagcaccaccttccatgacaccaccggcgccaaaccctccacctttgcccccgccggctacaaacccggcacctccaccgctggccattc

SEQ ID NO: 44772 - DNA, 438 bp, Oryza sativa
ggcatacttcaattccacagtaaacactcaaattcggctatattttacgaacggcgagcttggatgcgcgagggagcggagatcgagagcaagaaattctcacctttgaggtcgcggagggcgacggagtgggacgagatggaagcggtagcggaagccatcaccacctccgaatccttcctcttcccttcaaaattccgacaaaatttggaagcaggaaatgtttttttttcttggttttccctcacttctgcgagttttctgtggcgtacggtggctaaagaggagggcgggttacatatagctcgcgcgggaggctgggttcaatgcacctggacggaatcgggagcggcggacgggagggacacgtgtcacggcttcattggctggccgcacggtgagggggcgatcgaatcagtggcgtcacgcggagccaca

SEQ ID NO: 44773 - DNA, 456 bp, Oryza sativa
agatcctcatagtcacctgcggcatgcaagcttcatcggagatgggtgctcgttgttctttcttgtacctcagtgtggtcgcttgaaaacttgctaaaccttggtggttgcttattggagactaaacctttattgtggttgattgcttgatgaggcttgggatcaatcgagatccggctccttggagtccctcaacaaaaagtaggatcgttgagatccgaatttcggtgaaaaatctgtgtctcctccttgtcttgcttgttatatttgcttccctgcttgatcataattatttactctatctattgcagctgtgtgttgtgaggtttgcgcctatgtttgctcccatggcaaaacaaactcatgagaccggaagtttacgtttttcagactggaacttctggtccgctacttctgttaattaagaccgaaacctttggctaatttgatctcgct

SEQ ID NO: 44774 - DNA, 453 bp, Oryza sativa
  unsure (1)..(453): unsure at all n locations
tatttatgtgacctttggaacatggtacttgtcattcttgatcattcaggatactnttatgtcatcagcaattgtgaggaagatgcaattccggttttaaacaatatagcatgatgagctgcatggactgaaaatattatgctacaataagtagaaaacaaatggtgctcaaccaaatctcaaatcatatttcttgggtctgctactgtaactagatttggctgagctacgtgaaaatggccaaattatttacttaaccaacatattttctgcaattggataagacacaaaaataagactactacagcaggttactctgcaaaagaagcttgtgagaacataccctcataagaagtgattagcaaagatgccgttttatagccctgctaagatccttgtggaggttcataagcaagagttcttcatcaaccacgctcgtctggtgccatctat

SEQ ID NO: 44775 - DNA, 218 bp, Oryza sativa
atgggctcctaaagaaagtattcacgtgcagaatgaaaaaaatacttaagttgaaggggaggcacagaatgagataagagttcacatgtgtgcaccgaatcaacagtttgcatccaatcattaagttctttcgccaccacattatttatattcttcaccttggtcatcgatggctatgtcattgaatccattgtcaggtttggtttgttatccctcat

SEQ ID NO: 44776 - DNA, 411 bp, Oryza sativa
tattactattgtttttcctatccaactatacgtatattcttttctatacatgaggaaaatgttaggtatatatctaatctaatgatgtccaccaattttaaaagaaaatcgaggatgtatataaatctaatctaatgatctaacgggttcactgatttaagtgaaaatggatggtgagattatacagtgtcatgtgacgatttgagagcgtttgtataagcgtcatgtgacggctcataagcgtttgtagcaagtttaatagaattttagtatataatacaaaattctccaaacaaatactccgtgacgcaacagaaagaccatgggtcctaaatcataatacaagtgggcagatattataatatcaaacgattgaacatccaggttaagttaaccgcatagatgatcatg

SEQ ID NO: 44777 - DNA, 449 bp, Oryza sativa
tatcataaagggcttcgacaaggggttgtattcgttctttgagcataaagataaagatcggatagattcgaaccgcaattgcaaaggtaatcactactatgccagcccaaatcatgatcttcaccaacttggatttggttctctcgcgaaaatcgcgagttgcagagatgagaaccatgaaaagcaagatcccgaataagaaaacagaaaccgatgaaaccacaagagtgaagactagtagagtctcgtcttttgtcattctttgctcctttttcactcaatgattcattcgaatttcccgaccaaaaattctatatgtctattcatagggcctcgttgctaagtgctacaagatctagtgcactggaactcgtggttatggacccgaatcctttagtatggaacattgtcttttccaagtaaaaacccccagtatatgaaagaatgaa

SEQ ID NO: 44778 - DNA, 382 bp, Oryza sativa
  unsure (1)..(382): unsure at all n locations
agctntacaagattagggtgtgacagttgtcctttgtagttcacttcggcctgcaaattaaaatgcaagttattatatactacagtagtatatcaatcaagagttatgcagaaagaaagaaaatccataccagccattccctgtggccctggaagccgtcctggttgagcttcttgacggcgatgaccatgccggtgccgggcctgctggggaggaaggtgttctcctccacccacaccctagaagacggagccgaatcctccctcgccgatcacgctgacagtccagaagaccctcgtctgcgagttgagctaggtaaacgcaaagctcctaagcgtaggacgaccgcagatatcgccctctctactgggggtcaccgact

SEQ ID NO: 44779 - DNA, 434 bp, Oryza sativa
tagatgtatctccaacagcatggtcaagtattgtgttattcttttgaggaagtttatcaagggtaagctgctgcacatacatagagacaatatagatgtggtagaaaggatgagattggttgtagcagagctgatgagggggaaggaagtattgttattataggaacatacaacatggtaaggaacttgcattatacagtccccctcttgaatgggctccgatgcaaataatgacctgaatggacaaaaaaagctatcagctagtaacagattattatgtagtagtagaaattaagagaacaaattaagggagagaatgagaatgagaatgaccttccaaaggcagaggaggttccgagagataatacagaagaaatgtgggttccagacttgctgcgcagccaacgcatgaatacagatcattcgcagtcgcc

SEQ ID NO: 44780 - DNA, 422 bp, Oryza sativa
agcttgctgttatcgcagcatcacttctattctttgtcatcatctcaccaagattgtgaaacctgaaaagctacacaggatatttagctcttctatgaagttcaactattcctacagacatgacagaacattagcattaaaaaagaaatgaaaatccttagtaatcctgaatacgtcaacatagacagttcacctagatttaaacctgaatggcataagaggtcggtcattgattgctgcccagagattccatccagcaaaatctgcttgttgaaaagcaacctgcatgataagagtaatcattggttaagaaactaccaaggcagcatcttgctaaagttagtcatctataatgccttacctgtgcagtggctgggagaagtttgcctgatgggtctcttatagctgctgaatcaccgatt

SEQ ID NO: 44781 - DNA, 443 bp, Oryza sativa
  unsure (1)..(443): unsure at all n locations
tcgtgggattgaggaggtaaagtttctccttcttgtgttcttcctaatgaanacaacgtatcaaatcaaacaacaatttattccagtgatagtgctagcagtacctttttccactcttattctttgttaaatcagtattacaaggtctcatttaaattttgggcatctttgtgtaacttgtcatatggggctatatgtacaccctgctttattgctggtgtgataacatcggtttaatctggtatattctataaggcattatagtgaagttaatgtgccaagcttggccatgtatgcagatctcgtgcacctactgcctggcgtgaatgccatcaatctgtcatcatactcgaactattttgttagctgctagccatatcaatgcgtgtttgttcttacagatcatatttgtacatgagacatggagacaacacgtcactgga

SEQ ID NO: 44782 - DNA, 444 bp, Oryza sativa
agcttagcggttcgggtatgctttttctctattcttggttttcctcttcttttttacatgtcccataattaacatttgctctcttcgccattcctattttgcatccagattcttgcagctcactgttcgacagagcgaaccgtgcaggcttgtcttgacggatttaagaaccgtcttcgggccatggatgacgaaataggccgcaagaacttggagatggaggccctcaccaacaccctgaaagaggcgaaagccgaaaacaagcggctccaattcgagttggagaaaggaagagaggctagggccgaggtcgatcgcctcaaggccgaactggagaaagggagagaagccatagctgaggttgatcgcctccaggccgaattaaggaaagaaaaggcccattccgccgtgctgacggattattataaccttactgagccgaag

SEQ ID NO: 44783 - DNA, 406 bp, Oryza sativa
ttacgtgacacttacatactcaacttactgaattacttttatatgtctagaaatttacttttgaaatctagaagtaatttagacatatcataaaagtaatttatggtttttcatcaaaatataatcatgtgagatcctgttgtaaagatttaattgttacaaacacaacagggtaatcggattataaatcagatgagtaatttaagagaaacttctctaagaagaaaaaaatacatagatattgagtgtactagtagctctttttttttggaaagaaaggtgtctctctttagtactatccagctagcactctcggtatagttgtgttcttcttcttcttcttctttttttcgtccaatgccacttgtgagttgtggctacctgcaagcacaaaccatctgtgggc

SEQ ID NO: 44784 - DNA, 433 bp, Oryza sativa
agcttggatcaaggtgaagaatgctattctttgccaccctctccgataaatctagctcacccaagaatccaccaaagtatccaacgagatcaccccaccgacaacatcttaggagacatcaacaagggagtatccactcgttctcgtattgcaaatttttgtaagcattacttgtttgtgtcttctcttgaacctctaagggtggaagaagctcttaatgatccggattgggtgatggcgatgcaagaggagttgaacaatttcacccggaatgaagtgtggactttggtggagcgacctcagcaaaatgtgattgacacaaagtggatctttcgcaacaagcaagacaaagccggggttgtgataatgaacaaggagaggttagtggctcaagggttcacccaaatcgaaggattagatttcggtgaaacta

SEQ ID NO: 44785 - DNA, 453 bp, Oryza sativa
tcgctttgctcgtgaagattaagtctagtttttttttttccgctgcgtatgagttttattgtcttatttttgtaagacgtggatctatctattgttggtatttcataacgacattactagaaatataattcctagcaatggcgcagaaatactcctagtatattatggttacagagtttatccgcaagcgcacggatataccattgtagcatttcacctgagaatattccaatggtatcgtatttgtttaatcccgtgggaagattatagtagagagaaccgtactaataaccatagtctaagcaggattaatataatccatacggtagaatgacacatgcataagacttctcattctcatattaaacgatctaagctaagtggaagaaaatagaatagaatctattcctatacttctagtatacatattatacatacatcctagttatatga

SEQ ID NO: 44786 - DNA, 398 bp, Oryza sativa
agcttgacttcaacagtgggcgatcttcctttcatgcaatccttgacggcagcgacaaaaccaacctctctgagacggctccaactgagaagaacttcaactctggtgtgggggaaaagagagcaagactgagtactgcccactgtactcatcaagtcataccgaaagaggaggtatgatgcaggatataaccaaaggaagctaggggttcttttgcataaagcaagcatttcaaagcagtagttgaaagcagtaaaacagctgtagtaattaatcaatattaaccaatcactgtccaacgctacaccacgttgcaacaggcccaaccaaccacctgaactacaccagttcattaagctaaactaggggtgagactaaacacgggtgaatctggttga

SEQ ID NO: 44787 - DNA, 85 bp, Oryza sativa
  unsure (1)..(85): unsure at all n locations
tgtccatggcctgaaggatctccttgccataggatgtgtcgtgcacgancgaggatgattcctgactactatcaagaacaacatc

SEQ ID NO: 44788 - DNA, 404 bp, Oryza sativa
  unsure (1)..(404): unsure at all n locations
agcttctcttactgaagaggggaaagattgttcatttattactacaaccacagtactcagcaagccacgccggagatgcataattaatgcatgggagtacaacgggataataatataagggttaagctttgcagaatacagcatttaaaaggcacttatttgcccaaagccattttataaagacgaccctagatctacacaatattattaatcaaggccgcgaaccctcacgaacctgccttaacccaacgcctacgatgattcataccgaactggcaacccaaccctgngtcccagctcgtgccaagccaacccattgcaaccattccacattgtatttgttaagcaaattttaagaatttaaaacactgacttgngtacatggctcggcttggccataaccg

SEQ ID NO: 44789 - DNA, 446 bp, Oryza sativa
atgttctgatgcaggatgggaaggtggttgcctatgcatctcgtcagttacgtccgcatgagaagaactaccctactcatgatcttgagttagctgcagtggttcctgcgttgaaaatttggcgtcattatcttttcggtactcgtacagaggtatataccgatcacaaaagtttaaagtacatctttactcagccagatctgaacatgagataatggagatggttggaattaattaatgattatgacatgggaattcattatcacccgggaaaggctaatgttgtagcagatgctcttatcatgaaaggctattgcaatgctacggaagggcaacagttgccgttggagttatgtaaggaatttgaaagattgaatttgggaattgtcagtagaggtttcgttgccaccttataagcatagcccactctaatcgatcaagttaga

SEQ ID NO: 44790 - DNA, 427 bp, Oryza sativa
agcttgaatgctttacatgcagaatatcattgtatgatagacgacaagaccggccagaagaagggacatgacctcccagagccatctgacttcttaacccaatcataagcacagtcagaatttatagacgagggctcacaaaaagggctgtatcatatgaactgttgaagacggtttgaacatgagacttctcttggaagtcgataccaccagtaagaagagactggatacgcactccctgacagaaaaatcattgctgaccgattgacatgaccaatgagacttgctttatatcgcctaccgcgccacctcatttataagaacgtaaggaactcacatcaatgttccgttgcactagaccgcatacaccaccacgacgcttgagcaactggggttgaccttgtgcaatgttgtcagctccactaca

SEQ ID NO: 44791 - DNA, 223 bp, Oryza sativa
aaaagcttgatgggtcacatgatatagtccggcaaggtttcaaagtatgactcatagtcttattacattgcggatatcattgtacgtgaaccgcgagacagatttattaagcctatttaatccatcactaggaaatgtccactgtttctctacattgccacacattggcgcattcaagcttggataatgcgtctcgcaatttgcacgcaaacagtgtaacttg

SEQ ID NO: 44792 - DNA, 427 bp, Oryza sativa
  unsure (1)..(427): unsure at all n locations
agcttactttagtagatcgatttccttaaccgttatatcaagaatccgacaactgacgacatgacaactctcatcggctaatctcaagacttcgaagccgatgctgactctaagccgatgactactctgggcttaccaaatttcactgttaacaggcccgtcctccgcctactctttattctaaaaacaaacataactatcgntggaatttattttttattttctaaaagtcccatcaaccgtcagcggctctgcaactatactactatacacccgccggctgcttctcctttttattgtcattgacattntaaaaattgaatatgattatcattggggtttacttcttttttactttctagaagtcccggcaatcgccttcctcatttgcttcacggcctactgttgcccttcttttaacatcatt

SEQ ID NO: 44793 - DNA, 54 bp, Oryza sativa
gttctggctgtacaaagggtgcgggtagcatctactcactattccatgcgttct

SEQ ID NO: 44794 - DNA, 444 bp, Oryza sativa
  unsure (1)..(444): unsure at all n locations
agcttctctctctgcttatgaaacggntttcagattattgtgcgcatggagtatgttgtatatggaggagtgttacgaagtaatcgaactatttttgcaattggttcaattatcccatgagtagctatgagttcaacaggggaaaaaaatctaatgttacaaatttcaaaaagccaagcgctagtgtctagcgctgcctccaccgagagacccgactgtgtgcctctatatggcatctttttggcagggggtcgcctgccgtgccccagtaggggatcttttcactgctttttttttttttttgcagctgaaacggtagtgcggatacacgccctaccgctgcccattgcagtcggggtgggtgcctctggggtggcgatggaatggaatcaaatcgagctaataaacaggtcgtgttgtctcagaatcggcgatatggtacaa

SEQ ID NO: 44795 - DNA, 469 bp, Oryza sativa
tactgctacagccagtgcgcgtacagcatgcggtcgctttgtggcgcgggctatcttccctatatacaaggattgagccccctttggtcaatataatgccaccaactgttctcctccccatggtttcgtccatattcaactgaaaaaaaaagggagcaagctcaagtttgagagatgaataagtcatcatcaactatgtcaacagaatatcacaattggaccgagggcataattaacatgttaaaatcaaacaaagctttaggtgatacaaaacaatgaagtgctcccttataattcgcaaacaactaaagtgggaagagatctccgcatataatttgcagaataagtattcttctactgtccaaaactttgcagcatcagcaggtcagaacaagataatggatgaaaccaagatattgccaccaatcaaaatcaagtataatgcagaccacatatggtgacaatcatg

SEQ ID NO: 44796 - DNA, 439 bp, Oryza sativa
agcttcatcttggagccatcggagaacttctatcgtccttcatctatggccgattgaacctgtcatcgaaacacattgcaatcattagtagaatgagaatgagaatcatgccatttacaatatgctcaacgtttcaactcttcttgagatggtatgacatggcctttaggtaatctaatttggttctcttgcagaagataatcgaaaatcttatcacacttggccacatcaaaactatatttagcctcactttgccgatctttgtgaggtgtcggcattatgttagagcgaacaaaaggcttgtttttgttagtccatgaccattcagcaacatatatatcatgatcactctgctcctcactatcactagcctcagggtaatcaatcacattaacattaggctttttgtcatatgatctaacaaagtttttattatcct

SEQ ID NO: 44797 - DNA, 452 bp, Oryza sativa
ctggcggttcgggtatgctatttctcccttcttctctttcctctcccactttttttttacgtctcataattaacattttgttctcttcgcccgctcctatcttgcatccagatccttgcggctcactgttcaacagagcgaaccgcgcgggcccatcttgaatgatttaagaaccatcttctggccatggacgacgaaataagccgcataaacttggagatggatgccctcgccaacaccctcatagaggcgaaagctgaagtcaagcgcatccaatccgagttggagaaaggaaaagaggccagggtcgaggtcgaccgcctcaaggccgaactggagaatgggagagaggccatagcggaggttgatcgcctgcataccgaactgaatgatgagaaggcccattccgccgtgctgactgattactataacctcactgagccaaagatgga

SEQ ID NO: 44798 - DNA, 442 bp, Oryza sativa
agcttgctttagtagattgatttccttatctctttatatcaggaatccgactattggcgacttgataactcccatcggctgattccgagatgctgcagccgataatgattctaagctgatgacgtctttgccgattaccaaatttcactgttaacagtcttctacccttaccagccttcaacaaaaccaagtctggcacatatatccttttatcacccccagtttcgactaagtgttggagggacctccacccgaggatctcagcactccatgcattcagaactctatcctttatgtagaacgtcgacacgtatgatgttgaatcaagcttatatttagcgcacgcggccaggacatggctacatggcttatgaagaagcttcggcttattgcacaagcacgaacatgtgttatcagattcgtgccctatagtaacttcatg

SEQ ID NO: 44799 - DNA, 458 bp, Oryza sativa
taaagtcaacctgacttccattgcatcatatggcacaaaaacagcactattacgctagcaatcgaacagacttgcacaaacaatttcaaagtttgttttgcagtcacctaagaccgaataattcaatgcaacactctatcctgttttgatagcacaaaaactaaatgacatgaaagttgcttccaggaaaaaaacaacaacattaaggaatatgaattataccaatgaatctacaagctaaaaatttgcacacatacctccaaacaacggtccacaagctgccgacttcttgggtagtcaccatttctgtagtgtccaaccgccagcagatatagcttctccctagtctgcagtgggctgttggattgacctaatgatgctgtgaaaacaaaacgaaattgatcaaaacagattaggctgcaaatattatgtttagattatcgaaaacaaaacaagat

SEQ ID NO: 44800 - DNA, 432 bp, Oryza sativa
  unsure (1)..(432): unsure at all n locations
agcttaaggtttgtgcaggtgttctatgtactcaagaaaattagctctgcatgtcgcgcatgaaatttttccttgccactttcggtctatgtattattatttatctatgcggggactggaactatgcttctatacacaagtagaggattgaggcgagggaatagcattggctagtgctatgtatacattgatcaagatattgtactcgaggcgtgttgttatacggcaatactagattactcttggtagagcatctaggttggtgcattcaataaaagttgtgtcatcattgttgtcatatctgtttctgcgattgttgcagaattcctttgctcgtttgttcacagctccctccgtcccanaataagtgtggccatggttttccacgtctaactttgatcattcgtcttatctaattatttctaaaaaaaa

SEQ ID NO: 44801 - DNA, 458 bp, Oryza sativa
taaccccataatgcagtgatggccgtcttgcactgtgcattcggccgcggcacgtcggccgcgctggctatgccggaggcgcatccttgggctgctcatcgcgcttctttatcgtctccagcaagacctccagggagctcttcgccgcggccggggctggcgccatcacggcggctgcagagagcatcaccgccgtgggaaatcacacaaaagccaccagatcagaccagtgacctacacgcaggctcacacaccaatccgccaaatcctgccgcggtgcaccatggcaaccaaaaccttctccatctcgcaccaatattatctccaaatttaggtgcacacgcccctaactcaaaagcaaagggctcgaaagtgacagccctcccaaacccccaaattctgccgccaagggctcaaaatccactcaacaatctctcaaattgccactcccccagcac

SEQ ID NO: 44802 - DNA, 430 bp, Oryza sativa
  unsure (1)..(430): unsure at all n locations
agcttgantaattttttggtagaatatattgtctattcttaaacttgaggatattattaacaactataaaatatgaaaattacaatttgatcctttaaacttctaaaaccatgatccgtcatagccgttgtttagtcccattcaaatatctccattgtccctgtcgccacaaagtgagacccgcaccggtatattttactcttttacataagacaacagtaaacaacaaaccaaaatttctgcactcttgaaggaagccttatacaaaattaaagatgaacttctcttcatcagccatgcatatatgcagaggtgttgactctctaataaggcccttaaacagcgtgatcgatcgagattggcatatgcatatactccgctgtgcacgccgtaccaagaacgattatgtcagtacgaatattctccccta

SEQ ID NO: 44803 - DNA, 397 bp, Oryza sativa
  unsure (1)..(397): unsure at all n locations
ntgcaaacatgaacgagaaagaaagcagggacctttccctcaatgttttgtgtggancgaaaccacggcagctgaccaaataatcgtcattagcggtgttctctgtggcatataacaacttataatgatgtattccaaactctggtcagttcggcacagaccgtatggatagctaccaaagcaaccagaatcttcggagtatgtcaaagggaaacatatgctctccatattcaagaacatgtgacttggcatcggaaggaagagacagtatggcagatgatccaatgctctatgcagacagagctgcctcattctacctggcagtatgaggcaccgttgctatcttgttttccatccactcggaccgcgtgcaattctcgcgacaaggaatctggtg

SEQ ID NO: 44804 - DNA, 459 bp, Oryza sativa
  unsure (1)..(459): unsure at all n locations
cgcgatccttatagtcacctgcggcatgcaagcttnctctttgctaatctttctcttgttgattgtaaattaccatgtgaactagccaatcttccaagcaacaattttactaccttttcttctatttatgatctttatttccaagccgtcatatactcatctgcaactgttgtgccagctgatacttgtcggagtttgctgttcagctagtggtgatggaactgatccgtatgcggagctctcattgcaacctttacctgagtacattatttctactgatggtgtcacaatgacatgcatcacttgtacagataagggtcaaattttcctatctgggcgtgatggccatatatatgagctgcaatatacaactggttcaggttggcgaaagcgctgccgtaaagtttgccttactactggtttaagcagccttctttccaggtactaaagctgtaggac

SEQ ID NO: 44805 - DNA, 418 bp, Oryza sativa
  unsure (1)..(418): unsure at all n locations
tcacagatcgaacatgcatatcaatgcaaacatcacattatggtcttgctaaaacacatagttgacagcagaagttgttgtcattaatccattatcactggagcaaataaaccgagtcacatatagctgctatgtaactgttatatggtctgcaaaattaacacccatgtggaaacaataaataagtagaaacaatcaaacaaaaccttccaaagcccataaattagagaaagtaacctgttcatatttcttgggcacagctctagaaaaaaaataatcagagatcagattgaacaaatatctgctgccgctaacaggtcaacatctatccagccaaaagcaaaagggttgcaataaagttaagtggaacctgtatcataaagattatttattcttcngtaagcaaaatacaaaatgc

SEQ ID NO: 44806 - DNA, 439 bp, Oryza sativa
agcttgacgcaaccactgcgtgtggctctgtgactaatagaacacatgcaggtagctttcaaatttaccggttcatactaaaagaaaattgtaaactatttttcatggcttctctccgagcgtttgattgggttctattttccttgtttatattaacatgttcttgattattttaggtgcctgttgatatcactcctatattcggcacagcaaataagctgcttgcaaacgatcagtagggtgctcggtttagcaagctacgtgcttcagtggaactctgcaagaaaacgtattttgttcgatcctaagatactccatgacaagaaaagcgaaacgggaagctaggaataaatggacaagttatccataaacaataatgttcatgtcttatttttatatttattacgtctttgattgcgagaagaccccttgtaatatt

SEQ ID NO: 44807 - DNA, 441 bp, Oryza sativa
  unsure (1)..(441): unsure at all n locations
tctccacttcatcangatcttcaacggtttctccaatatcgttctgtgtagaccgatattcttgcaccctttgttgtaaccactctaaattagcctctttactcgttatacaaatttatatggcttagccgtgctacactagccggctttacagagataggtacaaatttgccatcagagatactaataaaatcatagctagaaagatccctccccgataatcattggatattcccatgacgccactcaaaagtagcatcggccattgcaacctcggccgatgtatccgcttgaacaatttcaacatcatcgccgtcccattgaattaaacattgatgcaaggtagaaggcacacaacaattggcatgaatccaacaacggcccagaataacattgtagttaccttgcacattgacaatgaagaaagcggttggtagcgtc

SEQ ID NO: 44808 - DNA, 377 bp, Oryza sativa
agcttcactaaagataagcaatgttctctctctttcgctcggaaataaaggaatgggttgcaccaaaataaaacaatattactgccggcgtctaactgacggggaatgagcccaatataacctgtggtgctgactgcgcctcctatgcagatgcatgattaacacaggcctgaacaaacttgagtccggcacgtattggcttcggacactttccaaccgtgtgtccgggtttgttacaattgaagcagaggtcaggtttttctcccaacctattgtgctgttctggcagagctggctgaactgattgagctggaatctttatcgaactcgcagtagagtcgaggctgtgctgctcactatagttgtgactgtcacta

SEQ ID NO: 44809 - DNA, 449 bp, Oryza sativa
tgctttggcgaagtcgtctcccttcggcatatactcttcttcctgcatccttcgcccaagatgcctccggcttggcatagtacccgcacgatccttcgcctctcaccgtccttgttccatagtcttcgccatggggggggcttatccccgactaactttgacgtttcgggcttggatccccactcctcgcatagccttcagcagattttggtcgaagggcctcatgccataccgccaacaagcccctcatgggcaagggtgagattggagcttcggccgagaccatgcaaaccatgtggtatgtggtatggtatgtggcgccccctttcaaccgatgctcctgccgaaacctacattgttcctgcaaataaagtttgttgtctgtgcggctggtattgacttgccgctcttcgcctactgcggacggtgatatatattgttttatttta

SEQ ID NO: 44810 - DNA, 396 bp, Oryza sativa
agcttaacagacgtaatgtgagggcacgcttacctatttctgaccgaggaggtgtacatacgcacaaacctgtgtgcgacaagatatatagtgacacttgcatgggagctaatgacaattgactgactcgagaagaggtctgcttcatgatatcatgctagaactcgacaaacatagactctgtcatcgactgggtcgtgaagcactcaaaaaagaataattgatctaaattttgaacgactgaaggacgcggatgctatcctgttgcttgacgcgctgcactgggcatgactatgatgcaaaagttattgtcgatcaaggaggatgtgttcataatgtgagaacctgctctggcattatactggcagaatgcatgtggcattgtgcactcttgtg

SEQ ID NO: 44811 - DNA, 350 bp, Oryza sativa
tgggccatgacagatattctttctttttcttccaagccgttcatctcttaccagtacatggccatgacccgttggggtcctttcacaatccaagagtgggggctgacctccccacacggatcctattggacacagcatcgaacaacacttttggatcgtgatcgccgattggtccgaggataaactgaatgcggtatttctaacacagtattgcgacttgttgagaccgtcgctacataaccaaatacaatgcatgggtgacgagcaacgtttgatgccatctgctgctacagatatggatcttgacgaccgatacttacctcctggaactcattcggtggagcgcttga

SEQ ID NO: 44812 - DNA, 439 bp, Oryza sativa
  unsure (1)..(439): unsure at all n locations
agcttgnagcatcccaactatgtgaagntcttttatgttgagcagcatcgngcagcaattgcatattccagtttagatatctggaagctctgaagtatgaaaaatactgtgtaacactatctccgaattctcagtatatgagtgaactgtgtatgcttcccccaggcaagcaataacctgtccataccacgtgaaaaataaacaagtctaaggaggctggtataaattttgtcatgcatatgtggatcatctgggattaactgctacgataaattctggaaagtgcccaacgtgtgatccatgattcgtagataatactccatgattgatgttaatactcaatatgaacgactctacctcagttgctgcaagaatttgatttctgagtcactcaacggaagatcaactctttctcatacttgtttactcgtgttcccat

SEQ ID NO: 44813 - DNA, 456 bp, Oryza sativa
accctgctatgaataccactgcaaatgctccttcttatgactctttcttatcaatgaagaagcatcctcctactgtttagcgaacatctgggattagcaacccatatgttacaaattgagtttaggttccccccaacagcataaaactgacagatgctagtaattcatggacaacactttctccatcactcgccaaattatgaaaggtatggctgttcatcaacacaagcaatatggttttattatacaccagcatcagagataaatcatagctgaaaaaaatgagcatatttatttttatgttaccataccatagagactatggttatcagattcctgaatactttcatcctgactagctttccttgtattactggagccatattctactaatgtatatggatatctctcatccattacttgaggggaaaaaggggtaaaaatgttggaaaacat

SEQ ID NO: 44814 - DNA, 437 bp, Oryza sativa
  unsure (1)..(437): unsure at all n locations
agccttgccgngacaacatttgcggaatgtatctttctcgttaagggctgaagctgggaggggcggagggcaacgattctgggtggtagtagcacgggacggctgcgaaaaaaaagaaagcaaaagcagtgctcccgctcggcgcgctcggtttcgacttccaaatgcaccgccgcggcggcagcttccccgtctttattaccccaccacgccatcccttttttttcacactcccgccacgcctcccaacgcccccgaaatctcgtgtccctacgtgccggagcagctgcgagcttttgcacccacgctgtgagccccacccgcgtacgccgcggactacgccggactccactccaccccaccctactgcgccgcgccggtacaaacccgttcctttcgttttaccgttcacaccacgcacccctctatttatcccc

SEQ ID NO: 44815 - DNA, 305 bp, Oryza sativa
tgcactttgattatgttcgatgagtttcccacaagaatcggtccttatatgcgaatacgggacagtgccacatatgcacaacccccgcatcacgagtgttcacaattcaatttattttcaaacacaccgacaccacatgtagtgttttgaatgcttcacacacccatttcccaacgttttgacaaacaatggtgcgtgtgggatattcggtatacgcgctcaaaggcacgaataccgatgtaccacaatggtggagcgactaggaatcagggtattaccacctacaataattattgcgactactg

SEQ ID NO: 44816 - DNA, 350 bp, Oryza sativa
  unsure (1)..(350): unsure at all n locations
agcnttggcggggcaagtgtatcccaactattcttttctaaatatgtgaatgtgttcctgctggaaataagaagctttggcggtttcaatatttgtttgctcagcgccaacttccaagaagtctgttaactaatcaattgcagtattctccagattgaagaaagtagtgaagcatgacacaagttttcaaatgcaaagtcaatgtcatcttctcagttttttggagaccaggccagttttgaaaaggaggctcaagtttccctccaaaagttttctgtaagtatttttactgtgctatactgccattgctgtggcgtggtgatacccatattgatacttatcttgtcaaa

SEQ ID NO: 44817 - DNA, 404 bp, Oryza sativa
  unsure (1)..(404): unsure at all n locations
tgcgcaaagcacacttaatgtggtaatctcctcttcctctaatacaatcatgttcacaatttaactgatccatcaattctatttttaaaccggctagttcgtcaattaaatctaactcttcatcggttgattcatactcttcattggtgttttcaatttcatctgtttctatgatagaatatattgattcgtcatcttttatttcatcatcacatactaatatatgttcatttacgctatctataattaaaactctctcttgttcttcatatgtactagaatatcttttttgatctttatttgggcaagttctacttaaatgatctggtgaattacatatgaaacatctgcatgtcttatcataagttntctttgggttatatcttcttacatttcgtttatgt

SEQ ID NO: 44818 - DNA, 442 bp, Oryza sativa
  unsure (1)..(442): unsure at all n locations
agcttctttatcgttccaccggtctgcatgctctctcatgattggntgccctggcaagcagtcggcggcttcacggcgtgcagcacgcacacacatcttgtgagcgagaatccagggaccagtgcatccatgcatgccaagatgatcatcagcgctgaacgtgcaaacgcccggcgacgttgctaattggatcgacattgatcttttttctttctgaagttgatttccatcgcactcgttgataggaaactcggcgtcacccctacctggcgcgccaactgtcgaaacaaattttcggcaatatgaaaagggggtagcatacgaaacctaaaagtggatggatgcggagacaaaggatttagacaggttcaggccctctcgatgagaggtaataccctactcctgtttggggatttgaattcgccgggtgtatattgatctg

SEQ ID NO: 44819 - DNA, 464 bp, Oryza sativa
  unsure (1)..(464): unsure at all n locations
tgcggctctgcatgctctgagccaaaaagctcaccacgtatgactcctgaacagcagatgcttcttggttcttgccatgaatcttcagttcaaaagtgtgaaaaataattttgcatgctctcttttcaaaggcttcaatgaaactctcaatgggcttgcggatgatggatggtccgtgatcgaaagcgatggcatcgacgatgtttgcatctctgtcaattcatccaaagtgaccggttgcaatgcaacattcagcagtggactcactattgtcagtaccggtgttctttgtgccaaggcatccatgctgttgcaggttagcttcactatgaaactagaattagtactttctttctgtttgttttgtaattgccaatatttntcatacaatatttcttctgctgtttgctaggatgtctctcctccatcactacttgcaattttgcgcgaacaccattcacaat

SEQ ID NO: 44820 - DNA, 443 bp, Oryza sativa
  unsure (1)..(443): unsure at all n locations
agctttcctttttgtttgacgtagaacttcttgagatgctcctactgcgctatattaaatagataggataatttacaaggttacaataaaatacaagaagattaattaaaagtgcttagccatgattgccacttggggtttgtccatctcttttgctctgtgtatatgcaaggcaaaatccttcagaaagtcaaccttccatttggcaaagctgagagcgatattgttaaaaatgagatcattccgtctgcaccagatgttccagcagccaattgataaaacttcgaagaagaaagagtgatgaaaggagttctgggctgaggtgagcatgttcataaattccaaggccaaattccagttgatgccaatgtgctgccagcattgttgcgcaaatgggcaggagaagaacaagtgagccatgctntcttcggtcaaggagttgc

SEQ ID NO: 44821 - DNA, 426 bp, Oryza sativa
  unsure (1)..(426): unsure at all n locations
tctactgccatactttcggcgagaaggagatctatgttttttatcataanctcacgtagccgtcatggatggtgtggtagcataagatcaagcaggcggcagcggcagcggtcaccgccgcctcatctgatcgaggatctatgtgcaccgcacgtacatgtcggatgagagctgctgcccgaggtgcggtcacaatatcgaccggaagctgggacgcgtgtgtgtatcacactttgttaattaaacatgtttaattaatagcttgctatatatgtgtgttgtttgcgtgtctgaattctgaattttgttggagatgttgatgcctgaatatttcgtgtcgctgtgaaagactgcgtggtgctaccggacggtgtgaagttcgatccgacggatcaagagctggatgagcatctctaggcgaaagtc

SEQ ID NO: 44822 - DNA, 359 bp, Oryza sativa
agcttgtcgtcgagcattcaccgtcgtcccatctgccccccatgccgatccatccctagcgccgtcgccgattcaccaccaccaggtcacgtccatcgtcttcttgatttgctccttccgcttcttatttatcctttcttttgttgatttgatcagaaactttatcctttcttttgttgatttgatcagaaacggcaatgaattttattttaacagagagagggggggggcacggtatgcaggcccttctaccaatacgcacctcacttaatcttaggcactctattcgtagatggaacttacgatagaagtccccgcatcatttgggccaacgtcgacattcagtttaataactccct

SEQ ID NO: 44823 - DNA, 415 bp, Oryza sativa
tctatatgttggatgtgctgaaatgtttgcccaagtaatattcctaccggacatttgaatctcccttatgcataacccatcaataatagcattaaaaagaaaaggccatctatcatcataattatcattgtttttttcatcatggctacgcaggatattaaagtcaccaccaataagaattggtaaggtttcatgactgcacatattaactaactcagtaaggaattgttccttaaactcattctgagcaggcccataaaccagaactaaagctcacttaaacttatccactttattacatagatggaacttaatataaaagtccccctcatcaataaggccaatgtctacattaagtagattaatacccaatagaagaccaccagacctacctctgggaggtttgcaatgccac

SEQ ID NO: 44824 - DNA, 432 bp, Oryza sativa
agcttgttttactgcgtcagttgaaaatttctttaaaaaagccgagttaaataagagtgaaaaaagaattattcttggaacctcattatgttcttttttatgatgaaggagaaggtgaaggattcgacaaattaaggtgccactcacagaagctaagcactggggcagattagcactatccatcagttcaaagctgctgctgcctgctgctgcgcatagcttgttctcaactctcaagcatggagctggttacaggggtgatgggcagtctgctccccaagctgggtgagcttctcaaagacgagtatgacctgcagaggggcttgagagagaagatcaagtctctctcccgggaactcgagagcgtgcacgctgtcctccgaaaggtcggcgcggtgccatcggatcagctcgatgagctggtcaagctct

SEQ ID NO: 44825 - DNA, 366 bp, Oryza sativa
  unsure (1)..(366): unsure at all n locations
tgttctagcatatataacgtaagtgatgtattctctcttctgttantaaanacnaaaaatatgaagttgttatatttaatagaacgcatatgctatcgtatataatattatattctcatgatagtatatatatgagtaaatacattgcattggacttactggagcaccgtggttgtcgcatgatgacggatgataggcaccggcggcatcgtcgccgccggagttctccttctggatcatctcgtcttctatggctccggcggcgtggtcggcggcggacttctcatccgcggccgcgttgagcttgagactgcggctaccgttgctgccgcccaggaatggagaataacaagctataccaatctc

SEQ ID NO: 44826 - DNA, 431 bp, Oryza sativa
  unsure (1)..(431): unsure at all n locations
agcttaacaatggttacggacgaacatttgtgttgttggatattatgactgaaaatcgaccaacctaggaggaattangttgcctgttgttttgattaggaagaaacatgcacccaaattcgcctcgacgagggcttgaacttgggtggtctgggcgtacatccacgccctcgaccaacttatgtcaagtcaatttttgtgtgtgaaaacataacctttgtattttattgtttattcacatatctttgctattgtaatttgttgtactgaagcgatgtcatggaaagtttatatctacggttgttatgggcatcgaagtacattattgctcagttcactagggcttactgaaacagaattaagatgaatattatatctttctttagctaagcatgtcaaattgctgaagaaaacgtgctcccaaactgtca

SEQ ID NO: 44827 - DNA, 174 bp, Oryza sativa
taagctttcatacctccttggagaaccgttcttgaactttattctttgcacctagcgtcatgttctagcacgagagagtctggcgctccggaaataaaactcacaacatattaataaagggaagaaatggatgtgagtaaaaataaatggtatcaacaaagtggaaagatagaa

SEQ ID NO: 44828 - DNA, 442 bp, Oryza sativa
  unsure (1)..(442): unsure at all n locations
agcttattntaatgatattattattatatggtttanttaaaagaaaattcactatgagaattcgctggaatatatattttcctagaaaatcatgataggagtccaatcatctcaaatcagcatgcgagtttttttaaatagattttttatacggctccttctgtatgtttaaaagcgaacgaacttaaagcatgactcanatacatgcaggttttttaaagagatttcttatatgatttcatatgtattttcaaaagcgaacaaacttaaaacccgactcaaatacggatctttatttctaaaaacgaacaaacttaaaactcgactcatatacggatctttatttccaaaagcgaatgaacataaaaaccgactcattcacgaatgacgtaccanagtgctagtaaaaacatcttgaatgtttataatagtagagatatat

SEQ ID NO: 44829 - DNA, 296 bp, Oryza sativa
  unsure (1)..(296): unsure at all n locations
tctatcanaacctgaatgatttctaccatggaatagccattatagaggtccaggtcttctagcaccaacatggtatgagtaaacaaacaatggagaggcatcacattgagcaagaaaactcatacgcgtgcttctccctctcactcggcggccgtacgtcacgactccgtacgtggccacgttacgcaatctatccacgcgcgcctcccgtcaaatgctgaccacgcaacaccgtcgctgcaacgaatcgtgtgcaccgcgaacgtgcaaagatttccaacgatcgaacgttcgac

SEQ ID NO: 44830 - DNA, 430 bp, Oryza sativa
  unsure (1)..(430): unsure at all n locations
agcttgagctacctgccgatattgtggttatttcccacgtttaacattgcagatttaaagccatatttgggagaagaagatgagttagagtcgaggacgactcaaatgcgagaaggggaggatgatgaggacatcccttccaacgatacaaccacgcctattgcacagcaaggaccaatgactaaagctcgagctcgtgaacttaattatcaggtaaagtcattcctagctaatcatacaagttcttctcagaattgggtgctactaaatggttgttgtgatctacttgttgttaggaatatgggagaggaaccagatcgcaagcagcactagcagcgctgatttgatgaagtcaatgctcttcactccggagggcaaacggngcanatgagtacttgttggaaagatctcgtcgtctactttcagctat

SEQ ID NO: 44831 - DNA, 454 bp, Oryza sativa
tatctaacctgaactacaacttcaaaattgagatctcgaatttccttgtacaacttatcactgaaaaggacagagtattaacacatatgtataaatccatattagcataaagaaactgatagttaagagtgaagaccatactgtaaaatgtgagttaaataaaaatgtacagaatttgagaaggaaaatagattcaaatatgctctcaagaaaaaaaaaaagagcatctgctgggctgcacagtgcatacactaccactacccaccgttctacactaccactaaggatattgcttccttagtggattccagtgacaagaaaaataactcagagttaccaagattctccagcgcctataaaatgtataaaaagttgctgcgcactgtgattgtacaaagactttaacttgttattatggtacaagtaatcatgaagacattcaaattttcaaaag

SEQ ID NO: 44832 - DNA, 425 bp, Oryza sativa
  unsure (1)..(425): unsure at all n locations
agcttataattntcttcttaatgttaaactctctatcaatatagggggctgtgacaaccatgtagcctatattttgaattgaaatccacatatcggatgttagacatacgtgcgaatcaagattatgtatttcagcatgcaagtcttccctcattcgctcatacaagttaaaggcatcatcacgaagtgtttgacgccccacaactttgaaagttggctgcatggactccacccactccaaaaaataaggatcctcaattttcttgaatggcacctctgcatgaatgaagaatctgaccattagctcccggcttctcttgggaacaaacacgaaaccttccctagtctgtttcttaattgttgcaaggaagttgattctagcatcaccatcaatagctggacatgattcggctatgtgattaata

SEQ ID NO: 44833 - DNA, 437 bp, Oryza sativa
  unsure (1)..(437): unsure at all n locations
tgacacacgcagaanagctgctggaacggngagaggaaatgttaggtgccattagccccaaataagcttgatcttggcatggcgtcaggagctcctccaaagcctccagccgaattcacattgggcatgccattggtcggagacgatgccttattctagatgggcctttcatgcaaggagttgcatgggtactacatggagaagtccaacgcaaggaggaataatagagagacctccatggtaggccagcacggtggtcagccgttcctcatgcctactgccttcatcgccgtagacttcatagatctatgagacctctatagggtgcgagcgatcgataccaacctccttaagtgctactcacttgaagtatttcttggtacgcgatatggtagtgactggtcatanattacacttaccgtgactcttgtcttgct

SEQ ID NO: 44834 - DNA, 446 bp, Oryza sativa
  unsure (1)..(446): unsure at all n locations
agcttagagntagccataagaaatataaaattactttgtctattaattcttcatagtaaaagaattagtaaaagaatttatatagattatttttagtgggtcccagcttaaggtcaatagaagatcttaaacattgtagcattggttgtaaagtaaaaagatatatgtacgtgggtcccatctaatggttgttgtgtggctcaacattgaggataccctaaccatcaaatcggaaggggctgtaaccccaccccaaacggtttggttaaccctgtgcagacgagcagtgatgtacagtacccactaaagactntacctaactactccatgggcagcaacaatgtatatagcaaaagcagtccatatagatgggactccacatatatagactntcattattgtaacattaaagttgctaaaaatattagttaaaaatgctgtataac

SEQ ID NO: 44835 - DNA, 479 bp, Oryza sativa
  unsure (1)..(479): unsure at all n locations
gacactataaaactaagcntgnataatgcagctggcagcaaggacagtgtattggctactataacgattacatgatttcgttttgctagcttatcttgaccagtggttgaagtaatactccatccatatggtccatagagaaggtttagatacagggacagacagacacacatgtgcacgcttgatatgtcccatattaccaagtctcaagcttttgcttggtatctactttttcctacttcctctcgcagtagctcagaaaatactactactactagtactacctgtctacctactcaaatacaagctgcggtccaggactcttaacaaggaattaaagtcacaagatgtaaagtttcatccttccaaggcaaaaggagattaaaaaggaccattttgactggcctttgatgaatcatgaatgtaaagaaaagatgcatacagcctatcttggaaaaaagaatggaattgtgaacaca

SEQ ID NO: 44836 - DNA, 433 bp, Oryza sativa
agcttaaagccatgaatccctgttatgcatatctggatctggatcctgcagaacaaacatataggatgagtagtatctgatataaatataatactcgagaaaaaatcaagtattttaaaatatttataaatatgtatttctcctcttgtcaattttgatttccccgagcagatgactctgtacgtttaaacactctgtccgactagtcatagcccccaagcatcgggagtcggcctaggcatttcccaaacatgcatatgagtgacatgagttcgtcattaatggaacaaagtttcacggatcagaatttactactcaggtacttttgcaattattaagagcagaaaataaatttatctcatctctatgcttttgatttattccgaataatacttagcaccttgcgttactcggtccatccaacgagcccccg

SEQ ID NO: 44837 - DNA, 428 bp, Oryza sativa
  unsure (1)..(428): unsure at all n locations
taaacatgaaagttatatggtaaagttctgtgtcatatgatgcatntattcttttagcaagtactactacggcactgtgaggaatagacagatttatcacgcaagttgttgcaatacttggcacttttgggaacaattccctgctttattccagtgtggtagaattattntacacagtgtgccattgcactgtcagctcactacattcatataaatatttacttgacagattctttgtccagcaaaaagatttcataggcttacagtacgaaatctccatgcgatcatgccagattgcctgtgttttcatgctttcaaagcacctgtgcaaatggtctgccctcgcctgcatcatatatccaattggatcatcgcatatgcagcaatagccgttctggcttctccacaaggcttttccactcattaca

SEQ ID NO: 44838 - DNA, 420 bp, Oryza sativa
agcttagccacacacacacacagtcgcacttggtcttctagccacctacttgggcccttcctactgctgcgatggcgatcgccgacatcgacgcgctcctcgtcgccctcctgaatgacgccgctggccgtgcgcctggcggagagagcgaagagggcgtctccgcagtggagcaacttgccggccggtataaatggtccaagcctggcactacctgaccaccgggccgtgccttgcccctccactggcacgttgggccggccctgtatgaccgggccagcagccaggcccgaataaaaagaaggtgattacacgagacatgtaggtgacatgacgaaagaatcacgagtcaggatgacatattgccatgcatatgcagtccaaatggagggacgtggagacacttatgtaactatcata

SEQ ID NO: 44839 - DNA, 440 bp, Oryza sativa
  unsure (1)..(440): unsure at all n locations
ctatcttgtatatcaatgaaaccgtgtgagcttctgcatattataaccggttgttcactaactcatttatagctctatgtaactccttgaactgacatcctcgttatccaagaacttgtagtatgtgcagcttacagaaggagtctggaagtactgtcatcccagtaaaggagagatccaaaaaccttatgtggtgtgaattgttaatgaaatcacgagccttctccaatttagcttcactgtaagagaaatctaatactcgcaggccacttatgtgtgacagaatattaacaaatgcttcgtgtggtttgattgttntgcgaccatcaaaaatcataatggtccgcaacttgttgtcctttctcaagtctatgtgcacattataatcangaaaactgatggctatgtggcggtaatcttggagccgtcttttctgttct

SEQ ID NO: 44840 - DNA, 380 bp, Oryza sativa
agcttgatagtagtatatactattgcttcttctgtatgatacgaataagcatgcggcttgattcgatcatatgaggtagtacttttttttctttctgagagaatcaggttttttgttttgtttgcgagaaagagaggaatcagctttgatagataaggaaatatgggcccttgggatagagccagaaaggaaaagtccattttgactcccttaaaagtcggccgaatctaattcgtgccccttaaccacaaaacaggatagaacgactctccgaaatattgaaaccggtatactttgactcccttagtggttgtggagggtggtttcactgatgcggcacttacttggcagagctgactgtgtcttgttcacacatggtg

SEQ ID NO: 44841 - DNA, 128 bp, Oryza sativa
tatgtaatgttgtctacaaagtggtatccaaatgcccggtttactgattgtgaccgatcctagatgatcttgtttctgtggaacaaagtgcctttgtgcacggaaaaatgattaccgacaacgctctc

SEQ ID NO: 44842 - DNA, 297 bp, Oryza sativa
gctttcctctactacagtaactatttagattcgttgatgtatgacgccgtgaacggacatgtaccagatgaagtgctttgcggatggactgatatgtgaatatcttctacctccaatgtcttgcggctctcgtaatttgggtgatgatcttatgacatgcactatcgattgcatttaaaataatagtcaatccttgcacccattgtactgtgctgtacaattcttgaatgacttgccccgtggatatacgataaatctgctctgtctctaccatctgatgtcctatgctctatatag

SEQ ID NO: 44843 - DNA, 440 bp, Oryza sativa
  unsure (1)..(440): unsure at all n locations
agcttgcatatcgatttattgatgactttattatgttatgnagaacaactggtgttaattgaactgagaatgatagtgatgtctaattaagggcctcatgtgacgctccgcaataattagaggaaaaagagcaaagcatcccagcagcatgacttgggcctttggcccaagcatgcaaagcagcagcgcaacaggcatatcatagcagcagcgctacagtacatcacggcgctgtagcagttcagtcccacctcgctttcctagccgcagcttcacctgtttctcgcccgttcactgtaaacaacgaatatggtttttttttcatcgaaagcgaggacgagaaatgcagtgtgataccgcgcttggtgtgtcttattagcgattaacaaataatttatatgtaaaatttttatatatgtgcgtgtcagaagcttaaagtc

SEQ ID NO: 44844 - DNA, 444 bp, Oryza sativa
ctctgctcatctcatcaaagtctacaatggcgaaaagcaaatgagagttcgtccactgccacgccgtgggcaagttaagtccaagattgcacgcattgtgatgagcgccatcacttcggcacttgtcagggctttgtcacagctccccgttcttgatcacaagtcgatgccacccaatgtgtaaattaagttcttgttgtaaattgcttgctcgctgtgtaaatttttttaatcagcaaattgcaatcttgaaatgttgctcctctttcggtacattgtggtgtgaccttcatggatgatggcatggtctattctcactttcctgcttgctcttgtgtagcatcacttttttcttcaatttgatcaccgctaggctgttggcaatctgattccctctcatcttcagaattttcatcatctgaactatctgaactatccgaacac

SEQ ID NO: 44845 - DNA, 438 bp, Oryza sativa
agcttgaataatagtgggaataagatttatgtgttatacaaatatttaaaccaaacaaaatgatttatattaaaggagaaatcaaaatctttgctgcttctcaccttatccaccgagcagtggttgtcaggtataaactttgatgtcatgaatttttccttagtagttctagagggaacatgaagttgattgatgccaatgcttgtgatgagttcattcacccatgcgaccagtaataactccacaaggtattctcgatgcattatgaaattacgtttcgctggagctacttcagctgtaaattagataaatatagtttggatacaaacactcataaaattgtaattttgtgagagtaaacagttcagagcaacttcagtgaagtctgtctaatttacaagcaaactgagcaagacattaactactgagttccactaa

SEQ ID NO: 44846 - DNA, 370 bp, Oryza sativa
tatctcttacgctgcaggaatggatcatgtataacatcactcgccggtttgctttcgccgccactgactggtgtcaccgactgcacagctagcttattatgccgatgttgttgggcgtctacgtgttcaccgaccggccgtctcgttcgacgccggctggtgtcacagcctgcacagctggcctattatgccgatgttgttgggcgtgtacatattcaccgaccggacgtctcatacgccgtcgactggtgtttccagctgcacagctggcctattatgccgacgttgttgggcgtctacatattctacgaccggtcgcctcgttcgacgccgacttgtgtttacgactgcacggctggcttattatgcc

SEQ ID NO: 44847 - DNA, 438 bp, Oryza sativa
  unsure (1)..(438): unsure at all n locations
caagcttatttgaggggtctgcatattttgattattattcgntatcgtattcgcttcgattcgtattcgctccgtatctgtattcgataatattcgattccgttttcgtatccgggtttccgattctgatttcgattccgagaaaaaatatgaaaacgaatatgatagagctagtttccgaccgtattcgattcgttttcatccctacatgcactggatatagtttgatcaatagcctaacatgcattcagccacatcatttagaaataagagctagccattggatcatttccatgttttaatcacaaccattcattttgtacctattattcctcattaattagtatataagtcagaataaaatgttattgccataaataagttacactatcaccatctttggcaccattgcataacactttttcatctcagactata

SEQ ID NO: 44848 - DNA, 460 bp, Oryza sativa
tcacaatccaactgagatatagctttgggataacgatatgtatcaaaaattcaaacaaggtactgatgatatgcaaaacctccatatcaagctggcctacagaaggaactattacagaaaaatagatcatcctgaagacaaccaattcttaaaacatgagttctagcatgcaaaattagactagctaaagcaaaatctctcaagttccattcagcaagaggcatctatgcggaagcttgaatggtctcagccagaaacgccttcccaggggcacgcttcgctagacgaccatgagaaccaagcagctggacaaaagccgaaagaaacaatattaggacgtgatatctattgacattatcaactgacaataagatataaaaaaacaattgaatcattgaccatcatatgaaggtagtccaaattctactgtatattgtggctggcacagaatggtacaaaa

SEQ ID NO: 44849 - DNA, 436 bp, Oryza sativa
  unsure (1)..(436): unsure at all n locations
agcatnttcttgaacacccacttgcaccctttatgtttacacccataaggtcgctctgttacctcccaagtcccgttagcgataatggaatccatatcactacggacatgcctcctttcagtagtctgcatcatgagatgcatatgcttctgaaattgacttatgagtgtcatccacgatgtacacagtgaaatcatcaccaaaagactttagccgcctttgtctcttactccttcgaggagcttcactgacatcctcctcagagacaagttcatgtgtatgttcagtatgttctggtggtgtgattgaactgggaattatttcagagggttgtgtcgaaccactatgtgtatccttcattgggaaaaagctctcatagaagggagcatcacgagactccataattgtaccacatgcatgtgcggtaccttggatt

SEQ ID NO: 44850 - DNA, 447 bp, Oryza sativa
  unsure (1)..(447): unsure at all n locations
ntataatagatctcagtttgcttgcatgcatactgttacatgtaagatatagtagcacatctgcacagcgaacaaaattgcttcacggaaaataaggcactttgcttataccaaatgttattacatttcacacatttggaccaactcaagcatacacatgtttggcctgcctacaatggaatagctatcttttttttgtatatttcacattctaggagatatcataggagaatacagattattgtgtaactacagatatcttgtatgatggcttctatctcctcccaaggaggatgtgattacagctgcttcttatccaaatttctgctttgctcaatataaaggtgaactctctggtactgtagtatggcccagacaatgtgcttgagagataacttcggccaaagatggtctggattctgcatatgactgaacgtctgtctgcac

SEQ ID NO: 44851 - DNA, 469 bp, Oryza sativa
atcctcttagtcacctgaggcatgcaagcttgtgaatacctaaatagacagatgaatgcttaatgcacgagcattacacttggactagaaggaatcaaggaaatctacagaatcagggcatcaaagctagataatgctttggacttcgtttcttttcatgtgcctagaagcccagaacaggagagagttcttcagtgtcatggacatggccaaataaatgtcatgataaacaagaatactgccatctcgttatttgaaattactgcttcatttgtcggattttctttgaattattcttatagtacagaatgatgaggaactcggctgcagtttactcaggaagtatggagaagttcctaataaaaaagaaagaaaaatcgacacagatagcagctactactattaccttaagaaatttgactaaagtagtttgattaaattgaattcttcgtcctgatgttatgctgaa

SEQ ID NO: 44852 - DNA, 453 bp, Oryza sativa
  unsure (1)..(453): unsure at all n locations
tctatctgcttgaatcagttcagcaaatggtttattatttcaaacatacactntttttttgttatttcattgataatattcaggcaagcagattgctaatttgctatgagttagtttcagtccaattgcaatgggaaactacatagtagatcaattgaaactagaaaggaaaagaagtatacataacattttcaacactattcatttgagaccaagaatgtatgttcaataccttgttaaatttcaaccatcactttggtaattattactctatcagaaaaaggagtttttgttgtgccctacaataagcttatgattaagcaaacttatatctcagagacaatccgtgccaacttgtcatcagccataagctaccaactattacgtaaaatcttaaatatgattttgttcattttctgagctctactacacatgctgatattgatcagaatc

SEQ ID NO: 44853 - DNA, 439 bp, Oryza sativa
  unsure (1)..(439): unsure at all n locations
agcttctgaagtaacggagatggtttcaatgcttcaagntgtagaacctcctgattgtcgtttgcgtgtatcccgaggcggacaagatgaaacatattggtgattgccacaaacagcttggcacaatggcggccttgtactttgctgatgcgaaatgatctcaaattcaccagagcaccaaggtaaaagaccatttcagaactagcttccatcagtaataaggtctgcaaacatcccaaagaccataaaccagtaggtgcaggtatgccaacagaaggaacaaaattcatagaagtaatcactggtttcacagtcacaataagatgtgtcaacttagatagccttataatttcctctggtaggttcatatatttgcttttccaagcatccaacacgaccaatatttgaagtctnccaattgatcttgagatatatgcaa

SEQ ID NO: 44854 - DNA, 420 bp, Oryza sativa
  unsure (1)..(420): unsure at all n locations
tgcattctttgcggggagaaccattcccgtatagattgcagcatgtacaatgtaaggcaagatgccacaggcgttgatgttcgtcgcgttccaaaggggaagtcgaagaagaaaaataatccttagttcgctattatccttggtggactccctactttgaagatcgttatcgttcaatttatgtttagtgcgtctgtaattttaatttgaactttcttgcacttttattacccgaatctatttgtaatggccttgtaattttcattntgaactgcactgcacttttaatatcgtcatgtatttgtattggaattgtaatttaaatttcgaactgcgctgcacttgtaatatcataatatatgtgtcgtgggcttgtaattntaaatggaaatgtactgaactgttcttatctgtatctat

SEQ ID NO: 44855 - DNA, 432 bp, Oryza sativa
  unsure (1)..(432): unsure at all n locations
agctnggacagattgagaaggattttttttatagaaaagaataatctacttcaaccgatatgcctttaggcacggccatacataacatagaaatcacacatggaaagggtaggcaattagctagagcagcagttgctttatcgaaactgattgcaaaagaaggtaaatcggccacttgaataccacctaggaagatccgtttggtatcctgaaactgcttggcaatagttatacaagttggtaatgtgttcgggtgaaaaaaaaaatttangtagagccggatcaaagtgttgactaggtaaacaccccgttataagagggatagctatgaaatgtgtggaccacccgtataggcgcggtgaatggaaagccattgcgaaagcgaagtagtcttcctgtgagtatagacaaacccgtcaaaaatatattttt

SEQ ID NO: 44856 - DNA, 355 bp, Oryza sativa
  unsure (1)..(355): unsure at all n locations
tatgaaggatccatgttaagactgcaagtgctgtgagttttgtacattttgctgatgattatggagacctaaggtctcatttccgtaatcccataatctgttatgaatcaaattacctaacgattgatagcgaagaaaatcaagtgatctaccaaagagacatttgtttggactaagagtttcagatgtgtcttcttcggatcaaaggcaacaattgtcagtctagcttttgacgaactacttcaaggtttctctganagacagcacgcccaatgacctcattgtcccagaagcatcctcaacacccggagcgaagagtacctgggtgagaaatgtcgaacggtgactaatggaa

SEQ ID NO: 44857 - DNA, 429 bp, Oryza sativa
agcgttgacaaaactctgaccaaggaaccttcgttgcttctatacgggtcgccacgtagttatcccaccatgcagaatcgggaccttgcaactggtgtgtagcaaaagcaactttctcttggtcgttgcattgcaagaggctcagattcttctcaatagcacggagccagtcattggcctacattgagttggtggagcttgagaaagcgggtggctggatacaaataagagctaacagtttggacacatgttatggcggatgaccaaactgctggttctgttgcgcctgctgcaacatctgatggtaatgttgctgcatcagttgcatcatcattgtcatcatttgagtgactgttgtcgtatcgggcgtgggagattatctgctgccagatgcaccactgacatgagctccatcggtctgatcttcgc

SEQ ID NO: 44858 - DNA, 460 bp, Oryza sativa
  unsure (1)..(460): unsure at all n locations
gctgatgttggggctaattcctgaatccacaaagccaatctctacatcttcaccagctctatcgaagccaccacccgttggccatacccctgttggcaatccaagaaattgtggagtgtgtgtcgtcaatttctgtatcttcatatctctctccacatgctttactcctggggctttccttangaattcagcctaacacagtgaaagattgctgtgttcagccaagataataatcttaaaccaggaaagaagaaaagatataaaaatgctaaatacctgtaagggtgacatgtgtactgcaaaaccattaataagatgatggtagctataaagcttctcataagttccttctaccaaaagtgagtctagaagcttgtcatggtaccttcgtaggtggagtgagtatgaagtcacagcctcactgaaatcagtaaattggaacatatacaaaattgtcatg

SEQ ID NO: 44859 - DNA, 437 bp, Oryza sativa
agcttatctgcaatgttatttctcttgaagattgcttagtcgatcgccggcgcggtgccgacggcgaatttcacgccatgagagatgcttgagctgttcgccatgaatgctggaaggaaagggagaccaaactccttggctacaaacaaaccgattattcttccagtgtcattgttattttcaggaaattgaactatttgtattgttctccgaatcgaaatattgctgaacttaccgatgaaatcgacgatgactctcccattgcagacacggcccgtggggtggccaaagaatgtcatgccgtaaggaggcttgtcgatccacacgggcataaccggagttgccatgataacgaagttaccggtgtcgatgtacgagtctccaaaggaaaacatcgaggtgaaatagtgtgaggttgagctcacaccacagagaca

SEQ ID NO: 44860 - DNA, 433 bp, Oryza sativa
agtggtcaacttacgagaattctatatgatgggctttcgagcttctgacttctagatgtatttttagcttctatagctatagattctcagaatctgaacgagaatatgtatcattggaggagttggagattctaggagaaactatagttgctagaagctctcctaaatagggcttgaaccagatgacggcggaggtgacgtgagattgtgagagggtatgtgagctgcttatcatgaataattctttgttttgtccttccatctttgtattgtgtttggcatgattatcaggtggaagcagatgcatctctcgtacacaagtcaagcggctacttgggctctgctgcatctatactaccaactgccattgatgtttgaaagaaagttgaaagtcactagaaactaatactagtcgctcacaatcaatggcacc

SEQ ID NO: 44861 - DNA, 430 bp, Oryza sativa
agctttcctgcctcatcttgacctctatagctttttatctgacacaacatgggctccctccgctctgtattgtaatactatccacccctacctgatgcgacggcgccgtgctcgcaaatgtgccacccctggaggcgcaacatcggtattgccactctatctgctatcagagctgctccttaacatgcatgccggcgcccatcttggagtgcggcaatgcctgcatcctcgcagggccacaggcttgcattcagtgcctgtacagcgtctaccatcatgtgaccggcctctgcttcaactactgatttaactcgtgctgccacatgagatgaagaaattatcccaagaatatatttatatctgcgtttggttgtgcaaagtgtgtgcgcttgcggacggccaatatatatatagctcaacacatgcggtg

SEQ ID NO: 44862 - DNA, 340 bp, Oryza sativa
caatattgactctacgccgatgatgtcttctgggcttaccatatttcactgttgacacacacgtactctgctttgttatacggtcatctatgtagccctctccaatcaatggcacatggaaattaggtgtttatacttgcggagaagaaaaccgcccgtcacaaacctttgcacatgtgcacacatacattagtcactctaagataatcgcctgcgaaatctcttttagacgggagttttatcactatcttgaatatgagataacttatatgtgtgtactatgcttggtgcgcccaccatataccaaattctctatggaatcgagcctgatacaaaaagt

SEQ ID NO: 44863 - DNA, 425 bp, Oryza sativa
gattgagttatagatgcaccatcatttattgccagagagatttttcccaagaaggctcatgagtttcataaaatatcccaacattggttggttggctggcaaggaacgatcacaatactacaatataattgaaaatatcccaagatattttttataggttactgccaagttacggctcaaatgaaatattatggttcaagttggtatatcggatgatctgatacaatgaacagatcaagtccaatatgggaattaccgaattaagatggattcgaagatgaaattgtactgcagatggcaatcttgaatgagctaaaagaaatatcatgttgtaattgcaagttaaacatatcactataccagcaatgtttcaagatttatagaattgagagatgaacataccaaagcttgagatagaatactaa

SEQ ID NO: 44864 - DNA, 463 bp, Oryza sativa
tgttgcatgaattctgcatcttcagagtgaagttgacgctgtcattgtcctttgagcatttccaaggatgataacaatgatggtaacatcatcgtggtactttctcctgctcccaacaggtatcctcatcaattcttcagctgttaaagctggcacaacataagaagaacaaaaggtgaagagttagttaagtccctgatatcaacataactccaaaaatggagcaatgatgctaattatgcaaaatataaaaatcatcaaaggtgtaatttctttcaaaagagattattaactgtccctgcatctacaagatactatagagcttaattaattaagtctaagggtgtaataatatggaatatgcatttcagcgcaaaagaatcttaatgctaactatttcatattgtaatactaaaattataaaactgataatatatttcggatgatacctgcttacttcgct

SEQ ID NO: 44865 - DNA, 350 bp, Oryza sativa
gcttatatttacctgccgcatgcaatgcttcatctactactgtgatagcagactttgttttcttgcgacccttcctcccaccgcacgtgcacagagtgacgattagctctgcccaccgttcctaatactgctcccccatttcgagtggtattggctgacagaacgcacggggctggcactagttgtcggaaccatgaatccgaataaccccgtatgggactaacaaggcctctttgatggaggagaaataggccctctgctctccgagagtcaggaaaataacgttgatcggcaacctggtgaagtatcagatgcatgctggagaagtcttaacaaaactcattaggtga

SEQ ID NO: 44866 - DNA, 419 bp, Oryza sativa
ggaccttaatcaccgcagcatcagctttcaagtgtcatatctcttttttttctggctgggcaactcatcatcgagacccgtcagaaacttctcctgcctctcggcatcggtacgcacgtactcaggagcgtatcgcgcgaggcggttgaactcatgcaaatactctataactgttctggttccttgttgcagggaacagaactctctctttttttgtgccacaattccctcgataacctgcgctttattgaaactatgacgaaactctgtccaagtaacctctgacccatctggacggtgcaccaagtaattgtcccaccaaatataagcgggaccttgtaactggtgtgtagcaaaagcaaacttctcctgctagttgcattgcaaaagaatcagcttcttctcaatggcatgaaacc

SEQ ID NO: 44867 - DNA, 458 bp, Oryza sativa
cctgtcaaatagtaatcctgtataaaattgataactcaatttttcattactaaaagcacccatatgcatatgtatttcatgctgtctttccatccgtttatgtaagcaaaggcagcaactacaattgtctctacaggaacaagcgacaattggtgatttcactaattctaatatagatctaatagatctcactcaaaaggttagtactgctgcgaatccacaatgcattttattcgagaatgatggcgctagactattgttgagcaaaatttgaaaatacaagttttctgaatgctactagacaaaatgtaagggcttgcacggaatgttttaatgatttttctgtataaaaggtcaattgttggttataacatttactgcaaggtgttttactgattggctgcatcgttttactggaggagctgtgcagtagatattgttgcctaatttgctgattg

SEQ ID NO: 44868 - DNA, 426 bp, Oryza sativa
  unsure (1)..(426): unsure at all n locations
agcttctgggaatcagcatggttccagtgattatctcctaaagatgcagcacctctggtttacgcattggcgaaaaagaaaagtgcaagcctgcatcaagcatcacactccgaccaatggttgatggatctcgacttgccggtggtctcatggtggacaacggcctaattagtcaacttgtcaacgtgtggggtgttgtacgaatcttgcatttgatagagagcaaagaagacaagaccacgtggaaattaaccagctacggcgaatacacggcagcttcagcttacaatgcgcaacttcttgatacaacaacttccaacttcaatcccatcgtcatccaaaaaagagtatggacctccgatagattagcaacctgtgggtggncgaataattccatctgccccctatgttgaaagaatccggaaa

SEQ ID NO: 44869 - DNA, 454 bp, Oryza sativa
tgtgttgtttactgtcagcctgatcatttgtttcacttgatcctcatcagctagaatgagtctctccgtgtggtatatatgtactactttgctagcctacctaacccatctgtttgaaactgagacatacaggaatttgtatgtactatgtttgttaatttgtatacactgagacatacagggatcaagtgtgttaattggtgtagcttgaggtagctaatctagactaatctgatcggtatgatattgagctcaaaaaagacatgtaattacttcacttgaggggatgacacatggtatgaggcctcttatactgctcatttgtgaacctgctactacaacagagatgaaccataaattaatcaaaaaataaaaggtgtgatccaataatctaacataaaaattcaatatacgaatatctctttattttgcacacagagacgaatataataaa

SEQ ID NO: 44870 - DNA, 423 bp, Oryza sativa
  unsure (1)..(423): unsure at all n locations
agcttgtggaatcttaagccacctacatttttctatcagctagcaagtgtacacacatctataaattgtagtagtaaccaccttagctgaggtgatggccatggcgatgagaatggtggtgctggtggcggcggtgctgtgcgcggtggtcgccatggtcacagcgcatgaggcatccaacgtgcgcgccacgtatcactactatcgccccgcgcagaacaactgggacttaggatccccagccgtgagcgcgtattgtgctacgtgggacgctaacaagccactgtcgtggcgtcagaagtatggctggactgccttttgcgggcccgttggtcctatgggtcatgctgcatgtggcaagtgccttctggtaataattgcctcatctgatntttaatcaagaattttaactatagagatatg

SEQ ID NO: 44871 - DNA, 435 bp, Oryza sativa
gcaatatctctcccatttttggaatgatgatttatacgagtacaaagcacgtgtccatttgagatacatctatcatacattgataagtatgctttgataagtatacatggatgatgctttgataagtatcatgaggtgaagaaatgcactacttgtaaaaaagaaaaaaaacaaaatcatttttggacgctgtgcatttattttcacaggcggcccaaaagaaacagagcttgtataaatggttgggaggctgtgaagggttaaagaccgtatttgaaaacctatttttacggttgggcaaatctgcctatgaaaatttgtctattctcgcagacgatttattaggaaaactaccctttgaaatggggtgatttttctacaggaatttttcatgaggaaaaacctgtaaaaattgacttttggcgaccagatctt

SEQ ID NO: 44872 - DNA, 347 bp, Oryza sativa
cgagcgctagcggagacgacagtgagcacaacccacgccggctggctcacaccccaccagacccctctgcccgaaatcttgggcgggggaacgcactccagggggtcaaaagatctgcgacttcgacgcccgcgagcaacgggggaagacggccagacagggcacgtccccgcctactctaccgcaaaggcggcatgccccaaggcgcgcaccaagctgcgggcgcactcctgcgcacccgcccatcgccccgatcaaagactccagcccggcttggctgaagacatggccgactaggcatgaccgcgcaaagctcctaggcgccagagagcggcctccgccaccca

SEQ ID NO: 44873 - DNA, 288 bp, Oryza sativa
ctaagcctgtctttttctcgccatcctttaattaccgataagaaattgcattttgggtcctctccctgctggtgaaattattagcatcacgaacttgacatttcttattctttattattcgcacttgaaaactcaaattctaatagtaactttttcacaaactgattttccatttgaacgttttatgaatgttaatccatatctatatgtgagagaatacaacacctttcatacttgatctacatgacgcgacaacgttattgtgtcatgctggtctgactaacgaat

SEQ ID NO: 44874 - DNA, 452 bp, Oryza sativa
  unsure (1)..(452): unsure at all n locations
ngagcaaagctcaaacttagtagcaggaactggttttgtcatcatatcaactgggttatcatgagtacttatcttgcataccttgacatcaccttcagcaatcacacctcgaataaagtgatatctcaaatcaatgtgctttgttctctcatggaacatctgatcctttgtaatgcatattgcactttgactatcacaaaatatattaatgcaagacgtaactccacaaagctcagtgtacaaacctctaagccaaataacttctttacaagcttcagaaatagccatgtactctgcttcagtagtagataaagcaacnagtgcttgtaaacttgccttccaactaacagcacatcctccaacagtgaaaacataacctgtgagcgatcttctcctatccaaatcttcagcaaaatctgaatccacataaccaacaagtccatcactagatc

SEQ ID NO: 44875 - DNA, 433 bp, Oryza sativa
  unsure (1)..(433): unsure at all n locations
agcttgtgtagacactcagcggcgtcttgtcttgcanggcaatgatgccaagctagatatgtgagacggcgggaggcaccgtgggttggggaacacagaagctgtgggaggttggatgcggtggagaggcaaggcgccggggtccatggacacatgagacgctaggcgcataaaggctcggcttcttttggcttcctagcctaaaggaatcgggatggaggcgccgggacgggaggcaagggtgccggggatgcacgatacattcaaaagaagcgctatcacgaacagatgacgagatccaggacaattacttcctatggacaattactcttgatgaaaataaatctcaatttcaaatgactaaacaacccattttatatttttaacaaataccaaacatacccttctatatactgcaagtatatacacgcag

SEQ ID NO: 44876 - DNA, 451 bp, Oryza sativa
  unsure (1)..(451): unsure at all n locations
tctccttatccttcgacctctgcttttcctacaaatagataataatagggctctttaagtattaaacaattactgtcagctaaatataattgagttaaattcattaaaaatttggatgtattgaagaagcttacatcactttcatgccacacgaaaccagagaactggagtatatgacctttaaaatcaacagtctggtacattacacaaacagtatttgtcagtatcatacacaacagttttgcttaagcaatccaaaccaataactggcaatcttatggtcacctaaaaggtcaaaaacttaagatgtccatcacaaacggaaaatgaatgtatagttgaatagtatcctgcctacgcagcttctatggtattttgataacccaatattggctgcaggctntacacactgagaaattcctcttcttttttttttcttttactaccattt

SEQ ID NO: 44877 - DNA, 434 bp, Oryza sativa
agcttcacaagcagaaagttatattacgtcccaaaagttaagttggcaaatttaaagttggaattacaagacttagctcatccagacatgtatttttggatgaccgatattgccctttgcctaatatgatctacttcgtctatgatttgggcatcggctgcatcagtgcttgggaacaccttcagagatttggtcagatcggccaagtgcttgacagatactttcaactttgacttctgatcctcaatgccttttggcaagtcagcaagcttttgctgttcaagggcgaccggtgcattgcactgctccaactcagccaagagttctatctttcgagcattcagccgatcaatgttagtttgagtggggtttgaccagcctccaattcatcaagctttgccttcttttcattgatagaaaccctgttagcttgg

SEQ ID NO: 44878 - DNA, 400 bp, Oryza sativa
  unsure (1)..(400): unsure at all n locations
tgtgctatcccatactagcacatgtgggtgtactgtatatgaaataaactgacattgagtgaaatcattgagtgaaatccttatgtcggtttggacgcactctccctctatcggtacacaactaatcaccatatgtgcaccacttgagacctaaacctaaaatccatgttttccatcattttatttatcaaaatcgcaagtattaaagttctgtccagattatttcaaaatcagttttcatatttgtagtgagcccataatgacaaggaagatcattctaagcatggctaagcattatagtaacctagtgactccaaaattcatatataaagtggtatagtcatattgttcctattgttcctaaggttangaaggaatgatggatatggatatatgtggg

SEQ ID NO: 44879 - DNA, 443 bp, Oryza sativa
agcttaattctacgatatatgcaaaatctaaccttaattgagctcgaattttgaccatgcgcatatggatgactaattaattctcggcattaagaggttagctagctagctaacctggagacttcctcctagagggggcccttgaggacggcttcccgaaaggcgacgtccatctccgaccggatcttgagcagcgccagcgtctcctgccgtggccaccggttgcctgcccgcgacccgctccggtcgccctcctcgccacccagcagcccgttgtgctccagtagctcccgttgagctgctcctttgccgtcgcctactccggcgacgagcggctgctgatcggcgacggcgccccccactccgcctggctgcttcgctcgcctcctgcaccgccaccggctgcacgcggtcgatgagcacggagaggagcagcgacatgt

SEQ ID NO: 44880 - DNA, 433 bp, Oryza sativa
  unsure (1)..(433): unsure at all n locations
tgtgtactgatccctgtattgtaagataacattgcctgtgtttacctgcttccattcattgcatcatatgggctgtagttacaccaataagtgcaatccattgtcatgagcaattgagcagtttgaactgaatgtcaattctctatccataaagtttgatgttgtgggctctgtacaaagcactatggcgagtttgcaccaccaattatgctgcagaagccaactctgcttcctctngtcgcangtgaagggaaaggcatccattgatgttgtctgcaacccattgtggaagtctggtggagctcttattcaacagttcatgatccttacatttggctctttagctaactccaccccctaccttggtggcatactgttggtgattgttctatcatggctatgcgcggcaagttcactatacaagcaattctct

SEQ ID NO: 44881 - DNA, 440 bp, Oryza sativa
  unsure (1)..(440): unsure at all n locations
agctntgtgtccgacagcgacaacaacgatgatgatcttatggaggtggacgaagacaagagttggaatcatgtggagaatgaggaggtgaatgatcagcagcatccagctgaccacaaggtggaccaaagtggtgatccggcagccagaaagatgaaggggaagatgaacgatagcagcatggtggtgatggagatgcaagatgctgacaagcaggctggtgtttggtactgcaacaagaatgatggcaagaaatggcactgccgaaacatcgtcgacgggcccaagaccctgtgtgactaccacctatcaaagagccgctcttactacacccgcactggtgaggcaggtgctgcagctagttccaagtcatgccgagcaaaggcaccagctattgtcaagccaaagtccagtttcaaacgaactccagcatgtgagtc

SEQ ID NO: 44882 - DNA, 446 bp, Oryza sativa
tcgccgctgcctccattggattcgcagctgcgaagtgaagcccggccacccctccgttgtcgccgcacatcgccggatagtcgtcgcctccgtggacagtacctcgctgcccttcggagctcgtcgccggccatcttccgtcgctgcccgtcatcgtgtaagtgttggtaagaatcgccgtcaccttctctacctcccggtgctctccgtttgcattattgtaccgtggttcgccggcaaccgccgctcctatgtcgttcaccggtgtagcttatccctagggtcttaattccatttaatctaatcttgtttggccctagtgtcatcatcgtctccgtgtgttgtcgtcagaccgtaaccgtcgcctcttcctctacgttcgctacacgttcccggtgaggcctcctctccgattcctaaggtagatgtttatgtaagccacgtgt

SEQ ID NO: 44883 - DNA, 434 bp, Oryza sativa
agcttaactccagttctcattaagtgaaatctcctactgcaagatggaatttgtttgggggcagacaaccaccaaggatggccaagaaaagtcatccattttctttgttggggcaaacacaatgatccacaagatggcctgcaaggtcaatgcccattttctttgggacaaattaaaccgaagaggtatgacaaatacgatgatccgacgagagggcctcagttattatttttcttgtcaagaattaattaaagcaagcaatatggaaggtttaaagctacgttcgttccagctggttaccaaccccttaccctcgtttttacgcgcacgctttttaaactgctaaatagtgcggtttttttaaaataaagttgatatacgaaagttgctcaaaaatcataatgatctatttttgaaaataaattagcaaatag

SEQ ID NO: 44884 - DNA, 444 bp, Oryza sativa
  unsure (1)..(444): unsure at all n locations
ngccaaggtaactctaagtatcacaccactgaaccaagatgatctggttgtcctctccaagctacccaagttacagtgtgttatgctccaacacatttcatgcatagtgagtgagctcatcttcaatgaagaaaatntcaaatgtctcaagtacctacttattgagggctttaacttgactaatatcacttttgaggatggatcagcctgtgagctcgagaaaatggttttatcttccaccaccataaagtctgtctctggagttgatgtgcttccgaaattcaaagagcttgagttgaacaacagccatgtcccgaatgagttgaaagaagccgttgaaaacaataaaaggataattcttaaatgtaatgaaccatgaactcaataccaggcaaaacggagatgaacaagatgatgaagacaatgctgctacatccccattct

SEQ ID NO: 44885 - DNA, 432 bp, Oryza sativa
  unsure (1)..(432): unsure at all n locations
agcttgcatgagctcttgtgcgcaatctatgaccactatcacccccagagggagtcccgtgatccagccccgccgcccctgcttccacagtactgccatcacctcctctcacctcactctgttctctctttctaactgtaactggtacttgtgttgaagttgctcaagaaccaaccagaaaatttcctccttggaggagttgcttgattattgcttccagttcagttcgtcttcctcaccatctatttgctgctcggacaaccctcttggatgagtcaatttcggtctggggacagggactgagccaattcatacgaatgcacggnggggatntgggttcttttgttggaggaaaaaagagaactgtgaatcaagtggctaaatgggcatatcgtgaaatatgtccagctctagagcgcaaaattattgatt

SEQ ID NO: 44886 - DNA, 410 bp, Oryza sativa
  unsure (1)..(410): unsure at all n locations
taattgcttgttcactcagtgcaaaccatacatgaaatgtgttatagtatcacacactggagcagcatagagacaagctaaggtgagtctatctaagagatgatgggtagtgcaatgctcagaagttgtccattaacattgacaaggaatggattaagctggaagctagaaggagatgagcatgaatgggggtagagagagagagagagctaatataagagagaggtgtagagctgctangtggtgatggatggatggatattgatctcggatggggtacaaggaaacaagtaacaatggaggtggttatatatagctagtgacagtggctagtgggattagtttcgcgaggttatggaagtgccaccaaccttgatggggagagaaacaaatgcatatgtgccccatcg

SEQ ID NO: 44887 - DNA, 433 bp, Oryza sativa
  unsure (1)..(433): unsure at all n locations
agcttggccgatgccttgtgtctggctctgtcgtggnaccttaagataggttagctgttggtgtggcgttgtanttgtggttttcgctcagttttccctaattaactgagcactgtaaggtttgatcccgttctctcctcaaaataagatatcttcttcttaatataaaacgtcggcaatggcctgaccgttcgaaaaaaaaagctgtcgtaattaagcaattaattacgatagttaaggacacctaccatgattggcacaatgagggcacatcacactttcttatttgcgtgtgccgtatatttgatatgcacaaaactatgatgtgccacacggattgttaagtacgtgctactatgtgttctaaagaaagaatgtcatatctctgtaatttgatctgtttgtcagtactagtacaagatgacaaatacca

SEQ ID NO: 44888 - DNA, 437 bp, Oryza sativa
  unsure (1)..(437): unsure at all n locations
agcttatntgacaacctataagcaatctattttcatgtgtggttattatatatatgaagcctatacatataacatttatgttcaagtcgattgcattggcaagtatagtagtcgatctaacacagcatatttggtcggcttgaggaatataatgaatgaagcatatttttttttccaaaatacttcgaaaattgagaattaagattcccaaggaaattaatactgaacaatttataattatcgataaccaagggaaatttggagggaccatgcaaggcaggatcagctatatgcatggaatatgcagagaatctgaagaacatgaattacagatcaccaacaaaacagatcacatgccaaaataaattggctaactgagaacaaaaaacaacaacaacaacagagctagctagagcacatccgccggtaaactcaat

SEQ ID NO: 44889 - DNA, 456 bp, Oryza sativa
  unsure (1)..(456): unsure at all n locations
tcctgaattgcatttctatgcattacactgctatatggtttgtatccgtctaatacctaagcaatttatattntttgattgacatgccattggaaaattggtttgtgtgtgcacaggcaagcggtgatgaacgtgcaaacagaaggtgacttggcatattctagaggcatgaaaagctgaattagctgagttattgttgtgcatgagatgcaaaatacggacttgtttggatctctgaagctgggctttgctctatggatatttccccgtcttgttgacagctatattcatctgaatcatctggcactgtcagttgcaggttgtgaacctggttggagtgtattggcatttcttgaatttgttcatttattcgctctgcttcatatcctttctgagtctggtcacgacgtatgctgntccttatcctgtgcttattcttgtagagaaacatcacca

SEQ ID NO: 44890 - DNA, 432 bp, Oryza sativa
  unsure (1)..(432): unsure at all n locations
gcttcttcagttcggtgtgtctgaggcttacatagaccaccattgtgctgcaaatgccaaacaatatgtcatttcactattatgaacacatagagcattgcattatgaaattnttttgctacattagcaaaaaaaataccaatggaagttttcccatccatggccatctttcttgctagtggcttcccaaattcgccactcttacactgatacatctcaacctccagcatagcggcagctgccgtgtcaatgtccgtcatccactcgaaagcttaacgaaggtcttggaagacggtggaactacaagtgtaagcgtagtgcgtcctcgggttcaataccgcagctacaaaacatagcctaaattagttcaagagttatgggtttaggaattgaacattatgtaaagaccgcaacttacttgcattgatgagt

SEQ ID NO: 44891 - DNA, 449 bp, Oryza sativa
  unsure (1)..(449): unsure at all n locations
tgttacaagggtaaaatattctgctcttattgtgttactatcatgaatgtgaaattaatagtgaactaccatccatttaaagaagaaatttctttttcaagaaacaaaacctccactgagaatttgcattgcaggcagaagttgctgtgctcatgtcaagatgtagttttacagtgacaactcataccaggatgaacttcacatttgattgtggtgtgttccgcttcttcctcagtacagacatactgtctgactgtctcctgngtcattagagctataggaacatacattttttcttaatgatatatgggtactttgtgttgtctgatttctcatattttcactggtggaaattatctttagttttggctggattattcagcaaattttatgcttgagtactcattgtcgacttgaacactatttatgaatgaattaaattaagacaa

SEQ ID NO: 44892 - DNA, 470 bp, Oryza sativa
cgcacccgagatcctcttagtcacctgcggcatgcaagcttcgcgagagcggcgcggcggcgtgatgatggatctggaggcggaagtgggtcgcatggcgccagatgatgtgctggccctggtgactaagctggcggtgctgcgggacggcgtggcggagcgcgcccacgagatgctgcgcgaggcgctgctcgctgtcgctgccccgaccccgaccacccccaccaccccgccggccgcgggcttctgaattcgagatctaccacctctccatgaaatgcatctccatgaagaataaactgatctcacagtcgtcacagatcgagatcgacctagcttcccttttattttgtattagtcgtcgtcgttccatcgtcgtccatgcattgatcgttgtatccgcagtttgaagtttgctttcgcttccatccatccatggagatttagtattttgtatccctgcatcttat

SEQ ID NO: 44893 - DNA, 435 bp, Oryza sativa
  unsure (1)..(435): unsure at all n locations
tcactttatgtgtaactagctgccctgacatagttntcgtcttagttcatatcttacttagctatataattacgtgtaagtttttccctcatattatcatgtctatttataaaatattaaatatcaaagttttgcatctttatgcacgttttgcagaggaagactgaagaagctgcgatggctaccaaaaggctgaaagagttactagaggctcggaaatcatcatgacgtgacaactcatgtatctctctccgcattgcgaccatttttcgcattataattaatactcccaatctaacagctcttccttctttttctttttttttttttttgctttcttccaaacacatcaggcatgaatggtacttctcctggctctcatgtaagttattttccatacttaaagaanaagatcagttgcttattttgaaatat

SEQ ID NO: 44894 - DNA, 434 bp, Oryza sativa
agctagagtcctgatacaatatagaggtgttttatgatatcctctattcatagtagaagtaatatatagaccgctcttttttcaatccaatggatcatatgtattcgtagtaacatcggtattaaaatctgtatatcaacggttgttactcttactgttgataatatttacggcggacaaacatggacaagtttatgtgctaattggtcaagtgatggcaatattatatcattaactctgaatatacagcttgagatatacacaaactgattcgtagctattatatatagcatatcactggtgagtgaggaccatctagcacaacatgttttaattacactggcacgcttggatcctcttctttgattaatatagataagaaagtacagtcactgacatcaacatattttccaactgcaacatcatcatgcata

SEQ ID NO: 44895 - DNA, 162 bp, Oryza sativa
tctcttactgaagaagggaaagactgagcaataatgatttctacctctctacccagcaagccacaccggcttatgcatgatttacgcaaggtggggttcaaagcgaataataattaggggttaggatttgcagtttacaacattctaaattcacttatttgc

SEQ ID NO: 44896 - DNA, 469 bp, Oryza sativa
  unsure (1)..(469): unsure at all n locations
ctcgcacccgagatccttttagtcacctgcggcatgcaagcttgaggactgatacgnatgctgttgtttatcatatgaacataaaaaaaattgagctgtgatatgaaattgaacaaatggttcaaaccagtgcttggttgcgccccacccagaaattttataagaatctgaagatgagagggtatagatgcaaggtattaaaagatccctaaaaaaattatactcctatatagcaaggggtccatcaattccacttgaaatgctatatatgatcgagctcattcacctgtccgaaattaccatagttctcacaaaacaactactactcctaggaaaaagattgctaaagtagagctcattcacctgtccgaaatgaccatagttttcacaaaacaattactactcctactatgaaaaaagaatgctaaagtaggtcatacactaacaacaaaaaactctacatgagcct

SEQ ID NO: 44897 - DNA, 422 bp, Oryza sativa
  unsure (1)..(422): unsure at all n locations
ntcttatgtaatgccctgaaacatttgttccacatcgacgtatccgtaccccaaaagaccatcctatagcatcatttaacacttaatttactattggcacacccacaaatgattctattagatagtatgtccctctatatgcattgactacagtagcctttcaccgatgccaccttatctcaaccataagtatacccttgcaatatttacgatagcatagtatatactataccctacattgaaggacggatagggacagaaaggaggaggtgataaacacaattataatttttgccccctacttatttctgtgaagtattatttttagtaacactcgactttaaaggctattgacaacacataagtgacggaccgccggcttgacgtttttttctttgaataagacatccttgattttacta

SEQ ID NO: 44898 - DNA, 431 bp, Oryza sativa
cagcaaggaataacaaatcttatattcaacaatgaaaaggaaggattatgttgaatgatgaataggttagctcaaagattttctagaagaaatgtaaaaacattacaaaaatgctccccgtctatactaaaatttttaaatcagctaattaccatgaagaaaataaggcacattagttcagtgttctctcttctagtcttactagttactagcttgctaaccatagcatctgcattagtcacatgatatgaaaataaaagatctggaatactatgaaaggctaagagttcttccaataactcttgcaatgaatactgttcaccaattcatcccttgacccttgaacatttacttcgatattttgttaagttgagtttggagagaacatcagccagcggattaccatgaagctagtcatttccaatgtcaaa

SEQ ID NO: 44899 - DNA, 453 bp, Oryza sativa
  unsure (1)..(453): unsure at all n locations
ntacatatatatttggcctgtagcgtgcagaataacatgtatgcccactttgaatcacaggaatgaataaacggtggaataggataaacatatgattctgataggaatacaagtgtaaaatagaggattgcaaaacacaggaaaaacatatgaatgaccgtttgattgagccgcatgaaaaacacaggaatttgaagagagagaaagactcaaaggattcttaacatgaggtagaacctcatgttaaatttccttcaaaatttgcatgggaagaggcattccataggaattttataggattccatatgattcattcctttgatttaaagggctatataggaaaaattcctatagaaattaaatcctttaaaattcctatgaatntcctttgaatcaaagggggccgtagtatgtccttcagcgttntcagcctcaatcatgcaaagagaatga

SEQ ID NO: 44900 - DNA, 437 bp, Oryza sativa
agcttactactctacaaaataggatcgtgacatccgaatttgctgcccatttgcaagagatcgatctgccattgataagtgtacaaaaacaggtttgtgacacaggatgtcttgtgtttgcagcctggtgtgctgacactatgtctgcagcatgtgcatgccagcggccacactagctgtgctaaaaattactcctcatcagtatcaaaatataagagattttatacagatggaatacttcttagtacttcctatatccaaaagtctaaaatctatttcttttggcaccaagaccaatgaataattattcattcacaaccaagaccaatgaataattattcatttacagtatgacaaaaaccaatgaacacgcaaccaataagtaatcaaatagcttcttgagttccgatcaacaatttaatttatcacatagtgac

SEQ ID NO: 44901 - DNA, 425 bp, Oryza sativa
gtccaacatgtattcatgggccccgatattgtcacgccctgtaattcacaagtaatttctaaactaatgtgtgcattaaatcctcgtgcaggaatcagccgatgtacacagattgacaatttaatatacagattcatcaaattaactaaaacgataaattgaggcacttagtcctcaccatgaagaaaactgcagcggaaaataaaatctagcgaagctccggctccactcccacatgcagctcaactgaggtataagccaaacgtgctctccatcgcaacttttcttcaactgagggttgattgattattgcaaggtgagcatatgacatactcagcaagccacacaccatatatgcaagtgcacaatgataccaaagtttggcattatatatgctcatttgcaatagcagcatttagcaaaca

SEQ ID NO: 44902 - DNA, 392 bp, Oryza sativa
agcttacagtattggtgagcgaatagagttactcatcatcgttgcaaaaaaataatgagagattcgagagtttatatgaaccttagccttattttaacgagcatcgctgcatcagttattagcagcgtgagtaatgttgaccaatataaataaccggtgaatatgccattattagcagggttgttttgtgttttttctatcgcgcaatgtaagagtcaggagaaagataaagttcactcgagggggatggatgttgagcgtactgatgtaaacatatgctcacattgttatatataataatgaaattatgagtatgtgatataagcatgatttcttttaaacacttaatcccaaaacttacggttccttgacacaaatcataatacatgtat

SEQ ID NO: 44903 - DNA, 387 bp, Oryza sativa
agcttcaacattgcgaccgatctgagttgtatacatcttttaatcatgcgtagataagttgctcctgcgttctataatccaaagggcatggtgatgtaacactatgccccaaagggcgtaagaaacaaggtcttcaaccactccgattcttttagtcggatctgatgatattccgagtaacagtccaagaagctgagtaactcgcacccggccgttaagtcaaccacctggtcaatgcgaggtaacccaaaagggtctgtgggacaatatttgttgaggtcgagataatcgacacacatgctccattgacccgtctttttccgaaccaagactggattagccagccaatctggatgaaggacttccttaatgaaacctactgctaac

SEQ ID NO: 44904 - DNA, 416 bp, Oryza sativa
  unsure (1)..(416): unsure at all n locations
actcagcttgcattgtataaatcttacaatataacagaattttgcttgaaaatttgacatcttcaaagaaacaaacaagcgaaagtcatgcaaatctcctccagcttgtcgcanacgttgtctactcatgactgcatggtcgggccaccgccgccgacttgccgttgccaacccgcgccaagccatcgccatcacctcctcctctgaccgagaggtcgccgccaacttccacgccgagacgccgtcggcaccacctcctcgcgtcgagccatcgtcatcgcctccccctctcacagagacgcgccgccacctacctgtgccgaggcgctgccaccacctcctcacgacgagacgccgccaccacctctccgcgctgagccaccaccatcacctctccccaactagacgcacggtcg

SEQ ID NO: 44905 - DNA, 419 bp, Oryza sativa
agcttgaattaattactccctccatcccaaaatatatctacctgtctagttcaagaactagaaaactagaaaggtagctattatctctgcattctgtttacacaatttcttttgtgtaaagttattctgatgttatagtgctttttagttactacattcagatctaaccagctttagtatttcaaatggtgtcaattgcaactttgtacgagcgcccatcgaaatatcaatacagaaccagactccaatataagcacacaaaaccaaaatgtctaacaagggaaggcaaaagaaaaaaggagcgcacctgtcttggtttggtaataagatctactgcatcctctacatcggtatcaccattttcttcatcgacatgatcattacaaaaatcatcaccatcccaaggttcagatgggatg

SEQ ID NO: 44906 - DNA, 405 bp, Oryza sativa
  unsure (1)..(405): unsure at all n locations
gctggacctatggtattatntgcggatgaatgtggaacaaatacatatgcatgcatttaattcgccttctggtgtcggaagagtcgatagagataaaagccatatgatttagtgcattttcatcttaaaagacaatatgcatatgaagttcaattaggagttcttaacccattgatcatttttttagaaatggtatgctttttccccacaaaggctatttgcagcatatgggcgacaaattaactataattttcacaagatattagctggatacatgagattttatatgtgtaaggtgaagctggaaaaacaaatttcactgtacaatgtatattgtttatttcagaattcttctgcgaggaatctattactgtctctcaatatcaagtctacacttggttatgt

SEQ ID NO: 44907 - DNA, 416 bp, Oryza sativa
agcttaaagaaagcatttaataatcaaaactacgctcttcatcagcatggttaattaaccctataggataagttcatctgggatatgttgaaaaatgagcaaagaaaccccacttaagccttactagattatgataaaccatgctcctgctagacaatgcaaattgattaaatttgaaattcatagaagccatacactttggtggcttgaccactggaactgtcttctgagatcttgtagagctttccatgcatgacatagtcaaacttgtcagcaagtgtttttctgccagcctgaaagatagaaatgatatataatgttagcaccatgcacagagttctggctatcaaatatgtgcctaaatgaatataagcccaagcgaaacaacaacatgattctaggcaactaacacacat

SEQ ID NO: 44908 - DNA, 437 bp, Oryza sativa
  unsure (1)..(437): unsure at all n locations
ntggagaagatgtcttnagtggagtactagcttatactcttatttatcgcctgtgaagatggaaccgttagcccgctagtccgctgctgtttatttttgattgacaagccttaagagcctttgtaataatgtaaatattatcgatataataaagatgtgtcttttatatcatgtttgtgtggtgtaccccggcttttcctgggactgggattaatacactagcgttcgggataaggcaattttctcggtcgcgacaagctggtatcagagccatcttgactgtaggataagccaagtggataatacctatggacatatcttattaataaaactatatgcgaaagttcctcttctctatttcnctaatgctagttgcaaaaggtttacccttgtactccttcttcagatttcaactaatactatatggtcagctttgc

SEQ ID NO: 44909 - DNA, 377 bp, Oryza sativa
ggctaccatgataataatggagtgtgatttttatcaattcaatttgcttacttgatttatcattgtcctgcttggtctttcgacttagtcaatgaggactgaaggtttttaatagtttttgcgggttttaagctcaataaagcttgacaaaggcttttaagaaatcaaaagctaagtatggaacaccaagcatatcataaattcatcagtattgtacaaattaaacctccatcatcattaatcatcaaaatcattgttatatcaatcagtatcgagtttttcatcatcagaattatcaaacccagtcggccgaaagtcgacatcttggaatctctcaaccacgtcagcaacaatcttgtcagcggcttttatcgcat

SEQ ID NO: 44910 - DNA, 372 bp, Oryza sativa
agaaccagctatacagcggaggcgccctcccagcaagcttacggatgtgcaatgcgtcgccggatgcatggccgccctaaattggttcatatcgaggctgggggagaaggcgctacccttatttaagcttctcaaacgctccgggcgcgttacttggacagaggaagctgagcgtgccctcactcagttgaaagcgtatctcagctctcccccggttctggtcgccctggagccaaatgaacccttactactctacttagcggcgacaccgcaagtggttagtgcggcgttggtcgcggagcgcgatgaggacaatcctcatttcgtgcaccaccaccttgtgcagacttggcccgggagagaacaaggagg

SEQ ID NO: 44911 - DNA, 413 bp, Oryza sativa
  unsure (1)..(413): unsure at all n locations
agctntagctgatttcctcgccgagtggaccgagtgccaagaagacatgccagaggaaaagatggaatattggactatgcattttgatgggtcgaagaggctcacaggcactggagctggggttgtcttgatttccccgactggagaaagattgagctacgtattgtggatacatttttctgcgtcccataacgtggcggaatacgaggcgctactccatggattaaggattgcaatctgtttaggcattcgccggttaatcgtccgtggagactcgcagttggttgttaatcaagtcatgaaagagtggtcatgtccagatgataatatgaccgcttatcgacaagaggtacacaagttggaaaataaattcgatggactcgagctcactcatgtcctccgacataacaatg

SEQ ID NO: 44912 - DNA, 416 bp, Oryza sativa
agcttcaacctcttcattattcttgctctatcataagaatatgcagggccaaattatccaggcagaaggaaatgttcaggggacatcatctagcagtaagttcttgaaaatttgaacaccagtatgttctttttttttatgttgcctacatgatgtattttctccatagtctacacatgattataatcttctagacaggttgatacatgaaaaatatatgagaataaaatttgtaaatacacaacccgatcccatgtttgagttaaagcatttttcatgttttcatcctttacacattggtaattttggtgcaaaatcgagaatatttgttattctggtgcaacacatgattgatgtgtgagcctcacctccttacttttttctttaaaaaaaaactgaaaactcatagctactat

SEQ ID NO: 44913 - DNA, 463 bp, Oryza sativa
cgtatagcccaaaagagcatggataactgtgatgctgctttaaagaagcatccaaagcagatgacaaccaacaaagctcatgagccacttctagagggcatcatagtttctgccaacatcaagaaagctcatgaaattgctacatcttctcaccatcctgttgcccctgttgttaaagcaaaccatgcttccatccaaggactgtttcatgagaatattgagaaagcacgaaattcgtttggaaacatttataaggaagagctgccagttatttcttcccaagttacgaataggataatgcgagcacgacttctcgagagacaggttgctggatttggtgggctgaagaattggcttttcacttgtggtttcggatggttcgtcgacatactggacagtgaaaagctggggatgtatcacatagtgtcccttacaatgaaccagcttatagatatgggtcttg

SEQ ID NO: 44914 - DNA, 371 bp, Oryza sativa
  unsure (1)..(371): unsure at all n locations
atcttgngaggactgctgcgccggctatgtttctccggcgttggagaagcgctcgttcaggcctcggaggagattaagcacgagttgggattcggtgacggcgtggccgacgtcgcgaagagcgtcggcagcagtcttcatcttctggcagtaatcgtcgatggaggagtcgccttgaatcatggagtgaaactggtggctgaggaagatcgctcgaggctctttgttggcgtggaacatgttctcgatggcgacccacagctcccgcgcggtctgattgggctccatggcgaggtcaaagacgttgtcggcgactgacccaaagatccagctgcggatgcagcagtcggcctgttcccaggccgggtcat

SEQ ID NO: 44915 - DNA, 432 bp, Oryza sativa
  unsure (1)..(432): unsure at all n locations
ggcaaacacaaactccactatttttttgtgccagccactctacactagnattggggtgtgtggacgaaaagtgacnatctcctcgccgtctcccgccgccgctggcgcctactcgtccctgtccttcccaaaggagctctgctgccaagcaccagaatctctacaagagcacaggctcatatatgcagggaatattccttccttcttgatcttttttttcacgttcttcacaaaggttaacaggctatgtaccggatctatcgttgctttctgacttactgtgtctctgaacagagaacactgaagctttggttcctctgctggacttcatgtagatgaaggtgtgaaggcgagatattggatcaaccccgataagaaggtactggagatcctgcatgctgaatccaggtccaagcaagatatggctctgct

SEQ ID NO: 44916 - DNA, 413 bp, Oryza sativa
agctttgaaggagacgatgagagactatttcgtttctaacgggttttcataaagacagagcgtgaccacatgctggaccctcagcagcaagattccatgatcaagaagtggccgcccagtgaggttttggaaatagatacggatcatagcccctttttttcagcaccagaacagctctttaatctaatagtcaaatccctatgatgtaaatctgcatacaactcaaacatccaaggagacttctccaaattattgtaccactgcatatacacaacaactttaaactgatttagagccacatctttgtgaatcatgctcctgaggagatcgtggcatgtctgcatggtataatggtggaaggctgcaagcaaagcaaagttaatggaaaccaattgcactctaatctgaaacat

SEQ ID NO: 44917 - DNA, 454 bp, Oryza sativa
  unsure (1)..(454): unsure at all n locations
tcaccttntgaatggagcccatatgaacaaataatatactattcatgcttttgccttaaagataatagaattcattttagtctgtactttntctaataaaactactccctccgtttcccaccgtttcaacttaagtcaaagtcaaactattttaagtttggctaagtttatagacaaatataataatatttataataccaaattagtttcattaaatcaatagttgaacgtatnttcataaaaaattgtcttggttgaaaatgttattattttttctacaaatctaggtaaacttaaagcagtttgactttaaccaaagtcaaaacatcttataacctaaaacagtaggaggataaccaattatatagagggtacagaacgaacgatcatgaatcacgagaatataataatagaataattaagatcgcaccatcgatgtctatacatttcaatc

SEQ ID NO: 44918 - DNA, 372 bp, Oryza sativa
agcttgtagctggttcttgttggttttgttctcttgtctgcatagtatcgtcgtcgtgctaagcactagtgtagctttacgcccttactttagggggttcaagtgatttgagtgccttttcaccactaactagtattagatcacatcgatgaatctattcgcgacgttagtttctcctgaacttttcagtatcttaaacagttcaaattctcgcttcgattttcaaaatataagaatatgtttagtctgatttggcccatgccgtattatgatttaggcctgttagacttcgatgatcattgggtgagagtagttcatatgaaaagtctagaataaattgagccaatttatataactagataactctcatga

SEQ ID NO: 44919 - DNA, 407 bp, Oryza sativa
  unsure (1)..(407): unsure at all n locations
agctgatttccttgccgagtggaccgagtgctcttattacttgccacagganaagatggaatgttggactatgcactttgatgggtcgaagaagcttacaggcactggagctggggtcgtcttaatttccccgactggagaaagattgagctacgtattgtggatacatttttctgcatcccataacgtggcggaatacgaggtgctactccatggattaaggattgcaatttctttatgcattcgccgattaatcgtccgtggagactcttagttggttgtcaatcaggtcatgaaagagtggtcatgtttagatgataatatgaccgcttatcgacaagaggtacgcaagttggaagataaattcgacggactcgagctcacccatgtgctccgacataacaatg

SEQ ID NO: 44920 - DNA, 400 bp, Oryza sativa
  unsure (1)..(400): unsure at all n locations
tagcttaaaatctatctcatattctgattngtatttccaaaagcgaacgaccttaaaagccgactcaaatacggatgacgttttaaaataccgataaaaatatttctaattattataatagtacgcgaagagaatgagattaagcgaaacatagtcgtactcgtacacacgcgtgatcacacggctagacggtgatatataatatcacaatcgatcagcgccgcttagtacggcgcgtgggcactgggcaacgatgaataggaaaagagaggacgccgcggcggatggagagatcactgctgccgtgtcgcgcgcgggcacgttatcgtcatcgttcggcggcgccgtcatctgcgacgacgtcgtccgcaacatgttcgcccgcctgccggacctcgac

SEQ ID NO: 44921 - DNA, 445 bp, Oryza sativa
  unsure (1)..(445): unsure at all n locations
tgntagaatgacatgaatggatctgtttttctcttaaaggttnagnacanaatcagcgcagaatctcttaataagccatgaccgccatgtttactaatgtttggattaaacatctcatcctcattgaatgccatgcttcttgttttcttaccaaacttttaattctgcaaggacagaatgtaagatattttcttttgatattgccatggaaatagattccgattcatgtgaaacagtgagcgataagcaagccctggctacgcaaccttctgctcagcaccttttacatagttctagatgtggggagattacatcaaagaaatcagatgctcaaagcaacaatagtcaccagggaagatcagttgcagatgtaatccaagtacaagggaattcatcttttgaagggatagagattaactgccaatcagatcatgcnctgtacagc

SEQ ID NO: 44922 - DNA, 416 bp, Oryza sativa
agcttatcgcacggatcttttttatgcgttcgtagttagcctgggcgtgttaccgtaaggtaatggcctacacagctctatgctgggggcgttatatagagaggcttagtatctcatctcatcatgagttatccaagtcttgcggcttctctcctcaagaactgaccttagagcggatgccactaatcatattcttagccacgatgaatggctgttacctcatgtcatgctatatttagtccacggtggtgttaccaacccggtctaaagatgcctctatggatagtttaataagagaccatcgccatctatgatgcatgtgagtagcctgtacgatggtaacgcactttgggtttgagaagagatatctctatgcttgatgctacatcccacacatatatgtgacttaagatgca

SEQ ID NO: 44923 - DNA, 297 bp, Oryza sativa
  unsure (1)..(297): unsure at all n locations
atactgcatgcatgcctatttgtatttcgtgggcgnactaggatgcgggatgggtgtgaccaacggtagatacgccgaccgtatcgatccattgtgctaatcgacatctactaacttactcgctgtgtgaaaaattgtgtctatcgaagaaagcgcttgaaattagttgagatagctgggcgccacagagaacatactgtctacacaatcatcggctctaactgatagacacacgaagcatctgagtctctagtctcttgtctatggaccttatagctgtctaacggcaacataacg

SEQ ID NO: 44924 - DNA, 352 bp, Oryza sativa
  unsure (1)..(352): unsure at all n locations
agctntaaaagtaaagccttttatttggatttttgatatactagttatttataggttaagttcgatatttcactccgtgggccggctaattaatgaaagtaattcctggaggggaatcaatcgaagagattgcctgcccatgctacaattacttactctttaagactagagtgctaagctgcctccccggcaccaccactataatgaatggctcaaacaaataggagatgagaaagtcgagtagcagcactgatgggaacattttttgaaactagaatggttgatagtcaaataggagactcgcgttgtaggtaaagcttttcaaaagcctcgacttggctaacgccctttg

SEQ ID NO: 44925 - DNA, 267 bp, Oryza sativa
  unsure (1)..(267): unsure at all n locations
ataacggcgggtattatggccctaaagtttcacgaaaccactcagtcagccattttaaaatactccctatatcataataaaagantcggatgtcacatttatattatggataaaatgcctataaactcgatatatgattggataacttacaagcgtactaatgtggatctgtgaaatgttaggatcataataactacgtgtatgtgccatattacaaaatttatgttggtttgtaaacctaaccctgttcattcccaaacaaaaata

SEQ ID NO: 44926 - DNA, 449 bp, Oryza sativa
acccgacctaaactgttcttgttaaatcttcatatactgcagctgcatggcagctagggcaggcgtcctaatatccttcgaggcatcacgcgtggatatctgtgtaagatcgaatcacaagaaccaagccaatctaaggggggtgaatggttggtatacctaaaaaccgaaaacttttagcggaaataaaagttaccctcaatttcgatgagatcggtttgaccgacgtatattatccggtctgaccgaagcgtagccgccggtctgactggtgttgatctaccggtctaaccgtcgagatcgcctgccgcttgctgtcgtcgccgccggtctgactgccgtgctcccgccggtctgaccgccgcttgccgccggtctgaccgccggtagatcaccggttataaccgcgaaacccggttaacacatatcgaagaactcttatagtggat

SEQ ID NO: 44927 - DNA, 419 bp, Oryza sativa
  unsure (1)..(419): unsure at all n locations
agcttcaaactagtcaattcaaaacgtattatattatgaccattggttcagctacataatttagatataatcttctaggctttgagctgtaccgtttattcatgttagattgaccactatacaccaaagatacggtaatataatgaaggactaagctattaaaagtataacgaggaagatgtcagttctgaacacagtaattaaatcacctcctactagcatttaaggattatgaaaacaacaggtaaggaaaggctgcaaaaaagaatgtgttcgccgtgggggtgagggggttgaactgaaaggactgtttttcttctgtagagtaaaaaccaggagctctgctattcattatagcatgggaagatgtntattcataaggatagagaatctaccaagaccatgttgagggccccttg

SEQ ID NO: 44928 - DNA, 419 bp, Oryza sativa
  unsure (1)..(419): unsure at all n locations
tcagctggatccgacattagaggaagtttagaagctgtgttatacttgccgtaaatntgcttgaacagagagagtcctttntaattacaatggtcatggtgtaccaaagcctacagctaaaggggagatttgggtatttaacaaggtgaatgttgcaaagacactgcataagctgctgcattgtttatccttgtgtgttnttgacgaagtgccctttttactttntggtccagagtgatagtactagatagttgaagttgaaagtgataatgatgatttcctatctgtttctattgttagactgtttataatatacttcactatgactactcatgttcactttagcgcctagactggagttctagctcgtctgcatcttcatcgaaagactgcattctccttgcagcctgagaggcgtt

SEQ ID NO: 44929 - DNA, 418 bp, Oryza sativa
  unsure (1)..(418): unsure at all n locations
agcttggtatttcacagccatacacattgctttgtagtgttagaggtgctgtttttttccaatctgggttcagactgctctgaagactatagtcatgaactgaaagagtattagtgccattgtttccttcttctctgggcacatagttataagatggtgaatcaatagagtcttctgtctccaaaagaaatcttttagcagcagaaatctgctgcatatcactgttgaatagacttcctggtgggtgatattctgaacactgtggatagtggggagctgactgctcatgcaaaaagagagcatcaatacaattcaattatggcaataaaccatcaaaatatttaaccaggaacactccatagttatctctcttanaaagcaaacagaaaatcatcttatgctgttcacagcttgtatg

SEQ ID NO: 44930 - DNA, 370 bp, Oryza sativa
actagcttaagagctactcaattactttgtggggactttgaatatatacgaacacctctcactctcatgtgtgctcaaactagatctagattacgccacgaataaaactaaccgttgtgctattgatgaacctatcagaaggtgtaaattattgtggaaaacatcattgtacactgattggctatgattatgaccatttcgagcgctaatcttgtacatcaaacacttgaccgatagagtactatgcgcatagcgtagcacactaaattatccatattagacacatgaaaatggaagaaaagttcgaagaatatacgacgatataagatagatctaaaaataggccatcaaagagatactattcaacccg

SEQ ID NO: 44931 - DNA, 391 bp, Oryza sativa
  unsure (1)..(391): unsure at all n locations
agcttctaaggctcttggtctctgcccgatgcattgaggccaaccctgagaagatacgggctatagagcggatgcgcccccccagcaaacttaaggatgtgcaatgcgtcaccggttgcatggccgccctaagtcggttcatatcgaggctgggagagaaggcgttacccttatttaagcttctcaaacgctccggaccgtttacctggacggaggaagccgaatatgccctcacccagttgaaggcgtatctaagctctcccccagttctggtcgccccggagccagacgagcccttgttactctacttagcggcgaccccgcaagtagttagtgcggcattggttgtggagcgcgatgagaacannatctcattcacgctttcccaccc

SEQ ID NO: 44932 - DNA, 417 bp, Oryza sativa
agcttgcatatcatgatagtatgaagtaactgttctggtatcttgttttaaacattgcagtttgttgaacaaaatgtcagcataatacatgggaacataaacatctctgaaatatcgtttcaagtctttccaagattgaggtattttgttatgcctacaaagatgtttccaatcattagaagcatgtttaattaaaacactagaggcacacataaccttttgtttctccgacaagacatgcttttgaaattcactatcaaccgctagctcccaattaatgtaagcacgaggatcatagtctccctcgaaataaggcagtgcagatttgatcttacctagaacctcatcacttacctcataatggtcatgttgatccctcctcatgtctcgacgaagatgtcgatgttgagcacagct

SEQ ID NO: 44933 - DNA, 417 bp, Oryza sativa
agcttatgaactaaagatagattatttaacttaattactcattttgcacatcactagctagatgaggcaagttatggacctaaacctctaaagccatgaacctatataacactatacacctatatacacctataacacgttataacctgtaaaatacataaaaaattcacattaactctaaaaattgtgaaatcaaatgtgctagtcttagaaaacatatatcttcaccctagcaaacataaacttaataagaatcaccttacaagagcatttcacaataatacctaagtaaatcctatactataccgacgaaaacttctaaaattcataactctcaaatgaaatgagataaaatagaaattctttcacctaaatttattttagaccagtacctatttactgtgcacaaattatgca

SEQ ID NO: 44934 - DNA, 405 bp, Oryza sativa
agcttctgttaggacttcagttcatgcttcttatgtgacccagtcctgaaagcaggggcggatccaacttgggacatggtggctcagttgaacccccaaactattcggcgaacaaacaaacaaacaaacaaaatgttactagctagttgtattaagagaggtttaaggctctcaaattaataaggaggaggagaagagcttcttccagatctagaagagaagctagtatggttaacgaacgcaagcaaattccaagtcccggtgagagatgaatcggaaagagggctcaccaggatcccctcccctcccctccccttctctgctcgccagatggagatcggcgcgccctgccctgtgtgttggcggcggcgcaaaggagcggaagaggagacaacgagagagata

SEQ ID NO: 44935 - DNA, 466 bp, Oryza sativa
  unsure (1)..(466): unsure at all n locations
actcagcttgccttctcttctgaacaagctgacgattggcctatattgtggcctcgatgtctntgcgctcccgacgctcgactagtctcagcttggccttctccagcttgaattgatgctgctcgagatagacagctggagttaggacatcggctagctcatctgggatcagagcttgaatctcatgtagccgagtcctaattgagccacaatcaaccactaagctgtctaacgatgatgcctctagccgatgagagatatcttcaagaattttcttcacatcatcggataagggggctaaagctttgcttgaggtatcctcttctccttcatcaagatagtctctaatgtcaaaagagaaaagatcggctaagacatgcaataatgattgaaagagaagttagaggtcaaatagacatagccgatctgggtatttcgtgtcaaagataagcttaccaggatagca

SEQ ID NO: 44936 - DNA, 415 bp, Oryza sativa
agctttcacctgaaaagacataccttcctctggaaaccaactaattgaggctgaaataagttgtagtgctgcaaaatccagtgtgcaagatgtctcgattaaagacgatacctttttcagtcagcaatggtggatcacatgtaagatcccataataaatatgtggaaggtgtcattacggtgctgacaaagccaggagtttctgctgatcttatgtatcattaattagattacagtttgagtattccacagcccacagcagcgagaagcaatactgaaagctgctagtcatttatagcatttggacggtccagctcaagaaagaacataaagttggactcaatcaatgaatcatatctcaactggactaagtcttaaagcttcctattagattatttaagtttggaagattatat

SEQ ID NO: 44937 - DNA, 445 bp, Oryza sativa
  unsure (1)..(445): unsure at all n locations
tgctctctnatcttgctattaaagtgttacgatctttcttatggaatatcgtcgaacaccttgcgtggaagaacgggaagaacaagggaagcagataggataaagacagagaagctaatgagcaggaagaggatttgtattagattgagggatagttctgtgtacagatttctcattcgttacctctttccactcacgcctgggtatttatagacacatacccaatacccactttcagacccactccggcccagttacacgagtgttgggccgtctctctctagctgagcgtctgatagtcttgatagggttatcatcagctgtaacatgcgccccttttgggcaaccggcttgtccccaagccggcacagtatggaacttctgcttcagcacagccagatcctcccagtagcatcataagacgattgcccatcaacgcacctta

SEQ ID NO: 44938 - DNA, 310 bp, Oryza sativa
cttgcatacttaaactgaattacaaagggcgcgaccgcattcggaacccaacgactttttgctactatgatgaacatttcataccgatgctacatattggagcgtgaatccatctaatccttccaatggcaagagtatatacggtgtctagctctggtgggtatactccgtcatgacacgcattatagtcacaagcttagtttgaattatggtgcttggtgtaccaccagaagagcatttgtttcatatgcagatcatgatatgcgaatgatcaatttgatatattgactaaggtttttccccaatgcac

SEQ ID NO: 44939 - DNA, 305 bp, Oryza sativa
gttaataaaagtaaaaaacctggctatccttcccataataatggtgaaccaaaatggccataaaacttaaaattgtttacaacctcttcaaattggtcttggtacttccagtagcaacagctagtgttgaaagaatattttctgccatgaattatgtgaagaataaattgagaaacaggatgggggatcaatacttgaatgattgcttggtcacatctattgagcgtgagatgttcttgaagtcaaggagtgtgatattataaaccgctctcaagccatgaatgaacgcagagttaaagctactc

SEQ ID NO: 44940 - DNA, 415 bp, Oryza sativa
agcttctcttactgaaagtggggaaagattgagcaagaatgagtacaaccacagtactcagcaagccacaccggcagatgcataattaatgcaagggaggtacaagggaataataatatagggattaaggtttgcagcaaacagcatttaaaagtcacttatttgcccaaagccattatgtaaagacgatcatagaactacacagtattattaaacaaggccgtgaaccctcacgaacctgccttaacccaaggcctacgatgattcagaccgaactggcaacccgaccctgtgtcccagctcgttccaagccaacccaagccaaccattccatattttagttgttgagcatattttaagaattaaaacactgacttgtgtacattgctaagcttgcccatatccgatggctccg

SEQ ID NO: 44941 - DNA, 442 bp, Oryza sativa
  unsure (1)..(442): unsure at all n locations
actaagcttggatacaatngatgttcccgcaactttcccaacactatattgagatggggctgatggtcttcttctgattgtgagtatatcaaaatgtcatcaatgaaaaccacaacaaacttatccaagtattccatgaacactttgttcatcaagttcatgaagaaggcaggtgcattggttagaccgaacgacatcaccgtgaattcatacagcccgtatcgcgtggtgaatgcggtcttcggaatatcttcttcacgaatacgtaattggtgatatccggaacgaagatcaatcttggagaatacagtggcacctttaagctgatcgaacagatcatcgatccggtgaagagggtacttgttcttgattgtgactccattgagagctctgtagtcaacgcacatcctcttcgtcttgtctttcttcttcacaaaatcac

SEQ ID NO: 44942 - DNA, 405 bp, Oryza sativa
  unsure (1)..(405): unsure at all n locations
agcttgactagacagaanagatgactccactatgatacattgcacagaacaagcgcacccacgcgctgtgatcagactgtccataccaatatactcactccattccatatggatgattatatgagcttttcatcgagatccaggaagacttacactaccatatattgcatttaatacgactatgtgggggttgattttttatttaatgtgattctgtgggggtgaaaaataaagacacatgcatactttaactctacacaagcacaagacacgaacctttaactatccctaaatgcctgcatgcatgaatgccgactcaatttacatgcatagatgcgataatgctacatatcaaatgatagggtcatgcgtatgaacactctggaagtctttattaaggctata

SEQ ID NO: 44943 - DNA, 326 bp, Oryza sativa
tctggttcgcgagagagccaacaactcaatcgagccgttctttgtggacggtatgcgcaaacgacacgcagggtatttctttaacaggataaaaggttgctcagagcgtgtgaataacttcttctgtggacaggaccttgacttgatcgattattcagcgtaccctaatctgatgggttcaaccttaccaaatcggattattatattaatatgacgactcataacgggcgttggccgataattgatgatgtcatgatgaaacgcatcaatcgttgtacgggtcggtgagcacgagtagctctaattctctgcagcatagggcaaca

SEQ ID NO: 44944 - DNA, 251 bp, Oryza sativa
agcttgcattcaagttatggtaaactacatagtgtttccaataaattatagggtacaagtttgtagcatgattagcttaaccgcggtaactcataagtgtgattatgaaataaatatggataaaacaaactatgggatgccagaattgtgacatgataaagtttgatggtgaaccaaacaacccttggcatagtagaagtgtgtggtacatgcatgatggttagagtttggcaactctcctaatcttctta

SEQ ID NO: 44945 - DNA, 443 bp, Oryza sativa
  unsure (1)..(443): unsure at all n locations
tctaatcgactggtctcttaagtcttcacactctgcctttattttatatgtttgncataattgagattttatcatcctgtattccatgaaaagttataatgcattatttgttttgaaattggcttggtttgtatctagaactagttgcacataatgaggaagattaccagaactatcgtagggctgcgaagcagcattgggatatgatgaagcaatactatgagaaggtatgggggcttcatgatgattctttatgctttgatgtttatttcgttttctgcaaacagatcgttttttgttttttccatgttgaagaattntcaatgaacattccaggctgttgatgcttntanggagggtaaccagaaagaagtcgagtatcttcttggggaagtaagtaatcatttttttgagcangaactacaggacattatttaatatta

SEQ ID NO: 44946 - DNA, 413 bp, Oryza sativa
agctttactaaattcagctcattacgttaaggtgatacaagtgtgtcgagaacactctcagtctctgtacaacaaagatacacatagccaaatgaacattctcaaatttacataaattggagtacaagaagtattactggccattcattttaagagtacctccaacaagctctctatatgccccttcaagcataaaacttagcaactcggaaaaatcagtcctccaacagactggccaaccagattaccaagccatgcggctagctaatattggatagtcggtatccctgacccagcctcgttaagtgtgggtacacgccatctctctcctaacccccttgccataacttgctagcaacacttgatatgcagctggctatcgtcgttagcgtctcaagctattgtggaggtac

SEQ ID NO: 44947 - DNA, 336 bp, Oryza sativa
  unsure (1)..(336): unsure at all n locations
tctataaggcagcatggcagcaaatcaagccctacatacttatcttgttgactgaatntcacaaccactctgcccagcttgaaagacttaacagagcatacatagtcctcattcacaaacccggtaaactaaactccccatattggtatagacccatctcactgcaaaactgccatctcaaactactggcgaaagtccttgctaactggctacaatccgttcttggcagtctcatagactgggagcanacacgctttatgaaaaggagaaacatctcaaacactcttctatatgctacaagaaattctccagtgttgtcacaaatgtaagctgcct

SEQ ID NO: 44948 - DNA, 418 bp, Oryza sativa
agactttaagaagctaagagcgaagagcattactatattgtatgatactcacccgagatgtgtcatagccgaaatggaccacagactcaccttcttgagccataccctctcgcggaccgccaatccgtagatgtcagatacagtaggcccccaattctgagcgccagcaacgccgtcctgatgtacgcggcgtcgccgccgaacgagtccacgttgatgacgtcgaagtactcgcggcggaggtagcgctcccagagcagccgggtggcgtcgaggtggaaaaccgccacctcctgtccagcgcccgctcgaagcgggagaggttgccgacgatgacagggcggagcgcctctgaagcgtcttggcccaaactaagtcgggccgacctgcgccaggtagcggagcgcgcggacgccgc

SEQ ID NO: 44949 - DNA, 432 bp, Oryza sativa
  unsure (1)..(432): unsure at all n locations
aagctttactggataggtgcaagcctgaagttccagtaaaaatttacctcgcggngnttgntagtagctggtcaaatattcactataaagttgcgtcatgcaaatcgataagctggctatactttattcttatatagtactggtttttaatattatcccaatggttgactctntctagatttttataccagtacgggtctttggaagctatatccttatcatactggaccaataaagcaaaacactatgtattagaccctaatccgttaattccagcatttaagaataaactaaatatgagatataacaaaaaaactgttattgcctaatacttcagcaaagtcatgctngtggcatggtctggactgaggattataacatgttgtgtcaaataattgtcacaaattcggttcttggcacgtaagttttctt

SEQ ID NO: 44950 - DNA, 418 bp, Oryza sativa
agctttcattatccccctcattcaaacttgacctgtctgtccaaaccccctgttccaaatgaatgtttctcaattcttccctcccaaacaactgcttgtaataattataaatatgagtctgtatttgttggaaatctgaaagaacctcctccccttgctgtatagagaaaatgtggcttttcctattcctaccattagcaatcctatggaaaaaagaggtattgctttgctctcttcctcctattccctaaaattattttttccactctacattggctagaaattatatctatcttataaaaaacaaaagaaagcacatgccacctagcccacgtgcgtatgtacgtactcactctttcaccttgtagcccatctctctttccttaattttcatgctatacgttagttagaagtatat

SEQ ID NO: 44951 - DNA, 463 bp, Oryza sativa
ctttgtcccatgctccaccaaagtcaagcgcacaggctctcatcatattctctaggatttgattgactcgctcggtctggccgtctgtttgtggatggtaagcagtgctgaaattcaaccgggttcccaattcttcttgtaatttctgccagaactttgaagtgaattggcttcctcgatcagacacgatcttcttatgtacaccatgtaaacacataattcttgccagatagagttctgctaatttcttccctgagtaggtagtgtgcactggaatgaagtgagccactttggtgagtcggtcaacgactacccaaatagaatcatgccccgatgacgtcctgggcaaaccggtgatgaaatccattccgatttcttcccactttcattctggaatctgaagtggctgtagcaaacctgctggcctttggtggtctgcctttactcgttgacagacgtcaca

SEQ ID NO: 44952 - DNA, 403 bp, Oryza sativa
  unsure (1)..(403): unsure at all n locations
agctnttctccattccacatagtatgttatttgatgtaaatattggtatttggcctagggtgatcctagcgcggagtgtgtcctgacatacctcaacatccacttaccattgcaagactcaggtatcccatcaccagagaaagcgccgagaacattgttgctgcccattttgtcactgccggataaggctccactctctcgcgcgtgcatggaggaaccggcacttgccgcgtcgccgccaaagagggtgctcccctatctcacgactcttcgaatgttgtgatggcattagatggtgtgtttctggcaaccgaaggatgtggttgtgttcagtcaccaaatcatatatatagctcataatttccttcaactctgtttaatgttattcccatatgaacattgc

SEQ ID NO: 44953 - DNA, 293 bp, Oryza sativa
acacaaaactcactgactcacgcagcaaaaagacgacacttttatgtggccaaagccagcgccccgcgcaaccaacaaactagcttctacgttagaatgggaagccaagaaacagcggacgaagaatcagtactcatcgggacacaactgaactcatgaaccgaactaactaacccaataacaccagctatcagcgagagctctaaccagaaaaaaccccaaacatctcacatacgaaaagggccagcatgccagaggctctccttaatcaaaaaaccgaatcaaaaaaaaac

SEQ ID NO: 44954 - DNA, 416 bp, Oryza sativa
  unsure (1)..(416): unsure at all n locations
agctcagacagntaatgtataataattaagtcgagtttatatanatccgaatacacatgtgttcggttttccagtagtactaattaataactatataattaatctcggtgcgattacagagtcgtaatttgcagtcagctacaccgagtcaagcatggcactgaataaccaataccacgtatgccgtttaattactctctccgattcacagtgtactcaatatgaatgtgggaaattctagaatgacttacattgtgaaacataggaagtactatgtaggtcattcctaacccaagacactcgacatagttttcataaacttcatatcatcaagaaactagtactagacactactattccaatacgaacagtattattctatacttaaatttaatgctacttatctcacatgatgc

SEQ ID NO: 44955 - DNA, 468 bp, Oryza sativa
  unsure (1)..(468): unsure at all n locations
gctgtcccgctgacgtctataatatataatgttatgngtgtctgnctgggcctcttaagcaagttgatatggatacacatatccattgctctttcgcccacgtaagatgtgccatcttttattagaccacatattatgtgcttaggcacgattatataattgcggtcattttctacgcggctgtgaaatcctttatgaatttatttactccgactttacaccacatatgccatatatttccaggtgtggagaaaccatgtgtcttttatggactaaagcacgtctgtttaagcagagtgcgcattgcatatgcccaatactttggaaatttatttattcaccacatacaagcttctttatagctgttttgctatgtgaattttcaataatgtagcctacattaagttacactcatcactatttacaaagcagtcagtatatcacttggatcatattattcatggattc

SEQ ID NO: 44956 - DNA, 368 bp, Oryza sativa
caaaatttaaaaaagaattgagatacataatcatgtcatatacatccatgtactaacatgtgaatacaaatttaatccacacacgcagaaacaaaataacaattccaatggcaccaaagcagttggattgttgttataattcattcgtacatatagacgaacttgattatgcatggttttatacgctaagacacccaatacaatatttatttttctaattttttgaaggatctcttataactatttagatcgcacggaagaaatgagggcttatgtttttttttcttattggaaaaaatggtttaactatgacattatataaatgtcacacttaaaatctaattaagagcaaaaggaatttatgcaca

SEQ ID NO: 44957 - DNA, 446 bp, Oryza sativa
  unsure (1)..(446): unsure at all n locations
tcnttgatctcacacgagcaaaagaactctatctctctgtatgagagccaaagcataataagtatgggtgtatgctaaagaaagagcacttgtgcaatatagtgtacatgaagaaaagtatgaggctttatcactttttattgagaaattcgaagatatgcccattccatatgatgctttacgatttgccatccaacttggttctatgacattatggatcctggtcatacacgtcatagacatatactccatccgtcctaaaataactcaacctcgtactacgacgtgacacatcctattacaacagtatatccagattcgtatcacatcttagtactaggctgctgttttttacgacggagggagtatatgattggcaaatcttacattgcaattaattattggaagtgcaaaattctcacatcccctttttattggttcattac

SEQ ID NO: 44958 - DNA, 411 bp, Oryza sativa
agctaggtctgtcggaagaaatatcacactgtggtcatgtattgtctgttggaaaagtcatttaccaacatggttttccacaacacccactttctgtcaggagaggatattctcagcagaaaatatgacacttgtcagtacattttaaccatgatgtagtgatttctgtgtcaacctcactcaaattttcgtcaattggattagggtcagaggctgtcgatgctttgtctatagcgtggtagatcagttaaaaatttagagtggatattgcgcctgttggttcatggcgtaatgtgtctctatcggcgtgtttggttggttgcatcgtacctggctagcatgcgcgggtgcagtcgcccagtgtttggttgcttgcatggctgccagggcctggccacgctcgtgcaaatc

SEQ ID NO: 44959 - DNA, 452 bp, Oryza sativa
cgtcgagctcttctcgtatggctagtttccgatctggtgcaaatctccgcagttttgtatactggcttggcatcaggtcgcaccatgagtttgtgctcaatcacctccctgggtaccccgggcatgtcgcatggctgccaagcgaacacgtctgcattgtcgcacaggaaggtgatgagcgcgagttcctatttctcgttcggtgatgccctgatcttgacggtcttgtcagggttggcgctggagagtggaacgatcttgattgcgtcgtttggcttcggcgtcttgtttgttttgctcactttcttgggtggctcagctgtggcgggtgggttggacgtgtgctcaaccatgtcgaggctccgcttgtcgcactgcactgccagctatgcgttcccctgaatagagattgttcccttccgcccaagcatcttgagcaactggaatgcgtg

SEQ ID NO: 44960 - DNA, 412 bp, Oryza sativa
agcttgtggcgaagctcatggcactgtggtttatgccagtaggatgagacactcatagcagcgctcttcgagagagcgagagagcatcgagcaacatgccaaattaaaaacgtggcagttggctggctcatcagcttgactcctactgagggtgtcagtttatttaaaaaaccggcatcaatgtccttcatatgagtgtaatttttaattcagtgaaataaaaaatgaatatttccaaaagcatttcatgtttatgtcatcatttcttaattgaactgtgcatacagttgcacacattctcttgtgctaagagatgtaaatgaaatatgcaaagtgaacttagctcaactgattaagtttctggtagtggaatctactcatccgggtttaagttctaaaacttggtacgatg

SEQ ID NO: 44961 - DNA, 325 bp, Oryza sativa
tatctaacgatatgcatccttcaatctggctttttttgtgtccgccctgttcttgagaatattcgacagacataattgatccgggttgattcggatcaatcttccgttttacgggaaaaaaacaaatcacaacaaaatatcaagatagcgtcaattgtagcacgtctaacttccaactcaacacaagaataacatagctacttgaacttcttttccaattccaattaattctgtcattttgactaaacgaggatgatagatgaactaattcatgctagtacatgagctctcgatcggcaagtacgttgggtattcatctcgcaca

SEQ ID NO: 44962 - DNA, 351 bp, Oryza sativa
tttgagcgcccgcggagaaggagccgttagcccgctataccggtgctgtttattattgaacgccaagccttaagcgcctcttgaataatgtagatattatggatataataaagaggcgtctgttatatcatgtctgtatggtgtaccccggcttttcctgggacggggattaatacactatcgtccgggaaaagcaatttctctgcgcggaaatgacccatcgtggaagttatacgagcacttgtacccctccccatgacgcctgggcaagagggagcgaattctcgagctacataccgaaagggcgaatcgcgggtcctctctacatggtgtacggtaggcaaggctgaa

SEQ ID NO: 44963 - DNA, 419 bp, Oryza sativa
  unsure (1)..(419): unsure at all n locations
agctntgagtgtttattcagacagattattaaaccatatatctgtatatttttctctttctttttctctaactaaccttgagctagtagtatcattatttggttgttgaacaacaagaccaaaagcttcacacgcttgtacgaaatccgaattttggggtcacatgtgcttagaattagatggtccatgtacttaagggccatggcctctaatctgtaggtaattaagggcacagcttgatgagacccatgtgcttccgtaaccatgaaatgccaactgaaaaagctaagcatttcatgtcgtctgctatgtagtagtccctctgtctaagtacaaccataagttntcgcgttcaattttaatcgtccgtcttatttgaaatttttttataattaatatttttgttgctatgagatgat

SEQ ID NO: 44964 - DNA, 422 bp, Oryza sativa
tggtgacaaactcttctacttcgaaatcacaactgtctgttggtataaagacattaatagctgggtactcgacaattttaatgctcctcagttgtggacccaatggttcttctatgttgagttggcgatatggtgaagttgattcctgcagcaagttataagaagctctttaaagaaacagaggacatatcaataactacaacggatgcaaggtaaattggctgcagtactataccttggcagacttttgaatgaacagtttgagatcacgcacatctgtattgcgatatggtgtgagctgatttttcaaggtccaggactcagatgttcttccaatgatgatagcaagctggtatgctcatctatgctgcgaaagagggcatataatcagcacagaatagagtgtgtgtggtgcacacagc

SEQ ID NO: 44965 - DNA, 420 bp, Oryza sativa
agcttgcagcgatcacgtcgacactagaattggtttggttactggtttacggcttgaacaccgccgctgcgtcgtcaccgccaccagcgcaaccacctcaagatcacgttaagaaagatgaaaggagatatgtgtacgtcaagaaatgatattaagtggttttctataaaatgagataggtctttcgtgtcaaagccgatgcggcaattgtgataaggtggaatggtaacatggcaatttttgtttacgtggcaacttatgcactatgggcgcacccacctagccaagttattgtaccgctacgctggacagtgtattttcaagtttttacacctaatcgcacccacctgccaagttattgtaccgtcaacgcaatttactttaaaattaaattaaatttgctaaacaagaggatgaatg

SEQ ID NO: 44966 - DNA, 453 bp, Oryza sativa
  unsure (1)..(453): unsure at all n locations
tcagcattccgcccaanactggtttagcttgctatattgatctttctgcagaggaacgtgagtactatgaccagatggaattggaagggaaaaacaaactgcgggagtttggtgacagggattcgattttgcgtaattactcaactgtgctttatttcattctgaggctccgccagctctgcaatgacatagcactatgcccattaaacctgaaatcatggcttcctggcagtggcagctcccttgaaggtatggcattttttcctgtttgtaattctggatttattttgtgatgatataatatggccataatacactcatcaaaattaaactgtgctgtttagattgaaccatcttgttgccaaagagatttcgcacactaagcattgtatgatagtagtatttcttttgatttttcttagaactgttccatcttactgtagagtgcatact

SEQ ID NO: 44967 - DNA, 362 bp, Oryza sativa
  unsure (1)..(362): unsure at all n locations
agctnttatctccaaatgcccgcttagccctgatcaatccagtgttaatggcgctcccactctacatgtgcgttggaactactagcctgtgcaatcaacgaaatcgaaaaaaaaaggcgggggttttgtttgaaaggccaacaaaaatctggcggcttcgggcaactggggggtttggaaaaactttttcttccttttcgaccattggggattagggatcttaaactctcccttaatgggaatggcgcttcccgctcggtggatttgattgcacccgactgagctagaacgtttctggacgcgcgttgcacctctggctgacaaaaagtcactacactgctttgccactggagcaaagtact

SEQ ID NO: 44968 - DNA, 461 bp, Oryza sativa
  unsure (1)..(461): unsure at all n locations
tagctntcccattagccgagagttggctactgatttgattctccagtcgctccctcccagctttgagccgttcataatgaatttcaacatgaacaacctgaacatgtgttaacagctaaatttggtagcatctgtgtcaggaaagaggatttgatcaaagcggagtcggaggcagagatcgagtttgaaaacagagcaggaatcggctgaagtccagatcggctatgataagatcggctaggtctgagttgggtaaggtaagccgatgtagccgattccgacaatacaacttgtacgcggcatcgggttcaagttaatgtacttcaagatgattgccacgcatggatagagtcctaggaaggcaattgtatctattaattaggatattttatgtcaaattcttatagataaatgtgggcaaaagtcctgcgcatagacttatagtatcttagagtttgtga

SEQ ID NO: 44969 - DNA, 415 bp, Oryza sativa
  unsure (1)..(415): unsure at all n locations
agcttcaatcaggttgaaagcagctagctggctgaagctaggaacatgttaagatttgtttgacagcaaagaggttcttatgaaccgttgataaccacatgataaagttcttatgaaccattgataaacatgtcggggagaagattagcttgacagcaaaaaggttcttatgaactgttgataaacatgttactttgtttcgctgtttatgaacttttggccctttttccctccctacatttcatgtgtttgtttgttcttgtgtctagagatggagagagaaaaagccagataattgtcatggatttctttttctcttttcttttaagnccgaattgtcatcatcatgaatttcattgataagttccttttcttgtttcaagtggctcttttgatagaaacgctagtgaacact

SEQ ID NO: 44970 - DNA, 458 bp, Oryza sativa
  unsure (1)..(458): unsure at all n locations
taagtaccaattgctctctggttcacaactctgtgatgattatctggaagttcgtttcaaaaaggacaggtctcgagttcttgatgcttctgaatctcctgttnttgacatttctcgagttggtcgagttttctttgctaacttcgactcttctgctcctggtccttctcgttgtctcattgcctcagagaatagggatttgtttttctggcatcgacgtcttggtcatattggctttgaccacttgtctcgcattagtggtatggatttgattcggggtttgcctaagttgaaagttcagaaagatcttgtgtgtgcaccatgtcgtcatgggaaaatgacatcttcctcccacaagcctgttacaatggttatgacagatggaccgngacaactgcttcacatggatacggttggtcctgctcgggtccagcagttgggggaagtggatgtcttgg

SEQ ID NO: 44971 - DNA, 418 bp, Oryza sativa
agcttgttggctattccgattcggattatgctcggttgcaaagtggatagaaatagtacatccggtagttgccaaaagcttggtagatcccttgtgtcatggtcatcgaagaaacaaaactccgtagccctctctaccgccgaggcggaatatgtttcggcgggtagttgttgtgcccaattgctttggatgaaacaaacattgttggactatggcatatccttcaccaaaaccccactcctatgtgacaatgatagtgccataaagatagccaataacccggtccaacattctagaaccaagcatattgacatacgccatcacttcctaagagaccatgttgccaagtgtgacatagtcattagccacataagaaccgaggatcaactagccgacatctttaccaagcctcttgatg

SEQ ID NO: 44972 - DNA, 465 bp, Oryza sativa
  unsure (1)..(465): unsure at all n locations
tataaaactcagctatgattcggggattcaaattctgtgatatagttcttgttagagtttgcgtcaaatatgtttacaaagtcggttacgggttagaacttaaagttatattacgtgttcagaaaagaataagagccacactctatcttagaatctctcttaaatagagggacagatctgttataaccgcatgacgacttatcatatcgagagggagcagctaccggcagcgtccggccgcgagacattgtaattctgatactctgtaatatgtcggatcggngaggagcgcccgtaatcagtgtcctatggatgtatgcttcggctgaacctcgctaacaaatatcgtgtctcggggtcatcatcgtgtttggatctcccatgacgtttttataatggttggntctcgatgtgctatccgggccggtttataacagctctctggatgttagaacagcatactct

SEQ ID NO: 44973 - DNA, 414 bp, Oryza sativa
agcttgtcacatagaagagatgtttattgtctttatataagcaatggcatcacataggagctcaaaggcatgtttgtgttgattcttcattttcaatgcctgtaaacttagagctaaatcttataatttgattattatcagattaaaatgtcatttcgattcatctgcaacaaaaatgtttgtaatcttttcatgttgtttgtagaagtagacatgacattttctaagattcatcaatatctaaactatttgcttctctagaagagaagcacctggagcccagctaaacagtttcagctccacctaaaataagagcggagttgggtggaacactctcacaaaataaactaaaaatgtggagcatgagttcagcctactccactatagacctaatggaacaataaatttagaagt

SEQ ID NO: 44974 - DNA, 459 bp, Oryza sativa
  unsure (1)..(459): unsure at all n locations
tatctcctgagaagtacctcacatcaaagcagatttcttatctattctcccatcagaatgcaaggatttccaactattctcagcgggagccccatcctcttccccggcctcccctgccccggcctcttccactccctctaccaccacgggataacccttcaaaagctctgttcacaagttgattccgggctgctccctctccccgccccttcttgctcgcaggggtgttcccatttgtagcacgctgggacctcttccctctaaaagatccacaaagcagacttaactataatgaaatgcaaagtctgacggggaaatggaatattaggtaatagaaatctaaccctgttgttgtaggtgctggattctatggctgctccatccatgagagagtgattttcttgtcaccaatanataaaggggatttcgcacgcaacggctgatatgaacattcatcac

SEQ ID NO: 44975 - DNA, 450 bp, Oryza sativa
  unsure (1)..(450): unsure at all n locations
ntccccagccccttttatcaatggactcctgacgtctctaaggagtngtggtcgntcgacaaattcctacctctatatctatctctgaggtgtttgggttttgcaaaactccatagatatgcagaagagaaatgctattcccactccgaccaagacagaacttttaccaaaagtttattgtgatctttttgttcaaataacaattaaagtgaagcatggtcaggaacaacgaatctctntatgataaacagatccattttgcaagctcgttattacgggtagttcctacaaagaatcggactaatgacgtatacaatgcttgaattatcgacgtagatgctacatagtgggttctcatccttcagagactacgagtgttatatgagcatcccgtgacaaaaggatcaccctaagatgatcatctcatggctattgggaacgaatcaaatc

SEQ ID NO: 44976 - DNA, 413 bp, Oryza sativa
  unsure (1)..(413): unsure at all n locations
agctctaaataatatgagagtggtggtgttttcttcatatacgacataaaagtctgcgtgcatattataagattctcttcattttttttgaaaaattatttttatgtggtgtatgaaagatgaatcgcgtgcacaaaacatagctagattaaagaaagaattttgtgtatcatatgaaagatgattcacatgaaagaaatctatgctgaggtattctttttacttaaatgctagggtattctattagcatgtgaaacataaattatatttttttaaaaaaataatgaatgaaaattaagaatcttaatatgtaaagagactatgcaaaaaaaattaatatttttttgatactcctagaaagtgaattaattgtcaaccctctatgtctngaagggtattttacgcatttttta

SEQ ID NO: 44977 - DNA, 415 bp, Oryza sativa
agcttgcaagtaggaggaagggagtgtcattattctacttactctgctagcagtacatgacagtcctgttcttatgacatgggaaatcataagacggagaaagaccgctaccattttccaaaacaaactctgtttcagcagataacttctctccctcctgtttcacgcgcacacttttcaaactgtgttgaacggtgtattttttgtcataaaaagggtgtatactaaccggggcttagaaactatatttatctttttgtaacaaatagctaatgcttaattaatcacgcacttataaactgctccgtgttccgagcgcacgaaatttgctcccacatccaaacgaacacagagacaacctatgcttcagcctagctaggagtctactactgtatactaccttcatcctaactgc

SEQ ID NO: 44978 - DNA, 313 bp, Oryza sativa
tgaaatcaacaaggcagagaacgctatggatgctagctacaaatcgaagctaaacactctgaatccgaatgatgacaaagtatacgaactacaatgtgcatacaacagaagccgcaaggagaagaagcttaccaccgtagaacacattcctgtgacaggtgccaacacagcgagagccaagcagagagcccctgaatatcactatattcggcacaacaagcttatgagcataagaaagctcactaaatcctggcaccatggttgaccgcagaggcagagcaagatgcccttcatagtcctgacaggcaacatc

SEQ ID NO: 44979 - DNA, 412 bp, Oryza sativa
  unsure (1)..(412): unsure at all n locations
agcttaagcacccaaactgttatgctcagctgttatttacagcagttggcatgtagtcgattatgagtgtcttctccattgcaagcaagatttcctttgcaaattcaagatgtgctgggtgttcaatgtactccttgactccttctgtgctttcaaaagtgcactcgaatacgtgtgtgaatccatggtgcatgttctctatgctcacgtcagttcccctgcaaattaaaccgcacatttagaaactgatggtttgagaaatagatcatcaatgtagctaaatttgcaccacggaaaatgaattcacaaatgtcacacatttgggatatcggaactttaggagaaaatctactctatgccaccgagattgcattggttcaacaattcaccattgacattttcattntataaa

SEQ ID NO: 44980 - DNA, 461 bp, Oryza sativa
  unsure (1)..(461): unsure at all n locations
tgtctataaagaacttcacacaggacactaaagatttgcctatactaaagaatctttttcttcagatcatcaaaacttgatttgatagaattgcctctaactggtaaactgtgaacaacatctatagattcttttgattcggtggtgtttgaatctcctaaagatgaagatgaagataaagataaagtgtttcacgtaaaacgaggtggtaataacgcatgattaattgacttttaattattacaaacttgaaaatggattaatctgatattttagaacaactttcatatagaaagttttcgcacaaaacgtaccgtttggcagtttgaaaagcgtgccacgaatatccaaaactttatccactctttctagtggaaacgaacggatgtctcaaacaaaaatgtcacaagagtttacatctacttgatgggaaatccatacaacanactgataatgcacat

SEQ ID NO: 44981 - DNA, 413 bp, Oryza sativa
agcttataccctaccaattatgccctatgttggtcctacagaccaaagacacaccaaggttctagactaataagccataacacctattaacaaaaaaatattttttgtacataaaacttttttatatgtgctattagcgacttacaagccaatgctagaaaataaaatacaatgaaaaataataaaaaaatgaactttaaatttaggttttaaaactcaaattttatttgggcatataggctgaagagcaaacaatagagttgcaaaatgtttaggatttaaggttttgtgtattttagaaaaaaaaactgatctactttcattttatatttcaagaaagcatgggtaatagaacatttaaagggatataactaaaagcaaaatatatattattacaataaatacatatgttg

SEQ ID NO: 44982 - DNA, 411 bp, Oryza sativa
  unsure (1)..(411): unsure at all n locations
agcttaacacctcttatttgactntntcactattttgaaatacgaaaaagatccaaatccaaaatgcaaaggtcgtcttattcaaaacctcaatcatcacatcccctctctcccacttcacacctcggaacgcactgttcttatagagagaaaggggctttcccatcttcttaacccgaaatgaaatggctgatgagagggaggttccttttggggggtacccccgggaagagatccagtggagacggggtgggcctgtagctcagaggattagagcacgtggctacgaaccacggtgtcgggggttcgaatccctcctcgcccacagccttccaaaggggaagggcctttactttccccctgagggtaggaaaaccatgatcgggatagcggacgtaaagctattgaact

SEQ ID NO: 44983 - DNA, 387 bp, Oryza sativa
  unsure (1)..(387): unsure at all n locations
tcgataaaaacggatatacccaatacgtcgaaactcattgcccaagggtagagaaagaccgtttccacatcaaaaacaacaaaaactagcgcaaacatgtaatagcgtattcggaattgtaaccaagccccccccatgggttctatacccgattcataactagaaagcttctctggtccttcacgaaccggagctaaaagtgctgaaatccaaaatgctaaaataggaataaggcttgctattattanaaatgcccaaaaaatatcatattcgtgaagcagaaacataaatgtactcccattaatgtggaataggcggaactgaattagtcaattcaagtcagnattgggaatgtatacagaatttctctctttttctcggtgaaac

SEQ ID NO: 44984 - DNA, 336 bp, Oryza sativa
atggggggcagttcctaccagctgcgatgtgatgttcgattcatgaggaggacggtgatgcccgaggccgacgtggtggtggtggttaagctagccccccgactcgcgttctgtggaggaccggtggtggcacctacggtggcggaaggaggcaggacacggcttgtggaagaggatgcgtgggcgccgctgtccgctgttgcttgtgggcgtggaggacgccgactggcggatgctgggctggatggttaggttcttcagctaattggctaattgatgggctgaatgggcctatatattgtgtcttatggccgtataatatggaataagctcatc

SEQ ID NO: 44985 - DNA, 410 bp, Oryza sativa
  unsure (1)..(410): unsure at all n locations
agcttgttatgaggagcgagaagatatgttttgattatttcaaccagngtgtgcaaatgtcagaggaatgggtatgaccgggatgtctacgacgtttagcctgccaaagctatcataatcaacatatccattagaatcccttaacgcctgatcaccgacactacagaaagactgggtcccctggtcctcaaaaaacatcacagtaagtatttcattcacattgcggaccagctggaacctgaatacctaaagatttctgtatcatacttaccttccctgttagtatgatgactccgattgaactatcatctctagcattctcgaaagcacgcagaagctccttcacgggcaggggtcggaatgcattccttctatcagggcggtttattgtgatctgcaacaagaatcgc

SEQ ID NO: 44986 - DNA, 455 bp, Oryza sativa
tctgctctacattcatttctatatgcagcatgtgtgctaatctttttatgttgcaagaacaaatctgctgattaaggcatgaatagtaggttaatacgtctactgctatgcgattacttgcgtaactgaagaaaggaattaatttaaccattttaacgggtgcacctcctttgctgttaaaagaactaaaggagtctgcttttgaggaagcaactgagtgcttgtagaaagcgtgattgaatagtaaaaactgtcttaagaaagctagatcttttctcaacggcaggcttttcttgttataggttgaactaaatgtttacgttccttcatgagttcattttaacgctgtgtctatcgaccatatatattgagatctcatatatatttctaaggtgtattctccaacttttgcatctgttctgcagaggggtttactaattcaagcacaacgcttc

SEQ ID NO: 44987 - DNA, 420 bp, Oryza sativa
agctttcccacaaatgccaacggccagctgtataattgagatcaaccaggtagtgaagtacagttcaacactctatgagaacaaatctgagaaaaatagttgagacaacacgattttcatacttccagaaggcagatgttacaactataccaagatctgccttttctttcacacgagcgagagagcttacctaaaaaaggcgagacctattgacaccaaccacaactgccaggtgagtctggttgtcgatgtaaacttgccaaggaactcaacaataagcgcctgcacattaacagatgtgaagccaataacagatctagatcaattcagctccatataaacagctatagggcccagtaacagatatagtaaggaggaattattacggtgggttttctacctgcagtacaactgttatgg

SEQ ID NO: 44988 - DNA, 427 bp, Oryza sativa
  unsure (1)..(427): unsure at all n locations
ctattgataactatgggagaagtcattatcgaagcccatttttatttgtttatccataaagcttaggcgaacctttgtcttatcccaattgtcatgtttcgcgctgactcacacattcctacgctgtctaaccggatgattggacaacgcttcctaacaagatggttggacagattattcaccatcgcttaaaaataaatcaaatattgtgtttaaattagaaaatagcttaaaatatactccctctattttttaatacatgacgtcgttgactttttctcacatgttttgaaatgttctcccattactgcgnaatangtctatctgaattactccatcatgtcatccttggtacattatacagaatttctctctattcctccttcatacaaggatcggtctttttaaactctaagcatagttatcc

SEQ ID NO: 44989 - DNA, 418 bp, Oryza sativa
  unsure (1)..(418): unsure at all n locations
tgcaagcttgcaaaccacattgtacatgtagtactactngtcattatagattttccaataaacgtgcaagcggggatcccatccatctttctacctataataaattagaaaagaatacgagaaataaatggagaaacaaaaacacgacaaaaagaaaagctgatttgagtatggttgtcgctgaactgaatgcaccgggctaatcaacatggcactagtgcaaccatttagttgcttccccatgcatataatagtgcaaattggatgtgcatatgttgacctctgaacgactcatctgttctttggccgataaaaatatttaggtagggttgcatgatctatcaacacaatccattaacgtttcttattgctagttatatcaagaagatgagagctccctggctaggccacgtctcct

SEQ ID NO: 44990 - DNA, 448 bp, Oryza sativa
  unsure (1)..(448): unsure at all n locations
gtacacgcaccagcccacttgaactttttctatagactcagacaagggccgcccaaccagatagataagatacacatgcagacatgcttgtgcatcagtccaggcgaatccggcggctacccggatatatcatctgctcctttttcacaaggggataatgatagtctaatctcacatctgcaattccttttcttttgactgggatacatccacccaacaactctgaggacttactcggttcatagggttttcaaatcattggtagaaaaaaaatgggattaggatgactcgtgcactccaattcatagaaatttttccaagagatcacccataatataaaaaaaaacttatagaattaggttgtaagaatagattcctagacatggataggatctattcctatgaaatgaatgatggtaaanaaaaattcctaaggtttcaattcata

SEQ ID NO: 44991 - DNA, 363 bp, Oryza sativa
accctgatactctaactgcacgcgtgcgagcttaagagtattcgaactagggtggggggagcattcttacctcccacctactgcgcagagttgtaaatattcggatgtttaatttcttatggaatggaacagagggtctcttcttttgcaggtatgagattacgcacttgactacttatgtgctttgagagtgcggctaaattttcggctgcaatgatttgggttagctagttttggcatgtcccgtacgaagggcatgacacatgaccttacaaagctgatggctagaaaactagaatatactttgttctggtacgctccgggaaaatgattatgcaaatgtacactgtagggtattcgaac

SEQ ID NO: 44992 - DNA, 179 bp, Oryza sativa
atcaacaactcagacaataccttatttattgtttacttatgaaatttagacctaagagatcaatatcatctgctcaattgagatcccctgcagagcatgtgcggtacttcaggctgacatgtgggtccggaggattttccttcactttctactaaattaccttcaacatctttgtctta

SEQ ID NO: 44993 - DNA, 414 bp, Oryza sativa
agcttggaattgagcctgcagagcttaagtcttttctgctacggctagcgacagctggccaagtggctgaagctgtacttgggtcgcggcttggggcactgctgccactgtcggctgtccgacaaagtacattggtgcctgcaagacttgcggcggagcgggcttgggctgcacttgcggatagacttgaagtgggacaaaacctgccgaatactggaggatcggtgccgaagcaaccttggatcgccttgccgcttcttacgcttgctgctgttcttgcatttggcgaagcatgtcttggagtcatgccatgttatgccgcatggcctccatatcggcttcggcttgtgtttcagggtcggagttgacttggacttgcatggcatggagcgcagctagcgccgctgctggctg

SEQ ID NO: 44994 - DNA, 413 bp, Oryza sativa
agcttcgcagaaccctcatcgacggtggctttgcactcaatatcctcttcgccaagaccttggatgatatgcagattcctcgctccgagctaaaaccaagcaatgcgccttttcacggcgtaattccaggattatccgcaactccactcggccagatcactctcccggtcacctttggcacccgggaaaacttccgcacagagaatatcagctttgaagtcgccgatttcgagacagcataccatgccatactcggacgcccggcgttagccaagtttatggccgttccgcactacacttacatgatgatgaagatgcctggtccccgaggagtcctatccctacggagcgacatcaaacaagccgtcacatgcgacaaggagagttgcgacatggcccaaacccgcgagatg

SEQ ID NO: 44995 - DNA, 459 bp, Oryza sativa
  unsure (1)..(459): unsure at all n locations
gacctatgaaactcaagctggggggtntgttgacggtcgttatcgatcagtttcttccgtcaatattactaaaaccggagagaactggtgatgcttgcaatgcataagtatgatagaataataatattccactagtattaggtttactaaccttttgcagagaatgatcataaagtagaggagaatcgacatcaacaccaacgataaatcaatcggacgatgtcgagaatcagactaatgcatgaatgggccaagaactcagaattgacatgacaaactgggccaaaattcacaagtccgcggagaagagaagtccaggaggcaaccagccaaattgtgggctggttgggccagccccaggtggttcgcccgaacccatttctccaccgttggatgtggggtttggcagggacgctccaaatcttctcctaatggcggttggagggtacttcggacaac

SEQ ID NO: 44996 - DNA, 273 bp, Oryza sativa
  unsure (1)..(273): unsure at all n locations
agctttatggccagatgtctgatggaaatatgcacatacatatcananagtaaggcttatagagcaaggagaaaggcttcatagaaggttctgggctatanagaanagcaatacaagacgattagagactatttgcaaacattaattgacaccaacccaggcactacagcagtggtgacaaccatcattagagatgtttaggaataacaccaagattattggactattcatatgtttcagtgctcaaaaagaaggcttaataaatggttgcat

SEQ ID NO: 44997 - DNA, 411 bp, Oryza sativa
  unsure (1)..(411): unsure at all n locations
gacccgcagctgcaagcttaatgcatcgcntacacttggatatcttctntggatccggcaaaatcaaaaggggtgctgatattaagcgatttttcaactcttgaaagctctgctcacattcttttgaccacttgtacttcacgtctttctgaagcaagcgtgtcatgtgcttagcaatcttggaaaaattctctatgaacctccggtaatagcctgcaagacccaggaaactacgaatctctgaaactgtattcggttgtttccaattagctacggattccacattactagggtcgacggcaactcctctggctgagatgacgtgcccaagaaactttacttcagacaaccaaaattcatatttgctaaacttggcaaaaagctgatgttctcgtagcttctctagtgcaa

SEQ ID NO: 44998 - DNA, 460 bp, Oryza sativa
  unsure (1)..(460): unsure at all n locations
gtcatgcgaatagtaacatgatactagtacctcacatttgtcctttttgtttctctcagacaaaggtgagttgggatctgagatttgggataaatgtatatcatgcctatacttctatccagcaacttttcatgaatatagagaacttttaggtatgattttcatgggttttcattgaatatttcccctttatcttttctaagtgattcctctctcatgaactacacaaaaatacctcaggaaatacttccactccctcatttttcgagcgtgcgaacttcttctgaactgttaaacaatgtgttttttgaaaaaaaaaatctataaaaaagttgattctaaaaagcatatcaatctatttttaaatntttttatagcatgcactaacgagtcacctattttgcgtgcgcgtgagagaagatccaacctttcctctcaaatacaccctantagcataaaa

SEQ ID NO: 44999 - DNA, 415 bp, Oryza sativa
agcttcagcaagagggtactagtaagtgtattaaagttaatgtccctgtggttacaaactacgctggcagccgttccatattgatgtaatactgaattcttctgttaaagtcatgtcaccggaactcatggatcaaattacgaacagactaagaaattttgattctcaaagtcgttcacgtgcagcagctaaactgaagcaaaagcaagatacagctgccatacatggcttgagggttcaacgcatagtcaaagttaaaaaaatatcaatatcagaagctattcatgacaacggattcataggtgcaaagatgattcgggcaatattgttacataaatttctgtgggtatatgttagtggtttgccaaacgggtccaacgactgtgtcaaagaaaggtagcattatgacaagaac

SEQ ID NO: 45000 - DNA, 449 bp, Oryza sativa
  unsure (1)..(449): unsure at all n locations
ntataactaaggcgtatgaaatcagattctaatgattctttcacctaaatttatctaaaatcatcctatatctactgtactagtaccatgcatgtttgagcatttttaatatttggtgttcattcgagtttcatttaaatttgaataaacgacaaagttacagccgtggaggagtgtgagcacgaacctgatacttgtgatgagttcactgagtaaggcaagtcctattcaattcctcctccgatcatgttgtatgtctatattttcgtaatgcaatattgtctataacttgtatgcgatgttgaaaaaattgggtaccgatagaacaactcctacttgttacattatccaccttgaattattgttcatattcctgttgatatacctaggatgccttgtagtagtgtccaagtaccaattttagtatattcgagatactaatatagcta

SEQ ID NO: 45001 - DNA, 412 bp, Oryza sativa
agcttgaatcaacaatcaaaattcatgagttcatacgatttataatgcaacatcttaacaagcacataggttgaagaataaacactaaacacatatacatattgcatttatcactctttctcaaataacctttagcacaaaataaccaagagaattttttcaattttttcttttcttgagcctttttgctcatatttttctcttttattccgagtacgtccctgtcgtcgagactatttccagggattcggcacccattattttgctcacatcgaatacattcttgtcgtcaagactgtttccaaagattcggtattcaattttttcatattttgtattctctttttcacaatgagcaattaaagctattggaggaataacaattcaataaagcatatatatagagcattta

SEQ ID NO: 45002 - DNA, 457 bp, Oryza sativa
tcaagctggactatgtaagtcgagtatgtgaattctgtttctcttacaatccatacgagtgcccttcaattgtcgtataactgatctcgatatactggtagtaatcaacgtttcaaaagtttagacaaatggttaactaacttgcatggcatcaataacagcaagtcagcaacagcatgaaagctgcaaagcttcatttcagtggagcaattgccaatcatcactacttacaacaattagcaaccatccacagatcgaaaaactaccgttagcatagactatgaacccctttgtctatgtcccataaatggattattcgtacttctaactcgactgacgcggagaggcaattcattcttgccaaaatgccatcatatgctcgagcaatgcagaatgaacagtagatctcgattatgtacgcatgcatagtaaagtacaattaccaatggtctgaaca

SEQ ID NO: 45003 - DNA, 398 bp, Oryza sativa
  unsure (1)..(398): unsure at all n locations
agcttaagtcagcaataaagccttttaattgtgtatgaaacaccctccacagggtatttggctntaaatagagtttctttactgacaataaattttatgattcaactcatgctattattcatttctgccccaatgctgagaacaattaataatcgcaccctcatccccacctatcaacaactcattcgtactttcctcatttccaccactccaccgagccaactgatcttcttttcttccactacaactatgccgcatagtcacccaaccgatgagaaacacgactcgtctacctcatcgatggtcgtggccagtgtcgtgcatcctttcctttgcagctccttctctttctcaacagccaattgcctttccccattcacacactcaaatctgggggt

SEQ ID NO: 45004 - DNA, 329 bp, Oryza sativa
  unsure (1)..(329): unsure at all n locations
cacacattgaatgtctgtggactttttgaacttggtcaatgaatctaaatgggattcaccgaaatgtaaactaagggaaattggatggcaatatttggaggaatctattcgtggagttaagggagatgaaatctattggaagatctttgcgggccttttgcatttcgataaacaatttgaatatagaattcttaaagtcaaataagcttgaaatattcttaaaatacaactaaataagcttattttgaaatatacattcgacaaaacataaatatatacatgctccaatcttatacaattcantcacaaccaaacttaaaacttgtcca

SEQ ID NO: 45005 - DNA, 418 bp, Oryza sativa
agcttgtccagttaattgcactgattgcattgacatcctctacaaaatttaggtatgccaagcttacatacctttgagtagttgggcacaggaaaacaccgattgatcacaaagagcacaaaacggcgaatgaaattgtcgtcatatatacctttgtttgtttgaaaatactattgcaaagaagataattttatatgtgccccttgcttagatgctgtcttgaattcatcaaacaagtccatattcttggtctttggtggttcaaatatttcttctccttgtgatggcaggtcaagcaaatgctcagcgtccctactggatagactcagatagctgccttggatgttgaatgcttcagcctttgtatcaaattggtttgtaatccacatgcacaaaatacggtgtacatttatcctat

SEQ ID NO: 45006 - DNA, 354 bp, Oryza sativa
gatggacaataaggcttatcaaagttacaaaacataaagccaattaaacccgagtatctattatctaatactgttctatgccagtagctcaacaataacatatggatcatagtagaatgaaccgacctgggaagaaattcttgatgatctgccaaattacacagcatcttccataatctgagtagcaagctcccttgtccgtgccaaaactagcactgttggaccaaaccttggcgctgtttgcaagcgcttaatatgcataaatccaggaagtagatacccaagaagttttccagattctgactttgcaataactacaacatcttgacactgcaaggcaaatggccatgactg

SEQ ID NO: 45007 - DNA, 321 bp, Oryza sativa
  unsure (1)..(321): unsure at all n locations
agcttcttcgacttccgaagactacagatattaacttttcgttcgcggagtactctctggcttcatattaatccctaggtttacctgggttcttaactttggagacgagatgaatgagaatttaagctttaatatccaactctatatgacttgaaatttttttgctgagaacttangctgaacctcacttcctaacacgtaaatacagacaccggtattgcataattaaataagtatttgttaaaataaatttgaaaaatggattctatgatcttttaagcaaactttatgtagaaaaatattgtcaaaacacaccgttta

SEQ ID NO: 45008 - DNA, 459 bp, Oryza sativa
  unsure (1)..(459): unsure at all n locations
ntatagcgcaatttccgagaaaccacttgagatggattcttgttatattgatacacatcatacctccaatcatcggctgatattgtggcgacttctactttgacatccttcaccattggcttgaaccctgatgccccctgagccaaatcattaacttcaacattctgctcccgagacatatgctttaaagttaccagccgaaatccatccatctactctcggcacttctcattgtagaccatcaatgtatcattcttacattcatattctcctgctaattgactgatcaccaacaaagaatcacccataattttgatagcatcggcttcagcttccttaagcaattgcaaccccttgagaactgcttcatactcagcctgattgttagttgcatatggcttaatagtataggcaaacttgaaacttgccgcctgaggtgaaatgataaccaagccgata

SEQ ID NO: 45009 - DNA, 414 bp, Oryza sativa
  unsure (1)..(414): unsure at all n locations
agcttgtttgtatgttttcctagtaacatctttcttatcaaggatntgagcctcttcttcatgtgcttgttcagtggctgccttcacatgcgtaagagactcttgaattgtagcaatctccttgcgaagctgatcagccttttgcttgtttgtttcagctaagtgcaatgattcctcttcctgctgtgctgcagccaacctcatattcaatgaagcttcaaaatccttcttgagctttctaagctcctgttttgctgcatcaagatctgccaaagcaacaacatactgttcccttgcaacatccaattcctgctttaaagggccatcttttccaacagcctcaagcgagtctccaccttcaagctgctttgttcgagttttgcatcctctgttgcttgaataaccagctctttg

SEQ ID NO: 45010 - DNA, 456 bp, Oryza sativa
  unsure (1)..(456): unsure at all n locations
actaagcttaaataagccngctagtctaggctggaaattcttctcatgttataggtagacacacctattgggtggcatggggcaacctgcctagctactgctcacgtcgcctcacacctcggacccctctcatactttctggtctaggcttatgccacatattatctagtacacaccattggcttagtccattgatcagctattctagcctttcaagcatgacaaaatttttgattgattcatcttctgcagtccacactcgtcacgtcgcgtctttggcatcattcgttcgtattctcactcggtccactaagcctggacacaccgttggtgccgcggtccacggaacgagcttgcaccgtgtgcangcgcgggcgtgcggctcgatgattgtgcctttgttgcggcatggcaaaagtgcgccggcgctatcggnctatccaaacgggtgcagca

SEQ ID NO: 45011 - DNA, 225 bp, Oryza sativa
agcttggtcggaagaactgccgaacacttactctgttgccaggatgaaaaccctgactcattgtgctagtccaccggttgtggtggaccacattcgacacgagtgttttgtgaagacttgtctacaccagctgaggcgactgacaccttatacatcatggcaatccaccaaagcgaactgctccatgacccggacgatcgtctaacgccatgaaaccagcaaatt

SEQ ID NO: 45012 - DNA, 431 bp, Oryza sativa
  unsure (1)..(431): unsure at all n locations
ntagatgcgcgccacnagtagcaaggaggctcacttctctatgggaactagacgagacaatattagttgggggcggtgatacactgacttattaatgataacgtggccactcttggtcaggctttatagtgcactctgatacatgcgtacgctatcaattatctattacatgctctaagcctagcatactgatccttggttctataatttctatccagcgacattgatgtgaaaagtaaatcatttactagagaactaaggagcgcacgtatcattaaagcgtgcaaacttttataccgtcagtctatatggcgctagatctcgcatacgatgctctccgacgaacgatatatgagatcttggacggatagaacattctgaaggactgaagctagataatcctatccatgcagaattgcttatattctata

SEQ ID NO: 45013 - DNA, 444 bp, Oryza sativa
ctgatactctaactgcagcagcgcagcgcgcaactgttagaagagcggctaatgttgggatattctgctatagtcagaagctctcccaaacaggtgctacgtgtgtctatcagtcggcgaactctatgccatcttgttcataaaagcaatttaaacgtaggtgtaaccttcagacttaccatgtcaatgaaggttcttgattcattccaagcgctgcataaagctcaaaggccaagcttctttttttttacaaataatggtcaaacgtatcttatattaaaaaacagagagagtagtgatagaatattctcattattatttgtgagccaggatttagagaaaacgatgtgtcacgtgataccctatgattaagcacaaaattgaatgggtgaaagtgaatgggttagagggcacggtcgagagataatcactagacttgaaaga

SEQ ID NO: 45014 - DNA, 384 bp, Oryza sativa
  unsure (1)..(384): unsure at all n locations
tatanatactcaactcttgtccataacaantggatggtgacatctgataaacacatttttcctanataagacatggcacgatctctctctctgcgtgtattaattccttcctgctgcctccctaatataacattaatagtccagactttgcggttttacaactcgatcttagaagagttgaaaaatacagagaaggcgatgatgatgcatggtgctgtcggtcaaggggacacagaggaggcgatggcctatattcaattatcaccgccagcttgccggctagctactaattaaggagttgtttccaccacctcactagattattaccactgtttatttactacacatttctataagtaccttctcttataaaaaactgaaatg

SEQ ID NO: 45015 - DNA, 370 bp, Oryza sativa
attggcacaccacccgggcacagggctacatctcgcaatagcccacaagcggctactaactgtctccctataagcaacacctgaaaactgtaatatagatgcctcacacagaatctttgttcagcaagagaaaactcccttctcacagctggaacaagcccccggaaacaaactataaagaattatacttaggaactaaaacgtaacttatgcatattatgaaaaatcagacgaagtcctaccttatgcctaccagtcataactgtccatgcagatgtactctcaatgccaaagtctttcttgagagagtcaagaaaccgactccagctgtcaagctctcactacaactactgcaatcgcaatgggaaaa

SEQ ID NO: 45016 - DNA, 273 bp, Oryza sativa
aatcggaactacgatcacccaagtgcgcacaattgctcatagcattacattctgcgatgaagctcttcagagcccccatagtctctagatcgaaaacttcgaacgcaactacatttgagccttgaaacaggttccctcgataaacataaccatatcttcctttgccaattaaattggactcggagaacccttcaattgcctcagcaagctcattgcaaggaacttttggaaactttctaccaaacgaaagcaaaaatgagctaatcccttcat

SEQ ID NO: 45017 - DNA, 412 bp, Oryza sativa
  unsure (1)..(412): unsure at all n locations
agcttgtgcctgaggagagcttttctgaatatgacgctctggttgtagttnttcaatatatatagattcaacacctgcctgcaatctatccttccttgaactagaccttgcagcggttttatcaaatgtctcattgcatgattcccccctatgaattgaatgggtaacaggctcctttcgtgccaatgtgtgttggactgctgctggggagtcgcttctgaaagaactgaatgtctcctctcttggaactgaacgaatggagcattgagctggtatctgctctgaacgaattggatggcgtctttctatttgtgactgctgctccaaattaaataaataaatcaaaagattagatccatacctagtggagtcagacaagaacattgaaggggagctcgtgatcaaatagatt

SEQ ID NO: 45018 - DNA, 449 bp, Oryza sativa
  unsure (1)..(449): unsure at all n locations
tcagcaacaggagataactcgactgcaccgcatttttattatcatgtgtaataaaaaataattcagcatgttgaatgaaaaccaaaggtagaatatagttcgaaaccaacaaaaaaaatattcctttcaagccttaaaacacacctgaggaaacatgatacccattcatccttaacaggcgaaaagccattgcacatgttgttatgtccagcataatttcctcatctctttctaaccatgaactgcaaactagctaaaattaagtttgaactattaaagatagataaaatacttactcaaagtcattacacgtatgttgtgtctaggatgctctntatctcactgacaaaatactgagaaattccatcttttaagtgcatcccccataaagctgaaaatatgttagtggaacactgttggactgaatggaccaatgtattactatgatt

SEQ ID NO: 45019 - DNA, 411 bp, Oryza sativa
agcttgtcataaacaaaaagttgaatatatttttgtgatacatcattaaaaacttatgtcaatacacatcatgtgttttctttctatgctacatgctgaacctccattgagttttgatgacaaatttgattataataccacaattgtttcattagtcacttaattttttgtagttcacaattaacatatttgtttaaatatatcatgcctttttatactttatgtgttatgtaccacatgattttacctcttatgttatggacacaagattcctatgtttgtcccagaaactattgtatcttacttggtaatcctactattttttgcaatattacatgcattgtgttcacatataacacatattgagttacttggtaatgtgattctgaactttttcaattggatatttga

SEQ ID NO: 45020 - DNA, 420 bp, Oryza sativa
tataaatactcagctacttggtgctgcctataggaagaagagcgcattctggtttatgaatatacgcccgaacaagacgtgtcatgacttgtacatggtctagacgggagatgttacatatcacttgcaactcgtttgaggatagctgctgaatcttctcaagcacttggacacttgcattcgttggcacgtcctatccttcatggggatgtgaaatctgccaacattctgctaggtgacaatttgattgccaaggtcgccgattctggttgctcaataatcgcacgaatggacgaagaagctctcgtggcaaaaggtacagacgggtacctagattctgagtacctgcaatcatgtaagcttactgacaagagcgatgcttatagctctggtgctgttcttggggagcttctaacaggt

SEQ ID NO: 45021 - DNA, 408 bp, Oryza sativa
  unsure (1)..(408): unsure at all n locations
agcttgctgcgtcgagaaatccgctcggtttcattttagnctagaggcaactcttgcttagtcaaaaatttgatgaaaggctctctccagtcggtgacaatcatgctgacttcttgagtacctgctgtctcgattacatcctttcttggtactgatggctcataaaggtgctcaacaaaaacatttgaaggaacagcttttcgtattgaaccaaagttcgctagtctgtcggccgcttcgttgtcgtgctgaagcacatgatttaactctaatccatcaaacttgtcttctagcttatgcacttcttgtcggtatgcagccatattatcatcgaggtatgaccattctttcataacttgattgacaaccaattgggaatcaccgtagactattagacgctgaatccct

SEQ ID NO: 45022 - DNA, 462 bp, Oryza sativa
tatgaactaagattagattagctaacgaagatactcattttatatatcactacctagatgaggtaagttctggacttaaacctctatagccatgaacctatataacactatacacctataacaccttataacttgtaaaatatataaagaattcatattaactccaaaaattgtgaaaccaaatgtgttagtcttagaaaacacatatcttcaccccagcaaacataaacttaataagaatcaacttacaacagcatttcacaatagtacctaagtaaattctatactataccgaacaaacttctaaaattcataactcccaaataacaagagataaaatagaaattctttcatctaaattcatcttagaccagtacctatccactgtgcacaaatcattcattttagagtatggtggatgtttcgcatatttcgggttttaattgcataacatgcactttg

SEQ ID NO: 45023 - DNA, 435 bp, Oryza sativa
atactctacactgcacgcatgagcacgcatacctacttaatatctcggtcgctgtaagggcactatgtctgcaagctccatccctctccctctcttgtgtaaaggtcctcctgtgcatattaaggttagccatccgccggctgggcttcttgctcgttcggatggtgtccgagcaaaaggttacttccggcaaagcaatgttctgcgacatgcaagtggacatgggattcgatccgggaatgagctagcgtctaactttgagccctctgcgtggggggatttctttatcaactacgagcccaagcccctccaagcatatatatacatattttatttttcgcgcggtatatgtttgattctaataactctgataattaaactatacacctttgatatcccagataattttgatacctaagtgttctcattatatat

SEQ ID NO: 45024 - DNA, 457 bp, Oryza sativa
  unsure (1)..(457): unsure at all n locations
tagctcattgcagcanaattaaataaagcaatgttattatactcttgatggtgaatggccattagtacagtaatagatgtacagtactaacaacacaggaataataaataaatcttaaaagagaacaataataaaatataaactgcatgtgccattagttgggtttaattaaaagagaaagagaggagaacagttctacttttccaatatntttaaagggcttctatttgtaaccattgggcataacctatggtcaaggacgctctgataccaatttgtcacgcccggaatttctatccaaaattccaaatgcttacatgtgtagaaacccttgtcgaggaatcactcgaggtacacaataacaaattgataatagagtacaattattactctaattaataagcaaataaaatggtactacagacgtagatagctnctctcaatcaataaagttcta

SEQ ID NO: 45025 - DNA, 406 bp, Oryza sativa
  unsure (1)..(406): unsure at all n locations
agctctgcagaaacaagttccgcccatgatgttttgagactgatcttgttacacttccagacctacataaaccaggaaaaaatcatcatggtaatatatgagcccgacacattattcaatatataggtgcccctattctcgtcgatgatattagcatatagttactgatagcatgcatgacagcagcacataacaagcaacagcaggccaaaagatgaatgcaactctacgaaaataataggcagatgcaatgcatcacttccacagaagctggatgggtatatgcatcgttactaccagtccattgctcccttattatcagcataagagcagctcactgctagagcaaagctgctatatttgctatctgctntctttgacaatgcagacatgcttcctccatttg

SEQ ID NO: 45026 - DNA, 456 bp, Oryza sativa
  unsure (1)..(456): unsure at all n locations
ggctgggggggcgcatccgctctatagctcgttacttctcgggggtggcctcaatgcctcgggcagagaccaagaacccgagaagcttacccgcaggcacgccgaacacgcacttgtcggggttcagctttatgcgggcggtgcggagactttcgaaagttttcgctagatccgagagtaaggtctcttggttgcgtgtcttcacaaccaagtcatcaacataggcctcaacattacgtcctatttggctacccaaagaaattcgagtagtacgttgaaaagtaggacctgcattctttaacccgaaaggcattgtcgtataacaataagttcctatgggggtaatgaatgcagttttntcctcatcctccctagccatgcgaatctgatgataaccagagtatgcatctaaaaaacacanaaggtcgcaccccgcggtggagtcgacaatctgat

SEQ ID NO: 45027 - DNA, 410 bp, Oryza sativa
agctaggcatccttgtactcacttgtaccctcatggatctccgccaacttgttccaaatctcatatgcggtctcaaagttgctcactctatcgaactcctcttggctcaaagagttgaacaaggcattcatggcttgggcattgagttggaggttgcggtgatcaatctccgtcaagggtgtgccggtgatagcaaagcctacatccacaatactccaaatatagaagctcatagctttgaagtgagtagacattttaattttccaagtggagtagtttgtgccattaaacatgggagccttccctacatggttcacctcgttcgacatcttctctctatgcggtgaagcccaatcaagagagaccatactctgataccacttgtacgatcgagatgtcgactagagggg

SEQ ID NO: 45028 - DNA, 457 bp, Oryza sativa
  unsure (1)..(457): unsure at all n locations
nagtactctgtggcttgtacaaatagagagacatgtactatcatgcattgttcaaagctgctcattgctaacttggcagtggtagctttgcaactcacccacaatcaactatcatggatggcttgattttataaaagaagtacacattttctgcaaggaaaattgcaacatttgtccttaagcggaaagcacactagcccacacatatttngccttataagaataatcattccctctagtaatattctcttccctcatggtcaccatttcaagtgcccgacgcaaaatacgagactataacgtccagtgaatagagcatggaaattcttctagtaacatgattgtgctctgcttgctacaaccaccaagattgtcaatctgtcatgcggacatcttctaatcacagattattaacagctntattatgttatgtgtccatcgcaatatggaatgtcat

SEQ ID NO: 45029 - DNA, 406 bp, Oryza sativa
  unsure (1)..(406): unsure at all n locations
agcttccttatgcttggagaagagtggggcaacacgtttatccccgcttcgaaaggctgactgcgaccaggcacgcatagtgacacttagctagagttagttgtgctctcgagtacttgtgttggaatcgctgatgtgtgatggtgtttttttttctaaacataatctcctcaagctataatcttgtttcttcctattatatcaacacgaaacttcaccttcacacggttttttttaagaaaaaagagagtctagcttcatgaatgaacgattgcacgtataccctaaatatgaactttgtaagcatgacccacataatctattgcccattgtttggacatatntgcaaacgaaaaataatttgtaaataaaacttttatatgcgtgttcttagtgatctaaaagc

SEQ ID NO: 45030 - DNA, 465 bp, Oryza sativa
  unsure (1)..(465): unsure at all n locations
tatacaaataaaaagtagattggacctacgtacagtaaatcatatgatttaaacaactcagcaagaaatgacatgcagatgatcacgatataaaatatgggccctcatgaaccatcgagaacctctaactaagagggctgaaagtaagcaccaacacatttctatcacctcttaaatcttgtcactatcgatactcccaaagtcaaaatccaaaaatataataatgtgaaaatattatgagtacacaaaattcccttgttactgaaaactaaccgtctgccccaggacccagacacagacagctgttgcaccatcttgccagtttcctatagtataataaggaaataggtagaaattcagtagtatagagtaaaaaatcatatgaaacanaaatgaaactaacaaaatttacataatagagtttcaaaatctacctcaatgctgggcacaatacaatgtttatta

SEQ ID NO: 45031 - DNA, 417 bp, Oryza sativa
  unsure (1)..(417): unsure at all n locations
agctnttcggtcacggaaaattgcgcagttaatgtgaacgaccatttgacatcatcgacacctcttcgcacggagcaatcacactccgcgacgactcaagtaatatattcaaagtaaacggtcaacgcttaaagattttccttgaaccaaatgaaactttagatgaagtggatgttattgaatttatcgattataaaccatgatgatctcatctattgcatgcttagaaccctgtatagttgtcattttttgtgcctagcttaggaattagtgggcctaggaaagaaaatggaggcctgccggaccaaccagggttcggccgaaccaaggcggcgcctgttcggccccgtttttgaatggtagtctcccccgctcatccttagtctgtttagatacgagtntggaggtatagcgatc

SEQ ID NO: 45032 - DNA, 461 bp, Oryza sativa
  unsure (1)..(461): unsure at all n locations
tggtattacgtngtggnttagatgaatgcgaagaagcttattaattgaggtttttatgtgggcttaacaaagaaattcatgacatgcttgattgtcaaagatatacatctctttctcttttgttacaacttgcttgcaatgctgaaagtaaaatagaaaaggatatgaaaaagaaacacgctatgtctttgcctccaattactaactatttgcaggaagtgcgtaatcacgaaaaggaggagagagacatgaaagagccaccaattccattgttcacactcaagttcgagacacctccatcatctaaagaggacatccaaggtaaagtaaatggtactgaaattaatcaaggtgagtgcattgttaacgaagtaaatttgtccacttttcatgcaaaagtagagcaaccggtagtggaaccaaatgctggaattcctttgtcacaagttgatttactcgct

SEQ ID NO: 45033 - DNA, 416 bp, Oryza sativa
agcttgtcagtttcatagcaaacacacaaagctaccagcccaagcactgcaaaccatccctctcacttggccgttctcgtgctgggggctcgacatactcggaccattcccacgaggacagggtggctacaaattcctgttcgtggcgatcgacaagttcaccaaatggatcgaagcaacactcacaggggaaatcaaggccgacaacgccatcaaattcattaaagggatattttgcagatatggattgcctcaccgcatcataacggacaacggcacccagttcatcagtgccgacttccaggattactgcattggactgggagtcaagatctgcttcgcttcggtctctcaccctcacagcaatggacacgtcgagagggcaaacggcatagtactacaaggaatcaagaccc

SEQ ID NO: 45034 - DNA, 481 bp, Oryza sativa
tttaggacctataaaactcagcttctatggggtgtcgctattccggtgggacacttgttttcgcacggaaaacagaacagtccattaaggtgggattatttaagtattagcaatctatttttttcaaaaatagattaatttgattttttaaagcaactctcatatagaaattattttttaaaaaacgcattgtttagcagtttgaaaaatgtgcgcgcggaaaacgagatatgtagttgggaacctgggagaaagaactcagctataatatccagaaatcaacatctgattctcacatgttatggattagctgcttaattcttagccagatcctgtacatgagacccagcctagctaattatgcacgaatacattcatatgcatcattacgactatacacattggtctatgaatatgtctaattccatttcgtcaaaagaaaacaggtcccacatacattggtcatgatgtctggaattgg

SEQ ID NO: 45035 - DNA, 442 bp, Oryza sativa
  unsure (1)..(442): unsure at all n locations
cctgtatatctacactgcacgcgtgcgcgctcgatcaaccatcaacaagaaatcctaatgtgtgtaagggcgctcagggggatgcaaaaatagtgcttctagatccattactcgttctacgccttatgttcttcttcgcatccgctattttggcacaagtttttttggntctcaaaaagaaacagtttgaaaagggtcacttgtacgaaatgaatttctaggtcccgggatttcttaccatcaagttggtgaaaagccgcgatttattggcgactgctagaattctctatgatccattttggaaatcttttttttgtttagactattttttgcttgcgagatgtcttgtccgcaattccttatttctatcatctcatgcaaaacgaggagaatgcaaggcaagggcgagaacaataaaaggaacaaatccttttatgaggga

SEQ ID NO: 45036 - DNA, 415 bp, Oryza sativa
  unsure (1)..(415): unsure at all n locations
agcttggncctgagggggagccctctatgactcaatgactgggcccactcatcaacaagtgacaaaacattatgtacctaatccctgtatgctaggacccaactgttagagcttagccattgtagtattcaccagctaactataaggggagagccaaggcctccgaaaagaaagatcaaacctaataaactctccacacattttgtaaaacttgtaggttagcctttaaatccaagaacaaaggaagaacaccatataagtagggtattatgtctagtatggcccaaatgtgtataaccaacattggcctatttactacgacaacaactagggatgctcccgctacccgcataaaaacccgcttgttagttcatttcccacatgggagtacaaaaattaaaagaaaaaatgaact

SEQ ID NO: 45037 - DNA, 409 bp, Oryza sativa
agcttatggtggcttatgcatatttggcattattctggaatgaactcgtgaaggcttattcaatgaggaactcatcctcatatgcaatcacttccctttttttttactttatttatatgataaaattgcaagtaatagtaaccatcctttcataagtatgatcttctacattctagttctccgtgttctaccgtctggcttacctttttcatgttacattcagatcgaataactctgtaaaattacatcaatacttctgcatattatgattaatatagtagacatccctacatattaattaccacatacatgttgaacgagtagatcaatccatctacctacccgcacaattttatattacaaaaattttataacaaacgtctatattattatgatagcattcttcaag

SEQ ID NO: 45038 - DNA, 460 bp, Oryza sativa
  unsure (1)..(460): unsure at all n locations
ntgcgtgcctcatagtccaacgtataagccaaacaacaattatatcttgagatgcgtgntgctttcaatttgagagtaagataaattttggacaagacgcatcacttctcgctgtaaggctcaatccacgatgagttcagtaggcgttcgaccagtgcctgatacagcgctgcgttcgatcaacaggataacactggccgcctactccaaaactttataacagatatagacgcacatttaaagtattaaacatgaactaataacaaaacaaaatacacattccgcctataaatngcttgataaatttattaagcataattaatccgttgctagcaaatatttattgctgcatcacattgtctaattatagcgtaattatgctcaaaagattcgcttgcaaatatatgtaaactgtgcaattgaggttttcttccggcatatgtaatggcctatgcatatg

SEQ ID NO: 45039 - DNA, 373 bp, Oryza sativa
agctagaagagggaaacaaagacactactttgatgaccatggccccccgcggcgacaggttagcctctctgcctatctaccactgcccacctatgactatgagaggctaggacagggaaaacatgcttcgcaggataggaggatggctgccgttataagaataatatatgccggaaacataagaactaccggacaattttaacatggaccattgaaatttgtgacgtactacgagtaaatctttaacttctatcaaaacttttattgatggttaacatcaagagttgttgaaaacttaatcataactcatgatatgttaatcgaaaatattaacagaatactcataacatacataattaaacgcatctatcca

SEQ ID NO: 45040 - DNA, 410 bp, Oryza sativa
gagctggcactgctgcacactatatattctgtatatctcacgcagcaacgattgggctggagcggcagaacccaatgatagcgggagccgaccatagtaaaaagacatgatatttacatagacattacaacaaacagatcaatacttggagccggccatgcattgaacaccaaaagtttctttgatattcatgaaagtacacatgatatcgacatattgtaattagtgtatatttttcacaggagatgaattattgcaagccgctataaactgacagtcagataaacgtttagattatagtggattcacaaattaacgttcataatttaacgggtgagatataacacctatatatatatataggaagtagaggtgtagtgcttatataggagtacaaagcgccctgctcg

SEQ ID NO: 45041 - DNA, 455 bp, Oryza sativa
  unsure (1)..(455): unsure at all n locations
ttcattaacttttcagttggacttgaagggcatgactatgtgttgccatgtatgaccaggtatatgtgctgtgtgctcatgctaagataatatgtgccttgtgccttgtgcagatgagttcatgctaagataatacttcctccatccaaaaatgttatataacctacgattagatggagacggaggtagtacagtacttgcaagcaattaaccagaacgttcttcggcgatgactacagctgacagcttctccgtatgtgacattattcatctcccggacaaccggggcacccaacgagtcaatttcgatgtgaaccgggtcgtgcgtgtatactggagcaaccctgactttagtcaattccacacctctcgctgtactggaatctatctcctccattcgaccaaaaatagatacctctgtanggtatcatatgcctgtntagttctctcgtata

SEQ ID NO: 45042 - DNA, 409 bp, Oryza sativa
agcttaccgattgaataatgatatgcaagatataagatctcatgaaacaattcatccgtgttgctttgctgaacatattttccagccagttaggataatataaagattaatctacttcaaagaagtataaatgataacagcgagttgtatatctgtagacaaaaggtgactcgtcaactttttccttgattagtgatagcttgtcgatcttgcataaacatattgcagcctgcagggaatgtgaagtttggtggcaacttgtatgatatcacttcagagagacaagcagccatgcaccggatggccttggaaccgttctagatgttgacttagcatttattggataaaggcacactgttcgagggcaaaatcttccactctcccgtatatggatttgcaaggacttctg

SEQ ID NO: 45043 - DNA, 460 bp, Oryza sativa
tatcagcaaagtgctagcataccgggttcaaggggaaattcatgagttaattgatccaatgcaatctgcattcatcaaaggaagatcaatcacggagaattttatactagcttctgacattgttcaatgtgcaatcaaaaggaaaaaaccaacgattattctaaagcttgacttccaaaaaagcttttgacacagttaactgggattgcttatacttggtcctacaccgcagaggattcgacgacacatggatcaattggatcaaacagattttggaaactagacaagcacacatattgatcaatggatcaacaggcgagtcatttaagtacaggagaggggtccgtcagggtgaccctctctccccatatctcttcatcctagtcgctgacgtcctacagcaaatgatacagcaagccttccactccgagtagttactccacccactggattctcactt

SEQ ID NO: 45044 - DNA, 407 bp, Oryza sativa
agcttacaccatatcttaagatcccatgtttccattttttggatgagcctttgccatgttttgcattccacctattaaagttaaggtgtaagacacataaaaggatcagaataaaaaaattatagaaaagaatattttcaattttcactaccttaacactttctggcaatagccaccaatgcttgattatatttttgcacagctttaagtagtgatatggtttcttatcatcgtaaccagatgggtggcttcttgtttggtcataacttatcatctcctgaagaggggatggtaaattccccaagtaggtcacaggtggccactgtatgaggttgttaacctcctgctctaccttatgtgggttcatacacaagaccttcaacaagtatttccccttctcagtttca

SEQ ID NO: 45045 - DNA, 449 bp, Oryza sativa
  unsure (1)..(449): unsure at all n locations
gctcttactgatgaacaatgtcttcattttttgtctttcattgcattgctgnagggtgacttgtgaacgtgtcatctccgtgacccttcaagagacatacgatgatgatgaatctatgaagatgcaattatgatgaagaaggtaacctacactttatttactaatgaatcatgtacctttgttgttcctccgacgttgatgtagttggcaacatcgacctgaagatcatctgcaacttgatccacttggatgtttgaggaaccaatccttgaaccacgaatctgctgtatcttacgtagtgctttccttaataagtttgtcgatgtgccctgattaaagaagggacataaatcactatgtcagtggtaatgacatctagaagggaaaaaggcaaaaagaacttctaaacttcaatcaaatagtgtttgattaggatgaacttactgaac

SEQ ID NO: 45046 - DNA, 404 bp, Oryza sativa
  unsure (1)..(404): unsure at all n locations
agctagagctagtagagaatagtggttttaccagctgcgtcgagaccgaccatgaggatcctcatcttcttcttggagaagaggcggctgaaaagcttcgtgaaagtgaagcccatcttgccgcagttgtgcaagaccttaaacaatcaagaatcaatatgagatatgatacaaaagcacatgcagcaaagttcttaaatctcagctcagataatgttagaccaaaaccaaaatgggctccatagttcagttagttaaatcacaattcattcaaacgaaccagatcttttgcagacgagaaaagtatataatgatatcgacattgagaagtactcccgtcatgccgctgtcttttaacatgacgtttgacatcttactaaaaanattatataaataccataatt

SEQ ID NO: 45047 - DNA, 455 bp, Oryza sativa
taacaatttccttaactcacaaggattggtataccttattcatctcataactcttaggataaagtttattacggctataccttatccgtaacctaaaaaatcatttttttcaaaattaaaagtaattaatactcaataaataatatattaatgattcacctcctcttacacatagctccagtcccatatacaccacaacgttcacatcgtcgttcattatattttcttcgtcaaaaaaccataaattactactatgaatctggacgattattaaaaaataaaaatacgtccagattctttgggttgtttcttttaaagactcgtcgtaggttggttgtatcatacaacttcgcaacggcagatagagggcccggtgggccacaccccgcaaaggccgaggcagcatcgctgccgcggcgaggcgataaatatgcagcgagatcgagataccgaga

SEQ ID NO: 45048 - DNA, 378 bp, Oryza sativa
  unsure (1)..(378): unsure at all n locations
agcttgcctactgcctcggagaagcgcatgcaagttgccttaaccctagatatggcggccgccacgcagaggcgcatgacaaatctgtagtattagtggcagtgagctacagctgctaaaggcgacgcgatgatggatggtcgaataaagagttcacggaccaaaagagagcggacgttttgcaagcaggcagcgtgggttttgctgctttgaatcccataataataataatattcccaattgattgtttttgggtttcaattccaactaaggcctgcctttccctgcattttacggtcttgccactcatctctcatctgcttggttgctatgcagnggcactttgggaaatactcatgaacggacggtggctctgag

SEQ ID NO: 45049 - DNA, 393 bp, Oryza sativa
tgctatggtctgcgacgctggtgatcccttgatatattgtgggtcatgacatcaaagattggcccgaatcctacttcctctgctaggagatccaagaatgaatccccacgttcaaagtcttgcaattcatctgctatgggatccaagaatgcattcccatgagtgaagactactatcacgggaaggattactacacaggaggcggcatagataatgaatgattcaggttcgtttctcacattttattcatacctgctatggctgttttattacaatacacgggtaatggattgcataagttggctctcatgagtggtgttctgtcaaacggtaccgatgtggctactatgttggtggaaaggttattatcctgtttactttagacacttcact

SEQ ID NO: 45050 - DNA, 394 bp, Oryza sativa
ggacctaatcactgagctgcaactgaaatggggaaaggaggatgatttttattacagtagttgacgtggcaaggaaaagtcgaatgcccacaccgcatttggaggactggacgtcacccaaaccccacctggatgtgaatgtggtcgcgaactttgtatgccatttggctggctcttggcccatctttctccctggaccttctctatccatttctcggagttttgggttgatttactggtgtttggatgaagttcacaaccctttcttatatggatacgtgaatctcctcactgtagtctgattttcctcccaacatcggagtttgtcgtctgcatacacatatttaccaacacttattgaatatgtgagattaagcacctattactatgttgg

SEQ ID NO: 45051 - DNA, 445 bp, Oryza sativa
  unsure (1)..(445): unsure at all n locations
tgtggttcagagtgtcaaacgacttctcctgtgtctttccccaatggaagaccacccctttcttcgtcaactggttcaatggtgcagcaaaggtactgaaatctttgacgaaacggcgatagaatcctgcaagaccaagaaaactcctcacctgtgtgatggtttggggaaccggccaactctttatggcttcaattttcgtctcatccacctcaattccctgtggagtcacaacatatccaagaaatgaaactcgttccgtgcaaaagatgcacttttcaaggttagcaaacaaacgtgcatcgcgtagagcattaaaaacagcatgtaaatgatccatgtgttcatccaaagacttgctgtaaatcaatatgtcatcaaagtaaactaccacaaatcgtccaataaaaggccttaanacctcattcattaagcgcatgaaagt

SEQ ID NO: 45052 - DNA, 412 bp, Oryza sativa
  unsure (1)..(412): unsure at all n locations
agctnttcttcattatcatcatcagatacatcaacatcagaacttgcattacgagcaataaaagctagatcaacaacttgcttacctttgccctcatcttcatcttcagatccatcaaaaatttttatgagttcttgaattaaccactgcatgcaatggttcttcttctccttctccttcatgggcttcttcttgttcacgtcatactctttgactctaccatcatcttccttcttgactctcccaagcttaaggcaatgcgagcgaagatgatcaagtgcaccacactcaaaacaacgattcgggtatcctcttttcctgttcctaacatttttcatagctcgagaaaatttgttaaatatcacaaccaagtcctcctcctcgaactgttcgagttgatcatcagacatgg

SEQ ID NO: 45053 - DNA, 463 bp, Oryza sativa
  unsure (1)..(463): unsure at all n locations
taaatcgagcttggttgaaaggtcgaacattgtatagactctgctcgagcttgtatcgagctcaagcctagacaggcgagctcgctcgagcttgcctgttgacagccgccttgacacaccaagctagcggctgctgctgcttttccaacctgaacaatagtataggatagatattgtcggattacactgtaggcgatcaagattattgacccgaaggcacagtcaattccgtgcaagtcccgcggatttaactgtggatataacgagttcgagtccttgatgaactagtcccatcacgtcgagctgagaagtgcccagtggtcaaacagttctggtcgtttctttggactaagtactactactccacctagaattngaaacggaaggagtaaagcataagagggcagctagcccacaagataccgtggaatagtgatgtcacgggataattaaaacacacgac

SEQ ID NO: 45054 - DNA, 415 bp, Oryza sativa
  unsure (1)..(415): unsure at all n locations
agcttgtacctgcagacaacagaaatagattcttaatcagcanatatagcacatgacctacaagtgataaaaaagtaatttattacatatgccatgacaatatttcagtgagaaaaggtcaaatgctaacaatcataaaagcagcagtaataaactgaagaaaacaaaaggctactaaacagcgagctttccataccctcattccgatgtttgttgcacctggaatgacttcacttccaaagtcattagctccaggaaattgttcacggaggagctgaagcattacatttttactaatcacatagatacccatgctagcaatataaggcatttcttttgccctcacgtcgtcaaggccaagtatggtagtgtcaacctacaagacgaaaataggcaacaaaatgagttttgatat

SEQ ID NO: 45055 - DNA, 457 bp, Oryza sativa
  unsure (1)..(457): unsure at all n locations
gatgcgcatagacntcatttgttcttcagtagtttctttcagcattnggcttaattaaccatagtatgtatgattcatgcaggaagtagtaagcgcgtgccttctgtaagtgggggcaaagaacgtgaagtgttgaagatagattcgggttagtgcttactgcttaaaactcgttcgagaaaaaattcaggcaattaacttatcgcctggtttctttcaaaaaaaataaaattaatcgcctggtttctttcaaaataatatattttatacaaattattttttctgcttttatgcttttcttttgggccaaaaaaaaatctccggtgttatatcctccacttcaaattacttgttgtatctaactttgacaattagtttctaaaaattcatctgcaggtttaacatcataagatttatgttttcagaattatgatgagacatattttcataatatata

SEQ ID NO: 45056 - DNA, 409 bp, Oryza sativa
  unsure (1)..(409): unsure at all n locations
agcttcttccatagagacttcttcttctccttaggttntggggaagtcgatttgctgtctttctgtcttagcggtgttgccagagcctttacagtcatattctacaagacacatttactgtatctgagattttataatgagaaaaaatattgaacttatttgagagaaacccaaataaacgattagtaacactaagctaatcaacttaagctatataacagtattaatctaaatatcatgcaaaatatttatcataattacctcacatccaatgtgcctgctttcatagtatttttagtacacacaactaaactgaaagggaagtaagagaggcaacttacctcttgcttatcactaatatcgccagggaatgagtcgtcactagctccccctaaagaggaacatctac

SEQ ID NO: 45057 - DNA, 451 bp, Oryza sativa
  unsure (1)..(451): unsure at all n locations
tgcttaatacgtcgagaacaagaagagtcctacaatattggtctccctnccgccctaatataaggagtttaacattttgcctgtactgtatgaccattcgtcttatttaaaaaaatatagaattattatttattttattcgcgacttactttaatatccaaagtattataagtataacttttcggttctatatttgcacaattctttttaaataagacgagtggttgaacagcgcacacaaaatatctaaatcccttatattatgggatggagggagtactgtcttaaccaaattcctcatgttattacccatcttcgtctactgaggaggagctctaactcattactcatgcgtctttattatcattttctttacgacaaaactcggtttagtatgtaacattagatatactacaccggcgaaccgtaccaagctttctattaacatata

SEQ ID NO: 45058 - DNA, 408 bp, Oryza sativa
  unsure (1)..(408): unsure at all n locations
gagnctttcgatgacctcgcattggtagttttcgctccatgaacttaaatcctgatgcactctaggcgtccatgtttctagcagtgagaggagttctggcgctctcgggaaagaaaagtctcacacacatattaaagtatgggtcaagttaagttctctctctcacacactcatggcagtcctaccaatgacgacaccgatgtaaggcacgcctctcggccctacctcaacggctgtgccaccgtagcgcacctgcctcactcaagggtgaaccatctatgcagggatactgcctccgctcggctatctaatccgctaggtctatacccatttgagaaatacggttgtacggcggtcgtttcatgcttaacttcatggctcggtccttaattgaccggagacggtact

SEQ ID NO: 45059 - DNA, 343 bp, Oryza sativa
cttctagatcgtgtgttgtttgcttgtgtgtacgggtatggtttgcatcactggtggggatgcgaccatactaggttgtttgcttaaacaacttgaatcataaaatccattcacaacagatcaataggcaagtggtttagtacctcctctctagtaacccctcccatttgcccctctctctggtgcctgcagcagatggtctgcatgagggacaatttcatcggatcaagaccccgtcagtttcatggggcaactcagggcaattctaatagtattccacgtcagcctcttgaagatcagcctgaaccccaagtcatggctaatcatactcagacagcggaag

SEQ ID NO: 45060 - DNA, 399 bp, Oryza sativa
  unsure (1)..(399): unsure at all n locations
agctntggtcacaaaataacagtatcggattccaccttaaacagatcccggccaaaaaaaacccagccaaacagctccttagttcacattcaccaagtcttcagtggacgacattatgcaagctaaaatgaaatttcagaggacggcagtacgtacccaacaaaacatatttacatgtcagaaactgcaagcagagatgctacaaatggtcggctttcatcacagcaacttcacaccggcggctctaagagaatccatgacggccctgaccttgccatggtacgtctggtcccttgacatggagaccgacaccgcaagaatgcctctgaacagcaagcgctcgcccagcagcttcccgatcttcgccggcgcggcgacatcacgtgtggactccatgct

SEQ ID NO: 45061 - DNA, 455 bp, Oryza sativa
  unsure (1)..(455): unsure at all n locations
gtgaggtctttctcagcgccatgaagacgtcacctnctaatgtccagcagtcatgtatccccctcagggaggaggacaatgaacaaggagcgacgctgatctcagatcgattcgttggggtaatcgacatcgatccccacgaaccgtcagtcctgcacctgctcgaagactatggctcatcgtcaacaagtacgccacgcgaggtattggctattgacgggaccagcacgtcagcgcgcgctaatgcggaagcagaaaatcaagtgactacaccggcccagcacatcagggccatcaacgcaatactgagggaaaccccctatgatcccgttctgaatgacgatctcgcacggtggatagaacggctacgggaatcagtaaccaacctcagcaacgcgtttgaagaggccactactgcagcgcacccggaacagccaccaactggcggtgctaat

SEQ ID NO: 45062 - DNA, 402 bp, Oryza sativa
agcttagctcacggctggattatggctccatatatatacgcaattaacacagatactatattctgatatgcaattatgtacgggatttttatatagagaaataataaatgctttactaaattcgtctcaaaatataaattggaaatatatgtatatgtctagatatatatatgactaaaagctagaaatatatatgtctaaatacatagtaagaaattattacatttccaaatatatgtgtccagatacagaatgagaggcaaagtgagtgtaactcaactgactatgtttctagaggtggaaactgtctatccaactgttcaaattttatatctgacataagtgctcgcatttacagctattttttaaagaaaaatggtaactgacgtttctattgacaac

SEQ ID NO: 45063 - DNA, 401 bp, Oryza sativa
agctttggtcacaaaataacagtatctgattccaccttaaacagatcccggccaaataagacccagacaaacagctccttagttcatattcaccaagtctttagtggacgacattatgcaagctaaaatgaaatttcagaggacggcagtacgtacccaacaaaacatatttacatgtcagaaactgcaagcagagatgctacaaatggtcggcttccatcacagcaacttcacaccggcggctctaaaagaatccatgacggccctgaccttgccatggtacgtctggtcccttgacatggagaccgacaccgcaggaatgcctctgaacagcatgcgctcgccaagcagcttcccgatcttcgccgccgcggcgacatcacgtgtggacttcatgcttg

SEQ ID NO: 45064 - DNA, 462 bp, Oryza sativa
  unsure (1)..(462): unsure at all n locations
gtgaagggctttctcagcgccatgaagacgtcacctcctaatgtccagcagncatgtatccccctcagggatgaggacaaggaacaaggagcgacgctgatctcagatcgattcgttggggtaatcgacatcgatccccacgaaccgtcagtcctgcacctgctcgaagactatggctcatcgtcaacaagtacgccacgcgaggtattggctattgacgggaccagcacgtcagcgcgcgctaatgcggaagcagaaaatcaagtgactacaccggcccagcacatcagggccatcaacgcaatactgagggaaaccccctatgatcccgttctgaatgacgatctcgcacggtggatagaacggctactggaatcagtaaccaacctcagcaacgcgtttgaagaggccactactgcagcgcacccggaacagccaccaactggcggcgctaatggcgaa

SEQ ID NO: 45065 - DNA, 407 bp, Oryza sativa
  unsure (1)..(407): unsure at all n locations
agcttgagcctcaagctgagtgtgcaacctctctatatatacattgctaaaagcactctgatcagtatctacattgctaaaagcactctcagtaaaagcaccggcacgacaacctacagtatggtatgacactgtcgatgatgtacaaggtgactaaagaaaagtacaataaagagagatggaggctaggagtttcactgttgatgatgatgcagatcaatcgtagatatggacattttgcacatgtgcgtggttgtgctgttagactgtagagtttttgtttgtatttaaagtgcacttggcaaaaaacacaaccacatacgaatacnggcgaatcgtgtggttgtgtgcgcgcgttgtttctaaccatacagctcactttcgtcttaaatatatatgcattttca

SEQ ID NO: 45066 - DNA, 426 bp, Oryza sativa
gccatagccgcgtgcatatcgatgacgcccgacgtcgtcgtgccaacctcctcccggcggggctctgcccgcagcccgtcgccgcttggctgccgtgctcacccaccgctgctctgccgccgagctagctcgccgtccgctccgccgccgcgctagctcgccgttcgctccgcctgcagaccgccggctctgcgcccggcccccgcatccacgcgtgcccatcgtatctccgctcgccgctggcctaaagaataaaagagagaagagaggagaacaatagaaaatatgtgccgctgacatgtggggcctatgtactttctattaatatttttgctgactaggatgccatgtcagcgataccacccatatatactgtcttggaaccttttatgcatggcttatgtgagtttagaggcatacacttct

SEQ ID NO: 45067 - DNA, 389 bp, Oryza sativa
agctttatctaaatcacgagcgatcctaaccgttcaatcgaattcgatgactcttagcacacctgtaccgacttgggccgtggcctgccacatgggcccaacgcacttaacaggccagccacaacgtccttctaattatgggcctaattgtgtattatttattttggatttaatttatttagatctgtgttttagtcggtttttaatttggttttataaaaattcgaggtgtttttgtcaggcctttgacacatcgccttgtccgattccaatttcctgttccacgcgtttcccgtcctgtttgttcgcacgtgccacgtttagcgtgacttttctttaatttcaacccgaccgatgatcccgtttggaatgttgcacctggcctcgcg

SEQ ID NO: 45068 - DNA, 456 bp, Oryza sativa
gtgtgctcgtgcttcacatcgtgaagcggtcaagcgaataatgaggtatttgaattatacacttgagtgtgcgatttggtattctactccatcttctatatgcttgagtggatattccgatgctgattttgctggttgtagaactgataggaaaagtgctagtggaacatgtcattttcttggtacatcattgattgcatggtcttctatgaaacagtctagtgttgctcaatgaactgttgaatctgaatatgttgctgctgctaattgttgttcacagattctttggcttatattaactttgaaagattatggtcttacttttgagaaagtgcctctcttttgtgataatactactgctataaacattgctaagaatcctgtacaaagcatattgatattcgctttcactttttgagggatcatgttgagaagggtgatgttgaattgacgttt

SEQ ID NO: 45069 - DNA, 403 bp, Oryza sativa
agcttggacagagcccctgcagccaaaattgctattgggcgatcagtcgagtgactccctctccgcgcgactggacacgtgtcgcgcgcggagaggtggcggtgacgtgccggagggagaagcgagtttttcgttttttttttgtttttttccctttttttcgtttctgttaggttggtttttttcaccggttttttcgtttctatttggattttttcctcctttttttctgttcagtttgttatttttccggtttctcttctgttcggctttttttccttttttttcaagatgtataaataccaagtttgtattcgtatgtataccaagtttgtattcgtacatatagaatgtttgtatacgcacatacaaattttctatacgcgtatacaaactttctata

SEQ ID NO: 45070 - DNA, 450 bp, Oryza sativa
gtgtgctctcaaagatcattcaagcattgctagtttatcttatattcaaacacttagctgcataaaacaaggtgctttggtgaagctaaccatcgggtgaaacttttgttatgttaacccccgccgagttagtccattcttgtttcctttgtgcagaatgaggaggcgactgtctcgtctatttaagaagggacccggctctccgttaagtcatcatgacgagtctagcactcattcatctgcagacatctcgatggaggatgctgacgttcccgaacgtctcttgagcgacgccgacctcgaccttgtcggtgatcaggataaacaagcctactacatgctgaaggaccgtgagtattctcaagctagtggagtaagaacaaaatataaatcacagtccggaagtcttctggagagtttgggacggctctacagctctcttatttcttt

SEQ ID NO: 45071 - DNA, 396 bp, Oryza sativa
  unsure (1)..(396): unsure at all n locations
agcttncacttgctttctcgagagcaccgcctcttatctcattctcagtattggctgggtgcatgggcacacatacacatgtcagcttctcatatcagggagtttttatatcatagaagtttgtcaaaactgaacaccaagactagttcttgtagtgaaagaaaatcacattggagtaacttaaacaactctctatgaatcagtgaacttgcatttgcatttttcaggaagaaaaaaaaaagatcagtttcttgttggaaattctgtaggtactttttttctctattgaaatagaggcaggagtgcaaaacacaaggatcctgttttagaaaccatgtgtcaaagcatctgtgaacttatctatataagtttgcggtggttccaccaacaatttac

SEQ ID NO: 45072 - DNA, 400 bp, Oryza sativa
agcttttcgataacctcgcattggcaggacccgtttttgtactttatatcctcatgcactataggcgtacacggtttctagcagagaaaggagttctggcgcacccgggaaagaaagaattatacattcattaagtataattatgtttaaattctcacatggcagtcctaccgatggcgacaccactgtaaatacccgcctcgcggttctaccaatggatgccccaccgtagagcccctgccttacacatcaagaaaccactatgcatggatactggcttcgatcagctatctactccgctaggtctatacccataccagaagctcggctgtacgggggtcgcttcatgcttaacttcatggctcggtccttaattgaccatggacggtactatcctttt

SEQ ID NO: 45073 - DNA, 401 bp, Oryza sativa
agcttctaccgagcctggccgagcttgactgtttatagtttatattgcatgttcacctctttaatatagtaaactaatagataaatatatatatatatatatatatgcgtgggtgtgtgtgtgtatgtatctatttacacaataaattagcatgtgctagcacaatatatttattttaatcattttttactctgttattagagcgattaactagaaaataattatacttatcaacagattattattaaaatatatattatactacttatggccgagctcgagctcaaaccgagcttgcctaaaagctcgaaagtgcaatatgctcggctcgagcatgtgtcgagctcgaacttgggcaaatgagctcgctcgagctctgctcattgacagcgctaatcata

SEQ ID NO: 45074 - DNA, 390 bp, Oryza sativa
  unsure (1)..(390): unsure at all n locations
atgcttgtacagtnacgaaaatgctgaactatttgctaatgcaantactctatacctgtgagaagatcacaatttctttcattgggcaaacataaattgcatattcatagaaatcacacacatcctccacattcacatcaatgggtgcagttcagctcagtattcacattcacatcaacggtataatacctgacgttcagcttgaatattcagagttcatgaatcatcacgttatacatgcatgcatattaaagcgaaatttctagttgcacactaactgtgaacactctcaactttttctttctacccctatctatttggaagctatttattagatccatgtgttcaagctaaactttgttgaacagctgtgaaattttcaaaacatta

SEQ ID NO: 45075 - DNA, 406 bp, Oryza sativa
agcttgtcgtctgttcgctttgcgagtcatatttgatagaggaaattcttttacgagctgatttgcttatagcataacggggtgtgtcacttgaaaaaaagaatgaaagtcacgcaagatttattttctggtttcaatattttggttgggtgatgaatgtttttagtttagttggagatgaaagcatagggggcggctaatgggcgggtgaccgtcccaggcgatcacctcccatcccccctatacagtatgcactactctcttccttcctcctctccttcttcttttcctactacaacataaatttattaaaaaataaaaaatacaaagttgaaaaaatttgtgtatagaaatactatatataaaaaatttgaattcaaatttaaatttgaaacgggtatgtaaa

SEQ ID NO: 45076 - DNA, 196 bp, Oryza sativa
tggagacttccccagcctttgcgtatcaacgacgtcgagatgctcaatagtcattccattcggcgcggactccttcttctacacaagaatgaagattcttctaatacatgacgcccacaagaggacaaaacgtgcgacatcaagacttgacggttgagacaaactggagtgaggccagacacccgatatctaagac

SEQ ID NO: 45077 - DNA, 299 bp, Oryza sativa
  unsure (1)..(299): unsure at all n locations
aagtaatgtatgcagtagagtgaaagccatatgcgatgaagaaatggataattgcagaactatctatcttccctgcgttcctggagcttatcacgaagttgaactgaaggcagttggaggctgattgttgtgatgtcttaatactcttaaatcttaacccaccttttgattgaaattgagttgactggtattatcttgtgttcaactgaatgttgtggcaagatgccggaagactacaagctatctttctctgatgaaagagtngcttctgtgtcccacttactgattgtcgcacaaaa

SEQ ID NO: 45078 - DNA, 390 bp, Oryza sativa
  unsure (1)..(390): unsure at all n locations
gagcttaactaaggngccatcattacaagcttttttgttctttctgtgctcaaagatgccgggcagcttagttattccgtgtttacctcaacaaatctgtacagagctcttgaagctgacctacaacgacaccgaaaaacatatgatcatggaatccgagggtatataaaccacaactgtcgctaattgtctggaactctgagtggctcatacttttcatacatttcaagcacgttccttttttgctttacacaaaaagaactgaactgttcaagaattgctttgcatacaacatcttgtatccaacatcagctctgcctttgtgaactcaaaggatccctgcattacaataatttgctccctccttagcagagcattgcagacgttact

SEQ ID NO: 45079 - DNA, 403 bp, Oryza sativa
agctttgtatccaccttttctacttggtttcttgctatgtgatcataataaattctaaaaatatgaatacatgaaagtagttctcatgatagatctaataatgttgttgtgacttatcacgatttcatattggagtgttttcttagaatagaactcataattaggtacattttatttatcatgacaatcatcgatataatttagttatcaatgtatgtgaagttatgtataatgacataatcaatatatgatgttagaaatggcatgtaaaaggttaggatttgacctaaattgttatattcataatatagatagattaaacttgtagttttcatttctaatataaaaggaaatgtattataccataatgaaatttcatgatagtgggaatattttttaatat

SEQ ID NO: 45080 - DNA, 425 bp, Oryza sativa
  unsure (1)..(425): unsure at all n locations
ctggacgacacgggtcgctcttctcgatgtgacaccggtgaatcggcttcgaagtgcgcccctctcgcggatgaagcttgcgattcggggcttgccgcttaattttgacggaccggacttgcagcgcacatgactactagtcgggtgccacagccatttcacttgattaatcggctcccagagcctttgtcattttctcggactcccagagttcagctgcccagctgcaaagcagatcgcttccactcgtgaagcctagactatgatgcccgcagacataccgaatcacacagattctgttctgactactcatgtcatccatttgccacgtaggctgattctggntacgatttccaatccacaacaacttttcacaatacgctggcnaacatatctacgcaacggaaccactcacataccccatg

SEQ ID NO: 45081 - DNA, 362 bp, Oryza sativa
tctttcccaacaccacacggacgaggtgctgatggtcttcctctgactgggaggataccacgaagttaccaatgaacaccaccacgaacttatcccaggattccatgaacactctggccgtcaagggcatgaagaaggcacgagcattggttaagccgaacgacgccaccgggcagtcatacagcccatatcatgtactgaatgccgccctaggaacaatgccctaacgaatacctaaatggtgacatccggaacgaacatcaacacctggagaacacagcggcacctttaagctgatcgaacagagcatcgatccggggaagaagggactcgctcatgatggtgactccattgagagctct

SEQ ID NO: 45082 - DNA, 342 bp, Oryza sativa
atgtgcagtatgggacatttatccattgtataacactctgaatggttcagagcaccgatctgcatatagcacaaactgatccttaccacagaagctctggataccattatatgcttcgccagaccacacctgagtcacttatctaaaaaaaaataacacaagctggaattcctcaaccacaattgattccctccatgataaaactcagatttaatcacatcttcttgaggcggtgtgcaccaatggcaattcctttagaaactgctcaactccattcacgtacagtaatatcgtgctctccaatctgaacatcgtccgcactattgcatctttacactcaat

SEQ ID NO: 45083 - DNA, 392 bp, Oryza sativa
agcatgacccatttggaactccatttcatgattttcttgatatgcacatccatattttctctatactacacagattgagcactatggacctctcaagtactatcgcaccatctaaagcaaacggatctggcgattcaggtagtcaaactcagctggctattgaatcaaggaagtccttttgtgactgcaaaaacaaatttatgcataagtatggaaaacttgtggtctggggccttaatgcatcatcatccatgacactgaaattagaagctctagcttggatagatacgtttggaaacctggttcttggcatggaaagggatgtggataagcgcaatatctcatacgaaatccatgaggtggctacccttctgaatactatcctttttgca

SEQ ID NO: 45084 - DNA, 405 bp, Oryza sativa
  unsure (1)..(405): unsure at all n locations
agcttcatggtgattgccacacatgaatagatttctgagaangcaattgtatctattaattaggatattttatgtaatttacttagagatatgtttgggcatccgcaaagacttatggtatcttagagtttgttagagataagagtcgtgtctgatatggacatattttgtaatctcgggtataaatagaccccgaaccccatgtaatcaaactaacacacgttcaatataatctcggcgcatcgccacccttttacttttgttttgtttcgacgagttcttactttcgggttgagctacatcggttccgatcttcaactagaggtaaaacttgttatggcggcttgcgttctcaggattagtacttccatctttatgatactctaatctcgtttatgtaattcg

SEQ ID NO: 45085 - DNA, 279 bp, Oryza sativa
agctttacttgtacaaattattcatcgcatattatttcaaaacccacatttgcctataagtagtaaataaaaaatcatttcgacaatgacttagtataaaaacaatgataatcgaatggccctatcgacgtaactctctatttaaaccggcttaaggacagggcaacaaatcctgactgaaaaggatgaaaacgaaatccgcactaacccactccgcggattttagacggacgccacctaacacaaacacacggctcctgtttatgctaataataaaac

SEQ ID NO: 45086 - DNA, 299 bp, Oryza sativa
tgcagagcttaaaaatctttttatccctacctgccccaagggggactgggagtcctttccggaacctccaggtcccctgtgaccttcagaccgtggccctcggtgagattctaatctcctagtctgcggaaaggttgcgagaatggacaaagcacaatacacgggcgatgtatacaggttcgggccgctgagaagcgtaataccctactcctgtgttctggtggatctgtgtatgaagaatctactacgatgctgggagcccacaagctcttattctaaaaccctctctctttgttttt

SEQ ID NO: 45087 - DNA, 384 bp, Oryza sativa
gcgtttgctctgctcatcgttttgtcatctcttgcaatggcggcaagtcgtcacatgggaagaagaataaactgatatatataacggttgacttgcatgggaccgcttattggattttaggagataattttatccggtcccttcgcaggattgctattttcagatatcaaatttcattcaagattcctaaaatcagatatattctttctggggggaggggggaatttacccaatctcttggtgatatgctcacggagcatctacaggagaggcaccaacaggttccctaaatgtaaatttcatgaatgtaattcaaacaaaaaagtctcgaacatgatataccccaatatcatctcaatatttacccaaacctaaaaatggtgc

SEQ ID NO: 45088 - DNA, 400 bp, Oryza sativa
agcttcatctggagtccagcaatgcatgtgatactgaacctatttaaaaccagaggattctagttacaattagattaactatgcaaattaaattttggaacaccttctaattaaaagcactgctattgtaggggattgccatgtgaaatgatccttttattgtgtgtgaccttataacttctaatagtactgtaaaatgtattatggagagttttaaactaaaattacttcatgggtgtggatcattgggtatcattgtcgaggtaaacttggatgtcaatttgttcttttgcttgaaaaaactcagttttggccaattcatacattaagacatcattttcgtagatgcgtctaaggcaagaattggcaggcagcgatgtaaaataatatctgattattt

SEQ ID NO: 45089 - DNA, 393 bp, Oryza sativa
agctttgtgggatcggcgtcgtcgatttgcttctttatcaccttgccttgaggggcgggcttctgcatgcgtttagcatggtcatgtgattcggcctcaacattgtgcactgccctgttgatttcggccagatcgccctttgatgtacccgagggttgaagccccttgacgacgatcacgcctgttggacccggcatcttgagcttgagatagctgtggtgagagatggcttcgaacttgttcaggattgcgcggccgaagatggcattgtagttgtatgggatgtcgacgacatctaacagtatttgctctctacgcctgtattcatctgtgccaaagactactgccagctgtacttggtccaagacttgaactgctttgccgccgaaacca

SEQ ID NO: 45090 - DNA, 409 bp, Oryza sativa
agcttgcgtgctcttcaacctgctccaataatctcacacacccaacttcaaaagcatcaagcaacaacaacacgggtaagggaagccaataacaggaggaaaaaaatgatcacggccaggttaaatcttagcaaattttggattccgaaacgccttaaaattctagaagagaaagaggcgccgttctacttgatcaagacgtattgaagacgggcagattgcatcaagaacagcaaaaagaataagaagagggcatttggtttatacaaattcagaaactgacacctccgcaacacaccaactgcgaaacaggagccaaaaaaaaaacaaagctgagaagagaaacgaattcatggcggctaacttctcgcgcacgcattggtcgcgccaggaaccgtcaagatcaacg

SEQ ID NO: 45091 - DNA, 405 bp, Oryza sativa
agcttcatggggaggccggagccgaggccaaacgatctaaactgggagacgttggacatcacactgattgatctacccacgctgggggaacccttcactgaggaggaagtgcatagggcaattaaggaaatgccagccgacaaagcaccgggaccagacggcttcactggggccttcttcaaagtttgctgggaaatcatcaaggatgacattctgctagtcttcagctccatctataacctgagatgtgcgcacctgaatttgctcaactcagcaaacatcgtcctaatcccaaaaaaggatggggctgaaagcgtttcggactataggccaattagtctaattcatagcatcgccaagatcttcgctaagatgctagcgctgcggttaaagccccacatgcat

SEQ ID NO: 45092 - DNA, 398 bp, Oryza sativa
cagcttgaaatatattaatgaacataggatatcttattgtgttcaacacaaattgttaatcaaactgctgagctatgattataagattgaatattagaaaggcgtggaaaacaaagttgctgatgcactatccagaattcagcagagtaatgctcttactactatagttattgtgcctcaatggatcaccgaggtgattgctagttacaggcatgatcctaaatgccaagaattggagagccacctacacatagcacctcaacctcaatccccatatactctgaatgctggcattctcaggtacaaagatcgccttgtaattggggcaagtaccaatttaagaactcaattactggcttcctttcatgattctgccatgggacgcccttctggggaaa

SEQ ID NO: 45093 - DNA, 398 bp, Oryza sativa
  unsure (1)..(398): unsure at all n locations
agcttctcaagctataagtaatgtcaaattctttatatgaggacaaccaaaccacatttgttctcaatgttccaagcttggaagaggtacaaaggaagaagatcatgatgaatcccagaacgccttgccaaataagaagcaattcaacaaaataagaacctaatcttatcaaaccaagtgatgtatttcttttcctacttattattntaatcttattaattgtttttgtgtttcatattgttttaatataagccgtgtgttgttaatcaggtgtttaaaaatcaatatgattttcccttaaaattgtatatcgagtgactggtagctagattaactaatgtgatttttacttgctaaatatatttaatttgggttatgaactatacaacaaaatctac

SEQ ID NO: 45094 - DNA, 400 bp, Oryza sativa
agctttacattaccagcggatgatggaagaactttcagagtatgatagtgatgcgcttgctaaagctaacgagctacttgctcagagggaacaacaaatagaggaattggaagctgagctcgaaaactacaggatgcagtttgcaggtggaccaacagagaaacaatccaatcaggtctcctttaatgaagaaaacattgccgaaactttgcttgatgaaactggtcttgaagctcctgcaattaccacaccaagtggtataaattcattagtgagctttgaagaggagagggcatatatagttgattgcttgacgaagctggagcagaagcttcaatcctactccaacaacagtactaacattcacttgtcaaattcagatgtcatagaggattacctt

SEQ ID NO: 45095 - DNA, 398 bp, Oryza sativa
gtgccactatatataagccaaccatggctatcagcaatcaggccacaatctaacctatattctcataaagttataattatagccatataaccatgccacatcatcacccattagcaataattatttatttaacctcatgcaagcatacaacatcatatatcacgttcaatttatttaactaggaaggtagcccgcgcattcacgcgggcatgcgtcgtacgccaagttggatgtatttataagagcgacatttaacaggagaacatctgccacaatttctccatacattatgtttgtcagcattaattaattctttaataatattctaacctaattagattatattatatcacatataagtagtatctatagagaaatatctataatagttctcatca

SEQ ID NO: 45096 - DNA, 406 bp, Oryza sativa
cctgcggcatgaagcttaatctagtgctgcacttgcttatttgtttttctcaacttaaaacacatcatcacaaggtcatactgacgactgcaagccacgaatatcaggagaataattactcagaataagtactgagatcacaagtgcagggaacgaagcagggatgaacaatgtaacattttattaaactgaacatggcttcagtgaagaagctcttattcttgctgtccaacaaaagccactgcaaaaacgcagttacatgactaagtgaggtagttgatgaactcgacagctgttgcaacagcgccttcggtgatggcgtccttgatgatcttgtctttgtggatgttgctggcagcagagatcatagcaccacttaaagcacctccaatcatagcattcttct

SEQ ID NO: 45097 - DNA, 267 bp, Oryza sativa
attcaactgaacatgatgatgaccttgagaaacttagtacacttgtcacggataacatcactcttatcattaatgactgaagaacttggaatgaaggtcagtaccttgagagaaatggcccttattgtgaggagtatgcgtgaacagcttgctgcaaagggttttcagattgacccaacaatggaggtaaagtgccccttctcttcttgtctgaatgtccccttcctccaccccccaacacacacacacgcacttaaatggttgact

SEQ ID NO: 45098 - DNA, 372 bp, Oryza sativa
  unsure (1)..(372): unsure at all n locations
agctntagagtatatacagcagatttctgtctttgatttgatacctgccggcaataggcattccctacaggactttgaagggcagctaactagtgccgggaatgctttttcctggcagatgagctgccacagaaacaactttctagggtagtagcactgccataggcactatgtcatggtgtaatgccatctcttattatctctatctcaccaccatcgctggttgtcgggcatagtcagcacccatctcactcttcggaatcacactccccatgtcgtccgtgagggtggcggtgcttcaccacccacgggccttgttcgctccagccggtcctaactctctccgccgttagacgcatcgccagtgagttt

SEQ ID NO: 45099 - DNA, 407 bp, Oryza sativa
  unsure (1)..(407): unsure at all n locations
agctntgcataatgtagccatttcgtagacactatcatacaaatggaatgatggcatagcgagagcgaggatagtcttcaaacttttgaagataccacttgtgagtttctactgctgcaaatgacaggtttgtgatctgcaaaaatgaaaaagaaaaaagatagttcaatctactggaacaaaaaacaaaagaaactaaatgtagaagataattgcgcgttagttgaattctgactatctttgttcaaaaagttactgtagggcgtaccacaaatacgaacaggaaccacactggaatgtcttctccaccactagcaaccaacatgccaaaatatattacctacaagccaaagtaactgtaaatgttaatgccataataatttaaaacaacaggagctcttttagta

SEQ ID NO: 45100 - DNA, 321 bp, Oryza sativa
acaaagcaccataccctaagtgcaagacatgccctctagaagactgaacgcagacttaccgtgcacgccatacaaacacgtcttactacacacgcatggatacccctaggtgaactctgcttcttgcacatgacactgatcagaaaggtttgcatcgcaattctcaccgaatcaaatggaatacctaaaagacatgtcacatgcatagaaacgtagcgtcattcgcgtgaaagaaccctacagtgccaccattcgaactggagcaggggaacacaacttacgaacatgtcggcccaacgagagctatgagagaagcacctc

SEQ ID NO: 45101 - DNA, 402 bp, Oryza sativa
agcttgccgttcgccttgggaacgaccaccgggttctccagccactccggatggatgacttcacggatgaatccggcctccagaagcctcgccaccttctcgcggatgaaggcttgacgttccggggcctgccgccgcactttctgccggaccggccttgcgcccggccgcacggcgagacggtgctcaatcacctccctggggaccccgggcatgtccgctggtctccatgcgaagacatcagcgtttgcccgcaagaaggagacgagcgcgtcttcctatttgccatccagaagaccaccgatccgtgtggtcttggatgggccgtcgcccaaggcaacctccttgaccgggacctcgtcgcatgtggccatccgctgcctcggggcggtgggggcagag

SEQ ID NO: 45102 - DNA, 318 bp, Oryza sativa
ctatgacctataccgtaaagctataaaagtttagtctatggacaagccggaaattaacaaggcatgataatcagtaacaattggatgataagatacactccattattgtataataccccaactgatacttaaggaggagcttgatgtatgcagtcaatatacggaaatacagaactaaacttaatcataataacgactaagatgttcgatatttcacgagttgtcgataagtgtaccgtcttcacgctcgagtcgataagaactctggctgagtgacttctgagattataaattggcccttcccatatggcggataac

SEQ ID NO: 45103 - DNA, 394 bp, Oryza sativa
agcttgtgacatcttgcttgaagcacagagtttttatctatgtggggcaaaatttgtgatgcccattcttcttgtctggagggagttatcctgttgcctgacctacatatcagcaacaaggctgtaattgctgtgtcttttgcagttggacgtgtgatatgtgatagataaccaagtgccagccaattttattgagcaaataagtttttgacgactttgtagttgcaagatttgaccaactttgactcctccagtttttggagtatgcaaaaacaaaccttatatgttcttatctataatgacttgagaagactgggttatagaagcacatgatatgtttgatacggatgctgtgttatttttacactccttatgtaaaatgtatgttttcttc

SEQ ID NO: 45104 - DNA, 403 bp, Oryza sativa
tgcagcctacatagcaggtaggtccgctttatattgcgcgaagaagacctccttacagaggcgctcggaaccaaagaacatcctggccgaactcggggaattgatagcgatgagccctggaagcatggactccctcagtacagctcccaatataggaaacggacagtctccaggaagagaggaacactcgtttgaaagccgaacttaaggttgaggtcattcatgaactaaaagctatcatgaatgccagggtggaaaaaagggttaataaggtcctcgccgacatgaatatacctcgagtcacaacacctgctgtgcatccaactactcgtgcacaacacgacgcgagtccgcacagcatagcagtaattgtgcatccacagaggtgccggcccctggtctc

SEQ ID NO: 45105 - DNA, 285 bp, Oryza sativa
  unsure (1)..(285): unsure at all n locations
ctaagcttcctttcgtgaacacctagaanattaatatcggattgctttattaacatgttatgtatgctgttgaactctaaggagggaacaactaatggtatagattcctaaattccaccagaaaatatatccataacaaacaagctaccaaatttggaaatttaatgttttgcttccacagccagcgaacaaacatccaaagttaaacaacttacgctatggtactagcattaagttaaaactttgcttagtatcaacaccccaatgaacgtttagcccaatgag

SEQ ID NO: 45106 - DNA, 407 bp, Oryza sativa
  unsure (1)..(407): unsure at all n locations
agcttcacaaagatgaatgatgatggcattgttctttatggagttaagttcagatgataaatctaaatcccataaaaatccagaagacctcggaagaatttataagtgggaagaccaaaaccgttgtagaagaaaggagtaaataccacgattttgccagtgttcaatgttgggaactcatagccgaaggctgggcaccacccgataattttcttcgctgggatcacgccttccttcaccatatccttcagagttgattccttcacagagatgccctattgatcgaaggggaattctctctcttccgccatgaatgaaatggaggagaacttggaatagaatnttttggctctgaacttggggatgggagatgaaaggaggaagcccgcgttggattttcgcggaat

SEQ ID NO: 45107 - DNA, 386 bp, Oryza sativa
agctcggtggcaggaataatgagactgttcttatatcttagaatagatggcatcagagtattagccgatatatcttaaatttacctcattggctaagctataaatatatataatctttgtcttaaagtacttttaaacataagtgatttatactgtctcggctcactgtccgatctattccaatcgcttagtttagacatatttttagaaaaagattatatatcattgatatctgcagccaatcaagtagatttaattctatcttggttagtattctattgccgatctggttcacatcacatcggcctgatatcaaatgaaacatcatccgcaacacagtcgatcggctatcatttgcggacttaattgttcttcttttatttctt

SEQ ID NO: 45108 - DNA, 394 bp, Oryza sativa
atctcgtaccaaatgcctttggtctggatgttaggtatttaacatatatataacagtttattttgaaactgattcgaggctgaagctcctttcaggtctgaacaattctttggtgaaattggtgtcgccaaagacgtgtatttatgtggtcatgtgttgcaacggattgctggtttctctttcaaatatggtcttttcaaaaatggccatacatatttttaaacctttcttgaatgctggacagaggattgtgatacaaatggtgattattgatgaaacaataaaaaaccttaaattgatatttatttatgcatgtagaaaaataagaaccatcttataaagtagtcagatcaactattacagatcaacatggtaatagtgaacacattactct

SEQ ID NO: 45109 - DNA, 401 bp, Oryza sativa
  unsure (1)..(401): unsure at all n locations
agcttcatgatcacgaactgcgggcgcttttgtagctctcgatcttgtgccctcgcatgctgtccttcacgttcaccacggccaccaggtccaagccctccctcacggcggtggaggacgtcgccttgatctccaccacagccgtcactgagtccgccgtcagagccacatctttcttgctgtacgtcgggatgttcatcgtcacgaggccctgtttgctccctgcacatcatatatacatgtattgaatccgcctcaatgcaggatcatttcgaaattgcggcaaacggtatgtattccagtatgtaatgcatcaatggaaggctgatggaattaagacgatacctccattcggaattggagtagtagcangcttctcatcgtcgttaaacgccatcctg

SEQ ID NO: 45110 - DNA, 350 bp, Oryza sativa
ctttggagccctacaccgttgacaaggaacaaaccatcatgctatcttttaagaaaaagaaaggctgtgcttctgcttgacaaattcttttctcctttgatttctgtatgaatcagttatgtctccatagaaattacaagaaatgaaaaatcccatttgaatggacacctaggttattggagtagttatatccatggaatacaaaggcatcaagcctatgaagctatttgattagcctgtgagttggctccgagactgcttgactatgcgagcatctctatctttatgatgaaaaggatatgcatctccagctttcctcttttttccccccttcatagaatggtttcttg

SEQ ID NO: 45111 - DNA, 394 bp, Oryza sativa
  unsure (1)..(394): unsure at all n locations
agctngcaagccggctgtgttagtgtgtgcttatatgagatgaggaggagtgtgagaatgggcgctacttataggcagctagctgggtgtgggcagcagcaagagagagaggattccatggtcgtgggtgtggccgggagaattgtgcttttccggagaagggtcaaaacgatggaggtgagtgatgaggtatagagatagcatgcagctaggcaggaggaacaaacatttctgtccccgggaggtgggcggaggatctctgctagctaaagctagcttattagctctctttctatctcttaatttgctcctgtcgcgtcgcgattcaacttgtttatcgcgcatatgttccatcgatctccatctctgtcctattattcaaagatccaatcca

SEQ ID NO: 45112 - DNA, 263 bp, Oryza sativa
ctgacatatgcactcacatggaataagagtcaaggatatcacacggatcaagtgctaaagatattaagaactctcatgtaggtgctgtcgatatccataacactaagaattccgatgtaagtcttgttatacttgcatattcacactagcagttaagtgtgtgtgtcaggctatgttctatgcctcttgctacccctcgctcctctggaggtggctgcagttctctcacgagagctatgaagatcgctgtccccagtctcaga

SEQ ID NO: 45113 - DNA, 407 bp, Oryza sativa
agcttgtgacttgatcgaagtttgtggtttgatctatatgtccaaagacatcaattctaaggcccacttcgcaatccgtccgtttgcttcgcattatgaagtatatccccgagtggaaacgatgtgaccaccgtgaccgagtgactttgaaagtagtgagataatttcctgatggtaattaagacaccatataataacttttgaacctgaggataccttgtcttggagttggctaaaacctcactgacaaaataaattggtcgttggactttttgaatatggccttcctcttcacgctcgacaaccaggaccgtactcacaacctgagaggtcgctgacacatataacagtagcggctcttgcggatgtggcgaggccaaaactggtggagtggtgaggagtttctt

SEQ ID NO: 45114 - DNA, 337 bp, Oryza sativa
tcaacacattagcaagaaactctgcagcaggttttgtagaaggatctgcatttcgagcttcttgataaacctgttacaatatctctccatcagaacatttatggataaatatatcacacaatatatacagaaacaacgtcgcaatctcgagcctatgcaaaacaagatttatactgaccatctgttgtgaattaggcccacctagcctgcgagctccttgttcttgcactaaaaattgcagtctggagttgctggggttaggactctttcctatagccctacgctgatctatctttaaggggtgttgcagtcttgcatcgctgacatatctgatcta

SEQ ID NO: 45115 - DNA, 403 bp, Oryza sativa
  unsure (1)..(403): unsure at all n locations
agcttncaagaagctacgtagacgcgcttccacttattcttcttcgncagggcagcatgccttaattttttcctcaaaattaaagaaaagaaaaaactaaattaacatactatatatatacagagctcaggggagctctagctacgagctaactgctaagaatttgcatgagctagcaattcgcatgattgcgatcgatcgaggatatcgagaccggagaggatttcagagggcgtggttggccggggtcgtggtgttccggcgatgcaaggggagagagacgacgaggcggcgggttgttttccggcgggaggcggcaaaggcaaggcgccgttcccgccgccgtcgccgccgagccacgagttcgacagtgggcaccgacgcgggctgatcatgcggcggc

SEQ ID NO: 45116 - DNA, 302 bp, Oryza sativa
atcatgttagatgagacaatcagccttataggacgggcatatgcggaaaatatatatgccaagtgacgtattagctagatatataatttatgattaaaagtgttacatttgatgttttaacgacttaaataacaatgttcgtggagaaactatgatgagaaaaataatcgaaaacaacatcatcattcaatgtgtgtttgtcacgtctacatatgatgatggcagcggagcggacatgcactaactacagagaccacacgcgctcacataccacgcacacccacctgtgggaagaatgggga

SEQ ID NO: 45117 - DNA, 372 bp, Oryza sativa
agcttgcacgacggttctacaggagattagtgtcttcctgccagcctggaaccacaatttcaagggggcttgctccgacaattatacttggcattattgattatggctcaagagtactatacatcatataaatacggcgtcataacaggtcattggatggaaaccaattatgcatgcgggtacagcgtgtgtacttcctccactatccgtgaagtggaagtcaatttctgcaaaatttccattcacctatagctaggtagcactactaactactccagttcagcaagcacgtctaaactcgtatcaaaacgtgcaaacttcagctgaattttgtggaaattctgcttcatcagcagttccgttttaacccct

SEQ ID NO: 45118 - DNA, 285 bp, Oryza sativa
  unsure (1)..(285): unsure at all n locations
tcaggaagagatgggttctaagctgaactatagtaccgcttatcatctgcagacagacggaccaaccgaaggggtgaatcacatattggaagacatgttgatagcttgtgctctanacttctgtggaagttgggataagaatctaccttatgcagagattttgtacaacaacagttatcaagctagtcttcagatggcttcttacaaagcactgtatggtccgaagcgccgcactccgctgttgtggatcaaacgggagaacgtctagttttccggactgatatc

SEQ ID NO: 45119 - DNA, 402 bp, Oryza sativa
agcttgccccgctttagcaacttcgattcccaaaattttagcccagagattgttgttagccagcatcgatggttgatgctgaaaacctaaatggaatttccatgtcatgcttatgccaccaggaaacaagagatcgaggataacgaactatgtgttttattactgcttcgtccgtggtgaggggtttttggaggtgcgaaaatgttcatctctccgtgggaattcaactgtttctctgaaatttcttgtgaaatttctgcatttttaatggaaatctttactagtcatacaaattcatgatgtccaaacagttgtactgcaaacagtttacagttgtactactttacgatgctcagaactcagaatattgtcgctttgtcaaaaacttcttgatgaagtatg

SEQ ID NO: 45120 - DNA, 432 bp, Oryza sativa
tctggaccgtggaagctctgtagaagtagatgaagcatctgatctagtcagacattaacacaactcgtgatagaacacataaaatggcagtgcagcctacagatggaaaaattgtgtctaatttattgcaggagagcgcataccttagtgggatgagttctctgaatgtaggggcattctgaaatattgaacaagcaccgaagacctatgtccagctacaaaagcacttttcaatacaattcttcttcggatgatcaaacacacctaggagttgcgtcacaagcaccccatggatagatactgtcaccagaataaaaccaatgagaatcaccaataaaatttactaatcgtcacgagtggttaataacacaaaactaatactaatatcttaccatcatgaaagagccacttattgtaaccaccacatacctt

SEQ ID NO: 45121 - DNA, 345 bp, Oryza sativa
agcttaccattcccactacgcccatattttaccttcattcctctacccactacacacggggtgtcgccttcacgccgtcgcgccgtcgcattaagccgtcgcgccaatgctttgagccaccgcgccacttgcgccttcgttgccgtcgccgccgttgccgtcgccgccgtaggtaagccgccgcccctccccttgagtgcatcaccgtcgtcgcccgggtgggcaaaaagccgaaagagagagggagaaaagggctcggagggagagaacatagagagataataaatgggaaaagatagggacgagaggaaaaggaatgacagaattgagataacaagataaaga

SEQ ID NO: 45122 - DNA, 166 bp, Oryza sativa
  unsure (1)..(166): unsure at all n locations
ggacacaccacatgcggtgactatgacagtcttgtggatgtactgctttgtggagataggggaggtcagagcttcttctgtggaattgcaactgcgcgcaacaatagggctacatatctntgggttccctctgaagccaaagtctggaaatgctacaaactggcct

SEQ ID NO: 45123 - DNA, 403 bp, Oryza sativa
agcttgctggctcacaacatgtgtcatgtgtttttattaactacagaacaataccttctgggtgtttccatcactggatccttctaagctgcaatctccactgcattggcagcatcagatgcacatgaaatcagtttgtcactcataataggtgtatattaagtgaactatcaatctggttatcgctttcattttgtaaaaacctgtatcaccttgttgtttcactgttgccactgccagttgacacaaccgcaccatcaatttccttcattttcttatttgaacagctatccttgctgatgacagactttgctggctccatgctcaatgggctcaccatcttgataaaaaatataagataaacaatcaataacagaagcataattaagatactagcaaaacg

SEQ ID NO: 45124 - DNA, 382 bp, Oryza sativa
  unsure (1)..(382): unsure at all n locations
agccatgtgcacaccctccgcgtggccgtcacatcataccgcacgacacgatcgatcgcgcgggcgtagcggtgcctcctctcccctccccgccacacctcacgtacgtccccacccacacacccggtcgtggacgtgcgactgtccagccgatgtgatcgtacgcgttccatagggtaggaactcacgattcntgacagcctgccaataatagggaccactatcctccaaggggcataagtttactctttatgcagctctagctgagccttagctcattcacatgtcattctatccaccagctacgcacaagactttacggtgctaataagtttgtcatggagataatatagaatcttagcttggaaattcttgatgatat

SEQ ID NO: 45125 - DNA, 405 bp, Oryza sativa
agcttgtatctggcaagaaattatctgcgcgcatcacttgtaatacagacaaaaacatattttgctttgaaatgtgcatattttcatatatgtatgccccttaattttgcaatgctgggtagacatcgataaaattataactggacaaagggcgatatgacaaatatcggacgtcatatatcggtataacacaaccgattatgataaaaataaaaatactaagtgcgatataacttatatcggccatctaaaagcgatgtgaacacatcggctaacatgtatcggcacaaaccagccgatcatgagttaatccaaacacttggataatatttcttcaagtatttcccattgagagctcttccaaaaacttctccatcaagcccttgcaacatataagctccctta

SEQ ID NO: 45126 - DNA, 455 bp, Oryza sativa
  unsure (1)..(455): unsure at all n locations
acgtacactataaatactaagcttacccaaagaatacaattaggtggcattgtctttatcacacgataatgctgtatgagacacactcttacaagccgacgacatattgcngatataccgttagacctacgatgggtgttctgatctgagcactcatcattaagagcatacatatcatgttttgagcagtgaataaccaatagagtgggagcaactatgatgagaaataacaacaaaaacaactttaaaatgaaattaatatattttagcattgcatatgatgataggaatcaaaagatgagagccaatgatatcatatccgatagtataactgagttcttcggccggtagaaacaatgatcgatcaaagaagttctagatagaccagttagcaccttttttttcttaaaagtataatagagaatgccacttataaatagatcatatgactatct

SEQ ID NO: 45127 - DNA, 356 bp, Oryza sativa
ctttggccctggtcagtacgtgctttctattattttacattatgaatatactcttgttatatgtggatagtcatatttattgaaaagaaccattgtgggcctctcggctccgtgtgttacactcttcatcctttgtctcttggcttatacctttacgaaagtctggaacatatactgcaacataatccttgctgacaggctggtatagctgtggtgcatccattatccatatattaccctggcatcttctaagtccataattatagtaagtatatctggagttattatttcgaaattgacaatgtttcagaaaatggacaggtttgataaaatgttgatttattctcataagtctg

SEQ ID NO: 45128 - DNA, 484 bp, Oryza sativa
  unsure (1)..(484): unsure at all n locations
ctatanaatactaagctncaggaagagacgggtgctaagctgaactttagtactagttattatctgcagacagactgacaaaccgcgagggttactctatatttggaagacctgttgagagcttgtgctttagacttcagtggaaggtgggataaaaacttaccttatgcgaaatgttcgttcaacaacaggtatcaatgctagcttgacatggcttcttacaaaacactgtatggtcagaagtgctcctcttcgcttttgtggtatcaaaatggagaacagctagtttttgggacggatatcctcccggaggcagataaagaggtcaatatcattccagatagattgcgagtggctcattcttgtcatatgaaatatgccgacaatcgccgcctagatctgagtctgtaaaaaaggagatttagttccggtcgcgcttcgctcgggaggtgcatcgtggtcgcagtaccgcgtctcgtcgccg

SEQ ID NO: 45129 - DNA, 393 bp, Oryza sativa
  unsure (1)..(393): unsure at all n locations
agcttaaggcaagaattgtatggaggctcttttttgttacgcttaanaaacgtatgactaagataaattcagaggtacattacaggtagagaaagggcctcataaatagaaggtattgtcatcaactcatcatccatctgataattatacataaataaatgtaaatgctactcccttcattttttaaatgtcatcaactcatcattctccgatggttgactattcgtcttattcaaaatatttatgcaaatgtataagatataaatcacacttaaagtactatgagtgataaaacaactcataacaaaataaattataattacgtaaattttttgaataagacgaatggtcaaacatgtaaaaaaaagtcaacggtgtcatctattagaaaac

SEQ ID NO: 45130 - DNA, 318 bp, Oryza sativa
  unsure (1)..(318): unsure at all n locations
tcgttagcttatataccatntaaacggttatgagaaactctggagaaactaacaatattcatacaacacatatatacgactctgcaaaatcttaagtgcaaactcaactcacacgtcgagatataaaaaagacaaattcagcatatgaatagtagccgactgtctatatctaaatatgtctttattgtttctcgatgtgtagatcgaatttgaatttgaatcttggtggactagtaggcattattatactctacatctgtaattntttatcagattctttcataactatctgcatcatattcgaaagagaaatgtata

SEQ ID NO: 45131 - DNA, 402 bp, Oryza sativa
  unsure (1)..(402): unsure at all n locations
agcttaagtgcaaagatccaatataaataatttgtgaacaacatgtatctagaacatgcacaataaatgtataagatttgctctccctaaatatattcatacaaagaaatatataagagaggcaagtgtatgcacaagtagagaagaaccaatggggtttatcctatacacatggagaaggtatgtagcaatgataaagacaaacataaacacatacctttatcatctccatgttcttaatgtaaagaacactaaataagaaaatgctcaagtaaacattagtctcgcacttatataacaataacatggaaatcatatatatgaatctatcaaaaagtatgagataagaagtgatacatatcgctttatctccatgcatttcatctntgtcatgattaagat

SEQ ID NO: 45132 - DNA, 333 bp, Oryza sativa
gatatctattaatctagtatatgtgtagaaggcactacacattcgttcattaagctactacttcatttagctacacctcaattaatgataccgataccctcaaaagatgacgtatataacacacgcaattatatgactccaagtgatgaatatcatgcatgatgtacatcaagcgtaattatccctcataaagaataccaaagtagatgtgataattgaatcccgactggcgcacacactcagctgatgtccctcgtggtgaataatgaattgtccagtcgttcgagcatgagaaatcgactcatgaccatgaatccatgttgaatgtatctt

SEQ ID NO: 45133 - DNA, 370 bp, Oryza sativa
  unsure (1)..(370): unsure at all n locations
aagtgtctcacatagaccatagaaactgcacagattatgttaatacacactatagatgttgaaatgtcacgaccatntaagaagccgatgacatattgcagatataccgcttgacctacgttgggtgttcttgtctgagcactcatcatcaagagcaacctcaacatcattagagctgggaatcacaatatgaggcggtccaattatgagtcctattaacagagtttgccattaaatattgtacggagaagatacagagcctctagagactaactaatgtaatgcctatcacaatagctaacagtgttggttaccttcatttagtgaggctaaatcggtgcgctcaatcacgtcaaaagaaatggatgat

SEQ ID NO: 45134 - DNA, 301 bp, Oryza sativa
tttttttaaagccaccactaggattaggacagtggacccatacatgcacctccaccctggggctgtgtgctagcacagccgacaaaaacggcgctgctgcaatggagctattgacaaggatgaccaacagcttcaacacacaatttacctcaatcatctttgagaaatcttcgggtcccttaacacctatggaatcatccaatagctggacctctttcacgctcctgatgtatgccaaagctgaatctagcaggatgactcccgatgcttcaattctacactcccaaaaaacaattgcctt

SEQ ID NO: 45135 - DNA, 392 bp, Oryza sativa
  unsure (1)..(392): unsure at all n locations
ntctgtgaggaagcgacctaaaatagtatggatacgtgcattgtcttctaaatagggccgtcccatatctaattgtaagtgtataccatatcatataagatctatatataatgataatcatcttactaaatgctaacacgatcataaccatacaaattttcatgataaaaatcattaaatataaaagattataatcagcaaagaataagacaaaaaatgaatagtgttctatttgccatctgttaatatcatatctcacaaattaagttgaatttgatctgaaaatttatacggcgtgttaatatcagcttccctatatctatgattcttaagaatttgcatataaaattgtttatagtggtccatctatgttagagattttatactgaata

SEQ ID NO: 45136 - DNA, 397 bp, Oryza sativa
agcttcgtcgacaacggcgtcaacaccggccttatccaatgagtccctacttcaacaatgctggtgtggactcaagtcggcaaaattgtcttcccggtttacaccacggtaccaatctcggctggtccatcaatgaccggaaacgagaacgccgtggctataaccccggacgatcccgtgtcgaaggatcctcccgccgtagcggagaacagaacatcgacgtcatacgagcccgagaaggttcctagtgcggccaaaccttgtccttccgacaagaactgtgagccgacaaggacaactcccgaggtaacaaagccctggtgtcctatccacaaatccaggaagcacaacttgcaagcttgctgggtttttctcaacgtacaagctgaaattcatg

SEQ ID NO: 45137 - DNA, 406 bp, Oryza sativa
  unsure (1)..(406): unsure at all n locations
gcagcatgcaagctagatgccnccagccgagcgcgccgacatttattcatcgcagtactggaccacataaacatcgactgcaccggcggggccggggccacctccagacgacgctcacgccactccgacagcgcccctcctgccgtactcgtcgtcggtgccgacgaacgatggcatgaaacacagcatggcgaggaaaaaggcgcgctcttcgccgacgacatccatgcggcattgcccgtcggactcctgaggccgcgcgcggctcccgaggggggcaccggggcaatacagctcctcgtcgtccacagtgaccgacgacgagctcgcgccgatcatcaccgacgaggagggcggcgaggaggccgacacgaggacgctcttctcgtccctcagctactcctaa

SEQ ID NO: 45138 - DNA, 267 bp, Oryza sativa
gtcgagctgatgcgaacaagatcaggcagagaatagcagcgacgattcgtcttgttgaagtcgtctgcggcgatgaatcaacgagctcccaaagcgaagacgaagccggcgactcataaagttgattccatcgcactcgtcgtcatgaaactcggcggttgcccctacctggcgcgccaactgtcgaaacatgaattcggccataataataagtggtagcgcactatacctactagtggatgggtgcaaagacataggatatacaca

SEQ ID NO: 45139 - DNA, 401 bp, Oryza sativa
agcttgaacatcgagggtttaaatagtaaactttattcttgaaatttttcaaaacacgttagaactttgataatggtgttatctatggctttacaaaattttagcttaaaatatgactcatataaagataaataaaagaagaaaaatgctgttaatcagtaaagtggaacactttaatagttttagaggtaaaatgagtaaaaaataatttaaggggtaagtgaacaaaacaaatagtttgaggaagtaaaataaatttttcatgcctatgctatggaactatttattgatgttggaacccggacaacccaggtacacaaaggcccatcttagcggggatggctagttagcgacccatcgtgcgctccctccacgcatggcgcaaccacatggcgcgcatg

SEQ ID NO: 45140 - DNA, 282 bp, Oryza sativa
atctcaccacacgcagatgactatttatatctctgtccgtaaaagactattgggacctgaagatacatacctaaataagaataagtgcttgatatgaccacttgatatgttacatatctcaccgatagatcagataattatccgaaaattccttcaggtgcttagactctcataccctatatctatgattattcacgacccgagtataattgttttcatgtgtgccatctatgtaaaaatctataccgaaacactgtatagtgtatccacctactcctaggg

SEQ ID NO: 45141 - DNA, 397 bp, Oryza sativa
agctatgcccatcttttggaatgccttccgctttttcctatcctttgcttcggctggaaacgtgaaccatttctccattgccgaccaagctcgctctttctcggcttctgtgaccttcccgatatctttatggaggatcccgaagttctcacgtgccgctatcccgcagcagttagaccatcttccaatgacagtcctgggcgccgtgggcctaccactagcgtcaacctctcttataacttgcactgtggtcggccatatattttgtgaccgcggatttctactaaacctacttgcacttgtctcgcccgacatcgacgtatgttgttcctgcggcaattctgcagcacaaacagaaggcaatatttgctaaggggtgctagcataaaattatgtg

SEQ ID NO: 45142 - DNA, 260 bp, Oryza sativa
  unsure (1)..(260): unsure at all n locations
ttgtgatcttaatggctatcttatggagattgatcttcttgggcatangtaccctggtcggttggaaaggtttgcgcaaccttacccggcaggttggagtagtcggtctgtggtaaagtgacccctctgagaggtaactactattaaacaccatgtcacggtcatggcggagtatgtggtcccgtgcgatatatgttgcctggctttgaaaaagttgtgtggcgtgggatcgaaccagaatctcctatgtggagatggat

SEQ ID NO: 45143 - DNA, 404 bp, Oryza sativa
agcttgccaaccgctactgggttcgccttttttcttatgacgagatgaccaggcattagctccgtgggtcagacttttttattgtaagttgccgaagtgcttgtggtgtacttgtgcatgtgctcgagcgcttcgacccttacaccttccaagagttcgagcgattcctcgcgcccctcttcgccctcggagaacataacccttggtgagttagcccctagctccgctggggtcattgcctcatcgccataaagaagcataaatgggctaaacttggttggtcttgtgggggtcgtccgaagggcccaaagaaccgataacaattcttctggccatttgcctttcgccgccccctcaagtcttttctttagtgcttctaggatcttgccatttgcacgttcggc

SEQ ID NO: 45144 - DNA, 400 bp, Oryza sativa
  unsure (1)..(400): unsure at all n locations
tgaaatcactaagngcattatctctttctaagtttgggtcaaataggagacttgcgcttcatatcgacttaagagatgcttctcaacaactctgatggtactgtaccgtcctctcggttttaatttttactttattgattcacatgacatttgatgataatattttgtgacaatgatgtatattgatgattcgttaatttacgtataaacgctttcttatcaagtgcagtaagcacttaagtgacttgagtggtttgccatttctaatattatgcatagtattattangtgtgtctccacgacacccagataatcaatcaatcttttctttataatatgagtaaatctggatcatataatggcaatatgctatacacacgaaagtggaaagaacctatat

SEQ ID NO: 45145 - DNA, 403 bp, Oryza sativa
agctttctatgcttaagttccactccttttttattcttgcatacatctcaacaaaaagcattagttaccctctaattgtgttgtcattaacaccaaaataaatgagggggtcctagatgcacattcatgtcactagcacaagccctatgtgttccaaaaagcagattatatatgtggttcaaagaagggccgataccatgtcactctaactcgctaaagccttatttgaaggaagcaaataaaaatgaaaggttgcggtggtgtgtttgtatgttagatccaagtacattgccaaacagccccaagtttattgaaatagaaaatattatacacatagatgagaaatggtttaatggctcacaaatggagaatactttctacctgcatctggatgaagaggaac

SEQ ID NO: 45146 - DNA, 265 bp, Oryza sativa
tgtgtgcttagcatctacgtcctgatggaccatctgaaacatatgatcatgtatgaattgagttgctgctgccattggctccattttgttgaaatgagaatatgacatcacatcattttgcaagttacagtttgagaacttctgacactggacctcgtaatgcccttttctactacaagtactgatgtgtttacgaccacaagcattgagaaacgttatagaatacgcggaactgtatgccataagaggtcttttctacttcaaa

SEQ ID NO: 45147 - DNA, 405 bp, Oryza sativa
agcttgggagaggcaaaagagaagacaaattatggttgttaagacgaacaacaacaagcccaacaacaacaagtcgaagggtacatcccaagggaggaagatggagaatcttatgaaggcttttcaacaagtttgggctgccttcgagccactaagtgatgtagatggtgaaagtggagatgatgataaggggaagaacatctccgatgtttgcttcatggcacgtggtgaatctgacatagagtttgaacataatgaggtaagtgcgtttgaggaagctattaatattttgagtgaaaaaaaaagaagtgtgagaagatgtatagaaaacaggaatttatcattgaatctcttaaatctgaagttgcaagattaaaatctcttattcctaatgatgatgattgc

SEQ ID NO: 45148 - DNA, 401 bp, Oryza sativa
agctttgaaagccatgatcgctgcggtttattttgttcaaatctaaaacatcttccaaaccttcgagccaaaaaaaaaaaagagaaattaagaaaaagaatgaatggactccaaaattcttttgcacgaatacatgtggcctatccacaacttgatcgagcccccacaaagagcgtactaacatcagtagtaagttgcacttgcttcccctatataccctgtaaaactgcaatcatgaagcacaccaaaactgcaccttaatctccaaatcgcgacaacttccatatctgtagtgtacataggcagaactagcgagtcgccaattgagcttcaccattgaagatcaatcacgtaaaatgttaaggggcgctgtaagtcgagccaagttatgcagtcccagg

SEQ ID NO: 45149 - DNA, 462 bp, Oryza sativa
  unsure (1)..(462): unsure at all n locations
tgaagacgacactgcagcatggaggcgttctagactttctgctgcgcttctgctaccataggctaattaagggatggacaccaagcagacttcnggaaagagagggaaaagactgcaggctgacagagagattgggcccagcaagtgagaggactcttcctaattctgcccgaaaaggaataaggggactttaattacttttctaattaaattaatcactgaaatgatccttgaattgtaaaaatactcctattgctcaaataatttcaagaagaatcctgagaatactctgacactcaaagtgtttataaatattaaaactagaccatctaatgatgtatctaatatgtggataattactgaaatgttgtttgatgataaaattaggaattggctccgaaaatccaagaaagtccagagagataataaccatggataattaataaatattaatccatccat

SEQ ID NO: 45150 - DNA, 379 bp, Oryza sativa
agcttgccgtcgccgtcgccgatggcctgcatttttgtcaatggcaagcccttctccggcgcggagagtaatagaagtcagatgcataccgatattctcttggtctctatactctgtcccatatgatcatctatatatcccacacatttttatcaccgctgcctatcacaacaggaataataaccctaatgcactcatatgaaacttgagaattagtgccgttgaaattcgattgatcttattatctaatttgatgtagattaagttatcccttccaagagagaatctcttcttttaaaaataaaggatcccaaaattgttgtgatcatcatgcaaattagatgtaactccgtgaataactcctactcactcatccttg

SEQ ID NO: 45151 - DNA, 172 bp, Oryza sativa
aagaaggccaacaacacaatcggggttaaaagcaaagaaggagccaaacccgccaacatggagaggaaaggggaatcgaacctataaccgacgtccaaagcaaaagggggaaaaaaggctgaaaacaaataaaaaaaccaaaaggaaaaaaggtgcgggacaccaaaaccgc

SEQ ID NO: 45152 - DNA, 235 bp, Oryza sativa
aaggtgaaaccaattacttctagatagctccctggagaataagcactcaatgccgtgtactaaatgagagtgatccaccaacatatcaactgaagtgactatctagatgatgaggtacacaacctgtaatgccaacaccactatttgagcgggaacagccttccaaccctacaagagcatcaccttcagtcactgaacgccatattatacactttcacaacaatatcactacaaa

SEQ ID NO: 45153 - DNA, 400 bp, Oryza sativa
  unsure (1)..(400): unsure at all n locations
agcttggtaagnnttggcactaacaaagggagtattatttttattaaactttatgggaaaaatgtgggtagcaaaccaaatatgtatttactactattgaagttacaagaatttagtagcacaataaccaaacaaagcccttaattactttcggtcaaaactaacaaatattaacctctctaaaatcgaatttggtaggatttgtgaagatttaatgcgccacgtcagtccaccttttgcaaaagaaccccgctcgttcagttaattccgcaccaggtccccgctacggctctacgtccaccgtccgatctcgcggtaggttcgatcttaccgtccatgtgtctcactgtgacggcctttncacaccggttccccaccaccacgcgcggccgctcgcccc

SEQ ID NO: 45154 - DNA, 418 bp, Oryza sativa
ttaatttacctgcagcatcaagctttttgatttcttcaaatgagacattattttttgaaatcgaaataccaatggtcgtgtggaattattcagcgtctaccacctatattcatggtagcatacaagctttttagttattaccacgttagtcctcactaatagaggggtgaaaacacttactttgccataagttgggaaaattattttcttaccatataatggtgtgcctggttttgccactgaaacccttaagtccctgaaagcattatgcctataccatttgttttttctaatgcttaaaatgattgtagcataaagcagctgataaattatgtattgcggaacactgctaactgctaagaacttctaccatattactatgttatcatagatgattctaccaggtatactttctgat

SEQ ID NO: 45155 - DNA, 400 bp, Oryza sativa
agcttgctgtcgcaaagcggacagcaagatctttttttttatttaatgtgcactgatacttatattgaaatgtagcttgagctaaatccttgttgaatgagttattctaaaagagctgaattttggaattctatatgtgctcaggaaaaatatcagttacgcctgaaggttttagaagaaggactgagagggccaccaagtggctctagtcgtctgcctaccgagggaaagagcttcagcaatggcccttctcgtcggttatcactcggcggagctgataatatgtctaaattgtctccaaatggtttattagcaaggagatctccatcttttcattcaagatcctctctttcttctatcagcagcttggtcctaaagcatgctaaaggcacttcaaagt

SEQ ID NO: 45156 - DNA, 432 bp, Oryza sativa
  unsure (1)..(432): unsure at all n locations
tggtcactagcatcataatcatgagcaatatattgctgctatgatgcaagcttgctcacagtctgcaatttgntgtggaagactttactcttgcagctgacagtatcattcacattgaacacagagtgcgtgatcttgaccagcatcgtgggtgggacatttgcaaagttatcatggtcaagaatgtaagcagcaacctctcggagcccagtctcaccgaccggtactgatcttttgaggcctgtcagtccaaaggtcttccccacaaaacctttatgattatttggagcagatggttcttcatctggtggcttgacaattgcaacacgttccgcgtagatgttcttgaagtagtatgcgccacccatgccactattaacaggtaccgggtcaacaccattccttatggcttcacaacatccttagcaagct

SEQ ID NO: 45157 - DNA, 402 bp, Oryza sativa
  unsure (1)..(402): unsure at all n locations
agcttgtgtntagctntgtaaaaatactgctttgttcttatatgaaattctggcaacaaaccaagtgtatgagtactttgccatgtcatttttttttgtatgggcaatgaaccaaacacaccctaagttccctcttatctattcttaagccttccaccctcccttgacagtatatgggaatcgatcagttctaggattgccattttgtagcatttaattattttttgccactgacgtggaagcacctgaagagtgaaatctttatgccaagtgggaagtaacccaaagtttgtacccctgacctcccccaagtctttagtcctgggccactaactacatcctcccccaaggtagaaaggaagaggagcggttcatggtgcacctatgaggtgaagcttcctg

SEQ ID NO: 45158 - DNA, 305 bp, Oryza sativa
ttcactatagacttgggatcacttgttttatactacaatatttgttaactttttctttcatagatttgcggttagataatccacactaataggtcctttaataatctaaaacaaacacacaaccttattttacccaaccgcttccatttacacgttgttggcgacatataatatgtacaccagctctcacgtgtacacacgtacacaccaactaccatatgtcactaaacaattctgaaaaattcatatatgtattttcaacatgattatacctacggataaaagattaccctaaatttattata

SEQ ID NO: 45159 - DNA, 395 bp, Oryza sativa
agctatgtctgaatatgcacacacggacgatgactttttgctggctttggcctctcttctcctcctcctctaggctacaagagcacatggtatgtatgccattcatggccagccacccatcaatcttctccgtttgtttggatcaccgatcagtggcgtattaatttcacttggagcgatcattgaaaaacttatttgagctcctgaaaatgcatggatcaagctggacaggcagttacatgaagcaatcaacaacaaggtgagtactaatatatgagcaattccaagttgttcttcctgtcagaaacaaaatgctcaaagattgctcatttctttgcatctttgttccagcaagagatcatacttgactgaaaagccgagcaatcactaaatac

SEQ ID NO: 45160 - DNA, 180 bp, Oryza sativa
tcgtgaaagaaagaggtcgaaggctttgtttggactgtgtctctctataatagggggctccactggtcgtgcaactatatataggtcaaccatggcaatcagcaatcatgccacaatctaacctatattttcataaagttataattatagccatataaccatgccacatcatcacccatt

SEQ ID NO: 45161 - DNA, 174 bp, Oryza sativa
ccagggtacgacagaggcctactgaccacgattatttcatatgactacacaagttaaacctcaaacaaaactcagagggcatagccccatattatcaatatgtgcacataactactaagagcaaagggcaaaagcttatcttcagtgtcattctgacagagatagttatattat

SEQ ID NO: 45162 - DNA, 390 bp, Oryza sativa
agcttggcgacttcggactcgcgaggcttgtttactatggccggagctcccacaccacggtgatcgccggcacgatggggtacatggatcccgagtgcatgatcaccggtagggccaacactgagtccgacatatacagcttcggtatcgtcctcctcgagattgcctgcggccgaccgccggtaatggcaccggaacaccaagctgagaaaggacaagacatgatccaccttgttcaatgggtctgggatctgtaccgcaaggggagaattcttgacgccgccgatcaccggctcgatggcgaattcaacggcggggagatggagcgtgtcatgatcgtcgggctctggtgcgcgcaccctgacaggagcgtgatgccggtgatcatgc

SEQ ID NO: 45163 - DNA, 399 bp, Oryza sativa
agcttataatcacgattgcgaagctctttcttcttcaaaactcatgttgcacatgaagaacctttattctgaaaggaaaaaaatcaatattcattttgaaaggaaaaatcaatatttattttgaaaagaaaaaaatcatctcttttgcacttctgcttatgtaagtagggtatatgtcctgtgaaaacacgtgaaagatgaacataaaaagttttataatttcatgaaaaaatactagagataggtattgatatgaatacattctcaccacacctcaaacttatactattaacctgactttttattctttagaataaagttgagcttatacttaagatttggcgggaattatctcatattatactgatctctgtagtattttttttattaaatcaattt

SEQ ID NO: 45164 - DNA, 311 bp, Oryza sativa
  unsure (1)..(311): unsure at all n locations
aacaacaaacgcacgagaaaccccaccccagtctccttcaccaagacattgcagaaccaataaaaacattctatgctctatttcagtccaaggcgnacctgaaacacaacatcagcccttgagttgaaactggaccgaaaaatcccagatggcacctgagaaaaaataacccacgaccccatcttattacaggaaagatcattatattgacagtgacctggcttttcagacagccaacagtagtccaacaaagaggtaaaaccaactcacacaacgagggttacacccaccggagcataccaactaccgac

SEQ ID NO: 45165 - DNA, 426 bp, Oryza sativa
  unsure (1)..(426): unsure at all n locations
ntaagctggcaactcaacagtagtaaaccacaagttgtcnttattattttcagcctattcactgagttatcaaaatacttcacgactcacaaagaatacgttgtttcaacataattctctgtcactatagtattgggatcacttgtttaaactacagcatttggttaactgttttttgtcaaatatgtggttgtagataatccacactaatatggcctttaataatctataacaaacaaacaaccttatattacccaaccgcttccattacacttgtttggaacatattatatgtacaccatctctcacgtgtacacacgtacacaccaactaccaaatgtcacatatgaatctagacatattcatatatgtatattcaacacgattatacctatggataaaatattaaccctaaattcattatat

SEQ ID NO: 45166 - DNA, 375 bp, Oryza sativa
agcttgggctacgctaatgaggatagctgttttcttagcgctcacacggctcaagatccacagccacacaccgatgggttcatacgccgggatgaatatcttgattcttactattgcttataatcaaatgaggatagacttagcgccagtccgagacatcgatggtgaacctggaaatgaagaataaggggagaacttttttcctgctggggtgattacgcgagaagatcttggcacctcgcttgaacatcttagtagccaagcctatcacctagctggcaatattatgcgtgacaccaaaatagatgcgaaaacatgtattgacaacactggtggatctttgaatatcttagatgagcagatgcaagactacac

SEQ ID NO: 45167 - DNA, 121 bp, Oryza sativa
  unsure (1)..(121): unsure at all n locations
tatatagaggctggcncattttaacattcaggttcatagcattcagatggcatcattcatgcgtacattgcagttatacagatccatgctaccgaaaggactggtgttgccaaacaaatta

SEQ ID NO: 45168 - DNA, 346 bp, Oryza sativa
ataggatacatcacgagttgcacgatgcacaccattctgtgcgaagtctgaaacataagaccatctgcgtattaaaagcttaaccggaccaaccgcggggaggagcagtgccattaacgactaaaaatttgcaatcagcggttaatatccctaatattatacaatatacgcttaatattctgtgtgacatagcttcaaatcttatattctttgctagatcatattggagaaaaatttataacgggtcgaaaatttatactttctataaagtatgaaaaaaatgaacattattaaaatactatcaatctaatcacaaatatagaaccatgaatttttgaagctatga

SEQ ID NO: 45169 - DNA, 357 bp, Oryza sativa
ctattacgtgaactatataaactcaagctatcataatcagaccgatagattatggtgaataattattgagtgtttcttacagaagtagtaatataataaaatcctaattcagtccggtgatatacgtattcagctgtatttacagttttacactcatgacatcaaatcaagtaactaatcaactaatagcacatttgtttggcaacaagtatatacagatgacattctgtatttcgtaacatagcaagtgaatgcaagagaagtaattctgcgagtagaacggactaaaccaaacaatacatgtattgtttaatatgcctctataatatatctctacactataagacatctgatcta

SEQ ID NO: 45170 - DNA, 393 bp, Oryza sativa
agcttaacttagagggtgttgattgaaatattttgtcccctcatccaggatcttagtgaggctcttatttatgcatgtactagccagaacatatcttaaataatcttaactttatgagcctttagagtatagatccatgagcaaaagcttggcttaataataattcgatcctgggacatatctttcacaactatatcaatgtgttaggcaaaaaacacataacatgttgctagtacaatagaaaaccgcgttcaattagtgcacaacttataacacagtataattgagtgggttacacctttttgagtggtttataagcgctatttaccactcttagttctgagaaatattcttatatatatgattaatcataacatgcttttaaatctaact

SEQ ID NO: 45171 - DNA, 301 bp, Oryza sativa
  unsure (1)..(301): unsure at all n locations
ngnncactctggattgggcagacaataacgttgatggagaatattctgtgtcactgtgcagcatctaacacatgaaggacttgagcttatcacacaataagtattctggtataatgccgacttgtgtgttcactgatattcttgagctgtggaccttgagtgcctcaaacatccagcttggaagtctagagttcggtgtgatgataaaactgtccatacggtttgctatgcacctacataacatcaaatttgaaagaacactgactcgtaatctgtcacagatcacttgtcaacatggatt

SEQ ID NO: 45172 - DNA, 419 bp, Oryza sativa
tagaacgaactgcagcatgcaagcttatcgacaatattggcagacgtaaccagttattattatgcagcagaaacaaattaacatcacaaaattgttgcgtttgtcagaaacttaacgataatccaagcataccatctgaacttctctgccttgtgcaagctgctttggctgatgaataagatgcctcaatcaaatgaagaagccggcatggcgtcatcggctggggagaagatgggccttcggatccagaaggcaggcagccctctctcttggacatcagcctccacaatcctctttctccccggccaccgtgtggggctgtgacgagccgacaactgggtgaggggctacagctgctcgtgccggccttctttccagacaagatctgagtatatgagaacacgagtttgcatgagatg

SEQ ID NO: 45173 - DNA, 400 bp, Oryza sativa
agctatgacttactcccataccagggaagaattctttttctgtatcttccggacaaaagaagagagaatcttaattcttgaggctcacttcccgaatgaacagcgttatcttttcgcttatgcttatgcctttgaactaaaatttgaatctttaacttcaaatttggagttgaatttggggttctttcattgaaatttattattcagcttttgcttttaaattgctaaaaacacgtatataaaagttttattcacaaattatttttccgttgcaaatatgccataacgatgggaccggaaaacataatatcttaagatcagtcctacaacaatactgtctgaaggcagggagaatctttcaattttttagctgtagaaacagagtacatacttacacatg

SEQ ID NO: 45174 - DNA, 397 bp, Oryza sativa
agctttgcttgggggtcaagataatctacgttatatttgggacccctgagggcggttaggatcattgaatctcatcgccaacacacccaccaaagtttacgaagtctgagtacacggagcctactcgccgggagatctcgtcgaatcccttgactacgatctcgtcggtatcgcctgtttcggttactctctttgtaatatgttctcatcatcatcaatcccatgtaaactggactagggctattacctgataaggggcctgaaccaatataatccttgtcttttgtctgctttaatgtcatactacgtaaacccctgttccaacgtaccctaataacttattcatccggtccgcgagtatcactcgtcgacatgttccaccaaaaatgtttcacct

SEQ ID NO: 45175 - DNA, 396 bp, Oryza sativa
  unsure (1)..(396): unsure at all n locations
cttatatagacctgctgcatgcaagctatccanacatggacgaaaggagaggcattgtctatggcctctggattgaaccgatgcagactgactccatagaaactcaatatcccccggaagaactctgaggtcggaagagcgaatccgccctaaaaaaatgagcaaaaacctcgatctcatgtgtatcggaggcccatgaatcttgaccacatgctggacgccattcgataatctgcttggctgggagaacgccgagcgccaccatattctttaagtttccctccaggatgtcggacgacgcccattggccttcaaagctctctttttctttcgccatcgnattgatccgaatgagcggaattaatacaatgcatcgcttgggagagatgtggaaac

SEQ ID NO: 45176 - DNA, 176 bp, Oryza sativa
aggactgttgttgccaacaaattaccaagctatttccggtcagactatttgcagaagctaaggctttaaccattgcagaaagcatataacagttcacaactggagcaaagaaaccaatatgcgatacgcagtcaaactcagttcacaacctgtcttcacgacttctttgtgcaagc

SEQ ID NO: 45177 - DNA, 363 bp, Oryza sativa
ttgccggtcggaaagaaatcttgggcacctgttactttgccgcttgtaaaacaaaggctaacaccacttacatatcttaatctgcggacttttctcaaagaagaagaagataaagaagaagaagatttttttccattactctgccagtccttcataaaccataatgaatatatagattgccccgtgcatgtaccaagatcagttgtaactactggaatcagaacgcgaaatgaacacgctatgccttactaaaatgacgataggacacatcagaaatgggaaggtcttgcatgaacagctggagtcagcataaatcaacgctacaccgctatccttactaacaggccaatggaactagcaagc

SEQ ID NO: 45178 - DNA, 399 bp, Oryza sativa
agcaagcttttccacctcgacaatggccgccgccttatatgtgcccccgtcgtcttccacaagcagcagctcaccacacaacaccacattcacgcacttcactgagctggtcaagggtacgcaccggttcaccgtcgccggattcagcctgcataagagaaacggcgccggacacttcgccaaatcaagctccttcgatgtcggcgggtacagttgggcggtcatgttctacgctgccggcgagaaggaggaagatcaaggacatgtgtccgtgttcctcgagctgcaaagcaccggcgtagagaaagttacggtgaagtacacattcaacatcagtggcagctcgttgctgtcagcagggtgaggtgatttcaagcctagcagcaaatgtcgattggg

SEQ ID NO: 45179 - DNA, 400 bp, Oryza sativa
agcttgaggaaataaaaagacctcaatctattttgggagatcgagaatgattctaccgaatttgatagggaggatcgggtcccgcattgtacgaagacgggactacctttcggagattgaagacagcattgtgcaagccatgcttgtaactccacttgtgggctgggccgaaaaaaggtatgacgaatggaaggaggtagcggactatgctaaggcggactaacaaataagaaaagaatgtgctttcagtctaaaaccaaggaaaaaattcatttacttttttaattataatgtttagtgattataatgttttaatttattgcttagctcttaataattggcgtatcattgaaaaaaatgtatctacccattgcaacgtacgggtattttcttagtaaac

SEQ ID NO: 45180 - DNA, 262 bp, Oryza sativa
aagtccaaagatgactcttagagacaggtgaagttgctctacaaagtgcgacaccacaatgtcgtcgcactaagaggcttctactggacttcgtcgctgcagctcctcatctatgattacctgcccggaggaaatttgcacaaacacctccatgagtgcacggaggacaactcgctctcttggatggaaagggttgacattatacttggagttgctatgggtctgacacatctgcaccagcgtgggatcattcattacaatc

SEQ ID NO: 45181 - DNA, 395 bp, Oryza sativa
  unsure (1)..(395): unsure at all n locations
gagcttgtcaattatatgacgtgggtgtcccatatgtttaatngcgccacttacgtaaccttgtcaacgctacactggttaattcgagaggtcctttggaacatactacaatttttagagtgcaagaattaaaagaagcatatgatctaattcgttgatacctcaaatcttatgaattgattagaaaataaatgatatgtttggatagacagtatgaaaaacagatgaatcaaagtagagggatagacttgaagaaaactttccaagagatttggccctccgtgggaagtcctccaaaattcttatgatttgagacgctccaatagaatttcaaaggagtcttaaacaaaactgctactttgatctagacgaattcttcccattgaaatcaaacc

SEQ ID NO: 45182 - DNA, 400 bp, Oryza sativa
agcttgtcaatttcatagcgaacacacttagtttccagcgcaagcactgcaaaccatccctctcacttggccgttctcgtgctggggctcaacatacttggtccattcccacgaggacaggccggctacaaattcctgttcgtggcgatcgacaaattcaccaaatggattgaggcaatacccacgggggaaatcaaggccgacaatgccatcaaattcattaaaaggatattttgtagatatggattgcctcaccgcatcataacggataacggctcccagttcattagcgccgatttccaagattactgcatcggactggaagtcaagatctgcttcgcctcggtttctcaccctcagagcaacggacagttcgagaggacaaacggcatagtactac

SEQ ID NO: 45183 - DNA, 438 bp, Oryza sativa
  unsure (1)..(438): unsure at all n locations
actaagcttactggtcgacacctntaaatgcattgtccgactcctatttagtgagtaactgcgggataaaaggattttaaggtattgtgcacttaatctcccgcacctttgcctaagcgaaaaaaaatgcctaagtccctaaaagaacgtgacaggccacacctgaaaatatgagctgcagacgtattatgcctagacctaaattatgtataccgatacccttagaatatgacgtatagaacacaccagttgatatgacttcgagtgatgaatgatatgcatgatgctaatcaagcgtatggatcccgtttgaaaagtcgataggccatgttattatgatccatgatgtcctatagttcacgtgagaccgtcagggaatcatgatagacactcgtttgacatgaaggtcccgtataccatgaatcatgtgatgttctg

SEQ ID NO: 45184 - DNA, 395 bp, Oryza sativa
agcttgcaacttagttgtaggtggaaaaatcatgccatcttagaatttgttgccgtcaagtagcatatagacaggagtctggagccagcacaattacatgcagtgctccgcccggcgctaagctagtcaagccgcataatataaactagcacctaacagccacccagacaggataaatcagctgggaaggatatataagagggtggcacctaagtgccaccaaaatgagctatgtctccacctaggggatcactgattgcatgagaatcggcaaggactaacatgttgaggcaacgaaccaagtgctacggtatcaaaatatatgaagttgcaagatgcaaatcagattgcataaagtatacatgcataaagtagtcccatgcgagacatgggtg

SEQ ID NO: 45185 - DNA, 245 bp, Oryza sativa
agcctccatgatccgaagttgcctgcattaaacaaactaagctggctagcctgcacacaagagtacattgcttaatactacggaatgcatgggccgtcaaaagtaattcatagttggtgtataatgtcatgggtgtagacagcgatgtttctggatagctgcatttgtgtttcacacaatgatcactacagttggtgaccttgctggttaacattcttgcattgtcacacaagtctagccgtgga

SEQ ID NO: 45186 - DNA, 376 bp, Oryza sativa
  unsure (1)..(376): unsure at all n locations
agcttaaagtgggttgggaggaagtgctgtctgatggaatcggcngcacacgcgtgcaagaccgggcggaggttaacgacaaccctaaggtgcgggagcagatgattcttgttttcttcctttttgtgcacgtttttctggtgtatagtgagggattacaggattgaagatgaaaatggtgctttttatattagcatagataaagcttcacgtgggttgggtggaaatgcgggcagagggaatctgcggcgcatgcgtgccgtgctgggcggaagttaacaacgacgcaaatatgccggagcggatgggttttcatttatgtgtctctttttggcgcgttttcgggtgtagagtgaggggtgggtttcacacggag

SEQ ID NO: 45187 - DNA, 375 bp, Oryza sativa
atatcctagaatcattacatctagcatgttatatgctcgtgtgatgatctgtaaatatgaattgcatactaccacacagtcatacttgattggcatgttaacagcaacatgatggatcaccataaatgaactgtgaggtcagattattctctctgctattatctactacgatacatcaagtaagaagcttcatgtttactccacattgacatggaagaatccaaccaatgctgatacaacatatcatatcatatataagcaagttgcagacaaacagcatgaagattagcgagagacttcgctagcttacatcttggatgtacacatcctctactatgtggataagatcttcgcaactggactttggaggtttat

SEQ ID NO: 45188 - DNA, 385 bp, Oryza sativa
gatcaaaatgatatcggataatgtgtttacctgtgatgaattccggtcggggacgagtaagctcttgtgcttttgcaagagagctggatcctgggtcattactggcatcctttccaaaagggtagttcgcttgagtttcaacttcatgaatctcttggtttggttctgtgcccaactggtttccagtcgggggctcctggttaactccaattccagcttcggccgactgggttccagtcgggggttcgctgctgggttctacattgtcggttgccggatgattgtcactcgggtgatcttttgtagtcggctcgggttcttttgaagaacccgtctccatgttagtctgatcaaaatctcttctagaacgatctatgtcagatgt

SEQ ID NO: 45189 - DNA, 287 bp, Oryza sativa
aatgatcacaatatatagggcaagggattataatactgtacaccttatatacaggataatagcctaccacctatggataaataaatacatgctcaactaataaaggcttaattatgataaggatggtgtattcatggtacttagctgcaaggagcaccaagtgttgtgaattataataatgttggtacttaacgggaaaaaaattaggaacacaacagatatagcttctttttattaaaaaatatgtagctatttatctctatcccatgaaatataacgtatttttt

SEQ ID NO: 45190 - DNA, 395 bp, Oryza sativa
  unsure (1)..(395): unsure at all n locations
tatatcttaattatcttgaagccgattgttaangattcttcaaataattgaacacatcatatctccaatcatcggctggaattgcagcaatctctatgtcaacacctttcatcatcggtttatattctgatgccccctgagccaaatcattaacttccatgttctgctctcgaggaatatgtttcaatgtgaccaaccgaaatccattcatcaattccttgcacctctcatgataaatcatcaataaatcattttacactcatattctccagctagttgattaattactaataaagaatcacccataatttcaatagcatcggcttcaatctccttcaaaagttacaaacccttaagaactgcttcatattcagcttgattatttgtaacataag

SEQ ID NO: 45191 - DNA, 405 bp, Oryza sativa
  unsure (1)..(405): unsure at all n locations
agcttagctgcttctgcttcctttaattggctatttaaatatatatgncntttttttactttttttttgttgttggcaaaatttgtccttccttttgctttaattcttgtgctggtattgagctagggattgggctggattagattagccaataaaagattatggaggagtgtagtgtaattatgggttatggcttaattgctctccctaatcaccttctaaagatagccaaaaaggttgttgatgtgctctggttaagtgcaatgcaactacctctacataagctgaacaggtgcaactgatccagcaatgatcaggctattttgacgtgttaatttttgggggttttttagttgttgttttgatgtaactttttttagaaatttgggagaaatttaaaatatg

SEQ ID NO: 45192 - DNA, 373 bp, Oryza sativa
actcagcttacagtagtggtatgctggctacagcgaacatgacatatttgctcagtagcaatcatatccttaaagcatcacagctagcagttataagcacatgtgcgatcagaaaatgaatggatcttcacacagcaatcttgaaggcatggaacagctccgtatgaccagcatcaaaatatcaggaggaaaacctaacattagagatgattgtgacgtcgattcattgctgtttattgttcagcattaactctcaactcacggccttggagcgctattcatgtcactacaaccactaggctacgtgacattgcgcaactctcttttttcaacatataattgcagctttactcgcattttggtgctactgcat

SEQ ID NO: 45193 - DNA, 308 bp, Oryza sativa
ctggagctgggccacagccagatgtattcctgtctgagctagtcgtgcttgatggaagatcatccacatcctcggtaatgatcatattgcttgtgctcctgctgcgagctttccctctgtgcataaattcaattaagacaaattctagttgccaagagaagtaatgcaaaattaagacagaatgctaaccaacctgttgcgtgagatgcgatcgttactacctaacattccatgtattttgcctcgcgcaatggtccaaggaggagcctgagcattacattactactactcacatagatacccatgct

SEQ ID NO: 45194 - DNA, 393 bp, Oryza sativa
agcttacctgactgtacacaagaagatccactttagagctaactgataaaaataagagaacagtgatgggtctaaatagtagtggtgtcaaaattcctgtatcaaaaacacacgcaattacaaatttaccattgggttgaattccacgttattgcaagactgctattaaaaaattacaaaaataccatagaattatcattcgagtagcattcttacataattgaaaaaaatcacactggtggagaaaccatctttcgtcgggcggccgatttccacaatagtcccggatgcaataaaaaccggggctaaagatgatctttagtcccggttcaaaagggtaacgggcatatttgatctttattcccggtttgtgtaccaaccgggactaaagat

SEQ ID NO: 45195 - DNA, 200 bp, Oryza sativa
ctaagcggaagatcaacggctcagtgggaaggcctctagcatgtaaaactgaagctgaagatgcaatgctatccagaggatgcttggagatggtatgacaatgaaacctcagttggagtcaatgatggggatctccgatattgtaactgaacaagccatccttcactgccattcgggaatactgaactggactaatcaca

SEQ ID NO: 45196 - DNA, 400 bp, Oryza sativa
agcttggctccttaatcccttgtaaacactttattaattcctgagaagtttgaagattcaacgaattgtattggctaattaagccctagtttttattggttgagctctagtcttaatttgtaaattcttggcaacgcaacgcaagctggcctaccaatgaaatataaaagatcacaagcagtttgtcccataacaattgtacttttaggatttgaatttgtaaagatgcacttgatagtgcactggctagggatgcatggtttcaatcccaaggtcctatgttcaatccccaacacgctcacaatttcttcttactcacaatagagtattaatggtcgcattaatcacttttcattcaaatttctttctattttaccatcaactactctgtcactcttac

SEQ ID NO: 45197 - DNA, 367 bp, Oryza sativa
taccctaatattcactgtgagatgaatctctaaggagatgtgtatatgcttcacggctgtaatggtttgtcagtaaatttctgacactcaattgcaaacttgacataacaaatttctggaagactataactgcgatattttgatgaccacttacccgaataacttggaaaacatgtaaactaacgctttcagcagacttcaagtttattaaaaatttgtgactttaacgtaaaacggacgatatctctctaaagtcttcgtttttaaagagagtagacatctggttcattccaagaaaaaaatgttattttttctatatggaagacttccttatgcttgagtaattcaaaaatatttaatatctatt

SEQ ID NO: 45198 - DNA, 399 bp, Oryza sativa
agctttacgacaagtccttttctggccaaacttgcttatagatgcattcaacaccgcccggcgatgtgaaccctgtctatttcacaggatacacacacagttacccgcgcgagcgctccaaactatacctatgacttggccgctctcgagctgggggctacatatacttgggccattccgacgaggacaggacggataccgattcctattcgaggggatagacaaaatcaccaaatggatataagcagtgcccacgggggaaatcatggccgacatcgccagtatatttatcatagggatattctgaagactcggactactgcaccgcatgatagaccgacccggctcccaattcatcaccaccgacttacaagattactgcatcaggatgggagtcat

SEQ ID NO: 45199 - DNA, 402 bp, Oryza sativa
agcttcaactaaatgatgctgctttaattgttgtattcctgccctatatatcttgagacaggatcaccagattagcacaaatgcatatttcaagctgttttggtttgtttgcatttccagtatatgaagttgaagcatcttcttacttacctttgtccctgcatcacaatgcatctgtagaaacttcatagaggaacatgatactccatattgaatgcaggcaaaataaaggcaatatgattttgatgaagaaactctatattttttatctcatttttataaaattgaaatatgcagtaaaagttgattgtggaaagaatgaatacattacttcagttagaaagaaaagttgatgcatttcttctcatttagagttaggcgagtgaatgtttggatcatatg

SEQ ID NO: 45200 - DNA, 270 bp, Oryza sativa
  unsure (1)..(270): unsure at all n locations
aattatgacagaatgctaccaacctgttgcgtgatatctgatctgtactttctaacaaggtatttattttgccttgcgcattgttcatagtagcagactcagatgaacatgacaatgacttattctccatagtagaatgtttcttctgaatctgaacattnttcatctcaacatcaacatcattcatcctattaacaggctttgaaatatattgactgtgtcagtttggaactctgacatacctcaattgacccatctaaattgtctgaa

SEQ ID NO: 45201 - DNA, 402 bp, Oryza sativa
gagctttagagaaactacggcggctaataacattctccaagcagcgggaaagggctaagccacgctacactcccaacaaattcccaaaagcggtgacgccaactaaagaccataaatggccctccgcatggatggactctaaaaccactgggatcgaagaaagagcggagttaaaaaccctatagtttcgctccttccacagacaccaagagaccaggagcaccatggagtccaagctgtcgcggaggtgctctggtaagcacgccctagaggatggccaccagtcctggaaccaattgccacggggtggagagagggcagaccggccataatgcgacaacacccggagccagacctgccgagcgaacacgcagtcgatgagaatgtggctcgccgtctcaa

SEQ ID NO: 45202 - DNA, 201 bp, Oryza sativa
atagatacttatgcagcatatatttacatgacctacaagtaatataaaagtaatctattacatatgccatgacaatatttcagtgagagaatgtctaatgctaacaatcatataagcagctgtaataaactcgagataacaaaaggctactatacagcaagctttccataccctcattccgatgtttcgtgacctcggatg

SEQ ID NO: 45203 - DNA, 396 bp, Oryza sativa
agcttatcaagataccgcttgatttttcatgataatatagcagtatataaaaaaaacaggggtacatacgcgttgtgttctgttctaagacgccctatgtttttcaaccttttgttttgaacagaggcatgctgtgaattaatcaaggccaagtcttttccagagtttggtgtccaagagccattattcaccgtgtgctttagtgaacacagatctatttcaaaatcatactgtaattctggtatggtatcttcaatatcacaaagatcatcttcatataattcttgctcataaggtgattcttcatattcatgttctggacttggaggtatctcaataatgggctcacacttatagatggattctcttccagcaggcatgtttattttgatttgc

SEQ ID NO: 45204 - DNA, 338 bp, Oryza sativa
acctggatcgaatcatgacacgccatactatatgaccacaatgcttcgtccaaccgagtatgccattgccgaagataatcagaattgtttctcttaatcaacttgattaagctcttgttagatgcctcggcttgcccattagcttgtgcataatatggtgaagaattcatcaatttgatacccatgctatcgacgaactgaacaaacatcatagacacgaagatcgacctagtccatcatataagtactcgtatacatgtcactgatatcagtaaccaagatgaccatacattctccatatcaatgtaagtgtatataaaagctgtctctttttcaca

SEQ ID NO: 45205 - DNA, 418 bp, Oryza sativa
  unsure (1)..(418): unsure at all n locations
cttaagtcacctgcggcctgcaagcttgntgtatgacagatggagctctctgagtatcgtgaggtcgcccacaacaggcgagagggtgccaacgaagcccagaccctgcacgcgcaaagagaccacacgacgatggcgcgcaccactggagcacgtgacgcctctccatgagcagaagccattggtgccatcagaggcgccattgctgacaacactccaggaagacagtgcatccgaatgatcctttgctatgtgggatctgaatgataagagagcgtggaggtcatcaccggcgtcgatggagcgggaagccggtgcgagaaagaggaagatgacagcggagggaagagcaagcagctggaggagcacacgtgtgatcgccatggatgtgatgggcaaagataactaaaaaaggacg

SEQ ID NO: 45206 - DNA, 398 bp, Oryza sativa
agcttgcattaacaccatgtgttctttgtttgctaactggcaggcaggcacggcatgccacataatactcacataataattggctgagattgttaatcacataacaattttaatgtcatgtcatatgacatgtgaatgttggtcctaattctttttccttgttttacagaattacatgaagactgggacttgcaaaatttgtaacaagtgcaaatatcaccatcctaagcaagacggagctgtgctacctgttatgttaaacaacagtggatttcctatactcctggcgtgaaatctctcgtataatattgcttattcatacacttgtttttcctgttctgagaaatacatgttggtacaaacacaatgcatggtgataaggaatgcttctactacat

SEQ ID NO: 45207 - DNA, 203 bp, Oryza sativa
taacctatcggtatatccgcacgagtggaccttatgagttatgatataatgtgaaaattacattgtctggataatgtaattaatgttgacataaacataaatttacagcatgcatgacatgacataagtaaggtcaaagtctggcatattactaccatactatcggtatgcatcacgagacttattgcccaactaattattat

SEQ ID NO: 45208 - DNA, 447 bp, Oryza sativa
tccttaagcacctgggctgcagctgtctaaaccattcaccattgtctttttgttagggacctgacaattgattgtcggcgatgtcgaaccaatagaggttggaaagattgcccatagaagctggtatttttccagagaactgatttgagttcaatgccctgaaagacagattatgtcagtcttcttctccagacactaagttgcagaagtctcccaattgtatgtctactaattcaccagtgagtaattctcacatgtaagacaattttggcagactccctagctcatccgggatgttgccatggaaactgcaaccggccagaatcctacataataggcagcgcatgagcatactaacttcttagatggcagaaacctgaaagagaaatactttcagaacttacaaggtggtaagctgcttcaagtttccgatgtttggagtgagca

SEQ ID NO: 45209 - DNA, 442 bp, Oryza sativa
  unsure (1)..(442): unsure at all n locations
tcatgcatacttgtgcataaaacgctggtnaattaatgcaccctctctgctattcaggtttcattgtatatggacaagtgtgcaggagtttgccagtcaattctccatgattgcaaattgacattccttcagataatatgtgaccatgatctttttgttgagatgcctggtcgtgacccctctgataggtatgttggcccttaggtccctcatttgtggatgtttgccttcccaatatatgttggcaatactcatctgcttctcaaacatattttggtggactggcaatttattcagagactttaggcttctttctttaagctcgaaatatttcttaacatgaaggcattcatactctgttagttatacaaatcttggtatggggattttatacatttctaattcttatattggtcattcctcgattctttttgaataaata

SEQ ID NO: 45210 - DNA, 438 bp, Oryza sativa
  unsure (1)..(438): unsure at all n locations
cctgccgcatgcaagcttcgatggcatcgactacacccacttatcttgcatgtgctaaggacccttacccactgcctcgcatagatcagactgcctactacacagtgcngtgcgaccttctgtgttacctagatgcatactctgggtaccatctaattctgctggctcgtgaggatgaggaacaaactgctggcattacccccatatgaacttattgatatacgacactgcccttcgggctaaagaatgcaggtcctacttttcaacgtactactcgaatttctttgggtagccaaataggacgcaatgatgaggcttatgtcgatgacttggatgcgaagactcgcaccctagagtagttactctactatctagaggaaacttttgaaagtctccgcttccgccgcataaagttgaatcccgacgagtgcgtgttcg

SEQ ID NO: 45211 - DNA, 427 bp, Oryza sativa
  unsure (1)..(427): unsure at all n locations
agcttcatcgagaggaccagagtagatactgtctcctacgacaactttgttcggtggtagcgccgccatggtgactttgacaaaatggtcgagtgatggcgccggacgtggagaataacggcgggagaaaggggcggtgatacagggtaattttctccaaagacaaaaatgcccttggtaaaacggcttaggctattgaagcacttctaatctgaacctctcatcttcgttaaaaattgtgcaattttttctttgaagagcatagaagcacatctcatagtgtactcttttgagtaattctagcgtaaattgtatcgttggtacgtgaacttgcgaggtgagtgtgatttagtatatggaatttgtgagatactcattttaatggataaacttgtctggtccatataaaccanagcatcaacatgtc

SEQ ID NO: 45212 - DNA, 465 bp, Oryza sativa
atccttatagtcacctgcggcagcaagctttctcaagctactggttctagatgtatatgacgaactctagacagatggatcttatatgaatcggatgatgaagtaccacatgagtggatatatatgaaaggaattcaaatctgccaaatcgctcatgttatgatcttttacattctatgtatccgcgttccgtcatctggcttatgttcttcatgtatcattcatatcgcatgactctatgaaaatacgtcgatacttctacatattatgggtaacgtatgagacatccctaatgtcccccgggggtcttaattaccactgcttatcttttaattcgcctctgaccatcgaattaaatgtgaataacccgtcctcctctgtttgaaacaaagggcgcttccagttctgtgcgtgcttcaaacaattatgtcttctccatattaccatatctctagagtcaataat

SEQ ID NO: 45213 - DNA, 459 bp, Oryza sativa
  unsure (1)..(459): unsure at all n locations
agcttctttatagctggtgtgctatgtgaattttcaatgatgtaaccaactttaggttacactcatcatattttacaaagcagtcggtatatcactcggatcatgttattcagggattcacaccgcatatgctacatattaatatcaggtcgcttggttgactataattattaaaaccactcggttggttggattatttattccttgactatatgcttggtttgttcaattaaccatatagtcgggggctacacctattaggtgcatctagtcgatgcacctgactntatttttcagccctccacagtcttcatatttggtaaaagtacttcggagaccatggcgaagatgattgaagcactcagctttggagtaatctagttcgagagaagattatcttttcgactgtgaaggtctcaggggctactgtggagattatgggtaccccatacccacatg

SEQ ID NO: 45214 - DNA, 395 bp, Oryza sativa
agctttcggaatccatgataccccatcgttgtgttcacaggctacttaatccgactgaggacgtagtagatgcaagccaacacttatactattgcaaaataaaacacaatatttacagtatacagattacagggtgcagtttataaatgcgcagtcttgtgatgacaaatacatttagctggagtatattatattaggcctggtttagtttctaaccttttctttaaacttccaactttcggtcacattaaaactttcttacatacataaacttttaactttttcgtcacatcgtttcattgttattcaaacttttaattgtagcgtgaactaaacacccttgattggtataactactccattatcagacgaacacctgtaccgttctaaataac

SEQ ID NO: 45215 - DNA, 450 bp, Oryza sativa
  unsure (1)..(450): unsure at all n locations
agcttagactttcttaagaggcgagctcattgctttttatnttgtctgantntttaaaaatgctgcagtgcacactgcgaggtatttttggaaatatttactaacttctcatggcccaattgtgtctgatttctacagtgcatattgtagaaacattccctaacttctcaacggtttttttggccacaatattttgttggcatacttttgctttctgctgatatctggtgatgattcttctcctgagctatatcctgtatttatttagcatcattcactgttcacttcatttctatttttcttagggtcatggaccgacttccaggatcaagaatcgcatttgttggtgatgggccattcaagtgagtattgcagaaccatgtagttacgggcgttgattcattgcaacactcgagttaggcaatatgatctctgatggctaccattccg

SEQ ID NO: 45216 - DNA, 397 bp, Oryza sativa
atggacagttatgtgtcttactatgcaaaagcaaagctatataacaaatttgcaagctctatattgtgcccaattccttggtgacaagttgcaaaagatgaatgccagtatgaatgtttatagctaatgtcagataactctcaaggacttgtctcttccagggtagatagaaaagaacattcagtcgtttgtgcattaagatcatattttaaacgtcatttgtgtatatctcggaaactgaattgacggagattctattcgtccgtcaacttacgtggtcgacctattggaccaccctgctgatttgacaaacagtaggatctctaggcatgtgaacattctcaattatttttaccggccatataacatgttatactaacgagagtatgtgcatctt

SEQ ID NO: 45217 - DNA, 441 bp, Oryza sativa
agcttgaacagcataacatgatcacacatgcttcttaagcaaatgaaagctagacaagagatcaaactagcataagagtgatacatgcatagcatagtgatgaccaagagataacaagcaaagctcaatcgaagagtgtatagtacaatgcataaagtaaacatgatgtaatatgttacaaatgcatgcaaatgaaaaacaactccccctcaaatcaagccataggggtggatcactcctaactcactccgcaagaactcaaaccgagagcgatcaagtggttttgtaaaaatgtctgccaattggttttcagattcacaaactttagccaatggtactttctaacattgtctcggagaaagtggaccgtatctaatgtgcttggcctggagtgtgaactggatttttgaatattgattgccttgtttatcacaagcagag

SEQ ID NO: 45218 - DNA, 461 bp, Oryza sativa
  unsure (1)..(461): unsure at all n locations
tattctcaaaaaattaaccaagaaatatctcttttactgtcttgtacatgtttagatggctcgaggatcatacataatgatactgatggcaagctttcgctgttctcgaaaatggccagagagacatttaatagacttatcaactgatcagaagatgtacagtacagcttcactggcaaaatgcagtcattgaactaagagttgcaacttgcaatgacatttaaactcttcgtgctgtaatgtcgacatcttctcaaaatagtacaaaattataaaggaaaactgtgtaaataagcacttctgcaaacgagaatcaatgagataattcaatacccttggccatcccatatttacgaaagggccaactggaatgaaccttcagatgccaggaggttttccagttaaaatcacacgtaattntgcacctcaaaaagcatgctctatgcgactatgcagacagc

SEQ ID NO: 45219 - DNA, 252 bp, Oryza sativa
tactggcacaacaatgccgaccagcttaagctttcgccatcaccacccctgcacacttgatctcctatcatggataacagcctgatcacttgctccactgaggcgtcgacacccacaaagctggctgcgtcttgtaaagagcccgtagtcggaagtccaaccgatcgtcgacgactacgacgactacatgggcgtctatcctgtcccttttccggagcctcgtcacctcctccacatactttttgatgcgct

SEQ ID NO: 45220 - DNA, 428 bp, Oryza sativa
  unsure (1)..(428): unsure at all n locations
tcgagaccttttggctcggatataatccagtgctgcatacaagaccttntcctttcatttccctatgagaggcagcgtgatgaaccatttcaccttatggcagactagcatgtatattcagcatagatttaggcatataagatgtgataaattcatgagctttactgtagggtgatgttacggcacgaacaataatcccttctgagcatcaagtcagatttatctcgcgagtcgtgagtgcccggtacgaggatgttggatcaagtctgtttggacgcgtacaagtatgaaaactcctgtacgccacatcacagatgtgactatgtcagagactgcgagagattgtctgtgagggacaataatatctatgaaaccacactatatctgagaaggccttctctcgtgtaaatataactttcattacgata

SEQ ID NO: 45221 - DNA, 440 bp, Oryza sativa
agcttaacatgcaagtgtgccacattatttctactaacaattattatctagagtattttaaaatcatgcaaacatgacgccatttacaattttgttgtatttttagaactcaatatgcaagcaatgtcaaatcattatctccatatcattttcacattctttaaacatatacatctatcatttctataatgtataacatgcattcatccacatatcccaaaacaaagcgcaagatagtttctttaattagggttgttctagaggtctttggagatgcttttggagtcaaacaaatatctctaagagctcaattacacctatgacctatccaatgttaggaggaggatttagcttcccatctcatccctgaatatctctatccaaaagcctaccaaggccgagctcctccccttgattgataagatggttgatcatcttct

SEQ ID NO: 45222 - DNA, 428 bp, Oryza sativa
  unsure (1)..(428): unsure at all n locations
cgtaacgaaaggactggatcgatccatgacaagccattcttttagaccacaatgcttcggctaatctagtatgccattgccgaggataatcaaaaatctttctcttaatcaatttgatcaagctcttgttagatgcttcggcctgcccattagcttgtgcataatatggtgaagagttcaacaatttaatacccatgctatcggcaaactgaacaaactcatcggacacgaaaatagaaccttgatcggctgtaatggtttgaggaataccaaatcgataaattatatgctcttgaacaaactgtatagcatccccagaatcgactctcttcaaaggagtcgcctctacccacttggtaaaataatcggttgccaccaatataaacttatgtcctntacttgagggtggaataatcatgccgatcata

SEQ ID NO: 45223 - DNA, 352 bp, Oryza sativa
agcttacaatctgcctgagcacttatatatttgttttccttctcggcagcatgtgctcgccctacgatgaacgcacggtattcagcacccttgttggttgctatacccaaaccctgccgttgttgagcaatctccactcaaacagtaaaaacacatcaccacttagccatgatgattgaagattatagaacgctccccagtatagtactgaaagtgtactgtgtacataccacagttgcatataggggccttattactgctccagcacctgctttaccaggatttcttttataagcaccatcgaattcatgacgacatgagagctgtataacatgaactccacttgtgagaa

SEQ ID NO: 45224 - DNA, 476 bp, Oryza sativa
  unsure (1)..(476): unsure at all n locations
tactgctggttctcacacaccacaacagtggcaggagagtgcagtgtatttgtcttgattggcacttcatgttgcaaggctatggacagttatgtatctcacttgccaaagccaagcttcataacgaatttgcaagctttagattgtgcccaaatccttggtgacaagttgcaaaagatgaatgtcagtatgaatgtttatagctcatgtcagataactctcaaggacttgtctcttcaaggtaagttacaaaagaacattcagttggttgtgcattaagatcatattttaaatggcatttgtgtatttcttggaaactgaattgatggagtttatttccgtcgttcaacttacgtgtttgaccgattggaccaccctgctgatttgacaaacagttggatctccaggcatgtgaacattatcaattattnctacctggcatataacagtttatattaacgagagtatgtcatctt

SEQ ID NO: 45225 - DNA, 428 bp, Oryza sativa
  unsure (1)..(428): unsure at all n locations
taagtcacctgcngcatcaagctagatttcggagtgtcatgtgtgttttagtggatgattctagttttgttgagtgctttgtgttaactctgtaaatatttgttgagatttatccccaagaaatcttttttgcatttgttactcttggtggtggaggacacctatagacggctagagtcaacctcgagacaccgatttgtttgtagtgtgccgagggagtttgtgaaggtcggatcgcacctccgaaaggaaagagatacccttagtggaaggcgaagtgcatttgtgcaacctcatgaggatagaactggaaaagacctggctcattgtgggcttctcaacggagagtataacacccctcatggatttgaaccttcggaacacaacatcttattagaacaccggngatatctctctctcgctcatct

SEQ ID NO: 45226 - DNA, 201 bp, Oryza sativa
aaatagattctcacccgcgggttgcgtgctagaaaacttgaatgcttacttgagaggttcattggaaggcattcgaaatatacatatgtatgagagtctattttaaaaaatcgagttgagatttactaactcaaatttaacccctacataatcctacatgacaagagttgccaacttaaggaacacaactcgtcgagatct

SEQ ID NO: 45227 - DNA, 448 bp, Oryza sativa
  unsure (1)..(448): unsure at all n locations
agcttagatattggtgctgacacaggccgtttatttatctcttgtactgtgatatcttcagagcgtgtgctcctgtgtccttgtggggaaggaactnttgattctgattggtcagcttccaaatccttctcgaggagctttgccttcctaagcaatgacatggcctctgcaacattaccagccttcttctgtgcaatagcctctcttttaagagcaagcacttgctcctttaatgcctcttgattcaaagaagaaacaggaccatgaccttccatttgtatctcgtcctcttcactccagccaaatgattttagtgcagcagtcatatctgggtcattcatgtcatcatctgtaatatcaaagttgccatcgatgagaagatcatcagaggtgcccagtagtttntcagaattaaaatcagggaatcttggattgtccaaagaatgtc

SEQ ID NO: 45228 - DNA, 449 bp, Oryza sativa
  unsure (1)..(449): unsure at all n locations
ggttctgtccaaccacaacatccaaaggattccaaggtgttttggctcgctngtcaacctctgtcacctggaaattgttgtcaagaccacacggcaaaacgatctcggcacactagggaacctgccatgtctgctctacctcaagatctgcaggttgtatgagcccgtcgaaagccagcagctcattgtaccgaaccgaggattccgttgcctcaaggagctgtgcttccagtgttggtgcccgttggggctggagtttgccccgggagctatgccgtgggtgcaaaccttccgcctgtggttcatgccatgctggaagagctgcgatcatggtgtcagcgtcggcttatgcatcgagcatctgctagaactcaagcttgtggatgttaagacgggctatggatgtggtaagagggaggtgaagtcatttgaggcagcaatcacagctg

SEQ ID NO: 45229 - DNA, 444 bp, Oryza sativa
tgcagcaagcaacttccaagctgaagcagcagtgtgatcttcctacataagggggggttctcatgcttgaatacgctcgcctacaaaataaaattcaacttataaacaagcacacacaagagcaggttactttgtaaacataagcactatatctaacctgaatgcgtgctttgatggccctgcgcatctcatcgctcattttaacatcaaaaaacaaccgtgaaaataaaaggattcaacaaagcggaccgtcatctgctattctatcatcggcatttacatcagggaaagctgaaggttgtccatattgacccagagcaagagacgttggactgtggatcactgaatatgtgatgaactgatattggacttgcatcttggaacccataatccttcaaaaaccgttgccctgatagctgagataatatcaataactattttctc

SEQ ID NO: 45230 - DNA, 275 bp, Oryza sativa
agcaatatgatatagcgacacaggatgtagctgagataaccagagggtacggcgatgcaaaatgaacgagaccaacgatgaataagaaggcttacaatgcggcagcggcgactacccttattatacttcatgacgctgatgatggtgggtgggtaagtccaacgaagtacggagcgagcatctaactcggctgatggatggaacttccctgacgggttattactgctatatgaaggcgaacggctgatattgctgaactgtatatacaaagatga

SEQ ID NO: 45231 - DNA, 455 bp, Oryza sativa
  unsure (1)..(455): unsure at all n locations
agctcttgcaagtgtttcttatgtgggccatcttgttggccatatgactatctgggctacgccaaatattattcgggctagaattctacatggggtntcctggattaatatttcatggatgacaatttaagcctgcatcacaattgacaaacaacaatatgcagatttccccacgatatttaactatttgctacttttaagatgtggcaactaagaatttgtcactcgcagtctataatatgtgagtccaataaaatatccttaattgtcacttgcaatagtggtaaatagttaaaatatccttaactgtcacttgcaatagtggtaaatagataaatatctcgattttgttctctatctatatctatatggacctttcttaggttctatttaggggagcttctaactgctgtagcttcttcgagaatcagaagctcccccanataatctatctt

SEQ ID NO: 45232 - DNA, 443 bp, Oryza sativa
ggaactgagtgaatagggcattttcattagcgtaaatgcttcgatggatacgttttcacacaaccactacctctattttgtggtccttgcgattccttgatgtgatattagactgagatggctaccacatttcttttctttctactaggtaatgttagttgtttgtcatatcttgaatagtattcaatcttactatgtgtcatctttttgtttggtcagagcttaaagcataaccccaatggaagatttgtcgtagtttgtggagatggtgaattcataatttatactgcattggcttggaggaataggtcatatggatctgcattggagtttgatcggtcatcaaaaggagagtatgctatcacggatagtacatcaagaataaagattttcagtaaatcatttcaggtttggcccacattgattgtagtcttccttttatg

SEQ ID NO: 45233 - DNA, 455 bp, Oryza sativa
  unsure (1)..(455): unsure at all n locations
ctgggcgcaccccacatgggccccatctgttcctgtgtcccaaatgaggttacaagcccatatgcccattacaggtgtcacagcaccttgtttcttcagttgctgccgactgagatggaatnttggaatgagggttgatgcattggaaagaggactccgagagctttccatcaagtactcacgggctgaaaacggaggtcgtatggagcttcggcggccgtttgaagtcagcagtgtagcaggtggccgaattggattttggcacttggaggactcgaacttgatatcttgttgttcatccatgatgtgagcaacggatgtatccgtagtagccatggtaacatcaccacgggtgcgatgtttttgaccggaaagaataagctcactaagcaccacaacatgaattctggacatattggagtgtattgggtgcgttcgtggcacacactcacttc

SEQ ID NO: 45234 - DNA, 427 bp, Oryza sativa
  unsure (1)..(427): unsure at all n locations
ttacccacatagcatgtgcactcttgagagtgcatacttcactattaatgtcatcactcanagcacaaaatatagcattagtagcttgagcatcgagatgtaggcatttctcttgcccacttgtgggagcacgttcatccaaagcatgagaaaagcccacatctacaatccaccatatttttgggctcatggccctaaaatgagaaatcatgtgaattctccattgtgcataatttgtgctatcaaatataagagggtcaccacccgggtggactatatctctagaagccatccttttctctcggaacgcgtaagtccataaaaagagaaaccaagctctgataccacttgtaggatcaaggaggccgactagaggggggtgaataggcggtnttaaaacttaatggcacttaaacaaaactaacct

SEQ ID NO: 45235 - DNA, 271 bp, Oryza sativa
  unsure (1)..(271): unsure at all n locations
gaaagaggacaagggtcgggccgccgcaagggaagcacaaccacacgccctcatgatactggagcaccgncaaacgagggaggcctggccaaccaaatgagcaccccatcctatgaaccccaagaagagaaccaagataccattacagaacattaattatagagcgcctgggaccagcgcagcctcctatgaggctcagagccatagaaacggatcatcgtacgctatcccaaggaaaaatatctgaagcgacagagcctgatgccatcgc

SEQ ID NO: 45236 - DNA, 480 bp, Oryza sativa
  unsure (1)..(480): unsure at all n locations
ggatccttaagtcacctgcggcatgcaagctntccatcatgttcaatgtcatagtcttcatctttcacttcatgggatcgaacaacaaggtctggaacatcatcaggcaaatcaaataagtgaaataattttccaagggaacaaaacaagctcttgacactattacaaataacagatgtttgaaagatccaattccaaccggaaactttntaacaaattttacttcatacccagattattttcttgtagaaatttcttagtcacatctgcaccaaacgaaagaccaacaccgcgtttgcttggacctctaccaagttgaggctgaggatcactccataatacttcacacattagacctgtcagcagaaacaggagtcatgttggcagataactaacatgggaaaaaaggcatcaaggtaaataatatgccaacacttataatgcaaattaatggttaataacttaatatatgtcactttg

SEQ ID NO: 45237 - DNA, 325 bp, Oryza sativa
agaccacacactttattgatgattcgctgaatacatatatgagcatcacttctaaatgtcacgagtgactaggtacaactgttacctctatcccatactacgccacgtggtctgagattgtcgtcccacaatggaaacatcacattatttctttgcttattcgtagagcacaattatcccctagaggtcaacttgcaatgttcgtgatatattatcgaaaattgaaccaattatgctggattgccacctccacctctgaacataaaaactaaacatgactgtgactggtagaggcaacacttatttttttatatacatgtgtata

SEQ ID NO: 45238 - DNA, 376 bp, Oryza sativa
  unsure (1)..(376): unsure at all n locations
agcttgcccgcaggtacaccaaacacactcttgtcggggtttagttttatgcgggcggagcggagactctcaaaagtttccgctagatctgtgagtaatgttccctggttgcgcgtctatacaaccaagtcatcgacataagcctcaacattacgtcctaattggctacccaaagaaattcgagtagtacgttgaaaagtaggacctgcattctttaacccgaagggtattgtcgtataacaataggttcctatgggggtaatgaacgcagttntttcctcatcctccctaaccatgcgaatctgatggtaaccagagtatgcatctagaaaacacaaaaggtcgcaccccgcagtggagtcgacaatctgatcta

SEQ ID NO: 45239 - DNA, 432 bp, Oryza sativa
cttaatcacctgcagctgcagctaagctcactatatactcgctctaatatgtctaaatggcgaatagtttatcccgaagtgagccttgcgatcactctgttctaaacgataatgatataatccggtctcccggacagtggaagaaaaatctggcgcttcccccgtcccccgtgcgcggtgcatgttataggtcccaccacagtttctgcccccacctacggcaaatcaatctcatattttgcatattttggaaagcctatgttaagggaatttgatctattttttttcaccaaaaatgtttcacctattgtactcaaaatgttgcattgaactgaaatattgcattgcaacaaagtaacccacatattttggagaacctcctattaacggaatttggtttatcttttttggtcaccgaataatgtctcatct

SEQ ID NO: 45240 - DNA, 409 bp, Oryza sativa
  unsure (1)..(409): unsure at all n locations
tatcgcactatagcgtcaatctaaaccacagacagaataaagattctactttttcaccttatcaccaacccagcagcagcaaattccactaaggcctaagctgactagtatacccatataacagaaaaataataatagcataccaacaaagattgcgtttaccaagtcagatggagcaatnttagttgactacagatcaagaaaaaaattgcagtgcaaagacgcttaaacactaagttcaatcacgaacaagcactctcattcgccacaaaataggggaaaccggtgagggaaaccatactcgatctggagcagcgccttctgcgactcggcgtgaagctcctcccacttcgtgttgtaccccgcgggcttcccgtccgtcgtatatagcatcagctgctgctgctgc

SEQ ID NO: 45241 - DNA, 458 bp, Oryza sativa
  unsure (1)..(458): unsure at all n locations
gcatgcaagctttntctttggcttgtgctccatctgtgttgttggacggctgacctcctgcagaagcgtggtattgataaccactcgccctgtactttccgcactcaagaattggagacagtgaaccacatcctacttatttgtgtgttcgctcgttaggtctggcaccatgttctatcttctcctggttggcctgacctcgctcattcccgtggttgctcactttaggtttggtggtcgattgctcgggactgcctgccaaagcttcttcgcaagtcttcgactcccttgttctttaggtctcctggcatttgtagaaggggcagaactccagaatgttctttttcagtagtactggtgtcggagcccaaaactaacaacttggatccgactgagattaatgtatcaatccctggatcagtanaaattgatacatacaatataactgggtcttcatt

SEQ ID NO: 45242 - DNA, 418 bp, Oryza sativa
tctgctatgagatgtatttagaagagaaatcctcgcttcaactttatctcaccgctgcattttgtctcacagatgcatggactgaaccattagaactgatgccttagtattcagtttgctgtttgctgataaaactccctgcaaaatttgtctgaattgaattcttgtgtatatgaagcatttcgtttgagactgatacacagtatgttgcattcttcagcatctgaagcatttcgtttcagacttcacagatgtatggacttactacttaagtgtgtcgagagttgtttggtttaattaagacaattcagagatgtatgaacttactactttcttccgcatcatgtaaccatctgcccatctagctacttgagcagtattccacgtactagttgttttgctcaactagtgcacattt

SEQ ID NO: 45243 - DNA, 446 bp, Oryza sativa
  unsure (1)..(446): unsure at all n locations
agcttcacttaatccctctgccttttgaggcgtgtgntnattgggagctgcgatggtaattatgtgatgcgggtggcgaatagtccaacacatacgctatacctcaatcgctactcgaaccggtggcctcgcacgggcggggaaatcagcctagctcgaccgcctgctgcggggtgggagacggacagggacctgccatacaactggaagagttgcataggctgtcgttggagatcagccattggagttttggaggtgatttcgtcgaggtcgcttcgcctgtacgcgcttgtcaatgagctccacgaactttgttacctcttggctcgttgcctcgntgcatgtcaacgcctgaacgagtctaagcactctctatatatcagggaatcatctatgtttggtttctgatctccactggggacacaagactgcnagacgatgagaaa

SEQ ID NO: 45244 - DNA, 243 bp, Oryza sativa
cgctacagtacatcggaaagacgtgacgtagaacaatctataaacatgtatttgttataagagcacacactctactgatgattcgctgaatacattatgaccatctacttttatatgccacgagagaaaattgacaacgtatacccttaccccatactacgccacgtgctctgaggattgcgtccctaaatgcaaagaacacatcatttctttgatgattcgtagagtccaactatcccctag

SEQ ID NO: 45245 - DNA, 327 bp, Oryza sativa
ctactgtggagcccccaaccactccaagcgaactcgcttaaacacaaggaaagttcgcttcgcaccgcgatcaagatacacaagacatcaggatagcgagcgaacgactgctttggccagccacatgaaacacgcatctagtctgtcgcgccaaacggcctaacccatacactacctgcaccccgtagaacggagcgcgactcaacgcacggtacgcatcacggtccagatgggggtgagaagaactcgctggtaaatatagaccgacctgaccagattgcggtggaaccattagaaacatggacaccaacccaaaccaaccaaccc

SEQ ID NO: 45246 - DNA, 458 bp, Oryza sativa
  unsure (1)..(458): unsure at all n locations
gacctataaaactcagctattgtttctcngtttcagtcgatgaagtgggccctttacaagttcagagctaccgaggagcacaagatatattcgatcgatgatgcacagccccttgtgttgtttggccttagctgtggaatgttctcatcacctgctgtaagtatatataccttttatctctggttgtcatctcaacactatttaccttttatcttggtttgtcatctcaacactatttaccttttatcttggtttgtcatctcaacatgtatacacggacggtcttttaaagaagctaagagtcaccagtatgtgtcaggattaccttataatgttttacgccactgaatatattcactcttaagcctgaaacacttctaaatcatcttttatgttccagtatttattaacacaaaaaactggccatttcatgcctattctcatttccaaaatgaaat

SEQ ID NO: 45247 - DNA, 445 bp, Oryza sativa
  unsure (1)..(445): unsure at all n locations
agcttaatgaagaaaaacccatgtcctaaaccctaccctggcctatacatggacacagacatgcttactcccatcttctgtcccctctcttattattcactccctctctctaaatcacgttccctatcccattttcttgctataccttagaaagcaaattttgagacaaaagattattaagaacaaaaatatactttttgagaatatttttccttccttggcttcttggatatattcccttaagggtgatctctttcttttgttgttagattgaacgagagagataaagatgtaattttaaactggattaggttgttggaatctttttggttctttctattattaataattntttttaacacgggggcctcccctggtgtgatgtttcaaaaaaaaagaacaaaatatcaactaacttttaggttggttgaactgtatttattat

SEQ ID NO: 45248 - DNA, 296 bp, Oryza sativa
  unsure (1)..(296): unsure at all n locations
tccgaggagatcgaggccgncgaggtgcttcggatgcggttgttgctgaggggttggggatgatggcgatcgcggtttgcctggtggcgtctgcggactgcggctgctcgggcgctggtccggatgtagcggtggtggtaacactccccgcctcggatccccgacttcctcgccccgccccgcccccgacttttctccccacggcgggcgacggaggagcggcggcgatgggagggacggatggagggatggcggcccgggcgtgaggggagaccactatggaacacagtgagcgg

SEQ ID NO: 45249 - DNA, 419 bp, Oryza sativa
  unsure (1)..(419): unsure at all n locations
agcttaagtcgattagactggacatttcactcttctatagaaccagctatctatctgtcaggctgtaacgagtcaagtaggaccgtcgtatatagtggttggaacttggaactaagggccgttataaatagggttaattggatccatgccactataaatagaccaaattaaaaaaataccactactattccgatatcgttggatccatgcatcgtcccggagggaagttgccgtcacaggccgtcgagacgaatccctgtgcgtcgactccccctttctgtttcgagtggtaaacgcccctagtgcctcccttcgcctccagctcaggttcagcttcgccgatgactctaccgaagccggcaccgngttcttgcatttcacggcgtcgacgacngtgaacagcgaggtgaggaaccatg

SEQ ID NO: 45250 - DNA, 474 bp, Oryza sativa
  unsure (1)..(474): unsure at all n locations
tgcaatatccaccttcatagatgctgtgcccttctaatgcttcttttgctgcaactgcggtttgaatatctacaagagaagcataaaaggctttgagggacaactcangcagcaaaagtttgacttcagtgtagctgcaacttacctggatactggattaatgcctggaagccagagttcttctcanagatagcaatcttttgcacaaaaccaaaagcagaaaagacctgcaattacaggagtcaaaagataagtccaagctatgtgcacaagatgatctataacatcagtgtgaaacacattacctcgtgaagcacatctattgtaacaacatactgcatgttctcaacagatgcaagcagaacgttgctctctgcttcctgcttcttcccatcctgcacaaaaccaaaataaaattatccataagaacaataatataaacaaaacgcggaaaggctagaggtgttaccggtc

SEQ ID NO: 45251 - DNA, 421 bp, Oryza sativa
  unsure (1)..(421): unsure at all n locations
gacgtggacaggtgctttctctggcaaatntagaacccagacaccctgtgtggatgaccaggcttcacgtcttgcatatggcgatgctgctatgtttttattatgaacttggtccacaagtttgacttacgacataaccgaataatcgtatgatttggaacagggggactaataatgtaatggttgtgtgcatccctagctgatgcaaaggccaggagnttacacttcccttgtctaanataaagttagtaataaaactcaaacatgttctttaggattgtatacatggtctgccagggtccagagctgttcacagtctgctgcaagacggctaatcatgctgaaccaactcagatcaaaccacttctacagattttgtttggactgagatggatccaacataactaattcaaccttttac

SEQ ID NO: 45252 - DNA, 477 bp, Oryza sativa
tgaggagcgccagaagcagacagaaattgaatgggaaaacctcttgaaataacataattcttgcttctatactgtttctgttctccaagcccagaaacagaaaatgcatgaggaaatgaatgatcaattaatgaggcttgttgaggacagaacaacattagaagctcataataaggagtttgagaggagggcttgtgctacagaaactgcattaaagagggttcgatggaattattctgctgctgtggagcgtctacagatagatcttgagttactgtcctttcagggtctctctatgtatgaatcatatgaaactcttgcgaagcaatccatcgtagaagaatttgagagttcccctgaagaacagtctgcagtagcagatttaggtgctaacaaggaacgcagactgtacatgtctgatcatgaatcccaagcattttcagcagaaaatggcagaccagataatctcacttacaa

SEQ ID NO: 45253 - DNA, 478 bp, Oryza sativa
  unsure (1)..(478): unsure at all n locations
tcccgcgacctctaagcaccgcggctgcagctttctttataaaaaacccttctgaatttctgtttgacaaacaattatcctatctttttcttgttatttagttcatataactcaaatttaaacgttttgtgttgtgcagagtgaactttgcggccatggaacattagctgctgcgcactacctgatttcatctggccatgtgaagtgtaatgcgatagatttcttggcaaaatctggatttctaacagccaaaaaagttgttggccttaagcagtccagcaccttgatttctccactgcaagaagcttgcacgaaattcttaattgaactggatttccccctcattccagtagtcaaatgctcacctttggagatgccatctattcctgagactttagatggtgcattcgtcagtaatgtgctgaaaactgtttctgattctgncaccgatctcattgnaatttctctcacgtatata

SEQ ID NO: 45254 - DNA, 456 bp, Oryza sativa
cgctcacttaccgatcaaggggggtggaagtgatttgtgaatgcctaaaatggcctatacttacgtgaggagttgatccttctatgtggcatgaggtaaccttgggtcggcttgggaaaagctttgtcgcgaacctctgacaccggccagtgtctggagctagttcgtgtcttgtaagtaaagtgtacccctctgcagaggctaactaactgttcgaacagccgcgcccaccgtcatgggcggatgtgaggtggttcccgttgcgtagatttgtttgcctgtgctttctgaaaagatggtgtggatcgcgaatcgtaaccagaatcaacctatgtggccaatggatgacctgagtggtcagaaaccaatctgtgtgattcgggatatcgataggcatcatagactacgcttcccgagtggaagcggaatgttgtgctgctaagcagctggactctg

SEQ ID NO: 45255 - DNA, 453 bp, Oryza sativa
  unsure (1)..(453): unsure at all n locations
agctnggnttactntatntacttcccttcttttttgatttctaaaccttattcaaattaatccaaaaacttgtgctattaattggatagatgtcttaactccctcctttcacttgtctttagatgccgngttacaagcctgagtacctgtttggtgttgagggttttgtccaggagttgcgtacgatgtcctttgtcattggatttgggactgcccctttttatgcccagattcgtcatgatcgtcatgaagagaagtgccgagtcaaagtcaccatgaacagtaatagtgaagatatcccctcagcgatgttcgaagctggaggaagaaactacatccatgcatgtcangaagtggcaaggatcgccatangagagctccgtgatagctacagtgatcaattggccgacactgagtatcgctaccatcctcgtcaaccacagggaagtgacc

SEQ ID NO: 45256 - DNA, 426 bp, Oryza sativa
  unsure (1)..(426): unsure at all n locations
ataaatacaccagtatcgtgcaaattgagcctncatgtattacattcaaactcagtcagaatcagtcctttcatcatcagagtcttcattactcggatggaggtcgttgttgcgaaattgctctacaacatcgctcgcaattttgtcagccgcattttgcgcactgctgataagatcaagggcagcttcttcacttgtcccgtctgcaaatccatcaatggtgtcgacttcaattctcgggtacaagggattttgtcatcgccaaggccatgccagctcccatactttcagctatcttgatattctngaaatatacttctcgagcaacactcagcttgtcaaatatatcggttgcgtcgaatgcactcggaccaccattattgaggaacatggcttggataattggtgcagcggcattggcgacgt

SEQ ID NO: 45257 - DNA, 446 bp, Oryza sativa
  unsure (1)..(446): unsure at all n locations
agctgagtttaaggaggatgctgcttctgnctttaggcaatttcaggggagaaaagaatgctgggatggaacatagatggattctacaggacttactaatatgtttagatgatcagcacatgtattaattgatgatcaagtcttatggatcatggtatagagataccatattaataatgcggacacatattagtgaacatgttattggataaacccaacttgagacactgcaagagccatatgtgttgtgtcattcagtgatctcatttagtgttggtgttgaatccttagacctgatattatcatggttcccaacatgtgtagtagcttacttatggactgctaaacgctactcccgaattgggctgtttaataggaggttttgagtatgctatgaaacatgtagtgggatatgaataatgaagatgggatttgccccttctatg

SEQ ID NO: 45258 - DNA, 470 bp, Oryza sativa
tcgctcgcacgcgtacgctgggttcatgtgagccatcgcgttgttgtgtgctcgcgtgagattacgccgaaggtagttcgttgctccccggcagcttgatccctgtgcgaaagtcatcatctatagtggcagcattttttttctcataaatttaagacgacgtgattcaagtaatcttactttacacattttaacaatctgtgctctagaataacgcagactagcccatccaatcggcacgttcacttataaatatcacctcacatacatccttagtatacaagagaaaaaatactccatccatcccaatataagcattcttagaatagtggcaaatcatacttttaagatttgactattaatagcaaacgaacaataacagatcaatcatgtgaatttgatgttactagatttgttattaagcaaattatcataatgtgtaacttttttatttaaacatcttactttat

SEQ ID NO: 45259 - DNA, 446 bp, Oryza sativa
  unsure (1)..(446): unsure at all n locations
agcttgagcttgcccactcatcggcgtgttggtttcatacgtgagcggtggtgggtcgccggcaaggaacttctatatatcctacgtggcggtggatcggctggcgaggtcgaggcgaggcgcggngaggtagaggccaagatggcgcagcccacggcatcgaatacgacggcgaggaggaggggtcgtgggagcgggtgggtaggcgcggagaagctgaggcctctcaccatgtcgtcgccgtcgccaatgttgtgcatgcgacgcggcctcttgctccaccctgcttcgtgttgcatcgcttgtcgagttgtcgtgcgcgcggttctgccgtttcaatgtacctgtgtccgtctctgtgccgtgcacggcggtctcttcgcagagctgctcgaggactcggtcatggactncttgccgctcctcgactcgcttcactccaatcc

SEQ ID NO: 45260 - DNA, 453 bp, Oryza sativa
  unsure (1)..(453): unsure at all n locations
agctntattaagacaaaacgatgagttttttatcagcacggaggacagctattgctagaaatgatgaaagtagagggcaatgcacggtttacactctacggtagacaagagattgagactgccacaaataacttcaacaaagcgaacatcattggggaaggagggcagggaactgtttatagggcggtattgggtggaatcgccgtcgcaattaaaatgtgcaaggagattgacgagaacaggaagatggaatttgtgcaggaactggtcatactttgccgtgtcaaccatcccaacattgtcaagttgctcggttgttgcctgcagattgaggcacccatgcttgtgtactagtttgtgcaaaacaaaacactgaaagagttgttggatctccaaaggagcacgaggttccatgtcacactatgaacccgcctaagaattgctgcggaatct

SEQ ID NO: 45261 - DNA, 434 bp, Oryza sativa
  unsure (1)..(434): unsure at all n locations
tcttatcgatgccggctaggaattcgcctccattgctatttatattgaaagcttgtcgccgtaggaggcgtcaccaggtttgatggcaaatgagagaaatgacttataactacaagatctcatcaaaacatgcccaagtgaaatgatatggtttccctaatttcttttatttcgaagttctaggctgtaagaaagaaaatacacatgttttcttcatatgtccgaaagcaatttttgtttcaatcataggtggtatgctatctgtacaaggtatgctcatgtgaatagttaaattagcaaattactcgcttaatttacattagtgatctatatgttcatnttgaaagtagagtgacctgcataattcacctaagaaattcacctaagaaaattaagtgaccctccatgcatcttactctattaaaacatattat

SEQ ID NO: 45262 - DNA, 463 bp, Oryza sativa
  unsure (1)..(463): unsure at all n locations
ctgcaggctgcaagcttgttntaagcatatactacaggttactttattatcttggcttgggtaatagatgcacaaagcacatttaacgctataatctccttttcctctaatgcaatcatgttcacaatataactgatccatcatttctatttataaactggctagatcgtcaattaaatttaactcttcatcggatgattcatactctttattggagttttcaatttcatctgctgctatgatataatatattgaatcgccatcttttatttcatcgccacatactaatatatttccatttatgctatctataataaacactctctattgttcttcatatttactagagtattttttttgatctttattnggggcaaatctacttaaacgatctggtgaattacatatgagacatctgcatgtcttatcataagtattctttggttatatcatctacacttcg

SEQ ID NO: 45263 - DNA, 401 bp, Oryza sativa
cgagcaagcaaaggcgcattatctctctccgagagcgagtggcgacgactgggagccaaacccacgccgtcgagctcgtactccacctgccccttcacgctaaagtcctaagcggagggaggcgcttgaaagggtcgaaagatccgcgacttcaccgatcgcgggcgatggataataactgcgagatggggagcgtcgcctcctcttctacagcgaccgcagcacgccctcaggcgcgctccaagctgcaggcgcgctcttacgtcacccgcctgtcgtcctgacccggagtctccagcccaacaatggctggacgacgtggccaaattaatcatgactgcacggcatcgcctagatgctggtgggccggcctccgccaacaaggcctctggtgctgtacc

SEQ ID NO: 45264 - DNA, 455 bp, Oryza sativa
  unsure (1)..(455): unsure at all n locations
agcttacctatctaggctcaagctcatacttatcccgagtaaccttcgagtttttagacatgctcggttcaagcttgagctttcctacaaagtcggcttataagtagcgcaacatagtatatttcaaggataatctcttgaaataaataatttatttatatttaatcatgctaatgattgatgaaaaataataagataaatatattgtgccaacgcaagatacttcaccgcatggatacagatatatggcatacatgatgtactactttattaaatgaacggtaaaactcgacatgagctcgagctcagctggacaaagctcgtgagctttggcataggctcgagctctactcaactagaactcgaggcgagcttaaattgagctcgagtaactcatgagccttgngttntttttttacaatctactatcccggactcatgcgaattaggcattg

SEQ ID NO: 45265 - DNA, 366 bp, Oryza sativa
  unsure (1)..(366): unsure at all n locations
tgcggcatgtttagttatctattaatcacaaataggttgctagtttccttttatcttttacgaaagtgagcttaatgtcctataacgactttatgtttgccttttatctttacgaaagattcttctttgtcctacaaggactagtatcctccatggctataaaaatgtacacctgtggtcattgtaaacatctctcatcaatacaactactctcggcgcatcgccaccctctttcccgagtttttacttatcaaccggcggaatttggcacctgacgcgtgggcggtgctgcatcggtttagttcgatctccggtgaaggncgtatgtcacgcccacaaatttatcccatatttccagactatttt

SEQ ID NO: 45266 - DNA, 423 bp, Oryza sativa
  unsure (1)..(423): unsure at all n locations
agcttggaataaaacaactcttatgcttacgcattgcanagggcaaggaaccaaacgctctgcttgcgaataaaatcatcagctcaggtcatagccctgcatgcatgcagcactactcctgaatgacatacacaaaatgtttttaaactctaattagttaactgcaaaatttctagtttgttcactgactagcgatgtgttatatgcttaatcatgaccgagaatatgcgtaatcatcgcttaattttcataaccagccaattgactttctgctccctgcttgcagttntacaaattcagttgaccatccacagaatcttggttgcgaagtacttctcctctgccttaatctgcatgatcattaccaagcatatattactcattcttcagatcatgacgcatatattactcatgattaccact

SEQ ID NO: 45267 - DNA, 341 bp, Oryza sativa
gacacataaaactaagcttggcagcaaccgagcccaactagaacagaagagagtcgtttgtacgaacttgcactctatacgaacggaaactagttacgttaagtattgaactcatctggttctgattgacgacggcatcacttttgttctcaaatgtgacagaggcgaccgggttgaccttatcccttgtccgcgcaccactgcgagctctttggtcaaggatgtctgacaaccgggcagggacattctatgctgcggctgctgtatattcttgggcccatattgcctccttgacgacgtaccgtgcggtgcccaatcgatgcaggtgctcattcctatgg

SEQ ID NO: 45268 - DNA, 447 bp, Oryza sativa
agcttcctcctggccggccgccttgctcttctctctctctctctctctcttgggcacgtcggtcactgcccgcctcctccaggccgcgccgctgcctctcttccggtcggccgcgcacatgccccctcggccgaacgtcgtcctcggctgaacaacttcctcgtccacgaccgaacgacgtcctcggccgctcgtcgtccgcgagcgaacatgtgcatgtgggtgtttatatatgtgtgaggggtttgtattttttttttatcaaagggccttaaccctccattttcattaaaagaaatgtcacagtttacagcagaagataagaaagcagaaaacacaactgcgtctagagtttataaaagcaacaacaaacattcaacagttgactgtgaggggtttgtatatatggatggaatgggaatgaggggtcttatctgttgattgtgg

SEQ ID NO: 45269 - DNA, 348 bp, Oryza sativa
tcagcatgccacaccggtggatgcataattaatgcaagggaggcacacgggaataatattatatgtggtaacgtttggcataaacggcatttataagtcacttaattgccccacagtcatcttataaagaccatcctagagctacacaatattattaaacaaggcccggaaccctcacgaacctgccttatcccatggcctacgatgattcacaccgaactggcaactcgaccctgggtcccaactcgttccaagccaacccaggccaaccatatcatattttagttgttgaagcatatttaagaaatagaacactgacttgggtacattgctcggcttgcccataac

SEQ ID NO: 45270 - DNA, 457 bp, Oryza sativa
  unsure (1)..(457): unsure at all n locations
cctgagctgcagctttctcgncagttgcgaagctattttttatgccgaccgcgagagtctctgaacagagagaactaatttgaagctgatgtagattctggcgttacaaaccacttcagacgccaatctaaagtatgaacagaaattatgacttgtctagcaataatcgaaataaccccatgttaaaacaacaaatcaaatctacctgtatattctatagcatgactgctgatttccagcctgaacgagttgctgacctatatcatgcagaagtggctatattactgggggcatcacggttggagtcctacatataccagtctccaagcctttggatggatgttcacagtgagtgcgtcctccatcagcatcattagcatcttttggtgctcgtggaggctctggaaggcaatctaataggcgatcaggctcaatatgtttgctgaaagaacaggga

SEQ ID NO: 45271 - DNA, 435 bp, Oryza sativa
  unsure (1)..(435): unsure at all n locations
gcgtgcagagggaaatcctgcactatgcagtactgtttgggacacacatctanaagagattgagtatgtttgagagtattacacgttgcttactgttggtagttttgggaagttagattatgctctcttaaaggacaggatatattcattctatattacactatatattcccaaaaaattaaataaggggattgaatttcattagacggtgggggaggctattattacgaacccgagggaagatgaattaaccgcctcataccctccctagcattgctatatctgattctatattgctatatatgggggtgcgttagcactggccattatttaacttatctccctcacacactcaaaatgttaggtttttaagcaaaaatcagtctccaatggtaaccttacaaacaaacgtgttagaaccttatctncatcttc

SEQ ID NO: 45272 - DNA, 438 bp, Oryza sativa
agctatcattgtgatgaaggcgataagctattgctttatctagagtagagtattatgtgtaaaagtagtataaatgcacatgatggtagggaaaatcaccactgtagagtcaagaaaatgatgtttgctttagtcattacgacaaattacaaaacgaaattcttaccaataacacaaaattattatcaagtctttcagcaagctttgtacatgtagcgcaaactaacttcattagtgagagttaacatagtttagaacattctttgttcacaatttcagccaaaatcaaatccattcccctgtggaattaatgatttcaagtaactactatgctttactctacatccttcgccccatagaagatcaacttctacagatgaatctgtccaatgcaactgtaggttttagaagtcaacaattacctctcaattcctcaca

SEQ ID NO: 45273 - DNA, 446 bp, Oryza sativa
  unsure (1)..(446): unsure at all n locations
gcagctttttgtaataaaagaggatccgttttttttttcccctagacaatatggcatagcgaagaggtagagagttaattcagtgcattataaggaaaaaagacagttaatttaaatcggcgactctgntaaggcatcattacgagtaataaatataatgttcagtgaacaagaccactgaacttaactctgtatgatcactgaaaggaggacaattgatcttgagtagagattcgatcaatttaggcccaatggattacagagaggcctaattgcaaaaacgagcccattaggcagtttgcatagacggactgggctntgcattttcgccgggcctattgggcttttcttaggccatcatggactggcccacggaatcactcccgtcactcctcgagtccggcggcagcggcgccggcgctggcgactgccacggcgaggcgtat

SEQ ID NO: 45274 - DNA, 447 bp, Oryza sativa
  unsure (1)..(447): unsure at all n locations
tcgctctgcttnttctttntcatggggtnttttaggttgaatgggacgagcaaccacagcaatggtgatctctgtttcgtcccttcactcacgtttcaacctctggtntcgtccctcttcttgggagttgggatcgaactctgctgcttcctatttctcatatctcctcatccatcgtctaattctttccacgttttcttttgatgttgctccaaacaagtttggaggaaccatggtgatctccgtccctttttttttcatgttaagttctttntttcgtgaaaagaaaatccctgttagtgtgtctttatttgacgttaatgtatttgatcaattntcttgtgaaacatccctcctctccttcgctggtttcggttttgacttaagatgacggcgcatgtattntgctgtcagtaaaatctcaaaattgcctcggatttaattctc

SEQ ID NO: 45275 - DNA, 459 bp, Oryza sativa
  unsure (1)..(459): unsure at all n locations
agctntgcaaggttagaaatgctaaagcaaatctattcacacccggccttatggtatctctcttcttcgagtgcttcctcatcaaggccaatgtcttgtgatgtgaatagactttgcatggtataatgtggccaatatgttctttgatcctgcattntgtgaccacataataagcattggaccctatctttgtttgattcattgaatgttttgcctcattcccatcccatgtcattggagttcctctaatgaggatagggtacttctgttaccccagtaacactggtggttgatgagacaatttgcatatacaggaggaccaaaattagtaaattattgaacatctaaatctgagattatatcaatttcatcacacaattgactgattgagacactttctgaggttgtacgatgcatatcttgatttcatgccacagatgacagatcactaaatactta

SEQ ID NO: 45276 - DNA, 439 bp, Oryza sativa
  unsure (1)..(439): unsure at all n locations
tgcactacgaaatattatagatttgttcagctttgcatggaaagntaaatgtcatggcagactattggccttctgagcaatgtccactaatcttgccattactctttaatgggaaatccaatggacgagcggtttgttgggtgtgaaactagactcaataagctttccaaaaaaaaatgctcattcaccttcatagcttttgagaatcaaaagttatgacgaattcttaaactggtctggtatgaagttgaactggtccgtttttcactggagcggcttgatcttcatggtccgattcagcttcctctttgtgcataatcctaagcgcaatcaaagtagaacatttaggtagtataacattctcatctatagatgcatcacatgtagcaaggagtgagttcacctgttgttgtagtttctgcgcacgactatgcgtaat

SEQ ID NO: 45277 - DNA, 444 bp, Oryza sativa
  unsure (1)..(444): unsure at all n locations
agcttcgcctcgagcttgtaaacacctctttgtagtttatcaatagcaggtagcggggcagcgtcattgagcggcttttctaggagcgcagcctcgagcttgcctagtggggcggcaccggcgccgccctccaccatgcgacttccatgggagtaggctccatcatgacggtgttgagcggctcccccacctccatccatccctcctcccatcgtcctctccacactgttgtcgactcgctggccgcctcgcactgccgggttagaaagggtagaaaaagagaaaagaaagaggggagaagacaatgtgacacggacatgtgggtcccacatgctaagtgagctggttggactangtcaaaacaccacgtcagcgaaaccgttctctaaaactgctgaggaagtcaaattacaccggtttcaatagtngagagagtcatgatat

SEQ ID NO: 45278 - DNA, 459 bp, Oryza sativa
  unsure (1)..(459): unsure at all n locations
tcaatccatgtgatgtatcattntgtaagaaccagcgacaatgcatagtttatgttttatccttattgcatggcatgattaagatttcctattccttatgatcaccacgttttctaagatatcaactacaagaattacataaattcatccatcatccctgtactacgaatgtggaaaaggtcagatattgcaaattatgggctctaatgaatcatcacataccttagcaattttgcatgctcttcagaagctttggattcaaaaacatgctccttggtctcagcaaanagtctgtgggcctgctcaatgagccgaacttgtggaccatggagaggagatcccttgcttgccattggattcctctccaattcccttgactctttcaataaaagaaaggcagcatcctgcaatntctctcgatagtttatgaagtaactcatgctatgggatataactaac

SEQ ID NO: 45279 - DNA, 449 bp, Oryza sativa
  unsure (1)..(449): unsure at all n locations
agcttcaccgctgtgagtgatccactatgttttacttanggggaaagaacggngaaaatggaaatgaagatggagcgagcagcaagggaactccatcacccaagggagctactataccttttgattacagcaaacttaccattccctctcacaactttgtctccatgccttccgggcgtgctcctcaatttgatgggacacattacgccgcttggaagcacaagatgaagttgcatctaatctctttgcatccatgtatttggaaagttgtttgtacaggtgttgatgtaccccatgatgacatggagctcacttcggagcaagagcaactcatccaccgcaatgctcaagcttccaatgcaattctctccgccttgagtccagaggagttcaacaagggtgatgggcttgaggaggccaangagatatgggatacttngcaattggct

SEQ ID NO: 45280 - DNA, 263 bp, Oryza sativa
  unsure (1)..(263): unsure at all n locations
agaaatcctgagtcctaagcttatatgcccatgtagctcgatctggcaatattttacttgtaagatcacttactggtagcgaantcttctcgacttcctctcgcctccatatctagctttcctgggctgaacaagtcttctcatgtactgtctttcaagttcctttcttctcgtgccactgcactgcacctaaagaggagagagctgaagttgctttcatatccatcttttccctgcagctctagttcagctcctaacacttg

SEQ ID NO: 45281 - DNA, 346 bp, Oryza sativa
agcttccatgtccatggtattcctcagtatatggtgatacctctgatatgcattcagaattgaactgaacttaacacaaggctgatcacaatcttttgaatttacatagaattggttgtatgcgctgatcctatccgtctcggactgttcgcggccgcgtgcctatatataaactgcgtcggcttcttaccggccgcacgaagaatcgatggcgatggagattatgcaacagctcgccgccgccgccacggcaacggccctgtgccctgaaccatctctgatggcgatgacgacggccggcgcaggtggaggccgccatcgcgacgctgcatggcaagaagcaacg

SEQ ID NO: 45282 - DNA, 447 bp, Oryza sativa
  unsure (1)..(447): unsure at all n locations
agcttcttaatcttggtgaccaggacttcttatgagcctgagattntaatttgcgatctgcataaaaggttcacatcaacgtccaggcacgaagataagaatgattttagagttttaactacaaataccttcgacatcttttagagccgagtccctctttttggttagttcacccttgtctttttccagagctttgatttgcttttctagctcggtgatcttggcagcttgtactgtaatatattccactgattaattggatgcggatagcagcctagaataagttaatcaggtgtaggggttacctttggatgaaccactcagctcgaaattggaatcttggagctcggtgatttggtccctgagatcttgttcggntttcctagcaagctccctagtttcatggagttgggctctagtcgcttccaggggttcgagatgtggaac

SEQ ID NO: 45283 - DNA, 450 bp, Oryza sativa
tgaacctttgctcgccccgactgaaggacgaaaggaaacatggacttggttgttgattaagagttgctactatgctgcatatctcaaagatacaggggccaggtatatgtactctctcttagcttaaataatctttggcacggtggcttacccttacccctgattcccacgagacactgcttttccttgccttgagcaggtgaaagacagaacaataattagagcaccaatcacccaatctttattcaactcttattccagaagtttcaaatgattctgtataagaaagccaagtttctcaaatgattcactcagtctctctaagtgcatcaaaatgaattcctcaccaatttgcctttttgattcctactccaagggttgatatgtggagctcgatagggatcaaacatggcatacttgcatttacatttattactaagtcaaaaactt

SEQ ID NO: 45284 - DNA, 418 bp, Oryza sativa
agcttgacattacggaccactgggtctagtaccagggggtaccgccccgggtggaccactcggtcatgatgatccgagcggtcaaacttgattgcaatctctgaccatcgaagatactggggcgtgtcgggctgcacagcattgatctcccgttcagtcagcttctgcttccgtttagactcataagccagggggccgccgaagatatggttgagctccttgcggtgatcttgaaaacctgccggggtgtcgccgtcgtccttcttcctcgacgtgctttgttctttgtcagagttcttccgtgcagtcttggtgtattgatccgcgaattgcttgtagacgaaacaatctttggccacatggttggagttaggatggtgcgggcattgggagttcatgatcttgtcgaacgtgttga

SEQ ID NO: 45285 - DNA, 427 bp, Oryza sativa
  unsure (1)..(427): unsure at all n locations
tcacaagcgtnggatgaaatggcgatgtggactatggaattgtggtttatgtgatgcaagctaattccatagaaatccaaaattcctcggaagaaacttgaggttggaagagaaaatctgccatggaagaaatgagataataccacgacttcatgtgtgtcgggggtcgggaatgcttctccgaacgccggacgccatccaaagatctccttcgccggaagaacaccgtgcgccaccatctccttcaagatctcctctgttacatcggagggcgcccgctgactctcgaagctttctctctctttcgccatggatgcgaactggatgatgtgatttggtccgagatatggctggaaatggatggggaatcggtgcggtggttgcacggaagggttttgtggaactcatgacgatggattggagtgga

SEQ ID NO: 45286 - DNA, 298 bp, Oryza sativa
  unsure (1)..(298): unsure at all n locations
agcttgagcttgcccactcatctgtttatttgttgcatangcgagcggtggtgggtcgccggcaacgaacttctatatatcctatgtggcggtggatctgctggagaaggctaggcgaggctcgtagatgtagaggccaatatggcgcagaccactgcatctaatactacggcgaggaagatgggtcttcggagctggtgagtaagcgcggggaagcttatgcctctcaccatgtcgtctccgacttcaatgatgtgcatgccatgcggcctcttgctccaccctgcttcgcgatgca

SEQ ID NO: 45287 - DNA, 188 bp, Oryza sativa
ctgcccatctttggaatgccttccgcttgagcctatactttgcttctgctggaaatgtgaaccatttctccgttgccgtccaagctcgctctttctcggcttctgtgaccttcccgatatctttatggaggatcccgaaggtctcacgtgccgctcatgccgagcatatacaccatcttccaatgaca

SEQ ID NO: 45288 - DNA, 403 bp, Oryza sativa
aagggtataatcttatagctaaaaaaaatatgggtgtgattacatttgcagatgaaaacagggacaagaacactattaaacctatatatcatgtgtggagatattgtacttgctagatcgcacgtcttttatagttcgaagtatctgcacacataatatgatattctctataaatttttaaatatttctaaattgtagtcattctcaaagaataaggaaaatagttcttccaagtagacttcttaaaaatggcatagaatagtgtgcatgcggttttatttctagctatcaacctctaaaaatggaaaaacctcagatttaattttttttgaaacttttacatatgaagtcagatgaatgcacatttcgtgtgaatgttacaatcctcgaggagaacttcaac

SEQ ID NO: 45289 - DNA, 331 bp, Oryza sativa
acacataaaactcagcttctcggttttggtctctgccaggcatctagtcaacttcggaagaacgagcttagagcggagcgccccccgcaagcttatggatgtgcaatgcgtcaccggttgcatggccgccctaagtcggttcatatcgaggctgggagagaaggcgctacccttatataagcttctcacacgctctcggccgtttacttggacggaggaagctgaacgtgccctcactcagatgaaggcgtatctcagctctcccccagttctggtcgccccggagccaaatgaaccctatctactctacttagcggcgaccccgcaagtg

SEQ ID NO: 45290 - DNA, 451 bp, Oryza sativa
  unsure (1)..(451): unsure at all n locations
agcttcttcttggtctcttcatcagtcttatcttctttgaataactcttctgctccaaatctcaatatcgctgaaagttcattctggcaaaatgtatagctcacatcagaagagcaaaacagaaaatacaagtgaggtgacaagccagattctatttaatgcatttctctcagaattttaattatcagtaaatgctcttgtgttgtagagagaattatagcttgngtatcttgaaagaaggctggtctagtcacatgagcatatatataccacactagacttacagcctgtatcactaacaatcgcttagttgataagttactggtagttntaacaatcttttgtatacaattatacaatagatagatttcaaatatacaaatctatcttatatacaaaagattgttgaaactacctaagtaatattggtgtaccaaaccgatatgacatc

SEQ ID NO: 45291 - DNA, 453 bp, Oryza sativa
  unsure (1)..(453): unsure at all n locations
ggggtcctaacanattaattaacaaatagtgtatatgttntgtaggtgctcgagcatgcattgctggaggattctttngaggcaaatgtccgtgactacaccaaattgatccacatatatggcaaacaaaagctattgcagaaagctgaggatgcattccatgccatgaaaagcagaggtttgccttgcgatcaagttatgttgactgcactgatggacatgtacagtaaagccggagatctcactcgtgcaaaagaaattttcaacgagatcggattgcttggcctaccgatggataagcgtgtatacggttcaatgatcatggcttacatcagggctgacatgttagacaaagcagaagacatgatcagtgaaatgggggatcagcagattgttgcacgaaaggaagtttacaaggcattgctgagagcctattcatacaaaggcgattca

SEQ ID NO: 45292 - DNA, 447 bp, Oryza sativa
  unsure (1)..(447): unsure at all n locations
gcttctatacctcttatactgacagaatattgtcctttaaagatgnctttggcgaaaacactacctacttagctgtttaattaacttcgattaactcaaattatcaaaagttctcaatccgcaactacgccagggatagctaagatatatacacctaaatataattacgctttaattaccagcatagaaaaaacgaaagctaggtatgcatgaacagcgggattaataattaattgggttgggagaattaaccaccagacttaaccaacaacctgtttatagagtatgttagccaggacagaattttcctttccagtgcagcttatcctgcgacgtcatgcacgagaccaatcatatcctccactacctgtcttaaaactatgtgcgccgccgaccacataattaatcactataggcatgcacaggtatcacaaattaaccaatctc

SEQ ID NO: 45293 - DNA, 260 bp, Oryza sativa
tcaccacttcttcacacaagaggcgaggtcatgccaaaatttatagtgaatctactttggtgattatatacaaatctgaggtgcccaaaatgttaacaacttcatcctccaattatttttggtcataatacatttggagctatgctttgcacactatttttgtctccaaaattatgttgtaagttgatgagatagaaaattttgtttggaaacgaaagaaaatataacatattttgtgtatttgctaaaaaaggttttat

SEQ ID NO: 45294 - DNA, 452 bp, Oryza sativa
  unsure (1)..(452): unsure at all n locations
agcttnctgagattattcatgcacggttattgttcctttctagcctgtagaactttggatgctctggttgaacgtgcaccgactgttgctgttacagtgagatggatcggatccctcagctacctatgaatacctgatcctctttgatcaatgagagatgcatatgattgagagccttttttccagacatcattctgttcctggttggtgcatccgtaccaggggtggggtgccactgccatggtgttcatctctcattatctctcccatctcttagatataagatatagatattatctcactttatgttaacatgattctaagcagctaaacatcatatttcgtacaagatgatgtttttaaatattagataactatattttttaagattaaaataattataacttaatcaataatatgctaatggttttttcgttatacgtgttcatata

SEQ ID NO: 45295 - DNA, 420 bp, Oryza sativa
  unsure (1)..(420): unsure at all n locations
taatgagagaggggtnaatgaaagctatgctcaaggtacgtatagagaaagttatgcaaacctttntcagcctcgctttcatatcaactacttcctgcgtttcacaatgtaagtcatactatcatgttctatattcatataggtgttaataaatttagacataaatcatatagttggttataaatctagaattattaacaactatatgaatgtgagaaatgctagcatgacttacatcgttgaacagagtgagtatattctacagtaagaaccacgtgatttcatggtctcgataaaaaaaagaagaaaatccacatgctaacatgcctagttcaaaagagacgtacacttgcacatacattacatttcttttctttagaaaacaacagtactacattctattcatatgccctatacatt

SEQ ID NO: 45296 - DNA, 465 bp, Oryza sativa
ggatcttaagcaccgcggctgcagctaggcctgcggtctatcgagagtacttgctcggcttgttgctaaggactatactcagaaagaaggcgaagatttctttgacacttactcacctgctgctagattgaacacaattcatgtgctactttccctagcagcctcacatggtcttctcgttcatcaaatggacgttaagacaacttttcttaatggagagctggatgaggagatctatatggatcaacctgatgggtttgtagttgaaggtcaagaaggtaaggtgtgcaaattgttgaagtctttgtatggtctgaaacaagctcataagcaatggcatgagaaatttgacaaaacattgacatctgcaggcttcacagtcaatgaggcagataaatgtgtgtactatcgtcatggtgggcgtgagggagttattctgtgtttgtatgttgatgacatactgat

SEQ ID NO: 45297 - DNA, 477 bp, Oryza sativa
  unsure (1)..(477): unsure at all n locations
tcgacatctcggcatgcattatcaactatgatgccgngttatattattacaacaagcggtgttccaatcttcaatatttctactcggacatcttcaacatacattttcactcaagcaatgactactcgacgaccagaaactacagttctcgactctatgttcagttgtttcccaactaaccaaagagtcgggggctacacaaatacaagactttcaaaattcgacaagctttatgtcaagacgaagcaatcaactaatcagccaaagagttctacggaatctactccaagagtcattatcttcgtctttgcttcagagcaggcattctatttcagcaacttcaattatttcaccggtcaatttggcttcttcacgccgccacaatctactccaaatttctcanatatgaagtttgagaattaatcaacatgtccgggagtttagagttatcaaccaatcagctcagtttcgatgagt

SEQ ID NO: 45298 - DNA, 400 bp, Oryza sativa
  unsure (1)..(400): unsure at all n locations
agctttggggggagagatactcctccactattgtttctgtatcacatngcatatttccctttccaattgcatatttgttcttgaattgcatcttataaaactgaaaacaacataaaaatttgcaaaatagaaaatacccaaaaagaaaatacccaaaacaaaataggataggtttgagtcattctaagtaagacaagctagttctctttgttgaaatgatgaataaatgctctggtttatatctcttatatatgggttcataggtaaagtgctctctcaaaggttaaatataagtagccaacaattatctgggaacctgaagtaaatgagctgcacatgctgatctgagtctaaagtgttggtagatatgagatagtaaataagaattgctttgatccta

SEQ ID NO: 45299 - DNA, 436 bp, Oryza sativa
  unsure (1)..(436): unsure at all n locations
cgatatttagcgcatttcgtntgttttaacatcttaagatatattggtatccgagtattagccgatacatcttagatttacttaatcggctatgctatgaatatatataatctctatctcacagcactttgtaacataagtgattcatactgtctcgtgcaactgtccgatctatcccaatcacttggtttaaacatattcntagaaatagattatatatcattaatatctacacccgatcgagtagatttaactntaccctgctatactcttcattgcctatctaatgcaaataacatccggctaatattgaacgatatgtcatcggctatcgcttacggattcaactctgccttctcgttactctctcatttcttgctggatgcacaccaactggcacgcttagaaatcagaagcaattctctggacctgcact

SEQ ID NO: 45300 - DNA, 408 bp, Oryza sativa
  unsure (1)..(408): unsure at all n locations
agctngagtcttagaatcagatactttctttgttctgactgaaacggtgcatcaaatccactgaacaaaccgtgagagccaatgtcccaacctgcagctccattcacctgcagcagcatacagaagcccccctaagatcagaaatgcagttactagagaaccacacaccccgtcaaggaggactaattattacagccacctacgttgaggcatggctccaccgatgcaccggacggcaccgacatcggcccgtccggtggtgagtactggttactgacgaccatctgcagcccatagccagaggatcctgcagaagtatgcatctgctgcaaggtgctcatctggaggcaggaaggctcgacctgcgccatcggcagcgccatggccggcagagccgcaaggttgcac

SEQ ID NO: 45301 - DNA, 429 bp, Oryza sativa
gcgctaccacccacgggtatctggagggcataatcagatatgaacgagccagcgttcgctacgtattattttctggatcatctatgattactaaaccttcagggttcatgcaaatcaatgcttagcatctctaatcaacaggtctctgagttcaagcagatgctcctgtcagcagcagccagaaaaaaaaattacaagagagtattgcaacttgcacgaggagaccaactatggcgatctttactcttaggtctgagttcaagcagatgctcctgtcatcagcagcctaaacaaaatgtaagagagaattgcaatttgcatgagcatcgagaccaaaacggcgatctataccttgatcgagaaggatttccttctccctcgaatcagaagcgccggctcatccatgcgcagtcatttcttgatggtgag

SEQ ID NO: 45302 - DNA, 448 bp, Oryza sativa
agcttcctataacagagaagaatactactcctatcttgatcgatccacttgccaatctcctatccctctctcttctagaagtggtttcttcttttttttttaacatatgcatatgaacatgattttagacaattttcttatgtcacaaataattttaaatattttcatgacatattgcatgctattataaattttgatatttaagttagttgttgtacgcaaaagttccaacctatgtaactgagataccaagattaaaataggacacaaaatttctccttgaaatataacttgtatataaagagaaacataagggggaatgttgtaataaagtgaattaatttcatcagtaatttaattaggtggtaaagtgtgtgctaagaaatacaggagtttgagagagagagagagagagagagagagagagagagagagagagagagagagt

SEQ ID NO: 45303 - DNA, 429 bp, Oryza sativa
  unsure (1)..(429): unsure at all n locations
agcttgtcaccgccgctgcaactccttctcttcgtgctcccaccgggctggggaggaggagccggtgagcatcccgccgctcctgccattgtcgcccgcccgcgctcctacccagcgatggaggaggaagtgggagaggaggagagaaaaatgagtgggggattgagtaaggagattgagagggtgtggaaaaatgagaggtgagagagaagttgaggagataacgatggggacttaaaattttaaagatgctgagcgggaagagacatttatgcatgcgcccgcttaagaaatccacatgctaaaaaatgcttgtgttttgcatgcgggtgtgttaagaggctcctatgtgaaaatatatattttctttgcatgtgggtctcttaagaggactnttatgagattaatctaatagatcatgttgatata

SEQ ID NO: 45304 - DNA, 460 bp, Oryza sativa
  unsure (1)..(460): unsure at all n locations
tctccacttcatcaaaatcttcaacagtttcaccaatatcgttcttcgtagactgatattcttgcaccctcttttgttaccactcaaaactagcctctttactcattatacaaatttatatggcttagccgtgctacactagccggctttacagagataggtacaaatctgccatcggagatactaataaaatcatagctagaaagatccctccccgataaacattggatattcccatgacgccactcaaaagtagcatcggccattgcaacctcagccgatgtatccgcttgcacaatttcaacatcatcgccgtcccattggattaaacattgatgcaaggtagaaggcacacaacaattggcatgaatccaacaacgacccanaataacattgtagttaccttgcacatcgacgatgaagaaagcggttggtagcgtcttggttcccactgtgagct

SEQ ID NO: 45305 - DNA, 455 bp, Oryza sativa
  unsure (1)..(455): unsure at all n locations
agcttcaagaaaaacaaccaatcatgtctatcctcatacgcgatgctattacatgtttatagtgattattggtctagtcttttcaggtcaagaatcacaacatgcttccttcgcgcagacgttaatccgaaattttcatccgattatccgagacactcctgttgccttntcttaattaaaaaaaaactctgttaccattgaccagctgatagcgtaatggatagcctatgcttgtgtaattcaggtatactacaagtcattgaccattagcagcttaacagccactggagcaatggcttctttcggaatgcaatcttgggagattacagtgcacgtatcttcccgtttccaatctccagctgatcttaagagatcaggggcgaggatggcttgcaatggtggctgcacggacactntgtgatagtctgatctcactgagcanacgatatactctg

SEQ ID NO: 45306 - DNA, 252 bp, Oryza sativa
  unsure (1)..(252): unsure at all n locations
tctcgaggcattntgttctggataatattatcccacagtacattactagcggaattttcccatctatttatacaccgagatattctttttttttgaatttgatacatgcaattttgcactggacacaattatcctagattatgtttctatacatatatacatttgtattggcgctgttctacttaatgtcactcttgtgcagtcaacacacagtgtgttgtgtctgccaggggcggatccaatatgggtgca

SEQ ID NO: 45307 - DNA, 382 bp, Oryza sativa
  unsure (1)..(382): unsure at all n locations
agctnggtcttaaccttagtctttgtgattactttgtttagtaactaaatcattataataaatgctattaaaactttgaaattcataataaattaatgctagctcacaaaattgtaaactaaattttgttgaacttaggacaaagtactctttatactgcagtagcctagaacttcacagaacttgggcctaaaattcatctaaaatttattagtacattatagaatttataaaattcacaactcacaaattcaaagtgataaaataaaaattccttcaccataaattatgtttatacagtacctattcacagtagtaaattcattcattttagagaatgctagaatttggcatattttagatggtgcgcgaccgcgatatt

SEQ ID NO: 45308 - DNA, 464 bp, Oryza sativa
  unsure (1)..(464): unsure at all n locations
ngaatgaacttgagagcaaacttcggtgagggaatgaaaatgtgttgaaatggggttgaattccctctctcggtcgtctggctttaatagggtacccacaacggtcagaaatgacatgtgggacccactagctgttacctgccaaaagtggcaggtagctgttatatggctagttcgggcgaacccctggtgggcccaaccggccccactttcggccgttggattccaacggtcagtgtggtcgtggcacaatgaattttcgttgaaaattttgttttggtttgtgttaacgaccaaatttggtaatatcagcatcggaaaagagaattagatcgaagtggagtcgaaggcggagatcgattcgagaacagagcaagaatcgactggaatccaaatcggctacgattaggatcggctgggtccgagtaggactgggttaagtgatacagctgattctgacaata

SEQ ID NO: 45309 - DNA, 466 bp, Oryza sativa
  unsure (1)..(466): unsure at all n locations
tcattgtanaatctntggttcatggatatactataatgcatgcttgttttgctatagatgggtttatcttctttttattgcaacacatgacttgatatgctatatgtaggctcagctcttgaacattaatgaacataattcctatgcttgatgaaatcattgtcaaaagggggagaagtaatgtgaaacattttggatttttggagaagcaaggtgaatttttgaagagttgttgagaagagcatgttgttggttcaattgagaatttctttcttttaaaaagggggagaagttntcttttagatttttgagcacgatgtgtacatttgtacgaagtgtgctctttaccaccaaataccaaaacattnttatggatntgccaatgtgttcatcaagggggagattgaaaatcaaaggtgtgtttgattattattctgtgatgaacaattgggctctggagatattg

SEQ ID NO: 45310 - DNA, 354 bp, Oryza sativa
  unsure (1)..(354): unsure at all n locations
cagcatgcaagcnnaaaaggaagcgcggacatatttcttcttatacgagctaactatcagagcagctgccccatgcagaatgcctggtactaactgaaatccaacgcactccagttaggggtgaacgacgacaagcgtcaaacgggtaactagaaccctaggcggaagcaacagcaggggagtgcagggctagattccactcaccgcgaggccaatgccgcttcagcgcggcctgaacctgacgcaggaagtcccgaggggacagcgtgagggaggaggtggagctcgaccacgaggtcaggttcgtcgcgaaccctgtggaggggaccgggaggacctttccgccgacggcgg

SEQ ID NO: 45311 - DNA, 453 bp, Oryza sativa
  unsure (1)..(453): unsure at all n locations
agcttgtatatatcagcaatagattggtgatgtttaacatagcatcaacaaaggcccaatgtcaacgtgtattagtaatatcatggcgttgaaaatttgttgataaatttatagactttaccaatgatgtattggcatatcggtgatttttttcaatgattttttttttcagatttggggcatattcctgatccaattaggaaaagagaaggaagtgtggtctcaatcctcatcaacaaatgatcatgaagacttggatattgagttaaggaactcatcctctaaatgagatggtatttcaagataatatattgtaacttgtgttcataatttttttaatgttttgtctctcattnttttaagtgatacgtgcactgtttatgatcttgaagttgagtttgagaccacatttctctacatgtaacggttcactaaanttggtacgaaactcat

SEQ ID NO: 45312 - DNA, 480 bp, Oryza sativa
ctcaagcttcggttcggacatcccttctttgcagaagtgtggagattatggatatcccatatctacacggcgatgatatttggactggatataggataccgaatatatatagaatatcttatttgtatctcgggttcgtttcttaacttgtacatcaaggaaacaccttgagacttagtcggttacgactgtattttacctgtatctgcatattccgttaggatatagattatcttttgtaacacggactccttcccatatataaggggggtccgggtgcctctaggggcagagatgttgattttctccaaatcatacaatcaataatacactcggcggattcatccccggacaggagtagggtattacttcttgaataagaaggcctgaacctgtataaatcctttgtttcaaacccatacactattccagcttgatagccacccacttttattattgccgagatctaggttcgacagg

SEQ ID NO: 45313 - DNA, 448 bp, Oryza sativa
  unsure (1)..(448): unsure at all n locations
gcttgctntaatccatagatggatctctttattttatatcccatatnttcgnttcctgttatgacgaaacctttcggttgtgccacgtatacttttttcttcaaatcaccatttagaaattccgcttttacatccatctgatgtaattccaaatcataatgtgccactagtgccattataatcatgaaggaatctctacaagagactggagaaaatgtctcattgtaatcccttctctttgcgtgaagccttttgccacaagtcgtgctttaaacttttctatattccctctagagtcataatggttttgtagacccatttatagcctattgctttggctcctttaggaatttcttctaaatcccagacatcatttaatttcattgatttcatttcatctttcatggcatccaaccattcagatgagcgagcgcttctcgtggcgtct

SEQ ID NO: 45314 - DNA, 448 bp, Oryza sativa
  unsure (1)..(448): unsure at all n locations
cgtgacgcgtctcatgtgttgagacgaggctcatgtgttttgtactcaccgagggcgggtaaattatacatccactgcagtgtgagttaactaaatctattcgaatagccgngctcgcggttattgagcaccgggacgtgtattacacttggctagactctgaattcttaacttgtatgggatgggttattgcattatgagttttatgttgctggagccacttcctgagaggcgggaaggtggacgtcctcagaaaaccatgacgactcaatggcgggaatctatccttgagatcacaatggatggtggacagaaccgtcgttattcaaatgtgaacactggtactaaaacttgatcagccaatgctaggtcttacgcttgtgaaaagaattacaaaacttgctttgcgcaaaagaaccatagccattctttgaaatacccctatcat

SEQ ID NO: 45315 - DNA, 408 bp, Oryza sativa
  unsure (1)..(408): unsure at all n locations
agctngaccttcatcatcgcgacgctggctgtgctttatacgacctccatccacacagtgcctgggctggagatcctcttcgcctgacaccccgactttcgccccgccggctcctggctcgcgatcctctacaccattgacttcctctgctctctagctcaccctagatctcctcgcacgccatccctaaactcgattgctcttcgccagcattggccccaagctagacattgacttctgcttgtgcaatccttaagctcgtacttctgcgcgcctgccttggagtcatgaggactcaccaaagagatagaagaggaggtcgatatgctctctcaagctcccatcacgatgcttcggttttagtccctatntaacctcactgacaggtgggtccagaggcagaagcat

SEQ ID NO: 45316 - DNA, 468 bp, Oryza sativa
  unsure (1)..(468): unsure at all n locations
gtcacctgcngcatgcaagcttcacaatcagtccccttcacgtgtacttatgcttgntaattgagaaagaagtagcgcgcatatatacacctgctatattcaagaagggtaagtttgagattattacatccatggattgggaagtaatatattttattgatgacgatacagtagagaagtatgtcatgtgcttgaaagagaacaatgagaagctgaagattttgaactgtacttatgaggaatcatttttgaagacaatgagttgcccttgcatgaaactngattgtgaaagccttccatgtcagcacatgtttgcagttctggtttatttgaagatggatgccattcctgaaagttgcatagttcgcaagtggactgtgatagccaaaagtgtctctccgtccgatagatatggagagacatntttatggtcagaccacatggaaaggtatcgcatgtttgcgtact

SEQ ID NO: 45317 - DNA, 450 bp, Oryza sativa
  unsure (1)..(450): unsure at all n locations
tattatgcacgcatatagnaataatatcgacaatgtatgttattctataactaaacatacacatgctaaatgattactcttaaataattntcataatatttcagtccaaataattttatcatttctctattatctaacatatatactgcagcaaaatgcggggcatcatctagtataaaaagatgacctacgccgaacattgcaacaggaaaactagtgacggaactaaaataaattagccatatttttgacaacttgacacttttaaaaaacttattctgagattgaaccgtgccaaaaactatatttaacaaaggtcgttttctcagcgccaaccttgatggcgctgagctataacatccttgatggcgctgagctataacatcttagtgccaagcggtctgaggtgtcatggctatcactcatcatatagcttggttcgataaatac

SEQ ID NO: 45318 - DNA, 284 bp, Oryza sativa
  unsure (1)..(284): unsure at all n locations
agcttcgcctanatcggtgtggaaacttgtggttttatctcgaatcggattcatctctctcctccaactncgaagtttccttcggcgtctncgtcgcccggggccttccgcgccgccttcttgcacctatttaaggacccccgagctctcctctacccgtcgccaccctcgccttcgcctctcgtcgtcggaagagctctagcgccgtgtgccctagcttcgacgtcgccgccgacgctccagccgtgcgccggcgtcgtttcagacgtcgccgtcgctcggga

SEQ ID NO: 45319 - DNA, 410 bp, Oryza sativa
  unsure (1)..(410): unsure at all n locations
agaagattggtttgtacaaattttattttgtcgtcggctgtgtggctgtggcggtgcccagccaactcaacacaaacggcatcaagtgttgcgaacaagacaatcactgctgagcattgtgaagggcattatttttgctccaatttgtgcaatcaaagtcatttcgcgacaatagcaatcatgtgaaaagcgaccagaatccaggatccttcttggtggcatgtaaagtagtagcataaactggtaagattctgcctacattttgccgagatagccggctggattttagccctcttctgtcctgtcccatgatctagccaatatgcagattgctcctactggtctcaaagcanataggtgctacatttcccttttggcaaccagcctatcataaatattatgtattctga

SEQ ID NO: 45320 - DNA, 354 bp, Oryza sativa
  unsure (1)..(354): unsure at all n locations
agctcttgagtatatgcattcttaaattatttgtaatatataaaagtcgtacaagcactgtgaattcgtggggttctatcaaataatatgaattcataatttcttcatgtctctatggtaaaacaagcatgtaacagcagcatttttttagagaaggtatttttacccggcgtctatatctaaccggatatatgtagcttttttagcctttntttaatataaacttagtctatcgaagagaaaactagttctcaaataacccaatctgaaattcgctcctatgccatattgaacttagaatcttgggtgctactcaggacactgcaaccactagactacatgtccttttaccat

SEQ ID NO: 45321 - DNA, 304 bp, Oryza sativa
  unsure (1)..(304): unsure at all n locations
agcttgcaantcatagggagtatagtgtttttttatgcaatgcaagcgggactctctgacccggtaaactgttctcaacatactgacagtgaaatacgaaacttgtatggactacttgggataactagtcctccacagtgcatgctgatcaggaaatgcattttatatgacgcgcgcacagctaacttgatatatgtgatggctcatctcattgcatagcatgaagcttgtgaagcagattatatacgacttcggtaatgatacataagagagatctgccttgagcacactggagcgaaaacca

SEQ ID NO: 45322 - DNA, 458 bp, Oryza sativa
agcttcaggaagagatgggttccaagctgtactttattaccgcttatcatccgcagacagacggacaaactgaaagggtaaatcagattttggaagacatgttgagagcttgtgctttagacttcggtggaagttgggataagaatctgccttacgcggaattctcatacaacaacagttatcaagcaagtctccaaatggctccttatgaagcactgtatggtcggaagtgccgcactccactgttgtgggatcaaacgggagaacgtcaggttttcgggaccgatatcctgagggaagctgaagagaaggtaaagatcattcaagaaagattgcgtatagctcagtctcgtcataagagttatgctgataatcaccgcagggatttaagttttgaggaaagagatcatgtgtaccttcgtgtcccgcctcttcggtgattatatcgttttcacacc

SEQ ID NO: 45323 - DNA, 461 bp, Oryza sativa
  unsure (1)..(461): unsure at all n locations
tatacattcctgngatataggggggcagcngaatgtatttatctattcaaattatacagccatatgtgtccacccttgtttgcagatctattgctctacattacaagagcatgtattctgagggtctgattgatatttgcttcctgattttgttttcacacttacatgtgcttgtttatcaaaataaactaccttggtctggctattgatgctaccttgctgcggctaaattcttataatcttatttgtgccttttgcgtgattaatccctcttttaacgattcacaacaacgtattcatatgtatgctatcactcagaatgagtgttgacaccatgtatgcctggctagatctatttaatatgattttcccctcgagcctgttatggccatgactcacgaaattgtttactgcatatatctatgccaacagcccactgtaaaatcctgaactatgtcctg

SEQ ID NO: 45324 - DNA, 452 bp, Oryza sativa
  unsure (1)..(452): unsure at all n locations
agcttcatcgctgcacctagcagacttcttgtctctnttttgtccaacggagggatgactaccactagcctcctcctactggctcccctccacatcccttaacacgggcccctgctggatcccctcccatacctctcacgttccacttctcgttcaagtactggtgtggatcctcgtgcccctcttcttcataccaggactggctgcttacctccgcgattgcatcgtacaatatgtgttcctcatcgcggacagccatctgttgatacaaaaaacatctgctaagtcacgagacattcatgttataacaatctaagacatgtatgctaagtgtaaatgtcgtacattagaaccctacacaaccttacgtgctaagtctaatcacaaatcgtgatataagctacgtctaggtgacagatattatacgaccctaactactagataatatctac

SEQ ID NO: 45325 - DNA, 472 bp, Oryza sativa
  unsure (1)..(472): unsure at all n locations
tcatcctntattntcaataggtgcacatagcagaatctagtgcaatcttctatcagtgtcatgaaatatttctttccccctttagtcaacacgccattcatttctcacagatcggaatgaacaagttctagtggtgccaaatttctcgcctcagatgccttgtgaggcttgcgaggttgnttcgattgaactcaagtatgtcacttagagcctttgactaaagtgaattttggaattaaactcatgttggctaagcatgtcatacaaccaaaattcacatgacaaagttgcgaatgccacacattggactcatcatcatcatcgcttacatggttcacaactttattacacatatcatccaaggaaaagcgaaacaaacctccgctgtcataaccttttccaataaacgttccattattagatatgacacatttattggattcaaacacaagtctaaaaccatctgtacaca

SEQ ID NO: 45326 - DNA, 442 bp, Oryza sativa
  unsure (1)..(442): unsure at all n locations
agctngatgctttaagctctattcttagctgtgtcatatgaatgaataattgaattgaatcgatctgccggatggttattaacttattactgctctctctgtttcatatttgacttttttttctacattcaaattgaactaagtttatccaaaaacaaagtaattaatgttttgaatgccgaacaaatatattatcaaaatatatttattgttaaatttaatgaaattaatttaatgttataagagttgttatattttctctataaactcagttaaacacttacagaagtttgattttctttaaaaaagatcagagtatcttacgatataaaagggatggagtactatgtccatgttaaatatatntacgacgctgctaattttatatatgtggnttctatgtgcagctttgacaataattttctctaatagattactaaag

SEQ ID NO: 45327 - DNA, 227 bp, Oryza sativa
tagatgattagcacgatgttagcggtctgtgactgtcaactttaaccgtcgactcatatagaagagaactaggttattacatcaaaacttactgagtgggagtggtatgtattggcggaggaagctcaacgaggtggtgcccgacgtatccatggcagagaggatgcctaggtggtgactgctccaggattactaataataacgcagctgatactcgtcactacgcc

SEQ ID NO: 45328 - DNA, 455 bp, Oryza sativa
  unsure (1)..(455): unsure at all n locations
agcttcctagaagatacactcatnatcttcatatactgcgaccaacagtcaagctcacaaaggtgagttctttcaagaatgctctgctggacagcatcttcgctaattaaagccaacagaactcattaaggcatagccaacctgccttgcagctcacgagagtacatgcatcttcacttagagagggtatatatcggtactctcctctagtttactaatggtttgttcttcccaggatctaattcacgggatctccgatcacatagactggttaccaccatagtataactcacatgggtctcaaacccatctacttcgatgcattgtctatcacatttcgtgatagtcccttcgtgaagggatctgccaggtttctagttgtttggatgtaatccaacgctataactccggagtttctcaacttcttgacagacttcaatcgtcttttcacatgt

SEQ ID NO: 45329 - DNA, 458 bp, Oryza sativa
  unsure (1)..(458): unsure at all n locations
tatgttgatgatgtagtcgtcaagaccaagcacaaggattatcctgttgcggatttaaagaacatttgaaagcatncgtgctttcaggatgaaactaaaccctgaaaagtgcatcttccgagtaccgccacggaagctgctcggatttatggtatctcaaagaggcatacaggccaacccggagaaaatcaacgccatcctcaacatgaaaccgccgagttcccagaaagatgtccaaaagctgactggttgcatggcggcgctcagccggttcgtttcgcgactcggcgaacgggggatgccctttttcaagttgctgaagaaaactgacaatttccagtggggacccgaagcacaaaaagcctctctagacttcaagaatcttctcactaccccaccaggtattgccttcccacgttcgcatgaaccgctattattatatgtgtcgggacctctca

SEQ ID NO: 45330 - DNA, 442 bp, Oryza sativa
agcttataagaggaacttgaatcgatccatgtctagccatccgataagaccataatgcttcagctaatcttgtatgccattgccaaggaaaatcaaaaatctttctcttaatcagtttgatcaaacttttattagatgccttggcttgcccattagcttgcgcataatatggcgaagaattcaacaacttgatacccatactatcggcaaactgaacaaattcatatgatacaaaaatcgatccctggtcggttgtgatagtctgaggaataccacatcggtagataatatgttccttgacaaactgtatagcatcccatgaatcaactctattcaacggaatcgcctctacccacttggtgaaataatcggttgccaccaatatgaacttatgtcctttgcttgaaagtggattgatttgaccgatcatatccatacccca

SEQ ID NO: 45331 - DNA, 467 bp, Oryza sativa
  unsure (1)..(467): unsure at all n locations
tggngcacccccacgctaganatcaggccattgaagcacgaacagtctacaaccataaccacgataggagcccagttcagtcctgcttgcctcatcagcgtgaggacgtacgcacacgcacgcctcttctctttttttttctttctggcgactcgctcttcctctttgtccctaccagtgccgacgcctcttgccgctaatgccacaattaatcctcgcctcttaccgccaatgccataattaatcctggatgactaattaatcgacgcctcagcaagatgatgggatgtcaccgaggctgggcacaggcaattccttgcctcctctatcttctgttctatttgctaattctttaccagacaatggattcatttgaatagctccttcacttttcaattacgcgataatagctatctttttttccagatcgaatggttatggntagtgcagcgttttatctctgcttc

SEQ ID NO: 45332 - DNA, 467 bp, Oryza sativa
  unsure (1)..(467): unsure at all n locations
tcttaagtcaccgcagctgcagcttgcgccgtggaaccgtcanattattttatatatttctacttaatttgtaaggtggtccaaaattttaatttcttaaccaagtcactgatcaaactaacccatcataggtgattccacatgccaccacattgcatctagatccattgctaacgctcatacttgaccttacagcatgcctaatataaacattgaggttcaatttacaatggtggctagttagacttgacactgaagaagagctgtcaaaccaagtgcatgaatcctagctcgctatcaatggacaccgaaaataatagggtatttctacttaatttataagcaactcgatccaaaatctttatttcttgtagtgactcgcgccatcgaacggacttactagcgaagagctataaaatatattttaaaacatgtttctagatctgctgtttttgacgaaaaccaac

SEQ ID NO: 45333 - DNA, 443 bp, Oryza sativa
  unsure (1)..(443): unsure at all n locations
acggaccttaaaactaagctaatcaacttataaatatataatagtgtcgtacatatcatacatattataaaaatatattcaatgtaaaatgtaatgaaactaaatttatgttataaatgttgctaactttcttcataaactatggcaaaataaaaaactntaactatgaaaaaaaaagtcaaataacttataatttgaaacagagtgaatactacaaatcagaaaacggcattagctaagtatctactccctccgtactcgaattagatgtncgtttggcatcgctcgcgtnttcgcaaaggatgtcgctgtacgctcggaagaaaggaggaggacgtgtatgcccctgcgcatgcgtgctcgtcgtccgcaataatcacgcgcattaatcgtgcctgttcgttaagctcgctgctcggactctgttcagcgaatcagcgctt

SEQ ID NO: 45334 - DNA, 449 bp, Oryza sativa
agctccagctccagctcgactgagagacctgttttttctccgccgtcgacgccgagcgccgccgcgccttcttcttctcctccgagaacttcctctactccgttgacctccccgcccacacccaggtacggttactctgctcaccaatttgttatactgcttgaaatcttcgttttattgtttgcctcgcaacgtaccaatagtaataccacgctcagtacaagagggatacacatattatatggtgttaatttaccatgcgtatgattctcagatgccagttttttgggtcaatacaacccgttatactgctaactaaatttgggcagaacactatgatttttttttttgtacaacgaaacagacaaacacatcatcatcttcaatttgctatggtagcactgagcgtgtaccttctaacctacatatttgatatttaggacacgatc

SEQ ID NO: 45335 - DNA, 433 bp, Oryza sativa
  unsure (1)..(433): unsure at all n locations
ggtgactcggatcctaatccttaagagtgctgccaggcggatctgtagtgntncgccgccttcaatacgctatgttggattgttgtgttgtgacaagaacggtttaaaagcgttattgttcaagagaggctagataatcaatattatgcgtaatggacctgataggggaatatgtgatacagcagctagcagacaagggcctcttcctgtctgcagccacctcaaggtctgaatcatcctctggcttgcaatgttagctgtccacagccagacgtctcattcattgctgtttgagaatattagcatttgtggaacatcttgttaagatagatcaccagcagaatatgattgagttctaatggtccacatcctatggatctacagcactcatctccttctatcagatgtgaaatgtgcattgtatacgtcatat

SEQ ID NO: 45336 - DNA, 439 bp, Oryza sativa
  unsure (1)..(439): unsure at all n locations
agcttncattgcagatagtgaagctgcgtttgttttatgcttccattcatatgagacagttctcccaccctctgacagaatgtctattgtaacataatctagaaatgagctatccaaagttccatcagttccccttgagatgtgtaatgcggtatttgtccctgaagattgaaactacacaagaccaacctgtcatctgatgatggtgtatttgcagtccattggttcatgccgtgaaaatgatttcgtgtttctgcatactctgacacatcattcgatattctactgctcgaaacctcccggtattcttcaccataaataaatcacaagggtgatccatcgattggcttatcagttacagccaagatctgaattctanaacttaattttagagtatgttttgagggtgtgtttcttacatagtttatattctagcatt

SEQ ID NO: 45337 - DNA, 472 bp, Oryza sativa
  unsure (1)..(472): unsure at all n locations
acactataaataacatcagcttcactctctcgataagataatgctacggatggatctgtgcttctgctngatanacaataaccattctgtatgtcagttagttcactaacaagatcatcggaccatgagcgtgtggcaccagctgtttcctaagacatcgtgacacaaatttctcctgcaaggtgaaatcatgaaagaaagaagaaaagtgattatcatacttttcgcacaatgaaccgacatatgattcatacatcttagatgtttgtagtgctaacaatatgaacaacgctataaccttaaaacactcacattacatgaacaaagcataagattcgtgtgccaaattaagaagaagggaaatttccatcangtaccacaggcaatcgccttctcggttttgcctttcggaagaagctcgaaccaccgcgcgccgagcgagtagttatcagcagctatgacatcctccaga

SEQ ID NO: 45338 - DNA, 468 bp, Oryza sativa
ttaagtcaccgcggctgcagctgtcgtggagtagaacggactttatatcaccggagatagaagatggaagtacggcggcactggaattgggaagatggagtacaagtgatgaaatcaaaatcaggttgcaatgaagagagggagcaacgtgcatccaacatgcaatgccgaccaggcgcagggcaacagaagaatcatgtgatccggctagaagaaatgtgtcgaatgacgcatagacatttcctaatattatcaaatgataaatgaaataagatggattcatgtaacacccccaacctatttgaaggctatagtggtgtgtggtttacgccagagtggtcttgaggtggttgtcgtagtgatggtttaattctaccttgaaagtttacgcagatgacgatctgcttataaagtttagtgctgcaataatgataccttctacatgaagcgtgaacagaaatataaaca

SEQ ID NO: 45339 - DNA, 371 bp, Oryza sativa
ctatcctcatatgactgtgtgagcctcttgcgacgcaatgcggtgttgaagtcatcatctctatcatgcaatctatatgcagagtattctaccaagctaacattgttccgtttgatcattcctgagcggtgacattgcctatacttgagaatttcatgacaaccatcctctccatatagaaacaatagcgggtattaatagccataaatatgcactgacttcacttaccctctgaagctgcaatgagcgatcctctactattaagtcaccacctatctcggtgatgcctatatcattaaccataaaccatccactctgatgaacttgggtgatacaattaccatgtcactgagggggacaatactcactga

SEQ ID NO: 45340 - DNA, 365 bp, Oryza sativa
tatgttctaaatatatgataatgtagcattatatatagcctctgttattatgatgcactgggtcaccaggccatatatggattgtgccgtgccaggtatgttgcggcatgggccaagcctgtgcgacacggagctggccaacgacttggctgttcacaggctgggatgcctggttgccaccaccttggtttgcctgagagccgcgccataacccgtggcgtgcattgggttcatgccatcagagctgccacggattacgtcgctggtggcaacaaacaatgctgatgaggagttggaggagcatttggattccttgttgaactatcgaggatgagctgactacgtgcttctctgtcatgtgcagt

SEQ ID NO: 45341 - DNA, 452 bp, Oryza sativa
  unsure (1)..(452): unsure at all n locations
tcggctcacgtggtatngtcaccagagcgagcgatctttgtgatgccacaagggacagagaattggctccttaacctatcgtatataaacagctatgtcaaagggaagctgatgaccaagatgatggttgatggtggggctgcggcgaattcgatgccatatgttacatacaagaagctgggcacaaatactgaagatctcatcaagacaaacatggttctcaaagatagtggtggcaatccatcgggaaaaaaaggagtcttgaatgtggagctgacagtcaacggcaagaccgctcctacaacattatttgtcatcgatgggaagggttcctatagtttgttgcttggaacggattggattcatgccaattgttgtatttcttcgaccatgcatcaatgcttgattcaatggcaaggcgacaagattgaaattgngccagccgacacgtc

SEQ ID NO: 45342 - DNA, 472 bp, Oryza sativa
  unsure (1)..(472): unsure at all n locations
ccggatccttaagtcacctgagctgcaacttgctggaatggacacacactctcttatactaganaattaccgtgccagttggcgcacccgttatttcataccccatgtatatacttgtttcttctttctactaataggttgaccaaggttacatgtaaatatagcaatagttttaacacccaaaatatattcaggcctgtttagaacccaccctaaaattttntaccctgtcacatcgaacgtntgaacacctacataaaatattaaatataagctaaaaaaataattaattgcacagattacgactaatttatgagaggaatattttaagcctaattgctccatgatttgacaatatggtgctacagtaaatatttgctaataacggattaattacgcttaataaaattgtcttgctgtttactgacggattctgtaattagttnttctattagtgcccgaacaccccatg

SEQ ID NO: 45343 - DNA, 458 bp, Oryza sativa
  unsure (1)..(458): unsure at all n locations
agcttgcagatttcctctatcttatgtctatcttcaacaacttgcttgttacctgttcgcaacaaagacttggaaccaacagcacacctacaatctacatactccgagtaatattggcacacaatgtcaatgatcctatgaagtccgcanagcagtggtaaaaaccttccatcagtttcaaaatattttagcaaaaacatataaagatctctctgcacttcatagcttgagtgtacccatatttgtggattcaaataaatttgtaaaatagcatctttcagcagaacttttgacatgcctgaataaatgagaaaaacaataatgtcaagatgtctatttcgatcagtcagatagtcacgagagagagagagagagagagagagagagagagattaccgcagttccttataacatcaaacatatacttcagtgcagaaagtgtttcaatatttaacagc

SEQ ID NO: 45344 - DNA, 403 bp, Oryza sativa
  unsure (1)..(403): unsure at all n locations
cactatcntgttcatcaaagtgtaagtgtacctattttgttggtaattgcgataaagcccaataccaaaccaatcatagacgaaactgccactctgtcagtggatgagaactcaacagctcactcaatatacgagtccatgganaatcaaaatggtccaatacaaaccattactttttcaaagaaattcacatcacagctagcataatcaagaagcaatgaactgaccttcgattgttccaagaaacccgctgcatatggtgtcctgagagatgaggcttagcgtggacccggtcagcacggaccggtcggtgttgacatcgccaacggcgagctcgatggcgagacccgacgcgcgcccaatcaccgagtcgtatgtggagagcgcgccgattgacacctcg

SEQ ID NO: 45345 - DNA, 360 bp, Oryza sativa
gagctaagggattcaatgccttacggacgctctttagatttgacaatgacacaatgtataaaccttcgatacatttaatggcgtcagctccaattttcagaagattgacattggacatgttcctcatgacgagtgtcttcagcagcggaaacgactttgcaagaagaaccaaagtgtgtgcaccattggtatgcaccttgctaagactctaatatgtcaggttcggcacacacttttcgagcctctcaaatgcttcatgcccaaggtgacaccggcttagagctagatacttcacgcgtcgtccatggtcctgaaacaccaggcactcaagtgtgctctcactggtgcatcctctgataa

SEQ ID NO: 45346 - DNA, 303 bp, Oryza sativa
  unsure (1)..(303): unsure at all n locations
acctatatatctcatcttacagtcgcggggatactttatttaagatcatatatcgtaccggctcaattgtgtagactccactgagaactgtatatcttacagtatctgcatgacttactgtcaccgaggtattgcgtatatgtgccattattcacactttcattttctttgtaccttcgaggcctgcttctacttccagtctttcaggctagatggtcccttgcgaatcacctatgcttctttntggcacatgacttaattctggtgtactcacatgctatcaggctttttatccttctacaa

SEQ ID NO: 45347 - DNA, 474 bp, Oryza sativa
  unsure (1)..(474): unsure at all n locations
cgacctgaggcatgcaagcttcatgagaaatcttgatatatttcttttctgtagcggcaagattcttctcatgggtttaacacaaacaggacacaccaanctctttacgctgactatgctcccacatgcacactatatggaaagggcgtggaaatcaacagaactatgcattcttcttgctcaaattagagcatggatttttgaaagtatatagtaaaataccactatcaaaataaacagcgaaatgattaataaagaggtggtacctctgaatgtgcctgaatatacttgtcaagaacttcgccagccagagaaattatactaacaagctgtaaagaacaattaaaacgtgctcccttctcctccagctgcttctgtgcctcttcagtatcacctttctcgcgtgtttgaggagcacagcataatcgctgcacgataacatgaaatccttcacgcttgaccttccgaaactgg

SEQ ID NO: 45348 - DNA, 442 bp, Oryza sativa
  unsure (1)..(442): unsure at all n locations
agcttgtagctgatcgtgtgatctctcacctagataactcgagccttcagttcctcaatctcgtcagcaatattatgcctcgggccaagagatttgagacgttgtatactcttcctaaagaaatcctcgatgctattactggtgcggtgctgctcaccgttggcaccaagttggtgcataaacttgtctatgcagtcctcgatgtcataggcaagctccctcagctcggtgatccaggccttcacctggatgtcagggtcctcgagtgacgcatacttgtggagcgccgcttgcatgttgctcagctccgatcttagggaatggatctcacggcggacacctttcaagcacgcgtacttgtctgcgagcaaagtactgagctngtccagtagcggacccaatccccatgtgagacactaccacggatccatggctacgatcg

SEQ ID NO: 45349 - DNA, 275 bp, Oryza sativa
gctgaagaagcctgtactctgtgtgtaatcatatgcacccgacattctacagaggcatcatacctcagctcaattctaatggaccctgcataatcagaggttgcgcataacaacatttagtttcaagcaggctcaacgctatgagcggatcatcgcatggactcactcatattaatccgctagatgataatagcagctatacttgattcggcagaatcttaagacctgtttcctataggcatgcagcacacgaagactccagcgtcacataccat

SEQ ID NO: 45350 - DNA, 392 bp, Oryza sativa
agcttagcactaacatcgggcttgtatcttctgtgtccagctgaatggacgtaggcattatcttctatatgcaaggacctcagtcatggccagaatccgagccgctctccttggtgcctgctgacaggactgcggccataccatacacgcccactcgtgggcgagattgagcagcaaagacagcgtagctgctcggtctaatattgacaccatagggcgcgatccacacctactgggacacggtccacccctcacaccgaacttgagatggctcaccatcggcggaagagcccactgctctctgctgacagacctagacctaattacagtcttcgactacgcagatctgaggctttgagggtgagggagaagatctgccgtctaccatgtcc

SEQ ID NO: 45351 - DNA, 107 bp, Oryza sativa
tagtgtaaaccccctacatacacgagggagaggggaccaacctttttgatttcactatgtattacttcaagtaagacaagtgatcttcactctccttttctcaaaaa

SEQ ID NO: 45352 - DNA, 452 bp, Oryza sativa
  unsure (1)..(452): unsure at all n locations
agcttaagtaaaaaaaggagataaatgcctatgttaacatagccagtagaaccacaacaatgtactataaatctatacactgagtaacatagaaaatagacacctgctctcataatgtttatgacatcttaatatgattcagaatagcgtatattgtgatggcataacatggcttataatccttgagcagaaaacacacagaagtaatatggaacaaaagctaatccagaacataagtacataggtaaaacttaaatatagcattcttacaataatgcagacagatgtattaagaatattacctccatccatcaggattaaatgccagcacgttaattggtccaaaatggcctttaacaccaatttcctcttgcaaaatctaaagaaaaaaatataggcgccttattcttgaacagaagnaaataactntgtaaaggagatctacactatca

SEQ ID NO: 45353 - DNA, 438 bp, Oryza sativa
caactttgcttggcataggctttgtctcatgtacaggaaggatttgccttttcgcattgcaccacttgttaagctccctactatttgagggttcatgttcacactgataggaaatggcgaacattgaaatttcgtttcttcgttactagagatatattattcatctttgctctagtgcagtttgtaagtccctctagatactctttgatagatctcgattgtctgtattctaatgaatgataaaagagcttgttctctgttatttatttgttcacgtcatatctgcattagcgtatttggtgcattttattgatggattacagaattactggttgaggacagcctgtgcatttgacaatgaagttacgttttattacatatgtggtagattactatatcatatcacacttgttatttcttgcacttagttttgcatga

SEQ ID NO: 45354 - DNA, 440 bp, Oryza sativa
gctatgaaggacttcttcaagatgcttactattgttaagcttcttgagaaaaaactaccttctaacagtcggaatgaaatatcctactccatccggttcatatcgtaagactctctagtattgcccatattcatatagatgttaataaatctagacacatatgtatgcctagattctttaacatctatatgaatgtgggcaatgctagaaagacttgcattgtgaaactgatgaactacttatgagttactgcttagacccttttaatatgcatatacattatctggatttcatgttggaaggaaatattggttttataatatttgtggatagagctactgattctgcttagatgaacaatataattaaacccctgtcgctctgtttttttattttttgataaatgcaagaatcagctcgagcttgtatggacctaccat

SEQ ID NO: 45355 - DNA, 441 bp, Oryza sativa
  unsure (1)..(441): unsure at all n locations
tagtactggagtagaatatatgttcaagctgtcgctaggcttgttgcaatggnttaggtatgcattatcatggatgcatctaccagctaccgatcggaattatgggctgataattgatactgcaacttaagtattcctagctactgctatcaagtgtgtgtgcggtagtcaactatattctgttcttttctctgggactgaaaattaagcgacttatattatccctgaagcctgaagatatcgtcaagctcttagcaacagccatagttcagaatagctgttattttagaaaaaaaacaacatttgatctactactttctagtcgaatctcaacacataacggtatggccgtccactttgcaccgaacaggcgaaacactgaacctgaagagagcagtctatcatttagtgtgagtcagtaaacgactatgtatattgcac

SEQ ID NO: 45356 - DNA, 476 bp, Oryza sativa
  unsure (1)..(476): unsure at all n locations
acctgangcatgcaagcttagaagttacgggcatgcatattnttttttttacggatggagatncacaaatatacttcaataattgttttctcctcatgtgctggctttattattctattcttattgttgcctgactattggctctctttgagagtttttttttaaaataagtagttgtagcttatttgaagtaaaggtcggaatttatattccattatctagaaaaaaaaatgttgtaccctccctatatacaaacatacaggatgccatacaattatatacaaacgtacaacatacatgatgtaccctgaggagggcccgaacctatatatatataaactccacatacttaagttacatagataacacaagctatacacataattactgtcaattaactaatggatcaaacatgatcacagatattaaaggagctttcgctgtgcacgtgattagagagtatcatctgatctggg

SEQ ID NO: 45357 - DNA, 444 bp, Oryza sativa
  unsure (1)..(444): unsure at all n locations
ccttaaccgaattagcagtttttactactgacgacttgtcaactctcatcggctaatctcaggactttgaagccgatgctgactctaatccgatgactactccggacttaccaaattntactgttaacacatgccccccagttttggagtatgagaattcatgcttcagaatttcttgtcttgataactccaaaaccgatcttcctttgcttcttgcaatcggctttcatgagccgatactgatgtgctccaccatgctgaaactaatgcgcttgccccccgagccaatattgttgttcctccattaaattctccaccgcaaccatgatcttggcattgacttcttcttcagacatgtggatataaaatttgtggtccactaggcatgccaatttgtgttgacgannaaatcgaacacaccggcctgtgagatctacttagctc

SEQ ID NO: 45358 - DNA, 454 bp, Oryza sativa
  unsure (1)..(454): unsure at all n locations
agctntacgtttcgctatataagggcatagtctatatctgcctcattctgcaagatgaagagaggttcaaggaactaagttgagtatcattgagctatggcaactcacaaggccaatgaacttacctccggaatcatcaacgaacaggttgagtaaacaatgtaaccgccagttttggagttggcatcaaccaaatcaatagctgctaacaggagttgctgtagaacaattcatcagttagattgttaaatagtggtatatgatatgcatacaaacaaatatagagcataaaggttaggcagacaacccagaaagattgagcagaatgcactaaattattacatagcctaacaaacaaaaaatatggcaccaaataataatggaacacaatcacatagcctaacanataaaggataagcaaacaaaacccataaatattgagcanatagaacat

SEQ ID NO: 45359 - DNA, 451 bp, Oryza sativa
  unsure (1)..(451): unsure at all n locations
agcttccatatgatcgacggctatttcatatttntgtaggatcagntctgaggaattctgataactcgcactgtcgctggactgtacgtacttgaacgttggttgcccctgcggggttgttccgattctgtaatagttgaaatgttgttgccaacatgttggtttggttaaccacaatttggattatctctggtgaggtttcgttgatgcttttctcattcccattggcttgggttcttgagtcatcggatccatcattcccatagcctttgttaccagtgttatccatctgtcacaagggagaggttgagagaggaagcatacaatgaaagaatataccagaactagggacaataccttaaaggaactaactctntntgttgatgtgttgtttgatttgcttattctgcaagttgattaagcaaacaacctagcatggttacatcacaac

SEQ ID NO: 45360 - DNA, 339 bp, Oryza sativa
accggcttgacctcgctcattggccatgctgttcgatcttactatagaattacatcggtccccaaacaaataatttgagatatatactgatacctcacggtatcaaatcgtttttatcattggatttacacattattagatccaacgatcgaaaacgatctactatttattgaactggagtaaatctcttatgattaacaagtaaatctcttgcaggttggttatcctttatctttgattgagtgatagtatgaatcacagagtgagatccgtcgcgttgtaattgcggctgacatgactaacgatccatgtcattgaatgtgaagtagccaccgctgc

SEQ ID NO: 45361 - DNA, 452 bp, Oryza sativa
  unsure (1)..(452): unsure at all n locations
agctntagctgaattataagaggctctattgttctatattgtatactagaataggaagagaatacagtagaagaagtcggaagaattccagagttgtcgtaatcttctctcatttcttttattccgtttactactctgatttcaatataatattcttcgtgagtaatttagatttatattatgagaattatctcttggttaattcctaaatagcatatggaattattgttcgctataatcaactaaaatatagtgattgctttggtgagttataaacactaaagtagatattaattgcttagccatggtgtttaggtaactgttatccagtaattgctgcgtatcccacagtacgtttgaggtaggtgtagaggtggtgacagccctcaagatgacttaaatccttcttgtccgggtacgtaatagagcgacatctaagaacagcgggttgc

SEQ ID NO: 45362 - DNA, 266 bp, Oryza sativa
  unsure (1)..(266): unsure at all n locations
gcaaggggtccaaggaaccctcgcgacgaaacgcgcgtcaatgtatacgaaagagtcnattccaccggctcgaacaacaactcctcgttcgaactccttgacgtactcccacgccgaacagaaccgcagaccatcggagcggagcctataccgtgatccacacatatatggatggaacgccacgcgcagatgtgctaacacccacacgctactagggttttgaccggggaggaaaatggcagcaaggggttctcacgtgaagcaat

SEQ ID NO: 45363 - DNA, 392 bp, Oryza sativa
  unsure (1)..(392): unsure at all n locations
agcttcanatgtccggcgtccagagtttcagaatattcactcaggagtatgctagactattctcttctccatgattccgcaaaaagctttttcgttaaaacctaaataaacctcgtcaaaaaaaaaaagccggcgacaaatccaagtcctccacgtcatcccatccccgacagcgacacgctccactcactcgagccttctgggcggtggaacctacaccaaccactgatgggccgacggcccagcccagccagctcgcgctgaaaccctagccccatcacaggaggggggctatataagccctccgcgccgcccctcgccaacccttgcaccccctcgcgcctccaccacacactcccacccaggttaggagagggaggaggatnggaacc

SEQ ID NO: 45364 - DNA, 449 bp, Oryza sativa
  unsure (1)..(449): unsure at all n locations
ccaacttcaaaaatggcactttctttgtgcatttcaccaatttctagtaaaatcacataaatgtaaacagtttgtaaaacagaacttctggtgaagtggtaaaacagaaacaccacaagcaccaatgactaggtaaccactaatttggcaagcatgccaaatgtccacaaatttagcaaaccattttattcccctttcagacaaaaatttagcaatagatgagtaaatgacaaaagcaccaaccagaatcccacctatattgctttaaaaataaactccaatatccatccatgtaagcaataatagataatgccaactataccacaaaaaaataggtcgagttccaactaactaacaaaacaagtaggtaatgggcctacctgacaacattatgtgttactggctgaatncaaggcacaagcaacctcgatcacccagcacagttatta

SEQ ID NO: 45365 - DNA, 391 bp, Oryza sativa
gcttggcacactcggaagagtgcgatagctcataagactcacgctgagtccccctatctggcgcgccagatgacggagctcgtggcccctcaccgggagaccgcgcaggccctcctttgccggttcgggcgggggctcaaggtgagatctcaagctctctctgtatgtggaaagatcgcggcctatccaaagagcatgagacacaggcgacgtatacaggttcgggccgctgggaagcgtaataccctactcctgtgttttggtggatctatgaatgaaggagttacaaagtgtgagccacactctcccttcttcattgttcgtcaatctccagcccccccactctaaatgggcaaggtcctccttttatatctcaaggagataccacatg

SEQ ID NO: 45366 - DNA, 437 bp, Oryza sativa
  unsure (1)..(437): unsure at all n locations
agctntgtattggttatcattgtattggtttcgcangatgatatgctcaaacacgctccagaatcatggcgatgccctgaccgacaccgatgcacatggtgcacaatgcgtaacgaccgttacgccgatgcaactcatggctggcagccagtgccaggcgggcaccactcattctcaacggatggcctaaggcgatagcgcctccgttggggttaacatgtggggcatcatcaggcagccccaattcgcgtagtacacccaacgcctgtgccgcgaacgcttcgttcagttcaatcacgtccatatcgtgaatactcagccctgcgcgttccagcacccggcgagttgcaggcaccggaccaagccccatcatgcgcggttccaccccggcggatgccatggctactatacgcgcccgcggtgtcagtccttgcgct

SEQ ID NO: 45367 - DNA, 419 bp, Oryza sativa
  unsure (1)..(419): unsure at all n locations
ctccagcccgnagntagtaatgagcggagcgacaccggtatcgacaaacagacccgcaggcgcagatagcacacaatacccatgcaccacccgctcaccgaaaatagattctgcagcagcaatcttatccatatgtgcatagaaatgatcggcgctgaagcaagcaaagttaacaatatctgtctctgtcattgtgcggcggcgagataacaggctgtcgcctggttgtggctactcaaaatatttgcggaacggatgaatacgatcttcttcgactgtcgcaccgagcacccactgtttactgatagcggcaagcatcgtcagactaccctgaacagcggttcgttgcatgtaatgtttcaccgctcgtaaaccgcctaatatattatccgctcctgcgcgaccaggcccaccatgta

SEQ ID NO: 45368 - DNA, 411 bp, Oryza sativa
agcttcggatgaactgagcgactgacaaatctgtatggacgcgtttgtgtcttttttgcaggagagtgatggaacagactggtgagatccggtgcgccatggaccacatcctcgaggccgagaggaagggcgagatcaaccacgacaacgtcctctacatcgtcgagaacatcaacgttgctggtacgtatttgtttattccgcgcaggatttgactcttagtttatcctcagcttaattttctttggatcaggcctaaagtatatatcgtagtacatcatacgtatccatgtcatagttctgacaaagctggagttttactagtacttgaaaggaactgagtttgtggagaatagcatgttcagaaccaggccaaattgaatgctagcatttttctaccaacacatcaca

SEQ ID NO: 45369 - DNA, 441 bp, Oryza sativa
cttctccaaaagccgcttcttgctgttggtatggaagtctgtaatagttgtgactgtttcgcagccctgctttgcgccaattgatgtgtgcaatgtctgtaatgcccctggctgtttggagtgaacctatttgcttctgtaaaatgctttaatagactttaatacctgtaggggaattgacatataacgtgcatgcacatttgactaacattggtttttcccacaacgagcacacccaaatttcattaccaggaaagcaatgatattgcaatgtttgtcgcacaacagcattctcgacgagtttaacaacctacagcatttaaccttgatcgcaacagagcgcatacggctcaattacagccatggccaagaaacctaaactgctcaaacctctcagttaatagcctctcttgacaccaacatctagaaatttaactagca

SEQ ID NO: 45370 - DNA, 409 bp, Oryza sativa
  unsure (1)..(409): unsure at all n locations
gcctaaatcagatcatattgaggctgcgagagaaagcgctacccctatctaagctcctcaaacgctccgtgccgattacctggacggaggaggctgagcgggtcctcactcagttgaagcgcgtacctcagatctcccctgtctggtcgcccggagccagatgagccgttgttactctacctgagggcaaccccgcatgtggtcagcgcggcgttggtcctggagcgcgacgaagacaaccctcactccacgcattcncaccctgtgtcgactcgacccgagaaagagcatggaggagaggcccccgagccgaacggtggcctaaagcctccgacggccggagctggcctccttcttgttgtacgactgtgccagccgctcccgaccccaggactgcctcgggccactg

SEQ ID NO: 45371 - DNA, 449 bp, Oryza sativa
  unsure (1)..(449): unsure at all n locations
agctggctccatattaatccacgttatcagctctctttaatcgttcaatctaatcccatggttttttctgacggcacgttacatcggcttaatactgaacgatacgtcatcggcaacccagccgatcggctgttgtttatagatttaactttgtttcatctttggtttcttgttggttgcaggatcaaaccaaatagcacgctcaaaactcgaaagcaattctttggacctgcactggagctaagcagaactcccagtgcttgtttttttccatcgacactaggataattaggtactactatgtcctagaaatagacaaaccctacctatatatccgatggattagggnttttttgttacattacatgtgcatacttcacagcatatcatgtatgagtattgtctaaatatattccttatgtacatgcctagaaacttcagtctatata

SEQ ID NO: 45372 - DNA, 290 bp, Oryza sativa
  unsure (1)..(290): unsure at all n locations
tggccgtgatcttgacacagtttttcactctcaacagcgcagccgtcgggcctttgcttgcactcatggtgctcgtccagaccgtggaaccattgacatcgatcangaccaggtagccatcatcatgcagcaacaccttcgatccatgcacattcactggtgacctgcgatcctgacaccaaacgactgttgtgcctcccgagttagtgaaccagattgagaacgtgaaggcgtttgtcctattgcgtagaagccgcatgagaacgttgaattctgtgatgtgaggaatg

SEQ ID NO: 45373 - DNA, 424 bp, Oryza sativa
gcacgcaagctttgagatgaagataggagacaatgcattttacacttgatcatagaacaagctatagatgcaaaaaataataacaattacctcaatcccacgccccatttcttgtacagaagaaaggcctgaatagttctccaagatctgcaaatattcaggcaataattgaaacgcctgcaaacatcaacatcatggcataagaaaactaccataaatataagaaggcataggtgattaacagcataagaaacaactactgtggtagttcagactgtggagcaaccaacatactacaacaggtcacgtgaattatggggttgaaaactactggagtaaaataaagcagtagctaatatcaccctagagtaaaagagatggattcatgaaacagattaagaaaacagcagccatggataaaatc

SEQ ID NO: 45374 - DNA, 393 bp, Oryza sativa
gagaaagaggagaggatctactgtaataaacatcccgctctttagcccctatgggcattgtatccctctatcacattagtcaacactacacttctccctaacaagtgattcaataaacgatacttagtaatccatacgggcgttttataggttcatagatctatatgacgtcacaacagagtctacgcgaattgagaaccttcgagttctttccttttaaaaaacgactaattagatctatgtcattatgattttgacggttatcaaatacaccattactattcacctatttacatctgagcaactatcattcttcaattatgtgatattagcttgacactacttatccttagatcacatgtaccgaagagagttacagacggataaccggtt

SEQ ID NO: 45375 - DNA, 260 bp, Oryza sativa
acatgccatcttgacaatgaaggtgtgattatcttgcagtgcttaagacacaaggtgcatcgaattaaactgcgctgatttcctaaaatgatataaaccacagccaaatttgaatttcacaaattaatgtgagtggtttttattttatatcaagttttagccttgtcttttgaaccgcaattatctttacaagcaaaatggtatcataaaacatttggcattttgccattatttttcaaagaaatggcttcattttttcc

SEQ ID NO: 45376 - DNA, 431 bp, Oryza sativa
  unsure (1)..(431): unsure at all n locations
tgtgcccattgaggtcactgactgtgtgtgggcaaggtctgagttgtctactgccaactctaccaagcatgtgcccattcttacgtgtactggatttcaatggttgtgacaaaattgagaatcaacatttgtaggatatctgcaagttgtttcaccttatgtatttgcggctatatggtacaagtataagcgagctcccaaaagagattgcaaatttgcagtntttacaggtcctggacatatctatcactaatatcaaagagctgccaccgacctttattcaactaaaacagctggtgtacctgcatttccccaatatgatgagattgccagacggtcttgggagtctaaacaggctgcatgaaattcctaatgttatcactatcgattctccaaccatgttgcacgatctaggttgtctttctaagctg

SEQ ID NO: 45377 - DNA, 311 bp, Oryza sativa
ccagccccttttcatcaatggacttctgacctctaccaaggagtgtggttcggtcgacaaattcctacctttatatttatctctgaggtgtgtgggttttgccaaacttcatatatatgccgaagaaaaatgcttatcccacttccacccaaacagaacctttaccaaaaagttattgggatctttttggtcaaataacaattaaagtgaagcagggtcatgaaccaccaatctctttatgataaacagatccattttgcaagctcggtattacgggtagttcctacaaagaatcggactaatgacgtata

SEQ ID NO: 45378 - DNA, 432 bp, Oryza sativa
  unsure (1)..(432): unsure at all n locations
agcttactcaattactatattacatgaataatctggtatttttattcggaatcttattagtctactaggctgcttcttttcctttgcattatctatactagagttatgtgcacaaatcttagaagagatcaagggatattaattggaatcatttcttgaaatgattattgctgcattgtaaccaatatcaggaagatagccattgttgctttaagtgcatgctatgaaaccatgttatgttagcagttttcgccaaaatatttnttagttcaatatggcatgtctgatgaccttctccaagagtcttctgcatagtaaaattgttcacaaacctttctttgggggtgatctgtagggaatnttgttgaaggccgacatgtgctggatgctctttctgcttgtcagtctattgcttttgacaagacaagaaca

SEQ ID NO: 45379 - DNA, 410 bp, Oryza sativa
  unsure (1)..(410): unsure at all n locations
tcttaaaagtgttgcaggtgcttgtgaacaacttcactggacctggatcacttactgctttcatcggccaaccgagatggcttgcaaggaagaaggaaatctattctcagttgcatgagagtttgagaatgatctctgatactgtacccttagcaccaaggatgttaaaggatataatagataggagtatgccgaagttatttgacaacaaagctgtaagtgtgaactttgtaaaccattccatttattgtagtgattatgatgtgatatattctggttntccttacttgtggatctttacttggaaaacaatacgcacatgttaaaaagtgtctgtttttgaacccaacatgnttttttntgctgtattaatccccaagctgcaacatccctattatatcaatgcaata

SEQ ID NO: 45380 - DNA, 411 bp, Oryza sativa
agcttacgggcgtaaagcctaactcattttgtctaattataactgcgagttcaagccgatcaagtctgaattcaaataaatgtggtgaaaacgagtgctaaattcaaacaaatctggcgaaaaatgaattcacacaaagttggcaaaaatatcctcaagttcagaaaaaaaaaactttgtaaatcccgaaatttccgtttggagatttggtccctcattttctagagatacactcttaaccccaggattgatgcttgacgagaacaatagtacgcggtagagggaatccaaaagctaccacatgtaattcccccatcttgacaacgttggattctgaagcgaacaaaacgagagcactttggatgtgcgagctgaggaatctcgtctttcaactcttaggcatgcaccaca

SEQ ID NO: 45381 - DNA, 442 bp, Oryza sativa
  unsure (1)..(442): unsure at all n locations
gatgacaatagncatgtgacagtggattgatgtgctatctcataaaaacactatcatcgagctagctggattagtgaaaaggacctgcattttaaaactgctcattgaattaccaccgtattaattttttagtcacaagtgtcatactttggacaaagatgtttacaaatgctaaacttctacagcttgatgcatgcggcctgtatggattctacacaattgcaaccagtaattgttatcaagattttcgatgcttcaacatgtttctacaaagttgccttcacacctgtcagggtttaagcgatgttccgatgctctatacttgtattattatatcacccggattattagaggtcaaatagtaaattattaatacaatgaatataagttactttatcattcatgttctgtttctgactaaatcaatatatgaccatccatt

SEQ ID NO: 45382 - DNA, 459 bp, Oryza sativa
  unsure (1)..(459): unsure at all n locations
tatctttctcaaacttcacatctttcaagcccacatctatatctcgttntgaaagtttgctcaattgattcatgccaacatgggctaacctcctatgccaaagccaacccaatggaagttttgcaactaaacaagttttcaaatttgcttcactagaattgaaatcaaccaaataaagatttccatatctaaaacctttcaacacacaagacttgtcaagaaggctagaaacaataacttcttgcgggaagaaagcacatgataagccaagatcacaaatttgagcaaccgaaagcaaattgaaatttagagatttaacaagagagacattatcaattgacaaataattggagatagcaattttacctaacccaattacctttcctttgctattgtctccaaatgtcactntctcttgttcattccctcctacttcaaatgtggtgaacatagccctat

SEQ ID NO: 45383 - DNA, 317 bp, Oryza sativa
gaacactgaacgatcttaccaaatggatagttggtggcttcaatggcaacctgcgttataaacaatacgacgatagccagtatatttagatgccttatagaattacaaagatacctttttgatatcacggctttgcttattgttgtataccatagatatgttacaaacctaatatgttggtttactaagtaaagggaaaaatagagaattaatacttgcatgctgacataaaaaactgaccagcaagcctacatttactagcaaactgacattattgctcaatcaaaaagcttgatagttttcatctcgaaaatctg

SEQ ID NO: 45384 - DNA, 408 bp, Oryza sativa
  unsure (1)..(408): unsure at all n locations
agcttagttcttgagcatctgttnttcttctcttccccgtctgctcttccctccagatggtctacaccaggaatggtagccgtgcaacaggcgagggcagcaacggcgaagaacgcgctgatggtgtgcaccccaacagtgattctggcaatggtccgccaccacttcccgagaatccgacccttgcccaagttatggcacatcagactcagatgatagcagccatgatgcagcagatgcagcagcagcaccagcagatgcaccaaaggatgatgcagcacgccgagcagcagcaccagcagtttggtccccctccccctcagtccaagttgccagagtttctacgcgtcaggccacccaccttcttcagcaccaccaaccctatggaggcgaacgactggcttcatg

SEQ ID NO: 45385 - DNA, 361 bp, Oryza sativa
  unsure (1)..(361): unsure at all n locations
cgatgaggcaatacatctttaaaacccggatcgaccacccggccaaaagtcgagttaacagctggatatactcgacgaccgacacgtcaccgatcatcctgcgggcttcgggttcagcatggtcaaaggtcaacactgtgaaagttgagagtgaagctatgtcaaaagtcagataacgccaaatcaaaaagcataacagtatatagctaaagaacagtcttactgttcacccnctcaagaacgatcaagaatggcaaactcgcgacactattaccctgatcaaccgcgacttgccatgactaggagagaggaaaatcgcgaagcatacagaattacttcaccgagtcatggcacctatagc

SEQ ID NO: 45386 - DNA, 437 bp, Oryza sativa
  unsure (1)..(437): unsure at all n locations
agcttgagcagctacaacatcatcttgatgttgatgctaaccgagctattgaagtactgcacaaagaagtcgaatgccataaacatggcaatcaagatgcagcagaaactattgctaaactacaggctgaaatcagggggatgcaatctgtcagatctgacagagatgttgacatgatcacagatgaaggaaatggatctgatttgaaagaagaaattagtagacttcatatgcaagacaatgatattgctaaacttgaggctaaactagaaaatgtacagaggtctattgatagattggtgatgtcacttccaaatgttggcacacaatgtaacgagactacaccaaagtccaacagagcatagaagaagaagaggatgcttctttcactgggcgtgacaacatanacaaccaaatctgataaggcaccatgctct

SEQ ID NO: 45387 - DNA, 458 bp, Oryza sativa
  unsure (1)..(458): unsure at all n locations
ggacgcttacgttgcatcagaagtcaagagacaattcaagccttgaagtccagaaaagaagattcctatagaccccagtgccaggaacttcttcaggggtatgtctgcatctgtcaaggaggccatcaagctatcggactatgagcgaacgctgaagaaagcatcttctggaaagtccaaaccagtccctcagcttggagagcaaccaaaccaggagatcgagccgttggtgaccggtaaagaaatgacgatagaacaatttattactgacaccggtctaactacggatcaattgctaggagtcgcaccaatcgaaaaggtggaagtgaaatacatgtacgaactcggtaaaccgcttgtcaagcctgagctgctgcagtccctacccacacaaatgtacaagttccatcagctgtacacggagatgagcgccaccggtagagagatgatcngagcga

SEQ ID NO: 45388 - DNA, 333 bp, Oryza sativa
  unsure (1)..(333): unsure at all n locations
aagctgagctgataagagaactaagtattatcaggggagcgtacagcgaataccaaacaaaaatacattctctttataaggaaaatgaggatctcacaacgagaaatcagcttatggagaacgagcttgacctgaagacaagccaaaacaaagatgaaaataccaataaacaggcgagccatttaaatataatcaactgtggaaatctctatgcctgtagagaaccagctctaaaacagggtaaagtacatcaaatgtgataaacttcatcagctgttntcttatttgtttaaggaaatgatgctaatgaaaatggagattctccacgtaatg

SEQ ID NO: 45389 - DNA, 429 bp, Oryza sativa
tcgcttgtgccgagcttacgctattgaaggtgataatgctcgacatatggaaccacctatgtgcccagctcctatcacgctacacaaggttttctgattaaccttgtcggttcaaactgcatttcatttacctttttcgactaatctttgggagtattaggccattcccgacccaatgattacgatggtgtccataccattaaataatgtgccacctacaatgaaaaatgatgcggcaagtgaataaatgatgaacgagaatgaaaccatgtcttgcatgagacatggtttctacacaacatccaagacatcatgtgagataaggagcattgcatctcagtatggaataatagtgtgtgcaatgtaagagtggtgtctagtactacgctcttgatgatgtggagtctatgacaatcatgtctattggtt

SEQ ID NO: 45390 - DNA, 458 bp, Oryza sativa
  unsure (1)..(458): unsure at all n locations
agctttcacatattcacgaatgaagtgctcttctgtctgttacattaccagtcagaccagcaccctccgcgactgtcaccctgttctggcattgactgaagtaaaatgtttctccagggttcccaagcttcacttcatcagtggtgtcagcagatgatatgtcttttcttgattctcggagcttgtttctacaaagtaataaatcaagacttgttagaagccttgtggactacagatttacttcaattattgaacatgtttgtggcaagctcttatataggtggttcaagtatgttaccctatgtactccagatagtacttgtgtacacagtatagttgcaacgttacttatagcaaaacacaccanaatcttagtgattgattatagatgacatcacaagttgatgcactagntatgctagtatgatacgtcaaaaagaaaaccatacatttctttt

SEQ ID NO: 45391 - DNA, 93 bp, Oryza sativa
gaccatgcaatgcttttctattgctttgttagttttctgaaccgcttggatgttttaatacatgaacttacgtatggacatgtggaatcaatt

SEQ ID NO: 45392 - DNA, 370 bp, Oryza sativa
  unsure (1)..(370): unsure at all n locations
agctntggagaagatgtcttaggtggagttctgtcttataccccagntgagcgcctgtgaagatggagccgtatgcccgctagtccgctgctgtttatttttgattgtcaggccttaagtgcctttgtaataatgtaaatattatcgatataataaagatgtgtcttttatatcatgtttgtgtggagtaccccggcttttcctgcgacggagattaatacactagcgagcgggaaaaggcaattttcccggtcgcgacaggggtcgatggacattctccagggcaaatgaaggctacacgagctgcggcccggtagtcgagatgtcatacagcagagggttggtgccctgctgctaggggctcagtcct

SEQ ID NO: 45393 - DNA, 425 bp, Oryza sativa
tatacattactcatgctcgctcgagaggcgtatcgaaccggccaccgctaagtggtcgtatctatcgaagttctggtactatgctcatggtggaacgcttaacccagctgatggctccctggtcttcagcgatcagatacgcgaggctgccagtcgactaacggacgcagtggaagcctcttctcagggcacgttccgacccgacagagagaacgactagctgtcacttgccctacagactcccgagcatccaggacgaacacgagggataggggtgattccttggaagattggactcaaggaggacatccacacgtacaggagtcggatgaggagcaagagagataccgaggcgaagattgcacatcttaagtacagggtatcgagctatgagctcatcatgacagaggacgtggcacggaacg

SEQ ID NO: 45394 - DNA, 458 bp, Oryza sativa
  unsure (1)..(458): unsure at all n locations
taaaaataganaaccaacacanaactaatgatcagaagctaatgatgatttagttcttgagcgagttttctgattaactaagagaacaaatcaatatgagattatgagtagctaaaatattacatgagataacaccgagagcctggatgtggttttttatttgtgatcggctgaaacatacagacgaaatacacttggatgtggtttttttatttgtgatctaccacaaaagaaacttgaatttgtatcaagcatatcattcttgcttatttattagccatttaattgaaggtgtacttggttgttgctgttgctatgcttgagttgtactttgctctacattcaacacattactgccattaagttaaagagtcctttttcaaacctgaacccattaatagagagctggagtttgaaatctggagggtagatatgggtggccacatgacctattcttc

SEQ ID NO: 45395 - DNA, 420 bp, Oryza sativa
  unsure (1)..(420): unsure at all n locations
gctngaccaagtttatagaagaatgtaacatcattgtaaccccaatcagtttcattaaatgttgaaaatgtagctatatttttctgtaagcttattcagactataagtttggcttacgataaacccaaaatgagttataaaatgaaacgtagggagtattactctacttgttgtcggacacaagttttacctggatgcgggtatttttgcccatgtaatccttgggcgaactgagatctagttagattataaattctagctaggggtgccaatggacaaatccgtgcaaattgaccttgtgggggtggcacggtggcagcatgcaccacctctgcattgagaacacggcagtggggcgcctgtttcatggtcggagactctgcaaccggaacatggcactatgccaccgtcttcttgggt

SEQ ID NO: 45396 - DNA, 462 bp, Oryza sativa
ctgacgaaatcacgggcatatgagtataatggccaatcgactgtttctttctcaaggaacgtgagatcaccgatctgccaaccatcgtcatacagtccagtaataaaaaagttctggagatttggagcctgaataacccactggtgatacaccccgtttttagcaggaaacagcaacatcaggagtgaaaggctctttagcaatggcgatctagcgagcaatatctccaatccttttgctccatctgggaagccaacatctgataatcttagactggttagatttgggaaccccgcgaagcatgttggcaaccctgggatgtagcagtctgcaagttcgagctgggtgagctcgcagcacgagaagatagagaatgcagcatatggatctcctcgttcgaccgtcagaaagcaaggaagagggattggacccccttcccggcgaggatgagcagccagcggt

SEQ ID NO: 45397 - DNA, 319 bp, Oryza sativa
  unsure (1)..(319): unsure at all n locations
agctntgactgcttgtagaatgatccaagtatagatgtatagagcctactgtgctatcacatcaattcatcagccttgtacgcttggattgtttgttgcaccagctactcctgctgctgttgatcctaaaaccagcttattgatatgctggcagtgcaccattgaaggctcctatagccatatttggcgaggcagtggctagccgaggacagtgttaccatgtgatcagtgatcattctacatgggaaagctaccagtgatgagagcgccacgtttcgccctagcagcgacctctgtgcacgggggccccacacgtcag

SEQ ID NO: 45398 - DNA, 454 bp, Oryza sativa
  unsure (1)..(454): unsure at all n locations
tgtccatccaatntgctgcctaataagaggggaaagcgactacgaccgtagacggggaagtggtggtggaatagtggtgcgtagatatgatggaggcgaggaggaggagccagcgacaacgagctagggtggccaaagatgatggaataggggagcaagaatgactagtaagaatgtggattatttttattttagaggtttttataaattattttgtctaattaagggtgctaacagcacaattttggataaggttgtaaataaaatcaacggaaggattgatgggcaaataaacaaagtgaaataaaaatcttcctacgggctcaagctatatttgcactatgggagcaatctataccatctctctagagataactacacgaaggctactctatgagtggccactgagaagagagtgtgcaccacgtaggttagtaccatatctctttctact

SEQ ID NO: 45399 - DNA, 407 bp, Oryza sativa
  unsure (1)..(407): unsure at all n locations
cggatcttaagcacctgcagctgcagcttcaagccaaagagagttttttttgtaggattgtagagagcaaggacactatgccctgaatggtccatgggtatataccaaagaagctccttcctttggtttagcagggcagacatcgctaaaccagcctcctcacaccaagtcaagcttgcagcctagtgtgcaaagtagagagctcaacggagagaatccattgaatccaaggaaatgctttcctcctagcctttcgtaccacgtggggtcacgtacgaagcaagccaaaggcaagaagagtaagaatcagaagagaaaagcaccgatgcgaactggagaagaagtacgtaagatgactattaccagcaccgaatgggcctcagcanggataactattcctagacgtc

SEQ ID NO: 45400 - DNA, 461 bp, Oryza sativa
  unsure (1)..(461): unsure at all n locations
tatatgatgtataatagttgtttaaaacatgaacaaaagaagtcaatatttggtagattataaaaattttccgaaaactgtaagaccaggcaatgcttttctattgcttcgttagttttctgaaccgtttggatgttttaatacatgaacttacgtatggacatgtggaagcaatcacgatctagtggtttatccttctttagtactaagtaaagntttctaagactcaatttaatgttgtgcggngatgaacattgcactcatatgtttccaccaatcaataaaaaaataggctagtgcctgttcaatctatagggtggatataccatatagaagtttcctactcaagtgtttaagaaaatttatttgttggatgtagcggaanaggccgcctatcaactcctgtaaactcatcgtagaaaccacagtgagggaactatatttgcgttaatccattcatc

SEQ ID NO: 45401 - DNA, 407 bp, Oryza sativa
agcttgcattaaacacctaaattcctgtggcttgctgagtacgaaagtactcacccttactctatataaatatatatagtttcccccgccttgaagtgaagatgaagtgaagtgaagattagggtttcgtcctggttcccagccgtcgcctgtggtgttgggtgttagtccattggttccgctgctgctgctgttgttggtgtttcctcgtccgagtcgtcggttgcattctcgggctgttctgagctgcaacctaagttaaggtaaataagtcctctatttattttaaggatttgcaatgattcatatttgtcaccgtgggtaccagcactacgtcctgggactggtaccgagatcgcagtttcgtatgaagcggttcgcgccgttattcctacgacacgctccta

SEQ ID NO: 45402 - DNA, 460 bp, Oryza sativa
  unsure (1)..(460): unsure at all n locations
ngagcagatcattgccactgtatctactactaccaatnttccaaatcccaatctctgcattcaaaccagcacttgccatatgaaagtacttttcagtaacagttttttccttaaaaaaaaaatccaggatgtcacaagctattgaatgaagtcataaatcaaggtatctgtctaaatgatacgaatgacagctacttgatttgtgcaggccaggacattggaagatttgtatttaagccaggtccaacaaaggaaagaaacagaggaatctctntcaagggtacaacaagagtttgaacaacttaaaatacagcaagatgaggtcaccgtggaacttcagagagtcaatgagcagaatgagaatctactangtcaactctcagactccagagagcattttgaatggcttctatctgagcatngaccaatgctacgtgaacgagataatgcagttcgagag

SEQ ID NO: 45403 - DNA, 444 bp, Oryza sativa
  unsure (1)..(444): unsure at all n locations
agcttggattgcttgtttaatttctttcttctatcctgctttatatataccatatatgtgaagtgaaaaatctttctgaacaactgctaatcatttggtttagatttttggtcaacaaaagctttttaaaaaataatctaagttcatgcagtcattgtgtcaaagaatactcgttctaatgcatgttctacatagtatatataacggcttgcatattaattgtttgaagtatgcctgtatgtggctcttggctagcttagagtgagtattaataggattaattaatccgagtaattctccctgatcagtttactttttgttagcaaagcctagctattntcatctaattcttcactatatatatagtagtagtacaatatttattgccctttacatattatctagttatattagaactgaatatgccaaaaccggcaaacccat

SEQ ID NO: 45404 - DNA, 459 bp, Oryza sativa
  unsure (1)..(459): unsure at all n locations
cgatggttngagttttgtgagggttttgaagttttagtttaccggagagaatcatggatatgtggaaaagataaaatggtgtatccaacgttatggactaaaatgtacagtacttgcaaatagggatgaaaacggagcgaatacggacggataatactcctaccatattcgttttcatattttttaccagatatgaaaatgaatatggatagctcgaatacgaaaacaaatacagattatctcgaatacgaataagaatcgaatatgatcggacacgaatatgaaaacaaatttttctcggaacacgaaaaccaactcaacttataatagaaacaaatatcaacatatataattagctcattntatataaaatgaagtataatttataaatattttttaaaagttaaataatattaatattatggactagtgttaagagataaactactattaaaatat

SEQ ID NO: 45405 - DNA, 470 bp, Oryza sativa
ggatccttaagtcacctgctgcatgcaagcttacatggtctgacctccagaatcatctgttgttgctgctgctttaacagcagcttcttcatttgtcgatgaagcaatgtggcgcacaaatctggaggaaaagggaaaagcacccggactcaatattagacaagaaccatcaattgtagacgatgggagagaactatgatttcatagcattaccgtaaacccaccacacatctaaatgccaccatattgtttaggcacttgtttaattttggatttaattgttttacagacttgagtttatatcaaatagcaatataactaattgggattcggtaattgctatttggtgatcaaccctttgttcattggttatactttttttagaccaaccgttggaaacaatacagcacactacactccgttgaatgacccttcatggctaacttaatctagaatcatgcacatataac

SEQ ID NO: 45406 - DNA, 419 bp, Oryza sativa
  unsure (1)..(419): unsure at all n locations
tcggccgagntcggctagatattctacttgcgacacatttctccaacccatataaacagagctgggacccctcttatggcattggccaaaacaagatcatttgatcaaatacaatatttgacggatacaatcctcaaacaagagtagagtattacctcccgtcgagagggcatgaacatgtttaaatctttgtttccgtattcatctgtgaaaagatttatatgcatagatggaagcagtttctacagagttttgaaaggaaaaaaaaaaagctttagcttcttggattgaagcagttcttttttatatcttcagttaaatgggcttctttcttgatatttatattggaatctaaggaatacacatatgattattgtcgaatccaatttagatttgggtacactgagtattgtgctatg

SEQ ID NO: 45407 - DNA, 441 bp, Oryza sativa
agcttgctgaaataattataagaaaattcttatatatgcaccatcataagcattctttagagaagctcagaagaagggaataatagaaaagctgaatagtttttccgtcaaagagtattagtactagttcaggtttagttgcttgttgtttttcgatctatatgtttgccctatgtcttacaacaggaaaaaaatatttgcacgttaggaatgcataagttccaccaattttgtgggaaacatccactcttgctgaatttttgagatgtatgggttccaaatgaagcctacagatgtaagcaacttccaatatattgtcaccatttgaccatctgaaagacaaatatacaagaatggaaattttctattgttatcaaattgagaaatctacatgtaaggttctagacacataacatgagcatcaactactttcatgtgatc

SEQ ID NO: 45408 - DNA, 342 bp, Oryza sativa
  unsure (1)..(342): unsure at all n locations
cgtaagaagagaagagcagtttatataagcagtgaatcataagactctggtacagactctgaggttgagggaagcaaactctccaaaaaagatggggtcacgtcagtctatacatgtggtcaccagccaacctctaagaataaggttgatccgatgaatactagcaagtcaaggcagtgtggaagtattctgaagaagctcatgggatcacaaagtggatggattnttaatacaccaagtgatccagtggtatatggaaatcctgaatactttgaatgtattcgcaatccgatggacttgggtactggtaaaaggaacttaaagccagccatattccaccct

SEQ ID NO: 45409 - DNA, 405 bp, Oryza sativa
agcttgaggaagagagatcaactttagtctatggagagtgttactgctatggtaggcatgggatgcacccggagctgtcttattacatattgcgccctttcttctaaactaggacggaagcccgcgcatctgcgtgggcaatttatttattgtctataaaaccaatactaaaagaagtattatctcaccatattcactataagaaatagcccattgatatatactaaatgattaaaatggctatcattctgaatcaagaatcactttatcccggttatatataaattcagcattcgccataacttattttcattgtcttttttatagatggaattaatggctatcattctgaatcaagaatcactttatcccggttatatataaattcagcattcgccataactt

SEQ ID NO: 45410 - DNA, 441 bp, Oryza sativa
  unsure (1)..(441): unsure at all n locations
tgcagcctantgtgcaaagtagagagcccaatggatatattccattgaataccgggaaatgctttcctcctagcctttcgcaccacgtggggtcacgtactaagcaagccaaaggcaagaagagttagaatcagaagagaaaagcaccgatgcgaactgaagaagaagtacgtaagatgactattaccaacaccgaatggcctccagcagggataactattcctagacgtcaaagaggaaataccttccgaggtgcacgacagttgacccagcacctcttaagccatggcggcagagtatctgatagtgaagggtcagatcaagtctccttggattatgaagatgagtctccccgacatgtcggcagggatgagatggaatcaaaagcatgctcncattgtggangaaatggacatgttgctagcatgtgtctcacactct

SEQ ID NO: 45411 - DNA, 437 bp, Oryza sativa
  unsure (1)..(437): unsure at all n locations
agcttatacagcccaactcgacaatgctttcttaccccttggcttctataacctcctatgtctataggagcaaccatttgtatatcaaactaccttgaagccctattcttaccattactaatatctagtgactagtgcagtacagtataggtatagccctttgattattttcttaaatcctcttattggtcgcattctctgttttcctggaccgagaaattgtgtccattactaaaaagttgagtttaggtttacgaaataaagatgaaaatatgaaaggctgtttagtgaatccttcggtagagagcatctttggtattgttaatgtatacaccatatatatatttcttgtttaggtcagttggcccacttagcccatttggcccatgtatatgtatattaccttcactaccatctanggttcactgctgaataca

SEQ ID NO: 45412 - DNA, 416 bp, Oryza sativa
  unsure (1)..(416): unsure at all n locations
tgagtgcaaatacatataatttctgtgctcttgaatcagtccatattntacatgtgatgatgtgaaacaaactatcttcaattcagaaattgattgattggcagagaagatgacaggataaagaaggaaaggtgcagaatatttgctatagtggtttctaatctgggtctgatcttaatagaggcttgaacaaccccaagaacagttagggcaaatgttttctctaaaatacactatcttaaatttcgcctaaaccctgtctcaactcgttaacagctctaggtaagttccattcttatctctaactttttgcaaatgcaaaaactacacaatatatcaaaagaggaaaagaaatattctgaggagcatttgccctcccagctataagctgacactctacactgaattcggcgcat

SEQ ID NO: 45413 - DNA, 456 bp, Oryza sativa
  unsure (1)..(456): unsure at all n locations
agcttcttgtctgatatagtgtgccatgtactataatggtacactncttcctttaaagtctaaacagacgtgcccataaattgcaacaaacaaagtttatagcccctatcgttntgcttatgcttataagccaaaatttaaattntaaaacttaattttcaagttgattttacggttttttcattgcagtttattttacaacatttactttcgaatcattaaggacatatataaaagttttacccccaaatcaatttttggttgctaaaggtcgcatggataagcataagtataagcggaacgatgagcctcatagccaggaacacgattcaagcggcgtctaaactctaaagaggcgaacttaatcgcagatgttggtttctctctgagtcttttgtccacaaaaacggaaatcatcagtgagggatgagatgagtagtaaatacccagttgcga

SEQ ID NO: 45414 - DNA, 383 bp, Oryza sativa
  unsure (1)..(383): unsure at all n locations
ctcataagttgctatcgtaaacaacatttgccgcctgaattttttttcacctttgtggggaaaaatgcttgcacttgaagtgaacacactatttgctacactgtattgtcgagcaaacactgtttactctccggttggggacatacatcaaaaagcaggctattgtctgctagtggtgttttaccttgattttgcatggaccatgcatctggcattcttgctggtcctttcccttgtcgtatggcatcgcttaatttctcgcctctttaaatagatggtgtgaaaataaatacgcattttatctgggtttatacatggatcatgaggacgaaacatacctttntctggctgattggacaatgaattaatgccgataattactg

SEQ ID NO: 45415 - DNA, 456 bp, Oryza sativa
gcttgctcaccgcggtgaacacggcgtcgagctgggcgtcgaggatgctgtagtacttgaggccgctcccggagtcgagcacgccggcgttggggcggaacagcgcgtattcgagggagatgacgtcggcattgccagagtacgcgaagaacgggtacgcgttcaccatgaggtacgagccggtctgcgcgaggaagtcgagcatgggcttcatgaccgcctgtgcgaggtcctcccggaacacgccggccgacggcgggtacgagccggcgagcgcggtgagcgcgatgggggacgacaccttgacgggcttgtcaaggctgagcctcgccagcgcggcgtgcacgttggtcatcgccgggacgagctgcgccgtgaggttcttggccgaggcgaacacctcgttcccgacggcgatgccctggatctgcgtggccgggtagtacgctgcgacgt

SEQ ID NO: 45416 - DNA, 433 bp, Oryza sativa
  unsure (1)..(433): unsure at all n locations
gcttgtgtgcacactaactaacaaatattatctaatnntttttaaaaaagtgtgcatatatactttcaatagtattacacatatgcgtaatattaacctcaaattcattatattttaggcataacaaaattttttttaacaatttcagtctataagtcaaaaatttgtcttttttgttgctctctatgtactccctccgtttcaggttataagatattttgactttggtcaaagtcaaactgttttaagtttgactaactntatagacaaatatagtaatatttataatactaaattagtttcatcaaatcaataattgaatatattttcataataaacttgtcttgggttgaaattgttactattatnttctacaaacttggtcaaaattaaagcagtttgactntgaccgaagcaaaatgtcttataacct

SEQ ID NO: 45417 - DNA, 369 bp, Oryza sativa
gaccaccactagcccactgctcctgggttcccttcacaatccttatcacgtgcccctggtgggtcccctacgcatccttttcacggttcctttcttggtcaaggactggtgtggatactcgttcccctcttttatattacagcactggctgcttcccttcgcgaatggttcggacaatatttgttccttattgcgggcagccatctgttgatacaagaaacaattgctaagtcacgaaacatttatgttttaacaatctaagtcatgtatgcctagatgtaaatggtggacattataaaccctacacaaccttacgtgctaagtctaaatacaaatcgcgatataagctaagtctaggtgacgtatatt

SEQ ID NO: 45418 - DNA, 447 bp, Oryza sativa
agcttctagatggagatgtgatgagcttgctgtatcagaagctgtgtggtgaagcggacttgaaggaggttgagagagtgtgcaagatcggttgctggtgcattcaagaggatgaggttgatcggccgacgatgggtcaagtggtccaaattcttgagggtgtcttggactgcgacatgcctccgttgccgaggttgcttcaaagaatctttgagaggccgtcttcagttagcaccagcacaccagttttcctttttgtcggtagccctgaacgccaatgagaatacagtatcagtttggaatgtacagtatatctgaatgtctctctctttttcttttttcttttgttttaagggtgctatgtctgaaactttagttcatttttgtagtatgtattgtactatcacaccacataccacaagtagcttataccactgtaatttgatc

SEQ ID NO: 45419 - DNA, 449 bp, Oryza sativa
  unsure (1)..(449): unsure at all n locations
tctgcaggcgttgctgctgtagctgcatctgaagaagctcttgctttgctgcgcagaagacggcgccggcaagcggaggacggaggtgtttgagcttgccgccggcgagagcacgacggggctgagcaacgagtccttggcggtgtccgcctggacgaaggcgtcgtcgagcttctcgaaactggcgtaaaggttgccgacgcaaccgaccatggagcccttcccgagcagcttgatgcccgangcgatcggcagcgcgaggagggagaggaggaagtcgacgacgtccttgcgtgcctcggcgtacagcacgcgctgcgccttggtgtcgatcaggagtgtcatgctcatcagatcgctacttgccttttggctggttgtttcagaagccatttttgcagtagttgcagtgtgcagtggcctgcgtctgaactctgaagtcgaagtct

SEQ ID NO: 45420 - DNA, 437 bp, Oryza sativa
  unsure (1)..(437): unsure at all n locations
agcttgagcattgngtgaaaaaggtaaggacatttacactgaanagtttgtggtatttactgagacatgagacacagaaagagcacgtatcttttcgtggacaccacaaaaacttggtattgctggacacccgatgaattattttattatattcagtcaagaaggtgagagaaacttaaataaaaggcaagtttgcccttggggctatctttgtttaatctgattgggaccggttcgaactagacccattccactctcaatctcccgagaatggtgcagtgacaagcggtcaatgatggtgaggacggtgcatcatcaagttgcggtgatggcagattcaagcagtggggagtggcggttgattcaaaagagatatagtgcttgccattttcttcaccgcaccttcttaccttggggaccccttccggggactttcg

SEQ ID NO: 45421 - DNA, 464 bp, Oryza sativa
  unsure (1)..(464): unsure at all n locations
nnttctcttttggctcatcgtgtgggttttaccagttctcctttaattaattggtcggttgtgtggtttttaggcccgatcttccttataagctaggccaggccaactcttcttaatatatctagcagagatcctgtcaccggcttttttttttaaaaaaaagaacgaaatggttgatattgatctgctttcgctagcatgacaacctctacaaatttaacatggaatgtctctagaagacaaatatataatgaaacatctcgattcctcccaataaaagcaagataatttctgtgtttcaaacaagctgggtcttgccaactttgctcgacatttgtgacttttctggtaacctgtgttctgttcatgttgntatacgacaaaagtaacttgcaacatgaagtgaaacatgtgtagctagagcatnttctctttctgtttgagtgttgacacaatgacacctg

SEQ ID NO: 45422 - DNA, 448 bp, Oryza sativa
  unsure (1)..(448): unsure at all n locations
acctgccgcatgcaagctntangaatccaggagagcatgttgtttcgtcagtatacgtttacatttgcaagtcctggccaccatgatgccaccatttaccgaacgagaatggcgattcaagtttctaacttatggtggtctgaactctgaattcagaagaaattatgtctcacgtatggtcaggcagtcaggctgaactccactccgtacaggagccacagaactcacgctctcctgtgccgtgcgtctgatctcaccatgaccttatgacaacggtaattcaattcagcttcaggctgaaggcggtctatagcatgaatgcgagtgctagattcacatgctgcagacatggctagaaatcattacacgatttcattgcctcggatcggctctacgcggccgggaataatcaccgtttcttttccgcggggccatgttgatctggtct

SEQ ID NO: 45423 - DNA, 463 bp, Oryza sativa
  unsure (1)..(463): unsure at all n locations
ctaattaatcaattaatcatgttgacagcctcaacgttagcctgccatagcaatatgcacggacaggatcgcattgacacgggataaaggaaatcggacgcttcaaaacgccgactgtgatggaggagaaaatgtgtcgatacaattctagcaatttcgtaatttaatcagtataagatccggtaccaacaggcattagctgatggcctggtgtcgatatggtgccaacataggatagaaatatgacaccttatagtactatttaacaaatatagtaaggccctgtttatccagggatgaaaagtttcgacgtgtcacataggatatagaccgcctgtattaaacgtagactaataatataacagattaataatatccagggatatacagatacacatttaaagtattaaacgtagactaataatataacanattacagattccacctgtaaactacgagatg

SEQ ID NO: 45424 - DNA, 395 bp, Oryza sativa
  unsure (1)..(395): unsure at all n locations
agcttgtaatgcagcgtgatgaggagctgtacttcatttgccacctctgatcaaggtagtccttgcacccaaaactgtcgcaaagctcctaatgtaatgcctttggttacagatgaagcatccaatgaggttgtgttggtaaagcatggcatccatatgctgggaaacattgccatccataccagttttgcttctccctatggatgaactcgacttcctttcagcagtgttaacaatatccagagcaagttggccaaaaaaattcaagtgctgcagtacaacaaagcaaggcatatgtaaccttcacatccctatcattgtaagcttgtctgtgactgtggtgaaataggcctatggctccaacatgcangtataaagctatcatacgtagcagt

SEQ ID NO: 45425 - DNA, 446 bp, Oryza sativa
  unsure (1)..(446): unsure at all n locations
tcctcattcttatccgatactgagtcatttgtgcacgcgctgcttaattttgggcaccaggtacttgggcccaaattcctaccttatggaagaaagaccaacctttgtaacttaaaataaaggtcaccatccgaaccgatgagaaagctctgagagcgtacaagatgcgtattgaggacactcatagcgctctcataaattctgggtagattgaccctctcccataatttgttcggaagatgggctctttcagctgttttcatgtataggtagaaaatacctgcaaggccagaaaaaagagagagaaatgaaacagaatgtaacaaaaaaaatattaagatggtatacataagttgggaaagaaccgggagcaaaacaatgtgcttaacaagtatgcttagactgcaatctgtatccttggacganaggattctgaagccctcatg

SEQ ID NO: 45426 - DNA, 361 bp, Oryza sativa
  unsure (1)..(361): unsure at all n locations
ctgcagcttaagntttttcaatttccaatttatttcttaaaatcttatatttaatttcccccattctattctcatgaccctgcgacgctcgcgtgttgcgcatttgtttggcccctgggtggtaagagcccaacctctctcccatctatatgaacgattctttgctaagtgtgggggctaagtcttctagccttatcctagccttaagttgagctccaggtgccgtcgaagcccgggaccccctgtgctggctcttccatagcggctggctttggacccgccggctggctacggtgcccaacccggctcaactgtggacagggattgctggctctagaattttcggctctcacactcgtgc

SEQ ID NO: 45427 - DNA, 427 bp, Oryza sativa
  unsure (1)..(427): unsure at all n locations
ntctttgtgttgctactttgtgggtctgggcgcttgggatggttcgcgtattctgctgcgaggacttccgcttgagctttccttttcccatttttgcgattcttcttcttgcttgactcaggtgcgtccgtggctggtttcttttctccctcggtcttcggcttatcgttcttgcgtcttagcgcatcatctgcgtgggcgcatcgctcaacaatctcgaacaatctccgagtggttgtgatgcgtcttgtcgccaactcctgngtagtatagcgatctctgacaccggatttgaaggcgcgaattacaaaagcgtcggtgatttcaaggattgtatttctgcactcgttgaagcgccgaatatatttcctcaaggattcacccgggttctgtgtcaacgcgtgtaggtcgtcttcgatcgcgtggc

SEQ ID NO: 45428 - DNA, 396 bp, Oryza sativa
agcttgatttattgttatatccaagtttatttatttttcatgtaagtttgtaaatttattgaattataattgtgtttcatgtttgggtgagaaagttatccaagaaagaagaaacatttttttaaaataaaaaaaagtacggaagcgacgaaccatattaggtcatcatatccaatggatgagaaaagtgattggcacttttgaaaactctcaggctcatgaaacctaggttctctcgaggtattattgtaataattttcctgggtatctcttgaagttttaagttattattatactaataactagctaattgctaatccgtacgttgcacgagatattcttatcgatactataaatgttaaagttctaatattatgttgaattatttagtttttt

SEQ ID NO: 45429 - DNA, 406 bp, Oryza sativa
  unsure (1)..(406): unsure at all n locations
tatatagaagtaacttatgtaaattgaatatttctttaattnagaactatatctagagtcattaacatctatataaatgtgggcaatactaaaataacttacattatgaaacgggggagtaactctctgtagtagaaataattatatcgtgagtgagctgaaataagaaactatttagagtgaattcgcaagttaagtgttgagaagatttataaagtccacaaaatatagaattaactaagaacaataataaaaataatcaacttacagcattatgaatgtatagaagtaatttagtcaaatctaacagtaacttatatatattataaaagtaacttagtatataataaaagtaatttacaaatattaattattttatcgtaatataatcatgtaagatcttgtt

SEQ ID NO: 45430 - DNA, 377 bp, Oryza sativa
  unsure (1)..(377): unsure at all n locations
agcttatggaatgctgatgctattttctcttcactgggngnaacacaactgctgtctgctcttaattcacggtacaaattaatagtgtagatagcaacccaagaactgtagtcatagcctactccttgacaatagttggtaatcgacttaccggactgagatacattagctagctagagatgcagatgggcgctgctgccatggctaattagtggaagactagctagggctagctgagaaatgagaatcgcaagacaatataactaacaaaatacgttccatataaaagtcaagtgtgaaaaagcatagtagcatatataatagctattcgaagatctaggattgggactaagagagtactacttcgtaacatatat

SEQ ID NO: 45431 - DNA, 462 bp, Oryza sativa
  unsure (1)..(462): unsure at all n locations
actcagcttttcacagtgaactatttgagtggagcacttatcccgcttaagtagnattgaatcaatctattccattggttacagaggaaaaaaaagttcattttacatcctaacgatattttattctcttaaactttttttcttctctacatacaagtcatatttcactttgacacatcaggagatgaaggtcaatgataattaaacgaatacactaaattccacgacctgcatgtaaatgcctctaaggtgtcaatacaaaatcaataagcatttcgtataacgatatgattagaaatttcctactaatttttattttaagactcatattaacttggtatgtntcttaaaaatactgtacgatcctacgcataagaatcactatcttacatatgtatatttggtcaatctaaaaaggtgatagcacgttagtaaataatatatatttatgagcaattaaag

SEQ ID NO: 45432 - DNA, 343 bp, Oryza sativa
agcttcctcgacgcttactctggctaccaccaaatcagcatggcgaaggaggacgaggagaaaacagcgttcatcaccccgttcggagtattttgctacgttaaaatgcccttcggattgataacagctggcaatactttccaacgcacggtccagggcgcacttagcaatcagcttggcaacaatgtcgaagcatacgtcgacgacatcgttgtcaaaaccaagacaagcaactcattgattgatgacctccgggaaacgttcgacaacgtccgacgatatcgtctcatgctcaatccaaagaagtgcaccgttggagtaccgtcgggaagctactcggatt

SEQ ID NO: 45433 - DNA, 431 bp, Oryza sativa
  unsure (1)..(431): unsure at all n locations
taaagccatgaatcccttctatgcatatctggatctggatcctacagaacaaacatatcggatgagtagtatctgatataaatataatactcgagaaaaattcaagtatttaaaatatttacaaatatgtatttctcctcttgtcaattttgatttccccgagcggatgactccttacgtttaaatactctgcccgactagtcatagtccccaagcatcgggagtcggccaaagcacttcccagacatgcatatgagtgacatgagttcgtcattaatggaacaaagtttcacagatcggagtttactactcgggtacttttgcaattgtaaagagcagaannataaattatcttatctttatgcttttgatttattccgaataatacttagcaccttgcgttactcggtccatccaacgagcccccgggt

SEQ ID NO: 45434 - DNA, 447 bp, Oryza sativa
  unsure (1)..(447): unsure at all n locations
ttaagtcacctgcggctgcagcttctttattagcgtgcaacggctcgactttgttgtgagatganaaagaagggattatcggattacgacgtggtggtcactcggtcggccggccgatgcatatgatagatggatcattgcacggtgatgtactactcaatatgtaccgcacgcgcgccgccgctgtcctccaatctcgtcgacgtcgatacgtggggatgctggagctagctatcaacgcctacggacgcgtgcctgaatgccttgatgcgggagcctgagtaagctcgccggctcgccccgtagtggacgggctggcttgcggctgcaacttgcaaatcatggcatgggcacaggggtcaagggcccaacgcacagtcgtctcgtccgccctcgggtttcttgctcatatatgccacaatctgtggacgaaccgaacaaacttca

SEQ ID NO: 45435 - DNA, 451 bp, Oryza sativa
agcttgtgtgcataggatatattcccttatcctccttataatagttccaaatccccagtttaactgtatgattgttgctgggaactggcgatcctgctgtcactgggaaatgcttttttcttagagacctcccattttagatgttttcaattttttactctatttgctttgtatgtcgaaatctgttgaaattgtaactaaaaacgagaaaataaaatgaaatgtgacaaggactgagcttggtaactgcctcctaccaggccctgtcccaagaaacttgtcctgaaggggccttgctgtcttgaaaacttgttctaggtgaacatcattatatttgttgtaactgttatgtacgtgcaaaactatatatgtattctcttatgtcttttaacgtaaatgaggtgtcgtagaaaggtatgaagtattacttcagttttagctgatgatgata

SEQ ID NO: 45436 - DNA, 415 bp, Oryza sativa
  unsure (1)..(415): unsure at all n locations
agctnttgcatncatcgatcgatcggcactgtctaaactgtagactgtactacgctagagaaacggacgcgcgctaagcgttcattgctggccaccgactcaattcaatcaacgcaaagggtacgtaagctgctgctcgccagtcgcctatagctagccgctgctagctgctctcctgctttacaggtttgcatgagaagagagaacactgaacagatggagatgcgatcggtcgatcgacgtgaagccaagccgccagtcactgctttgtcgatctctttccctccctcccagcagaaacgtgactccggtcgggactgtgttactgtttactccatcattgttacaggaaggaanaagaaaaagagagaagcgaaagttgcaggaatcatgcattgcaacatgcattgagatc

SEQ ID NO: 45437 - DNA, 462 bp, Oryza sativa
  unsure (1)..(462): unsure at all n locations
ggcttatcggtgtggaagaataaatgagtaaatcacgaatatcatatggtgtttgaaccttcaaagtgttggtgtcggatcggataattggacggtctgatcattcagtcggctcaagcaaggtttccccgtggcatcagtgtccaccattatggtgtcaccaggcttgaactgaccagacagaattgcttcgctgataacatcctcaaccagctgagtgacggctcttcttagtggccgtgcaccgtagctcttgtcgtacccatgctgagaaatcaggtccttcatggaatcagacacctctaggccaatcccaagggctaaaatcctacccttcacctcttgcagcattatattgagaatagccagcatctgcaaattgtcaggcaagtgtcagtggcttacatcangcatttgcgttggttgcctgaacatgtnagaaattatagcacaacgtgctac

SEQ ID NO: 45438 - DNA, 428 bp, Oryza sativa
  unsure (1)..(428): unsure at all n locations
agctnggagtagagtagagccggccgaagtgatcttccagcccaacttaggctttgttgcatgggcctaaaacccggccggacatgtgtttaatatggtaatttgatattggaataagtccaaacattcctcaatattacatcgagtttaaatcgtattcctgaacgttaataccggaaatatatattgactctcttatactgactaggatgccacgttaaattaccatggcagcatcaataggtggttttgctaacgtggcatcataataagtaagaataaaattaaaaaaacatgtgggggtacacaggtacacatgtaagtggtcagcgctactttccctctcctctcctcttccccgggagtttaccgatgggataaggagcagcgaccggtgagcctttccgcgggatgaggcaatgacaatt

SEQ ID NO: 45439 - DNA, 444 bp, Oryza sativa
  unsure (1)..(444): unsure at all n locations
agcttgctctgaaaatggtttcagataatattaccttataattatgtgatatctaatcatgcattataaaacaaaagtcacatcttaaacaataatgtgtgttgtattcaaaaaatagcattatntttaggacttagaagtgaaaaacacagtgttacatgcaaaataggtaatatgtatgactatgaggtgaagcaaagggaggtgaatgtacaactaataaatgatgaattagatggacaagcagcttctcgatctaacgattgttatctntgtactaactaggtgataccccgcgctttgctgcgggatccatgtatgagtatatgttaaatattgtcgaaatgatgaaagttaaatgctaagaaaatatgtgagaagatgatttgcacatactggtaacctctataatataataccgcagatgatgtgttatgcttgcat

SEQ ID NO: 45440 - DNA, 369 bp, Oryza sativa
tagactggaggaacaatccattagggttacctaaatggtcctagcgtccaaagtgtgggtgcagagatcgctggcaggtggctatatcctttgctgaacaaacatttcgaaggagatattttgtctgccccaatgtagacaacgatttcgttgtatgtctaaccatttacaaaatccgctatgatttgcacaaaattactacccaaactaaataacattactatttttacagggcaatccaaggatgggtggatttacttgatggatcgacaatgtcactccatcatatcatggccagaagataacagagtcagaaacacaagtagagtatcaacgattgaaggaccacgagaatgcaatgcattctga

SEQ ID NO: 45441 - DNA, 429 bp, Oryza sativa
  unsure (1)..(429): unsure at all n locations
agcttgagtcactgagaatctctatcttcttttgacaatgctctttcgctgcgcaaacaagaagagcacatccaccaactttaactttaagcatgttggacccaatgactcgccgtgcaactgatgatatgcagcctgagatttctgaaaccaaaccacccacaatatcatgttgatcagaacagagcctcgataaaacttctatggccttgtcttgcaatgaaggtgctgcatccgctacacatgacacaagaggaagtatggtgtggggattttctgcatgaactgtccatggagctttggtatgctcacttgacacctttggttttgataatagcaccaacgcatcaacaacttctgatgttgagcagcttaccatancagcttcaaaacccactagagcaagcagccctgatcgttatatatctg

SEQ ID NO: 45442 - DNA, 405 bp, Oryza sativa
attacggaccttagaatctcagcttaatgtttattgcgcaatattgccgccaggctgacatcatctagggagggggcgccgacatgcgggccccactcggtagcggctcaaggggccggtccaccatggactgggaccacgcgggtggtccaccgccggtccacgggaccgacggcccggatcggcccggggccgatcggacggtgcatgcggtggcctggcacggctcggctcggcacaaagccggccgaccggccatggggtgcggcggcggcgcacgcgaccaccggcgactgcaagcggcggcgcgagcggcggcgatggatggcgcacaggtcgacggcggcggccgaaggtgatggcaagcgcgcggagagcggcggcgcgagcggtgaaaggtgggaa

SEQ ID NO: 45443 - DNA, 451 bp, Oryza sativa
agcttgccatgaaaatggcaaccatgtttgttgataacgacgaagagggctctgaagatatctgattcaattcacggagcccaccttttgcatgtcttcaaacatatgttcccagtttatggcgtgctgatttgtacaggcagatgggccgcaggccgtgtaggcatttccatcggctatcataattcccagtgaaattatgtaccttagtagttccatatttaccattcttactgctgtaagatgtatactgtattatttgaaattaaagttctctggaatcgacttgtctgaatctgagtgttatttgtcaaatattatgctacaaaggaattgagcaaaataacaaattaaagaatcacgcaagctgtcgtgcactcgtagtcgtaggcaactggggtgcatctggaaaactgagaaaaaaatatccctttcaacatacgaatacatt

SEQ ID NO: 45444 - DNA, 394 bp, Oryza sativa
tggtgagccatcgaggaactctactccagccgcacccgtgcaagatcggtgaataccaggctcgccctcaccaacacgaagaagggaacaatgaaggtcgctgaatacgttgccaagatgcgagctcttggtgatgagatggctgccgccggtcgtcctcttgatgaagaggatatggtgcagtacatcatctcagggttagatgaagacttcagcccgatcgtctctgctctctgcaccaagtccgatcccatcacggttggggagctgtactctcaactcctcaactttgaaactctccttgatctctaccgcaacaccggtcagggaggggctgctttcgtcgctaatcgcggcggcgggcgcggcaacaaaaacggcgcccacaacaact

SEQ ID NO: 45445 - DNA, 368 bp, Oryza sativa
agctttggatgatatctctctaggtttaatataaatttgagggatcttagatctattgattcttcttatgatactaattatccacaatctgagatttcttgtcactttttgaatggtcttgacatgtctatttgggagatgaaagttacgtctattcaggagtctatgactactttgactttggattcactttacacaaaattgaaaacacatgagatgaatgttctttctcgataagttgattctaagtcaagtgctttgatttcttcgtattcttcttctttggatattgatgcttcttcatctaagccttcttttcttgctgtttttaatgccacatccgatgatcaactccaacagatcgagga

SEQ ID NO: 45446 - DNA, 425 bp, Oryza sativa
  unsure (1)..(425): unsure at all n locations
ttgttntgacatccaagccatgaactttggctttaaggccatggcatgttgacaaagtgagtagtttccacacacacgcaaaaaaaagtagcaagtatctttgtgcactggtctggaactcctcattgttaggttttagacagtataactgatgtacaatgtcacagacttactgcacttaaacatggccattatattcagacaacattctttggcatatcagaactcctaagcaatagcagttgtgaattgctatgttcacgtatgtgcaatccttgagacaaaaacaccatcacatcctcaacaatgcatatcataccaacaattaaagcactgcccgtcaagaaagaagaatgaacttgtttagaaccagatattccaatccttccaactgttcagggaagtttatgaatatgacatcctgc

SEQ ID NO: 45447 - DNA, 365 bp, Oryza sativa
  unsure (1)..(365): unsure at all n locations
agcttatgttgatgatgtagtcgtcaagacttatcataaggatgacctgatcgcggatttggaagaaacttttgcaagcattcgtgctttcaggatgaaactaaaccctgaaaagtgcatctacggagtaccgtcagggaaattgctcggatttatggtatctcaaagaggcatacaggccaacccggagaaaatcaacgcaatcctcaacatgaaaccgccaagctcccaaaaagacgtccaaaagctgactggttgcatggcggcgctcagccggttcgtttcacaactcggcgagcggnggatgcctttcttcaagctgctgaagaagactgacaatttccagtggggacccgaagcacaga

SEQ ID NO: 45448 - DNA, 167 bp, Oryza sativa
ttaatgctcattggcacacatgctggattggatgatctcgtcctcacacctgtaaaatctctctccaactatttaatcaagctgttgaaaaggagcatctatggcagggatcctacatactcgaggagaagatttgttccctaccggaaatgctgcgttaagggcca

SEQ ID NO: 45449 - DNA, 440 bp, Oryza sativa
  unsure (1)..(440): unsure at all n locations
ctcgtacccgagatcctctgagtcacctgctgcatgcaagcttcgttnttctcaaaaacgaatatgttgtatccatgtaaacacaaccatgaagaaacattaataatggaacaagaaaaacagtatggctgtttggttcaaagaataccctcattcctagagtcttatcagatcctacatgatcctgtttggttattagaacgggaacatgtgaccaataaaaatttgtttggttattgcaatgggattaacctcattctttggattgaaacaatccaaaggtggatgagattatgaaaactcatggaatgcagttatccacaagggcacccattcatccaagatgggtgtactaattgtggtcaaaatgcattcctcanattacaggcctcttaacaagggttcttcggagaaaaatcacatagtacaaccataatgat

SEQ ID NO: 45450 - DNA, 451 bp, Oryza sativa
  unsure (1)..(451): unsure at all n locations
ntctaccgcanacattattctgatgtaacaatgtatctggtaatgctaaaaacagaatttattcaaccattacatatataaccacaaaaacatacctttagatgagagcagtagatgcccactcttaagaacctacatcagaagagtacttaacattggttatgaagatttgtgcacatgacaacaaagcacacaagcaaccatgtctactccttttttctactgaacataactctgagctaagctaacccacccccacccctttcttctatgctcaccaaacaccaaagcacaaatgagacataagaacataaaaagtgaagtttcaagtatgaggcaagtggcaaatatcaaagcttatgtatctatagtcaatcttgataatttgctgtgaatcagtgatgtgtcaagcagagtatccctggctcaagtaatgtacaatanatcattc

SEQ ID NO: 45451 - DNA, 417 bp, Oryza sativa
cggatcttaagcactgagctgcaagctgaactgagatgaattcttacaatgatgaggaaaaatcttgtgttttcatattataaacgaactctccttgagaaattataacatctaaaacaaggtgacaaaactgtgtgggagtattttcataacttcaaattgtgtatcacttatagtggtttaaaagaaagcaatgagaacacaatgactagatttttcaaagggcttaattccgatattcaggcttggcttattaacatgacatataatcatataggccacttgttcatgcttgcttgcagtgttaagagcaatattttaaagaacccaaaggagaaacaaactatgcttgtgcctcctattactgacattttgcaggaagctcagaaaattcaccatgaggagaagagcaatatg

SEQ ID NO: 45452 - DNA, 426 bp, Oryza sativa
  unsure (1)..(426): unsure at all n locations
taaccaaaatttctctactattaatcagctaactgccacttagtcattggctgtctgtcgtccaattagacggattaatccgagcttgtcacgtatcctgctgtcagagaaggcctttcgagtgaggaatataccaatcatatcgaaatctggtgagtacttccgttttgtcccgaacgatgcagccaagccagttcaaataacagtagagaagaatatgttatactccctccgtcctaaaaaaaaaagcaaacattggatttctcttatatgaaaattttttataatttgtattttcattgttgttagatgataaaacatgattaatattttatgcgtgacttgtctttttaagttttttcataattntttcaaataagacagacggtcaaacgtttgacacggaaaccaaggtttgtctttttt

SEQ ID NO: 45453 - DNA, 423 bp, Oryza sativa
  unsure (1)..(423): unsure at all n locations
agcttctccagggttcatctcatatntaatatactcctgtttgaaaagatcacgacgaagttctttaatattatttgttccttgaagaaaattactcaaagcagtccaaatctcatgagcagtttgaagatgagcaacacgatcataatccgaacgagaaataccactcaaaagaatattgcgagctttgcagttttggtcaaaaccgttttttttagcagcagtattaatagcttaaggaatcacataaggatgagaatcttttctccaaatatcataatcttcagccataatataagattgcatcctactacaccaatgagaanaatcctgtccatcgaaaacatgaggcttaattgaaaacctagcgggagtagccatgggcaaaactctagatcgataaaaatccaaagaataaacaag

SEQ ID NO: 45454 - DNA, 444 bp, Oryza sativa
taggatgtgtttagatccgggggtaaatttttttgctgtgtcacattggatatagacacacatttaaagtattaaacgtaatctaataataaaataaattacataatccacctgtaaattgcgagacgagtttattaagcctaattaaccgtcattagcaaatatttactgtagcaccacattgtcaaacgttcgatatgatagggtgtaaaacttttgtgtggaacaaaagttttcaacatatcgatgttcaacatatcccctggggcggatcccaacttcccaccatttatacgttacagcgtagcatctatttttagagaacagtaacgataaaaaagatatttagttgccggatatactgtccacatcagcagctagagcaatccgtttctctatcacaaatcgttacaaattaccctgtctaccaaatcgggtctcatg

SEQ ID NO: 45455 - DNA, 412 bp, Oryza sativa
  unsure (1)..(412): unsure at all n locations
gatccttaagncacctgcggcatgcaagcttgttccgcagcgtaggacagttatatttcttgtcatcgagtaacgacctatgcgagtgctgtgcaccgagatcgccgcgctgttccacagaagtaggatgcctcccctagtgcccctggacggtttgaaagcgtaactgtctaacctgtaagctcctaagaaacgggctagctggacatcaactgctcttagtgtggtttcttggatgcagacgaggttgcaagatgtctctgcgattagctcgtttagtgcagtacactttgccggtgagttaagcccccctcacattccagctaagtagttgtaggctttggcttgacattaggacatatatgctcagtggtggtctggtttacagcagggaagtggcgactcatatgtg

SEQ ID NO: 45456 - DNA, 398 bp, Oryza sativa
  unsure (1)..(398): unsure at all n locations
agctnctccaccatctcgctgctagccattgtttttatctacctccatcaatgatcatgcggcaacaacgctctttgacgacacactttgtttggaacaacgtgtgtcgctgattttgctccgccttctccatttgtgcgctaaggacacgctgcacaatgaggctctcatagtgatccgcaaatgcagccccaatgtgctcttccggtggctcattatctgcatggtcagccgcaagcaaagcaagtgtatcatcatcgaaatcactagcagaggagtactcaacatcgtttttgactaccaaaactcgcttgctagggcagtcacgctgcacatgcccaaagcccttgcaacggtggcactaaacatctctcattctggctgtggatgccattgaa

SEQ ID NO: 45457 - DNA, 217 bp, Oryza sativa
caaatacagctaatatctcaatgacgacaatacatatatcccactaattctttatctagattaattactgggagttaagttccttaaaacttgagtcataaaagcaaatcaagttaggatatggaaggtaaatgtaccccctacactatctggagacgaatacccgtcaataaaaaccaatattctcccccaattttatacggacaaattacctgaa

SEQ ID NO: 45458 - DNA, 417 bp, Oryza sativa
aagcttggggtcgcgcctcctccagactgttcttattctatgcggtcatgactacatatcctacttaccttcaacaccctcaagctcgggaacaatactactgcggtggcctcctgctgctcctggcggaaattgagacaaaccacatgatcgttgaacgaatgctcccacaagcgcatgatggccagccttggcagtgtcccgaggactttgatggcggcatcggcatcctccagttcgagccacatcagtctcagcttcacgagattctggagctttccgatccactgcggcaagttgcctagcgcaccctgcagcttgacgctctgcaagttcttcggacgaagcgaagttgacgacgacgaccacgtgccatgtatgccttgacacctacctgcacacaccgacaatgactct

SEQ ID NO: 45459 - DNA, 457 bp, Oryza sativa
ttgccgacaatggtccgtgcagcagcatgattaccacatatactataatgtatatccttcaacaattgtctcccttcctccaaagatacacagcgctgcagtattcctgatggacttttcttgtacagtttagcttcatgaataatgtaaagtctgctgcgcctggaaatccgctcggcttcatttttgtcttgagggagttcttgtttggtcaaaaattttatgaggggttctctccagtcggcttcaatcatgcttacgccttgagtatccatggcttcaattgcttcttttctgggcacggttggttcataaagatgctcaacgaacacatcagaaggggctgcttcccgttttgaactaaaattggccaatctatcggctgccttaatgttatgtcgaacgacatgggtgagctcgaatccatcgaatttatcttccaacttgcgtacctctt

SEQ ID NO: 45460 - DNA, 440 bp, Oryza sativa
agcttgacaagagtcaagttatgtgagagattttttcacctgaaaaatctaacacaattgcagacaccagagagccaagagaataactgccagctctgcttgagtagcatttgtgtgaatagaagagcttgcttgaataaacagagctctatgcgagtgaggatcatgaacaaagatcccaaaacctaatttatcatctttccaagaggcatcaacaaaacatctgattccctgtggaatgttaaacccataatccattgtgtgattgttatcatgaaggcagtcttcagcagtttagtcacgaatttgagagaaattgggcgccataacatttgctgctatgcaaacttgaacaggttcccaaatcttctttttgaaatagaaatcactcctagctatccagatgaaccaaaggcaaatatatagtttcttgcaagcat

SEQ ID NO: 45461 - DNA, 463 bp, Oryza sativa
  unsure (1)..(463): unsure at all n locations
tagcaaaanactttaagaaatcacaaactttgcgagaattatcttgttctgcataaatacaccagtattgtacaaattgagcctccatgtattacattcaaactcagtcggaatcagttctttcatcatcagattcatcattactcggctggaggtcgctgttgcgaaattgctccacaacatcactcgcaattatgtcagccgcagtttgcgcactactgataagatcaagggcagcttcttcgcttgtcccgtctgcaaatccatcaatggtgtcgatntcaattctcgggtacaaggattttgtcatcgccaaggccatgccagctcccatacttccagctttcttgatattcttgaaatatacttccggagcaacactcagcttgtcaaatatttcggntgcgtcgagtgcactcggaccaccattatngatgaacatggcttggataagtggtgcacc

SEQ ID NO: 45462 - DNA, 424 bp, Oryza sativa
  unsure (1)..(424): unsure at all n locations
agcttaactcgagctattcaatctccgagtgatgatattctaaagaaaaacactttcccaactatagtattgttgttgtggcactgacatgccaccgtgtgcagtcaattggtcataattccctcttttctctaacaaaatttacaaattcaattctttcattgtttgcgtttcacctcaattttccttttgtcccattttcatccctcacttgttgtatcgtcgataatgggccaactcgactcgtttgagctcacaatcgtcttagcaagaaaaccaggaaaaaacaagttgttcgtgttatactttgcgaattatgaactgatgagaatgtaaatcatttccaactgtcttcaatgggtgctaggcttctaananaattatgaatatacttattttctaataacttatgtttatatacctg

SEQ ID NO: 45463 - DNA, 465 bp, Oryza sativa
  unsure (1)..(465): unsure at all n locations
tggagactagaagaaagcgattcagagtttatgctatttgatttctctcagatagaagatgctactagcaacttctcggaagataagaaacttggagaaggaggttttggctccgtatacaaggtaaaataaattagatatatacacacacataaaaatcttcaatacatgtttacttgaagtatgaactacttgaactttgtttgaaaaaaaatgcagggccaattgcccaatgggcttgaggtagcagttaagcgacttgctgcacattcaagtcaaggcctggttgagttcaaaaatgaaattcaacttattgcaaagctacaacataccaatttagtaaaccttcgaggatgttgcattcaaggagaagagaacttactaatatatgaatacatgccaaacaagaagttagacttcttcatctttggtatgcttatacanttgttttcaaaanatgtggta

SEQ ID NO: 45464 - DNA, 421 bp, Oryza sativa
  unsure (1)..(421): unsure at all n locations
agctngaagcagtatgatgttgatataatttctttcatcttataacttgaaacgcatcttacaactagaaacggagggagtataatactacacctttgccactgcattacaattaccaggtgtgttcacctcgtcattttgcacgtcacagctcatcatcaagacatcaactgactagtcttgtactacatctttggtttctgctaaaagatcttgcagaaacatcaaagcaacagcatcacacaaatggtacaaccattaaaagaaactaatggaagaatagggccttcagttataagttacagcgacaagatcaacctaatttaatcacacttaatatgttggcatcgaactgctgatgttgattttccaccttgtccatagcaggaccttcacggtgataatggtgatcaggaagatg

SEQ ID NO: 45465 - DNA, 455 bp, Oryza sativa
  unsure (1)..(455): unsure at all n locations
cgttntaacagttaattcatcttagctgttacctgttgtactcctgcaggtgacaaaggatgctgggtttgagctaccgcagccaggcgagtatgctgtcggtatggtcttcctgccaatcgatgagaagcgccgtgagcggagcaaagctgagtttcagaaggttagttgttttcatttcttttgttttttcaattcatggccgtgatatttacactaatgttttctgttactttcatttatccaggtagcggaatcgctgggacatgtaatacttgggtggcgccgggttcccactgacaactcagacttaggtgaatctgcgctccagactgagccagttattgagcatgttttcctcaccaaaagttcaagttcggagggctgatttgagcagcaggtcattccacgagcttacattntgaattatgaatgcgtatgtagtagactgtgta

SEQ ID NO: 45466 - DNA, 322 bp, Oryza sativa
cgcgaccagcatagtggaaagcaaaaaatatggagacggcacttaggccccgctcgacgcagatctagctcccaactccaacctactcggagctagagcgatgccacactgtccaaaacctctatttgagggagcggagtgagcagagctaccctaaaaaacgaacaaccgccgaggagctggatatctgcagctccactgctccacttcaactcagaagacccactaccctgtacattgtttaagatatgtacaaaaaaacaccacgtaactacccaaactcacccgatgagccccaggctctgtctctggaaacacacac

SEQ ID NO: 45467 - DNA, 444 bp, Oryza sativa
  unsure (1)..(444): unsure at all n locations
ntcaggataaatannggagtaattgatattcatgaccgtcaccataaaatgtgtgcctccttttttgcgttaatcttcttcatgggtatagatgtagtcttcgtttatcatcgccatgttttgtaaaaccacctatgttcaactttcttttggcaaagaaaaatggaacagggttattgattcagcagagtagatctcatcatccctggtcaatgagaataccccaggaattgtagagctccaaacagaatgcatcatcctcaatttgaacattaattaattagtacaatagataaatcaaatgggaaacatcaattcaacagtactagaaagaaacagttaattaacatgttgagaatatattaattacactagtatatatggtcaggatcaagatggagattcaatgggcatgcatgtgacgagcttgataaaatgcattta

SEQ ID NO: 45468 - DNA, 432 bp, Oryza sativa
agcttgttacatactagaggtaacataattatttgtataaaacaccgcataacttattacataactccaagtgcagaaacacagtacatggcccttcactgaaaacatagattttcgaacaaatggagaattggtaaatgatgtttgagaaaagcatctagtattgaacatcaaatcaatgagaatgctgccagggacctaaccaaaataaatacttaaatgcagtctgaatttgctgaacgtgtcgaggtgtaaaggtatatctaagtatctaaccactggatgactgaagaaccccacgcacatctgtttcattaaacgcatttgagaggccatttcatcaaattcatatggtgtcatagtatatgatacataagtagtcagctggcacaatatttttttttcacttgacaagacatttaatccttatgt

SEQ ID NO: 45469 - DNA, 455 bp, Oryza sativa
  unsure (1)..(455): unsure at all n locations
tgttcagcaaccaagcccaactagaaaagaagatagtcttttatacgaacttgtactttatacgaacggaaattagttaggttaagtagtgaactcaccagttcctgatagacgacggcatcacttttgttctcaaatgtgacagagccgtccgggttgaccttaccccttgcccgcgcccagttgcgagctctttgttcagggatgtctgaaaacggggcanggacattcgctgctgcagcggctgcatcttcttgggcccatattgcctccttgccgatgtaccctgcggtgcccagccgatgcgggtgctcattccgctgttgcagtacgcgatgtgcctcgcttgattccctaaactcttgggtggtcttgagagagcagaattcctcccacaccgcttcggttatttgagggtattgatcgaacggcgtatgaatgccgggcgggttgac

SEQ ID NO: 45470 - DNA, 372 bp, Oryza sativa
ggagggggaggtggccttcttgattgtgtgagcgcagggcggctgcggacagagcatgcacgatgcatacgatgcgcacaaccaccgtctagtttcttcatgtgcgcttgcctgccaccgggcgcctttcccccatctgctgccgactgagaagaccgggagagaagagaagagaaataggaaatatagaagagatgtgaagcccacatcattttctcacttacatgtgggccccacatacttttttttcgactaggatgctaaggcaaccaaaccagggttctatactactatgggacctaaaatgcaccgtgttggacagtttaggggggaagatctctgatattgaagataacggatgtcacacaaact

SEQ ID NO: 45471 - DNA, 456 bp, Oryza sativa
tattggtgcatatcatttactgtacattctgtgctttcatacatgttggtgcaaaatgaatgactaaacattagctcatgccaagctattgtctgtggtttattagtcacaatcaattagcctccttttttatgcgcaaaagactgtggcatgatattattcactctgtcttgcaggtcaaacagagagtttctatatcatattctagaggaagtcataaaagctggagcaacaacactcaatatcccagacactgttggatacactcttccttatgaatttgggaagctaattgctgatataaaagcaaacactccaggaattgaaaatgctattatttctactcattgccagaatgaccttggtctagcaaccgccaatacattagcggtactaccttttccatgtctctttgatccattatcattggtttaatcatgtcactaatgtgactta

SEQ ID NO: 45472 - DNA, 394 bp, Oryza sativa
agctttccccaagccctattgatcactggactcctgacatctacgagggcgtgcggttccgatctacacattcctacctctctatgtgtctccgaggcgtttgggttttgcccaacttcacttatgtgcccaagagaagagctatgcgcactccaaccaacacagaactattaccagaggttcatcgtgatcgtttagctcaaacaactagttaggtgcagcagggacacgaacaacgaatctcctatgataagcagacccacttttgatgctcgatattaaccgttgatcctacaaatactgcggctaatgacgcatacgatggttggattatagacctagatgcttcgtaatgagatgtcatgcttcagagactacgagtgggcttcgagca

SEQ ID NO: 45473 - DNA, 375 bp, Oryza sativa
  unsure (1)..(375): unsure at all n locations
agcgngagcctacgggtagtactttcttataacagcacaagctctaactccacacacaggagcagggtattacgcttcctaccggcccgaacctgtataagtcccttgtctctcactcgcttgtgagcaatctcgttagccatatccctggcggagagacactcttgatcatcgcgccttatcccccggccgaactcacaaaggggggcctcacaacctcccgctagagaggaacactcctcgacagagtctgataggaatgcagactctcctgagcagccgtggggtaacattcacgacacaaatngaatcgtgaccccgagatcggcggggcagtcctgctataaaggccattccaatctccctcgcatttca

SEQ ID NO: 45474 - DNA, 387 bp, Oryza sativa
  unsure (1)..(387): unsure at all n locations
tatcatctacatatttctaagtttataggtttcaaaaatcatattagctatccttactttnttgtcacccttccttttttttttgctttctcgatctaccattgcttctattcattctcgttgaatcctttaaaaattagacattgtagcttttagaatttattggctcgttgggttttatttttataatttttagaagtcccatcaaacgatgccaccatactcctctaaggcccgtccagtgcctctttttttttactgtcattgggattttaaaagtccaatataattatcttttgagtttattttttactttctagaagtcctaccaaaccatcactggctttgccactatattcctgtacagccctcttctttttttctttc

SEQ ID NO: 45475 - DNA, 381 bp, Oryza sativa
  unsure (1)..(381): unsure at all n locations
agctngattggaatattaaacctctagtgagcagtacgtcctccgagcaatatcgacgctgcgataccagatgtcgcgggtgcaatggctattaacccatcatatcgcaccctatcaagtagtgccttgtaaaggaatgtttttccagtgccacctggaccatcaacgaaaaaaacctgactcttcttcttaatcacatgttgtatgatgacatcaaacccttgcacgtgctcattcgtcagagatttgtatatatctagatgctctgggtcaattggcacagactgctcctctctgactgtaatcggtgtgtcgtggaaaaaacatctggttgacgaaagcataacatgcgtcagtttttcattgattataaatataaag

SEQ ID NO: 45476 - DNA, 438 bp, Oryza sativa
  unsure (1)..(438): unsure at all n locations
tagagaggtagatgatcacccgcctgggagtcgtgatgatgtgtccatacttgaatattatcggtatgagtgccactaccgaaaggatgagcccaacccatttacttgatgtggtagactttctgatcagctcgctgttaatgctttctcatgtatcgagacatctcgcctcaacttccatactctgagccagaagaagcttcgctctgaaacacatcaaggtatatctgatgctgttgctaggggagacactaatggaaaagatgttggtataaaggtaattctgccatcaagtttcactggaggaaggcgatacatggtgcaaaattaccatgattcaatggcgttgtgccgtgcctacggtcctcctcacatattctcaactttcacatgtaatcctaaatggccaaaaattactcangcgattcgttttgagct

SEQ ID NO: 45477 - DNA, 437 bp, Oryza sativa
  unsure (1)..(437): unsure at all n locations
cagctttggagaggaggtcttatgtggagtctttgcttataccccagntgagcgcctgtgaagatggagccgtaggcccgctagtccgctgctgtttatttttgattgtcaggccttaagtgcctctgtaataatgtaaatattatcgatataataaagatgtgtcttttatatcatgtttgtgtggtgtaccccggcttttcctgggacggngattaatacactagcgttcgggaaaaggcaattttctcggtcgcgacagtgaggcagaattgcctccgctgttgtagtcgttcacggcacctcctactggcgcaccagctccggatccagctcctgtcggcgtcggcggcggcgcagctcctgtctgcggcggcgcaccacctccgccaatagcggcggcagcaactccagacatggcgatgagcagtcgtgca

SEQ ID NO: 45478 - DNA, 424 bp, Oryza sativa
  unsure (1)..(424): unsure at all n locations
agcttaatcanatntaaaaatgtgtgatatgttttaataaaaataacttataatatgcaacttataatatgcaacagaggagcgagtatagtcaattatttactgcagctagctaccacacatgcaagaagtgaaagtagagtacatatgccatgttcttttcctattaagatacaaattttgtcacagatttcattaacacacttttcaaactaataatcagtactatccgtgaaattattttcattgaaatagagttaaaatatcaaatagattcatttcatgagtttaaaataattaatcaaacatcaatggtttcctcgtttcacgtgtctaagcttaagattggtgtaatttagattattgaaccagattactataagctgaattataataggccgacatataatatgctgtgagctgg

SEQ ID NO: 45479 - DNA, 425 bp, Oryza sativa
tctaagctcgtagctcatagcaagcaggtgaattatggttctaagattactacgacggaaagtggatggatgtgcgtgaagtcaatcgcacacaaggtggtcgaccgacgggcggaagtggttgatggtatggtctggcaaagcagaacttcacggttgtggggttatggttgatgatgatccatgatggacaacgaaaggattggggtcctatttataaggccagacaaagtggatgaactcgggcgccatcaacgccattgatgagcttggaaattgagcacggcaggggtggcacggagctgtgagagggagggcaagatcaatttgagtggcgggaggccacgttcgaattcttactgacgaacgctcgacttgaccatgtgtgaaaacgtctggcgacgtgttggcgccaatcccggctc

SEQ ID NO: 45480 - DNA, 427 bp, Oryza sativa
  unsure (1)..(427): unsure at all n locations
gacttaaacactgagcagcagctttggggaaagggtgcgaactgtatctnttttgcgggctaaggggagggaagtgaaacactaatgctacgaagtttaatcaaattctcttctgatgacgtgggaagcangatatcaacatacaagagttttgattttgatacctcactgatcaaggcaagtgtagtggatactggtatgacaaaagaaggcggtgatgatctgtgtgctgcatgggtaaagatctatggtattccgaagctagctagaatagaagattctatcaaggtcattgatgaactagttggggagcttgagatgctagatatgactagtcttagaaaggatggcctctgtgaaggtgaggctcgcttgtaatggccctagtgagttgcattctcattcacatctacttaacaaaggggta

SEQ ID NO: 45481 - DNA, 256 bp, Oryza sativa
  unsure (1)..(256): unsure at all n locations
ccagccaacgcacgcattatcaaatgcagatctgtnagccgttgatcatgctcaaatattcgtgctccttaatgaggatctcgatggccttgcacgggagtgtcacgagatcccggtcctcagcacggagcttggtgtcgtaagctcacaatctaccaggttttaagcctgataaacaaccaccttcccaggatgatccttcgctatatgaccgactgagagaggagactgatcttgtcgctgatggatgggcata

SEQ ID NO: 45482 - DNA, 441 bp, Oryza sativa
  unsure (1)..(441): unsure at all n locations
agctnttctttgcgcctagctagctctcttcttttgcatgtgacagaatcacagaagaatatggaaacatttattccctcctcatgcatgccactgaggagtttttggaaccaattaaagatattccttatgaaaaaagaagattttggaactaaagctagccatgcatacctagaaatctttagagtttccttggtcatggaatatttcttggcaaatgtgtatcttgagaaactataaaaaaatcaaatctgtagaaacaaatggaccaatcaaatgagaacttgtgccatctttacaaattgaccctttcattctttttccaacatgttagcttcttttctcaatataagacaaaatgaaaaaggtaatggtgtacaattaatattaacccaatcaatcattacaacaagaagtataaaatattatcaatacttctga

SEQ ID NO: 45483 - DNA, 452 bp, Oryza sativa
tccatcctggacatggatgattcccgcatccgaattcttcttttcgtcgtcgtcgtcgccgctctcgtcacgtcgtcctgtttgatctcctcctcggcgaggaacctcccgatgcgttccagcgacaccttgtactggatcatcatcgtcatggcctccggcagcatcctcaccggctccgacatggccctgagcgcggcgagcgcggtgaacaccgtgccggcgtcgagcggcgcgctgccggcggcggccgtggcggcgaacatgacggcggacaccacggtgggcgccgcccagtagagcacggcgccgtatgccttcttcagctgcgcctccctcagccacgcgaactcgccgccgaggcgcgactcgacggctcgccggaacgcgccctcccatgactggagcttgatggccctcatgccggcgagggcctccgacgtcgaccggag

SEQ ID NO: 45484 - DNA, 394 bp, Oryza sativa
  unsure (1)..(394): unsure at all n locations
agctntccgtagagtattagaacttaaacttttggtcaggtggcttgggagaacagcccctgagagtgctgctgtttacaatgtgatgaccacatgtagcagtttcagtctttcccttataaattatgatggctatgtgggctcataactagaaagtcttcacagaaccaaatgttgcaggagttggagaaagaatgaggcggttatgtgcttgcgaagcaactgtccagttttggacagaacagcaatcatcggttaaaactagagtctttttaagcaaactagggacaacggctaataacgaataggtagcgaacttttattagtctattacctgaagagtgatttactttggaccgagtgttaagtgacgattttgagagcagagcttcta

SEQ ID NO: 45485 - DNA, 276 bp, Oryza sativa
ctactaagagaccaaagagtacgacttatatgctccatcctatgggtagtctactaacggtctattaatagataagactctgggtgatacttgtttgcacaagacttgcaattcaatgcatagcccattgttcaagttatgagtaagtgtagcttggagttctagatggatagtcaaccttaatcggtctccctctaacccgtagtatattaaccggtcattgaaaaagacatatctcactgggatccctgaaattggtttaggatttgtggaatt

SEQ ID NO: 45486 - DNA, 236 bp, Oryza sativa
ccgaagaagagagcgggttttttaaccccccaccccggagaggaacgagccggaacccaaagagagacgaggcacgcacacccccgaaaggaaaacaccgcaaaaagaggccaaaaaaaggaggggggcccggccaccggaagggaaaaccaaccggggaaagcatgccagcgcacaaagacaaagcccccggggagagaaagacccacgggcacagcggaccaacggcgaaggga

SEQ ID NO: 45487 - DNA, 455 bp, Oryza sativa
tgcggggtacccaggctggcgaccacgtacataaatattgttcttactccctccggccaacaaaaaaatttacctagaaggggatgtggctgtccagatctgttgttctatgaggggtggctgagttttttttagaacagagagtatataagaagacggctggggtgtaatggccacagatacagatggatgtcccctcatgatggctgctggaaattacagaatttgcaaaatgttaaccaagcaaaagctttagcatgcatcaaactctgaaaatagctaacgatatgggaatggaccacattatatttgaaactgatgctcaagaactgaaagtggctctgttggatataacgcacgacatgagtctaacgctgctatcacttgaaaagccaaatttatgcttacagcacattttgatgtccatcaagttatttattatcctacagaatgta

SEQ ID NO: 45488 - DNA, 419 bp, Oryza sativa
agcttgcaaatttgtaaattagaatgtatattcattgcaattctatgctgctgatatacaaatctgatactgtatatgaataattcgttgcatatatacaaatatattgacaagtaagtttagcgagctactggttatgacttactcctatataagaaggaaaatcacgccaaagaggctaaacaatcttgagcctcttgctgttgaatcgaccaagaggcatttaaaacagatgatggaaccgcctaacccaatgaacttataacaaaataacggatgatggggtacctaactgtatgatgctaccaaatctctacagaactttgtaacttctgttcatatatatactatcgatattctcaatactatccaccgccgtctaaaaggaccactttgcaacagcaaatcagtcatcgtct

SEQ ID NO: 45489 - DNA, 457 bp, Oryza sativa
  unsure (1)..(457): unsure at all n locations
tagtgagagctcaatcagcagacatggtgaattattggctgtggctnttgggttgacaactttgccatctgttgctcctgtaagagttatgaagaatcagaggatatcctgggaaagccacgaaactctgaagttgctatcagaaggtgaaaataaggaaataactgtcagggatccaactcattttcatcattntactcgaggctcatgctcttgtagaggctactggtaattgaagttgatgcctcatcttgagagtaggagacttacaagggtgagaacatttttaaggtgagctntctactggcagatcatggagttttggacgcaagcaaaccaagccagatgattcagttgtggtcaggataagactaaagtcaattcaactgaagttgcatttgtacagcttgtggctgtgcttcatggttaatagcatcacggctcgagattttactct

SEQ ID NO: 45490 - DNA, 286 bp, Oryza sativa
  unsure (1)..(286): unsure at all n locations
agcttttagtgttgaaacttgaaaaggtatcatagtggcgctggcacctaacactttgtaaaggtggaaaaaaaagaaagaaaggaaatttactggtgtcaatagttgtcattaaagttctcttataggcaagcttttatggttgtagtattctactacctccgtcccaaaataagtgcagnctgnatatactgccttccttataaaatggttgacacctttgaatttttagcacatgtttgtccgatcatcttatttaaacgaatttgtgacacatgttatacta

SEQ ID NO: 45491 - DNA, 457 bp, Oryza sativa
  unsure (1)..(457): unsure at all n locations
ntgattatatccgacagaaggcaacgcgttgccttctgttggattcctgcagaaaggggaatggtgataatattgattcacaatgtccccttgttaccctgatacagatatctattgctgtaaattgtttgcaagaagacgacgcacgatagtaaccgagccctatttagcgcactcatgaaaccactgactgaatatactgcctccgtttcaaaatgtttgacaccgttgaatttttagcacatgtttgaccgttcatcttatttaaaaaaatttgtgaaatatgtaaaactatatgtgtatataaaagtatatttaacaaagaatcaaatgatatgaaaagaataaataattacttaaattttttgaataaaacgaatggtcaaatacatacttaanaaaatcaacggtgtcaaacattntgaaatggaggggagtatatataacggacgaattg

SEQ ID NO: 45492 - DNA, 384 bp, Oryza sativa
tttaaacacttgggttcgacagctcgtacttgtacacatatccacaaatcgcagatgacactcatcaggtgggagaatatatatctccatgatgtattggagaacatactggtgatgcgtcactaccagtgaaatacctgggattacctttcaccgtcggttgattgcttaaggcagacctccaaccactctttataaaatggcatgacgatggctgttggtgggaaagaaacatggcgctagctagacgcaccactcaagcaagtaagtgctttccttgcgggccaactatgtcctaataacgcttaaattaccaaggaatcctataaagtgcttgacacacaatgaaagactttctatgggtgggttaagaaaacataccag

SEQ ID NO: 45493 - DNA, 415 bp, Oryza sativa
tggtgggatgggaatactattctgcaatgataaaaggtggcaatgggttttcgcgacaattgtatcaattgttggctgtcttctcttaagataataattttcatgtccctggatcgcacttgtatcaattggatgcttgagatgctagtttgtggtacaagtgtatggtctatatcattgtatgtcatcatccagaattcagaataatgtccagttcatctatcaaagattataatcagaactgtttgttttcacataatgatgatgattggggcatcgacatatatcagtctcctctccaattaactatgctgcaaatttgccactgataccggctattccatatttctgtcatcttagggaaagccagaaagagaactgtgcctatgtttgtggtcaggtatgggtggacacc

SEQ ID NO: 45494 - DNA, 442 bp, Oryza sativa
agcttgaaatggtataactgatatactatgtgcgtcaactgggttctcgtgtgctttaccttctctgtaccatcctcaagggttgtcaatacctcctgatacaaaataaaagattaagagaaatgcaggttgtcagagcatgaacagcgaagagaacaaacgtcacacgaggcatgttcttaccacttcaccagacacgatgatgtagcagtccgtcgaagcctcgttctccaggatgatatccgccttggggggaaatgactctgtcttcatctccgcgacctgaatttaccacgttatttagtcagtcacccaaccggtaaacgcagagctattccgaccaaggcgtttgctactgcgtgttcaattaccagcggcaggacgagcttgtcggagacgccctgtaacaggtagcaactctggaccgcccctctgaacatgt

SEQ ID NO: 45495 - DNA, 352 bp, Oryza sativa
tcgaaacacgatactaaaccatgcggcaagcaagttgattttaagtagtaacactaagcccctagcaaaatcaacttaccattggtcctaatgagcatatcattttacacgctacccaatatcatactgatactgtgatacacatacattgcgacatcacatcaaacaagtttcgcgcataccttcatctcgagctttctcgtggtggccgccgccatcgtactcccccggatcttccagatagtcggaccagtccatccgcctcttcctcttcttcgggaactcatcccgctgctccccggcaccgcagggacccagtcttcctcgggcacgggcacatgcgcggcgcggc

SEQ ID NO: 45496 - DNA, 370 bp, Oryza sativa
  unsure (1)..(370): unsure at all n locations
agcttaccgaactactatagaaaaggaggagcttgcttcactctcaacacacagcaaagtggagtacaagtcactttcatgtttaggctgctctatagtagagttataatatagtaaaatagtgagaggaagctcttgaaggagttgcccaatggtcggagttttctcctaagagtcctagaggagtgctagagatgtcaacattctttccaagggagatctagaggagggtcgaagatgtcggtgtttacacccaaatttggcacctatggatgaaatacgtgaaaactgccaaagtttggaaagtgttgggtttccttcacaggaccggtcagaccgcangtatgtgggtggtttgaccacagtctga

SEQ ID NO: 45497 - DNA, 317 bp, Oryza sativa
  unsure (1)..(317): unsure at all n locations
tgtcaatntcgtagcacacacacaaagctaccatcataatcactgcaaaccatccctctcacttggccgttctcatgctggaggctcgatatactcggtccattcccacgaggacagggcggctacaaattcctgttcgtggcgatcgacaaattcaccaaatggaccgaagcaacacccacgggggaaatcacggccgataacgccatcaaattcattaaagggatattntgcagatatggattgcctcaccgcatcttaacggataacggctcccagttcatcagcgccgatttccaggattactgcatcggact

SEQ ID NO: 45498 - DNA, 216 bp, Oryza sativa
agctcgcactatctatggattagtgttacatgcgattttacatggaggcccttatgaaacggacattcacatggggatgcagagtcatttgcacatataggcctttaatgggctgataggcttggccatgtctatggcaaaccggctttaaaagccaaaggccggctgttgcgcctccttgatggcgaactcgtcatggcgaaacctctttaactc

SEQ ID NO: 45499 - DNA, 296 bp, Oryza sativa
ttaacccgctgaccctaaggggccacttatcatctttttttcatggggaccggattgctcttttgcttttcccaaaaaaaatgtcttccctaccttaccggcattagtttacccacttgcaagatggctttaaattggccatggactccttccccatgcttaagattacatcatcaagagcttttagggaaaaacattctggcatttcatgttgtcagaattggtcaaagctttttgaaaaaatcaaaactctttcaatagaatttaaagctttgatctgagctacaatacattga

SEQ ID NO: 45500 - DNA, 452 bp, Oryza sativa
  unsure (1)..(452): unsure at all n locations
gcttgttggtaaanatgagaataaatagatttctacactggccaaggtcacctgtgacgggcccaaaccctcatctttaacggcttcgcgcatggtcagtgatcagtggtcactggtgagtccagtcacctttgacgggtggccggccgtcacaggtgacacccacctctgacgggcaagttactagatggccatcagaggtgttggtctccgctagcctagggcgagttgggacctgtcacaggtgactcatctctgacggccctttaaataaaggctgtcagaggtgatggttggtcacaggtagttagaagctgtcacaggtaatctacctgtgatggccccaaaagtaaaggcccgtcataggtaggtcacctctgacggacctttatttgctagtncgtcacaggtgatgttaactctgacggatttttgntctgacctgtcactga

SEQ ID NO: 45501 - DNA, 450 bp, Oryza sativa
agcttcgtcacaatgtcatttcgccgcctgtcatccgtgagggtaattagtcactgccgcattgttgccagtcatactctgcgaggttcttcgccgtcggcagtcatcggcaagctttgacgccacgacgtcgtcatcgatcgcccatgagatacgttgttgtctctgtcggtcatccacgaggttcgacgttgccatagccggtcgctggcatggttcgtgggtaatttgtttcaatctttttatatcctgacatgtatcagttctcccttttttttcaggtttagtgtaaacaatttcccttgttaatcaagacctcaagatgggagcggatccttctaataagttgctcgttcatcctcctagcgatcaaattcaagatcacacaatcacggcagaattgctcatccaaatgctgagagcatgtctactgcacatatcaaccaaatg

SEQ ID NO: 45502 - DNA, 461 bp, Oryza sativa
  unsure (1)..(461): unsure at all n locations
cgctactatgtatctntatatgaacgaagaaaagtacttgtatttctttgtgttaacttgtgactatgcatatgcacatgtatttttagcacttgtattttgcacaagattgagatttaataatttagctatgcacaagtagtggtattgtagtagtaccgttaataacatatgttctctgttactgcagctttatgatgatgttactgtaaaaaccacagtaacaacctataaatttcgcagtaacgtaccgtgttactgcacttctgcgataatattactaccgaatcatagtaacaaggtacgattcctatagtaatataactgatttgttctcataaaatttatatagaggtagaaagcaagcaagcaataacccctaatcacatagtggtaattgggtaaatggtcaggagagcttattataaactatgaggtcatgtgttcaagtcttgatttcc

SEQ ID NO: 45503 - DNA, 399 bp, Oryza sativa
  unsure (1)..(399): unsure at all n locations
tatgcattcgggcacctaaattttattggcatgcacatanacaaatattagtgttcactagaatgcttctttgttattacgagaaacttaatgcattaagtcactataaaatattagttaaatttatttttttaactagaatgcatcttaatatggctggaacagacagcctgttttaataagggcatactcctttctggagcttgttctcaacagcggtggcaccaagaagaagcatgtctcgctcgatgctctcagcagccgcctcaactttttcatctctgtcacacttacagatgttctggcagtgttgaatttctcactaaatttcatgtactcattttcatccaagatacggtacgcaagatccaatgttcttagacctgagtcagaatactc

SEQ ID NO: 45504 - DNA, 438 bp, Oryza sativa
  unsure (1)..(438): unsure at all n locations
agcttncagctatgcaattatattgagagaccttatcacgaaaaacaaaaggcaaaagtggtttgtttaatggccgataagatgatacatgaaacttatggtgataattgttctggtgaatactatatatacctatgttgcattgtttagtgaatcttatcgtgcatatcatgtttattaactagatatgacactatttagaactggaaagacaaactggaagtgtacgtatgcttgaggtgggtgtatgagcaaagagattgtgtaatcgtcaacagcttcaacaatagcaggttaagagagaatctacgcatctttgattgggagctcaccaatgatgatcgttacaagataagcacccttccagagtggaggggaactctagacatcttcgtccacaagaccgggccatataatacagttgatgagttctgggac

SEQ ID NO: 45505 - DNA, 97 bp, Oryza sativa
accggggaccgcccaccccgtcatgccctgccagacgaaccacaaatcaacacagaccattgaagatctaacaccacatacgacggaccaacatatg

SEQ ID NO: 45506 - DNA, 379 bp, Oryza sativa
ttatatcacctgcagctgcaactaaatgaaaagaacatgccgacttatctagtccctgctgtgcactcttgcaggctacataaattacgtgacacatggggcattctgctgtattgataacctgctatgctaagcaccttttgtcttaatgtgaatggtagcggtttgtttgataccaagaggccctcttttgtggaatgggctaatgctcctacctgctagttagtccgcgactttagtctgaatgtctggctctatatagacatatggttctattgatatatcgaactaacgttatgccacatgtttataaaatttaagcaagttaactttctatattatctgtccagtgatgctctgatgccaagttcatgcctgg

SEQ ID NO: 45507 - DNA, 436 bp, Oryza sativa
  unsure (1)..(436): unsure at all n locations
tanactaactaggtgattcctcacgctttgctgcgggaattattaagcaattctcaatatatatttttcttgacaatcaaactagaactaaaaaggaaaaaataatgaaatatcacggcttatcagtatttattatgaaacacacaaatgataccactgcttaatgcgagtatatgttaaatattataaaaataatagatagatttgttaaaatattgtgcaaatgatgtgagggcgatgattggatatgctcgcatgttgatttgtagaattaaatactacctccatcctaaattggtgctagctttgacatttatactttgcaatattggacaattcgtcttatntgaaaaattagtgcaaatataaaaagcataagtcatacttaaagtactttttaaaaataaagcangtcacaaacagaataaataataat

SEQ ID NO: 45508 - DNA, 417 bp, Oryza sativa
acctgcacgcatgcaagcttggagctgcggagctgtttggttctctcaggatccaacatatacttttgacaaattccccatttgatctttaatttggattacaagttctcttttctcgacaacaagattttgctgttggttcttgagcccctccactctctctctcttccggataatatataagatgatatgctgtttattcagtaattgcagagagcaaaggcgagaatctgcagcagcacgcatgtgttggattacagcggcgaccatgaccggcgaggcatgcaaatgtcggagtggaggcggtcgagagggacgcgcatcgtcctcccggcagcgcaccgatgttgctagtgaactagaactacaagaaggtgagccctctcccgcatggcgcccaatgactccaaatttccg

SEQ ID NO: 45509 - DNA, 453 bp, Oryza sativa
  unsure (1)..(453): unsure at all n locations
cgaatcaagtactattcaattcaagttcctctatttgaataataaaacataaatccaagtctaactaacgaataggaagagatatacactactaaaaatgatttttctgtacgaacacatcaataggttgcaaacgggttataagtgtccgcgtctataaatcgacccatattttcccatacagctcctcaagagacgcgtatgcaaaaaaatcaatttttccaagtgaaccacttaaaatatccacacgtgaaaataagggtattttcacgtgcggngctcttaactcaccctcatgcaaaaaatcccccctcctcttcccactcattatttttattctcccccctctctctctctttctctcacccacttctcctcctctcctctctctcggcctcccncactcctcctcctactcctctcccctctcttccctcctgacggcgggcatcg

SEQ ID NO: 45510 - DNA, 247 bp, Oryza sativa
tgagaatttatagaagctagatttcttataactactacttctcaaaaactgaagaaaaagttgaacggtttaaagctgtgtttgatacttggggttgggaacccaacttcaccgtacggaaaacggagcggtccattagcatgtgattaattaagtattaagttattctttttcaaaaatggattaatttgttcttttaaagcaactttagaatagaaactttctgcaaaacaacccaccatttagc

SEQ ID NO: 45511 - DNA, 446 bp, Oryza sativa
ggctgaattaatggatcaggtcaagtcgttaaagcagacaattatcagtaaactaaatatacaaaactgagaacaaaactcgtactgtagctagctactctttagcaagctcacatctttacgaggaaaaactgtattaattagctaaaacatcatttttctctctaaaaaaaggtataggtcaatgtacaagtaactggaattcgattggtattcacaaatcacacattcacgcttgctttaaaaggcattgtaaaggaagattagttttcccatatatttcttgtcagtcgtcgtcatgaatttcgacaggaaaggtgaaacaggggagctttagctccatgcgagggagaatttttacctttattacagctcccgctttttcgtgaatttgatgattacgaatttacgaatgctgacgcctttcatcaccaatctacacattc

SEQ ID NO: 45512 - DNA, 392 bp, Oryza sativa
tatcgagaatgctgacgatcggacgaccgatccagcgcaaactattcggacacttggacgatggacgcaccgtacaactctttgttcagaatatgagccaacatgcatattgtctctttttcaataccgaaacctttctctcacataatatagcacacatactacgtttggcctctctcccctacacatgcatgcatgttttctaataagctttaaatgattttttccaataattatctatcaaagttgagatgcgattacaccatttattcattttaaataaatctgtataataagatatcacatgactatattctgatcgaaatattttatatttattcttttttgcactaaatggttataagtttttcacactatttagttatatattc

SEQ ID NO: 45513 - DNA, 444 bp, Oryza sativa
ctcgacgtacaagctgagatccgtgtctgtatagagcgtggaattcaacgcacttctctgacccgtgatgttcattgtcctattcacaagacgaagaatcatgacctctctagctgcaaggttcttctcagcgccatgaagacgtcacctcctatggtccagcagtcacgaatctctcttacagatgtagacaaggaacgaggagtgacagttatctcagaccgattcgttggggtaatcgacatcgatccccacgagccatcagtcctacacttgctcgaagaccagggcttatcgttgacaagcacaccacgcgatgtgtttgctatcgatgggaccagcacatccgcgcgtgctaacgcagaagaggagaatcaagtgtgtacaccggcccagcacattggggccattaacgcaatactgatggaaatcccttatgatccc

SEQ ID NO: 45514 - DNA, 400 bp, Oryza sativa
  unsure (1)..(400): unsure at all n locations
agctntgaagaatagtgtgcagttcctgtatctctgtcatcgctgcaactgtaagccttgaggtgacataattggagattccaatacagaggatttgttgaacggtggctaaaacgtctgttgagtgcgaaaaaagggattcaaactttgatgcgagttccatgctgccagtccagcgatcatgccagaaggaggttcgcgttccatccccaatatgcacagaagttaagctataatgcttcggaagcaatttctgaaagacactccaatgttgacccaaaggaagagttttcattatagactttccatggaattctttccaattcagttagcccaagtcgacttattccagaacagggtgaataatcttttcaaaagaagaagctcattttgtgattta

SEQ ID NO: 45515 - DNA, 446 bp, Oryza sativa
  unsure (1)..(446): unsure at all n locations
cgctagactcgntaatgagntaactatatggtattaatattgtattaataattttaaatataacattgtattttgtattaacataataatgaacactaactaatatagtactcactaaatatgaatagtttcgttgtaattaaaagactaagcactagttaacaaacactaagttcatgaagatatagtgatactcgcgagctagcttgataagctcacgagctaaaaggctagctcgactcgactcattaagactacgagttcgatcgatatgagccgagcttgctacgagccgatccgagccacgagttttgatgttttttgtccacccccgtatatgcgctgaatgagagtgggggctttcaatatacacgaagaaatagagttatgcagttgagtttagatttcagtagttgcaccggtcagtcttttgcttaaaccacccc

SEQ ID NO: 45516 - DNA, 426 bp, Oryza sativa
agcttgttatgacagcgagcgttgttgggattattgcttacatcgctatgacactctaatcctgtctacgtgaatcgctgaattatcatatataccgcataatctagattgatctcgtcatctaaccccatcggccagcctctatcatcgaaaacggccgataggtttagatgtcgatgtcagcctagattatgcggcgtgtctaccatcttgaatgaggtatcatctatttgcttagatcttatgtatcttttcacgcttaacacggcatcggttacgttcgacctgttaagtattggcttgaaatgtgtaatctagctctttctttgaatgctaatatacagagcatcaggggtgcagccgatcatacctgatttagccgtcttgttcactacgtgggtctggatcgactaaatctgcctttat

SEQ ID NO: 45517 - DNA, 444 bp, Oryza sativa
  unsure (1)..(444): unsure at all n locations
cgctttacactagatgatggctttccacaatatatatttccattcaaataaactcctacattagactatgctttcttctcttggaaaaattcttgccaaaataaaaaaaaaggggaaggaaaggcatggctatgaaaaaaatataaaagagaaggaaataaagtttgctcccaaaacattgagcaaagttggaaagaacatatagtaatgccccttctatattcatgccgagaaaaccaaaggggagagaaagtataagaaaaagggagattcatttctttattccatcattccacaaaatattttactttttcattttccaccacaaataaagacccttgatctagaagtataactgatgatcttcttgagtccgtatttttggctttgcaatatatatgatgcaggtatgtcacangttatccctacccagctacatatatc

SEQ ID NO: 45518 - DNA, 439 bp, Oryza sativa
agcttagtaatatatgtcgatatagcacagtatatggatacaacacaaggagatagacttgccaaaagatccatttggtggaagacatcaataagcaataggatgacaaatcaactgagatcgattagaaaaaccgtggacatcttttagcaaattcgtacaccgaagggccagaacaggattaatacgcgtagctactcaccataattggttgtctcacaaggtctcgatctgttgtcaaacagggtactatagcagttgaattcgacatgatcccacaatcactattcatcatcaatagtgatttaaaaaataaaatcatagcagttgaaaatttcttgatttgggttttatggggaatatctcacaggatcggttgctatccgtcgaagcaatggcttgtccccaaaatataaagttttgacttatgtagtagtag

SEQ ID NO: 45519 - DNA, 411 bp, Oryza sativa
cggacactttaatctcgccttcttatagctatgttgctatatcactcatcatattgttcaagcagttggtatatcactcggatcatgttatttggaggatacacaccgcatatgctatatattgatatcaagtcacttggatgagtgcgattatcaaaaccactccgttggttggattatttattccttgactatatgcttggttggtacaattatccacattgacggcggctacacccattaagtgcatctattcggtgcacctgactgtattatacagccctccacagtcttcatgattggtaaaagtactctggagaccatgacaaagatgattgaagacctctgctttggactaatctggatccatagaacaatatctttttcactgccaaagtcttaagggctact

SEQ ID NO: 45520 - DNA, 371 bp, Oryza sativa
  unsure (1)..(371): unsure at all n locations
nggtccagacgtggatagaatcggccaccatcctaagccagagccgtcgatactgcctaaatacattaactgtggtacaatgagcccaaataatcgcatacaggtgggctcctatccgactattcaggcatcacggtccataaaatacgcccaattatccgtggtccaaagtaacgttgggctggatacaatgacaaagagtacgatacaggccgtgctgacaggctgcagggtccacaagcatcacgacggacggcggtgagtaattaccgctagccttatatcgtggtgacatgtcacgtggttatacggacgcatatttaaattaataaacgtgcgttaattgtcaaatttagttccagagtcttcta

SEQ ID NO: 45521 - DNA, 450 bp, Oryza sativa
  unsure (1)..(450): unsure at all n locations
agctatttgtatagctgatgtgcgatgagatattttcatgatgnacacaactttaggttgctggcatcatattttacaaagcagtcggtatatcactcggatcatgttattcgggattcataccgcatatgctatatattaatattaagtcacttggttgactacgattatcaaaaccacttggttgggtggattatatattccttgactatatgcttagtttgttcaactaaccacatagtcgggggctacacctattaggtgcatctagtcgatgcacctgactttattattcacacctccgcagtcttcagatttggtaaaagtactcgggagacaatggcaaagatgattgaagcactcggctctggagtaatcatgttcgagagaagattatcttttcgactgtgaaggtctcatgcgctactgtgcagattatgggtaccccat

SEQ ID NO: 45522 - DNA, 440 bp, Oryza sativa
  unsure (1)..(440): unsure at all n locations
gctacatggaacttcctctgatgtattttataggatgtcttggtttttaaaaccggatctttgttatgatttttaataaacaattagtcaaactataaatataactagttcaatacataatattcccttctttactaaatgtttgacactgttgacttttttaaacatatttgaccgttcgtcttattcaaaaacttttgtgaaatgtgtaaaactatatgtatacataaaagtatatttaacaataaatcaaatgatagaaaaagaattaataattgcttaaattttttgaataagacgaacggtcaaacatttttaanaaagttaacggcgtcaaacatcttatgatggagggagtagataaattgcatcatggatacaccanattgcgtgagtggatgtgattaagtactttatagctaacaagagtatatcttatg

SEQ ID NO: 45523 - DNA, 445 bp, Oryza sativa
  unsure (1)..(445): unsure at all n locations
cacgcctgacggtactattgaanagacaatgctcggcttgttgttaatggctatactcagaaagaaggcgaagatttctttgacaattactcacctgttgctagattgaccacaattcgtgtgctactttccctagcaggctcacatggtcttttcgttcatcacaaggacggtaagacagcttttcttaatggagagctggatgaggagatctatatggatcaacctgatgggtttgtagttgaaggtcaagaaggcaaagtgtgcaaattgttgaagtctctgtatggtctgaaacaagctcctaagcaatggcatgagaaattcgacaaaacattgacatctgcaggctttgcagtcaatgacgcagattaatgtgtgtactaatcccatgatgggggtgagggagctataccatcttntcatactacaccccatctacatt

SEQ ID NO: 45524 - DNA, 342 bp, Oryza sativa
agctgtttgaaaattgctaaaatttgagaatatctttttctacttcgtattatattatttttagccaatggaactaatggaacattaattatatatttttatctttttgaccaaaggtcactgcaattttatttcattagtattattattatgattatgattcctttatatttttttcaaccagtatacatgattaaaattacctttacccgttgcaacgcacgggcatcattgctagtgtgtgtctatatatatatatatatatatatatataacctattctatacccccctccctcccaagggtcacacccacttccccctccttaccaaggcccaaaac

SEQ ID NO: 45525 - DNA, 337 bp, Oryza sativa
  unsure (1)..(337): unsure at all n locations
nggagtataaatggatcaaatgtgcattattaagcatggagttatttatttttacttttcccaagagtcttttcatatatgtatatatatacattgggctagatttttttcgtggccccgggactaccaaggccacctgtgtgcacgcgctgtccctcgccttgctagtgagccctccgtccacccgccatggcttatttccgagctccggtgaggtggcccatcccaccctccttctaacctctttgtttcgttttaccctagtcgttgaccctacgtactgttccgttgcctcatcgttgcctcccatgttcacgggctanggccatcgcatcgt

SEQ ID NO: 45526 - DNA, 464 bp, Oryza sativa
tagacaaagttagataagaaaatagagtgtatgatatgtgtactctatgtgattaagagttagacaaaataaaattatggcagaaaccaaacactatccactaaaaagtggtttgcctaaagttagatgcgataaatttagttgccaaccaaacagcccttcttctagcgggccacagcgagattcatgaacagtacaggactaccagcttgatactgtcctcacatatgatgaatctaactggaagtcgccaagtcggccaagggccaagggttatctttcttgcagctttcacaacttcggtaatgccgtacttgaccggttgatcgaggacgtgcatgcatgatgtagctaagctagctagccacacatcgcacagggatgcagcaattgaagcagctgctgcaacttgcagggtcgcgttcgctactgtatctattgcggtggcatcagggtggcgatta

SEQ ID NO: 45527 - DNA, 389 bp, Oryza sativa
  unsure (1)..(389): unsure at all n locations
ggatccttaagtcaccgcagcatgcacttctcttataaattatcctacaaaatttcggaacgttaacttttcgacgaataatgtctctgaacaaacaaaaatatggaaaaatttgagctataactgatatccatttaacaagtctcgtataactctactaccacaacaccaaaagaaaagactttcaaccaaaacgagccagtagtatttaaactagagtaggctatttattagagataacaacaaatttcaggggtctagatgcacaacaaaaagagaaaacatatccgcaacgggacgaaatttacaggagagactaactatatnttcaagggcgcgttcatgcgagggccactgccagtctcacgtcgcgttggcctcatgccctg

SEQ ID NO: 45528 - DNA, 448 bp, Oryza sativa
  unsure (1)..(448): unsure at all n locations
ctttacggacctataaaactcagcttataggaggaacttgaatcgatccatgactaccattcgattagaccataatgcttcagccaaccttgtatgccattgccgaggaaaatcagaaatctttctcttgattaatttaatcaggctcttggtagatgcctcggcttgcccattagctcgcgcataatatggtgaagaattcaacaatttgatgcccatgctatcggcaaactaagcaaatttatcagaaacaaagattgatcattgatcggttgttatagtctgaggaatccccgatcggtagataatatactccttgacaaactgtattgcatccncaaaatcgactttcttcaaggaattgtttcaccacttggaaaatagtcggttgcaccaatataaactatgcccttgcttgaagtggattgactgacgatcatataattcc

SEQ ID NO: 45529 - DNA, 395 bp, Oryza sativa
  unsure (1)..(395): unsure at all n locations
agcttgagttgtacagagtgcanctatgtctctctataaggcgcatctattggtgttcaatacgttctaagttattaaggagatgtattggttctaacacgggcgtaccgcgccacggcggctagacactatagaccatctgaagaaatcccctgctgctcacatttttacttttcctatgtgtaaatatgttaacgtaaacatcttatatctgctcgagaaaaatattgtttcagcacacttctaaatgtaatgggtacccatattgctgacaacaaaatatgcatgaattacttgcctatggtctatgacagggcaagggcagatgctccactacttatattggaatgggatccagaagatctccatgatgaacagtatcaacagcggattgc

SEQ ID NO: 45530 - DNA, 445 bp, Oryza sativa
  unsure (1)..(445): unsure at all n locations
tctggctggccgcgccatccacggctcggtggtgatccttctctaggggctatttgtggtcgccgtggttcgtcgtcgncgnctctctctctctctctctctctctctcgatctatctcctgtatcgggcatgttcgtggaggttgatgtcatggccggcgcgacggagctggacatggaggcggcggagcagctcatccagctgagcggttgctgcagcggcgacggcggcggtggcgagtcggagagcaggagcacggacagcgtgagcaagaataatcgctgcggcaagaaggcggcgaccggccgcaaggcggcggctgcggccgtggagagctgcagcaggaagagagccgcggctgccggcgacatcgacgatgtggttatcggtggggaggcgaggcggaggcccatgttccggtcgctggcggcggtgtacagggag

SEQ ID NO: 45531 - DNA, 447 bp, Oryza sativa
tgcagcatgctagctgagagatgctgtccatgaatattttatgccccaacttggtttttaaaactgacgtttcatatgaccatctttcttgttagagtactgctgcagcacttggctggaacagcagtaatcagtacgtgcatcctgaaatctgagatatttgacagttgctaattaatgtgggagaaactgaaactgtaccttgaatattagacgacactgaagaatattaatatgaggggaagctgaggcacgcatataagatcaacagccaaaactttttcaggtgtactgtccataaattgaaccaaatgaagtcctttaatttctctcgaacggacttgaaaccaaatgtccaacaaccagaaaaaggtctgggactactctgtgtctcgtcctatcggtggaatagcagaacacgtatgcaagagtagttctgctcatgat

SEQ ID NO: 45532 - DNA, 424 bp, Oryza sativa
  unsure (1)..(424): unsure at all n locations
tatccggtttgattgcgtgcgggcaatcggtttaccgctaatcatggcccagntattgctgccatgcacatgcgcgtgccttgttctggcaagtaatggaaagagaggcattgatttggttttgggggttcgtcgggttaatttgctcacctcgcgacggcgacggacgcggcggccccatggacgcaatgttgcagttggctcgccggccgccgatcgtcgggttcgggttccgcaccgcctcccgcgcggactccggctccctgaacgtcacctgcgtcgacacagatgcatctcgtgtcagatcgatcaagcacatgaatacatgcatgcacggcggcgagcgatcatctcgtcggcgagaaagaggagggacgtacgaatccgtagcccttatagcggctggtctcgcgatcggtgatga

SEQ ID NO: 45533 - DNA, 325 bp, Oryza sativa
  unsure (1)..(325): unsure at all n locations
agcgttttcactaagagcagtacaatatcttgctattagccagctataaatatattttaatgagataaataataggagagaggagcagccgactacagatttgtagccagctgtagcacaggctccaagatgcaatatgtgtatggcaggtgggaccatatattaatatnttacgagcaaccttgtataaatagcttttaaatggctatagatgaattgggcttgtgggggctataagattgaactttctctaagatcacttggggagcttacagaagtctttgaaaggcaatcatttactctttgttgtcctgagctgtatatg

SEQ ID NO: 45534 - DNA, 448 bp, Oryza sativa
tcgtatccttatttgggatccaaataattatgctacctatttgaaattgtatgttcatcgagtgaaaactttcaagctgaaattgtttcgttcgttcttctcctttaagatgtgtattacatgtgcaatttttattaaggtgttacagtacttgtgcttaactgttctgtttattcaacagcagcgttacaacatactccatacaaatgtaataactcgcagcattttttatatcaataatggaaaattttagtattgatgtaaccacactcatgaggcacgccaatgccgcgccccgtaatctagtgcctgtttaccagccaccacaagtagtgatgatacaatgttgaaaaaagaagtctgcaagtattataagttcaatacacatgggacgtagcacatataaattgagtgtaaagtcatcaacaacaagccccttatacaaata

SEQ ID NO: 45535 - DNA, 420 bp, Oryza sativa
  unsure (1)..(420): unsure at all n locations
agctngnnggaacctgagaggaacctatagtacgttccattcaagcatattcacacatccagttttacctttgatctgccttgaaactgaaaacatggcggggtaatcataaatgtgtacgaaaatgatggccttcactgtgaagcgttgtcgtaagtactcatcccacactttcaacccctcatgccataaatctgccatatcttccaacagtggttcgagaaatacatcaatgtcaataccaggctgtcggggtccttgtatcacgatacatagaagtatatactttctcttctggccaagccaagttggaagattgtacatggtaagaagaactggccaagtactatgggaactgctcatgtctccaaaaggataatgnccatcagtacttagtgcaaatctaatattacgtgggtc

SEQ ID NO: 45536 - DNA, 475 bp, Oryza sativa
ctataaaactaagcttagaggaaatcgaccgaagagccaccaccaccattgctgccgccggccgcatcgggagctcgtcgtcacaccgcctccactccaaccgagcatggggtaagcctcctcatattccctaagtgctcccctatcacctaatcgatccctcgttcgccgtagcatgctagccgtcgccgtcccgaacctaccgccaacaacagccatggcgctcgccgcctacagccttccccggccgcgccgccacctctagggtgtgcgaaaggaccacctctagcttccctggccttctgccgtgttagagtttgtgtcgaatatgtgtacgtagtcggttacagtttaagacttggagttgtactatgtataggactagaataagagtcggactctatcctatgatctctcataaatagaggggcgtgcctgttgtaactgcatggcgacttagcatatcgagagggag

SEQ ID NO: 45537 - DNA, 380 bp, Oryza sativa
  unsure (1)..(380): unsure at all n locations
agcttgcccgcaggtacaccaaacacactcttatcgggggtcagctttatgcgggcggagcggaggttctcaaaagtttccgctagatctgaaagtaaagtttcttgtgtgcgcgttnttacaaccaagtcatcgacataagcctcaacattacgttctatttggctacccaaagaaattcgagtagtacgttgaaaagtaagacctgcattctttaacccgaagggcattgatgtataacaataggttcctacgggggtaatgaacgcagttttttcctcatcctccctagccatgcgaatctgatggtaaccagagtatgcatctagaaaacaccaaaggtcgcaccccgcagtggagtcgacgatctgatctatgcg

SEQ ID NO: 45538 - DNA, 454 bp, Oryza sativa
  unsure (1)..(454): unsure at all n locations
tgacattacggaccactgggtctagtaccagggggtaccgccccgggtggaccactcggtcaggatgatccgagcggtcaaacttgattgcaatctctgaccatcgaagatattggggcgtgtcaggctgaacagcattaatctcccgttcggtcaacttttgcttccttttagactcataagccagggggccgccgaaaatatggttgagctccttgcggtggtcttgaaatcctgcctgggtgtcgccgtcgtccttcttcctcgacgtgctttgttcttcatcggagttcttccgtgtagtcttggtgtattgcttcgcanactgcttgaaacgaaacaatctttgggcacgtcggtggagttatgatggtgcgggcattgagagttcatgatcttgtcgaacgtgttgacgcgcgaacgctgttcagaagaatgagtggcggttgcaaca

SEQ ID NO: 45539 - DNA, 430 bp, Oryza sativa
ccacctgagcatgcaagcttgtagagcataatccatcttatctactatgggccaccgagatcacattaggcctgcgctccaataaaagtcacaactttatgttttggacctacacaatccaaaaagactaaactggtacgtgtgaatctttctcaccttctaagttatgtttctccaccatcaattttcgatgtaagactaaatctaacaggtgtcccatacggggctagtattacctaggctatacggtcagcgtggcataaatctattcttgcacacaaagacctgctgtgactggcattcttaataatttttttaagactagaaaacaagtatatattgtaaagcacataataatgcataccacaaataagcaatattataggaagatagctattgtattgatttatgaaacatgtatgatacaagt

SEQ ID NO: 45540 - DNA, 451 bp, Oryza sativa
  unsure (1)..(451): unsure at all n locations
ctggcacatacganagaatgcgagagtttagaanaacacacgcagagccccctacctggcgcgccagatgacggagcgtggggctcctcaccgggagaccgcgcaggcccccctttgccggttcggccgggggccctgngtgagattataagctcctagtctgtgtgtggaaggttcgcgagaatggaaacacacaagacacgggcgatgtatacaggttcgggccgctgagaagcgtaataccctactcctgtgtttttgtggatctatgtatgaagaagctacaaaagagctggagaaccagagagctcttactctctccctctctgatcgttctggatccgaaaatcaatcccccttctaagtgggcaaggtcctccttttatacctcaaggggataccacatgcaccatctctctctcttttgtggggacttatnctatcttttcat

SEQ ID NO: 45541 - DNA, 433 bp, Oryza sativa
  unsure (1)..(433): unsure at all n locations
cctgcggcatgcaagctagatcatgatccttattctgttaatataacnaannacaatgacaagaatgtgttgattcggccggagcaagccgaatctacataagaaaatggaataatcattggtgaatcaaggccaaagatgatagtgccaattaagccggatgttggtgttcttaaagagaataaaagcgaagcttctactcctaaatcttctatgaagaccaaagtgacccttgatatgcttttggagaaatatgaaaagcaatgtggcgagagagcttgcaacaatgggataaaaccaagatcaccttctatggagcgaattggttactctccaagatgtgtgcattcacctccatattatcattcaccagacataccatggtgtccctatccatgccgccgctggttatccttaaccttattactgccat

SEQ ID NO: 45542 - DNA, 427 bp, Oryza sativa
  unsure (1)..(427): unsure at all n locations
tgtggaaactgagacaaaatgaaacaaagagaggaacatgttanattcaagttagaaacaaaaaatagaataaaaaaggcaaaaatgtagataaaagagagggtcagtgaaaaagtgaagaaaatttttaccgtagtcccttggctgcttgaggcagatagcgtgatccattcattcaatgaagcaaaatcttgagcaacaccatcttgggcgacaccagctccaatgcctaaaccatcttgaccaacaccaattggaacatccgacagactgtcactcgagtttgaaaatcttcaaaacatcgatcaaaaactgctcgagctgtcacttgagtcaccatcactgctcgagctgtcttcgccagattcattcccctcattttcttcattctcccgagctcttcngtcccatcattaccttcattatc

SEQ ID NO: 45543 - DNA, 444 bp, Oryza sativa
  unsure (1)..(444): unsure at all n locations
agcttatcaaaggtcaccttattgttcttaggagctttaggactcgaagctgcactcctattctccttccaaacaccaaactccgtattctttggcaccacttcggcctacgctctccaatgatcactccttccctttagtagattcagcttgctccggccgaatcaacaccttcttatcattgaaattaattgtgttcaccggaaaaggatcatgatcaagcttcatcttggaaccatcagtaaatttcaatcatccctcatctatggccgattgaacttgttgtcgaaacacattgcaatcattagtagaatgagaatgagaatgatgccatttacaataagctcgacgcttcaattcctcttgagatggtatgacatggccttttggtaatctaaattggtnttcttggcaaagataataaaaaatcttatcacatttggg

SEQ ID NO: 45544 - DNA, 439 bp, Oryza sativa
  unsure (1)..(439): unsure at all n locations
agctnggtggactngagagaagctcaggtcatcttgccgaaagccattggaccatccaatgatgaagcctagttgtgttagacttttagggctgctagtggcactctttaggggcatgtgtacatccctttatcagcccttctattttgtgtttaagttatgtaaactctatgatggtactatgtgttggcgtgcttgggaactgcatggattattcctgcttgatatctttctctctttaagactagttgtcaaatgaattcggctatgagaaattggaatgtcctctgctggaatgttatgggtctgaattctgatgacaaatggttagccattagaaatataattgaggaaagtggttgtgctattcttttgccttcaggaaacaaaaagatcttgttttgatcattcttacataaagaagtttgctcccaaacgt

SEQ ID NO: 45545 - DNA, 406 bp, Oryza sativa
  unsure (1)..(406): unsure at all n locations
gagtactcgttggtgttgagggatntgtccaggagttgtgtacgatgtcctttgccataggatttgggactgcccctttgtatgcccagattcctcatgatcgtgatgaagagaagtgccgagtcaaagtcaccttgaacagtaatagtgaagatatcccatcagtgatgttcgaagctggaggaggaaactacattcatgcatgtcaggaggtggcaaggatcgccataggagagctccgcgatcgctacagtgattagttggccgacactgagtatcgctaccatcctcaccaaccccagggaagtgaccgtggcagctaccttgagactgaggggattgagaatgatgctaccacaaggcatttggttgagatgctgtgggctatggatgaaacccgcgcgga

SEQ ID NO: 45546 - DNA, 449 bp, Oryza sativa
agcttgacactatgggcgcggattattgttattatagattggtcactgtcaattcatgaaataagtttttcaaaaggattaaattgtcaaaattttagaagcatataattctgagcccattctcactcacgcaccaactcccatacctcactaaaatcctattgcactgtcaattctttataatattagtttgcatttaaatttttaaatcctaatggttagaagtgtgcgcctatgactctactacgagcacaccaacggtgcttatccccaaagcacaacttagatcatttttaaaaagaattatatctataattaaacaacacaagttattaaaaagagatgccataatgtcaattatagtaatatagctttcatgtgtgcaaatttgctgatggcaattgataaaaactttagatctctaaccccacaccaattataaagtgtgg

SEQ ID NO: 45547 - DNA, 444 bp, Oryza sativa
agcttattggaaagttacaaaaccgatatattttctgttagctccatgtataaaatgattatgtatgagaatatagtaccaatgaaggatttaatttggaagcttagaattcctttgaaaaacaaaatcttcctctggtatttaaagaagggagtgattctcacgaaggacaatctagcgaaaagaaattggaagggcagcactaagtgttgtttttgtaaccacaatgaaacgatacaacatctcttctttgattgtcatgtggctagatttgtttggagtaccctttttataacatttgggataaatccgcctaacaatgttgctaatatgatcgggatttggctaaagggtttacagtctacgctaaagtaccaaatctttacagggattgcgacgttgttgtgggcaatgtggatttctagaaatgatgtggtcttcaat

SEQ ID NO: 45548 - DNA, 427 bp, Oryza sativa
  unsure (1)..(427): unsure at all n locations
agcttcataattcatttgcaagtttcatattttgcagccattgcagnaagattgcgtttcttgttaatgctttgattgctaaggcggagaaggtatatttgagtgctccacccaagattgtgatcattgaccatgacaagaagagaacttttgagttaaggaaagagggacttcctgatgttggtaagatgctaatttctggattacacagcacggttgttctggtccttttgttttgcttacttttatgtgtgtgtgtgtgtgtgtgtgtgtatttgccgggtcaacaaagaagccacccacaaggggacttctgtatatatatgtctcgtcagtatacttttttttatgcaggtgtttggaacccatgggacaggaaagcaaaaacgatactggattttggggaggaagactcaacctcatgcta

SEQ ID NO: 45549 - DNA, 438 bp, Oryza sativa
gctatcttggcgtggggagaactctgtgttatactcctcccactcggcttatcgggttctcttcttggggagaactcaattctagcacaagccattctagaagtccttcgcccctcctcgatgtcgttacttcctctggctggtcaccctcaaccgatgctggacggcggaccgccttcgaagccgaggtctatcgcacctggatcgttgccccctctgcgatcaaagcgacgaaacgattgatcatcttctggtcgcatgcccggagtctcggcagctttggtggattgctcttactgctatcggtcattccgaatgtctgcctctcaatgagcagtcctttcatgcctggttgtgtgacagacgcataaggatgagtaatgaccatctgcgatggttcgacacaattgcgacactgttagcatggacaatctagaa

SEQ ID NO: 45550 - DNA, 403 bp, Oryza sativa
  unsure (1)..(403): unsure at all n locations
cgaaataaaatgccataacactcatgttaacaggtctaacacaacctagcagagcactgtgtctgtgaaaatgtgaacattcatatattatagcccccatgtttttaaagctagtcagcaataacaactcgtgtttaatacaggtatcataatgagcatcttttcatttaattttaggcatgaatgcaacactgcattactacttctgtagttctgtacggctatagctggtgtcatattggactgactacacatgtnatgacctactttatttgaaaacacaaactcgctatacctacgaaggtattctgatacaatggacaagtgtggacgccgtggtactgcacccataaagagtatcaatattggatgacgaagcctgcgcattattctcatctattta

SEQ ID NO: 45551 - DNA, 417 bp, Oryza sativa
agcttctcgggttttaggtctctgcccgaggcattgaggccaaccccgagaagatacgagctatagagcggatccgcccccccagcaaacttatggatgtgcagtgcgtcactggttgcatggccgccctaagtcgtttcatatcaaggctgggagagaaggcgcttcccttgtttaagctcctcaagcgctcggggccgttcacttggacggaggaagctgaacatgcccttactcagttaaaggcatatctcagctctcccccggttctagtcgccccggagccaaatgagcccctgctactttacttagcggcgaccccccaagtagttagtgcagcgttggctgtggagcgcgatgaagacaatcctcattccgcgcacccccaccctgtgctgacttggcccgggagcaagc

SEQ ID NO: 45552 - DNA, 337 bp, Oryza sativa
  unsure (1)..(337): unsure at all n locations
ggaactataaaactcagcttcacaatcttcagaaaacccgcgatcgacgaatatctcttnaccgcaactatacgcaaacaatcgaaaacctaaacaaaagaccaaaggaaagatcctatttagactaattattagtgccattaaatagatctcaattttacggaattactggaagtggaacggagtcaatcggatgagcggttgggaagatatggattttctaaggtttaaggattttctaatcaaagaagaaaggatttaataatttattaaacccctttctggaaagagaattgaaggagggatgtaaactatacttgtttcggtggcattggcg

SEQ ID NO: 45553 - DNA, 400 bp, Oryza sativa
  unsure (1)..(400): unsure at all n locations
agcttttcgctcgtaccgtctgcatagctatcaacggcgtcaatatcaatctttgggtatagggacttggtcatcgccaaagccaggctgctcccatactcccagcctctttgatattcttgaaatatgtatccggagcaactctcagcttgtcaaagatttcggaagcatcgaatgtactcgggccattgttattgaagaacatggcttggacgagtggggtagcaacattagcatcttcatccctggccccttcaagccttttgattntgccgacaaagacgttgaattgagcttgtgacttgatcttgtggtctgcatcaacagattcacattaatgagtcagcataaagaaaatgatggcttttgaagtattgattgctagtaccttcaacatctt

SEQ ID NO: 45554 - DNA, 279 bp, Oryza sativa
gcaatgcaaattatttttcccaacccccatacctccaattgtcaaaatatgtttgggcatggaattttcattcgtaaaacatgcacctgtagccatttatccatatggaaaaagacaaagctgtctcgaagagaataagtttgcacaactccactttcatccattgatcaaaatgtggttgggctgttgacttttatacagtataacatgaccgcggggctatatgccatatggttattgacaaagtctcgctgtttgaattttttcctcatggccatt

SEQ ID NO: 45555 - DNA, 448 bp, Oryza sativa
caagctgtactatgtggtatcacttatcatttatgttctctgcgtaactaactggaaggatggaattacttgtatgcagatgattccttcattctgaagggcagccatttggaacaaaggcacaaactgggactatcggatcacccacctcaatcgaatgcacgccaattccattccgagccaacttcagccctccagaaagtggaggtaatgcgctaagacatatatggtgattgatttgctaagtgtgtgtattctgattatcttgttgtgttgctcagatggagaaggcaaagcaggatgatggcctatctgatctaagtaacatattgaccgagctgaaaggcatggcggttgacatgggcactgagattgacaggtgaatgccacatttttcactttagatcataaaaactaatacacacttgttttttctgagatcggcgta

SEQ ID NO: 45556 - DNA, 246 bp, Oryza sativa
ttttccggcccttataagggctcacaggaacaagaccttaagaaggcatgtaaattcttgtccgtgaatgacatatttagtataactatcttagtttacgaggctaatccttgatcgattaatggcgatgtagcaccttgtactagctctttaataaatagaaaaattaatagtggtctgttcacaaagacttgttattgttgttttttgcaaacatcagacaaaagggagattgcataacgacac

SEQ ID NO: 45557 - DNA, 445 bp, Oryza sativa
agcttggtcattgctaaatgatgcttatacctctccagaccattttttaaaaaataatatccctccacatttatcctaccactaactagggtggtaatataaatagagcacagtagtggggagtatgtgggcgggcttatttcatagtttacccaaaatgctgctatctatccaaatctcaaagcgaagtaggcaatgacacaactgattagaaacataaatggatgtagaagatacaataacttgcaggaatcacaacaataaaaaattatgctcgtattaatccaagcatttattaactaagtccagcagttcttcgcctgatcctgctggtagagcaggactaatactactcttagttaccaattttacttgaggaggtctccggttcagccaattcaggcaatggcccatcactctccaagaaatccattgcttgttgcac

SEQ ID NO: 45558 - DNA, 406 bp, Oryza sativa
  unsure (1)..(406): unsure at all n locations
ataagggtaccattcagacgtatagttcacgagtgactattaaccaggaaatcaatctaacgccataaaattcagactcgaaggggtaggtaagtctcgtacgcgtgggtttacgtaattagttcatttagctttgagtactctgcatctcttgattgggtaggaaagtcttgattgtttaggttaatctctagagggctgctacaaaacgggatcccattgtaatggaatagacatattaactattctcttgcacgagtatcacaggtatcaggtcctatatatcacaaaggattccttgtggctcccgcagctattgtgactaattntccctaaactcaagaggcatctttaacctgtgagaaggccaatataatgttatgtttggcatatcactcataaatat

SEQ ID NO: 45559 - DNA, 414 bp, Oryza sativa
agcttgattaattaattagcctgttcttttgataatgaacgagaggagagtaactcacaagtgtatagatggctgtctcatctctgtttgtcatagtacacaccaagtgcaagttgcagctgtgtctgcttgcaagaatgcatgcccatgtacattgcatccccctttgcttgacaaatgacacattcagacagcctccatatcctgtttcctctcgttgctacaccctgtttttgtgaagtacatgcatcgcaacaatgttcacgaataatcctggtcactgttttgagcagtcccatagctctttttatttggattatgtaagtacgtattcatagaatctatatgctgaaatctcagctatctttagttcgctttgaaattctacaagtatagtttctcgtaatctgggta

SEQ ID NO: 45560 - DNA, 435 bp, Oryza sativa
  unsure (1)..(435): unsure at all n locations
actcagctnttctgtcaaccttgactattntgattgttagatcatatccttgcaaaacacgattctgaggatgtttcaccaggaagcagaagagccgacggacggcgagggtgccgctggaaagaagcaaggaatggcgcgcgattccgatgaggtttcaccgggatgcagaggagctgatggacgatgctctcggcggtggaaggaagcgaggaatcgcgcgctttctatgaggattcgccatgatggggagaagccggtggatggcgcgcgcgctggcgggaggaagcgagtaatcgcgcgcggaggcgagcgcttccgaggaggtttctccaagatgcacggaagccggcgtttggcagcgctggtcgtcattctcattttgctgcaatgcacgcacgtggcggatgacagttgctcaaagcgatgtcatat

SEQ ID NO: 45561 - DNA, 403 bp, Oryza sativa
agcttttgtgccatgctccaccaaagttattcgcacatgctctcaacatatgctctagtatttgattgactcgctcagtctggccatctgtttgcggatggtaagcagagctgaaattcaaccgggttcccaaatcttattgtaatttctgccagaactttgaagagaattggcttcctctatcagacacaatctttttaagtacaccatgtaaacacataattcttgccagatagagttctgctaatttcttccctgagtaggcagtgcgcaccggaaagaagtaagccactctggtgagtcggtcaacgactacccaaatagaatcatgccccgatgacgtcctgcgcaaaccggtgatgaaaatcattccgatttcttcccacttccattctggaatctg

SEQ ID NO: 45562 - DNA, 449 bp, Oryza sativa
  unsure (1)..(449): unsure at all n locations
ttacggaactataaaactcaacttgtggttgtgcatctggtcattagcatgttgattntatatgataatcacatgagtaatttgctatctgattgaatacaacgttatcaatttaattaaatggatgtaagtgtaacaatggtttactacttctctactttcaaaaataactgttgattggcctgactatccaagctctaaaccatatgcacaaaaggcagcaacatgctgaaaaaaagtcgatatgagtgacaacatatgttaaatagagatatattataaagaaaattacaattttggttgtaaaaaccacatgacaaatatagaattatagtggtaattgtatattttagtgacatgtatttcaataagcgcaattggagaatatagtttgtgtataattatatttaattcattaattaagaggataatacgctagtcatatcaca

SEQ ID NO: 45563 - DNA, 441 bp, Oryza sativa
  unsure (1)..(441): unsure at all n locations
agctagactacccaatcacaagcacaccgactatgggtttaccccattaagttctcatcctagaagaagcaatcggaactcgcatcactcaaagactaagactaaacctgcaaacaaaaggttatatcaacagcaagagtcagtacattaacaagttaatgtactggcaagcacaagtcaatcctactatactacatgtaaggcatatattcaaaggaaggcaatatgtagttcaatttcagcataaagcaagttttgttttgcaattcttttgtaaaggagttgatgcttcaattaacaaagacaagttttaagtttcattattaacttcttcataattccatcataaataatctcttattgcatacttaacaataagtcataatgtatcaccacatacacaactcaacacanttatcaatntcaaaccaatgtcacatg

SEQ ID NO: 45564 - DNA, 406 bp, Oryza sativa
gtgcttccgacattcaacgtaggtgtgttggattacaaacttgtgacagtgctgctgctatactcaaacatcaacgcctactgtcgtctcggagttttaccagtgtggaacctggtctacacttgtccggcaagcaagaatgccgacagcaactcactattggtgaactcaacaacaacagtgctgtcggaggttgctcttcattgatgacaaagcattcccaacaagggatttcaatgtgtaaaaaaaaaaaaacaagggatctccgacaggcggctattggcaaccattatttgtaacagcttaggtgtgatcccgcacaactccaagctgtttgagatagtgcgatatggtgtaccgacttgcgttgtacctttcatttgtatcatggcctaagagttttctt

SEQ ID NO: 45565 - DNA, 440 bp, Oryza sativa
  unsure (1)..(440): unsure at all n locations
agcttgcccgcaggtacaccgaacacacactttatctgtgtttagttntatgcgggcggagcggagactctcaaaagtttccgctagatctgagagtaacatttcctggttgcgcgtctttacaaccaagtcatcgacataagcctcaacattacgtcctaattggatacccaaagaaattcgagtagtacgttgaaaagtatgacctgcattctttaacccgaagggcattgtcgtataacaataggttcctatgggggtaatgaacgcagttttttcctcatcctccctagccatgcgaatctgatggtaaccagagtatgcatctagaaaacacaaaaggtcgcaccccgcagtggagtcgacaatctgatctatgtgaggcagggggtaagaatccttangacatgccttgtaacgtcngtgtagtcgatgcacat

SEQ ID NO: 45566 - DNA, 458 bp, Oryza sativa
  unsure (1)..(458): unsure at all n locations
cgttctgtttctcgaagaactangagccagccatggtggcttgtacgcagcaatggccgctagaaggaactggtccagtccaatgtgcaacanaatgtaaatttatatggtctaaagtgaaaacagtactatatgcctagcccaagttgcaacaagggtaaaaataactggcccaatgtgtaattgactctaaaatttttactcctgagtaaatttgtgagtaaaatttttactcatgatgatatggacgaatctcagccgttggatttgtttccgttggatttgttttggaggaacgagattcaccctatctcacattatgacatgcctaccctatgtcacccaatcccaatccatcgcacacatataaaaacacatttccctatgcgaacagcttaaccagtccacctatatggcatgtaagtatccgtcagataaaattaatacatggtttcata

SEQ ID NO: 45567 - DNA, 433 bp, Oryza sativa
agcttctcgaggcttctgcggcagcggcggcggctgtggctcaaattttcgccactcgcccaatctgtgctcgaaattgttcgcgggttccgctgttgggttcactgcttttcgtttgcaggaatgggttccagaagatggacaagatcaaggactccaacaggcagtccaagcagctggaagatctcaccgggaagatgagggagtgcaagcggtaggtctccctgcctgcctgaacactactgtgtgctctggtgatgcacaggctcacgcctgaacccatggtttagtttagcttctccatctgtgcgccattgatgttcctggcttgaacaagcaatttagatctttttgcatgtggcgcatgagttctgcaactgctcttgctgttagatggagcactaatgtcttgatagatttgtgttaatgtgat

SEQ ID NO: 45568 - DNA, 446 bp, Oryza sativa
agcttacacccaagaacacccaataatccacatgtattaactcaagtaattggatacaaagtagcataatggaattggggatcggggatgagcattgtacattgggaattagagaaaatagactgggaattggagaaacagaagtggggattcagagaagaacagagaactgaagaagatagaggcctcagccattcattcaaatcatcgatgcctgttctccacaaattgaatcctcaaagagattcttggaaggctatattaactcgctactggagtttaagcagtacccccaacctgatctagccaaaggtaaacacgtggtcagcctgtacacaccaaaatccaccatggggcgaagcgaccagaacagctacgtcgatgcgcagtgggttaaaccgcaagggggatggatgaaaatcaacacggatggatcgtgtgacagt

SEQ ID NO: 45569 - DNA, 446 bp, Oryza sativa
  unsure (1)..(446): unsure at all n locations
ctgtacctgttccattcctcagaaatggaacgctnttgctataagatgcatggtcaaatgtgcttgctctggttaattgacctgatggatcaggggaccttttgttagctgatgagctgttggatggggtcttcactggacatctaataaggccttgtctgttcagtatcataacacacgctntagaccttgatggcatcctgaaaagaatcgtttctccagtttctaacttcagattatctccatcctgtcgtcatgtacagtgtgctagctacttccttgattttgatctttatcttcaagccatgggaagtttttaacttcagattatctccatgctgcatcttatatgctgtcgcaagtgtgattggcacaggctgtagaaagaaaatatcatatccgcactggtgctaacagcatattgtccatagaaaagtttgtttgac

SEQ ID NO: 45570 - DNA, 431 bp, Oryza sativa
  unsure (1)..(431): unsure at all n locations
agctngactcgaatcagagtagaattgtgtgttccaacttggttctgtcactttcagaaaaagaaaaagacagttctgtctatttgcctgaatggtttatttttactgattctccccttttggattaaatacaagtcaacctgttcctatacatcatttttagccatgtgagaaaatgctctcctttgtgaatcattcaaagttaatgcaggtaacagtttctacacctccaaaattagagcaatattggcagatattagatcaatgaacactataggcgagttgcaaagtgcatagtacacttgtttgttttaaattcaaatagaactggttggatgaagctactaatgaaccctttcatgtntttatagggttccatatcatatactccggacttggcatccaatcgtcaccgcccacgatctcatgca

SEQ ID NO: 45571 - DNA, 444 bp, Oryza sativa
  unsure (1)..(444): unsure at all n locations
tcctctaagctgtagatgctgatcatatcagctgggtatgcctctttntactgctcattgatgcatgtattggcatttagagaaataaattcttgcaacttgaaatattctaaacaacttactccttcccttattttgtagggttaatacctttgctcatttgtttgtcatctgttgctccctagttaattaccactaatgttgcattgaggtcagggttcatccttgctatagtatgcaactatatactatggttgctgcttgatcttctgagtgaaccaagatccaacaaaacataaggcgccttggctactgctcaattgactgcgtgcatatatgtgctcgcgctaaatcatagactaatcaattggaagtggtggcaacacctgtcttgtgactggctgtccacaggataagctacacaagctgacttaccgcatatga

SEQ ID NO: 45572 - DNA, 425 bp, Oryza sativa
  unsure (1)..(425): unsure at all n locations
agacttcggaagcctctcgatccgctctctttattcttttcacccgcccgatctgcctggtgccctcccgtgatctcgaagcgtcgagagctagaagttgatacttgatcctaccttgtttccgaggatccgagcggtttgactgttaggtttcggtttctgggacgagaattttgtaatcgaagcgtctaggcaataggctccctggttccgaggtagatcgagaggaatctggatccggggtgtgtcgcttgagcagatctcggtgcgtggatctagaagcttccagatcacgagtttctagttcaataaagctcgttntcttactttggactangaagtactgccacactggatggtcaattgttccgtttccgcccttctctgctactggttagtccgtacctgaatcccagtgtggcttg

SEQ ID NO: 45573 - DNA, 461 bp, Oryza sativa
  unsure (1)..(461): unsure at all n locations
tggtgtcaacgagtgatactcgtggaccggatgagttgattatcggngtatgttggaacgagggtctacgtagtacgacatcaagcagacaaaagacaaggattatactggttcaggtctcttgtcaggtaatagtcctagtccagtttatatgagattgatgatgacgagaacagattacaaagagagtagacgaaacagatgataccggcgaaatcgtagtcgatgagttcgacgagacctcccggcaacttggctccgcatactccggcttcgtaaactatggtgggtgtgttggcgatgaaattcgatgccttgcacccctccctaggagtcccttttataccgtggatcatcttgacccccaataaagatatgaggatagttgatctagtacggtataacanaaattctatcccttccgagtaggactttggaaatcgcttcactcgtagagatat

SEQ ID NO: 45574 - DNA, 433 bp, Oryza sativa
  unsure (1)..(433): unsure at all n locations
agctntatggttacaatgacaagctgtccatcctgctgtccagtatcttggctgcctctcaatctttttctccaaagtcagataggtttgaggtaacattgttttgaaatataactgaaatatgacttgttttatgcaattcatgatttattattttgaaagatgactgatctgatgtagagaaaaagtttggattatttctttggaagtcttggttttctgtatctgttttcttgatttttcaaaataaaagtggaggaattaacatgaagatattgaagttgttgactattgacatacaaagattagagagaatcacatatcatgtatttctgtccatcttacaatatttctgaaatataaaacacgttactttgatttctgggaggatgagcacattgaatgaatgtagcctaggcattgggatttagat

SEQ ID NO: 45575 - DNA, 475 bp, Oryza sativa
  unsure (1)..(475): unsure at all n locations
ctattaggaactatgaaactcagcttacatatgcatggttggttntactggtaaaaaatagtgattacattcgtgcgattntaaaaaaagaacacttgagtgacatatagcttgccccatgcagcttagtacttagggtgcattcgaatatgcttatgaactgagctttttagcctcacgcaaaacataacaagttattaccgtataattaattaattaattaagtattaactattataaatttaaaaataaaattatttgatttcttttattaaaatatgtatatataatacttacaaaatgtagtttaggaaatcgtactcagggaaacgagtaagtaattaattaaccagaaatgggagccttaattaccagtgagtacaaccaggtcggtggggctgagccctttcccggcgaagctagtgacgaagttacccacgtcggtggtcggtggatggaggttggtgttcgccat

SEQ ID NO: 45576 - DNA, 434 bp, Oryza sativa
  unsure (1)..(434): unsure at all n locations
agctntacggactcgacgagttcgactgctttgttttcattcctgatctgaacaatgtcgtgatgcatggcaacagtatcgagttacctgcacacgtgctcaagatgctcgacgagaagcgcaaatgtgaactcactgccgagaaggatgacgcgtaaggaaccgtaagataacatgctttagttctaattaattgttacaaggatgtctctactaattaagataaaacaacggtaagataacaagctaactagcatcattctaattgtttcatgcagcaagagtagccttggcttcatctagcaaagatggttcgcaagggagagaagttggcagccgatcttctctttctaatgtttctttatgcatgtgtggaatctaaaaattgttgcttcatagcttccatcagaacactttgtagtgttacaaacatt

SEQ ID NO: 45577 - DNA, 467 bp, Oryza sativa
  unsure (1)..(467): unsure at all n locations
tcctcctgaagagcngacaaaccactcttcctattcttgcgcctatacctcgatagcatttactctaacacactggtttcatcatatgaaccaaccttgtgttccccattacccaagtgcttatcacccttctcttcttcatcacgcacctccaatccctcgctcaactcgtcagccaactcttcagcagcatctgaaaattcactctcctctgattcctgtgcaggctgaaaatcaaaccccacatcaacttcttctggctcctcttcttcagcatccttcatagcttcttcctcttcttcaaacaccatcctcagctcggacaccttatctctatgcttctttgactgctcatgggtcttccactgcttgtcggacttgaacttcttattacacgccacgcagtacaggtccttcttcctcttcgcctcgtctcttctcttcgtgcctaaacaccgccgctcatc

SEQ ID NO: 45578 - DNA, 456 bp, Oryza sativa
  unsure (1)..(456): unsure at all n locations
tacgtgactgtttaggagtatcttagtatagaattcaatcttataaatgtagaanacccgggaataaacatctaatagctcacttcataccctgttttgcttcatcatcagctttaaccgtctcgataacaaatggttgcctgacgccctgaaaattaaagagaaaggcacaattaatcttcatgttcagatatatgtactagcatagtcttcatctaagttacattgaaaaaaagaagtctctgatagttcgtgaatcgacgcatacactgctaactgtaggtgtactctccaggaggccctctactaggctgagcatctcccttccacgatcattcctaaaggaatgccataataccattatgatcgaaaaaaaaatcaattcgctgctcaacagaaactggctacaatcaattgccatgctccagcatccccatcactctacctgactgtaat

SEQ ID NO: 45579 - DNA, 439 bp, Oryza sativa
agcttatggaatgggttgtgtaattagtgtatgtttaatactccaaattagtgtccaaacatccgatgtgacagggacttggaataagtcctgaaaaccaaacagcccctgaatcacgtccatcaagcaatgcaggagaaatcaggagcagcagcagggttgaagccattgatctattccgcacgcatcccgaggaaggagaaaagtccaagccttcagcagccttctcggttctattaatgtgaattaaatttcacgttggaattgttatgtgcacacgcccttcgcaccagggatttaagccttgcattgttttggttctgttcaggggaacacaaattcacgttccaaattgctatattcacaagccagtctaccagtaggttctgcacggagatcaactctcgtttatgcacacagagtggttcgcgtgtctggt

SEQ ID NO: 45580 - DNA, 390 bp, Oryza sativa
  unsure (1)..(390): unsure at all n locations
tcatcanaatctaatatatttttccatgacaatccacccattatatttgcatctattttttgggctactatctcttcaaaagatatgtacactccaggaagctttccgtcaaaaacaacatatatgggtttttgtggtattacttcattattttctgatgttggcattatatcattcattagatggaaatattcagcaagactgtttaatattgatagcatatagcctttttcttccctcttattattgtattgataccagaaattatctaaaatatattcttggactttatccggcacgcataggaacaccacatgcatttcgtgttttcgcgcgcgcggacccgccgatctaccgatcggtgtggcgtggcgtgtggctgtgtgggca

SEQ ID NO: 45581 - DNA, 432 bp, Oryza sativa
agcttgtgcctgtttggagagatcatcatatattattaaagtatgccgttcgcggtacataaaatactcagccagggctgctcccgtataaggagcgaggtattgtaatgtagcaggggaatccgccatttcagctactacaatagtgtattccatggccccctcttcatggaaagtagttactacttgagctacggaggatgctctttgaccgatagctacataaacacatattacatcttgccctttttgattgagaattgtatctgtagctactgctgttttgccggtttgtctgtccccaataattaactctcgctgaccgcgcccaataggaatcatcgaatcgatagcaataagccccgtttgaaggggttcatatacagaacgcctggatattatacccggagcaggagattcaattaagcgaga

SEQ ID NO: 45582 - DNA, 466 bp, Oryza sativa
  unsure (1)..(466): unsure at all n locations
ntaacaatntatggactagttgtggcactggcgcttttatttgcgaacccttttgtttaatcctaaaaaagaaaacgagtcctttagattagatactttcttctttttttagtaaattggtatttgcttctgcaattccaattatatcaatactttactcctaatttattactcctagagttttctatttatggggacagacaataccccaccccacgaatagctgatttgaggatgatcaatttagaggatatgttcgccgtcttgcttcccgccctttgtttatggcagtggaaagtatttttccttttattatangaattttgggaacatttcaacaaaggaggtctttcacaggtcaaacgagatctaagacttaatctaaaagaaattactaaattgaatctatttctattataaaaaattgcattaaaaaaaccgatcaataagggcgagcgaagtaagt

SEQ ID NO: 45583 - DNA, 413 bp, Oryza sativa
  unsure (1)..(413): unsure at all n locations
tttaatgtacttacagatggctcttccatagaaatatcctctgagagagtaatatcttcgagaaagccatttccactcccaggaggcttggtcacatctttattaagaactccagcaacaggagccatgaatgacaagtaattgcctgcaagtcagccagataacaggatttaaggcacatggaatttctcatcagtgaatgctttataaaaagaatgacacctgttaacacggaattgtaaaacacacgtgacttttcaagcttgcaataatcaagatgtaaaggattatactcactttccaaattctggagagctntttcagcagctagtacttgggctccatctcttgtttntccaatggcgcacccgattttttcattactaaatagaacctggaacatcatatgtata

SEQ ID NO: 45584 - DNA, 441 bp, Oryza sativa
  unsure (1)..(441): unsure at all n locations
taacttagtgggtgttgattgaanaaataagttcctctcatccaggatcttagggaggctcttatttatgcacgtactggccagaacatatcttaattaatcttaactttatgagcctttagagtatggatccatgagcaaaagcttagcttaataataattcgatcctgggacatatctttcacaactatgtcaatgtgttaggcagaaaacacataacatgttgctactagaatagaaacctgtgttgcacacagtataattgagtggtttacaccttttgagtggtttatgagcgctatttaccactcttagttctgggaaatatgattaatcataacatgctttaaaatctaactgcatcgtcgactatgcagtaagagagtattttggagctctccatgggtattactcccctatgtgtggatatagcttaatctg

SEQ ID NO: 45585 - DNA, 440 bp, Oryza sativa
agcttccaagaaccctcatcggtggcggcagcgcactcaacattcttttcgccaagactctggaggacatgcagatccctcgtacagaattgaagctgagtaatgcgccctttcatggagtcatcccggggttatccgcaacaccactcggccagatcactcttccggttactttcggcactcgggagaactttcgtatagagaacgtttgtttcgaagtcgttgattttgagacagcgtatcatgctatactcggacgcccggcattagccaagttgatggctgtcccgcactatacctacatgatgatgaagatgcccggtccccaaggagtcatatccctacgaagcgacatcaagtaagccgtcacatgtgacaaggaaagttgcgagatgggccagacccatgagatcacgctcgcccgagaagaaatctgactg

SEQ ID NO: 45586 - DNA, 443 bp, Oryza sativa
tggcacacaatagatgttcccgcaactatcccaacaccatactgatattgtgctgatggtcttcctctgattgtgagtatatcagaatgtcatcaatgaaaaccacaacaaacttatccaagtattccatgaacactctattcattaagtacatgaagaaggcaggtgcattggtcaaaccgaacgacatcaccgtgaattcatacagcccgtatcgcgtggtgaatgcggtcttcggaatatcttcttcacgaatacataattggtgatatccggaacggagatcaatcttggagaatacagtggcacctttgagctgatcgaacagatcatcgatccggcgaagagggtactctgttctgatggcgacttcatcgaaagctctgtagtcaacgcacatcctcttcgtcttgtctttcttctctacaaaaatcacacgagca

SEQ ID NO: 45587 - DNA, 444 bp, Oryza sativa
  unsure (1)..(444): unsure at all n locations
agctaggacttctttccataatcgacagagagactctccaacagaagagaaccaagtcctgatccagttccaccaccaacagcattgaacaccaagaatccctgcagcccagtgcagttgtctgccaacttgcgcacacggtccaggcatagatctacgatctcctttccaactgcattccacaaacaatgagaacaagacacatgcacagttgcaatagaataacacttgtatgaactctaagctgaattaccagtgtaatggccacgggcaaagttgttagcggcatcctccttcccagagatgagctgctcagggtggaagagctgacggtacgacccagtgcgcacctcgtcgatgacagtgggctccaggtcgacaaagatggccctgggcacatgctngccagcgcccgtctcgctgaagaaagtgttgaacgcatcg

SEQ ID NO: 45588 - DNA, 460 bp, Oryza sativa
  unsure (1)..(460): unsure at all n locations
cctcgtcgatgtccatgaaggcgagtgcggagcccacttcgttcactcaccttggttggcaaaggcctttcggcagggtttctattggccgacagctctcaacgatgcggtcgacctggctcggcggtgcatggcgtgccagtctcacgctcaggcaaacccatcagccggcccaggccctgcagaccatacctctttcgtggccgcttgctgtctgagggctcgatatcctgngtccgttcaagcgggccccgggcgggttcgagtatctgtatgtcgctgtcgacaagttcactaagtggcccgaggcttatccggtcatcaagatctataagcactccgcgcttaaatttatcaggggcatcactgcttggttggggtgccaaccgattattaccgaaaccgcacccattcactagtgactcttcgtgacactgcgaaacatgggcatcatctctgc

SEQ ID NO: 45589 - DNA, 439 bp, Oryza sativa
  unsure (1)..(439): unsure at all n locations
catcaagcttaacatttcaccccagctgcgagcataggactttgcaaatcaaccttgcganagttgccccctcattcctcaggccgaaaggcatcctgaggtggaagaaggtgccgctgggagttatgaatgcggtcctggctctgtcgtccggattcatgagtatttgatggtacccagagtatgcatacaaaaaactcatgtgttcgcagccggctgtcgaatcaaccagctggtcaattcttgagagcgagaaatcatccttgggacatgccttgttgaggtcagtgaagtcaatgcacatttgccatttgccgttcgacttcctgaccggcacagggtttgccagccactcagggtggttaatctcttagattacgccggccttgagtaacttctacacttctgctgttacagccccctagcgatcagccgacat

SEQ ID NO: 45590 - DNA, 276 bp, Oryza sativa
gcatcatagtacaaacagccggtatactggatctatatataaggatcacaccggatacgctatagattaatattaagacactcggctgactacaataatcaaaaccactccaggtggatggattactcactctgtgactgtatgctgacgctgatcaacaaaccatatagacgtgagctacacctattaagatcatctagtcgatgcacctaagtccaccggccatcatgattcagccctcacaatctccacatttggtgggagtactcgggggac

SEQ ID NO: 45591 - DNA, 452 bp, Oryza sativa
  unsure (1)..(452): unsure at all n locations
agcnttataaccaaacttatagaggccttttgaatacttgaaactgtactgagtatgccttcagaaagcaagtatggcagtacaatgttcattgtttcatttgcatcagatgaagtagtgagtgacacatcacagagcctaactgtcaacaagcttacagctcggcacaaactgtcaccagcatttcgcacagtttccttaatatcatccattgctcggaaggtggtaatccatatttttctcaaatgcttagaaaccttatcaaagggaaagataagcaatattttattctcaaaataaatccaaaaccagttattcatagcttatgcaaaacaacatagttacataaattnttttttaaaaaaatcaaaattagcaaaacaaattaactacctgaccatatcttcgaccttgaataatgtctgcaagtgcacgacatgaagcttcacgtg

SEQ ID NO: 45592 - DNA, 469 bp, Oryza sativa
  unsure (1)..(469): unsure at all n locations
taactacctgngatgccatcaaaggcccggttcacgctatgtgctagaggagccgacgctagtattcttcgactgtcccagtacagcggaggtgggatagcattctcgtagtattcttggaacgcaccggtggtccaaaacgaaggttgacgaagttggcgaagcgcgaccacgttaggacgccctcagtgcattgagttggtgataccattcacgtgctgcaccggtcatgtgatatgaggccagccacacctcttctgctcttcttcctccaacatctcctgtccctgaaaaaactgctcagtgattgagccagtttaacgggtcatcttcatcgtcgtgcgtcaaaaaattgagtttgtggtagcatgatgcaccgcggtgaccgcggcgatcgtcgtgatctgccggagatcggtcacgatgcttatgtgggggcgaacgatctccttcctgatatttcttcatg

SEQ ID NO: 45593 - DNA, 419 bp, Oryza sativa
agcttcgcagaaccctcatcgacggtggcagtgcactcaatatcctcttcgccaagaccttggatgacatgcagatccctcgctccgagctaaaaccaagcaatgcgccttttcacggagtaattccaggattatccgcaactccactcggccagatcaccctcccggtcacctttggcactcgggaaaacttccgcacagagaatatcagctttgaagtcgccgattttgagacagcatatcatgccatactcggacgcccggcgttagccaagttcatggccgtcccgcactacacttacatgatgatgaagatgcccggtccccgaggagtcctatccctacggagcgacatcaagcaagccgtcacatgcgacaaggagagttgcgacatggcccaaacccgcgagatggcgtct

SEQ ID NO: 45594 - DNA, 436 bp, Oryza sativa
acccgaactagaagaattcagatgtggcagctctcaacaaatgtgaactatatgtggactcattacgttgctggtcaacagccccaatgaaagggatgtccttcagctgcaaaatcgcagggaactgtggtggatagccatacttctttgtctgctttgctgccttcacatccaagttcttgatcatatctgagctattagcggatgcaactctgtttccctttgagtccatcttatcagccttggaatcacctggtatgcgaggcgtattgttcttgttatgaccgattccagaatccagaactttacttagcttcacgtaacatgaatcacatacgcaatatggctcttcacgattatgggacaatgctgctcttagagccctttttgaactgcacgaatggcacgtgactaatccacacgtataacagttgtg

SEQ ID NO: 45595 - DNA, 472 bp, Oryza sativa
  unsure (1)..(472): unsure at all n locations
ctaccaactgccaagcctgtactcctgtccggtttttattggatatcgtttagagcaagtactataatatctcatatgttgcccctaanaatgccacattagattgggtgatgaggtagaggagagaagtggagagagagaagatgagccacccctaaatcaagagataacctccacacaaatttcaagaagtgtgtgagagtattagagatattggtatttgtgtgttagaggtgatacattgtatgtgttgcctcttaattcatgagtgaataaaatagataaatttagaggtgatagtcacatctaccatagcacttgcccttagaacagcgacacggtcttcanaatataactttgacttcttgattctataaaaaaatatttattaaaaagatataacttttgacttctcgcttctataaaaaaacatttattaaaaagtaatatatgtatatttttatgaaagtat

SEQ ID NO: 45596 - DNA, 435 bp, Oryza sativa
  unsure (1)..(435): unsure at all n locations
agcttcaccgcactggagcgggctaaccatggatgaggtcgtcgggaagccgccctgccggagcgcgccgaggatcggcggagctgccgccgactgccaagacttctatcagttctcatgccggaggtcaagcatcatgcatggcgtcgaaaccagcggatgacgatggaggcaagtatggctgcagtacagaggaaggacgacgggaggacggcgagccactgctgttggatggcaacaagctagctaatgcatgttgattaagttaattattgtggcaacgtggccaaccaatcggaggacgacatgtcatcgctgctacagtgccatgcacaaaccaatgcgtgggctgaagaagtcctgttggtttttcttatttgtcccanatgagatgccgagctttgattaaatcccgccaccgtctacatcaaccat

SEQ ID NO: 45597 - DNA, 380 bp, Oryza sativa
ccggatagatgacctaaacaacgatgccactgagcaaaagtagtattggctgaagtagctaacgctgaagcagtggaaccgactgactggctggtagaagcatcagaagggagatgtagccaatcaagctcccaaagacgctgagagtcatggcgcctaggaccagtccccaccaggagccctgtgcgacgatcctggacacaacaagagtcagcctcaagtataatccgacaaccatgatcagtgatctgaccagcggacataagctgcatggttaacttatgaacatgagagacagtaggaactcgaaaggaagaagtagaaagtgtgccacgatcaacaacaggaagtgaggtgccattagctgtctgaactgtgag

SEQ ID NO: 45598 - DNA, 446 bp, Oryza sativa
  unsure (1)..(446): unsure at all n locations
agctngggagcttatagagtcctagattcttagttatggcaggatttacaactggcgttacctcttgttgacctgttgaccagcagtgatctggggaagatgcacaaatgaaagctgttgaaacaacaatattcagttaggaaccaaacccaagaccccaagacaccggggccgtcgatctccccaagaccccaagacccctatagtgtgcattgatctaatatctgccattattgctctaatttcagaggtgtatctaacattgatggtgagcttctcgaattaatttctacacattgtatttactgtgtctaacattgtatatactgtgtgttataaaacaaccatgccatntaacgacgccaaaacaacatattgaatttatttgacagttctatntgatcaatntgagcagagggactattagtactctagcatgtcttact

SEQ ID NO: 45599 - DNA, 470 bp, Oryza sativa
  unsure (1)..(470): unsure at all n locations
tactgctaaactataaatgatcagtacactgtggtgctttatgttgataattaataacgcttgtcttatcatgttcgatcaataattntcatcgtaagatcctaatgatatcttctgatcagtgtagtgtatatatactataaaatgggcaagataatgcatcttgctaagagctaatccactcatcaatgtcatagtaaaatacgacgcgttaggttgccagtcatattttgtcatagtttactatgtccaagattatataggtttcactaacttagcaactactccattcgtttcatcttatcaatcgttttgacattttatcaaatctatctataaaaataattagcaataatactaaattagtttcattaaatataacattgaatgtantttgatatacatcgttctcacgattgtcatcaatcataatacaatgagcgagataataccaccatctgctatcacta

SEQ ID NO: 45600 - DNA, 435 bp, Oryza sativa
agcttaatgtttgcagtgtcataattgctaatcccccagcgttgagaaaattgcaaaattgggactgcaaactttggggctttgctgttttgacactccgagtggatgataaatgggcccatctgtgtctatgaaatatgggtccagtgtcattatagcaaagcttaatgtttgcagtgtcataattgcaaatcccccagtgttgagaaaattgtaaaattgggactgcaaactttggggctttgctgttttgacactccgagcaaattaaacatgaggatgaaggaaaccacaacgggaagagctaagtatccaagcaggaaggtagaagggtgcaaactgaaatcatttgtcaaccaaatagttgggcaaagccgcaggtaaactgtgcgaaagtgaatacggatggagcttttgttcagcagaccggggaag

SEQ ID NO: 45601 - DNA, 470 bp, Oryza sativa
  unsure (1)..(470): unsure at all n locations
tgataaaagctnttaagaaatcaaagacttggttagaactatcaagcacagcataaatacaccagcattgtacaaattaagcctccatttgctacatttacactcagtcagaatcagtcttttcatcatcagagttattattgctcggctgaaagtcgttgttgcggaattgctctacaacatcacttgcaatcttgtcagctgcattttgagcattactgataagatcaagagcagcttcttcgcttgtcccgtctgcaaagccatcaatggcgtcaatttcaatcctcgggtacaaggatttggtcatcgccaatgccatactagctcccatacttccagctttcttgatattcttgaagtatacatccggtgctactctcagctngtcaaagatttcggttgcgtcaagtgcactcggaccactgtcattaaggaacatagctnggacaagtggtgtagcgacattg

SEQ ID NO: 45602 - DNA, 394 bp, Oryza sativa
agcttaaagccatgaatcccttttgtgcatatctggatctggatcctgcagaacaaacatataggatgagtagtatctgatgtaaatataatactcgagaaaaataaaagtattttaaaatgtttataaatatgtatttctcctcctgtcaattttgatttccccgagcagatcactcattacgtttaaacgctctgtccgagtagtcatagcccccaagcaccgggagtcggcctaggcacttcccaaacatgcatatgagtgacatgagttcgtcattaatggaacaaagtttcacgaatcagaatttactactcgggtactttttgtaactgtaagagcagaaaataaattatcttatctatatgcttttgatttattccgattaatactt

SEQ ID NO: 45603 - DNA, 246 bp, Oryza sativa
cccctctggtaacggtttaaaacctctaactttattccacttgatctcacgttgacaacgtggtttgaggtccctgactctgaataacacttagctatttcgtattacgccattgccacaattgtgttaggccgtaaactaagtcggggatggaacaaattagagctttcagcaaacctcactctatacagcccgaatttttcttcccagtcctgattttttaaccagggtacctcacagctttaa

SEQ ID NO: 45604 - DNA, 435 bp, Oryza sativa
agcttgtttatggacatgaagctgttttaccatgggaggttagaatcggctcaaggagaacggagttgcaaaatgatttgacagccgatgagtattataatctcatggccgatgaaagggaagacttggttcagtctatattaagggcccttgcaaaggttaccaatgataaggaatgggttgctcgacattacaacaagaaagtggtgcccaagactttttcagaaggtgaacttgtatggaagttgattttgccgattgggactcgggataccaaattcggcaagtggtcaccgaattgggaaggaccgtttcagatctacaaagttgtgtctaagggagcttacatgttgcaaggactcgatggagaagtctatggacgagcgctaaatggctagtatttaaagaaatattacccaagtgtctgggtaatgc

SEQ ID NO: 45605 - DNA, 442 bp, Oryza sativa
  unsure (1)..(442): unsure at all n locations
tctccacttcatcanaatcttcaacggtttcaccaatatcgttctttgcagaccgatattcttgcaccctcttttgtaaccattctaaattagcctccttactcattatacaaatttatatggcttagccgtgctacactagcaggctttacagagataggtacaaatttgccatcggagatactaataaaatcatagctagaaagatccctaactgataagcattggatattcccatgacgccactcaaaagtagcatcggccattgcaacctcggctaatgtatccgtttgaacaatttcaacatcatcgctgtcccattgaattaaacattgatgcaaggtagaaggcacacaaaaattggcatgaatccaacaacgacccacaataacattgtagttaccttgcacatcgacgatgaagaaagcgggtggtagcgtct

SEQ ID NO: 45606 - DNA, 434 bp, Oryza sativa
gcttcttgtgagggtgatcagggaatcttgcaaagaggagccaaaggtggccatccgatcgaccaaaatcttgtgggagggatgactatgtcgaccggtgtccctactactgtgcctcctaccccagcattagctgccttgaaaaacctacttataagggtggtggcagcagcagctgggaaaggcctcagcagcagcgcaaaagaagcaaggtgtctttgggcaaagctgccggcgccggaggaggatgaggatgccggccaacaaccggagaggccgccgtcgtcatatcggcggccaccgacatcgacgttgatggcgccggtggggctccctccggggttccggttccacccgacggacgaggagttggtgaactactacctcaagaagaagatccacggtctcaagatcgagctcgacatcattcctga

SEQ ID NO: 45607 - DNA, 459 bp, Oryza sativa
  unsure (1)..(459): unsure at all n locations
tgttntctatttcagaaagagagtttctcacttctgcaagaatccttataaatttcagaaagagcttacggttcaaaaaattcagaaagtctggctgagctatacatattgtgttgattttggcagttattagaatgtggagatggaatttgggcagattttgtagtaactgcacttgcattgttgcatatctataaactgaaactcaccaagaaatgacgtcagaaaacgtgaccgtcctcgccaggctagcaaacatgagagatggtgtgaagacggtgaaaacaacctgtcagaaatctcaacaagatcagccagagacaattaatacaattntttcgcagtgaatggctatgtgctcaccttgttcatatcgcttagagcactttgaagtagaatgttgctgtaccagaagcgagaaaagctcaacaacacctatgagtagcacctggacgactg

SEQ ID NO: 45608 - DNA, 402 bp, Oryza sativa
  unsure (1)..(402): unsure at all n locations
ggaccttaagcacctgggctgcagctaaccaacctggataatcgcacagtatataatatttaaaacagggatccagcatagcccgtgaattaagctaatatatacagctacaatcacgacacttggtaaatctaatgcgcctctgtgagcgagtgatcaacagatggatgcacatggattagatgtatgattactccataccctacttctgtgatggctttaagaaaaggattagcaagtagtttatgtaacgtgatggtggaggaaagagctttagataatataatctttaaaactttggaatccacttggtggttagaaaagaattaggcggagggaattttcctagcagaaagtagtggaagtgaggtaattagactaatgcnttttggtctttaaacc

SEQ ID NO: 45609 - DNA, 484 bp, Oryza sativa
  unsure (1)..(484): unsure at all n locations
cactatanacaactcacagcttgcccggcagaaacacctctattgaatacggtgactgttactttggttggtaagagttgcggccaaacgattggaaaagattgtttggccaagattcaaacttcagacaattggaagcatatcaatctggcgaggctgcttggtaggctcttgggcaagtggatatattatcgtgacaatagtgctgctccttttggaagtagcgaacagcggaacatgacacaggataattagcactcaagtcgccaagagcctctctttacctttaaatccacaaaatatcctctcctagatgtcaacttcaatgctacaattatcaagattttgcaccacaagtgagtaccacatcagagaaaaataacgttggtgaatgatgtctacactctatcttgagaccggtgtactatcgggatatatcattaaaaaatgacctcgacccttaggtccgacaagaataatctat

SEQ ID NO: 45610 - DNA, 433 bp, Oryza sativa
  unsure (1)..(433): unsure at all n locations
agctntactntgnttggtgaccttatgctatctttctgtgccanagaagcagcatggattatgcccatcattagctgcataaacagctacttgtctgccttaggtttggcctgtcgccagcagccatgcaaatgatatgtgaagatgcatttttatgatgcacctcctacgggcctatagacagttgaaaatagatgctgcacctatagacctatatagggcagctcaggtttcttttggttttaaccttccaattagcatatcttatattttttataggtggctattgcgggttgaccacaaaaagagtaaactgatacttgtcagagcttcggccatttcactacatgagattgtatgataggtgacgcttcatntatgtcacaaacattgaatatttcgtcacgttccgtaatctgtgacgctcccgtga

SEQ ID NO: 45611 - DNA, 465 bp, Oryza sativa
tatttagtaatgggtatgtgcatgtgtggctatattcttgtttaaccatgcttgcaaaaaggcccagggaaaccgaaacatctctatgagctctctctctctctctcttgtagagctgtgaggagtgagccatcagcgccgccatcgatcacacacctcccgctgttctatgtctcgtgtgagagtcgagatatacttgatagtacagtggtaagagatgtgtggttttaacaccaaggtcctgtgttcaattcctaacacgctcacaatttcttcttacaaaatgttttgaagtacatctgtccctccaatcctcttttttttccttgtgtgagagtcaccacaccgctggacttcttcgttggttccactgttagccccctttatccttatcctcccacgtgattacttggctttgtcaaaggatctccgccctggtctggagtgccctcgcgcgcacaacta

SEQ ID NO: 45612 - DNA, 453 bp, Oryza sativa
  unsure (1)..(453): unsure at all n locations
agcttccaaagctgagccatgttcaggcactcatttaattggccattgttacaggtaccatcaccaaagaatgccagggttacatcaagtccatcagggctagactgcttgagcacctcatggcggtatttagcagcaaaggcagcaccagtagcaacagggatgccctctccgatgaaggcaaaacctccaaggaggttgtggggttcagagaacatgtgcatagaaccaccttgtccacggcagcagccagtggccttaccgaaaagctcagccatgacagaacgtgcagggacacccttggatagggcatggacgtggtcacggtatgtgctgacaacacagtcagcttggttgagcagcttgatgaagccagtggagacagcttcttgcccattgtataaatggacaaaaccaaacatcttgccacggtagtacattngcgcgcacata

SEQ ID NO: 45613 - DNA, 411 bp, Oryza sativa
  unsure (1)..(411): unsure at all n locations
agcttgtgatgacacggaaatggaacacagcgcctacttaattgccggggaaaggcaagctgagagtcgtcctattaaataaattacgctccgacctcttcaaatatttgacgtgatggtccatgtttgctttcgtgttagataaagagcagagtgtgcttttacctacttcctttgagatacactaggtagtgcaatgggtgtaaggtttcaactccaaaatccagttgttcaacatgagattaactgagcgctgtaaggtttggtcccattttctccttaaaatgtgatatcttcttcttattataaaggcaaaanttgatacaggacacccaaaaaacgcgtnattnntctgtggacaccagatatacgcggaactgctcttagacattccatttttggagaattggc

SEQ ID NO: 45614 - DNA, 448 bp, Oryza sativa
  unsure (1)..(448): unsure at all n locations
tcgcccgctggcgacacaactgcgtcgacgccgacactatgttctctctcctttcgcctcctcatcctgctgcttgcgaaatcctcaactcagattcggagctactgccgccgccgcctcccccgttgttgttccaagcgcccccacaaaacccccggccgtggcggcggccgcggcagcgacgggcttcggcggcggcacgcggtgcatgaggaggagaagaaggggaaggcacgactgctgtgtcgcgatccggagcaggagccgatggggaaagtgcggctgacccgcgcctgagcgatagagattgagagatccanggttcgtgagcgagtgtgaaaaagaaaggttatactgaagacttcatctggtggcgccaccaagatgcagaccagcaattntcgtaagaaggattgagatcaatctctcgcccttggatctttgagct

SEQ ID NO: 45615 - DNA, 447 bp, Oryza sativa
agcttataagattcatgcacaagcagccctatccttgtgtgcaagattactgtcggatcagatgatcagatggttcttgctaaggtagtttctaccaatagcctgtatcgataagagaaatgacatcatatcatcttccgctgcattggtagaaaacttacactgaattctatcgacaaggatcaaactctctgagttttagcattttatcaatagtgtatcagtataatcattatgcagtcatataaacttgacacgtactggatactattcactaccaaatttaaccggccgcgcgcttggtctcttttttctttggaaaaatattactaatatcttagaaatattttattattaaagtgtctagcatgctacatataactatactacttgcattcaccacaacatcgtctattaaaaaaaatattagtctaaatacaattacac

SEQ ID NO: 45616 - DNA, 461 bp, Oryza sativa
  unsure (1)..(461): unsure at all n locations
ttattatgttgcacaagctgttcgggttgattcgagatgactagtntattaagagtcattctcttggcatgttatatgcttattttgattgtggtaagggtcatagcctangttattagactcgttaattaccatgatctttatcatatttggcggatcatcttaagagtttcttacttagattcttgtcaaatatgcctgtttgtggacttttttgagtcgttatcactcggcctttcatattttcattctcaatatattaaagctaagaagcagtcggctgggtgttatttgaataccacgtatgctttgctatatgatgtttggttgtaaaaccactccgttcttgactacatgtataggctttttaacttaccacataatcggnggctacacctaattaggtgatgtactcgatgcactcatttatttctttttcgccttcacagcttgatttagac

SEQ ID NO: 45617 - DNA, 416 bp, Oryza sativa
  unsure (1)..(416): unsure at all n locations
tactaagcttactcagcccttttgaagtgaaccctcttgtattgttgcaactgattggtagagctatcaccaattaccagccaccagccttcttccttgagctttgggtacctgagggcatgaactggccccacctcagaaggcaagttcgtcatgtcacgctccatggtcacctgtacagttacattgtcaccagccctgatatcatcaccctcgcgaacttcgtaagccatatcgacattggggaaacgcttgaagaattcaatgatatcctgcagctgagggtttgattgctgtaacagataccgcatctcatcgatgctcatctcagccagatcaaagatgctctcaatgggccctccttcattctcctgacatctccgngccaactccttggtgaaatgtggaagttgtaa

SEQ ID NO: 45618 - DNA, 428 bp, Oryza sativa
  unsure (1)..(428): unsure at all n locations
agctntagctgatttccttgccgagtggtccgagtgccaagaagacatgccagaggagaagatggaatattggactatgtattttgatgggtcgaagaggcttacaggcactggagctggggttgttttaatctccccgactggagaaagattgagctacgtattgtggatatatttttctgtgtcccataacgtggcggaatacgaagcgctacttcatggactaaggattgcaatatctctaggtattcgccgactaatcgtccgtggagactcacagttggttgttaatcaagtcatgaaagagtggtcatgtctagatgataatatgaccgcttatcgacaagaggtgcgcaagttggaaaataaattcgatggactcgagctcacccatgtcctccgacataacaatgaggcagccgacagac

SEQ ID NO: 45619 - DNA, 470 bp, Oryza sativa
  unsure (1)..(470): unsure at all n locations
tgtcacactcgtgtcccaccgggcgtgccanaagcatgttgatgcgaataacacacactggcctgagagatctgcttaactctagtgcaggtccaaatcttggtttcgagttcaaaggcatgctagttggtttgatcctgcaaccaacaagaaacaaagaaagaaacacagttaaattcataaacgatagccgatcggccatgtgccgatgacgtatcgtttgtaatctagccgatgtaacgtgaattagatcggtaatgatatgtaaagaaaaaaggacggttagatctagtcgatcggctgtagatattaacaacatataatcagtatatcaaaatatgttgaaaccatgtgactgggatagatcggacaacttgtcgagacagtatatatcacttatgtctaaaagtacttcaatataaagattatatatgtttatagcatagccgatgttgcagatctgacatgta

SEQ ID NO: 45620 - DNA, 457 bp, Oryza sativa
  unsure (1)..(457): unsure at all n locations
agtcacctgcggcatgcaagcttgacgagaccacaccaacactgtatttgatatagctcgatgagggatagcaatggcaagctctaggtgtatcgtccttgcaaggttcctttgcactaaccacttatcaggtggatgagtagttctatgctaagatcatggcttattttttatatcaatgtctgatgtggttcatcgttgaaactaaatttttccacaaagatcgaaccgtcaaaaatttggatagaagaacaagctatacgccatgcaaagggccttattgtttggcttttttcatagtaagccaaaacggcttattagagaataaaaataatttgtagataaaagttttatatatgtgttctcggtgatttanaagccaatgccgtaaaagaaactacgttaaaaatatctcagaatcaatgtcaaaattaagcttaaaaattcaaattttggt

SEQ ID NO: 45621 - DNA, 452 bp, Oryza sativa
ggatccttagagtcacctgccgcatctagcttaaggtcttattatggcggctcttatttttatagactcggggagatctagactatgctagtacctagaaactactatatgagctaaattctttgacgttgtggtggatggggatagaactatggctccactggtcctaataaagtttatttggatttatttggagctaccatgcatatatatacttattcatatgtattggttaaccactatgatgtggttagtacctatactaccaatttaaggtttaaagctatggtctgaacacaggttgccatatttcactctactagggtgaaatatatacttgctggttctatagaaattaggatcacttcatttagactaaagatgaattgtctacaacacttacaatttaaggtatgctctatgatggttatcacttacattaatatttatag

SEQ ID NO: 45622 - DNA, 373 bp, Oryza sativa
agcttatctcttacgctccaggaatggatcagtcagaacatcaccaccggcttacctcgaccgccgccgactagtgtttccgcctgcacggctggcctattatgctcgccgtgttgggcgtctacgtcttcaccgaccggcttgccttcgccgccgccgactggtgtttccgcctgcacggctggcctattatgccgccgttgttgggcgtctacgtcttcaccgaccggcttgccttcgccgacgccgactggtgtttccgcctgcacggctggcctttatgccgccgttgttgggcgtctacgtcttcaccgaccggcttgtcttcgccgctgccgactggtgtttccgcctgcacggctggcctttatgc

SEQ ID NO: 45623 - DNA, 374 bp, Oryza sativa
tcgggcgcgctcctacgtcatccgcccgtcgcccatgacccggagtctccagcaaaacgttggctggacgatgtggccaaattgatcatgactgcacggcagcgcctaaatgctggtgggcggtcctccgccaccaaggcctctggtgctgctaccaccggctccgcgtcgtcaaaacgaagggcgcggcgagcggcagctgccgttcgccattcggccgccactccttcgtcgactccttcgacccgggaagatctgcatggggggccggacgcccgcgccagcatcgagcaccggcgtaatgaccgacgtgctgcccacgcaacggagggcgcttcctcgtccagagtgtcacctcgacacggacgtgggga

SEQ ID NO: 45624 - DNA, 432 bp, Oryza sativa
  unsure (1)..(432): unsure at all n locations
agcttgagggtcggcacatcataacggaagtggaagaagatggacgtcctagtgccccggccgaagccgccaagaactatgtacgtcacagcggttgggttgtgcgggataacgtgcctgtcagtacggtgtactggagaagaacaagggcacgcggagatcatgagagctttgtcccagattcggagaaagagatgctgtggaccacaatgctcgagacattcacccttcctgcgggtacagaggacaaagtgaaaaggtggactctgaagaaaatggcagaacagtttcagagcttcaagggagatctgtaccagaagtatatactaaaagggcagacaccgaacttcgacacattcccaaagctaagggatcactgngacgagttcgttgcatataagacaggtanacaagggcaggcgatgatagaaa

SEQ ID NO: 45625 - DNA, 289 bp, Oryza sativa
  unsure (1)..(289): unsure at all n locations
ngaataaagtatatgcgtatgccctgtaatgatattctaaggtccatctacgtttctttgagaaacctgaagtcgaatttaatttgacaatgaggtggatgtgctgatgtgcagaagattccaattaagctgcaaccctgctccctgaagaagagaagaacgttacaggcatatgcctcattagccatgtccagtcacacaccaattgaatttgacatcaatgcatttgcttgtactttctccgtttcacaatgtaagtcattctagcatttcacacattcatattgat

SEQ ID NO: 45626 - DNA, 352 bp, Oryza sativa
agcgtgcactcacgagagcatggctcttatgtttgcgcaaaagcggatctatctccgcctgtagtcggtgatccttaaatccgatcttatgatgtcgaatgaaaaagaaccacgctttagcggatatatacccaaccttacagttcacatcatggtgcctataagtcgtcctgacaatattcgcagaatacctgtcctaagcagaatcacaatcaagtacacaggccaagacgtacgctacactgtcagggatagcaagataatatggcactcatgtaagccactgcaggatcctgcccaacctgtgagctgtctgctcacactttcatgagcaattcacaatccaatcacc

SEQ ID NO: 45627 - DNA, 461 bp, Oryza sativa
  unsure (1)..(461): unsure at all n locations
tcacgagcggctggcgagcagcttgggctcggctcgatttataagcgagccatggaggcagctcgagctcggctcgtttagttttcaagccgagccaagctttacgagctcaagccaagcccgagccaagctcacgagcccgagctttttatccacccctacctcatggtacctcctcaaggactgtagaattgctctacatatttacataagacagtcttcaaaacggttattttagagtcagtattatttatcagaatatgcaattgcttatggagtgcattgtatggtccgtcacttggaacaaatccaatgattatttaggaatatatatacggggtcctccatgacaatatgacatagtgggaaggtatnagtaaaattaagtgttttataaattttcatctgaataatatataaaggttacaacatgatatgtcagataatagcaataatttaat

SEQ ID NO: 45628 - DNA, 445 bp, Oryza sativa
  unsure (1)..(445): unsure at all n locations
agcttcaccgcactggagcgggctaaccatggatgaggtcgtcnggaagccgccctgccggagcgcgccgaggatcggcggagctgccgccgactgccaagacttctatcagttctcatgccggaggtcaagcatcatgcatggcgtcaaaaccagcggatgacgatggaggcaagtatggctgcagtacagaggaaggacgacgggaggacggcgagccagtgctgttggatggcaacaagctagctaatgcatgttgattaagttaattattgtggcaacgtggccaaccaatcggaggacgacatgtcatcgctgctacagtgccatgcacaaaccaatgcgtgggctgaagaagtcctgttggtttttcttatttgtcccacatgagatgccgagctttgattaaatccggccaccgtctacatcaaccatcttcaataat

SEQ ID NO: 45629 - DNA, 352 bp, Oryza sativa
ataaaacacacactgcacccgacaatgaaaaacgaggtctccagcaacttgatcctttacttcagctaccaataagtgtggataatctagcaccggatagatgacctaaacaacgatgccactgtgcaaaatgtgtagtggctgaagtagctaacgctgaagcagtggaaccgactgacaggctggtagaagcatcacaagggagatgtagccaatcaagctcccaaagacgctgagagacatggctcctatgaccattcctcatcaggagccctgtgcgaccattctggacacaacaagagtcagcctcaaggttaagttcgacaccatgatcagtgatctgaccagctga

SEQ ID NO: 45630 - DNA, 440 bp, Oryza sativa
  unsure (1)..(440): unsure at all n locations
agctnntagcaagatgtacgtatatagggcatttattttattggggntactccatcgatgttgcaacttgtaacataatctccatactggtggtatggatgaatagtgctatgcctgcatgactgcgtcctttgcttacctggttacttcacttacccttttagcacaagcaagaagacaagattacacaagtcttcaacttctagcaatgttgaataaatgctggtcattagtcgcacttgctgcgtcacaagtatatcatgaaggaggcttcaatgcttcaaagggtaccaaaaaatagcttccattgaatgagatcagatttcgattacatacaggcaatcaatgaaaacgctatggccgacgactgctcgccttgatcagcanaactgcagcatgctaaaatggtatttcccagctgcacaagagctctatttcgc

SEQ ID NO: 45631 - DNA, 473 bp, Oryza sativa
  unsure (1)..(473): unsure at all n locations
ctatagaatactaagcttagatctgggctcgatcctatggcagagaccgtactnttgttctcgcatcgatctcacttgggtctgttgctcagctagtagttttagctacctgctgttcttctttacatcacgtgctaaagttacaacaaatatatgttatttttgcattgatgatagggcccaaatgtacttgtcttgatctcttaatcatgttccatgaatttgatatggtttatacatgtacacttgatgcatggtgagatactcccaacaacagtagcatgcatgcgtttgagcttaattaaattagttcttcagcaacagtgcttatgtacagtactaatagaccttgcacggtaaagttaaatctctgtttataataaatagtgattaacataaatctcttcttgtacattcgcgcatgctaccttattatttctggttagtttggtcctcggaattatagctggtga

SEQ ID NO: 45632 - DNA, 475 bp, Oryza sativa
  unsure (1)..(475): unsure at all n locations
ggatcttaagtcaccgcggctgcagctttataagggagaaaagaaggacattctataaagaattgatgccattgacattagagtagaaagcatgggtatgagtggttctgatagagaggagagaaaggaacttgaaaatagactcaaatttgttattagggaagagaaactgaagtggattcaaagaagtaaaggaagtattacaaggggattgtaatactatgttcttctatgctaaggcaaatgggaggaagaggaagagtcagattcatagtttggtgcatgaaggagaggtgattgaaggataagataagtttgttgcttcatattagaaatttttacaaagatctctttggacattcaaaggaaaacatgttttcaattgatatggcaaatgtatctaaggtggcaaaggaagatatgaagatgttaaccattcctatcactttagaggaactcanaacaatgatttttg

SEQ ID NO: 45633 - DNA, 487 bp, Oryza sativa
  unsure (1)..(487): unsure at all n locations
tataaaactcagcttgcttgtgctgcttacatagatctcggtaagttgtagcctaaactgctgatccccaactccactagggaaaactttctatgttgccctgcacaataaatcttgctatggaaatcattctcgcatccactatgtatccgtgtccacttgtgaacataacccatccaaaaagccatagaaggtaagcctccaaatgcaattccacatggtaattttctacgtcctctctcgtgaaagaaacctacaaaggtacacagaaaatttcaataacaaaacataatatcatcaatggaagttntttgtatgaattagtttttcctcgaactggatgagccagtgtaacgtanggccgcgcgcttcatctttatagaagagtcctttcatgtctctatcatcctctggaacaatgtaagcatatcttccaataatatcatccctccattccacangtgggtcggggaggacaattgtctgt

SEQ ID NO: 45634 - DNA, 224 bp, Oryza sativa
gacaggatctggtactagaatgatcatgctgggcaatgctctgccgagggcggacaaggcaatgattgatctcttgccgctttgctcttgccctgttggtatgccatagaggagttgtagcaccaccggttgtaacatctgcttatgaactcttattgcgacttccgttgctatatttatgtgctgtacggcgcgacctctgacccttttatgagacatgtacc

SEQ ID NO: 45635 - DNA, 338 bp, Oryza sativa
acgcttactgcgactaccaccagatcagcatggtatatttgtgctacgagaagacaacatgtatcacgccgttcggtgtattgtgctacattaagatgctcgttggactgatcactgagggaaacactttccaactgatatattaatgggcacttgatgaccatctcggacaccatgactaggcctacgtcaacgacattgttgctaaaaaaagacaaacgactcattgatcgatgacctccgggaaacgttcgactacctccgacgatatcggctcatgctcaagccaaagaagtgcacgttctgagtatcatcgggcaagcttctctgatccctcg

SEQ ID NO: 45636 - DNA, 344 bp, Oryza sativa
gcttcgatctgcacggagtcgcctattattgcatgtggttttggggtcttatatcctatataacatggtggactttgtcctggcgaatgatatctaatgtccccttgccatgcgctagagttcaccatgtgagtcgattatgtacttccgacaggtttgtcttgaatattatgagaagtgcgcttctaacgtgcgtgtgatcattatccaccacgattggtggctggatggatctagcaatctgatggatgtatcccttggacactaatgtaccacctgtagagcagcatttttccatggtgttacggtgttcactgctctaatcggggtataatctgccgcct

SEQ ID NO: 45637 - DNA, 159 bp, Oryza sativa
ggctaactcccgtattcggaagctagaaagatcctttttcgacaattgagataagcttaggatctacaagtcaacaatgacatatttttaacgatccggatcttctcaaaatctgactgttgaaatttactgaatttcccaagagtgttttgcccctat

SEQ ID NO: 45638 - DNA, 441 bp, Oryza sativa
  unsure (1)..(441): unsure at all n locations
agctattattgagccgtaacacaatgtttttctatttagaacaagatggtcatggagtgtgtccaatcacacatgtatatttccactgtcatgtatcggaccagtcactgtctgtggaccctaattgactgcaaattaccatggttttgattcggagatgccaacactacacatcatgagagtgagagtgatgctgaattcaagccaattaatcaagctaactaattcacttctcaaaggctttagaatgcagcacgttctangtcaacatcttgaatccgcaccggggtcccaaggcatgataatgtgtgagccggccgtgtatgcattgtgtcatattgctgacatgaagggctttgaaatcctcttctgtttggccaaccatatgagatagctggtgtgggctcaccatcacctctctctcatgacaatttaccagta

SEQ ID NO: 45639 - DNA, 385 bp, Oryza sativa
  unsure (1)..(385): unsure at all n locations
cgaggccgagcagacngataagccggcgtcccgtcttgatgctgccaagcctggattgccacactggctgcagctcagcaatgatcaaaataaggtatgtgtttttcccctgtcgaaatcttgggtaaacatcaagctctcttctaccggaatcgccattaatatatggtgtttcttgtttctttattacaggccaaggagcaagagctgaaacttaagaggagcaaagatgagcttgagaggaaatggcgcgagacgtgtgcccgaatccactccgcctgtcccatggcaccggcgctctccgtgcctcttgccacattcacgccacgcccatccgtcgagcccaaattgtgggtcgcaaggggtgccgctgtccccactctta

SEQ ID NO: 45640 - DNA, 442 bp, Oryza sativa
  unsure (1)..(442): unsure at all n locations
agcttcgagacagtggtacttgaagtttgttgggacaataaagaaanttgggtttcaagagaatgtcgaggacaactgtatttattcaaagtttaagaatgggagatttattttcctaattctgtatgtggatgacattctactggctagtagtgatgtcagtctactgcaggaaacaaagaaattcttgtcctcaaactttgacatgaaagacctcggtgaggcttcatatgttttgggcatagagattcaccgagatagaacaaagtatgcattgggactttctcaaaagacatatatagaaaaggtgttgaagaaattcaacatgtacagatgcagtgctacacctgctcctataatgaaaggcgaaaagtatggngcatcgcaatgtcccagaaatcagtatgagctcaatgaaatgaaaacaaagccatatgcgtca

SEQ ID NO: 45641 - DNA, 466 bp, Oryza sativa
cgagggagaaagaatatttaagtgaatcaaattatttgtatgtcccatgcttgttcagacaaagaagaaactatagttccattattgacaaaactttggcaaatatcatggttattgtttatattttatcaattgaaataccagggacacctcttaaagaggaaaaaagaatcatacaagatttgcctcaaacttaaagtttcaacgtcaaggtcaaatgtctaataggaagaacatatccttttgtagaatatgaaatgtaatttgcttgaaaagttgtcatgatgtttccttcaaattccaaggataaacaatctaatcatgatacaatccttattgcgatgcataacttattagtttttttttcactttcttttttgttcttgtcttacaagaaatggaagaggatcgtataccaccaaagaatattataatctcagaatgccacattttattaattgacaca

SEQ ID NO: 45642 - DNA, 363 bp, Oryza sativa
agcttgaatattcttataattgggaacggtttataatactccctccgtttcaaaatgtttgacaccgttgactttttaccacatgtttgaccgttcgatttattaaaaaaattatgaaatatgtcaaactatatatgtacatgaaagtatatttaacaatgaatcaaatgatatgaacagaataaataattacttaaagatcttgaatatgataaatggtcaaacacatattaaaaagcctacggcgtcaaacatgtttaaacggagggagtaggtgagtatacaacgtgtgtcttaagttatatctgctgtctatataagggttacaactctggaaccacctgggtcaaagtggcttttgta

SEQ ID NO: 45643 - DNA, 422 bp, Oryza sativa
tgtatatggcattatgggcttgttgagtagtactggcttatgttcgcacggcatgattttggcttataatggaactttcatattgttctaaccctctcatcttctatatctattaaattaatgaacatgaacgggatcaactcattgagattgaaactctagtctaaaaatttagatgaaagattaggatttgggatttctctgatcatgcgagagggaagagaggcaagggctttgcgaacagagccttggtggatgaatgaagagtcagagagcagatgagctaggggacagaaaattgatatgggcagctcccgcaaggtctagagaggcatgaggcagatatcagagataacggacaacaatggggtgcagataattgggcaccacgactaggcgaaaggcaggcggttatgcacatg

SEQ ID NO: 45644 - DNA, 436 bp, Oryza sativa
  unsure (1)..(436): unsure at all n locations
agctttggcagcgccaaatcagntgtgaatgatggttaagaagtgtatggttgatgtcaaagttaagttattgttatcaactttagtagcacaaaatgttgagaaacgaagacactacctaatacccaattttgttgcgtaaggatggaaaaggaagtgtttgatatgataacgaaatcatgttatttctcatataaacagaaagatgggtgttaccaaaagtctgcaggatagcatttagatggagcatttgattttctaactatgaagaattggcaacgagccaacgaacgagaccgaagtctccacacacaatttcaagtccccgtttcagacaaaaaatgatacaccacgcacacttttgcagcagtcacacagagcacggtaaaacagcctattctcggtatctttgccacactccccaactccaagtaaa

SEQ ID NO: 45645 - DNA, 467 bp, Oryza sativa
  unsure (1)..(467): unsure at all n locations
ngcaagataagttgaaacagttagaaacaaggtcacaaattttgtactttngaatcaacaggttccaaaagaaataaaagaaagttatacaatcaacatgctaaatttatttcattacagcaagattaaataaaacaatgttgtaaaacatttgctggtaaatgagccatttgtacagtaatagatgtacagtactaataacactggaataaattctgaatgagaaccactaaaagagattatgaagtgcatgtgccattagtttggtttaattaaaagagaaagggaggagaacagttctacttttccaatatttttagagggtttctatgggtaaccatttggcataacctaaggtcaaggaggctctgataccaacttgtcacgcccggaatttctatccaaaattccaaacgcttacatgtgtgtgaaccctcgtccaggaatcagccgaggaacacaataac

SEQ ID NO: 45646 - DNA, 435 bp, Oryza sativa
  unsure (1)..(435): unsure at all n locations
agcttgtangcatgagtgtcaggctatgatcttatacaggcaagaataaattcctaagattacttcaaattcaaaatcttcttttgtagaagagactattgcattattatgcagcttctgattntcataaaaatgcagcttctgattcttcaatgacgaatatgtagttatgactaccttttttttttttgcagatctggttctagatctagagctcctaatgttcctcctatggtacctcaattcatgagggcgcacggcagcattagtgaacagtaccagcagagttcatcatccagcttatttgctggggctcatagatcaggaggcatgcgaactgcaccgccgccccctctaccagagaacccggcattttgccttttcccaccacgttcatctggccataactccatggagactgatgatgcaggagga

SEQ ID NO: 45647 - DNA, 368 bp, Oryza sativa
  unsure (1)..(368): unsure at all n locations
gcgacgtggccgaggcggatggcattgacattgtcactagggctatgggaggcgaagccggtgaagaagatgccggcggcgcggtatacgatggacacngggccctcccggtagtccttcccctctttcgcccacaagaacatggccttgaacaggtcaccccacgcgttgccgtacatggacacgatgtactnggggttgaagtagttcttgttcggtgcgtcctcgccggcggcgagcgtcctcccggcgtaccacccgtcgtagtacacgcacgttccgccgtgcctgaagtccgccaccggcggcacgtcgaacggcacccttcgcacgatgtcgtaccggtagaccacgcgctggaacgcgac

SEQ ID NO: 45648 - DNA, 294 bp, Oryza sativa
agctttgccagaatatgccctctatgaccactaccccggaagagagctgggcctttcttcgtttacttgtcttggctacatgagcacatggtgtgtctgcgattactgggcacacacacaccgatcttgtgtcgatggatgcgtcacccatgagtggagcattgatagtagtcgacaagatgactgcactacatctcttgcgctttgacaatgcaagaccacggtgtacacggccggtcatgtaacactgaccctcaacgtgcgcactcatgtatcatcaacgactacctgctc

SEQ ID NO: 45649 - DNA, 328 bp, Oryza sativa
ctattagtgacctatgaaactcagcttgcatacaattgatgtgaccgcgactttcccaacaccagacagagacgctgcggatggacttcctctgagggtgagtacaccacgacgtcggcgctcaagaccacgacaaacttatgcccggattccatgaacactctgctgattcagttcatggaaaaggcaagagcattggtgcagaccgagcgacatcaccgtgaattcatacagtccataacgcgtggtgaatgccgacttctggatactcttcttcacggatacgccattgtggatatccggagcgaagaggaatcttggagaatac

SEQ ID NO: 45650 - DNA, 398 bp, Oryza sativa
gtacgtacggaaagacaataaatagcgtttgcatcgtgtagcgctggtacgttataaacatgagagaattatttttttaataatagatctaatttaatggtgtaaaataacgggtccaccaatttaagtgaatatcaacggtgagattatatagtgccatgtggcgacttaagagcgtttgtaggggtacacgtggtggcttgacagcaatcaacggtgagattatatagtgccatatggcgacttatgagcgtttttaggggtatacgtggtggcttgagagcgtttgtgggaatgttaatggacttttagtatataatagattgatagatagatcgatagatagatagattgatcgattgatggatggataagtacatacatggtaaaaatatata

SEQ ID NO: 45651 - DNA, 414 bp, Oryza sativa
  unsure (1)..(414): unsure at all n locations
ntgcatagaactgtntccatacaagcattccatcatggtttatcttatgcacaacactagaattgcagcatacagaagactatatattacataccgaattaagcattccacgtagctgtgaactccaatatatctacattgtatcctgtcagctcctggcattcaaatattcaaaactcatacagtgaaaactaatggccatatatgctgtaaatatgtacattcagtatgcaaaactatacttttttgtggtagaaattcctgctttaatctccagattgcagagaaaaacatcaaaacactaaagtgtgcagcgaatatgtgcccaacacaatttcatgaatagagaacttctaatgacacttcatttaataaaaaaagcaagcaaccagtcatgcatttgaaatctacatg

SEQ ID NO: 45652 - DNA, 421 bp, Oryza sativa
  unsure (1)..(421): unsure at all n locations
agcttctntatagntattttgctatatcacttatcatattttacaaagcagttggtatatcactcggatcatgttatttggaggattcacaccgcatatgctatatattgatatcaagtcacttggttgattacgattatcaaaaccactcggttggttggattatttattccttgactatatgcttggtttgttcacttaaccgcatagtcgagggctacacctattaggtgcatctagtcgatgcacctgactttatttttcagccctccacagtcttcagatttggtaaaagtactcgggagaccatggcaaagatgattgaagtactcggctttggagtaatctggttcgagagaagattatcttttcgactgtgaaggtcttacgggctactttggagatatggggtatccttccc

SEQ ID NO: 45653 - DNA, 438 bp, Oryza sativa
  unsure (1)..(438): unsure at all n locations
agcttgtatgttgtgaataaagaaatatttattgtttgggcatacgccatacgcacattgctttaacagatgtgcttaagtccctataagacacatggttccaccacacctggaaatatatggcatatgtggtataaaatccgagtaaataaactcataaaggatttaccaaccgcctggaaaatgaccaaaatatataatcagcctaaaccataatattggtcaataaaagtgcacacttacgtggcaaaacgcaatgatattgtatccaatcaattgctttatgaacccaaacagcgccttgacttatataaaanagtcagcggggagccatataaagcattactggttggcaccttttaaattgcattgtaccaactcctaanaagttgaataactgcggtataaaaggattttaaggtattgggcacataatca

SEQ ID NO: 45654 - DNA, 464 bp, Oryza sativa
  unsure (1)..(464): unsure at all n locations
cattgcatatccaatctgaattgccatgggaaaatattgatataacactctcattttacaacaattacacagagcaggtcacattataatcagctgaaacaggctccaaacaatgcatggcactaatgacgtgcacacatactccaatgataggaattcacggtaagtaagtacagctcgttattaagcttctgttaatggaagatcacttcagttcgccgctgtctgatatgaggactttggaccgtggagtaccactctgactgccttcagcttcaatcttgtagacgacgtccattccagaatgcaccttgccaaacacaacatgcttcccatccaacctgcagtagcaaacaacacaaaaagagtaggtcatgatcaaaattacaatctgatcggaagaattctagcaaacaaaaagaaaaattgcacgaaaactaattctcagctctcangagctgatg

SEQ ID NO: 45655 - DNA, 458 bp, Oryza sativa
  unsure (1)..(458): unsure at all n locations
ggatcttaagtcaccgcagctgcagctagatgcatagacattaatcttttgtagcactctgaaaggaccatcagctctaggtagcaacttagatttctcaaatagggaacctatcctttctcaaatgcaaccaaaccaaatcaccaggatcaaaagcaacatgtttttttcctttgctcccagcaagtttatacttaatattcatgcgctctatgttctccttagtggtctcatgcagttttaacatcaattcagcgcgatattttgcatcaaagttcactctctctgaagttgggaggggcaaaagatcaattggagcacggtgtagaaggccataaacaatctcaaaagggcacttcttagtagtagaatgttgtgaacgattataagcaaactcaacatgaggcaaacattcttcccacattntaatattctttttcaaacagccctaagcattg

SEQ ID NO: 45656 - DNA, 460 bp, Oryza sativa
  unsure (1)..(460): unsure at all n locations
tgagtgtgtgcgattnttgagctgccactacctagtagttaatatgaacgcgcatatntttgtgtatgtttcttgttttctactaacaatggcagggatacgcaagataattggggatagctgtgctcaacatcgacatcttcgtcgagacatgaggagggatcaacatgaccattatgaggtaagtgatgatgttctaggtaagatcaaatctgcactgccttatttcgagggaaactatgatcctcgtgcttacattaattgggagctagcggtcgatagtngaattcaaaagcatgtcttgtcggagaaacaaaaggttatgtgtgcctctagtgttttaattaaacatgcttctaatgaatggaaacatcttagtaggcataacaaaataccacaatcttggaaagacctgagactatatttcagagatgtttatgttcccatgtattatgctgac

SEQ ID NO: 45657 - DNA, 446 bp, Oryza sativa
  unsure (1)..(446): unsure at all n locations
agctngaccatctntgatctgaccggtctttgtgggtttacgcttcacaggtttttgaccggaggagatgaccaagcatcatgtacttattgatcctgacgattctcttgtttcaggtgcgtcaattctgacatccatgggccatctgtttcttcaagaaattaattgtgatatcatcggtgcttttctgatgcgaatttcgccgctaattccatttttttattattgttttggtttcatttgaatatacgaggcataagagagggagagcccttttgacagttcagtcgcactccatttggaacatacgctgattaagataatgaccatgattacaaacaaataaagcaaggtggagtacctaattggtgataatgttggctcaatcattgtcatgtgatcctagttaacgaggagcaagcgtcactggtttattcagacaaaaa

SEQ ID NO: 45658 - DNA, 423 bp, Oryza sativa
  unsure (1)..(423): unsure at all n locations
ntgttgtgtacctgtgcctggtttacttaaatcaaatgatattcttctatgcttattgcttaaatctttttactgttacttgtatttctaactttgcgataaaatcgttaagcataaaaggcactgaattttgtatcatgggtttcttgctcaatttcaacctagtacgggtgttccttctattctaaggaaattgtagattaaaatagacaataacatatagttctccttttgctatcaagacttttatggagtttaactgtagtctgtactgtcgtcttggaagtatgctactagttattgttgtccacatacgtccacatacgcttatggattcaacttactatttccctccattatttttgtccagcaagtactaacatgctgttctgctaaactgatgacgttgaattcttgacatga

SEQ ID NO: 45659 - DNA, 452 bp, Oryza sativa
  unsure (1)..(452): unsure at all n locations
agctntanaatcatgtcatgcagaanaggatgctcaattttgctacacaataagtatagcagtccaattcaatctacctggactttcagacaaaataaatataatataaaacatcaatacgaaatagtgatgtactgcttctaatgagatcttggagtcaattttacagaagaaatatgatattatcaaaccttaagttcctaatgggaacagagaagcaactcaagacacagataacagatcatgtgttcgactttctaaaacactaggcattatagtctgttaaataagttttgagaagaagatagaacatataaggcagcacaaattgtaagctagaaaatgcacgtggaataggaatggtgatgatgtggcaaaagacaatgaaaacccaaacaaattctacagatagatgataggaaagattgcataatcacaaatttcacaatttc

SEQ ID NO: 45660 - DNA, 454 bp, Oryza sativa
ctgagctactccaattataggctagcactctgtcaaatctatctcttaataaaatcatagccctgtctagttcgcgaaaagaaaattattaactgtcacatcagacgtttaaccagatattacaaggggttttccgacacaaatgaaaaaaaataatttcataactcgcttagaaaccgcgagacgaatttattaagcctaattaatccatcattagcacatatgggttactgtagcacttatggctaatcatggactaattaggcttaaaagattcgtctcgcaatttccatgtaaactgtgcaattaatatttctttttatctatgtttaatgctctatgcatatgtccaaatattcgatgtgatgttctgggaaaaaattgaaactaaacaagccatatcttgtaggatgcatgcatgaatagactagcatcctgccagtgccctacttca

SEQ ID NO: 45661 - DNA, 433 bp, Oryza sativa
agcttctctaatagtctccactgccttatttttgaaggtatgctcccgttgaagttgttcccatctagatgaaactcggttagttgggcaagggtgccaatagaatcaggaataatgcccgagaggttattttgtgccaagcttataaccagtaagttgctaagatttccaatggttggtgggatgctcccactaaacatattctcatccaaatacagaacactgagactcttaaggttaccaatctctgatggaattgtcccagaaagtttgttttgcctgagccacaaccagttgagctgtgagggaagattaccgactgagctaagcaaggttccttggagaaaattggcatccaaggccaactttttcagttgagtgcagtttgcaagggatgagaggaagctccagtcccctgcttaagctggttgta

SEQ ID NO: 45662 - DNA, 470 bp, Oryza sativa
ttccgaagagagaagttcgctcattgtcctgaatttcttattgtcacttaatttggccactctgttttggttaaggaaatatcaagttttcatgcttaacaagacccaatctagtataccttggtggttccatataatatggttggattgttttatgagtttgtgccatctactgtatgagtttgtgtcagtttatcttttgtgagcataatataagtgtgatctttgtggctgcatgatttctggggtacagcttagaagttactcctatttactgtacttacatggatggttggttgtgctgttgaatcacttgtggagtagtagtacttaaagtttaacatgttgcatttgcatggagttttgtcagggttcagttgcatttgaagagaatgtacgggtgatcatgttgcatttgtcatggtccagatcacaacctttgctggtgtgctgtcctgatctggttcatg

SEQ ID NO: 45663 - DNA, 439 bp, Oryza sativa
agcttaggattctgactgtacttcgttctgtctgcctttttttttccagcggtgactgggtactacacaatggaaagtctatttcttgctgacatgcgggcccacccagagctatctgctgctgaactgctgataccttcggccaggtgagcattgacgagcgtgggcacgacccgctcacatgatcacatccagccgttgcttctaaatgaacggctgtgataaaagcaagaaaccaggcccgtggatggccatgtgccatatatgcaacacgccccccttcttttaggccccatataaacatgaaggtccacttcagctatagcaatgtaacacaaatttctagagacgggtttacaagaaacgcttcagtgctcctcttcagcactaggcctcaccgaggatgtggttttatccctcgaaggggatcctctcgttt

SEQ ID NO: 45664 - DNA, 315 bp, Oryza sativa
gacttattcttcataaaacacccaagtgaccccctcttaaatcatcaaacttggatcttacggcacgcgttattccagagtccaaacactcccaacctccaccaagctgaactgtaacagctctccctccaaggaccaactatttcatagccttagaagaaatggagaatcgccacacgcaaccacgcccagggctcaaccagcagccacgcacgagtggatctacccaaccagcacaccaacagtaaaagctccccccgaaccctaaaagagcagccgagaaagatgggtttggcccctcctcacctgcatacc

SEQ ID NO: 45665 - DNA, 449 bp, Oryza sativa
agcttcttcagaattgattgcacaaatgatctcacttggtgtccaacagaatcaccattggccaaaagttgttttagatcagtcactgaaggttggagcctctctgccgttagcattgatgacaaacttgctgtatagctctgcaccagaatcatcaaaactaagcaccaaattaccacaacaatttttgactgaatgctttggatcttttgacctgtccataggattaaaaaaaatagattatcaaaaatcatagtagtatcaaaacaaattacagcaaatactgaatcacagtagcatatgatagcatccttaagagtctttcagctgacccgacaaagaacaataaaaaaaagcatccttagaaattaataagttgaatgtacgaagatgtatgtagttatgtattttatctattcaatagctaggtctgtaatgacataccatgt

SEQ ID NO: 45666 - DNA, 455 bp, Oryza sativa
  unsure (1)..(455): unsure at all n locations
tgtaagtggcagcagatgagagtgctatcatttattaattatcagtttaattcagatacaagagtcactaatttataagaccaaattagagtggttaggtttatgaattatgaagtacaggaagaagcttgtagccgtaggaattgtctgtgcattaacagcaccctgtcaatctgccacatgctgaaatactgaccattcgtattgcttatgaaacaaaccattgacttttaatatacacctaagctttgtcaattgaaacatactggcttataagttagaatgtggttatgtgaaacttangcttcctattaccgatgcagtgttgtttaaagaagggttagataatcggatgtaaatccaatatgaaactattggttctatcttattcaaaatgccctcttctttagttaaattgtgatgtaagctgtctttcatacgttgacacaaatctg

SEQ ID NO: 45667 - DNA, 434 bp, Oryza sativa
  unsure (1)..(434): unsure at all n locations
taagtcacctgcggcatgcaagcttaatccccaaatttctatcttctcccctaatattgacatgtgaatcatcggtattttgatccgatggtcgacatctgctgatacaagatatgtaaaaataataattttttgctacggtaaatggtaaattcagatccagatcagaacaggaacaatgacacagagagagcccttgggctgcaaaatctgccgttcctctccttggctactttacatgaggattggggctctctccatgcgaaaaacagaggactagaaacaggggaacaaaaacaacagcatgtgaccaaaatatacgccggaaatcccaactttntattgaccgtggtggaaaccccaccctacttgaaaacctgtataaaccatgaaattaaatcttccaaaaaactgacatttttttcatgtgttgc

SEQ ID NO: 45668 - DNA, 457 bp, Oryza sativa
  unsure (1)..(457): unsure at all n locations
tgtattanggtattaatttgcatttntctttatattccagaatttgtacttgaaggtagtgctggcacaccatttgaaggtaaagattacacaaactcaaaacaatcttctatacattctattacatttcagctagcacttcactaatcaatttatctgtaacaatattttcacatttgatttcttctccataggtggatattattacgggaaactcaaatttccacctgattacccttttaagcctccaagcatcaggtaatggaactttattttgtaatattgaattactgaaattgaaggaatgcttacaatgtgatagaagagttatacgtatttgggattagtgaacattttgaaactttggttttcatatctgacttgttttattgggattagtgaacactttgaactntggttttgcatatctgacttgnttattgttcagcatgacaac

SEQ ID NO: 45669 - DNA, 448 bp, Oryza sativa
  unsure (1)..(448): unsure at all n locations
agcttatagcaagtgattgctactccatctgtttcacaatgtaagtcattttagtattttccacattcatattgatgaattacttatattgtgaaacggagggagtaattagcacgtgcatgttcccaatgcgcactcctttccccgtacatactacgaaactttcaactaaaaaatcatacaaaactttccatgtgccctcatactttcatattgactctaaaactttcacccaaaaacaaaacagaaaactttgtacttaaatcatatacaaagcttccgactgcgccctcaaactttcatattgaattggaaaaagtatgatttcaaaatctaactttcatctgaaatatcaaagattnttattcaacacatacaantttcagcttaaaatcaattgagacggaactttaaaccgtggcctcaactttcatcttaaaattaaaaa

SEQ ID NO: 45670 - DNA, 322 bp, Oryza sativa
cggcgagatcgctcttgacagcaaccacgcgagcaccattctacatagatccgatgttaagcatgaggatttcacccttggtgagcttggagaccttcccagccttctctgtgccttttgtcctcacacctaatagcctccgaagaaggaagaagttgatctgtgtgaaaggttcagatgtaagtaatgacattcgttcactaaaaccctgaagaaacaaatgagttatggcaaaccttaagctccacatagacatcaggaagggatccaacttcacccaaaacctgcccaaccagtctatcggcacgtgtcaaagttggat

SEQ ID NO: 45671 - DNA, 427 bp, Oryza sativa
agcttgctatactaccatgatatatcaaatgcatacatttggatgagttaagccaccatgggtacttaacgatgcaatcctttatgagggtactaatagtgaattagccgttaaaactgttctccacgatggtcttgatgggcacgactatgtcgatatgtgacccatgtttcaaggtatcgaggaagaaagccttggtagttatgttcggcttcatccgttagatgggtattcatatcaaattttaacagtattatcctattaactcatagaagtgatattgttataatatatttttttgataaaatattattggaatatttatacatagatttggaaataagtcagatcgacatgaacagttacgttagtagtggagataattttttagtcgattaacgatgtattggtcttattttgatgttac

SEQ ID NO: 45672 - DNA, 412 bp, Oryza sativa
  unsure (1)..(412): unsure at all n locations
ctatgaaactcaagctgggagaaaaataaaccggntggacaacatataacaattcatcaaaacaagaatgaaaaatatggtatatacatatatataaagggaaattatccaattaaccatatgagagacttgtatttgataggtacaaagagaactgttgctgttgctgtggaagcgtctaaaacttacacatgcatatgattgactgattgctagctgatacaataaatgtgttaagcatatcgcaagcgcagaccactgcctcctgcgtgcaatctgctgtatacgtataagctgcatattacctagctaggtttgatagtattgcgctgccaccatgcatggagccgggatgacttgttgcgtgcctgatcaatgtgcgcaagtgctgagaaatctctcgtatttgatc

SEQ ID NO: 45673 - DNA, 372 bp, Oryza sativa
tctggcattggtagatctgcgaataaaatattgtgagtgtctactcgacttgccaagtttcccatccctccagggcattaaaatggagggtttctgccgtgtcaaccatatgttgcaactccctctattctctcagcttgagatgctagaacttcggtgtcacaaaaaactcgtatcgctgagaaaactccagcatatttccccatttcacagtttgagattgagaaaagaactattacacaaggtatcaggttgtgaagagttgccattccagaatccctctgttcaagatagtcaggtatttgttctttctcaagtagaaatcaaacatgattgctatcaaatgttgcatactctaaagcattgcatgct

SEQ ID NO: 45674 - DNA, 435 bp, Oryza sativa
gcgcgtgcaagcttagcaggatttatcagcaaggaaatggcttttctgtcgagctacgagatggcggcctccatcttgctctgcgccgaggacagcagcagcgttctcggcttctgcggcgaggaagaggaagaggaggaggacgtcttggctgggaagagggccaggtgcgctggtccgccgccgccgccgtgcgtggacgtctctggcgtggatttcgccgtgccgtctgaggaatgcgtcgcccgcctggtggagacggaggcggaccacatgccgagggaggactacgcccagaggctgcgcgccggcggcggcgaccgcgacctggatcttcccgtcaggatggatgccatccattggatttggaaagtgggggtgttctttatcgatgcgagccatatataaatctctctgatttggcattgttcgcgt

SEQ ID NO: 45675 - DNA, 441 bp, Oryza sativa
  unsure (1)..(441): unsure at all n locations
ctcagctgccgtcgcctgtgaacgacgaccgggttcgccagccactccggatggatgacctctcggatgaatccggcctccagaagtcgcgccacctcctcgcggatgaaggcttgacgttccggggcctgccgccgcaccttctgccggaccggtcttgcgcccggccgtacggcgagacggtgctcaatcacctccctggggaccctgngcatgtccgccggtctccaggcgaagacgtcggcgtttgcccgcaggaaggagacgagcgcgtcttcctatttgtcgtccagaagaccaccgattcgtgtggtcttggacgggccgtcgcccagggcaacctgcttgatcgggacctcgtcgcacgtgatcatccgctgcctcggggcggttgggacggaggtgctgagcctctcgtcgccacccgcgggcttggatgcc

SEQ ID NO: 45676 - DNA, 440 bp, Oryza sativa
agcttatgggtgaaatgactcaataatacttcttcgatttgtcatctttgtactggggtgtacttaacctaccctagctagcttgatctaattaggcgcagcggcatgcatgtggttttgtgttcttagatcctatattttatggcagacatggtactggcagaatagagctaatgtccccttgccatgggctagagttcagcatgtgatttgattatgtacgtttgtcagtatagtttggaagaagatgagaaatgcgtttcaaatgtgcaattcatcaacaaccagcaacattgatgggtggttggtacttggtttttgatggatggattcgtgtgatgctaagtgaagcaccaaggagagcgcgatgctgaacatggtgatcaccgtgttccacctgctcttcttcgtgttcatcatcctggccggcctgtggaacg

SEQ ID NO: 45677 - DNA, 469 bp, Oryza sativa
  unsure (1)..(469): unsure at all n locations
tctacttattgctctgcagtaagcaacatatagcttgactaactgtatatgtctattatncttcttggcaataaactttctttttgaagctcttctttaaaccattcgctgtttagtctcaaggagatgtcatgaggaatagaatagtacctctgttcttttctgtatcgaaattattggttgtttcatgttctatgatgtgtaactttgaattaaactctgtagaacttaatattgttacaacttaatgtttcttatgatgcaaatctactgatgtagttcttttacgggcaatctagatacctccaaacatatcgatggttaatgtatagattatttgaccatggagattcttattgccaactaaagaggaatgtttggtattttttgtatcccagtaatggatttttagttccacagtgaagaactcatgaagagcatatcaccgttctctttaatggatttttag

SEQ ID NO: 45678 - DNA, 452 bp, Oryza sativa
agcttgataacaagtgtgcactgttcctgttgtcatggtaacaagggagttctaccttaacaccgaagaattcattgacgctgtggctcaacaactgcgagaaaagattcaaataccagctgtggtttaatcctcaatatgcaaattctatgtctggttggaagcctatcattgggtgcagcaggttcactcgctgtgcattcgcgcgcattttgattggggtgatgagacggatgatcccatttaatagtttgcctcgaagcgatttttgtttcagcctaccattttatcatgttaaactgttaataatctgctagtgctaagtgaattggtgatttcgctactcaattcacaacctcgcatggttgggtaaattaccttgaggtcaatacataagcgtagtctcattcagggtttacgattctgacatgcccttacgtttcacgcactgg

SEQ ID NO: 45679 - DNA, 273 bp, Oryza sativa
  unsure (1)..(273): unsure at all n locations
gcatctacttcaatagggtttctgttgtacgcatgttcttgattcctgaatgccttgtcgctttcttgtctattctaagatagactacagggttatttcttggcaatgtaacaaaatgatttatgagctgtctgggtgctgttgcttcctaactccccatttataattatccacgactgtctaaatccccaagttggaagctctacacccgcgcgggaagttgtatgtttcattacaatgaangtaattgatcgattaagcacttgatgcatg

SEQ ID NO: 45680 - DNA, 258 bp, Oryza sativa
agcaccactatcaccgcgcgagacaatgctcttcagagcatattaattcacacactgatcacgcggaatcacaaagtactacagtgaactagcctttccgtacagactaatatatgattaagttaatacatctaagatagcaacgcactgctactaataaatacatctcttcctctacaacctatacaggaagggaagaaaaggaatgataggaatcaggaactagatcactctctcctctgcatcctaacactcacc

SEQ ID NO: 45681 - DNA, 231 bp, Oryza sativa
catgtgcctgctgactagacaggaatgacccgtgtgtgcctaattaaccgactgacacttccatatggatcaggtcggcctgcatatctcggattaacgcgtagaacacacatatctactacccgtcgtaatcgctcaggaatcttggaacggtgctacagaactgctggcttatgatgctggcgcttgactcccttgcatgcacgacatagaaccatgtgatctgacttc

SEQ ID NO: 45682 - DNA, 419 bp, Oryza sativa
  unsure (1)..(419): unsure at all n locations
agctnggcatgaaaagataccacatcattatttatttcaagatgccacatcatcatccactatcaatcatcacatttaaacatcatgcaaacatgctatatctttttagtttttataatttaagagcttttcatatacaaacatgttaaattatcatccaacataattcacataatgtttcaatgtatatctttttattatgttttatgatatcctatatactgcaaacatgctatatctttatagtttttataatttaagagcttttcaaatacaaacatgttaaattatcatccaacataattcacataatgtttcaatgtatatctttattatatattatgatatcctatatacttatataggtcatcctcaattaggtagtgcttaaatgaataatctatggtccaaatatcttt

SEQ ID NO: 45683 - DNA, 411 bp, Oryza sativa
ctctgtcaatgtgattgcaatcaatgtggccgagtctgatgtgggttaccctatcagggtatttggcactgtgctggccagggatgagtacgatttcaggtgtgtctatttgttcaagcgtgacaggaacaattcacagatcatcacctcgccggtatgttactgattcgttcctcctccttgctagattaatactatttattgttcaaatccatatgccattgccttttcaatccgctgtctgatattctacactataaatgacctgttaattaagctcacattgttaagtgaaatgtggacggttgcatagatccataatggctggtgaaatgcctgatacgatagaaatccttgtttctgccattaagatcctactgccagatcttaaacctgctgccaaatcatata

SEQ ID NO: 45684 - DNA, 439 bp, Oryza sativa
  unsure (1)..(439): unsure at all n locations
agctngattctagtgcaaaatgatcaatatgtataatccgaacaagtaattgcggagattcgtgccggaacgtccgctttgcattttaaagaaaaggtacaaaaacatatttattccgaatcagatggggaaatgcactggagtaccgatgtttatcatgcgcccgaatatcaatatggtaatcttcgtcgattaccaaaaacaagccatttatggatattgtcagtaagtatgtgcagatctagtatagcttctttttcgctccacaaggatcaagatcaaatgaatacttattccttttctggtgacggaaggtatatctttggcctctcgatggctgatgatgaggtaagacatagactgttggatacttttggtaaaaaagatagggaaattcttgattattcaacgccggatcgaatcatgtccaatggtcatt

SEQ ID NO: 45685 - DNA, 438 bp, Oryza sativa
  unsure (1)..(438): unsure at all n locations
ngcttgacctatggtcaccagacaggatattttagtgacggtacgtacctgaatttgtggatgatgatttagagcattgctgccaactcgccatgtgaattggtactgtgctattccctgttatcttaaaccttatatttttctgttaaatgatttttctgttatctatacagtctttacagtcgtaaactactctatacagctttgatttgtggatggatgatgatatgtcgctagatgatttttctgttatctatacagtcttaaactactctttgatttatacaaatgctaaatttaatgcatatagtatacattcagatattttagttcgatttttctgaatgaagttntgaattagctcaacatggataactccatctgttctnntttttttgtacctgtcaaatgatcttagagaaggtgtgcatacactgc

SEQ ID NO: 45686 - DNA, 346 bp, Oryza sativa
cacttctgtttctccgaaggataactaccactagacgacgccttcaggttccgcaccacatccctttacacatgcccctgctggtccctccgcatacctcacaatgcccttctcgtcaagaccgcgttggaactcgttccctcttctcataccaaactggtgctacctccgcaccgatccacaaatctgtcctatcgaggcagccactgatgaacaaaaacattgctagtccgacaattatgtctaacatctaagcatcgtgtaagcgcaaagcacaatataacctacacacctactgctatcctataccaaaggaataagcaagttatggacgaaatatacaccc

SEQ ID NO: 45687 - DNA, 444 bp, Oryza sativa
agcttatagcaataaggaagtaagtattaggtttaaaaaacacgacaaatagattaatatgagtttgtaaagcagctttcatatataaatgttttacaaaacacgtactccctccgtcctaaaaaaacaaactctggtttccgtgtccaacgtttgactgtctgtcttatttgaaaaaattatgaaaaaaattaataagataagtcacgcataaagtattaattatgttttatcatctaacaacaatgaaaatactaattataaaaaaatttcatataaaacggacagtcaaacattggcacgggaacccacggtttatctttttgtttttttgggacggagggagtatcatttagtactttgaaaaacgtgcacctaatacataataaggaaaggaagttggaacataacacatatggcagagaatacagtctagtctgattg

SEQ ID NO: 45688 - DNA, 470 bp, Oryza sativa
  unsure (1)..(470): unsure at all n locations
tgtatacaacgtttcaagttttttcagctatattcagcttttataaaaaatattnttatgtggtagtatatgagagaaaatttgcttaaacacgagataatagcacaaaaatatcttatgtggtgtatgaaatatgttttacattaaaaacaacaataaaaaagtattttacatagcatataacagagaagttatattttttaaaatgaaatagaaatgtaaaaaacttgaaacttctatacaaaattccatgttgtgtaaggaggtcatataaaagttttcatatttttttaaacttctaatgaaatagatcaatttttaaccttgtactatagaaatgagtatgtccataagggtattttgggtatttttgaaaagaaggcctagcccaatggcatattgtagaacaatagataaagtcaccagtatattatataaagagataatgtctatggccaacccgttgaact

SEQ ID NO: 45689 - DNA, 387 bp, Oryza sativa
  unsure (1)..(387): unsure at all n locations
ngctntattgagactagtcaattactccatgattgaatagctgaaactgaaagcacaaaacagaactacggtgcaattcatctttccctgccggggacaaaacaaaagatgtatgtagctcaatgtcaggagatagctttctgcgtgtagaaacaacctaaaaatttcagatcaaacaaatgcgtgaaaatgtaaactctttataagttattcttaaaagcattgagtgctggacctcttctgtatcgttctgtgtgttttcgacctgcatttgttgaataacagttattagaagcagataaaggaaagctaaaatttgcttcaggatcttggntntgcaagaaatggtgcatagaatagttttgatgtttaggagaagagagcagc

SEQ ID NO: 45690 - DNA, 429 bp, Oryza sativa
  unsure (1)..(429): unsure at all n locations
agcttgatcaagcaaaacaacctgataatggaagtttgatcgtatccagtaagccattcatgagaaagaaggctattgttgagacttaccacaagattgcctcctcagctcctgacgccaaaacgtccacctgcctcttctcgcgcccttttctgcattctcatgcgtatttccgtttgctcgcactgcaacagggctaaccaggcagctgggcctcacgcttaggtcggtcacagtgcggtgagctggaccgggacttcgttgcgccatggaggattttggtcgacgtgtcgcgtgcgcccgcgaccatactaggcgactcgtccccacgcagagcagcgcanaacttcatccgagtgaattaaaataatcactacagtatcgtatagcaaattaaaagttttttgcgtgtcctaagaccaaaccacg

SEQ ID NO: 45691 - DNA, 387 bp, Oryza sativa
  unsure (1)..(387): unsure at all n locations
ntgcaatggccgaaggacttaattgcggcagcctcgcctcatagatctccaaaacagaggccaagaagtcgtcgcacagtagtcggagacccgcgtcgaagaaagcggcgaagaccacagtacgcccatcgcctggtctctggacctcgtcatcaacgggccaagaagcttgaccttcagtagttaccccggcaaggaccatccccggccaagtcggcatcttcgaccaatgacttgcccaagtagcaagttcagttgtcggtgatgctcctagggtcttcgcctgttgccctagcacgagcaggtttgcgaggcgccacgacagccgtggcgaaaggcgagaggctgagaagaanggaaagaggcgaaagctcattgtggcgaaag

SEQ ID NO: 45692 - DNA, 434 bp, Oryza sativa
agcttagcttgttccttggtcgcaaacattctcttcatgcgctccgcaattgggagataccacaccacctttgctgggcctcccctctttgacttacttccttcaccttcactctttgctcgtttgtatcttgatgccccacagatagggcagacatccaagtcagcgtattccttgtaatacaaaatgcagtcgttcggacatgcatgaattcttctgacctccaggcccaacggacataatacttgcttcgcttcatatgtcgtctgaggtaaattgttcccctctggcaacagatcctttaacagctcaaggagttctgtaaaactcttgtccgaccagccattactagccttaagcttcatgagttccaacacgcatgacaacttgctgtgcttcgacttgcatccatcatacaacggcatctggcaatc

SEQ ID NO: 45693 - DNA, 440 bp, Oryza sativa
  unsure (1)..(440): unsure at all n locations
tgtcgagctcttctcgtatggctagtgttcgatctggtgcaaatctccacagnttttgctatactggcttggcattgggtcgcaccatgagtttgtgctcaatcacttccctgcgtactcccggcatgttggacggctgccaagcgaacacgtcagcattgttgcggaggaaggtgatgagcgcgagttcctatttctcgcttagtgatgccccgatcttgacggtcttgtcggngttagcactggagagtggaacgatcttgattgcgccgtctggtttcggcgacttgcttgtcttgctcactttcttgggtggctctgctgtggtaagcgggctgggcgtgttctctaccatgtcgaggctccgctagtccatngcactgccagcttatcgttcactcgaatagtgattgttcctttcgttcctgcatcttgagcac

SEQ ID NO: 45694 - DNA, 458 bp, Oryza sativa
  unsure (1)..(458): unsure at all n locations
ttaagtcacctgcggcatgcaagcttcttcagcatcccaaagggatgggtttgtctccttcatttggntacttgcttgttgctgaccaatcacagaagcaatagcagcgtcgaatgaatcgaaattaatatggatctgtgagaaactcgtattattttgagaaagcaattgcttgttgtctgcagaaggtgcagcttcagataacaattcttcaaagcttatattatatatgcaatcaatccatgaaagcggcgctactttgctttgattaccctgtttcagaaagcatgtgaagaatgtcaggtcgcaagtgaaaataccattggtgatgctgggaaaataaaaactcctaatactcaccacagtctgtactgcattgtcctcaacagactgcgcagcaaagtcattcgggaactcactcaaatgaaccgtttgtttctgttccatgagaacaggat

SEQ ID NO: 45695 - DNA, 373 bp, Oryza sativa
gggagaatgagtcatatcaagagataaagccatgactctcttataatgacagacaatctcatgcgcaggatatttatataatacaccaagaaattatggttctgcgtgaagtggagatggaacgatgtttgtatagccggggatgggtaattaatgtctcaccacatcaagatatacgttgaatcatcattgtgtccgcgtacagtcttgttacagtttgcagattctgtattttgtcaatttgcaaattaaagatacatatgtggggccaaaaaagctgtaaaaatgtaagtcacgcaggatcttgtcggacatgagattgctccacatgtaagatatgcaggagtgttctattttcactatatgaggatac

SEQ ID NO: 45696 - DNA, 432 bp, Oryza sativa
agcttcctttaccgcgtgatgctgtgagtcgatctttcttttaggtatacgttaagtgcattaagctcctagcacaagcacattttacctcggatcccctcacattcagacaatcagatccctacttttgggagcacggaagtgtgggatgttcatctgttactccgtagtaaattattagagaaaataatcaaaatgtaatgttcagtcctcatgagcacctgaatgatagctggtaaaagcacgcaaagagaatagtgcatatgatccgtgctactactatcttgctagttgctgcgccatttatatatagtttgacttgcagacgatttacattggctgactgaaacttaaagaatggtcctgggttactgtatcttgcaggagatgacccaacaagagacgtacggtgtgtgtgtggtccaaatagaa

SEQ ID NO: 45697 - DNA, 445 bp, Oryza sativa
agcaaactgatgcttaagaatcttcagatagtggctatattcagatctgaaccaaaaggagcatactcgaaaaaaaaagtgtatatgcagccaggaaagatgttagatggattcatccccttcctcactagccagttcattctggttaatggttattggtgaattataaacttgacatggttggaaactgtaacaaacttgtaaattataagtttgtcctagtacatgactacactgagcgagaaaccactgacgtctcttcatcaggaaacaatggcatgagaagcatttcactctcattggtgtatgaagctaagtggataaacttctgaatgatcaatggcaaaaagaatgaactgtcgtcaactcataaccattcacattttgattacgccgaacatattaagtttcagattatgaccatgtaaaatatgtaccacaatgt

SEQ ID NO: 45698 - DNA, 452 bp, Oryza sativa
  unsure (1)..(452): unsure at all n locations
agctntgggatagtggctcatgagcaagatatgtgcatatctagaacatgcaaactggattccccaatatgtgctcggcaaatttggaaataacgtaggctaagcagtattcagttcagatagattgttaaattgcgaatccatgcaattaatatttagactaaagaattccgatgtgtatagactaatctgatgtgcatggacaactgcaatacatgatgacgatgcatattttaagaccattccaacattaacttcataaacattacgtttgacaattttcaaactgtacttttagtcaaaagcatgtcatagctcatatttgataaacaaaatggtaaatcacttgtaagcaacaaatcaaatcatgctcgaaccatctacatattatgcttaaaaactcaaagttactttgtataatgcaataaattatcgatgtgctgcaataattt

SEQ ID NO: 45699 - DNA, 473 bp, Oryza sativa
  unsure (1)..(473): unsure at all n locations
cgtacttgtgccgcgtgangcatncacgtatcgttgtgatattttcaatctgaactattagaagctcgtgcaccacgcgtgagaaatcccaaggatagtcgccgtcaggggacggcgatggcctctattatttttcctctttttgaacttgacgacaagccatataagagtcgatccgttcatgataattccatatgatgattgatagcgagagcattgttatggagatggattttcaatcactccaggaaatatctccttattttttatatcatttaaatagtcactaaagatttgaataactctgacaacatgagatatatcattccacaaacatacaaaatcaaattcaacttctacaagttgtaacacaataacaaagtaaaatgaaaatgagttatgtgtatttgcagctatatttgttacagcttggataagtcgagaattcgaattacatgttatggtaggtatat

SEQ ID NO: 45700 - DNA, 362 bp, Oryza sativa
  unsure (1)..(362): unsure at all n locations
agcttacttcacatcaggatagcatgattacaagcattgnttttgttggaatgctaataggagcttacacttggggtgtagtttcagacaactacggaaggaggcaggtccatcttttactccaatcactgattgtgttttctagcacacattatgcataataatctgatctcttggtgatgcttattgctttagcttagcaatgggtcacaaaagatggtctgtgaacttgtttccatgcacagcttgttccagttgatagttttagccatagttattaagaccggaccggaccggcggtctgaccgggaaaaaccaaaactggagcctctgtcggttcggtccagttaaaagaccggata

SEQ ID NO: 45701 - DNA, 306 bp, Oryza sativa
ggaacttaaaactcaagcttgccaattattatagagatatatttcttttcctgaaactatggaacaaagcattgcaaggtggctatctatcaacttcatctgcctatctcttgtagggtttgactgtgcaagcattccctaactaatttaaccgtcaataacttgctgtctcggcagagtctcagattccgatactactaacgctgttcctctgcatccaccggacattgccggtttggcttggtcaatcttttgaacggccggccgcgaatctcttcagtcttcaatttcactggtcttctggcc

SEQ ID NO: 45702 - DNA, 434 bp, Oryza sativa
  unsure (1)..(434): unsure at all n locations
agcttggaggctgatcacaactcctgtattctttgccccgagntttaaaggcgaaatacttcccaagtggaagtctgctggacacagccttcccgacagtttctttacctacctggaaaggagtccaatatggtttggatctgatcaaacaaggcataatttggagaagatggtggcacaaggtgagcgagtcaatgtcctgtggaaaaatgcaaggaacaggctaatctatgtgaatgaactaatggaaccggggttgaaaagctggaatgaaaacctagttcgtcatgtgatgaagaaggatgatgccgaagaggtcctcaagatcaggttattggaatgccaaccggatgattttccagcctggcatttggagaaatcaggactgtttaccgtgaagagtgcatgtagattggcctggaacttatctaatc

SEQ ID NO: 45703 - DNA, 433 bp, Oryza sativa
  unsure (1)..(433): unsure at all n locations
tanaagtgctcttntttttcgcaggaatgaggtcactctatgtagttcaatttgtcatcgagtccagaattcatccatggaccatataattggatactacgtatcccccaacttacaaaataaggcaaacgaggtccctcgacagtattgtccccagttttagctgacgtggtatctacgttgctcctttgactaggtctttatctcacacggcattgacttgcttacgtgacaattcgatctaaaaaattaataaaaaccattggacccacatgtcaattacacacaaaatcctcactcctcccctcttctatctatccccactctctctctctcatgctaagagcaaggcggaacggagcaagatggtggagcgaggcatgggcgggtgatgcatgtatgaagaaccgaacgggtgacgggcggagcatgt

SEQ ID NO: 45704 - DNA, 374 bp, Oryza sativa
  unsure (1)..(374): unsure at all n locations
agcttaacctcttgcctacctttactactcatcaattctatactttncagtcatcttttcaatgttgaggttagttgactcatgcattttcagaataaattcagcgtgtgccttaggatcattatgaaccctctcactagtaggtaaaggcaaaatatcaattcgagcacgagggttgaaaccatacactatctgaaaaggacttaccttggtagtagaatgtgttgcccgattgtatgcaaactccacatgaggcaaacattcttcccacatcttcaaatttttcttcaaaatagccctcaatatggtacccaaagattggttgactacctctgtttgccatctgtttgcggagacatgatgtagaaaacaat

SEQ ID NO: 45705 - DNA, 453 bp, Oryza sativa
  unsure (1)..(453): unsure at all n locations
acatgtaaacttgtaaaatctataacatattgaaaacaactcatcttagagtaattcaaattactgctaactcatctaatcaagaactttagttttattgcataaaaacttgcactcacaatacaatttctgtctctaaaattcatctacgtaaaatcacatataaaacatacacaggattataaaatgcatacaaaattcatttcaactcattttagagcaaacttagtttctacagattccccaacatgttctctaaaaaaaagtaaaataaaacgtatacacactntacatcaaatgcctctaaaactattatctttaanataactagttctgcataagctgaactttagaagtttatataaaattcatcttagatccttttcgagtaaactcaagttctgtagaatcatagagttgtgcacttcaatgntataaaatanaaagacatac

SEQ ID NO: 45706 - DNA, 442 bp, Oryza sativa
agcttagatagttagttaaaaatgacactatataagttagttctaacaagataaatgttggttcatattaacaggagcttataaccagatttctaacttagatgaacttatgtttacagattttccaaagttctgaacagcaagcacagaggttactaaattaaggacaaacgagttcttagttactattacatccatccaacaagttcttatataaatggagtacatggcagccatattacatatattacataccatgattttcttccaaaatgggccaccatatacctagcgtattccttaagcttgtccttaagtcataccatcgtggcagtagaggttagataggactattgcttagtctctcatcctcagcttgaagactcgaccataccattgaacatactctggcggtccatacggtccagtagttccaagtgga

SEQ ID NO: 45707 - DNA, 423 bp, Oryza sativa
catcgcgacctggccgtaagtgcgaagcgggtgtgtactttcctctcctctcataagctccttcaagatgaccttgttgtcggcggcaagcacttgcaacagctccttgtcgagccacagtatttgaggcccgaattccacggatgctgctgaagctgccgccatgattgattataaagtccactctgcactctgaactttgcagtgctatttatactggtctgggtgaatctttgggccgctcgctagatgtcgatatacgtacctactacgtactatatgcattctgcagaggcgctcgaaatcacgtagaactaaatatagaatattatagtgcatgtgtccgtttgccagaatcactctactacattcttttaatgatcttgataccttcactttatcgttttcattaacacgctcttc

SEQ ID NO: 45708 - DNA, 438 bp, Oryza sativa
  unsure (1)..(438): unsure at all n locations
agcttgntgctaccatagacaanggcattgtatgtgcctgtggccatggcactgcaggtagctgcattgtttggctcgcgggacactcgcttggtgcttcccttgcgctggatgtggggcgcgccatgatggtggagcaaggctacaacctcccgaccttactcttcaatccgccacaaatgtcaccgactccagcgatcgatgtgctgctaccgatagagaaggcacacaaggcaaagagggacatatatgccgtgagctatttcgtgaacgcatggttgggcaaggtcttgaatccccacaaggagcgcatggagaacctctatcagcggttatcaccatgggcaccggaactatacgtgcacgagaaggatgtcatttgcaagggtacatcgactacttttagcaacggcagcaagtgcaagagcgcattcgtgc

SEQ ID NO: 45709 - DNA, 310 bp, Oryza sativa
  unsure (1)..(310): unsure at all n locations
gactaagnagganaaccaaacaaggcggtgatagaccaagtaagcaaattgaattgataaaaaatcaaactccattattatgatgatagcccccgactgacaacttcaagaagaaaacttgatgttgacagtcaaagtatggaagtacaatgattagcttaagcgtagaaacgacgaagatgttcaatgttccaagagttgtcgacgagtgtaccgttttcgcgcttgagtcgataggaacctggtcgggtgacttcagagatgataaatgtgcctttccatagaagagataacttgtgccgatctcgtg

SEQ ID NO: 45710 - DNA, 392 bp, Oryza sativa
agcttaggactgggtaatagcatgatatgtttttccgtctgtcattttctttctgtctgcttggacagagcagagcttctgcttgtttcagaattgaaatgttggccttttggtagtactacgttatgtgctcacactgagacaggttattaacactaagcatgaggaggcacatgtagcttgccgttccaaaagaggattaatttggattgagcagagcaggtgttgcccttccaaatagtagcagaacctggcggtttcaagtttcaaccgatggctctttgaggggtgcaggattagttgctccgctcattgctggcgctcccaatttgaccggcttttcaccggttctttccgaaaaccggcggttcaatcgggttctttcaggttga

SEQ ID NO: 45711 - DNA, 406 bp, Oryza sativa
  unsure (1)..(406): unsure at all n locations
agctntaagcatgtggttttctgcaattctgaccataaaacttgggcttttctaaaatttactctttagattttgatccaacgatcagattgaagttttttgcagctctacaggttagtttattttttaaaaaaattaagtgcatgtcacattgaaatttcgttagattccaacaatttcatccgttacttttcgtgtttcttggaaaaaaaatcggggctacatctagaacctctgtttcaaggtgcacatcacagggatttgaaattgggaagttgtcagtgaacctgaagggatgacgaagccaagcattgtcgatgacggtaaatagttcactgaagaaggaggagatgctgatacaagagtgggccgggtctattcaagacgcgcaagaaagaagaaccca

SEQ ID NO: 45712 - DNA, 380 bp, Oryza sativa
  unsure (1)..(380): unsure at all n locations
agcttcgagttcacaagattatgttctgttattatgcatacngctaaggacatggacatgccgtatgagncgatgtataagtatatatggtatctgttaatccactctacttcaactaaattatagattacctcgatggatatatttagcttgatgaaaactgggctcagtgtttaactgaaacttcatctatgttccattgtacccaactgctgcatatgctgctgacattttgggtgttgaattttcaatgaacgtacagatcgatatgcccgacaggcagccccagtttgtgctcctcaatgtgtataggccatgtcagagcggtcgtctctagatccggctttgatcactgttctgatctataaatccttccttcc

SEQ ID NO: 45713 - DNA, 343 bp, Oryza sativa
agcttgcctactgccaggccagtagtttagtgatatatcaccacataccagtttattatcatgttggttataaactgataaatcaactacacaagtagcagcacgccagcactaagccaccaaccaaccaccggatttcacttatggtagttcaaccgacacccaaacacaaacatgcagtgatttactcacagcctcacaggggaacaaaggaaaaactgcttagtggtcttgtgcctgctgctctgcttggtgagttggtggtcttgtgcctgctcctcggaggtggaggcgctactctgttgctggccgcggaccagatagaccgctgcgcgcggaggcg

SEQ ID NO: 45714 - DNA, 364 bp, Oryza sativa
  unsure (1)..(364): unsure at all n locations
tgcaatagctaagggtggagcaactacatcgcttgatttttgtctaacatagtgctcaagtagcatattgatagaatgcggtccttattgcttgtaaaaagtcactctcttcatcatttttgctatatgttgatacttgtgattagctgtgcacatatgcatgtgataattacttggttgtaccaatgagccattggtaaactcttggtcatctgattaacaaaccaaactgccatgttgagtgtaagtttgaaatatgggattcaagtggctaacatttgatgagatatcatttttcttgtccagtgtatatatagtngcatcagttatatacagttcatgtttggtgatgtactgtcctacc

SEQ ID NO: 45715 - DNA, 414 bp, Oryza sativa
agcttaaagaatgcgctgcgcagcagatggtttatctgttgtcagtggacactggctcaagccggaaaaggcaagtattctttacgacaagaatataattctctctgacggaacgagtttcgcgcgagtgctgctaagtcgtataggcccgaacccatataccccggatgagataaatcttaattacacaagatatcagagacttatagatatgattcctgaattgaaagacgaaagtaacaggtttgatacatcgaaaatgatgcgccttatcttcagagcatgggtgcgtcttctggtgtatgcatccgtgcgatgcacaagggattcccatgccaagcagctcgcctgtggtggtgagctcacaacaatcgtctggattcttaatgaacacgctggtgtatttcgtatcga

SEQ ID NO: 45716 - DNA, 253 bp, Oryza sativa
tgtgattaagctcatgagggctgaaactatgttcaaaaccaatatgcttggttgtgacttgtgagcacacacctgatacatatatatgtgcaaattactaaagagaacaaaggtgtcccatttcatgggagttgctgacaacaatggcttctttaaccttttttttttctttttgtgcatgagtactttgttttgtccacaagggaatcaagataggaactacctaccatacttaaggcctacccatatgcat

SEQ ID NO: 45717 - DNA, 362 bp, Oryza sativa
actcaacctgatattactatatttccttcgtaatggcaaggtggggagtggagaatctttcaaaaaacttggttcaatgaatttgattggctagagtatagtggttcaaaagatgcagcttattgcttgtattgttacattatctttgaaccgggaaaacctgaaaagtttgggagtgctgtctttgctaaggaaggttatgtcaattggaagaaaggtaaagataggcttaccgtacatagtaattgcaagactcacaatgatgctaggaataaatgtgaagactttatgaaccaaagaacaagtgtatctaaaaaaattgagatcgttagcacggaggaagaaattagatacaagattct

SEQ ID NO: 45718 - DNA, 345 bp, Oryza sativa
tcccatcggcagaatccgagatgctgcaaccgaaaatgattctaaatcgacgacgccaatgacgattaccacaattcactggtaacaacatcttctcacactactcattatgtgcactcaaaataataatagctgcctcaaaagcactcacctcattatatacatactctgagtcagattcaccacgcgccatgaaacaaacatcggagatgttctttcccttgtcatcaactacactatcaccatctacaacacttagcggctcgaaggcggagtaaacttagtgaaaagactacctgagattgccaacttactcccttgagatgaaccctacaacttgaagac

SEQ ID NO: 45719 - DNA, 348 bp, Oryza sativa
  unsure (1)..(348): unsure at all n locations
tgcaagcttnntaacttgctagtaatctttatagctttaactttgttgcaacattgttcaaatcacgaagcggatgctgtagccgctaccggcactctgttgttgttgcggcccgtctcccagatggggtcagcacgaggctgatgtggccgcgcctgaagaaggagagggagaacgtgagtctcgtaagaggagaggatgacgactccagagggaggcataggtggcggctcgagaccgcggcggcggcgcgaggcggaatatggatatgaagatggggaggcggtggctgctccaaactgcggttgcggcgcgaggcggtatatggagagggagagggagaagggg

SEQ ID NO: 45720 - DNA, 313 bp, Oryza sativa
ccaacattacaatctttcaaatgatacaaaacagaatgtggatcaagttaccccaatcttgatgagtcccgattctcaatgtttactttaagggagaattttcattgaaaatttttcccgtaacaaactttacaaatctaagaatatggcagtaatctccctctatttatttacatataaaaatatacagtttgctagataaatagtcttaaaccacagaaatgcctattgataatgagaaactatcccatgtaaagaataaacagcattattatggtatacagttataatactaaaactgcgtctctgaatt

SEQ ID NO: 45721 - DNA, 377 bp, Oryza sativa
ccaagtttatctaacaaagctgaactgaataaacaaactggatagttcttcatgcactggtgcacgtctggcaagtgcaactcacggcgccgtcgtgccctctgcgtcgccggcaaccctgtgcgtctgcttctcctcgcgttgcgccttcgctctcttgcattgatacgtaatcccgaccatgacatctctcccctccttcgcaaacagctcgtcctcgagctagaactctgggtaatgatggcgaaacgcagcctcattctcccgtgtcgcatctgctgcagccatgccgtcccactggatcaagacttcacgttcactgcgtgctatccttccacgaatcacggcagccggacgcggtagcaccctgccattga

SEQ ID NO: 45722 - DNA, 442 bp, Oryza sativa
  unsure (1)..(442): unsure at all n locations
ctcgtcccggatccttaagcaccgccgctgcagctttcaggctttgcggagctgtgttgtggtggctcagattttcgccactcgcccaatctgtgctcgaaattgttcgcggtttccgctgttgggttcactgcttttcgtttgcaggaatgggttccagaagatggacaagatcaaggactccaacaggcagtccaagcagctggaagatctcaccgggaagatgagggagtgcaagcggtaggtctccctgcctgcctgaacactactgtgtgctctggtgatgcacaggctcacgcctgaacccatggtttagtttagcttctccatctgtgcgccattgatgttcctggcttgaacaagcaatttagatctttntgcatgtggcgcatgagttcttgcactgctctgcctgttagatggagcactaatgtcttgatag

SEQ ID NO: 45723 - DNA, 343 bp, Oryza sativa
tcacgggccgtgtgtcctatcatactattgctgggaggtcaacgctgctgaacggaatcaaacccgctatctttttaattcaatcacagtaagggcactaacatcttcatgcgaacctgtgcacatatgcacattgctgggtgtattgaaggatgcaccgcggttttctgcacatggatgactattatgcgtcaccacaagatgcacaacatcatggccagcatcacaagtatataatcatcacattggtgtcggtggatccagattgagatttaattaaaatcagagacactcattattgtaaaataccatttgaagaaaaaggactggcacttaacgactt

SEQ ID NO: 45724 - DNA, 371 bp, Oryza sativa
ctaacactccggtagggatagaggacattttttctagacgaataggaaagcagggtttccacaaaagcaaaaaattacaagaagcgtgccgcctataatgtgaagatgcgccatgaaatcacagatcaagtcacacaacaagtcacccaacagttctactgtcttgccgcacaacatcctcaagccttcccaaacctggttcctcaaggatcgcagtcgacgcagatcccaagctctgtccggtcggtagaaaatacaacctacccggtagaaagataactggtccgacacatgcagccttgtcgtccgatagggagaggggaaaaacaaagaaggtgtggtccaattgcgataccggtagaagttccata

SEQ ID NO: 45725 - DNA, 425 bp, Oryza sativa
  unsure (1)..(425): unsure at all n locations
agctntagctcagggatcctccgtccgattctctctcctcgctaggcatggtcctccttttatactctaaggggataccacatgtgctgcgagtgctacctaagtagactacaggcctgacaggtgggccccacctgtcagcggcagcgaacgcgcgcgcgggctccgctagacttgggccgacttgggccgaggaggagagagaaagggttttgggccgactttcggcccaaagccaagagaggattttaaaaacctttttcgatttaaattattcattaaatgcaattccatttattaaaaatactttcttagctcaaataaatcccagaaaaatctaggaattatagagttaagtaaagtatttaatgaaattttatctggccccattttatattggaatctattaattaaaaatagatctt

SEQ ID NO: 45726 - DNA, 257 bp, Oryza sativa
  unsure (1)..(257): unsure at all n locations
tacgagaagcctcataaagcgctttcttatgggttaaacttccattggtccatatttctaagaaaaagtatctcatatnttgcatttccattcccacaagcaaaaatactattattcacatttcgaacaggcatggatacagcatctataggataacttccatcttgagtgttctttctgacttccgtgtgatatccgcgatctctcttgatccgtaactcaatacggaaatccgtgggttctgtcaagttagctat

SEQ ID NO: 45727 - DNA, 427 bp, Oryza sativa
agcttcaacattgaggacgatctgagttgttaaacatctctgaatcatgcgttgataggttgctcctgcgttcttcaatccaaagggcatggtgatgtatcagtaggccccaaaaggcgtaataaatgaggtcttcgagcagtcggattcttttagtcggatctgatgaatccccgagtagcaatccaaaaaactgagcagctcacagccggccgttgagtcaactacctggtcaatgcgaggtaacccgaaaggatctttatggcaagacttgttgaggtcggtgtaatcgacacacatgcgccattgtccggtcttcttccgaaccaggactgggttagccagccaatcgggatggaggaacttcttgatgaagcccgctgctaacagcttggttaattcctctatgatcaccgccttcctatct

SEQ ID NO: 45728 - DNA, 352 bp, Oryza sativa
ttattaccggaactatattagaaatctattcaacatatcggcatggccgaataaaaccagcatgatacaaacgagtaatttgaactttgatatcatcatacatatcagcttgacatctcctaggcgggtgttgatatggccgataccctagtttaataggaagccgatgttaaacaatcgatcggctaagacctggcatctcgaaatattcccaagcaaagcaatctctatattccttcaaaagctctattaactcggttctaaattcatatgataaactcttactgatgaaagtcggccttggtctatctcccggacctatatcaacttcttctaaatcatcggctgacat

SEQ ID NO: 45729 - DNA, 413 bp, Oryza sativa
  unsure (1)..(413): unsure at all n locations
agctttggatgactatctttcttgtttaataaaattntgagtgatcttagatttgttgattcttcttatgatgctaattatccacaatttgagatttctcgccactttttgaatggtcttgatatgtctatttgggagatgaaagttacatctgttcaagagtccgttaatatgtctactttgactttagattcgctttacacaaaactgaaaacacatgagatgaacattctttctcgtagagttgattctaagtcgagtgctttggtttcttcttcttcttctttggatgttgatgcttcttcatcaaagtcttctattcttgctttatgtaatgccacatccgatgatcaactcgaacagttcaaggaggaggatttggctttggttgctaacagaaatgctcgagctat

SEQ ID NO: 45730 - DNA, 367 bp, Oryza sativa
  unsure (1)..(367): unsure at all n locations
tgttgacgtcaccgagtgcctagcaggtatttttcgttctctttgactagatatgatagtgtagttgattacagatacatttgggtgggattcgcatttattattaattcttattaaagggaggatcatgaccaagagagcgcaatcttccaagctcttattntatgatctttatggcggtggtgagaaagttcaagttattgctgatgccaagtaaaactgtgtctgttcaactgtattgcttaccttttatgccatatagctggtttgttcccagacactttcagcatttcactcaaatctcactatgtgcagatatgcctgactaaaatgcatccttttggtaattntcatatcagctaaatct

SEQ ID NO: 45731 - DNA, 351 bp, Oryza sativa
  unsure (1)..(351): unsure at all n locations
agctncagatgtattacatataatctttttgttttagtacaatcgcaactattggaatagtaaaacagtttatttgctgtatttcaaacattggcaccagcataaacctggatatttaagatttaaagccacttactttgccacaggtgtcaaatacatcagcactccgccagctaacctaacagatgctcagcaccattagacctaacaagctgtctagaatacatatgcatgcttaaaaaatcatctaactactcacacagtttggtcagttcgccgaatgatgttttctatctgcatgtcttgctctcttgatcatactcctatcttcttgactgatgtatccattcc

SEQ ID NO: 45732 - DNA, 376 bp, Oryza sativa
cgcaagctgcatctactgagacttagcctaatctatctctggtcaacaactcttttaactaaaataatttctactgcggtttgttgatagtctaggagataattcttcctctcttttttttcaaaagagcatagcaggagctctgcccatttcacttagaagagaagagaaacaaaaaaatacacgatagaatcgatcatgttacatgcctcgatagaagcaaatgacaactaaaaagaccaacataaagagagaaagggataaaactctctcaatggttcagcgtgttgccgtttgatctggaagctatgcattggatgctggagctaattgttgcatactatcttgaaccgagaacgaatgctgcttatttaat

SEQ ID NO: 45733 - DNA, 400 bp, Oryza sativa
tactgtacacaggattaggggctatcttttctcatgaaaatcatcatgcacacaggagtatggtattacgcttcatagcggtccgaacctgtataatcatccttgtctcactttcgcaagtagccaagctcctctagagttaaccgctttcccggccgaactcacaaaggggggcctcacaatcccccgctggagggaatcactcttcgacaatattgataatgaccaagccttgtcgagaaagccgaaacaaagtttgaaagaaagggaaaacaaacacacacacttgacaatatcataatgtttgcacctctagattactagcacgccaatttttggcattcactaacaacaatgtggcacaaaattcactaacctgatagttttcttacctatatat

SEQ ID NO: 45734 - DNA, 418 bp, Oryza sativa
  unsure (1)..(418): unsure at all n locations
gctattccccgatggttgtttgactctttgaagtgagcgacttttgtcaacctatcaaccactacccaaatagaatcatgtcccgccgacgttctgggtagaccggntataaaatccattcctatttcttcccacttccactctggaatcttcaacggttgtaacagactggctggcttctgatgttctgccttgacccgctgacatacatcacatagagccacatattctgctatttcacgtcgcatactggcccaccagaattgttgctttaggtcttggtacatcttagtgcttccagggtgaatggaatacaaagtttcatgagcttctttcatgatagtatccttcaactccttattttctgggacgcaaattctttctcctaaccacacagatccttgctcatcttctacat

SEQ ID NO: 45735 - DNA, 357 bp, Oryza sativa
  unsure (1)..(357): unsure at all n locations
gtttcgcaggagaagaagttgaagagttccaaggccagcaaggcaagtcacacagatcccaaacaaccctttgagcatgttgatcctattaaagctattgtttctattcaaatattgcatttattttcgaatgtcattgggtggaattaacctattgtttgttatagcccttttgttcttgattaccttattccttgataccttgggttattgtaacttgactagttgagctctacatgttggttcaactagatgtattagatataattgcttagccctgcttagaaacattagcacactattgggataacttatgaatcactantaattaatgatggcttaatgatagttcacgat

SEQ ID NO: 45736 - DNA, 326 bp, Oryza sativa
ttgacattcatttgatatagcttaaaaatgacggtagtagcaaaagccagcaatatgcgaattgactcaagtctaactatccgggcaaatgtttcactgaaatctaatccttcgatttgggtgaaccctttgcgccactaaacctcgccttggtccttatcacgaccccggcctcgtcttgcttattgcggaagatccactgtgtgctaatcacattttgccgaggtcgctccaccaaagtccacacttcattccgggtgaagatgttcaactcctcttgcatcgccatcacccaatccggatcattaagagcttcttccaccctt

SEQ ID NO: 45737 - DNA, 357 bp, Oryza sativa
ttatgggtcctctattgtgcttggaggaaaagactttagtgccctcaatggagatatgatgggtggaggtgggaaggtaagtaaggggataacatgggaataaatattacattgacgtgaatgatgagataaatagtcagttgttcgggccgaaactttgatgggatggcccagaccttggcctatatcttgatccacccttgagttgagaggaaaagactataatgccctcgataaataagtgatgagtggaggtgagagaatacgtatgggataaaatatgaataaatttgaatatgaagtgattgatgaaataatacgtagtgattgggccaagctttatgagacaccccacct

SEQ ID NO: 45738 - DNA, 365 bp, Oryza sativa
tgctggcattgctactttggcaagtttattttttaccacgtgggtggtgctcgctgcgatgaaagccatcagctatatatggatgtttgctgatctgccattgtgcattagtgcagtagatctatcatgcaactttcagatgaataacgtgctgtagatgctcgagtaagtactcacacggcaaatcgcatgaggtcgatatcttgtggattctctagtacggctgtgtttagtttcatgtcaaaattggaaatttgatttaattggaacgatgtgacggaaaagtaggaagtttgtgtgtgtaagacagtttggatgtgatggaaaagttgaacgtttgaacaaaaactttggatctaaacatg

SEQ ID NO: 45739 - DNA, 372 bp, Oryza sativa
actaactgaggactgatttcctttagctgacaagctcttattttttggtatgattaactatccatcaaagctatttttactgaaagctcgtgcaagaaagacactaaaaaaatgacacagtggaaagaagggcaacgcggctacccattttgcggaggatgattttcatatgttagataatgaaccatctgtgctttattttgttccttttaccttatgtactttacctgtacctctgatgcatattcgatattaaggaacggctcatcagacttgaaaagcacagatcgcattgagcgaggtgctttgaggctgcgtaatcttgcctcattatttgtggactaatgaaaactgacgaattactgccaagtt

SEQ ID NO: 45740 - DNA, 429 bp, Oryza sativa
  unsure (1)..(429): unsure at all n locations
agctttagtattagattgatgggttcttcgcttactctgaangggatgttctcatcttcatcagtagcggcagggggggtctgggaaagctagcttgatgatcgggatgctgatttggaattggagaccctggcgtcgacccacggcgccatcccagcctcctccttcctcctcctgctaagcataaatatatatccttgtttgtctgagtaaataactcaactcgcatatgatttattagaacaatctgtctaataatcatactaatattaattagggaaaatacgttacctccttgcacagagatggcagtacagccaagcactgggattggagaagcagcacgctaattagcagcagcaataccaggatcgtgatacctgcagctagacgacgacgagctgtaaatgtaatcactactgaagaaac

SEQ ID NO: 45741 - DNA, 406 bp, Oryza sativa
gttgatgaagatgacgttgtcggcgatccaatctatagcggtgtagtagccgatgataatgacaaatacgctcatcaaccgttgcgtagtagagcaaccgtgaaggcgaaataacaagctggcaatgacagaagcaaccggagacgaagatgtagtcacccattagcaacggcggagacgtctggccgatgaagtataggtgctggtgatgatgtcaatgacaataatccatcaaactgttgagaagacatcgaagctcaagtaattttcttgatgtgtgcataacgaagaatgatgccacacccctttgattgtaaagatggcagtagaacatggtggtatagctattacagaagcttcacttggaggaaagtagatgttggtgtctaactcatcgaatctgagt

SEQ ID NO: 45742 - DNA, 425 bp, Oryza sativa
  unsure (1)..(425): unsure at all n locations
agcttnctanatgcgataacttcttctacttagaagccccngagagaagcacattggcgcggntgtgaattccacgatggcacatacacaacacccattctagattgtcaattatcttgggagcaagatcatccaagttcttttggtgcatcattcattatcacattgatctaaagctgatagttatggtattcagccggaggagtctctcagagtccaacattcttttgtccttgtagcactccggagtgtcaattgtaggctacaacaagttggtctccacctcatcatctatgttgtacaagatgacatgggctgggacattgaagagcatagacagctctcgcacctttttcagcaacctagaagagcacctcttatatgtggaccaccagaatatggatggcttcattggtcattggatg

SEQ ID NO: 45743 - DNA, 374 bp, Oryza sativa
  unsure (1)..(374): unsure at all n locations
cactacaactgacagctntacaagtcaattgctattatattgatttactagttaactggttntcatgctttctactgcaatatttttttcgtgttatttttttcagaagtgaatgcatcgcaaacgttggaattgtattgtgtacaacttgtgctaatcagattacttatattattgtattctgcacgtatacaggatgagaagaagggggtggtggtgggattgccggagcacgtctgaattagacatacatttgcttttaactaaggttgtactactgctttcttagtcttaatgggttaccaccgattttaggattctgtgaggagtgtcatagagctccattgacaatatattgcatatgtcaccaactg

SEQ ID NO: 45744 - DNA, 424 bp, Oryza sativa
  unsure (1)..(424): unsure at all n locations
agcttcngctcgtcgggcaggaggttacttcatgggatttgggggaggccacgtggtggagcggcggtagcactcgcgcggggccaacttggcctactgcccctctactgcgtggcaagagtggagcggcagcggccggcgggagaggacagctgccatggctccttcaattaagcagcatcaaaccactgctcaatccccacttcaaaccatgtagtacacgccgccgcctccctgcgcccggccgtggtcgagagtgtcagtcccagccaggcggcgccatccctggggcattcggctcaggccctcgccacggtcggtcgctgcgcgaccaggtggctcgccacgaccgtccccggtggcgcccctactgcccccgctttgtctgtctccgtggcgacgagcgcacacgcgctcgccacga

SEQ ID NO: 45745 - DNA, 378 bp, Oryza sativa
  unsure (1)..(378): unsure at all n locations
cgatcctagcgacgacgagctcgtcggcggctacctgcttttgcgcctccagggccagcccctcccgctcgaggcggatcccctgagcgcgcggccgcggaatcttgccgcggatcacggccgcggcgacgaagccttcttcttggcggaggcgcaggccaagaacgcgaagggaaagcggcagaggagcaccgtcgaggggcagagcatgtgcgtggacggcgggaggctccgcgtccctgatgacggtcgcggcggcggcggattggctatctcgcacttcttgccgctgtcgccgtcgatcgttccctcgccagcaccgtctacncgctgctccacctacacgccgctgtccccgccgaagcttctcgcggatca

SEQ ID NO: 45746 - DNA, 339 bp, Oryza sativa
tcacgggcctgctaactcagttacatatatttcttaagctctcgttaacacgctcgggagaaaactccttcagtctcctctccccatatctctctttctccttgtctccgagggtttgtcgctggcaacaggaggaaaggggtatgcttgatctgttgaatactatagataagaggaaagtggtgctacatatgtctacttttgctgaccattagaagaataagaggattcttaccgaacatttgatgaataagaggaaggcttcatcatcatcggcagtcaatcaaaagattacacatccactgccatcaacagataaattcattacagctcttaact

SEQ ID NO: 45747 - DNA, 351 bp, Oryza sativa
tgcaaacagggcattgactggtccaggaggtccatgtatttttattgtaccacccctccatttggatgtaggcacacagcttagctgccagcctacatatagcatgtccaactcagtcataatttgtgcgttgctatgacgaccgctaccaacttgcctcgaacagctgttctgctcatctgcatttctgcatacaggcacgcaggccagttgttatttgccgaaattcaggtttttggattattttcagtgcacgcctggaagtatagcaattaggccgagcaccagccaagatttgcatgagcctggccagtctgttgcaccgttgcagactgcatgaagatatgcaca

SEQ ID NO: 45748 - DNA, 339 bp, Oryza sativa
ggtccccggatgctgccgcaaaaagacgtcagcgtatccacaactatatgctggaaggcgagccgaggcggaggaaatatggcggccagaggtatataataaagacatgggaggggatgtccggtggggaccacattccttttcacaagggcaccccacgatggctgtgtgcgtatacaaaagtggcaaactggtaagaaagttcctatctccagtgggcaattactataaccaagcaaaaatgggcatctagataagtaactaatacttcaatagcccgcgacactggctaatcaccagacaatctctctaattatcctacatatccttggtttccta

SEQ ID NO: 45749 - DNA, 291 bp, Oryza sativa
ggcttatggtttggctattttaaaggggtagttggagaatacccacgagcaatgcaataagttaaccaaaacccttaacttggttctctggtacatactgaaacagtgagttatggtccaccttaattgcacaatgtaaatatacggggaaatactttttttaagggaaatcttgactccttgagtgcttataaataaaataattaccaaagtgtatgctctagttatctagtattgcgtaaaacagtgcttgctcaattttccgaccaatttgatgctttttctacctta

SEQ ID NO: 45750 - DNA, 411 bp, Oryza sativa
  unsure (1)..(411): unsure at all n locations
agcttgcccctagtacgctatctttcttctttctttntgntngantcttctctcttctcaagacgtgatcgatgcgagccgctttttggtcgcacgtatcggcgtaagcacgctctgccaggggcccctgcaccggcacgacgctgtcacggcggctcgtgacgagacgaggcgcggttcggttggttgggcggttgattccgccgagatcgacgaggacgacgcgacgacgcaaaagctagcgacgttcggttcgtacgtgccggtggcagatggcacggccggcgttcacaatgcgtataactggcattcaaccttaggcagccncagccaagattccacgccacgtcggatgtttccgttaccaagtgaagaaaatggagcctaaatgagtcgcatgtttctcgtcag

SEQ ID NO: 45751 - DNA, 410 bp, Oryza sativa
  unsure (1)..(410): unsure at all n locations
ttttctcaatatttgctacttcagttctgattcagcagttcaaatcacctaattaaaatgttagagagatttctttgaatagttctgttaacatcacactttgctgtgactnttgggtcttttctttttattctgcagcaagtctttcttgaagaaatagagaagactgtagcacttttggtttttgaagatataaagaactgtccatatggggaactattggatgtttcccaacgattgaagacccgaagtgaagttaatgctgccattcttacaagccaaagtcatgagaaaggttagcacatgtgctttgatatagtattcatattgagacctaatatcactcggtaatgtatcatgtatctacatgcaataccagtttgtgctataataagtttcatacctaatta

SEQ ID NO: 45752 - DNA, 402 bp, Oryza sativa
  unsure (1)..(402): unsure at all n locations
agcttggtgaaggagaacgtgataatggtgacagaccaggaggcgtggagaagcagaggtatagcaatgcaggacgtggagggggtagtgacattgtggataacaagtggcaacatataagcaagataaaatcttgtaccggaaaaaaaagagtaagttcactttagatctcttaatttattgctgagtctgaaattcatcgctcaacaaaaaatacaaggtataatccatccctcaactcacaatattgtgttaattntagtctctcgacaatatagtggctggttttagctgacgtggcgtgtgagacccatgtgggccccattagtcaatggctaactcctctctctcctttccttgtctctctcttcccacgctctctagggcacgcgatgaagtcat

SEQ ID NO: 45753 - DNA, 393 bp, Oryza sativa
  unsure (1)..(393): unsure at all n locations
tagcaatacagtagaacatatcgaaatagttattggctgtatgaaacagatacttaccaccatgcatctatcgaagctaagaagattaagtagcaatttgcaaatgtactttcatgaacaatttagaaagatactataatccagcctactcccacaaggactattctgggctagcagttacaataatcatgcatgtccttagtttgtctttgaacatcagtctacacaaagacgtaactgttcttagtttcacaatgaccttagtgcttagttaatcatagtacacatatgtcctgttttaccataacatcgttcattctatatgacctaaatgttntattcaactcgagatactttaatatgatacattcttcaactgtgagatgtactaca

SEQ ID NO: 45754 - DNA, 415 bp, Oryza sativa
  unsure (1)..(415): unsure at all n locations
agcttaaccgaggctatgacatnttaatgtttgttgcaaagctgnatgctccatatgactttttcaaaggatggtgagcttctttctgatgtgcatttggtcaagctaatactaccatttaatttatattgcgattttaatttgagggtcccgtgacgctcttatttaccaaagaaaatagcacattctaatcaagagaatcttgctatgctctgcttagaactaattaataatcttcatatgctagacaatatcccttttagagttgaaagaaatcactcgtatacttttctagactgcatttttttactaaactacgtgtactaaatagaaggggaaaaaactaccattcattcagtagatatattttccagatcaactaccaataatttttgcacaggcaaactaaatcaat

SEQ ID NO: 45755 - DNA, 426 bp, Oryza sativa
agcttgcaaccacagtagaggacgcaacaacactgctctttctgaaagaagtcatgaacagcaaggccagagaagatgtaccttggtgaggaacagaactgaccagcagcggatgtctccatgacgacgacctcgcatcaggggattcccccgtggccaccagcgagcgaccttccacgcggctgctgcgcctgaaggggggaacagcatggggatggacgcgacagtgaacccaaaatgctgtcccgcgcacgagcgccccccgattgcaacctgtgattccaaccgcgaacgtgaggtgagatgcatccttccagatcgcgaaatcgcgaggcaacgcgagggatcgagtgcggtggaagggttcttcaggttacctcaacctgtgacctgtcccctccccgatgcgtcccttcccgatgagaa

SEQ ID NO: 45756 - DNA, 291 bp, Oryza sativa
  unsure (1)..(291): unsure at all n locations
cgtagccgaaactgnggcgggtggtggtcggtgatactttaacctgngtggcacatcagcaggaggaccaggtgcgggcggcgtatgaacaagacgggtaggcgtgggcggcatatgaacaggagttgcatgcgcgggtggtgtaagagcatgaggagcaagcgtgcgcggcgcacgaagatgatgtgcangcgcgcgtagtgcaagagaaatagtgcgcatgcgtggcgtagcaaacgacgagctcgctccatcatatccgaggctgtggcangtggtggtcggtgacac

SEQ ID NO: 45757 - DNA, 409 bp, Oryza sativa
  unsure (1)..(409): unsure at all n locations
gcttagacatagcagagctattcaattcttgctttctttttctgggcttctggctacacgggactcgtacgaaaattaaaactgaagtaaaggcgcatgaattcaattcactatcgggacatgttttctagtacgttcgttggcaaatcattgctagtatatactcctgcgctaaccacctcgccactccacgcaaatgcgagtgcaattccgtactaatttccttatacaattcttggttcaaaaatatatataatttgcttaaattttcatcaaataatgcactatagcagactcatactangcaaataaacagagagagagaaaaaaaatataaccttctgccaatctgcctcccaatcgtccaaccattcaaaagcagtnagttgaaagatgaacaaacaaaaaa

SEQ ID NO: 45758 - DNA, 333 bp, Oryza sativa
aaatgatgtcaaattcaggcttatcaaatagaataaactcacacattcttttttcagatattaaaatcagtactcaaggcaaaaaaccactcaatcagactatttttttcagaaactaaaatcagtacttagggcacagaaccaactcaattcagacatacaaaattattaacgaagcctacatacaatgatctgacaaagttgatccacaactaacctatcatgccgtgatcgcaatcatgtccgaattggagaatatgcatgcacgatgaagtgatgatgtacagggaggtatggactgacgctcgcggatggatggatgacgtctgatgg

SEQ ID NO: 45759 - DNA, 396 bp, Oryza sativa
  unsure (1)..(396): unsure at all n locations
gggaagaacacgatttatctccgttataaatataaaagaatttatctatattagtaaaataaatgggtaaaatctcttatattttataacgggggatataattaattgtctgtactttatacgtcacacataatgcaatggttaaaaactctaatattattactccacacgaatgtgcgcgtacattgcttagctagtactcacatctttattcccagttataacatgctaaggctacattntatagccttgattattcatccactgcacgctgaaacatccacagacacataatacgttgaacattaatacgtacgtacgtgatgtgtttgcaacttttgcatgcgcacatcaccatgtacgtgcaactaaccatggatgcttagcggtgcacaa

SEQ ID NO: 45760 - DNA, 408 bp, Oryza sativa
  unsure (1)..(408): unsure at all n locations
atttcatcttgatgtttaacgtgatttgcatcttttaatcatcccaacctcgtctttcaggttctactggcattcacgtattatcattattntctggttacatgaaagacgacgtgtcatcagctgttgagactcagcttgcagaatcttgtcgcctcgagagtggtacacattttagatgatgcaaacacccctgagaaatcaagaagcattgcaggcagctgattgcgatgcaaaggttaaacaattggccggccataagcccttcctaagagcaaggctagcaaagctttntgacggcggtaacatatgtccatgtcatctaaagttgatgattgtagattgcttatacaaaggacaaactaatagttggctttatataagcgtgaattggactaattattatat

SEQ ID NO: 45761 - DNA, 367 bp, Oryza sativa
tcttaagcaccgggctgcagctgctatactctgctaacatctattgtttttaaaaggctagctaactagctagctactactcatattggtcatgagcttgaaatgctaatgaacaagggcggatctacgaccggtgtcacctgacaccggtaatttttgacaaaacctatagcaaaactatttatccatatattatactttctccatcctaaaatgtttgacgccggtgacttttttaaaaatatttgaccgttcggcttattaaaaaaatttaaataattattaattctcttatcattcgatttattgttaaatatacttttatgtatacatatagttttacacattttaaaaaagtttttgaata

SEQ ID NO: 45762 - DNA, 430 bp, Oryza sativa
  unsure (1)..(430): unsure at all n locations
gcattcttggggatgctataatcctctccttggcagtgctccattatcgtcttaattaagatcaatcacatgtaggcacattgagacagcagtcagcataggttcagttaatttctagtgaggtcatctntgattaattagtgtgaggcttattagcgagattaattggaatagcgtgttaaagaattatttgattacctcgtacaactgatctgaaatgatcccaactccatgagcatacggcactctcgaatcgaagtcaatgctttcacctgtaaccggattacctactaaatagccctgcttgttatcacaaaatacanattgatgaccatatatacaaaaataataattatcacgaaggatcacactatataactacatactacctttatgatgaaatcatgtttgatatgtgtgatgaataata

SEQ ID NO: 45763 - DNA, 320 bp, Oryza sativa
agcccaaggggatggtctttttctggcggcctttacattgtctaattccatatagcctgccctgtgacctgcttagaagcaacaaactctcccactgattccttaacttccggaatacgtcgaagactcgtgttgcccctatacgatgtatttcccgacagatcttccttgcacgtctggaactgttctggcattttcttaaaagtccaatgttatactatgttctctgtacccacacggagaaggaacgatttcagcattgtgggccaaaacatgttttatatgattccggaccaacagcataccacccctcccctgtc

SEQ ID NO: 45764 - DNA, 408 bp, Oryza sativa
agcttcgaagagttacctactgaattagatgataacatgcagacttcttcatgctatcagcacatctctctattatacactaaaagtctattaaactttatacaaatattctcaagccggcacatagaactcctacaaatgctcctacgaagccacgtggcactctaataaaccggcggacccactatttagatccattgaatctattatgattaaataactaatttaacctccccctaaattaagcaaagcaaggtacgtgcccctcctcccagtatgtatgtgcaccgactcccccctcccatttcctattttctagctaatctctctcattttccaactaactactacaatatataaaaaaggtaattagatagttattagcgcttataactcgagagttatata

SEQ ID NO: 45765 - DNA, 400 bp, Oryza sativa
  unsure (1)..(400): unsure at all n locations
ggatgctatgcacatgtgaggttccatcctctacattanaaacggngcaagaattgtcacccaagtagcgaacagagtagacgcagttcttctgaatcccgtacttgccaccggccacgcacgacgcgccaaaatataaaggagctacgaagaatgcgcggtcaccgagatcaacagctcggcaccatctccgctcggagaaatccatcttgtagacacccacctgcaatggcgatggcgacgacgacgacgacgatgatgcaggcgacgactgtgatcccaaggttgtcttcatgcggaccatgtatagctccccgtcggattccagcaagaaaacgtggaaggcttctcttactcagtcgcccggtgcgccgccgtacagtctgatggagctgaaccg

SEQ ID NO: 45766 - DNA, 421 bp, Oryza sativa
agcttcaaatcttgcacccaggcgttgttcttcttttcttgccgaagggattttcctctgttttttgagatcgtatagacaagcggcatgaggtctttgggtcttcgcccaccaatccacgcggactcccaaaatcgcaccgtgtttccgtcccctattgttatgtttgttgaagcggcgaagaggttcctatctatttcatcacatggcgtctccagccccacccaaggtttggtctggtccttccattcatgccacagccatctcaacctcaaggccctcgtgaatatgtccagatttaggacccccaatcctccttggctggtcggcatgcacgtctttgtcaaattgaccttgcatttccctccggtaatatcacccgtgcctgcccagaggaagcggcgccgctgctagtctagct

SEQ ID NO: 45767 - DNA, 402 bp, Oryza sativa
aactcaagcttgaggattggttatcaaaacaaacatggatgccgcgtgccttggatttgttaacaccggggaatatgactagggaacttacatatcgaattttggatcgagagatgatgccgaattagaggagaccaatggcatactccaattgtaccttctcttcaaagattctatgtgtgtctctacaaaacatatacgcattaatttgtgtgcttatgattggtatcatgctaaatgtgacctatgaaatctgtccaatactgacataaaaaatggtattctcagagattgacttatctgttacctatttctggagctgttcaatgccgcaagaagattgtttctaacaattaatcatttcctgattaattcacaatagcaatagtggcaccatgtcaa

SEQ ID NO: 45768 - DNA, 371 bp, Oryza sativa
taggcatatcctcatcttattgtgctaccgtctatctctacctcaataattattatgccaattgaatctggggccttgaaacatacctttatgcccgatttaaacatatcagcagacttaaatatatgagattcatactgtagctctacatacaaatgtggacatataatgtctaatcaagtactaactagctatattgtgtctatattcattgtactagaacacaacgcactacattgaatctggacatatatcattgtattatggggagtctaatatggaacgctgctgtatcatgtccaaatacgtgatgctacgtcgtttctaatacaatactaaactgcgttattgaattcagatttataatatta

SEQ ID NO: 45769 - DNA, 414 bp, Oryza sativa
  unsure (1)..(414): unsure at all n locations
agctnttgactgcgcgacagtccgctttgtctggatggaggtgttgtggacggtgcaccacttgccggtggggcgctccctgctgggagcgctggcctccttctttttgtcgctcgcaggcctcccctttcgggtggcccacgaagcgccctcgacggcgaagacatgaccctcggcgtcggaatggactgacctttttgtcctcctcctgtcacgccgccctgtttgagcagcggatccgggggcggccgaagctgccacaccggaaccggaggggttccaagtccaggcctcctccttgcgagccactcggtccgcgagctgaaaaagctccgcggtagtctggggctccttggaggcgatcttttcgagcatgcggntgtgccgcacgccctcccctgaacgcgtaaatta

SEQ ID NO: 45770 - DNA, 354 bp, Oryza sativa
  unsure (1)..(354): unsure at all n locations
tcctatagctcccctctcttttctctgtgttctccctcttttctatcaggccgctatgttccctcctctcctcctttctctctccctcctcccgcgcgcggngtctcgccttaacgattgccgcatatgggggcgacgagcaaagcgtatgccggagggagggacaaggaaagagagagagagaggctntctggctcgctctctctgcacgatctctcgtcttgttggattatacagccatgacatggtgcaacagcttcaacgacgtgcgcgccgtggagaacaacctggccaccgccgccgccgtggccgcggtcaagaagcagcagcagcagcagcaggtcttccagcacg

SEQ ID NO: 45771 - DNA, 394 bp, Oryza sativa
  unsure (1)..(394): unsure at all n locations
ggaccttaagcacctgcagctgcagctgagttgcgtatgcgttactttttttcttgaacnacagcgacttgtggtcagcgaggatagagcttgatcacattggctactactatcgttcttctgttctttgttcagatcgtgttcattaatttctacgatcgaattcgacgggctctgcttaacgagtcttgcatcttgttaaatggatgaaattaattccgctaggaacactcgtaagttatggactgattcggcggagtggtgtatctcttaagagccaaaacctttatcactggtctgattattgaaaacctgactgggtgggtctaatttcattggtggataactgtgtacagattctttaaatgcactgtgcacctgtgattccctttta

SEQ ID NO: 45772 - DNA, 121 bp, Oryza sativa
ccccgggggggggtttttttttcaccatacgatggcccacggggaaagccctggagctctccgctctgaacacttaatacataatttggtaaaacactgggagtatattttaaaccctttt

SEQ ID NO: 45773 - DNA, 419 bp, Oryza sativa
agcttacaaaagaggaaaggaaagctgctatatccataccccgactcttactaaggcttacggactgcagactcctattctatttctattccaccagctcgatactactaaactaaacttgagacgaatgaaagagctattgcttgacgtgtgtgttgaagttaaaagagtgagctccttatatagaggtgggtatgacagttgtggaaggggaattgtccgaagtgcccgtcaaccgtcattgtgatgcaatactggacgtgcatgccaaaacctgtatccaacggtgccatgattggttcggccgaaccaacctgtggctggcccaatccagcccagtttatgctggtggccttctctattgctccactccgcagacttgtgaatttttggtccgattcatcttgtatattctgagt

SEQ ID NO: 45774 - DNA, 413 bp, Oryza sativa
agctagtcaacactatgattgctgaattttattgcccgcacatcccgaatgaaggtccacgcacaaattgtcaactatgctggaacaaattgccaactattgacaatcaaggtccaagcactgttactgacaacgaatgaaaggtgaatctcgcaaataattacccactagccaatatctatacaacattcaaacatatgcatcaaaggtcgttctcttatgatatccgtaagaccttaactatcaaccaattctgctgcaaccagccaaagaaaacacgacatggatatggaagtgaatataccatcatgcagaactagtagtctcagtaataatacacacagctgatttgcttgacccacactccactaatattgtcgaacaataaatcatgccaagattctcatggcaaa

SEQ ID NO: 45775 - DNA, 379 bp, Oryza sativa
cctgtatcgctgatagcaaaccggcgtggtggtcatgtttaacacacacctttccgactatgttcaacaacacacatattaatgtgtcgcacaaaccatagtcagcttgatgtgtactcgctttcaacaaatgcaaaagcaacatgaacgacatggctatccgcgttgactccgatcgccgagagaattggtcctctgtacttgcctgacatgaaagggccatctactcatatcaaacgaatgcaattttaaaggcctctatcatgcattctaatgaccagaaagtccgacgaaaagcatatttcgcatattcatttacctcattgagaataccatgtgtgtccccgatttttgtctgatcacttcaatagtggggaag

SEQ ID NO: 45776 - DNA, 449 bp, Oryza sativa
ttaagtcacctgcggcatgcaagcttctgaagtaacggagatggtttcaatgcttcaagttgtagaacctcctgattgtcgtttgcgtgtatcccgaggcggacaagatgaaacatattggtgattgccacaaacagcttggcacaatggcggccttgtactttgctgatgcgaaatgatctcaaattcaccagagcaccaaggtaaaagaccatttcagaactagcttccatcagtaataaggtctgcaaacatcccaaagaccataaaccagtaggtgcaggtatgccaacagaaggaacaaaattcatagaagtaatcactggtttcacagtcacaataagatgtgtcaacttagatagccttataatttcctctggtaggctcataattttgcttttccaagcatccaacacgaccaaattttgaagtctcccaattgatcttga

SEQ ID NO: 45777 - DNA, 425 bp, Oryza sativa
  unsure (1)..(425): unsure at all n locations
gcttgcattctctgcggngagaaccattcccgtaaagagtgcatcatgtactttgtanggcaagatgccacaggcgttgatgttcgtcgcgttccaaaggggaagtccaagaagaaaaataatccttagttcgctattatccttggtggactccctactttgaagatcggtatcgttcaatttatgtttagtgcgtctgtaattttaatttgaactttcttgcacttttattacccgaatctatttgtaatggccttgtaattttcattttgaactgcactgcacttttaatatcgtcatgtatttgtattggaattgtaatttaaatttcgaactgcgctgcacttgtaatatcataatatatgtgtcgcggggctcgtaaatttaaattganatgtactgaactgctcttatctgtatctatg

SEQ ID NO: 45778 - DNA, 429 bp, Oryza sativa
  unsure (1)..(429): unsure at all n locations
gcttgagaagggaacaaccgtagcttgcttcttgttctatcaagaagatatcaagtccaacaacaagatcaaggggcaagatcaaaggaagaacaaaacttccattacttgcttcaagtgcaagaaaatgggacatcatgtgaaagattgtccttggaagaaagagaagaagttgaacaagaatgaggatcttgctcacaagttcttcaagtccaccaaagagggacactntgcctcaagttgtcctcgcaagattgatgatgaaatcacacttccaacaaagacatctagaatcaacaaaaggaagtgctatggttgaaatgagaagcgggcatgaaatggattttgtcctcacaagaaggatgatcattgcaaccgatcaagcaagaggcaaaccggcaacaaacaagtcataaagcaagataaaag

SEQ ID NO: 45779 - DNA, 372 bp, Oryza sativa
  unsure (1)..(372): unsure at all n locations
tagatggtgattagtgtagcttgcaagagctggggcctcttgctcagctctgggttcttggactaagtaacctaaagaatgtacctgctatctcgttcgctgcaaaggctaagcttggtgagaaggcccaccttagctacttgatgttagaatgtagtagtagacttggtgaagatggttntgtacaagacgagaatggtgtccccacggaagagcagcggcaaatcgaggaggtgttcaatgcgcttaccccgccactgtgcatagagagcattgagattagtggccattttggagagcagctaccaaggtggatgatgtcaagagagcacgtgcatatgagaggttgtcgatggtgatcatggatgacct

SEQ ID NO: 45780 - DNA, 392 bp, Oryza sativa
ggatgactatctatctaggtgattctttatcttgagttagtcgagaactatagattggtcttatgatgttaattacacacaatctgaggtttctcgtcactttttgaatggtcttgacatgtctatttgggagatgaaacttacatcaattcaggagtatgttgtcacgcccgaaatttctatccaaaattccaaacgcttacatgtgtgtgaaccctcgtccaggaatcagccgaggcacacaataacaaattgataatagagtacaattattactctaattaataagcgaataaaatgtcattacagaggtagatagttcctctcaatcaataaagatctaagccgcggaaaataaaataaacggcgcagacggctccactccacagaca

SEQ ID NO: 45781 - DNA, 398 bp, Oryza sativa
tctttcccggatcttaagcaccgcggctgcagcttaactatgcgtacacgagcgacatgctcttgtaaaagggaaccgcagcatagcacatttgggcgcggtcttattgacacactttattaaggccctggttcaatcagcttatgatgatcataagctaaactatttgcacccagctgaaactaacaagtacaattttatgatagattcttatgatgtgcttaccagattactataacttagcaagtcttctttgaacgagctttttgcagattatggcgtggctgaagacccactaccctctgatgccttcaataatccagagaaacacacaactcgcaactgattctatattagcttattatcagccagcttagagtaatctgacttactaatgt

SEQ ID NO: 45782 - DNA, 429 bp, Oryza sativa
tctctaagcacctgagctgcagcttcgagtgccaaagtgggatttatattgacactctgaccatacccggtggcacttatcacaaagagccatttgccacccatctctctggagtggctaaaacggattatcacgctcatatatcataaggtagtcatggccaatacatgtttgggctgtagcctttacttaaatctaccatcatcataatttgacacgatcagtttatcaacaaacacaaccggccttcaattaattcttatacataactctaaaacaccttatattagaatcatctatgctacttataagattgttcagaatgaaaggtgcccacatattacatatgattgcacactatgtcgagcttaagataccaccctatctgtgtatgggagaaaaacaaaaacatcccccaaggacaaatgt

SEQ ID NO: 45783 - DNA, 300 bp, Oryza sativa
tcacttgtccacgcatccgctttcgcgaaggccctacatctgtttctgctatatggggattcgcccggtgaggcagttcgccgttgtaaacccggttcgcccgcccagctgcttgtcgtgttagcagctggctatactcgacgaccgaaacgtcgccgatcatcctgcgggctttggcttcagcctggtcgagggtcgacactgcaaaagtaaagggtgtagctgcgttaaaggtcagacaaggcaaaataacaaagcacaggagtgtatagcaaaagaacggtcttactggtcgttccc

SEQ ID NO: 45784 - DNA, 419 bp, Oryza sativa
  unsure (1)..(419): unsure at all n locations
agcttatgttcaactcgaggactattttatctattcaattacacgctgggctaggctggactccgcttcgtttggaagtagctatagtacttttgacaacatttcagttaaaaaacctctaaatataagtatagtatgattataggtgtagttatgttgtaactaagactgtaattacattgtaacttatatataaatagcatgtaattacatgaaaagcgttcgtggtcaagtggttagcccacgcaggctctgtatctaaggtcgcaggattgattcccttcctcgtgtgggcagtgtgatctttnttcctcacgccgatctgcacgaatcgtagacacgatctaacggtcgacaattcgaatatttttaaggggaaaaaattgccgtacgtagtattagcaaatccgctccatttt

SEQ ID NO: 45785 - DNA, 422 bp, Oryza sativa
  unsure (1)..(422): unsure at all n locations
agcttattctgagtccattctccctattcttgcttattgaatacatttttaagatgttgcattccgtaccaacaaatcatttctttatggtaaaaggctacatctttatatgatctttcttacacaacaaccaatactactgggtcaatcaagggttatggaacttactgacaattacaaggaatgttgcacatctagcaaaaaaaaaaatctatacttcggttgaagattntgatattagctagaactttactagatcacaaatatacatatttatattgtcttcgttaggtcaancaggctctatgtataacaagctaaatggcaatatgtcgagatatgcgctgaatataaatggcagtatcaataccagatgtaaatggctaanatcgttgatatgaatagtccatgttttctttttt

SEQ ID NO: 45786 - DNA, 398 bp, Oryza sativa
  unsure (1)..(398): unsure at all n locations
tgtgtcatcatctntacatgatcttaagaccagcaatggttcaaaaatcgtgctaattgggctataccctcaatattaatagtcatatcaacctataaagtcatggcctcacatcatcttttcattattgaaaactaaattgttgttacaataattgattactctatttccccacgcaattgaggtggacaaaaaaggatgaggtaaaactttaccagcgcataaataaattaaaaaaatgctggtttaaacttctcaacttttagcgtagttaaaattcctttctaaacttaagatagagccaaatttgaatttntaaattaatttagataagtttttattgtctgtttttcagccttattctttgcgttgctaaagtagatgtataaaatcttact

SEQ ID NO: 45787 - DNA, 420 bp, Oryza sativa
  unsure (1)..(420): unsure at all n locations
agctngccaaccgctactggggtcatcttttttcttangacgagatgaccaggcatcagctctgtgggtcgaactcttttgttgtaagttgccgaagcgcttgtggcgtacttatgcatgtgctcgaacgcttcgactcttaccccttctaagagttcgagcgatacttcgcgcccctttttgcccccagagaacatcacccttggtgagttagcccctagctctgctggggtcattgcctcatcgtcataaagaagcataaacgggctaaacttggttggtcttgtgggggtcatctgaagggcccacagaaccgatagcaattcttctggccatttgcctttcgctgccccctcgagtcttttctttagtgcttctaggatcttgccattcgtacgttcggccgccccatttgattgc

SEQ ID NO: 45788 - DNA, 256 bp, Oryza sativa
  unsure (1)..(256): unsure at all n locations
tggctggctggagcgcacgagcttatatctcccttgatgctgccgcgctggaatctttcccctgctcccgcatgagcaagaagtgtcagcgctgcgcttttgtggcgattttgttgtgagtgcgcccttcagtagcccggccaaaacggctatgatgactgaggacctccgnaatgacttggacttgacatcggcttgcgagagacgatgcatgtactcccttatcgatttctccgggctctggggaatgccgagc

SEQ ID NO: 45789 - DNA, 424 bp, Oryza sativa
agcttcactgattagcccacattttgagttctttgatatcaatgagctcatcaccaaagcattatgctcaaagccaggtttgattgcccagaggtgtaccattttttcacatccaagggaaacgagagatgcacatatggaaataacaacgctcaagggggcttggtcaggtttgagtcctccgcggatcatttctgacagcaaagatagtgctccttcatctttgtacccagagatcaatgtgttccatgaaatcgcatccttggttggcgctcttcgaaaccaggcaattgcactatccatgtcccctagttgaacatatccttgcaagatcgcattccacgatatctgatccctgtctggcatctcagagaacaacttcaaagcatcattcaacctatcattccgcacaaaaccatccatc

SEQ ID NO: 45790 - DNA, 426 bp, Oryza sativa
agcttgtgccacagtacaatacaattagttcttttatgtaagctatcgtttatggctgttatatcctgttatgagtatttgtttgatttgctataacggtattaaatctctggcattgtcatacatgaattgcgctctgctacatgctgctattggcaattcatgtaactagagctgaatgggagttgagctataaacacattgcttctttcaacaacccttatgcaaacaaaattgaaatgatggtttctctgctgtgctaatttccattgttccataactgaaacttaagtaattgcaaagaaaatcttggaactcatctattctcttactcttataataagtctgggttttgtaggtagctacgctcatgctatgtgcttgcgctctgtctatctgaaccagtagacttttgaagattcattt

SEQ ID NO: 45791 - DNA, 338 bp, Oryza sativa
  unsure (1)..(338): unsure at all n locations
aaataaagtgagtgatttcttattttatagcaacttttatattaaagttttcgtacggaacatacggtttagtagttcaattttttttccgacgtaaaatctgcatattcattataaaagaacgggctagttgttgagtccactatagactcttaaatatgccatgttagagaaaaacgatagttcttganaagccggctttctgatcgtctctctactagtaatacgcaataactaaattcttgtatcacgtgccatgcatttctacattttggatctagatccgtgacttttcttgtagatggactatacaacgcgccgtgcttatctcgactgct

SEQ ID NO: 45792 - DNA, 254 bp, Oryza sativa
ttatgactcccgcctactagcacgggtcttttccctttagtgctcgatcaactgaccagaaactttaatatatccatctgatgctcattcacagaactctatgtctagaggaatctacaatactgagcatatagaggatggctctgtgccgaggagcatatagcagagcaaaactgaaaacttccatgagaactggcatatattcatactggggaggatagaccgctatcacgcaccttggctgatgctctagt

SEQ ID NO: 45793 - DNA, 408 bp, Oryza sativa
  unsure (1)..(408): unsure at all n locations
agcttgagtcttctacatattctcctctgttttatttgagntnttatacgatcatcaaatctaggtgttgttccttccttaatcctataaatcttatattattgtgtggtatgtttttgataatgtgttgtatatgtgtcatacatccagatagtattgataaggaattggattgtgatgattaatactatctccattttacgctgttaactttttgaaaacgtttgaccatttgccttattcattttttttacaaatatgaaatcatattttaaaatacaaaaacatttaagtcatgcttaaatttgatgataaatcaataaaataaatgatagttatataaataattttgaataatacaatggtcaaacatatctataaagtccacgacgtcgtatattaaaaagc

SEQ ID NO: 45794 - DNA, 426 bp, Oryza sativa
  unsure (1)..(426): unsure at all n locations
agcttgtcatgttggttgacaaaatgtcgtttatcttcttccaggaatgaatgcggatatcctgttggggccccactgctcagctaccgaccggagcaactgttgagatacccttttttgcaataattgacataataaacagatcgtattattattggttgatggatggaattgcttgtgtccaagctatagtcctcctagcaactgttactactagtaggaatagctgtccttgcccataactcatgtgcaaccatgtgctgtagctgcattctgcttgtctttgctgatgctntgcctaactgaaatcatttgcacacacaacttaactgggattcatagattgcaaccttttcttttaccagaaaaagggctgtctcttttgcttgcttttcaatataattccaccgctctcattttctttgg

SEQ ID NO: 45795 - DNA, 296 bp, Oryza sativa
cttgctggaggcgagtgcattggtgttagcttggtggtatctcaccttcgaaggagttgttcgataagccgagtacctggagattgctgcatgaggacagctcatctggaatacggccttcaagagaagtgatgctcaagttcaggtagctgatttgtcccaagcgtccgagctcacttggaatatttccaaggaatgcgtttcttgataagtcgaggcttgcgatggagctcagattgccgatgcaaggtggtattgaaccactgaggcctttggagctgacgttgagcaccatg

SEQ ID NO: 45796 - DNA, 422 bp, Oryza sativa
  unsure (1)..(422): unsure at all n locations
ctgcaagctgacttgtttgcctgtgccaccgtatagttgagagatgctnnttagcattgtattggcaatgagatcatgaatgaatgcatcatttgctttgttgacccagactttctagccacaatcccaaattatattgtcatgcacctttcagaatatggaagatcataaacgtaaaatgcttctatgagaggtaacaaacagtgcaaaaattatttttacttcttcttagtactaatattaaatatagtttaattatcatgacatattgtatttatctgttttcaggttactccatgtctccatgttgaaggattgaagccatgttcgagtttttgtgtcaactttacagcttttgaatcacagtactatgattatccctgttatgcttaattaatgattggatgcttggattaacaagc

SEQ ID NO: 45797 - DNA, 356 bp, Oryza sativa
  unsure (1)..(356): unsure at all n locations
tgtgcgaaagatacacgcgtgtgtaaccactgatcctattcgtaagagacgagattggatagatgccaacatgcaagagtagtcgatacaaaacaagcccgtagccagtccgagggtctggatgttgcccttgacgatgtagaagagtntgatccatgcaaagacagtaaccaaaaagaagattcctcagcttgtcatgtggtaccttctggtgaaagatcgtcntaaagcgttgttctcaaacccgagggatgccgaattgatgcgctggcatcacgaaaagcgaaaaaaaggatgggatgattcgacatcctgcagatgcaagacagtggaaggaatttgacagaaagtatcat

SEQ ID NO: 45798 - DNA, 286 bp, Oryza sativa
tttggccgaactttattttttggacgaaggccacactgactgccaccggccaaactgcttagtacaataacagttcgcttcctaggggtgggcttatcagagctggcgggctttgcaagtattgctttagctcgtcgaatgctgcatggcactcttgtgtccaattaaactttcctgcaccccggagggtcttgaagaagggcaaacctctttcggctgcctttgagaggaatcgactgggtgacgcaattctgcctgcaagcttttgtacttcatgtacgcttaa

SEQ ID NO: 45799 - DNA, 366 bp, Oryza sativa
  unsure (1)..(366): unsure at all n locations
gaaatgggataaagtcccttctcccggccggttgcttaagtagtgcacccacaacggtcaataccgacctgtggggcccactagccgttaccatgccaaaagtggcagggagccattgcctggccggatcggcagaccagggtgttcggccgaacccctggtgggcccaaccggccacaccttcggccgtctgaatccaacggttagtgtggtcgtggcacagtgaatnttcgttgaaaattntattatggtttgctccgaannaatcaatngaagaatntcctcaaaaatcctaactgcaatgttgaattcaaatatgtcatgatgcaaaaatttaaaatggttgaagcaaatatgcggatacat

SEQ ID NO: 45800 - DNA, 255 bp, Oryza sativa
caccggggcatctggcacagctgaaataagtgtctaacactggtcatcacggcaccgatggccgagatcctaagctttccaacattgggccatattcgcgaatttagattacagggcattgatatagttcaccgtatcaccgagttataccacagcagatcactacccagtttgtctaatacatcaatcacccatgcacacacctcagacacctacatgaccatggcgaatgatacgagtatgaggagcagtggc

SEQ ID NO: 45801 - DNA, 414 bp, Oryza sativa
  unsure (1)..(414): unsure at all n locations
gcttgtaaattatgtgaaagtctgcgagcactatccatnttgaattgtcagatggcttgatgcctcatagttctctcaagaagggttgctttgcactctccctggttggcccgtaaacaaccgtgatgaggaaggtagtctgacattcttttatggagactgtggccgaaagtgagtacgttctctgcacgaagtctttgatatcaacaaaatcctcattccaaaggattaggataccgccccttgttcctagtggtcctgtcgccggcttgaattgaaaagaccataagcatcccccgccaagggagtttaccagcctagcgtctatgttgctcatttttgtttcttgaagacatgtgatgtggggtttagcctcttagagcgtctctcttactgtcgctcttctagccggtc

SEQ ID NO: 45802 - DNA, 402 bp, Oryza sativa
  unsure (1)..(402): unsure at all n locations
ttacccctgcctcgcatagatcagatcgtcgactccactgcggggtgcgaacttttgtgttttctagatgcatactctggttaccattcaaattcgcatggctagggaggatgaggaaaaaactgcgttcattacccccgtaggaacctattgttatacatcaatgcctttcgggttaaaaaatgcaggtcctacttttcagcgtactactcgaatttctttgggtagtcaaatatgacgtaatgttgaggcgtatgtcgatgacttggttcgtaaaacgcgcaaccaagagaccttactttcagatctagcgganacttttgagaaatctcgcttcgtgcgcataaaactgaacccccataagtgtgtgattggtgaccttgcggcaacttctccggtttt

SEQ ID NO: 45803 - DNA, 422 bp, Oryza sativa
agcttataattgatataatacctgattgttcaagcgatggacataatgggggctcattgcttcgtggaagaggctgtttccctagagtcaagtttggtctagcattgtatacaagtctccctagagattctccacaaattttgctctgcattattaattcaactccacccaagaaacttagtttctaacacaaggcccaccaattgacctcctgcgaggagtgagagagaattgtgtgcgcaggttggaagactcatggtcatgttcatcaaacttatagcctgcaaagtaaaacgtcataatttcagagccaaattcaagcttataacctgaacaagtattagaagctcaaagtttattctctccctaccaatgaaacgtctagttttatgatggaaagcactaaagttgatgtgcacaca

SEQ ID NO: 45804 - DNA, 398 bp, Oryza sativa
  unsure (1)..(398): unsure at all n locations
ggcatgaataatagttagttggtacaatagttagcanagttttctttcttggcctctagtgaaaatgttgcaaaaaccaacatgtttgccaacgtacaaaacgaccagagagcacacggatttgtacatccaattcatccattaattcatcgtatgtgtctgatttcgatctggtatatgcagacctgtgaccattatcatggaagagtcgtcagcaatggccgatttgcagagcgcgacaacgcataatcatctctgcatttggtgtaatctcgcaatacccgatgtaataacgtgtgcggacaaaatctgcattggatggtagcactgaaccggacgcttctcgtgatcgatcttatcagtgatatgatgagattagtcaaaggcatataaatact

SEQ ID NO: 45805 - DNA, 415 bp, Oryza sativa
agcttcgctacacttccaatctttcatggtgtattcttctatagataatctaaccagtattatatatttatcttttggaatatgagagattcccttgtcttgaggttttgtggggattctaagcccccatagacttgatgatagtaccaaacacttgtacttttacttcatttcacagggtgtgtggattcccacatctggttcttctacttagtggcttcgaccttcaacacttctgctcggtggtggccatgcgagatgatggtgacgatttgaagattactgaaattcacatggcattatggttctatgtggcaggaattcttgctactatccgttctatcgtttaagttttctttgagaacctccacttctgttttcttgaacgatttttgaactcttgctgtctgtcatg

SEQ ID NO: 45806 - DNA, 370 bp, Oryza sativa
  unsure (1)..(370): unsure at all n locations
tctcgagtctaggctaaacgaagcttgtaccctcatcaatgataatgattcanaaatacttgaactcgatgtgctcaaccacaaacaaccaaagcagcatgttctatgcaataccgagctgctgtctctgcaatctgatatggatcaactgttcctggagaagatggaagcagagactcaatgcttcatcctgacaagagcatcgcaagcttggaatcccctgactgaggatcaagctgctatttttgacattcagaaatctctacctgaggatcacaaacagcttgaagctaagctacggcacaccgagaacagggcactgatgctagaggagatggtggagaagctagaggcacagtgcaaagatctt

SEQ ID NO: 45807 - DNA, 424 bp, Oryza sativa
agcttaaatgttcctgccataagactatatttgtacaacaatataaatagagctgggtagctgttgcataagatataatcacattgcacctattcaaatatcctataaactagttagaacctgacatcatatttaactttttcagcaactacgttcagctggactaaacaaataataagaaaacaaactgcacaacaacttccaaaccacactaaagacttagatggtgcaaacccaaggtaaaatagatatcctagtactaccaatatgaatcatctaagagtaaagacaagaagtcaaattggtaacaacaacttgtaagccataacagggactgtacgataaatatttgcagaattggcaaatggagaatcctaaccataatcaagcagttacaaattggccatagcacagatctacaaaa

SEQ ID NO: 45808 - DNA, 332 bp, Oryza sativa
tcatctacagacctactgtttcatatcgctggagattttttgttaagcttgttgctttacacgggttacctcatactgcttccactgaatcagtgcttctgttatacgcaagagaatcaaatgtcccagaaagaagcaaccatttttcatgtgattctcctaatgtaaccaagtgcaaacaagtgaagtagacaagtatagatggctagacttctctccttgttaatttcctcatgcacaaattggcttaaagcaagtaaccaaaagtgtaactgatgaaatagacagaagagtgtggcagtcaaggagcactttacccttctgatgactct

SEQ ID NO: 45809 - DNA, 382 bp, Oryza sativa
  unsure (1)..(382): unsure at all n locations
agcttttctctagtatgactttacatcctattgttccactctaccagnttgaaatatggatagcctatcaggggcaatgaaacacttgatgaattgtcttgaatttttattctaatgcgccctagaaattagctagctatagcttcaattcttcgtagtttgaaccatagcaaagagccaaagatatattaacacttgccagatcttcttgtttttttttaaatggtttggtccaactctagcccaatatgtatgtataattcattcaagcaacgtagagcctcaactaatagataccgatttgccccattttttttaaaaaaaaccatgatatttataatgttattggaatgaagcttgcttaccataactattcgaatat

SEQ ID NO: 45810 - DNA, 394 bp, Oryza sativa
  unsure (1)..(394): unsure at all n locations
ntcgaacaaacaaacagaacattcacgatcccaaacaaaatggtatgcaaatacctcgcttttagtagcaacagaatggtgaagacctccagactgttgaagccgcggtctacaaaatcaccctgcacgtgaagcacagctgaattcaggaacacagcatcattcagaaccatctcaaccaacaagctcacacacacagaaacacataaacacaaaatgctccagaagccacaccatgaaaatataattcgtctcgggcacatgccccccagtcgcgaagagcttcatcaggtcatggaactgcccatggatgtcttcgcacacggtcaccgggctgttcactggctgcacgttggactcctcgatgaggatctccttcacctggaaggatcag

SEQ ID NO: 45811 - DNA, 409 bp, Oryza sativa
agcttacaaaagaggaaaggaaagctgctatatttatacccgaactctttcgaaggcttgcggactccggactcctattctatttctattccaccagctagatactactaaactaaacttgagaggaatgagagagctattgcttgaggtgtgtgttgaagtaaagagagtgagctccttatatagaggtggctatgacggttgtggaaggggaattgtccgaagtgccctccaaccgtcattgggatgcaatactggacgtccatgccaaaacctggatccaacggtgccaggattggttcggccgaaccaacctggggctggcccaatccagcccagtttctgctggtggccttctctattgctccactccgcagacttgtgaatttttggcccaattcatcgtgtc

SEQ ID NO: 45812 - DNA, 366 bp, Oryza sativa
  unsure (1)..(366): unsure at all n locations
agctnttatgcagctgttatttgctaatttattaccactgtagcacgatgaagtcgttgattgcgagttggtagctccataggaagtcccatacaatgttgttccctgctggacacgcaccgagttcccaaatcctgcgtggattcatcaattggatgaatcaattaggtttcatgcagattcctataaaaatatgaaatgctagctagttagtattccctccactcctcaaaatataaggtatntagaattntcatccactactatagatccgggctttatggcaggtcatctgtgacgggccaacgcaactcgtcaaagatgagtcatctctgatgggccgaaaaaatatcctctttaatatat

SEQ ID NO: 45813 - DNA, 336 bp, Oryza sativa
  unsure (1)..(336): unsure at all n locations
ttctccacacgatccttgcgaacaatgtacagttctaatggtatgattcttccaaactagtgtggatcgatgtttatgtggtattcactaatattattccactctgacaattcgtggatgtataattaattactgcaggacttagtagctctgtgcctccccaaggtggntctggagcatccaaaaggcacgcggacattcatcatgaagtgacaaacctttcatgtatgaaagagaaaaataccctaaanataaaacaataatactctactacatgantctttattaattctacctttgaacgtaaataatttctgttggtgtttcgcagatgaa

SEQ ID NO: 45814 - DNA, 395 bp, Oryza sativa
agcttagtgatgccttagtaaattatattatttgtacttcagatagatcgatgcactaggatactactaggattggatcaaatataaacaggaaaagtcattctggttgctttggtgggtggtgggtgggaagtgagctatacttctgattgcactcactcagaggtgtatatcagtatatggatgtagttgcagttgctagggatcaagtattccccgttatgttggaattgttcgcagcttactatgtattaattattgttgtgatgtttgcttgctggtagttgcagcttgcaaggtattaggtattcccgtgttgcttgcttggaggtaatgtctgtaagggatgtctcttggatcatgctgttgtccctaagggagtgactcaaacaaaa

SEQ ID NO: 45815 - DNA, 424 bp, Oryza sativa
  unsure (1)..(424): unsure at all n locations
tgagatgaacatggagatggacgtggatatggattangattacgatgacggcggacaggagaggacaagaaaggacgctgggcaacaaggacagctcatgtgaagtggaaggagaatggtctccatcacttgcttcagtgttcaggtttgttcacctgttaagacggtcaaggcctacgcttcttacccttggtcgaaatatccagcgtcctatctgatggcctaatcggtcaaagaaaaaactaaatttttaattttcccgcttaattttgagaattgatttgagatattttcaacgtagtttctttttcaacattgacttttaagtcacccagaatacatttacaaaagttttatctacaagatcatttgtattttctaataaaaccgtttggcttataacgaattagccaaatgatgggga

SEQ ID NO: 45816 - DNA, 412 bp, Oryza sativa
  unsure (1)..(412): unsure at all n locations
agcttaggcctgacggtattattgaaaagtacttgctcggcttggtgctaagggctatactcagaaagaaggcgaagatttctttgacacttactcacctggtgctagattgaccacaattcgtgtgctactttccctagcagcctcacatggtcttctcgttcatcaaatggacgttaagacaacttttcttaatggagagctggatgaggagatctatatggatcaacctgatgggtttgtagttgaaggtcaagaaggcaaagtgtgcaaattgttgaagtctttgtatggtctgaaacaagctcctaagcaatggcatgagaaatttgacaaaacattgacatctgcaggctntgcagtcaatgagacagataaatgtgtgtactatcgccatggtnggggtgaggga

SEQ ID NO: 45817 - DNA, 422 bp, Oryza sativa
  unsure (1)..(422): unsure at all n locations
agcttgctgggaccaaaggttaccttgccttatgtaatattgtactaaatcagctgctctgtccttttgtatattagtttggaactctgacaaatattcgagctaactgttaaagtattcgtcttactagtatatctttgattcatagtagtatattagatacaattaggcaaatttgcatctcattntgtaaaaatagcatcgaatgccttctatactatttacatatgcaaatttgttgaaacaaagtcttaaatttttacatggcagagcttgcatacacaacaagggtgacagagaaatgcgatgtttatagcttcggagtgcttgtctttgagctgttcatggggcatcatcctggtgatttccttttgtccttctccatggccaaggaaagtacaacattgaaggatttgttggac

SEQ ID NO: 45818 - DNA, 263 bp, Oryza sativa
  unsure (1)..(263): unsure at all n locations
atccggacgtagaagccctagatccactggctcttatccctagagtcttcactatcgcactagggaaanatggaaagaggaagccccgccaccatcatccttgccattgcgtggctagtaattagctcaagtggcagcaaggcggaggagaggacaaatataaccaacagcgttgtctgttgatcgccacccgtgtcacttacgagcgacgtggtangcggnggggagggggggtganattcntatnnttggttntatgcata

SEQ ID NO: 45819 - DNA, 415 bp, Oryza sativa
  unsure (1)..(415): unsure at all n locations
tgcaagctntgacgatacaggtatgacaaatgtccagcgtgatctgttccacttcatccaccatgagtgctgtcatgtgaaaggagatttcttcgacccaaagggtgccctagcggctagtgaccaattcaaagatcttcgggagtggaacactgctatgccataatgtaactagatgatgttatttgaagtgacaatgtaaaaaaatattgtaatagatatattttggcaacacttttgagttatgcaatatatgtacatttctcagtaccaaatgcttgataatcttccaatatatgtacataaaaatctacctgcaaaaatttctattaaataatttaaaagtaatttacggccaaattataattaaatttcaatattttctacctatcttcgcaggcggaatttttttttt

SEQ ID NO: 45820 - DNA, 294 bp, Oryza sativa
  unsure (1)..(294): unsure at all n locations
acacttganaacccttctttggataatgcaaaatcaaaataggagctgatattaagcgattcttcaactcttgaaaactctgctcacattcttctgaccacttgtactttacatccttttgaagtaatcgtgtcatgggcttagcaatcttggaaaaattctctataaacctccgataatatcctgcgaggcctangaaactgcgaatctctgaaactgtctttggttgtttccagttggttacggattccacaatactaggatcaacggcaactcccccggctgagatgacgt

SEQ ID NO: 45821 - DNA, 424 bp, Oryza sativa
ggatcttaagcactgggctgcagcttggctggctaaaggatctatgggatatatttcaccaggtgagatcagctaatttttaagttgatcatttctgttaatgatacacgtggcgtctggcttctaattttatgacttctggtaatctaatgcagagtatggcatgagcaaagatatttcatccagggtgatgtctacagcttcggaaatcttctcttaaaaatgggaacaggtagtagtcctatcgatgaagaatataatggtggcactaccctgcatgaatttgttgatgcagcattgtccaatagcattcacgaagttgttgatcccacaatgctacaagatgatgtcagtgtagccgatgtaatggagaggtgtgtcattccattggttaaatacgcctctcatgtcaatggcattgcct

SEQ ID NO: 45822 - DNA, 365 bp, Oryza sativa
atcttctttggttgccaggcacattatgctcgtgttatagccctagcaacaatggcacctacattatggccaaacattgctccccatcagttcaattttggccatggtgtgcctgccttgttcccaccaccaccacctgcaggctttgggttccaaccaaattttgttccaaacatgatgatgccatataacatgcaaaggcagcctggccagaggagtggtcctccgcatggaggaatgcctaaacatctgcataatcctcaccaggtattcctggtggctaaatccattgcatatttttttttctttttaacacaatagatccagcatctaaatgtatcccattattataattacttaatttt

SEQ ID NO: 45823 - DNA, 421 bp, Oryza sativa
  unsure (1)..(421): unsure at all n locations
agcttatgggaagtgatttggtaactgacccttatctctngctggaccagaaaagctcctctcttcatggagacatgctcgtaaatgaccttggtcttgtcacttgccgcttcaccatcgcctgcagcatgtgatctcttgattcgggcatggccatcaatgaagcggtcgacaaggccttgaagctcatcatcaggctcgatcccttggatgtcagcaccacacaatggacagtccttaaagcgcaatatgcatgccctgagaaggaaatccagtgttttggagaaagacaaggagatcaagtgagaaggtacatatattgacagaacgaattagaaagctattgaaatatgatacgcacttgcagaacttgtgcgagcacggngtgcatttgctgctttgatgtagcagagcgtggcag

SEQ ID NO: 45824 - DNA, 310 bp, Oryza sativa
gcatgttcttgggcaacgccacaggagaaatggctaaatggcttgatatcttcacatgatgggttgtctgattatcaaggagaagagtccgtgagatcccacgggagattttctatgcatctggctctggatctctgcataatttctcttctgagataagataatctcttatcctgtgatatgtgaagtgaacgaaagttcagtgcactttgatctctgacaatccaacttgatcacgtcagacaacctgttgaatctgatgtttgaaggttgaaccagtcttaaaatacaacttgaaatacggtacctt

SEQ ID NO: 45825 - DNA, 419 bp, Oryza sativa
agctttatgtcaagataagcaatcttctatcttcaatcaattcggggagttattatcttcgtctacgcttcagaaccgtcatttaatttcagcgactccaattattacaccggcaatgttggcttcttcacgccgtcacaatctactccaaatatttccagtatcaattatgaaatttaatctacatgttcgggagtttggagttatcaaccaataagttcagttctgatgagttgggcaacagcatctactttcctccaagtgaagaatctgcaacagctataacaccaaattctactgccatctttataaatcaaggagctttgcatcaatcttcgttatacacactctcgcgccaaataaactactcgagcttcgatatcttctcaacacgttgatagattattgacattgacttc

SEQ ID NO: 45826 - DNA, 425 bp, Oryza sativa
  unsure (1)..(425): unsure at all n locations
gcccataacatacaccggtgtggctgtggatgtactgcttttagcataatttccttttccccacttgatatgaaattctctccccacatgatgattcttttccaaatctttcttgtaaactatggaatntacctttactcattctttcctctggcgttggaaaacccagatatttatcctcaaagcttttattcccaagctgtaagcaattcctgatcgcagtttgggtatctgctgggcaagactcaccaaacagtatagagcacttcagtgggttaattaactgcccagtccctgcagcatattggccaagaactgacttgattgtctctgcctgctcgacttctgctntgaagaataaaagcatgtcatcagcgaataacagatgtgatatccctggtgcagaatagcaacactttaaccga

SEQ ID NO: 45827 - DNA, 419 bp, Oryza sativa
agcttaaagccatgaatcccttttatgcatatctggatctggatcctgtagaacaaacatataggatgagtaggatctgatataaatataatactcgagaaaaaaatcaagtattttaaaatatttataaatatgtatttctcctcttgtcaattatgatttccccgagcagatgtttcattacgtttaaacgctctgcccaactagtcatagccaccaagcactgggagtcggcctaagcacttcccaagcatgcatatgagtgacatgagttcgtcattaatggaacaaagtttcacggatcggagtttactactcgggtacttttgcaattattaagagcagaaaataaatttatctcatctctatgcttgtgatttattccgaataatacttagcaccttgcgttactcggtcca

SEQ ID NO: 45828 - DNA, 363 bp, Oryza sativa
  unsure (1)..(363): unsure at all n locations
ggggctatcccatactagcacatgtgggtggattgtatactaaatgaactgacatngagtgaagtccttaggtcggtttggacgcactctccctctatcggtacataactaatcaccacatgtgcaccacttgaggcccaaacctaaaatccatgttttccatcattttatttgtcaaatacttgatttattcatctctgtccagaatcttaatanaatcatttttcatgttaatatgagcccaagtgataagtaaaaccattctaagcttggctaagcaatatagtaaactagtgtaactcatatttcaagtagtaacaggatatgattcctaaggttaggaatganggatatggatatatg

SEQ ID NO: 45829 - DNA, 420 bp, Oryza sativa
  unsure (1)..(420): unsure at all n locations
agctnggattttatgcagggtctgcatattctgcatangtggagcagggaaactctgtgtttctgctgttctggtttaggtttcgtttggaagttactcttcgtgtacagatgacctgccatttcatattggttcttcatggctggttttctcgaatgggttatagttatgaacagtgcgcaaaatttggtgcggagtgccttttgccatgtgtttttttaggaacagtatctggtttgggtatttcaattattaattattttcaatctccttttgtggtgaatttttttatttacctcgttttattaaagaaaaaacatcatgttccgaacgagcggaatcctgaatttctgattttccaaggcacatgaacccatgtaggttggcccgtcatacttaaacacttattttagaatcacc

SEQ ID NO: 45830 - DNA, 247 bp, Oryza sativa
  unsure (1)..(247): unsure at all n locations
aaacactngtctgttaattaagtgttgaccgttaccaagtaaaccattgtgtggactgacttaacttaattaatacctgggatgtggagttgtggactttactaccatgaatcaaccttgagtgattatcgcctctaacgaagaaattcaatgctactatccttatcacgctgttgattcttcttattacacttttaccatctattctaattaaagagataaatattattcatttctttgtgacctc

SEQ ID NO: 45831 - DNA, 378 bp, Oryza sativa
  unsure (1)..(378): unsure at all n locations
agcttggacctgcactggagttaagtatatctcccacgcctcatgttttacatcaacaccgaccatgatgttgacgatggttgcataccacgggtcagagtctgtgactttcaacagcatgtcgtcttgcagatagtcatttatcggtagttcctgtatgctagtgacttgcatatgcgacaaatggtctgcaacagaattctctactccttttttatccttaatttcaatgtcaaattcttggagtagaagaatccacctaatcagccgaggttttgcatcttttttacagagcangtattttaatgcacgatgatcggtgttaactattaccttagctcctattaaataagacttgaatttgcaatggaaacacta

SEQ ID NO: 45832 - DNA, 294 bp, Oryza sativa
  unsure (1)..(294): unsure at all n locations
tgaacctttgctcgtcccgagtaaaggacgaaagggaaacaaacttagttgttgatcaggagttgctaccatgctgtatatctaaaatgtacaagtacataggtactctctctctcatgttaagtaaaattcacggaggcttacccttacgccttaaaatttgggaacacacgcttctcaccaccatgggcaatgagagacataatagatcatagagtaccattttcaatgtccttagttagttntcaaaagtttgcaaataaaaactaaggtcctcaaatgaatctctctatc

SEQ ID NO: 45833 - DNA, 423 bp, Oryza sativa
agcttgggctatcccatactagcacatgtatttgtactatatacaaaataaactgacattgagtgaagtccttatgtcggattgggcacactctgcccctataggcacacaactaatcaccatatgtgcaccacttgaggcccaaacctaaaatccatgttttccaccattttatttatcaaaatcactcgtattaaagatctgtccagattatttaaaaatcaattttcatggttgtaatgagcccataatgacaaggaagacaattctaagcatggctaaacattatagtaacctactgtcaccaaaactcatatataaagtggtatagacatattgttactaacgctaggaatgagggatatggatatatgtggagttaacgtgataatgcaagtagtagtagtttgctaacaagataac

SEQ ID NO: 45834 - DNA, 315 bp, Oryza sativa
  unsure (1)..(315): unsure at all n locations
aagcttgagtgtgtgagaattgagctgccagacctatatttgtttgagcgcgnatattcttgggtatgtttcttgtgtgctgctaaccatggcacgatagcgcaaggggaaacatgatggtcatgctcaacgtcaacatctacaccttcgacgagatatgacgacttcttcacgtgatgcatatgaggtacatgactaataatttgcacaagttgcatgtaagttaccacgctatgatggaaagtatgattctcgctgcatacattaaattgggagctagcagtagaaaaacaaattgatgagtatgaattttct

SEQ ID NO: 45835 - DNA, 418 bp, Oryza sativa
  unsure (1)..(418): unsure at all n locations
agcttgtacccagctgcaaaatataaatgttacttanaggtggcggatggccataggggtcggaggaagtcagcatggagtatctactcagcaagaaaggcagaagactcatattggtgtgatattataatcagtgattntgatgatggagacacatcaagtgactatgagggccgcaaaatgaagcggctgtctcagaacaggagttttaataagaagatgaagcaggaggttgcacctcaagatgaggcctctgctgattcacctgctgtgaaacaggcagatggaccggcagctctgatcttacattttagtaatgcagaagccatcccttctgtggatgacatcaatagtatattccgtatgcacgggccaatcatggagggtgcgactgaaatcaacaagaaatcaaagatcg

SEQ ID NO: 45836 - DNA, 368 bp, Oryza sativa
  unsure (1)..(368): unsure at all n locations
atccttcatgctataattntaagagttatagccgttgtccaaatttcatgagtaataacacctgtgacaatgcattaatatttgtcatcagcataaaatttcatgtgtgttactatgggtatcatcgggcgtaaaanttgtgaatatttttctctggctcacgtttcacgacaattagccttggccttgttcgcaacaaaattcgtgaacattaaccatgtgaacaagagaagtgtgattttgtagtcttcatgctataatttcgtcgatcaaaaatatgtagccttggcatgagtntttttcgcccaaaatatcaagatttttagctctgtatcatcacgcataaaaaaatcgtgaatatctttctt

SEQ ID NO: 45837 - DNA, 405 bp, Oryza sativa
  unsure (1)..(405): unsure at all n locations
agcttattcaattgtcaaacatgccaaattttttttattcaattggacggggagaaattggaaaagtgaataaccttgaactatgcgaactattcttccctggnntttanatactttgatttttttattattttttcgctttacatgctagttttctgcgataagtttgggaacatttaacttaattggaactgattttggtgagctcctgacataaatcataaagttcagacttgagcactatagtgttattgttcaaaatactgacgtgatccccaaggatctaacatatttttataaatatcctgtaacacattggaacaaaatgtctcttgctctttcaccgtaaaatcttccaaggttcttttttaatgtccttttaagtattaatccatgaggtggtca

SEQ ID NO: 45838 - DNA, 299 bp, Oryza sativa
  unsure (1)..(299): unsure at all n locations
nttacttggctcggctcggcctcgtgtataacaatattgatcganttgacacgctcgatgtacctatatctctctctctcgcacgtgctagcgtgtgcactccggaattatgcaatcagagccgatgaaatcgtcacactttgctttattcaacacgatcgtcaagagccgcagttcttgctggtacgttcctcagagcagcacgcacgtcggccggcgcctggaaacacgaagcggtcgccggcgagagctcatatctcgccgtcccagaggtcggcgagcgacttgaggggccgtgg

SEQ ID NO: 45839 - DNA, 406 bp, Oryza sativa
  unsure (1)..(406): unsure at all n locations
agctngcatcttgcagtactacaatacgatttcattctagtgctattattccgaaatcatcgcaactatgcactagggagttatatatatccttgaaatggagcctatagcttccaggaattaatgcagaagacgcaatgacctcgatcaaactagacaccaacagacgtacatccatgcatgcaacgcatggcgcgtcattaaggctcggcatagagatggtctggcagcctgngcttgacgacggcgaggagagggatcttccgtggcatggtgagcccgaagatctcctccatgctcagctcgccggcggtgacgccgtcggngaggcaccaggagaaggcgtgcagcatgntggcgagggtgagctggatgaccttgagaccgaggttgtacccggngcaca

SEQ ID NO: 45840 - DNA, 382 bp, Oryza sativa
tgacgtgtgtgcgccaattataattcctgtgtcatgtgatcttaagaggacgaggccacacctcataatgatgcctgtgtaaaatttgtgtggtacagctaatagaaaaattttgatagtacaaatattcagtacaactcccttcggttaaggttgtaagacgttttgactttggttaaagtcaaactattctaagtttagcttacccttaaaaaatattaatatttacaacactttcattaaatctataattgaataaatttttattatatattttaatattttttctacaaaattaattaaacttaggttagtttgattttaaccaaagttaaaacgtcttataatcttaaacggagggagtagtaattattatgtggac

SEQ ID NO: 45841 - DNA, 226 bp, Oryza sativa
gatcaattttcccatcatagcatttctgttagagcatgtatatctttttttatttgggttcataggaacaaatttcaacagagcagagcatttgcaatgatctagaaattacggcttatttccttttggttgacctcctgtgttgattgatatttaattttctaggcaataccattctagtagtactgagctgtgatgcataagagcatacttatatacacttgta

SEQ ID NO: 45842 - DNA, 406 bp, Oryza sativa
acgcgtttcatgtgttgggatgaggctcatatgttgggcaggcgcggagtgcgggtaaagtgtacatccactgcagtgtgagtaaaccaaatctattcgaatagccgtgctcgcggttattgagcactgggacgtgtattacacttggctagactctaaattcttaacttatgtgggatgggatattggatgatgatttttatgctgatggagccacttcctgagaggcggaaaggtggacgtcctcagaaaaccatgacgactcaatggcgggaagctatccttgggattacaatggatggtggacagaaccgtcgtttgttaatgtgaacactggtattaaaacttgacctgtctatgctaggtcttaggcttgtgaaaagatttgaaagcttgtctaccaaaa

SEQ ID NO: 45843 - DNA, 347 bp, Oryza sativa
  unsure (1)..(347): unsure at all n locations
acccgctccatgaacttatatcctgatgcactctaggcgtccatgtttctagcagtgagaggagttctggcgcttccgggaaagagatgtctcacacacatattaaattatgggtcaagttaagttctctctctcacacactcatggcagtcctaccaatgacgacaccgatgtagggcacgcctctcggccctacctcaacggctgtcccaccgtagcgcacctgcctcactcangggtgaaccatctatgcaaggatactgccttcgctcggctatctaatccgctaggtctatacccattcgagacgtaccgttgtacgggggttcgttcatgcttaactttat

SEQ ID NO: 45844 - DNA, 429 bp, Oryza sativa
  unsure (1)..(429): unsure at all n locations
agcttatccaanggatgcaatttaacggagtgacctcatgtagtatgccttgcgacaatgatctaaatcctcttcaaaagaataagatgtctccaatacttaatatggtaattgaaccatcatttgactttgatgatcctcctacacatcaatataatttactggagccaacatcaattattactagaaagcatgttttatgtgctcatacatgggatcacgagtacaattttgatggtgctagtcttgaaaaaactcttgtgcttcataagcctacaaaatgctttgaagctactttagttgaattctctaaggacatgaagaaatctagaatccattttaactcttcattcagatcagagcatgtggacgatgcatcacattgtctgggatataacatacaaaatgcttggaagaaacttgcatatt

SEQ ID NO: 45845 - DNA, 427 bp, Oryza sativa
  unsure (1)..(427): unsure at all n locations
tacacataacgaagggctcccaacagttgctcttttgcataccaagatacattacttcattgtccactctgagcttgctgcacgaaggtgtataaacagcgccttcagctgaacacaatttgattgagtgggtggacgacattggaaatggaaaggtgaatcccctctggcagatatgcgcctagataacttcaacatgttcttcctttctggtgcacatgcactatggacatgntttgcacagcttatagttttgagaatttgtagatgcgatgtgctcatccactggccggagaaagaatatcacggcttggtatccttgaagacattacggatagtgagctgcaacaactgaaggataacacaagctctgacggtcacatctgtggaggccaactctacacgtttgaatcactaacatattgat

SEQ ID NO: 45846 - DNA, 418 bp, Oryza sativa
agcttaggtgtgatgaatttaaaccctgatctgttttatcttactcatcgaattattgaaatggtttttttccccccgaaagaaagtttcctctactgtattgcttagaccacttgttttaagctatatgttaagtttgtctctcaaaatatctaatttatccctataatatatccatgacaataatccactcaataatctaaatcaaacgatctgggtttactttttttttcctcttcaaatttgggtggcgtttcaatgattgggatgaacaatctagtgactcaaacttgcagaagcattagcgcgggcatggaattgtgattgctttgaatgattgtatcctgtgcaggcttctactatactagatcaaatacagttataacatgtagtgtcattatttcacataactaagttt

SEQ ID NO: 45847 - DNA, 396 bp, Oryza sativa
cctatgatactaagctgcctctcctagctgctttacattcttgtgctctgcgatatattttatgctcatcagcacatttgccaggtcaggtttccattcattacttgcagaagcaagtgccttctttgtgagatctgctgccttcgacacctgaccaacctttgaatatccaccagccaacttataccaagtattggaaaaaagtgtcctccctttcttgatgaattgatcaacaagagcttctgccttctccataagaccttctttgcagtaagcagtaagcagtatgttgattaatcgggaatcatggtaaacatgcttactttcccactcttcatatgctttctcagcccccacaatggtcttcatcttaagtaggacacttattctgcacat

SEQ ID NO: 45848 - DNA, 426 bp, Oryza sativa
taagtcactgggctgcactttcaaatatgattattttatctctcacgatacgtgttcctccatcctagtcatactggaaatatgacctagaactgttaagtggcgggcccacgccttaaacttaacgccgtggtggcggacacaatgggaacccaccacgtggcacaataccattgtattggacacgcttagtcacctaaactactacttcagggtaaataggaagctcctctgaattatacgaactcatacacaccgacctaccataatgtaaggctaaaacataaataatttactaagcttgggctatcccatactagcatatgtggttgtattgtatacgaaatgaactgacattgagtgaagtccttatgtcggtttgggcacactctctccctatcggtacacaactaatcactatatgtg

SEQ ID NO: 45849 - DNA, 307 bp, Oryza sativa
gaggtgctgaggtcttctctgatggagtattagaatgcatcgatgaaaccacacgacttaccaagttttcatgacactttgtcatcaagttcatgaaaagcaggacattggtaaccgaacacatcaccggaatcatacgtccattccgtatgaagcggcttcgaaatctttttcgaaacgtattgggatatcggacaagatcatctgaaatacagggaccttagctgacaacaacatcatcgggaaaggtactgtttgagggactatgaagcttgagtcaccaatctcttgttggtttttttccaaa

SEQ ID NO: 45850 - DNA, 412 bp, Oryza sativa
  unsure (1)..(412): unsure at all n locations
agctnggacagtaaaatcaccgaagaggcttcttatggcataaaaaaagctaaggtagtcacgtagcgcagaaagtaattatctcgttttccgctgtcattttctaaattttggcatatctctaggaatcctggaatctgtgaaatacgtttccttttaccattagtacattagtttctactatgtttttttggaatcacaaggtaaacaagtttggaatttgattaaaatttgatgacaacacacacatgttattcctttacttatgaatagcaaaatgaataactagaagcaagctgttgaggatctccttgcagaatagctatcttagtggtgcttattttacttcctctaaaaagaagatcatgcttattttgtgtgaaattattttttaatctaaatttggtacatt

SEQ ID NO: 45851 - DNA, 290 bp, Oryza sativa
tatccagatttatagtactaaaatgtatcacatccaaccaaaatcccttatattttgggacggagtgagtactacaaaggtgtttacctgaagagaagaattattagagcttataacagaactataattagttagggcttgcttgtttcatcggacacagtaattgtactgatttttgtttgtttggataaatagggtaggcatcattctggcatcacgagttatgccatgctatatgtgtgctgcttggaacagagtagcctctgcttttgctttaacttttttttata

SEQ ID NO: 45852 - DNA, 406 bp, Oryza sativa
  unsure (1)..(406): unsure at all n locations
agcttnctccagattcaccgagagcatactctaatggtgaaacattgtacctaagaaggaaaatgatttaaacaacagataattattaagtaaccgcaggctataactctaatggatctgtgcactgcattctttaagattaatgacgggataaggagctttatgaaataaaatagttgtacttgactttgaacttctacaacttctacaaaacttgagtttaatcttgaaaagactattgcaagatcacaattggtaattactttcaccaagtatctaatatatattctttaaaactttgatggaatgtattcccccaaaaaaaaataatggaatgatcatttatgacattgaattgagcanaagtgccaatgctgctaataacatgacatgcatgagtaattga

SEQ ID NO: 45853 - DNA, 345 bp, Oryza sativa
tattttcttattctgcattgcttcatatgtgcatcgttattcttgatattgagatagtattactaacctatatgatcaaataacagtcactgcggatcggcggctactatctttttgaatgttccactgaaagtatgaattattccatgaaaggctgtggatgtttacaaactagtaaagtttcactacgctatcatagtagagtttggagtcttgctattacatctaatggtactataaatataaagcagaccattggggatcaatctattggagcttcttcagtgaagatggatgagccattatccagagaagctgccaataatgagataaagctagtgcata

SEQ ID NO: 45854 - DNA, 397 bp, Oryza sativa
agcttggacagtaaaatcacggaagaggcttctgttggcataaacaaagcttaagattcaggtagcgcagcacgtaattatctcgttttccgctgtcattttctaaaataacgcctatctttaggaacctcggcatctgagaaatacgtttccttttaccattagtacattaggttctactatgttcttttgttatcacaaggcaaacaagcttgctatctgattaaaagttgatgacaacccacacatgttattcctttacttatgaatagcgaaatgaataactataaaccagctgttgaggatctccttgcagaatagctatcttagaggcgcttattttacttgctctaaaaagaagatcatgcttattttgtgtgaaattattcttttatct

SEQ ID NO: 45855 - DNA, 423 bp, Oryza sativa
agcttaaataatctacgaccgtgcctttctcttttctgcaagcaagcgcaacttttgttctccaccgtgaaaattaaagcacatacaactacagcatctattcattctcctttacctatacatttcacactcgaaaaggagtagtacagtactaaactactaatccatattgccgaaggccactatggtccacataagaatctccttttgaactggctccaactaattccctctgaatttactgaaccttgtcacgagagtctggtgtgcacagattattccctactagcaagtttagtatagccaaccataactactaactccaaattatctatagctaatttaatagctaattcatacaatagttacttaggtcattcccaacccaataactaggatggtgtccatagcatcaaataagct

SEQ ID NO: 45856 - DNA, 380 bp, Oryza sativa
  unsure (1)..(380): unsure at all n locations
tcatcaccttccttgctcacacgttcttgctgctgccggtgattgtggcatatctcccaatgtgtacgtctcanattatttcaggaaagaagcaatctttcatacatggagtgaggagatatatgggttcgggatctcagaatcttacacaacgctgagtgcccaagttntttatattccagatccatctaagttaagggtgaaaaagggtcgacgccaaactagacgcatcaaaaatgatatggatgagtcagaagcaggtgggaggactntacgctgcagcaagtgtgatctgcgcggccatacttacaagaaatgcccgaagaatgcagaagtttcaagcggcgcagatgctagttcatctggacaggcaagtgatg

SEQ ID NO: 45857 - DNA, 419 bp, Oryza sativa
  unsure (1)..(419): unsure at all n locations
agcttgtatcttgacctaccagcacctcattttccacagngatcccaactatgcgtgtctgaggaagatagggctgcacattctcattcagccagtcgatcgacctgctcttattcgccgcaaaatccttcacgagctcattggggatggcgataaccagattgagcccatatcccttgaatgcatcaagaacgctgtgatcggaatcgtatatcttgacattccttatctttgaagctctcaggagttgtactactttatccggagaagggatgttgtttgctattctcccgtagtttatcccatagcccccgggaaacgcttacacggctctaggaccttgtcacaacaaataccaacaatcaaatttcatatcattaataccaaatcaacgaattatttgttcttctaggcatccg

SEQ ID NO: 45858 - DNA, 342 bp, Oryza sativa
tcagcttgttggtatcgggctaaaacgccagatttataactctctcggctgtacaacgaggggtatgtttgttacgacgcgggcgacaactaaaactgtccacttacactcgtggcactaatataagtacttatactacttttgttagctcggatgcagacgtatccatgcatgggttcagctcacccggacacctgtaaaatttagggtcatatataaatgtaacatacatatcttggtcaagttgttgatgaatagtaggactcctgcacactctctttgatagatgcaatttgatgccacacaaattatagcactagatctttactattacaggatctc

SEQ ID NO: 45859 - DNA, 413 bp, Oryza sativa
agcttgcacacgcagctgctggataaggtctttttcttttcttatctccgctctctctgttccttgtgcatatcagtacgtgagcttggagccttggagcatgtctagtagtactaagatttcgcttttgtctcccgtctcccgtggacaggatcgcttgaccaacgcctgatgatgataattaagacctgcctaagcaacacctgggacatccgtattatgatattatctgcactgcgggttacttctaaatgatcaccgcaccccctcgtcgttaccaggctgcctcgtgcatgctcatcacaaaaaggcgtgctttgacgtccctcgcgagacacatcgcatgcagctgcggccagtctcagtctccatgtgcccatggtcttcctcgaatgcgtctgtctcgccggaat

SEQ ID NO: 45860 - DNA, 356 bp, Oryza sativa
gcatgcagctggtgaagacctacaacatgattttttctcatactaggattgcgctccctagaccttctggtcgactgggagatacagaagaagtggaaccaacgaatttttagcacaacgagagcatgacaatcaccctcctagcaaaaattagggagaagccaaaatttaaccctaggaggagctaaaccacagttaattcctaagagcgtataatctgtaaagacgggctttctccttcttttttttgttcggtaccaggggtgtattgtttagctctctatttaacgaaagataaagcacaatctcactctggctccttttaaaaacacttgttttacgctgtgatgggttgt

SEQ ID NO: 45861 - DNA, 415 bp, Oryza sativa
  unsure (1)..(415): unsure at all n locations
taaaacttttagaaatcaaagacttggcttgaattatcaagcacagcataaatacaccagtattgtaccaaatatgccttcatttgctacaatcatgctcaagcagaatcagtcctttcatcatcaaaattattgttgctcggcttgaagtcgttgttgccgaatttgatctacaacatcacttgcaatcttgtcagccgcattttgagcattactaataagatcaagagcagcttcttcgcttgtcccgtctgcaaagccatcaatggcgtcaatttcaatcctcgggtacaaggatttggtcatcgccaatgccatgctagctcccatacttccagctntcttgatattcttgaagtatacatncggtgcaactctcagcttgtcaaagatttcggttgcgtcaagtgcactc

SEQ ID NO: 45862 - DNA, 339 bp, Oryza sativa
acaatgtctaagccttggcatgttgcacgagaagtgagcttgctgaggggtcgtgaagcaagtacatcacgagtggcgcttatggatgtaatagaagctatccactgcagctactcggctctaccaccctgagttagcacacagaaagagatagagccctttacccaatcatgatctctatagctagtcaagtccgaatgcgaatggaaaattgaactactgcagatgatcctgcaatgcctattggaccaagatatataccaacttatgcacaaattttaagttttcctggagcccgtgatttacgtttcatgggatacctatatctaaccattaaca

SEQ ID NO: 45863 - DNA, 340 bp, Oryza sativa
cccaattgatggctccctggtcttcattgatcaaatacccgaggctgcgagtcgactaaccgacgccgtggaagtctcttctcaaggcacgttccgacccgacagagagaaagacgagctgtcactcgccctacagactcccgagcatccacgactaacacgagggaaatgggtgattccttggaagattggattcaaggaggacatccacacgtacaggagtcgaatgaggagcacgagagataccgaggcgaagattgcagatcttgagtacagggtatcgagctacgagctcagcatgcaagaggaggtggcaaggaaggttgatgaacgcatggct

SEQ ID NO: 45864 - DNA, 424 bp, Oryza sativa
agcttacatgagattaatccatatgcttggtttgatatatgtccagggttacccaaataaattccttatttgcccctgaaaggttacccattcccttatttggcccttgttctttcaatgacatgtgggtccagggacagatatcagtgagacatcaggggcacataagaaattgcatggaaattccagtggcaaataaggattaaggaattgtcaagttccataagtatatacttacattagtatactaagaaacaaaaatttctagcatctgcagatatacattaacttgcagacaggagcaaccaagtattacctagcaataatatctgcagtaactagggtaccgtattatctgaatattgacttgttgaggaataacaacgagagaaaactagcgaagtaccaaacagaacatagcata

SEQ ID NO: 45865 - DNA, 305 bp, Oryza sativa
  unsure (1)..(305): unsure at all n locations
atcatcactttctagaagcgcgtcttcatatcctgagcttgatacgcagggtcacagtccttgcctacctccaattggtgtgaaagtcagtgctgatgataagaagaacaatggtggttcatcttccttacgtcgaagatcgtctgctattggtgaatctgataatctgatagctgctttatctgggatgaatttatcatcatctggagcagctagtggacagcaaactgtgacccagtctgagctctaccaggatgttgataatgtccgtaagttctatttgatcgtcanggtgatcaattaaa

SEQ ID NO: 45866 - DNA, 422 bp, Oryza sativa
  unsure (1)..(422): unsure at all n locations
agcttatcggtgagtttattattcgttcttgagcaattgggagtttgggactaacataattagctgcattaggaagggtccttttttttccctcttaaagtcagaatcatgcacctgttatgcatatgcatatgatagaaaataaaacagaaggggaaaggcacaaaggcactccacgatgttctatccagagaatagcagaattgccacttggattatcaccaccaatttctcttctgctctttcacaggaaaatgtgtgacctgtgtgagccgtaagcccgtgacacgctaggtcactagcgtacgtagttagtctgtggcccttcaaaattntattttgtacagaggacgccaagatgaagcctgcatatcaccttgatagagaaactagaagtaagattccctttntttttatttctc

SEQ ID NO: 45867 - DNA, 209 bp, Oryza sativa
cttgcttatctggcatggcggagagccgtttggtttttgctaaagcacatgcaatgcatgcttaatttgcagaaactacagcttagatttcagaaagatgtccggtgtatgtgtataaaggcagagtaatgtgtctgtgtgtatgcggcgctcgtctagtattgtcctgttgtggaattcgacgcgccgaacattttcagatcaggata

SEQ ID NO: 45868 - DNA, 392 bp, Oryza sativa
  unsure (1)..(392): unsure at all n locations
agctttgctttcttacacctgctctctcttatatgaaagagaggagagganaggangaattaataatgtggaggccacacctgctgctgctgctggtctgaacctgcaccacgcccctcgtgggaggcgccccctccattctgggcgtccaccttcctgaatcgacggcggctatgttaagggtgatgggtgggccccacggtggagggagaatgagaatgacgagaatggcatgcagatgtggtggccttccgactgtcctacgccttctgtgccttcccgttcaggaaaggagaggagagcttttgactgcactctcctttcttttntactgctctgctctgtgcacgcctgccaaatctgccatggatggatggatggatggatgcttt

SEQ ID NO: 45869 - DNA, 213 bp, Oryza sativa
tgtcagtaccacaccaatcaatggctacatcccagtcatacccacgctagcttccaaatcttgcattgcgatgctgcggtgtcaaaatcaaacaatgccaagcgtaaactgacatccaatgccaagtccataacaaacacaagtactaccaacaacatggaaatggaagcatacacatcgaactctgctacgctgtatatatatacatggacg

SEQ ID NO: 45870 - DNA, 413 bp, Oryza sativa
agcttgagggaaggcacatcgctacttatattgcccgagacggcgaaccagtagccccggcgggtataagacgaaagtttgtgaatcattgtggttgggtcgtgagggacaacgtcctcatcagcatagtgtactggcgtcgaactatgtcacgcggggatgaagatagctttctccctaacacagagaaggacatgttgtggaccaccatgctggagacattcacgatccctgaggcagatcgtcccagatgcaaagaatggaccctgacgaaaatggcagagctattccagagctacaaatcagatctgtacaagacatacatcctcaagggcttgacacctgatttcaacgtgcataacaagcttagggatcactatgatgcgtttgtggcatacaagactggagcgcaa

SEQ ID NO: 45871 - DNA, 374 bp, Oryza sativa
  unsure (1)..(374): unsure at all n locations
ntcctgacactggtctgaccacacaaagcgtgttttcttcttaagtaggtgggacattggtcgggctatcttagagaacccttcaatgaaccttcggtagtatccaaccaagcctaaaaaactccgaatttcagtcacagaattgggtgctttccatttcgtgacagcctccactttagcaagatccactgctaccccaccggccgagatcacgtggcctagaaaagcgagttcttttaaccagaactcacacttgctgaatttcgcatataacttatgcttccgaagtttctcgagtaccaatcgcaagtgttccgcatgttcttcctcatcttggagtagatagaatatcatcgatgataccaccacaattt

SEQ ID NO: 45872 - DNA, 412 bp, Oryza sativa
  unsure (1)..(412): unsure at all n locations
agctttgcccctagtacgctgtctttcttctttctttntgnttgattcttctcttttctcaagacgtgatcgatgcgagccgctttttggtcgcacgtatcggcgtaagcacgctctgccaggggcccctgcaccggcacgacgctgtcacggcggctcgtgacgagacgaggcgcggttcggttggttgggcggttgattccgccgagatcgacgaggacgacgcgacgacgcaaaagctagcgacgttcggttcgtacgtgccggtggcagatggcacggccggcgttcacaatgcgtataactggcattcaaccttaggcagccccagccaagattccacgccacgtcggatgtttctcgtaccaagtgaagaaaatggagcctaaatgagtcgcatggttctcgtcag

SEQ ID NO: 45873 - DNA, 281 bp, Oryza sativa
gagttgcacaagaagaactcgctccaagaggcgattaatatgtagttttctcaatatttgctactgtagttctgattcagcagttcaaatcacctaattaaaatgttagagagatttctttgaatagttctgttaacatcacactttgctgtgactattggctcttttctttttattctgcagcaagtctttcttgaagaaatagagaaaactgtagcacttttggtttttgaagatataaagaactgtccatatggggaactattggatgtttcccaacg

SEQ ID NO: 45874 - DNA, 425 bp, Oryza sativa
agcttaatacaatgtcaagcaactatatgcataataaaggtgatcaggaatgtacttgcctatggccttggtaaggattagatgaagtaaattggaggattgagggtttaaaacaattttattttgaaaacatattcccaagagtcataacacgaggtgcaagaattcctttcatcttcaatcatctcacataaagctattaattagatgcaaaaggctccctaaacatggaaagtttttcacaagcacaagttcagcttagaatgatagatatacaagatcaatcatatgaagaatttcattagttggaaattttatctttcttatgcttgaaccgattggtttctgaattttcagctctagtactataccatggtggagatatacagatacaagacgtgctcacctgcttacctatgaaaact

SEQ ID NO: 45875 - DNA, 407 bp, Oryza sativa
agcttatgttgcttaagctattatacacgtttttttacttattggtctcatgataaactcccgcagcaacgcgcggtgtttcacctagtttaataaaaaaacatccatccaagcgttgtctaatagaaaatcatttgagatgtcaggtgtggttgtgtgacctgttgcatggttcatagggctgtagtaagtatgactagcgctgagttgcatgaggttgcccaacatccaatgcttcactaaaagagcccatagccgatatttgtattttgttgattagagataccatcaatagaaggcaataagggaatcccagcacatataatttttagggaaaatttgaaccatgccacacaaattttgcaaatttgtgatatggcaccctggcccatatgtatttacttatg

SEQ ID NO: 45876 - DNA, 449 bp, Oryza sativa
tccacagaaattgatcagcccaaattagcacttattgttttcaaaattcaaattcaaacaacaaataatctatcaatccacttgagcatcaatcagttaattacaagacgaacaaaacataatgtttaaatatactcgctctgttttatattatatacaagtcgatttagacttttttaagtaaaactttttaagtttaaccaaaatataacaataattttaacataaaacaaacatattatcaaaatatatatctaatgtttacatttaatgaaactaattttttatattgtagatgttaatttttttatataaatttggttaaacttggagagttcaacttaaaaaaagttcaaaatgacttataatatggagggagtagattgtcatgtaatgcagatcgatttaaatttaaatttgaagtaaatcacaacaaggactacctggtt

SEQ ID NO: 45877 - DNA, 416 bp, Oryza sativa
  unsure (1)..(416): unsure at all n locations
agcttcactaaagataacccatgtgcaccattttatcgcttggaaatgaaagaatgagttgcaccataatcaaacaatattactgccggtgtcgagttgacgggaaatgtgcccaatatgacctctggtgctgactgtgcctcctctgcagacgcatgattgacacgggcctgcacaaacttgggtacagcatgtcttggcttcgggcactttccaaccgtgtgtcccggtttgttacaattgaagcagagttcgggctttccttcgaactcctcgggctgttttgactgagcangcagagctggctaaactgactgagctggaaacattagtggacttggagtcgggttgaggctgtgcttctcgctagtgccgngactgccacaatggtagatcctgccgaagctacccgggtg

SEQ ID NO: 45878 - DNA, 463 bp, Oryza sativa
  unsure (1)..(463): unsure at all n locations
ctccataaagtgcanaaaatgttgaaataagatacccgagttatgtgaaatcgtctttttctgatagacggttatcttgaaaagtggcatgtgctccgactgatgggtgaattgcgatctgactagggagatagagctgagaccgatcagaccaagctaatggcggtctaaccgagctaagaacggtcataccaggccacccatggtggttagactcgccccctatgatgtgacaggtagcagctagtattctacttgttgccttgatggccagtctgctttttgcagcctgaccgatataccactgtgacttgtggattntgccccaaatggctagtttgtcttggcgcgtgtataaaggcatcctcactagcagcaagagcaaggtttctcgcacttcattgcattatcttgagcccttgcaagaactctcgcacccttgtgcacttagtntatctactac

SEQ ID NO: 45879 - DNA, 421 bp, Oryza sativa
  unsure (1)..(421): unsure at all n locations
agcttgagacaatagttatgcaacttttgtttattatagttggagattcacaaatagatttcaataatgtgttcttcttattttaggttagttacttattttgttcattgggtgttttcaataatttgttgaactacactcttgtttgagtgctattctgtaataattggctgtagctctcttgagtaaatgccggaatgttatattccattatcttaaaaaaaggtattaggcatattatatatttgaaaatgactctagatacttggtttatattttgtcttttctttattntatatccctggtttttttttatatttaaacaacatccttttataccttatgtctgaatgaacatgtaatgcctaagggcagcagaacaaccatgatgtactatcttggtcttgtgttacacatacta

SEQ ID NO: 45880 - DNA, 329 bp, Oryza sativa
  unsure (1)..(329): unsure at all n locations
tatacataatatgcaaattttgctcaaaggtatgatttttttttacataattcaatagaatctgcatttgcttcaaagaagctaccagaacctattattgagttggtcgttcaattcagtgcgacataacataacacaaagtagccacgaggaactatctattggggcatggagcaactatatctancggacctanaacggggatggctgcccgctggatgggcaaagttgtgactcttgtgaagtgtgacctgtgaagcaccaccgccatatatactgctctctctctctctctcttctaaaaaataaataattnttttactctgaca

SEQ ID NO: 45881 - DNA, 428 bp, Oryza sativa
  unsure (1)..(428): unsure at all n locations
agctntccccagcccctattcatcaatggacttctgacgtctacgaaggagtgtggttcgttcgacaaattcctacctctatatctatctctgaggtgtttgggttttgcaaaactccatagatatgcagaagagaaatgctatccccactccgaccaagacagaacttttaccaaaagtttattgtgatctttntgttcaaataacaattaaggtgaagcagggtcaggaacaacgaatctctttatgataaacagatccattttgcaagctcgttattacgggtagttcctacaaagaatcggactaatgacgtatacaatgcttgaattatcgacgtagatgctacatagtgggttctcatccttcagagactacgagtgtaataggagcatccgttgacaaaaggatcaccctaagatgatcat

SEQ ID NO: 45882 - DNA, 435 bp, Oryza sativa
  unsure (1)..(435): unsure at all n locations
agcttgaacaagaactttctcggctaanaagaggagtgccataaggagtgctgcaagggcttatttccatgctcggccaaccaatctcaccatcaattattgaagatttatcagcatggccacacatcttatagcaagaagtactacagataaggccatcatcgaccccatccattgttgcatcttccgattcacatgaatggcacatttttctcatgatacaaattttctagattattgagtcactcatttgaccacctgcaaacaaatactctcgaaattattctctctgctgaactcaaaacttgaaagactactggcaaatattaaatacttgtcaaagtacaaaatgttgcaaacttagaagacaaggtaacaagaatcagggcacaattggcaaagctggtgctaagttatgaagttattgatttatac

SEQ ID NO: 45883 - DNA, 434 bp, Oryza sativa
tggacagcgatggagaaccgaggaacgctccggcggcggttgttaacagcagtgcgacgacgtcggcttcctccggtcttccggctgccagggagagaaggggaatggattaaagatgccctagagatactactcgagcgaggaattgcaccgaagctcacccgagaacgatgaattgacgacgatagccggcggccggacttgaggaagaaaggttcgatctcgcgattgggagctccccagcttgattcccttggtgggtagcctactagtaccttggcgacgctcgtggcgcgagggctcggtcagcgggcgctctggacaccgagagcgacgtcgagcttggcacaaggtgctcgatctgtgcaaaatggagaccagattaatggatcgatcaggcagaggaagaagatcacgttgacatgaatggaatg

SEQ ID NO: 45884 - DNA, 263 bp, Oryza sativa
gcatcataagtaactggataagctatcttttaatatacactaaagatccagtaacctagaacactggctatacccaaaccttcacttgcaaacttgctatggaacacttgaatgacagaatgtagaatccagaaagtccaccgtccatgatatcaacaatggttaacggaacctcgttagggtcccattgactttaccaagggcactttcctaatctgtacacatatgcattcaccttgggatattaatcgccaaaactatca

SEQ ID NO: 45885 - DNA, 458 bp, Oryza sativa
ctagctatctaaaatctgtctgcatgttccatgtcattttatgtcgtacaccagacaactggtttatctcctctttttaagggtactgttttatctctttgtgtagagaggtagccttgctgcgatgttctcaaaataaactacatgttgtgctagttgatatggctcaagatggacaagggttgctttctacaaaccattgaatcatctaaaaagcttattgtcctaatatctttgttagactgttgcaactggaatttacctagatggttgttttacgtgagttcttactgttattctattgtaatattgtgacagctattcttatgtattgattaatttgtagacactatgctaagagttctgggcagctattggatggaagatctggagaatattttgatcggactgggtctacaagcattgaggtatattagcatattgatatttagcaactt

SEQ ID NO: 45886 - DNA, 421 bp, Oryza sativa
agcttgttcctttcctcatcaaccaaagatgtagttgcagcagctcatgtttcaatgtcacaagacaatgtctacctgtttaattggaatgttaggggcctgaattcaaaggcgaagcaagacgccgtgaaaattattttgcaataatatggtgctactattgtttgtctccaagaaactaagattgcctctttaaatgatcgtgttgttctcagcagtttgggccaaaattttgtgcggcaatgtgtggcccttccggcggacggcaccaagggtggtctgttgctagcttgcaatgaaaatttcttttctccttctgatgttatccttggacaatactctctgtctgcaactgtgaccatgcgagaagaggggctacagtggtcaatcacagttgtgtatgggcctcaactagaagctg

SEQ ID NO: 45887 - DNA, 416 bp, Oryza sativa
  unsure (1)..(416): unsure at all n locations
tgtgaaatttcgaaaatgtttgagataggctattttgcttatgctcgntctgacttgatggctgaagctttgagcttgctgtacaaaaaaaaaagaaagaaaaaagaaagaaaaaaaatcaatcagaagtgaagagaaggaaaaaaaaaaggaagggaagagaggaacgttgtgttgatgctgttttgtttgtgttattttcgtgctattttgagtggctatgcttgtgactaggctcgcgtctctaaagggtttttgctaggaccagcacaataccatcgttgaacgattattcaacttgctttgattaatgtggttctagctgtaccttgatattacttgcagccacctatagctgcacaaatttttatctgctatatcacangatcgtgctctgtgtcggctccggtactact

SEQ ID NO: 45888 - DNA, 462 bp, Oryza sativa
  unsure (1)..(462): unsure at all n locations
ctcgcacccgngatcctatgagtcacctgccgcatgcaagcttcacattcacacagtgatcgattctgttgctctcatcaacgttcagaaatcagatttttcttttttttcgtgttctctgcacattctattgtggcaaatacatctgagctgaagaactccaaagcatgatccgattaatgtacagtattttttctctttttttttggggtttcttgaactttgatcggtgtacagttcgtacagaaatgggagttgtccggtgaaataatcatgaaaagatctgggtttcttttgggtcgttgttgctgaatcgtcaaggaaagactatgcaagtttgtgaatgtgctcctgacctgacaagatgttccaagtcagttgcagtccatgaccacgcagtgaatgcgactgacacatgacgaggaagaaactcttctatggatgatttttcctaggatcata

SEQ ID NO: 45889 - DNA, 418 bp, Oryza sativa
  unsure (1)..(418): unsure at all n locations
agctggctttctcttcatgcacaagttgtttattggcttggatagaggcttcaatatctcttcgctcccgccgatcggccatcctctgcttagctttttctagcttgaattgatgttgctcgaggtacacagctagagtgatggcattcgctaggtcatctgggaccagggcttgaatttctgcaaaccgtgcccagattgaaccacagtcggctaccaaattatctaatgatgactctagccgaagggatatatcttcaagagttttcttgacatcttcatttaatggggctagagtcttgcttgttgtttcctcttctgcttcttcatcaaagtaatccttaatatcaaaggagaatagatcggctaagacctgcaaaagaagaaattgaagatagttaaatatcanacaaattca

SEQ ID NO: 45890 - DNA, 432 bp, Oryza sativa
  unsure (1)..(432): unsure at all n locations
agcttgtctcagctgcagcttttttcaaatactggttctgctagaagctgccccaaacagtccacggcttctgagattctgaaaaatgaactaataagccagaagctggagaagctgggtttcagagcttttccagaatctttgaagctgcctaccaaacagctgcttctcagaatttaaaactcctccaaacaggccctttgagggcctcatcgttttattcgtttgccctatggcttacaagccaaaaccaaaatttgaattttaaaacttgattttngaattgattttgatgctttttcaacatagtttttttcttagctttgtcttttcaatcagtacgaacatacatacaaaagttttactcgcatatcattttttaatcgctaataagccattatagcttataacaagtattaccaaccgatgggg

SEQ ID NO: 45891 - DNA, 329 bp, Oryza sativa
  unsure (1)..(329): unsure at all n locations
tcatcaccttncttgctcatacgttcttgctgctgtcggtgattgtggcatatctcccaatgtgtacgtctcaaattatttcaggaaagaagcaatctttcatacatggagtgaggagatatatgggttcgggatctcaggatcttacacaacgctgagtgcccaagttttttatattccagatccatctaagttaagggtgaaaaagggtcgacgccaaactagacgcatcagaaatgatatggatgagtcagaagcacgtgggaggactttacgctgcagcaagtgtgatctgcgcggccatacttacaagaaatgcccgaagaatg

SEQ ID NO: 45892 - DNA, 385 bp, Oryza sativa
  unsure (1)..(385): unsure at all n locations
tgtttcattagaaacatcctatggcatgttagcattttctatctgctattagctatattgaacccagcatgacctcaatggctcttatggtgtgtttgctaagttaataaatataacacaggatgacatatgttttcctttctacactaaatcagcctgagtcatgggatgatgatgatgatggtgtatggaagcctanaatgataccgaatccagaatacaagggacgttggaaacgcaaggtttgttttattgactgattagctcctcattgccacattntgtagcatttttttaacatgcttctgtacgcagaaaattaagaaccctaactacaacggaaaatggaagatcccatggattgataatccacgtgagaaatgat

SEQ ID NO: 45893 - DNA, 396 bp, Oryza sativa
  unsure (1)..(396): unsure at all n locations
tggggatgaagcggcgtctgaaaccattaattggacgctttgtttgatgnttccaattggtgaacaattgatttatacttccatgcatgctcctactgcattgtataaactgtcttattacatgttttacatttattttgttacagtagatcttgcccctagacaacaaaataaagtatatactagaagtcgagaacaggtcgtctgtaagtgtaagctaacatctcaagaaaattatttttgggatgccacaactcacaacgtattacttcttattactttactggtacaccacaatattaaagtacaagtagatgcacgacaaaaccaaagagagtacacgaagatgataatagattatctgtacaacggaaataattaaatttgtaacattta

SEQ ID NO: 45894 - DNA, 398 bp, Oryza sativa
  unsure (1)..(398): unsure at all n locations
cgacaacgtgcgcncnaacttacaacanatggtatgtctgtgttcttaagcatattccttntgatcaacagcttcaccatcttcatcaggatccaacacagctgtagaaccaattggtgtnnaaattggcttgcaattctccatcttgaaccgttccaaaagatccttcgtatacttggtttgatgcacaaaagtaccnnnaagccnnnnntnaatttgcaatcccaaaaagtatgataactcacccatcatgctcatctcaaattccctgcgcatattcttagcaaaatctacaaccaaagcgtgagtcgaataaccaaagatgatatcatccacataaatctgaacgaaaagttgattatcaccatgcttaagaacaaaaagtgttttgtaacctt

SEQ ID NO: 45895 - DNA, 428 bp, Oryza sativa
  unsure (1)..(428): unsure at all n locations
agcttccgntggtctctgatgtgtctatttggtctgtcggcctatgtaattattaagttgttgtaagtcttaagtttctttcatcttagttgtgtttgctatgtataatcatgcttaagatgaaagtgtggatctagtgcacatcctaagaattcacatgagtatgagttagaaatatttgagaggttgtagatctttagccattttgtcaagtctaaatctcctgaatgtgtaacacatctggtcgccaccttcgagtggtttgacgggcacatctcaggctgaagttgactggcaagctaaaggtccagcaatgtctctaatattcctctctcgagacgtcggatgtttcattatgattgtttgatgacttgaattatttacatcatccctcaattataatggaaggtccggagagcctacgacac

SEQ ID NO: 45896 - DNA, 430 bp, Oryza sativa
  unsure (1)..(430): unsure at all n locations
tgtccactagcatcgattgggaacttagattctatggcgtctctttctgttcctcctccactgggaactgctcacacgggtcacttgtggtatctaactctaaaaagggggaaaaagcaatggtgattacataatgtactcacaagccaccactacaacatgcattagtgtccatatggttcaaggaaggttgtagggttatttgtgcaaagcatgttttctcagatcattttgcaatcctaagacttaaccattttaacgaaaagggttcgctattgttcaagtggtttaaccattccacaaaggttgtgtccacctagccaagcaccgcttggttcgatttaccttcatggtccaattgtcctgtttcatacccaaatncaacctttccgccttctaagaaagcttagccaagtctcccatccatcat

SEQ ID NO: 45897 - DNA, 423 bp, Oryza sativa
agcttcaccaaatagttcatattgccacttatattatgataaattgtagctgtagaattcagaatatgaaatagaagttagaagctaggttttctagtttctccagattctcatcagctgtttctcataattttaagctccttagacaagaccatagttatgttgcattaagtgatgtgacaatcataaaagcaactggataccaagtgtcaaaaataagtttttggtaagaagatcgtttagggttgtcaggtaagaaaatgaacagagcatgtgtctatttctcaactaacgatggacctactggaagttaatcctgtcaaattctttgtagctttcgatcggattagagagagacaaaattgacaactaagagaagaagacgtttacaggaagaaaccagttcactccaaacataaaatt

SEQ ID NO: 45898 - DNA, 392 bp, Oryza sativa
acactatagaaactaagcttatcacatttaagaagcttgacttaaaaagtcagagcatggatggaatagaaacgattgaatctgtaaggactgattctaaattttttagcaggtatttcaagtgatttttttttttttgcaagcggttgtagaccgagctattttttttttaactacgcaccttgtgcctcgcagcagtagaacccctctgtttccaaccaatcaaaccgttccccagccggctcttgaacggtccacttcgcaaagccaggagaagagccacggccacccccacgctcgctcccaaaattctctaatcgaccgatttctcctctccacacgaacaggtactcatcaggcttacctagctctgacaacttcatgccgaaatc

SEQ ID NO: 45899 - DNA, 430 bp, Oryza sativa
  unsure (1)..(430): unsure at all n locations
agcttcttatagatgaatatatacttcctgtatgttgttatgtgctacatcgagaaaatgaagttgatcaagcttgtttaattggttagaaaggttaccacaaaacatgttcgatcttagaatcaaaacttccaggtaaggcattctctgtgcaatccatgttgggacatttccagacaacttgttatatgaaaggtcaagaaataataaccaaccagcattttgaaggaagctagggaattcaccagatagattgttattcttcatatctataaccaagaatgagaaaccaaattgatccactgaacattgtgggatttcccctgttagttgattgtatgacagatttattactctcaaactccgcagttgacacaaacaagctggaatagtgcctncaatttgattgtggtgaagatgcagtgtcatt

SEQ ID NO: 45900 - DNA, 429 bp, Oryza sativa
  unsure (1)..(429): unsure at all n locations
gcacatcgtatgaatggcaccacccatcattgtatacacacattgctcaagcgcatacctgagagagtccatcctatttatatgataaaaattatttaacacctgaagtctccgaatcctattgntcacctaatataaacatgattgtatggttaatagaaattgttcgatatatgctataaaaaaagcgttaactgaggaatacccttgatcctttatgaccatatgatatggaagaaaagtgtaggaaattctgaggatttcaatcctatggaaaatattcctatgaaagcctgtgaaacaaaggattgaatgctacactattctttataattcctatgaaatgtctcatgctatagagattctagagaacaggtagcaagaggttcaacctctagaagaaattcatatgagtctatctctcattcg

SEQ ID NO: 45901 - DNA, 383 bp, Oryza sativa
  unsure (1)..(383): unsure at all n locations
agcttcatacttttattagaatactcttctatatacctttatgggattgaaatacttttcgagtatatgagtacctactttacattatggtcatggtatactgaatatacggctagcttatatgggagatgctttggtgcgggtataaaggttgcttatgccattactctatgtcatgacgatgatattagagtagtatctggtaagttaggcgtggtgtctagattacgggatatcattatatggggttatatattgcggatgagaagtgggccgctgatggtgacagctcantacgggtattccttcgcgccggtatataatcctaagttaatatcttgggaagggtattcctcagtatttagccccagttgtatggtcat

SEQ ID NO: 45902 - DNA, 380 bp, Oryza sativa
  unsure (1)..(380): unsure at all n locations
tgccttgtccacatcgcanatactcagctattgcagcaaacctatcacaacccactgacttgctttgcaacttcttgtactaaattgcaccaactagcttggcaaattattggaccaaatcacacatactcagctcataaactgtcttatccaccacaacgctaaccaatttgccattaacatggaaaaataaagaggaaaaaaaacacctatcaaacaagatcaaaatgttattcagaacttagcaagagtgagtaattcataactagatacaagcgcaaaaatatctacgaagtacacatactagatatctatctatctatactttcaataaagntacaacccacttgatggaataagtnttagtctagtctttgcat

SEQ ID NO: 45903 - DNA, 374 bp, Oryza sativa
cacaccacactcatttgagcgatcgcaatctcttgagcaacaacatatgacactcaacaatctgcgtagagaagacccaggcatcaggggtttcaagagtgcatctgccataccgctcaacagaaatcatgggctctgaaatggggcactgtagccggacctacccagatgccctactatatcatctagagtacgcacgccaaaccaattcatctactcatgttttctgtcccatacgccaacgcggttacactagctatagtcacatgaatcatcctgcctcggccgaataaacagaaaaagaattcgcctgataccttctttcggaaagaagtgcccaaaattctaaaagcataagcctagcaacaaagcgt

SEQ ID NO: 45904 - DNA, 431 bp, Oryza sativa
  unsure (1)..(431): unsure at all n locations
tataggagttgtgtctaccaaacatgaanaagggttctttatttattgtaattgtactgccaactaggacagaagaagtgtatacgatagatcgatccaagtcggttcaaaccaattttgcccaaccttttggtatatgtggtttcatcgatccaacagagagaaagtttttgttggtgaaacattttgcaataattaaacagttttgtcttgacatacatactatattatatatgctcatgtgatggatatttttttggaataactatcttcattctggaatagctaagaattttcatatgattgtttgtggcgctgttaatgtntacggtacttgacatcatangaatctatcgtggcacacaccgatatatatctgccaataaataaccaatgtcagaacaaagactgcttcatattatttatttttg

SEQ ID NO: 45905 - DNA, 420 bp, Oryza sativa
  unsure (1)..(420): unsure at all n locations
agcttggccataaggtccctaatctcctgtatggtctatttactgccttgntcttttcatgcataattntagggactatattagggtctagatcaactcatggatatgcttttgattctgccccagctcacttgttatatgtagtttaaatattggatttaatatctttctgctataatgagttgatgccaataatggttagaggatttttgttacatatcttatccaatcgttaaatgataggcagagccacacaacggactaaattagtgctactgattttgttgcgaatgtttagacaacttttttgtttgattcccaggtgattgtcatgacgcatgcatatgggaatcgttctggagtacgatatgttacaggtggcttgaaggttattatgttccatggaagccattcctgatg

SEQ ID NO: 45906 - DNA, 388 bp, Oryza sativa
cgcgatgattatatggtcgtaagtttggccagcaggcactttctaacacgcgcaagtggctgaactcacgagttgcagagaaaagttgttcaaacggcgttttgaatgagatagcagaactaggcaacctgttaatgagatatgtggcggtaagaaaggcttcatcccacaattttaaaggaaccgaggcttgggatagaagagcaaggcctttctcaactatgtcacgatgcttacgttctgctgagccgttttgctgatgcgcgtgagggcaagaaacatggtgagttatgcctatcttctggaaaagggagtttaatttctcgtactcaccaccccaatcggtctgcatggtgagtattttggttataaactgtcgttcgacata

SEQ ID NO: 45907 - DNA, 420 bp, Oryza sativa
  unsure (1)..(420): unsure at all n locations
agcttaaggagttagtgggggataactttattgtaagatatgatttgtaaatcctcaaccataattagtaaaaagttacataaccgtagtctccgactttcgacatgcaactttcagaaactcttcattttcatcatacctttgtagttgtgcccaaaaccggagccaatgagttgtcctgaaaatgacctgcatataggaaaatgatggtgatttatcaaaaaccatatcgttcctactcagccatattgcccaacaaatggcaaaagctccaacaagtatcagtttactcttnttcttatcaactcccaaaagacacccattaaaaatatgagatatgctaactggaagattaaaactaanagagaactgaactgctctccatatgaacttcgcaaaatgacaattcatacagagatg

SEQ ID NO: 45908 - DNA, 431 bp, Oryza sativa
tataatgtgcacaggatagctgctactttgaatgtgtgttgaactcaaaagcttttttcccaaccaaataggtcccgttaactatattgggagaaaagggtgagcaagaaaatatggaagaccttaggatcagttggggtagcgaagggcattccagtaactattacagctcttccagcacggtcagcaaaatcaagaccctcactaacctgcataagtataaaatgcataagtagtagaactaatatttgaggttagtcaaaatgcaacaatctgaaaatgaaaagcctaccttgttaatactcaaggcatctatccttccaataatatgtgattattatgctttgtttgattatagcacttagttcttttttagcagaattatagcactatagctgaatggctactatgtgtattagaattctatgttc

SEQ ID NO: 45909 - DNA, 293 bp, Oryza sativa
agcttgacaagcataatgcgcatgctgttacttttactatgggatgtgatgctggcctcagtaacacgaacaaacgcatatgtggggaggaataattttattcagaaagctacctccccaggtcttgtatactgtttgtgctttatgaagaagaagatcacactagcttgtatggctggattaaaaaaatacagtcgatactttctgagatgttgacactaactttaaaaccgccggtcatataaatacaacaggtgtattcatgaattatatttgggtgccatattcatcac

SEQ ID NO: 45910 - DNA, 306 bp, Oryza sativa
tttgttgctgaaagaacgacttggaattaactactgacctgatggccaggcacaacgcatttatatactaagctagcactttgatatggtcaaatacacaaacaagatgttggaaagatcatctctgctcagtttctgagttgaaaaaagaaactgacatgtggaacgcgtagctcgcacataaaacacttcagattgaaaagtcagagcatagtatgcctatgcgttgagtttaccgcactttcgacctgcatagaacaagaagaagcttggctacttgtggcataaaaagaaataaaattctac

SEQ ID NO: 45911 - DNA, 164 bp, Oryza sativa
  unsure (1)..(164): unsure at all n locations
agcttgtctatatggtcattggaaagtttgtcttatcctagctctttntaaagcctatgtaagtacccttaacttacctggtcctggggcaaatcacaccggaatatccgctggtgccaggtaactatatccttcaatttctaaaatcaccaaaaaaaatggtt

SEQ ID NO: 45912 - DNA, 416 bp, Oryza sativa
  unsure (1)..(416): unsure at all n locations
tctagtactccattattgccaaccactaccatcacgctatgccaaccacatatgagtgatgaagtggaatatcatactccaagtccacagtcataaagtccaaggtcaagctcaagtgctagtttagattcaagcccgagcagtgaagagcaaatttctacaccggaatcagctccaagacgggtaagaagtatggttgatttattagaatctacttctcaaataaggaggtcagaacaacatgaattttgcaactattctgttgttgagccacaaagttttcaagaagcagaaaaacatgataattggataaaggccatggaagatgagatttatatgatngagaaaaataataccttggagttggctgatcgtcctagagacagagaaagtattagatttannnatgggttata

SEQ ID NO: 45913 - DNA, 403 bp, Oryza sativa
  unsure (1)..(403): unsure at all n locations
agctnggaaggattaggatggaaaatacctatggcttgcgcacgatcctcgccatttgcgctttggacttgctacagatgggttcaacccatttggaactttgagtagctcttatagtgtgtggcctattatattagttgtatacaacctgccaccatggaagtgcatgaaggaacccttcatattaatgcccttgctgattccagggaagaaagcacctggaagggatattgatgtgtacatgaggcccttgattgaagaattgaatctactctttaacactggagtcagtacatatgatgcctttgtaggagatactttcaatctacgagcagtagtgctaggcactattagtgaccttcgtgcattagattcactatctgggtatgtggcaatgggctat

SEQ ID NO: 45914 - DNA, 397 bp, Oryza sativa
agctcgactgggatatcaatcatgtgcgttttttatcagtgattatactgggaggtgtaacggatattcattcagttttatatatcctggatcagttgttgtccttgatctcttaacatgtaatttgcgttaatcttttgtccttgtggactaacatgtacccattcactatagcaaggtcggcgatgcctggatggatgattggcttgcagctcttctggaatgcgtggatgatccggttggcaatactctccagcttcgtggcacaactcctcctcgtcttcctcgccgatggtcgccgccgtaaagccacaggcatggagacgtttgtccctgggctggcgtaccacgttgctaattgggccccgacgttcgcgcttggcatgctgtcctcatc

SEQ ID NO: 45915 - DNA, 390 bp, Oryza sativa
acacaagacactcagcttgataaggcttttaagaaatcaacagctaagcaagaaatttcttcacagcataaatacaccggtattatacaaattgtgcctccatcattcgtcatccaatacatttacatttaatcagtatcagtcttctcatcatcagagttattgttaccagtcggccgaaggtcggtatcctgaaaccgatctacgacatcacctgcaatcttgtcggctgctttttgagtgtcgttgataagatcaagggcagcctcttcgcttgtcccatccgtaaaaccatcaatggcatcaatatcgatcttcgggtacagggatttggtcattgctagcgctaaacctgctcccatgcttccggcttctttaatattcttgaaa

SEQ ID NO: 45916 - DNA, 429 bp, Oryza sativa
agcttatctgtatctctgttgacaaatccatattaaaatgttttgtaatcagaagggaggagtgcatgccctgccgaagaacaaaaattaaagaatttcaagaacctgctgtgataccaacatggagtttcaggtctctcgaagaatctaaataatgtgtgtttctaagattgtcatgtacccgttagaaaggaatttcgagacaataacaacttttcttaattcttgcaagtcttatagtgatttctgaaggatatgagttatgatgccatacaagaattaaaaatggagaagctaataagcatacttcttaaccataggagggatggtatgcggatgagggataatttattagggacttgttcggtttaagttcactaaggaattgaaaccaaaaggcacatacagacaagacctcatagttcttat

SEQ ID NO: 45917 - DNA, 425 bp, Oryza sativa
ctatatatactcaagcttctttccatatatgcgcgcccactgggatacttgtattgctgtcttttgagaggcgtggctgtacggcgggaaacatgtatgggattcgcaaggaacgatatcatcaggtctacggcttcatatctacgaagcacatccctacttcgtgaacgcgatgaatcccgacggtgtatcactgattgcatgagtaggagaaaatcaaccattgccgactagaggcccaatacaccgcttatactagagcatgagctcggggatcgaaatagagtctatatactcaacggcaaatgaagatactactaattacgagctctacacgtgacaccaataggcagcactcgtgataactacttattatcacacccaagatcagaggggaattgctgttagtaagtatcagttccgcc

SEQ ID NO: 45918 - DNA, 430 bp, Oryza sativa
agcttcaacgttgcgaccaatctgagttgattatcatttctagatcatgcgttgataagttgctcatgcgttcttcaatgcaaaaggcatggtgatgtaacagtaagccccgaagggcatgatgaatgaagtcttcaagcagtcggactcttttaaacggatctgatgatatcctgagtaacaattcaggaaactgagtagctcgcagccggccgttgagtcaactacctggtcaatgcgaggtaacccgaagggatctttgggacaagatttgttgaggtcggtgtaatcaacacacatacgccattgtgccgtcttcttccgaaccaggaccgggtttgccagccagtcgggatgtaggacttccttggtgaagcctgctgctaacagcttggtcaattcctccttgatcgcatccttcctatcctgt

SEQ ID NO: 45919 - DNA, 433 bp, Oryza sativa
  unsure (1)..(433): unsure at all n locations
tctgatttatattcgtaaatatcatcctgctaatttatcttcgtctcgactctcaagatgtggacatgtcgaactcgctcgccatcgacaaaaccgcagaaccaaaaacaacatgatctgtagctgtatatatggacggcaaatgttagaggtactagaaccctggaattaaccttcgacgaattgtggatttgtgttgttgaatgcatctaggcgacggcttatggcagatactggagtcaacattcgatgaattgtatacttgtgcggtatctaagcggtagcggaaggtgtcgcagagaaagaaataattaattttaatggaaagaggaagccatgaacatagattaacgaanactatgcatgcatctttgtatggtcgagagacgtcccgttgagtagagatagaagctaatgtcagattgatcttcat

SEQ ID NO: 45920 - DNA, 429 bp, Oryza sativa
  unsure (1)..(429): unsure at all n locations
agcttagtcttcctcaacattgtcgtgtatgttccggtgaacaacgcatgtccttccaatgaccgcatcttctcccactccatcgtctcnttcgtgagcttgacgacatggataggcgcaccactgtagccgacgaggacagccatgagcgcgccttggtcggactcaaacaggtggctatcaacttggtgtttgattccaaagcccttaggtttatcgggaactgtaaaattattgtcgtggttgcatggatcatacaccgccatcttcccgtcttcaccaagaacatacaacaaaccaccatggagcaccgggttgctgatcggcgccgccagaagttgcggtccttccacgtcaaagtcccgtaattcccagggcccccactcgccgtcgtcttgttgggtcgcacgggcgagctgtagcgcgtac

SEQ ID NO: 45921 - DNA, 422 bp, Oryza sativa
  unsure (1)..(422): unsure at all n locations
cgctgctccactgagtatgcctggacaaactctntcttggaccaaacactgactaaagtttgcagtgtaccaaggaagctcgatgtcctttgcttctgtgtttctatgcctgaatttggtggcaattcaaagacagcatagtgaagaatccatctcagacaacatagagggaatgttttccaacgcaaaaatttgtcaacaaacattgccctgaagaaagcacagagaattaaaggatgaaagaaaagaaaagaaaagacacgttgaagattatttgatcaatcgctgcatgccaattatacgctgaatagacacccataatataagcccatgctgaaagttaagtaaacatacatggcaccctgtttgtcgttcatatgaatgaagtaacaaagacatacagggtatctgaagactatcat

SEQ ID NO: 45922 - DNA, 409 bp, Oryza sativa
agcttcgcccatcttcctgtcactcccgtatctgtcatatgtgatcagtgatcggttggttaagcagacaaggatgagtctcctctgatgtaaagtcagaggaactttgtcactgacatgtgggagtgacaaagtccctctgactttacgtcagaggagcgcgatccagcagacaaatagtctacttatatgatgtgtgttaatatgcatatgtaaaagtgtagcaagccttcttttaagcatttttgttaagtactttctctgctctatattaagaatatttttagctcatcccatttatctcataataaattgatttctataattaattatatccaagcttataacaagtaagaataattgcattggaaggagtcacagtgataattaggtatattacgatgagata

SEQ ID NO: 45923 - DNA, 351 bp, Oryza sativa
agcttcagccaacatatcagaacaagaagttatgtttggtttgttggctagttacatgagtcagccaacaagtcaaaagggagagcacttaaatgctttcttgggaagggctgattcacttcaaaaagttgcaaaagggttggctgttggtggaggcaacaataaatgcatttgggggtggctgatgttgtgatgagggtgctgctggttgtggtggaccaaattttgcggtgttggaggtggatttcctggtgaatatggtggtgatggtggcagcgggatgaaaaaaaaaaaaatgatggtggaagtgcttgccgtgacaaattcccgggcagaactccaaactctaaa

SEQ ID NO: 45924 - DNA, 462 bp, Oryza sativa
ctagaatgacctaactctgctggtttgctatagacttaaaccatctatctaatctagacttgaggattacgttgaaatgaaactaacttatatgattaaactcccagctttggcacaaactcctaatggactctaaaaaaggggattgaagcaagggtgagtacaacgtactcaacaagctattatatttaatcaacaatgaatgtatgaaatgataatatctgtgtaaagctaggtttacttgcagaaagcagagaatgcagaagtagaaaacctgtaatgttttaaatgcaaccatatttaataaaatttccaattagatttctatccaagatgccatagtgagtcccaatgcccgataaccgtgagcaccgctattccaatagttttgacgatattcatactgcagtagatgtacgccttacccacaaatcatgacgtgccaacacataaccttgtcat

SEQ ID NO: 45925 - DNA, 344 bp, Oryza sativa
agcttacagggctgtagacacaagcgtttttttgcttcaagaacattcggcgagctctgggatactagtacatgcaaaagacggggaaacatacatgttttatttccttaacggccaattttcacaaaaaactgcattcttgggacttgtataactaataatgaaatttttgcggtccatagatgagagaaattatgttacaagccaagcaaaggtagagttattcgaacttttcctctacttgctatctaggactagaagcctcaagataagtccgcgagactgaacaagttcatccctcctttactgccagcatattacacatgcgactacctatacctaac

SEQ ID NO: 45926 - DNA, 453 bp, Oryza sativa
gttttatcagatatgcttatacccatcggatccttctcttgcaggtcttttgtgacaactatctggatggtggctatcatgttccatatgcgcatggaaccctagcatctggtctacagcttcaatcctacgaaacacatgtatagtttgtaaacccactttctttctactgtttttcactttttcctttagtaatagatgtttaagtattggtgacttggtgtcgaatagatgggttttactagatcatgttctgttggattgttcttgtgtagaaataatcagtttcaattttttttattactttttaggatcttcacatctgacaccaattcccaccactgttctgatctactttcttatgaactatttgctcttttgggtggatcgctgattagcacgtatttatctttttgagacatatgaaagagttagtgttcaaaggtgtgaaag

SEQ ID NO: 45927 - DNA, 296 bp, Oryza sativa
tgagcatgcagctcagatgcagcacacagatatttgtggtcttcactgctccatcaacaacggcatcgcaatctccaccacgaccaaactctcaaaacctggcgtgcctctgcgactcacgcatgcacatgtaaagactgacgtcaaattaggctctccacaaaggaaaggtccaacatgcctccgactgggcgggtattacatcagaccaacactttgagtgcgaaacagccccctgtctcatgctggccacaggatatattatgaacatctagcaatgaccgcaacatctgcct

SEQ ID NO: 45928 - DNA, 425 bp, Oryza sativa
tcggatccgccactgtcgccgaaagagtggggagaggctgttcatatggtgaccatgacgaccgactagattcgtcgaacgcgggcttgcccgaggtggatccagaagtggcaagagacattggatctgtcagccgtacgtggatccagccggggcggatccaacagtggcggcaatgggtggcggtggatcagtaggccacaacccatgctgctttggatcaagtggcgatggcgatgacatctacgaccatagtttgcttgcagcgaccatggtggcggcagcggggccctggcccgagtggacctaacggattttggatggtggtgaccggtttcgtggtgcggcgaccggataatggcgaatctggctaagctttttatcttacgaaccttatattttttagcgattttttctttttgata

SEQ ID NO: 45929 - DNA, 328 bp, Oryza sativa
ttctcttactgaaggggggaaggttttttttttaatgactacaaccacagtaatgagctagtcacaccggaagatgcatgaataatgcaaggggtgtacaagggataataatccgggttaggttctgcagaaaacagcctttaaaaggcacttaattgcccaaagccattgtgtatagaccattctatagcttcccagcttattaaacaaagccgggaaccctcacgaatctgccttaacccaaggcctatcgatgattctgagcgaactggcaacccgacctttgttacaatctcgtcccatgccaacccgaggccaaccataccat

SEQ ID NO: 45930 - DNA, 367 bp, Oryza sativa
  unsure (1)..(367): unsure at all n locations
gtaccgcaaggtattgcatgttgcangggagtgttttttaaactcataaaccccagatctcatcaggtctgatcttgttttcttccacccaggtcatcctcccatcaccttctcccatcctcaagatccaacaactcactgtgaaaccaaaggagggtgcaagctcttcattgacctggccatcatcacgaacaatgcataaaaatttcatggttgttagttacaccaacgttctggtatacatctgaccatgctctgccatggtaaaagcgatcaaggccagggatcttgcaaaggaattcaaggtatagtagttttgggttgtcgtcgaatgcgtcacagaataggacaccattgcagtaatcaa

SEQ ID NO: 45931 - DNA, 258 bp, Oryza sativa
agcttgctcgggcagctggaggaggattattattatatatataggggtgggactttagtcccggttggtagcaccaaccggggctaaagatcaccgggatcttttaccccggttggtgctaacaaccgggactaacgttccacccaataaatataagtcttctttcattacagacgtccgagccagctttcattctgacgtgtgactcaaacgaaccaaggatctcgtgctctattcatctatattaatctaattata

SEQ ID NO: 45932 - DNA, 341 bp, Oryza sativa
agcttacactataaccaatggagatagtcgttatccctatcatgacaatatcacgtatgagaaggtatactagttgcaaaacataagaacaatcaacgaacaatcatatgatacgatggcccgtgatttgcgtgagaagcaagagatgatacacatgccggcccctacttcttggccgaggcgccatgtacgaaaaagcctgcgaccgcgctatatgggcataaaaaattcagcaatgagtatagcttggccagttgacatgcatcctgcttggaaatcgctttgaggcacgacaaactgaacaagtgcggaacgggcaaaaagcatctgatgcagtacac

SEQ ID NO: 45933 - DNA, 421 bp, Oryza sativa
  unsure (1)..(421): unsure at all n locations
tcactactttgttcatttctctaactctgctatatacatgtacatatgagtagtatatgggcctcatgggccaacacatacataactcaacactccccctcaagatgggcgatagatatctatcatgcccatcttgntacacgatgaagtacactccccaacacttaaagcttttgttaaacagtcagctacttgttcccccgacataacaaaacctagcttcaaaatcccttcatctagtttttccttgataaaaaaacgatctatctccacatgttttgttcgatcatgctgaactggattgttagcgatgctaatagccgacttattgtcacaccacaacttcatgggaatattcattagccactntaactcagaaagaaaattctcaaccataacagctcacttaaactcactgaca

SEQ ID NO: 45934 - DNA, 422 bp, Oryza sativa
agctttgggagacgtgcggtgggcatgttattgaagctcgcacatgggctaaattaaatgtgactgggttagaaaacaagatagtagaagggggcctttgcttgcattgagaggcatttgggtttgtttgatttcatggacggatagatccatctccccctaatttcaggtccttttttaaataactccccaaatctcatgtcatcttctcgaagtgagctccgatgactcctctcacgcggaaaaaactttgactctcggtgaagaagtcaaactgagtccaggtagaaggcccaaattacaagcaaaaacaaatgtactagtattaggcctaaattcggcctaattccaagtaaagtgggccgcttcggctctggcatattgggctggctggatgatgggccgtgggctttccttcaccg

SEQ ID NO: 45935 - DNA, 364 bp, Oryza sativa
  unsure (1)..(364): unsure at all n locations
atatgtagcatatatgacgccaaattagctttatattattttatataaatttatattgcaaaatttcggaatgacaaatcaaaccagttcaaacacatattagctatccgctcttatttaacaaatcaaaatataatggcatactagcataatctacgtggtcaaactttcagaaggtcgatgccacggaaatattttaatagggacggaatatcgaatctaacccaatgattgaactccattaatcaaatccagattaatctgtatgttgcgattacaaaaatcaaaatctcaatacacagcgatcaattaatgatgtcagaagtccgaactncgacaacagtcaatgatctgctgatgataa

SEQ ID NO: 45936 - DNA, 408 bp, Oryza sativa
agcttcaccgctgggagtgatttacaatgtcttatctagagggaaccgaagggttggatgacaagggagacgcttctagcaccaaggatactggacccaagggagctactattcactttgattacaacaaacttaatgttcctcctcacaactttgtctccgtgccttccgggcgtgctcctcaatttgatgggacacattacgccgcttggaagcacaagatgaagttgcatttaatctcgttgcatccaagtatttggaaagttgtttgtacaggtattgatgtaccccatgatgacatggagctcacctcggagcaagagcaactcatccactgcaatgctcaagcttccaatgcaattctctctgccttgagtctggaggaattcaacaagggtgatggacttg

SEQ ID NO: 45937 - DNA, 424 bp, Oryza sativa
  unsure (1)..(424): unsure at all n locations
ntatgatttcttcatcacaaagttntttcaattatatctatttgcaagcctagagtttagatttgtctttcgtcttctttctttttgttagtggcttcttcgtttgtgaagttgaggacctagagagtcttgtctgtcgggttgttcacggtccaattggcaatgtagtccttaaggtttggatcactgatttgtttctttgatggcatcagcctgaggtcctattataagagtgaagatgatggctagtcatggatcccccacgacaaagagtgggggtttgtcaaacatcaactttcaatgtgcatattgatcaatcaatcttcttgtgctgctagttgctaaagtttacaatgaaatacaatgaactaacataaaagatanggaacgttttcgcatgctaaaatggtgggaccactggttt

SEQ ID NO: 45938 - DNA, 380 bp, Oryza sativa
  unsure (1)..(380): unsure at all n locations
tgctcgctctggacttaagagcgaacatgttttatacggtttatcaccgccnctagggtgtatgatgagtcgatgacttaaggctgcacggaccgcatcacttccacctcgtctagacggatctcctactaactgatcaccacggccacaaactaatgctatcacgcgccttgtctgactgtgacaccccagaagacaggtcttatctctatacaccataatgaactatagttgagctcaacatgaattgcgtatctgatgtacttgcacgaccctcaacctgactattgtcttttaaatcctacccactattcttcatcaaccctagaacactgagctggacacacgtcgaaagcctaaccgtgcgacgccatttcgat

SEQ ID NO: 45939 - DNA, 234 bp, Oryza sativa
  unsure (1)..(234): unsure at all n locations
tgtacgcgtgtgcatccggaccaggccagaccgcctaacttatgggtcagtgtacctgggcctncatgtcatcttggcctgctcctcgcgtgcacccaaccaaggaaaaagtatacttgactccctcaactatggtccgagtatgattcataccctctaaccataaaaccgggtatatttactcctccaactatcaaaacctgtgcaaaatatatccctgagtgattttggaag

SEQ ID NO: 45940 - DNA, 419 bp, Oryza sativa
agcttttcaaattcttcttagtccattggttccatatgagcgaacctacaaggattatacccaaattagaatagcagaatatcaaccaataacaaagtgatacgtctgtatatattgaacaaagcacctccaaataaaaacagattgaagagattgcttctagccaacatgattctcctaaatgacagagcttctaagaaattctttccacacttctcgaggtggctgcagaataactcaatttcacctcttcacccatttgtttcctatttcttaaactttattcaagattgtagtctagttttagttgatatcttttttttctggccatacaggcctccacacatgttaggtgttgcagacttttgcacaaagtctatatatatactttacaatgggtcatcccctactggttcatg

SEQ ID NO: 45941 - DNA, 399 bp, Oryza sativa
tcttcccaatcatccacttcgacttcaggctgcatcttacttatcggtggcgcagtacttggccctgcgctggatacagcatcggtgcgaggagcaggcttactctcctcgactggcctggagcttgtggccgcatcggactccagggcgttccagcggttcgatgtccccatgacttgggcgacagtgtcaccgccacgcctccatactgatcctggagcttgaccaagcacacctgtccagtctcctgaggatggatcaggctcagaggcagtggccttcttccatggattggcactgctcttggtagccgccactccatctttctgccctgcaacccaaacatttgctggctgagcgctgctgcttggcaaaaacacagcagcaccctggtaagca

SEQ ID NO: 45942 - DNA, 330 bp, Oryza sativa
  unsure (1)..(330): unsure at all n locations
gcatgcaagcttgagctcggctagagaatgctcgctagtaagcttctttgctcgggnnccgctcggtaagagctcgagcagcatcttttttgacagccctagttgtagcctcaactagctagtttaagcatcacaatctcggtataggaactcctatacgctttataaagaaacgggggaggtcctgttgtttattttggtttgagatccataaattataggtgttcaaacgggctgcacggaccggaccggaacgggcacgggtccggcacggtctcgtatgcacggatgatgaaacggtgcgtgccgtgccggaccacgtgccgagcc

SEQ ID NO: 45943 - DNA, 389 bp, Oryza sativa
ctgtagcgtgtgaagaagtgaaggagcgaagctcttaaatatgcatgtattacggccgtaactactgcgaaatatctgaagtaccccacaactgctatcaggagaagatctggagtgttccagcacaacaagggattggcttttcaatgatgacaaaaatcatcactataactatatttttatcaaagttgctaccttgtgacgaacttatgattcgttgctatgtcatcactgaaattggcgtcacaaataacatagtgatgattctttttcaccacaaatactaattgtatttgtgaccaaaagtctttgaacttatgatcataacaatagtgatagttaaatacgagatgtactagtgaccgcaacgacatcacaggtgtactcac

SEQ ID NO: 45944 - DNA, 428 bp, Oryza sativa
  unsure (1)..(428): unsure at all n locations
agcttagacactcgtacctcatcagaatttgttatcatcatcggtactggcccacactggttgtgccccgtgcaaccatgggagagggaggaaagagagctcgtctcggcagccatggagcgagcccctagctctgtgccgcgccaccgctaggctcatggtcgagtagtttccgttgagctcacaaccagggtttgaaatttcactggcaagctcatatctcgaccgaaatatttggtttttaaaattttttgtgaatttcaaataatttcagccaaaaaattcgaaatttcggaaatttcggtgcccccagcagaaatagcaatttcgaaatttaacaccctaccactacaagaaatatgacattctatgacgaattcctcgtgacatcggangctattcgtattagctcattctatnttataatc

SEQ ID NO: 45945 - DNA, 435 bp, Oryza sativa
  unsure (1)..(435): unsure at all n locations
tctcttactgaaggggggagaaagatagagcaagaatgagtacattcacagtactcagcaagccacaccggcggatgcacgattaatgcaagggggtacaaggggataataataggggttaagttttgcagtaaacagcatttaaaagtcacttagttgcccaaagccattttaaaaagacgatcctagagctacacagtattgttaatcaaggtcgtgaacccgcacgaacctgccttaacccaaggcctacgatgattcagaccgaactggcaacccgaccctgggtcccagctctgtccaagccaacccaggccaaccattccacattntaattgttgagcaaattttaagaattaaaacactaactcgggtacattgctccgctttgccataaccganggcgcggctattcgaatagatatactctgatca

SEQ ID NO: 45946 - DNA, 399 bp, Oryza sativa
  unsure (1)..(399): unsure at all n locations
cagcttgttgatcgccggcgacagctaaggtgttgcggngatggctgaggttgcggtggctgccgttacctcgctgctggggcagatccgcaacgagggactatttctggggcgcgtgaagaacgacgtccggttcatcaagcatgagatggagagcatgaggaccttcctggagcacctggccgagaccggcggtcaccacgacccgcatgtccggacgtggatggagcaagttcgggagctcgcccgcgactgcaggagctgcgtcgacatctacctgcagcgcgggaacccaagcggggcaccctcccgcgatacctctgttggccccttggtttggcataccatggtgaccacctctacgattgtcatcaactgagcgagctcaaagagcgggcg

SEQ ID NO: 45947 - DNA, 333 bp, Oryza sativa
  unsure (1)..(333): unsure at all n locations
tgttgtttctttaanagaatcactactttagaaaatcaatattcgctatgttttntattttataggggaccaaaaaaatgcatccgtgaacaagattgaggctgccacatgcttatagatcacctatgaaaacctattcttatgggtgggtcttcatgaaatttgcacaaatgaaaatagcatgaaaagttacttttgcaaggaaattacggggtttttttaagatacgtgtcacatcaggtattatatacggtgtcgcatggggtgttcgggcactaataaaaaaaagctagttatagaatcggtcagaaattattaagcctaattaatcta

SEQ ID NO: 45948 - DNA, 386 bp, Oryza sativa
cgcgatctataagaccaccagcacgcaagccagctcgagtgtgtgcaacgcgctgcatattatctgagccgccactgcagcgcaatagagacccagctaatgacgcaccctccagaagaggcaggagaactccagcgttaacaggagaacaaacaccgcggacaaagcacgggagggaatagtcaaaaggacaaggtccttccctgagcgagtgcgggacgccgaactagacactcacatccgctcgcggtttatttccggaaacaactaatcacacaacacgctagatggggatgcacgcttcgacgaagcgaggcggccgatctaacagcacgccaaacacaaaagaggagggggggagacaacacgggacgagcaaaaacaag

SEQ ID NO: 45949 - DNA, 269 bp, Oryza sativa
cggaggataatgcgaccgccaacgcggaggcgacagcgcggcggcggcgggggagccagctgggggatcgaacggatcgctcgggtgcacggctccccacgacgcgtcgcgtccgctagcgtgagcagcgtctcgtctcgctctcgaggggctcgcggcgggagcttggcgcgcttctaatgacaaggcagggtttacaaaccccagggaaaccgtctggttaccgtgctcaccgatgggaacgagaaagtctacaccgctggaactcc

SEQ ID NO: 45950 - DNA, 388 bp, Oryza sativa
  unsure (1)..(388): unsure at all n locations
agctntgaacaggttcagtgagggattttttcttgaacttatgctctgtntttgaggaatactctgcagttattcaggagttttgtcagatattctttatttaccatgaaataaattctagtgcccctaacgcaccattctctaattctcttgtgtaaagatttgtttttcccgggtgtcgctgcacattttccttagtttgcagtttgtgcactataattcaaaaagaacaagaatatctaaacagagaacatgaagtataatggtatgagtattgtgaaaaaagaagaagaaacgaacatcttgaaaacgagattaaatacttaattccaccgtttaaagtcaaaaagggagtagctacatcccacagcaccagccggtctttgtt

SEQ ID NO: 45951 - DNA, 458 bp, Oryza sativa
  unsure (1)..(458): unsure at all n locations
ntctaaaaactaatgagccacgtcagttgaactaataatagccttaggatgagagtatgaataaatcaggaccgttggatcatgtaaaccaatcacagaatcaggagagttccagttcccacgcatcggtgcacatatgcagatagtttatggtagttagagcaaatctagtcaaagaaacaataaataaataaaaaggaagtatcgggaaggttgcacaacaatgaaaggagaggataaaaaaaaccagcgataatctctcctattctccggagaagacacaatacacacaagagagacgatccaaatccccaaatcttgggcgcagtctccgtcgtctcgctctcgcatcagccttgcgacaccccaatatagatggcctactaatattgacagggtatattagaactcaaagtcgcgcgaagcgcgacagggtggctagtattntgatacatatg

SEQ ID NO: 45952 - DNA, 272 bp, Oryza sativa
acctaaggagagatgtgggcgcccagagcactgccacgcaggaaagaaccgatacctggatcgccatttatcccaccgaaacaaggagcagcgacaaatattcgcgcgtcggccatgtgcacgctatgacagctggtcatcgtatctgaccatacacagtgaagatgaacagtctgggatgggtggcaaaacaccacccagaaccacaatgtgacctccgctcgctggggaggaatatgacacagcgcgaactacgagactgaccagatcag

SEQ ID NO: 45953 - DNA, 369 bp, Oryza sativa
cccactcgaacgttgaactaacattgtcgtcggaaaacccaacttctgggtgggggctaggaactactgcttacattaccttgttatagattcaagctgcctttgtggaaatacaattttccataaagacagatggggctgggaagagtacaataaactacgtttagctaagggcagctctagcgagagtactcttttattgtcccacacatattcaatttattattaatatttaactcccaagcgttcgctttggtgcttatttatcgaacactctattataagttatttatttcatgaaagctagatatatagacctgacacgtactcctatacctgttcggttgtccgggaacaattggatgggtt

SEQ ID NO: 45954 - DNA, 364 bp, Oryza sativa
  unsure (1)..(364): unsure at all n locations
cattctccgagccaaacctatttgagccgattcttgatgtacctggtttggctcacgaacgatccattcttgagttgcttgattcgaaatccaaggaagaagctcaactctccaatcatggacatttcaaattacctagacatcatatcaccaaattccttgcaaaatacctcattagtagaaccgaatatgatgtcatcaacataaatttgacacacaaagaaaatcatcaccaatgatttttgtgaaaagggtggtgtcaacttttccaattttgaaatcctttgacacaagaaaatctctcaatctttcataccaagctctangagcttgtttanaccatatagagcttttgagagtttat

SEQ ID NO: 45955 - DNA, 336 bp, Oryza sativa
agcttttgcctgttgatatttttgatctattctcatcgaagaaatctagttaactaacctctagactgagcaataatctctctttctagtttaattaagactcctttctcggctacaatatcgatagtgtaaattgattttttcttgttagagaatgtgtgctaagtaaatagaatggtgtataaaatgtctcaagtagcccgataacaaatatgccctcctctcactcactctctatccgattcatgggctaattatatgagtaccaatttctcccatgacatcaattttctctttcgctaaatggtcatattggctatcttttctttttttttc

SEQ ID NO: 45956 - DNA, 453 bp, Oryza sativa
  unsure (1)..(453): unsure at all n locations
gacctatgaaactcagcttatagagtggtggatatcctatataatctaagtcaacatcgatatctaacctaatcggctgccctctaccgacagatgttagccgattgtaggttagatagcgatattgccagagattatggaagatatatgataacttcgatgaattacatgaacaagattagagtatcagaaagatgaaagcactaatcccgagaacgcaagccgccataataagttttacctcttgttgaagatcaaaatcgatgcagctcaacccgaaagcaagaactcgtcgaaacaaaacaaaagtaaaagggtggtgatgcgccgagattatattgaacgtgtgttagtttattatatggggtttggggtctatttatacccgagaattacaaccatgtncatatcagacacgacccttatccctacaaactctaagataccatagtc

SEQ ID NO: 45957 - DNA, 53 bp, Oryza sativa
atgtaataaagaactgattggatttcgaatgtttcactcgctcaggcacggcc

SEQ ID NO: 45958 - DNA, 420 bp, Oryza sativa
  unsure (1)..(420): unsure at all n locations
gctaagcgctttgttgcatcacaaanattgtctatactgtacacgactacacacacacacatgcttacatacatggctgttgcatgttctcaagttcctgtggcttggcagctgaggttaccatggccaagaactagctccctctctcctgcatcgtacaggcactcatatgtgatctactgatcttctatttatttgcattgtaaatctaccaagaaacctcacaaatgaagcataggagctacctagtccattcctgtttgttgattctttcgtacataaaaccagtattctcttgcccaacgatacactaagccatacgtgatttgatccaagttctcaaacaacaatgaaggaaatggtttcttcctctacatttagagctcccggtggattaagattcttggggccttccaaaat

SEQ ID NO: 45959 - DNA, 417 bp, Oryza sativa
tcggactctgcacagaggaacaacagtcactgattgttcataaagcatatgacacaatatcatcgatgctgtctcttccagtgaaatcaatgacaagacatcttttggctgttgatgaggcagttcctctatactctgttcgtgatacatttctcatgtgtatgctttcatcggtcatagttggtcttcggcctcaaacacctgtaccagatatgctgatgatgattaatctctttacggtcttcctactgaaaggacaaattccagctgcccatgcattagcttctattttcaacaaaaacctacacaattcggaattctcacatgagaataaactggataaagtgattgatactattcttgagaggtgtttctcaacaatatcagtgcgaagcaatatgaagacatctctctctt

SEQ ID NO: 45960 - DNA, 424 bp, Oryza sativa
  unsure (1)..(424): unsure at all n locations
agcttataatataccctggtctcgngttcttctttcacttgttgnctgcaatactgaatgtaccacactgtggtagccagtaccaaactgcatggagttttcttaaagaaatggagagaacaaaaggtacatatacacacacagccttattagtcaacagattatactggtattgtgatgggactagaaattaacgactgacgtacgtctgaaatttttttccatgacatcttaatttgatgggtttatgaactgattgaaaaacccaacatgtgagtactacttaactcctactggtattactgttgggagtattggagctaagctagagcactgaattctgaaatcatgttcagtctacatctgaaaattaggtcgagcacactcgagatgcatgtgtgaggagttgatgcatttgtgaatg

SEQ ID NO: 45961 - DNA, 408 bp, Oryza sativa
tattggtagaaatatacatcgacctcacataatcgttgcgttatacataacgaaacagcaataccgaacagtatcgcataagaaacagcataccgaatctctggtccaaaattagtgattaattaccataattagttattatttaatgataactaagattaattagttgctaatcaatgtgattaaaacattaatcattcagccatgccgtgcggtctcgcgtattggttgtgcgagaccgtacgctttcgtggaattcccttgcaaaaccttggcgcgtcgttactccacgtcattctcgtgcggtggttatgtgatagcgaggtatatttctaaccaaaaaaaattgaagaaagaaataatatattttcaaaattaattacatcgtattctacccgcaccaccatc

SEQ ID NO: 45962 - DNA, 421 bp, Oryza sativa
  unsure (1)..(421): unsure at all n locations
agctngcaagataagttgagacagttggattctatttttgtactttcgaacatcggctccaaaagaaatgaaagatagttataaaatcaacatgctaaatttattttattgcagcaagattaaataaaacaacattgtaaaacttttgctggaaaatgagccattaatacagtaatagatgtacagtactaataacactggaataaattttgaatgagaaccattaaaagagattatgaagtgcatgtgccattagtttggtttaattaaaagagaaagggaggagaacagttctacttttccaatatttttagagggcttctaaaggtaaccatttggcataacctagggtccacctggctctgataccaacttgtcacgcccggaatttctatccacaataccaaacgcttacatgtgt

SEQ ID NO: 45963 - DNA, 377 bp, Oryza sativa
gacttattttatgtgttagaatctaccggctttctagcggatttcgcaaaaaccgccattccgccacgagcccgaaacggaaggccaactcggaaatgtaaaccctgctacagcactgaaacttgcgtctaacatggtaattcaacctatgtggcatgcgaggctcaacaattatatgtgccgcactactgctgcccttacagcttcatggtgccatctttgttgaaaacaactccatcaatcctaattactcagccgactcatacattttaaaacttatctcgacataaatcaaaaactttgctctttttcctacggaggtgctaaaaaaaatcggcacaaagagtttatagctaacaaaccttcaaatattaata

SEQ ID NO: 45964 - DNA, 437 bp, Oryza sativa
  unsure (1)..(437): unsure at all n locations
tcccgccaccataagtnacctgccgcatgcaagcttgctagacccaccgacctgtattttatttatttgagagggaaccaatgggagctctagggtatccgccttgaaggatcctttgcactaaccacttattaggtggatgaggagttctatgctaagatcatggtttatttcttatatcaacgcctgatgtggttcatcgttgaaactaaaattttccacatcgatcgaaccggaacaaatttggatagaagaacaagctatacgccatgcaaagggccttattgtttggctgttttcatagtaagccgaaacggcttattagagaataaaaataattcgtagatctaaagtttatatatgtgctctcggcgaatcaaaagccaatgctcgaaaagaaactacctctaaaatatctcagaatcaatgttcaaatt

SEQ ID NO: 45965 - DNA, 466 bp, Oryza sativa
  unsure (1)..(466): unsure at all n locations
tagaagtganaatatatatcactgtatgtctgtatcaggcatatggtttctgctagtaatcttctagcattgaaaaatcaaatctgtttagtgctcaatggtagctcttggacgagatgatcttagctgttcaagcacaatgaaatctacaatgttaattgctaaatgaactagtagtagacaccgtatattatgaatgacggcattgagagattaaaactatttactgctactgttgtccttagacaaaacactttatgaactgcaatataacctcaagtactatggttgaatatgataaagttggtcttaaattgtgctagtaataaattacacatacattcgagtctctattgtttttcaaagttagctctggttacctgtttcaagtaaacgttgagcataaaagaatcgattttgtttctgttccatgatcgaaagtgcggtatctgaagagtcacatgat

SEQ ID NO: 45966 - DNA, 417 bp, Oryza sativa
agcttgtgccactcggtgtaaaacattcttctattcaagcaaccattaaccatataacagccggcaaacatgttgaaaataccaggtaaactgtcgataaattatcatcaacttgtcacattatacaagcaagcaagcacccaacatcgactttattctgttaagtttctcaattataactatagaatctagaaaggcgcagccaatgctccaactctatcgcggggaatgaggcgcaactctgagccatgctttagaaacacattgcctgaacgaaagaaagcagctcacatcagcgagtagaaaagagaatgtgtaaaacttaagtttaaaaaattcatggtactgcatatgcttaagatagatctttcttatgttactgaaacctaatttgagaaataagattactgcacgact

SEQ ID NO: 45967 - DNA, 221 bp, Oryza sativa
tctgcacagaggaacaactgtcactgattttttatacagcatacgacacactatcatcgatgctgtctattctagtgaaatcaatgacaacacatcttttgtctttgatgaggcaattcctctatactctgtgcgcgatacatctcccatgtgtatgctctcatccgtcataggtggtcttcggcctaaacaccctgtccaatatgctgacgaagactaat

SEQ ID NO: 45968 - DNA, 414 bp, Oryza sativa
  unsure (1)..(414): unsure at all n locations
agctngtaggagtagcagtagtagtcttatatttaccgggagagggaggccgatggtgatggccccaccgttttaaccttgattcatctcctagtttccactgatctccagcgctttttggatcgacggcgacgccgccctctccatctccagagagagccctcttctccgtttcttcctactaggctactactactcctcctcggctcaaccctcccgtcccctcacccccacgcgcgccgccttctccccagaacgcgccgcggcgaagcgccgccgaagcagcccccactcctccgcgcgcggcggcggcggcgcagtctccagacgctttctcctccggngatctcggtatggctgactactgggnnttttttttcctttatcgcgattcctccccctgattgatctgct

SEQ ID NO: 45969 - DNA, 438 bp, Oryza sativa
  unsure (1)..(438): unsure at all n locations
aaatagcagactagttgtgcatgataatggcacaaganaacaaaaggactcattaattattgtagtcggctattaaggtagtcccaaccctccacctaggatgatgtatatagcattaagtacattgccatgtaggacttttaacttatgtgtcactatattaattaagagagagagagtgaagagaggaagaaaccgggtctcatgcaagacacagcttcaacacgagaacctatgcactagacactatcaagttttgcattgcgagagaatagtgtcttcataatagatatagaataaatatgattggtagagaagagagatgatgtatttattaatggcccattttaagaaaccatgggttggggagtataggttctattgtgatgtcttattgacacggtaccatagacactacttatggacactatgggttgg

SEQ ID NO: 45970 - DNA, 354 bp, Oryza sativa
agcttgctagcctattaatttacagtcccttaagctatacgtccctagatgttgcctcaaacctttaggaacacatgaattgaccctacttgtaaatacttacattggatgtatatacacatacatatatcccgatcacataaagcattgatatagtacgtacacctacaatatgtatatatatatatggattagattagcactaattaattaattaattaatttcttagttcattaggcggcatgacctccttgtcatgaccaggtcactcttgagtgttcttttctttgctctctgatgaaattccgatgccaacctgcagccagggcaacgactcccctgccactttcatg

SEQ ID NO: 45971 - DNA, 391 bp, Oryza sativa
  unsure (1)..(391): unsure at all n locations
tgccatcgaannagtgaacagaaaacatgtactactagaaggagcagcacgtttccttcttaatatacgtatgtccccgccggatacgtttcctaccgtaacgtagatttccaatagaagccttgattaatttgccttgctgttgttgttatgtccgcgtcagggggctcgctatcacctgaacaaattcgttgtcgcccacaattccacgtacgtacgccgtgctagcttttccatgtagtacgatagacctcgccaccctttgatggtcatctccaaaccactcccaaaatacaaataatgaaataatcactcacgcagcatgtcgttcggccgggacgtcgtcgccgtcgtacggccaaagcgcaaagccacaggggcagccgacaac

SEQ ID NO: 45972 - DNA, 438 bp, Oryza sativa
  unsure (1)..(438): unsure at all n locations
ggatccttaatcaccgcagctgcagcttaaatcaccggttacctccctctttcgtgtaagatgcccgctggttgccatatgtgtcttgataggcttcgcatcctccaagccaaacctcttgagtagatacttgatgtacttggtttggctcacgaacatcccatccttgagttgcttgatttgaagtgtaaggaagaagctcaactctccaatcatggatatcttaaattccctagatatcatatcaccaaattccttgcanaatacctcattattaaaaccgattatgatggtctcaacataattttgacacacaaagaaatcatcaccaatgatttttgtgaaaagggtggtgtcaacttttccaattttgaaatcctttgacagaagaaaatctcttaatctttcataccaaaccctaggagctggtttaaacca

SEQ ID NO: 45973 - DNA, 410 bp, Oryza sativa
gctggccctttatcctctttaccttctatataatcaggaaaaggctggggtgcatggcggaacttatgactttaatcctgtgaggtcaattactagtaatttgtatttaagtggagtcatttctctaaattttttgaatttatacatgaaaatcaaggtttgtagggtgttttttaaaaagctgtggggtcagccgacccccacagaatatgcctggatccgccacccgtgcatgtatgaattatatgtatgtttatgagcagctaaggatttctcctgatagagatggctcgatatgataatgatagatggtgatgggcgtccctctagggagcaagcttttttttcttttttactcctcttcccttaaaagtaaagcaagatcccttcaggcttcaagatgtgataat

SEQ ID NO: 45974 - DNA, 366 bp, Oryza sativa
  unsure (1)..(366): unsure at all n locations
tgcctccatctcctnccacttcggcatcgcgatgctatagctgcctgaccccaagtggtgatggtacttcttcttggcggtattttctttgtttctttccatcatcgcctacccttgttgacctatcttgtaagcaacgaactcgtcccagtgatcccttaacttcgggaatgtgttgaagttcggtgtctgccccttcacgatatatttctggtacagatctcccttgatgctatgaaactgttctgccattttctttagagttcaccttttcactatgttctctatacccgcgggaagggtgaatgtcttgagcattgtggtccacaacatctctttctccgaatctgggacaaagctctcatg

SEQ ID NO: 45975 - DNA, 414 bp, Oryza sativa
  unsure (1)..(414): unsure at all n locations
agctttgctgctttcatttcccacaaggctacacatttatgctgcctttgctacccacctatgtagccatttcgtcatcagctgtgaactatagctaactgctaaccaaagtaccaaaccatttgaggagcccccctaacttcatgtgattgctgtgagctgtaactcatcgtatggaccaaaataatgactttgagcacatggtggtgtatattttgctacagtaatatgtagaaaaataatcacgatcagtgactccagtggtgaaaattgtcatacaagatacaggcaatntaagatgtcatagcactgaatttcatgacatcagctttcagtaagcaagaactcaaccaagtgatttcttctggcatacatgtacaggtgcaaattggttttctagggctnggtcgggta

SEQ ID NO: 45976 - DNA, 418 bp, Oryza sativa
tttggcgcgaagcagcatcacatgctgggcatctacttgcagcgctcatgggtgatcctcaccgccatgagcgtcatcctcctccccatctacctcttcgccaccccgatcctccgcttcttccaccaggacgacgagatcgccgtcctcgccagccgcttctccctctacatgatcccccagctcttcgcctacgccctcaacttccccatccagaagttcctccaggcccagagcaaggtcatggccatggcggccgtctccgcggcggtgctgctgttccacgtcgcgctcacgtggcttctcctcgtgccgctccggatgggcctcgtcggcctcgccgtcgcgctcaacgtgtcgtggtggctcgtcgtgctcgggcagctcgcctacatcgtcatgggctactggcctggag

SEQ ID NO: 45977 - DNA, 432 bp, Oryza sativa
  unsure (1)..(432): unsure at all n locations
agctntntatgcacaaaatgagcatgtcactgatgatggaataagctggaaagtttgaagtatttaataatattgcctttntctctattttcagtttctgagcatgttactgaagtaagtggtaagaatgaagttacaagagtggagcagttcgttgctaaaaaggaaaaggcgcatgaaacatcaagttcaaagggaaaagaacttgagacacaggaaaatgctaattctcaagaaactaatgaaaattctaataacagcagtttggagaacagatcaccttcaaatggttcacatgaagtctgtaacagtggtgaaacagttacagttgcaaatggaaaagcaggcttgaaagtgatcacaatcattgacaagaaccaaaacggcctggcaaactcaaatggttctcttcacattgccaatgtcagcatg

SEQ ID NO: 45978 - DNA, 155 bp, Oryza sativa
aaacccccgaccctcatcgggaggacagaaattttttaagcccgcagggagcgctgctcagagcgcgtccaacaaagctcacacacgcccgggggccatctgaacacgaacccgccaggacccctacctccgaatgggtgagattcccccccccc

SEQ ID NO: 45979 - DNA, 427 bp, Oryza sativa
agcttgtctctgaatgactcgtgatggcatttatgtcggcgtacgagtatctcgttggggtcagcatttgatgcaattgcagaaacttctctacttcatcaactctcatctttattttccagtacatgtaggcaacggaggtccacatcagcagcatcaccaggacgaacctgcatgctacaccataaacatgttcatccctgctgtagagaccaagtgtatgaacaaatagagcatgacgagactacaatacagcgaaaaaggaaaatgtaactgaaatttgatatgtgtgattgtcacgtaccagaaatgacccttaaaatccagaaagtttgtggcactaacatcaggagcacaacaaaagggtgtggaagttgagttgcatggcggtcgcatatcgagaagtaagaattgatattattaacaa

SEQ ID NO: 45980 - DNA, 422 bp, Oryza sativa
atgccagccttcagcaccaagctcgcggtgcttgtcatattccatacagagccctggtcagcttcaggacttgtccattcttgccgacagagaatccttggggctgctgcacatatacctcctcttgaagatccccattcaggaacgccgatataacatccatgtggtggacttgccagacctgatgcgcagcaacagcaaggatcatcctcacagattccagtcttgctaccggcgcaaacacatcgacaaagactatgccgctctactggatgttgcctttcgtgacgaggtggaccttatgcttgacgaagtgcccgcggacgacacgctttgccaatgctaccttgcttgcaacgcccgagtcagatataccgttctgctgcttgttcttctgaaccccaacttatcatttggattaa

SEQ ID NO: 45981 - DNA, 448 bp, Oryza sativa
  unsure (1)..(448): unsure at all n locations
acacacaaaactaagctttgggctaanataggcaatttacgagaggttgggctatgaatgtggctattccataagaagaagaaaaaaagatgctcctaagacagattggagatattgatttgtaaggagaaacaagacagttatggccaaaagagtggtaagaatggaacagattagaatctaaacttgagaatataccacccaatatactctaccgacagcaaaggggcaatgagaaatggattctgcaaggggattttaatacaaattacttccatgggtgtgctaatggcaggagaaaatgccatgttttctacggaagagggatttgaggttattactgaccaacgaaaaagatacaggagcacatatattcattgtacaaacaattatttggttcaaagcagaacaagtccaccttaatttgaactgaagggggcaaatgaat

SEQ ID NO: 45982 - DNA, 447 bp, Oryza sativa
cttatagtcacctgcggcatgcaagcttagtttgcaggccaaaaatagctatgatctctctcttctaaatgggaactacatgtgagaatataaggtatcgtcacttatacacaaattataaatcataaggtggccactcttggtcaagctttatagtgcactctaatacatatgcaccctttcagattcctcttccatgctccaaccctcgcatactaatacttggttctttaatttctttccaacgacattgatgtgaaatgttgatcatttactaaagaagaaaagtgcgcacgtatcattagagcgtgccaactttgaaactggcaatatatttggggcttgctcgtgcatactattctctctcgcgtaaaaataggagatcctggaccgatagaacatttaaaggaccgatctagatatcctatccatcaaattcttatattt

SEQ ID NO: 45983 - DNA, 412 bp, Oryza sativa
  unsure (1)..(412): unsure at all n locations
nttcctccacatgctgtaccggctaccgcatacttcgctaaatttgtcccggccaacgccgtgcgcccgacccctcacatgacttcggcgccggttcgcccggcggcaccttaagcacagtacccgaagcccactcacatgccacaagcaatgatggaggtagcttcgaccttgcaagcacagtttcaagcctttttgcaacagcccaatcaacaccataacaatgtaccaagaacttcgcctccggtccaagccgatggaagtcaaagttaaggtgcgctggccggacagctgttgggccagttcggcatgccaagtcaggcaaaccagccagctcaaggggctttcgcttaaagccaactaccacaattcgaccccagtaccgcggttcaagcacccatgacctttatgc

SEQ ID NO: 45984 - DNA, 420 bp, Oryza sativa
  unsure (1)..(420): unsure at all n locations
agcttctgtgcagtggcgtgggtattatcttgaatagctncactgactgcaacgccaaagcaaaaggtttgtaaccaactgccaccaatatactatatatataaatattttgaatggaagccaaccctcttttggtctgccatctgaaatatattgtttgggttcaactgcagactctttgttctcatcacttgaactctcattgactggtttgccactggaactaactgacacattctgacgaccgacttccggtttcctagccttattatctgctatgacataagaaaggagtccaagtggaccacaagtcacggaaacaagcaatatgaactccatatatacacaaaaaaaggaagtaatttgtatgtcaaaaacacattcacttgctaatccaaatatattgtcagcataattacc

SEQ ID NO: 45985 - DNA, 416 bp, Oryza sativa
  unsure (1)..(416): unsure at all n locations
acactatannaatactaagcttccaagaaaccattcatctgggtgatcgaagcacganatatgttttcagaagtcgaggaatggcttgcagatgggttctaggagcgcgtcaaagacagaggcatgatcataatgggctgggcgccacaaatgatgatcctgtggcaccaggccattggagggttcatgacgcactgcgggtggaactcgacactagagggcatctccgcgggtgtgccgatgatcacatggccacactgttcagagcagtttgtgaatgagaaattggtggtggatcacctgaaaattggggtggaggttggagtgaaaggagtgacacagtggggaactgaacaaaaagaggttaaggtgacaatgactgctgtggagacagcggtatccatgtcgatggatga

SEQ ID NO: 45986 - DNA, 425 bp, Oryza sativa
agctcgaggtgtatgataaccccaacctgtttagtatcacttccctcaacaagttacagaagctcgtcattgacggctgcctgaagatgaggatattggagggggttcctgagctgctgaggctagagctcaaggacttagatatggaagagcttccaggatacctgctgcagagtgtgagtcctaggcatctggtgctagactgcagcttggagatgctcacagccatatcaacaggagaatccggtcctgagtggagcaagctgagccgtgtccagcatgtgaaggcctatgctgaccaaggagacaatgaacggaggtggcatgtgttgcacacgagagatccctatagattcgagacaaatatggggatcagctcttcttctatttctggaggataatcaacactttaacacatatgcttc

SEQ ID NO: 45987 - DNA, 394 bp, Oryza sativa
  unsure (1)..(394): unsure at all n locations
tgtgacttgatcgaagntcgtggcttgaaagatattgtccaaagacatcaattctaaggcccacttcgcaatccatccgtttgcttcatggttatgaagtatatccccaagtggaaacgatgtgaccaccgtgaccgagtgactttgaaagtagtgagataatttcctgacggtaattaaaacaccatataataacttttgaacctaaggatatcttgtcttagagtcggccaaaacctcgctaacgaaataaactggtcgttggactttttgaatatggccttcctcttcacgctcgacaaccaggaccgtgctcacaacctgngaggtcgccgacacatataacagtagcggctcttgtggatgtggcgaggccaaaactggtggagtagtg

SEQ ID NO: 45988 - DNA, 418 bp, Oryza sativa
agcttgaaacatatactcaagaagcaagcttgctcacactgtaatgtcatcagctccaaaatgagacacaaaggaatttaaatggaaacacgagaatacataatattacaatttagattgaacccacgtcgcctctctgaaagtatgagatgctccagaacacaaaacgttaatccaatgatagaagaggagaggatgaacatgaggaaaacaccaatccattcatcaacactgatatatatatggcagagagagagagagagagagagagagagagagatatgttttggtccaatgagacagtaggcaaattacatcagcaaaatggaaatcaatccctaattgcaacccctgcaagatcatcgatcggcgccaccacgtacggaaggccgctgctaattacattcacatttggagc

SEQ ID NO: 45989 - DNA, 398 bp, Oryza sativa
tgtttcgtcggttcttccaaggcctatggatattgttcaatatggcaacaatggatccacagttgctgactcagccgcacaggcattagttctgctaagtactgggagtgaatacaacagggcaaccatccttgataaaattaatctggaagagcttgtcggcatgctctttgatgcttccatggagcaaaggattatgatagcacatctgcttaaacatttgcggacgtattcatgcccaggttatggaaaccaactgaagaaagtaattgacggttctctgccaaaggtaaattctgtcatatagttgagtttttgcctaaaattggaattcgatactaaattttctgcatcaccataccactgaagaatagctgaaatatgtgtcaatgaataca

SEQ ID NO: 45990 - DNA, 427 bp, Oryza sativa
  unsure (1)..(427): unsure at all n locations
agcttgngtaacaatgctcctacatgggcttatttgttattggaaaaaaatatttagtgatttacacttcaatatctgatcatctgaaagctaaattagtaatgaataaaaggtatttgactaggtaagcgaacctattctgttcaaacattagtaaaaacatggacacaaacattgttaactgatgacctatagactgccattctaatgcagcatgggcataaacattgtttactgatgacttagtctgccattctacttcacatataacttaggaaacttacatcgccgccctatccggattattatgtatgcatttctagggtcaaccgaagaataccgtcgcttgcgaagaactcaaaacaatgcccattctcaagtggagactttccagtacagcttgagaatttgatcactaaaagattga

SEQ ID NO: 45991 - DNA, 190 bp, Oryza sativa
  unsure (1)..(190): unsure at all n locations
ggcgactntgcagncactgctgagtggatcttttcatgtgtgctttctctcatcagccattgttcttgccgtagtttccagataattagaacttttcagaaaaagaaagcagtgatatccaacgtgttttataacacactacgatgtacttcctccgtttcacaatgtaagtcattctagcatttnccac

SEQ ID NO: 45992 - DNA, 327 bp, Oryza sativa
agctttgcttggtatcattcagggattgtttgttgtcctttgggaagtcagtgctgctgcgcgattgcaagcttggcaacaatgacccacatcagaccacgtcagtcgtgtttcgctcttgtgtggggtagcaagcttttcagtttgcatggcttgtcagtcttgctcacccgtgcacaaacaagactggtgatcgtgaagtccgagctactacatcgacgaggtgcgacgtgtgacaacgatgacatgagtccttttgagttatgcttcggcatgggtcgaggcgttgttctgacttgttcatgaccaaggtgttggaatcacctg

SEQ ID NO: 45993 - DNA, 324 bp, Oryza sativa
actcagcttacgaagagatgggttcccagctgaacttcagtactgtctattattcgcagacagatggacagaccgaaagggtgaatcagatactggaagacatgttgagagcttgtgctttatatttcggtggaagttgggataagaatttgccttacgcggaattctcatacaacaacagttatcaagctagtctacaaatgccttcttatgaagcactgtatggtcggaaatgccgcactccacttttgtgggatcagacaggagatcgtcaggttttcgggactgatatcctgagggaagcagaagaaaaggtgaaaatca

SEQ ID NO: 45994 - DNA, 417 bp, Oryza sativa
  unsure (1)..(417): unsure at all n locations
gctttagaaggggatcacctncaacaacctattcttatgccaaattaaaaccatttgataggtcaaattatgaaacaaggatatttctcagaaggagtaatataatgtcttaaccacaaaatattcagtgttatcttcatggccaattgggaccatattctcatatggccttgtcacaaaaagatgattaaacataaaactagtcatgcatcttccccgcatagcggtttcaactcaataaggcgcataaccaaatgctgggctggtatctgaattttttactggttggtctttggtaagaatactgatataccttattacacttcagactggtcaaaataaactaacttatccacacgataattattattctcctgacattttctaagaagntntgatatacacaccataatgtat

SEQ ID NO: 45995 - DNA, 426 bp, Oryza sativa
  unsure (1)..(426): unsure at all n locations
ngcacctacttgttcttacttcttgaaccttaatgaatggtttcaatcattcaaacacaaaaactccaaactttagaagttcatttttaaagatagcaagaggaagagaatattttctttgtagtttaaggacatcttaggaactgcaaattaaacataagagaaaaactaaccggcttatgtgatgtctagttgaatagaaactagtgacacttctctgttgaaagttgaaagtaaagtcaccaatatcatttttgttgtaactgataaagttatactcgtaaatcaccttactgcaatgtgtctgacttcactatgttgatcattgacagagcttgcgagcacgggtgaaaaggagtggtacttctactgcccgagggaccggaaatatcgcaacagcgtgagggccgaaccggtgacaacagc

SEQ ID NO: 45996 - DNA, 418 bp, Oryza sativa
agctatcataataggataacactatatgtttatgttatatcctatctattattatatattaaaagtctattaaatttcctacagacgctctcaaaccgccacgtgtaaatcctacaaacgctcctaagtcgccacatggtgttttaatatatttaaggaatatctaataattcttaaaaagtaaaccatagattttattttaaatacggaggacccactttaaatccgtatcgtgtacgtgcactggtgcacgtactgtgtgcacgtacgtacgccatatatcctttctctcctcctcttcatgctatattatgtagaaaatacataatacatcattagaaacattagatatttaccataaaaattatagttgaagactcacacttaactatatttataagtaaaaaaataaaacaca

SEQ ID NO: 45997 - DNA, 440 bp, Oryza sativa
  unsure (1)..(440): unsure at all n locations
tcttatctcaatccttattctttagaggcaccaaactatttatgccccncatttttttaaaagaacacaatatatcgtagaaatataaatggaataataaaaataatttaaaggtaaaacttttatattatgcaagtacgaagataaacccaaatattaactccgaatttagtttcaaattttaaattttgcatctaataagccaacaatatcaaatgatgagaaaattacttattccctccgtaatctaggaagggatgtagggttacattctcctagtacaatgaatctagacaaaggtatgtccagattcgttgtttgctatacggctcttattatttatttctttctttctctacgagtctttcagcgtgcatttaacattgatgaacttggactacaagtgttgtccttctttgatatgaaattgtgtgccactg

SEQ ID NO: 45998 - DNA, 428 bp, Oryza sativa
tgctgattctaagcccatagatcaacaattctttatggccttggatctttttattgattatccatccgtgtgtatttcttcattatgatagaatgctataatatgtatggtctttcttacccaatactattgtgtgattcattcaagcattttggaacttactgatagtgatagcgggcattctgatattaaaatatttattcctaatttcaggttcgcaaccattcataatagattattagttgacatctacgactcaatgcagtatggggaacaaaagcaattgttactttctgatgaaaatgtttagcagtaccttcctgcacaatgatggaattatctggattccaatatggaatagcagacttcagtttttgtttgcccgtctcatagatgaatatatcttcatactatatttcgatgcatgg

SEQ ID NO: 45999 - DNA, 449 bp, Oryza sativa
gctctttccgcatcttaagtgacgcggctgcagctgcgcataatgagatccttcagggagggctggttagagaagttaccgttattgttacctccttgataatatgggcgtggttggttccacccctgacctacgtgtggacggtacccgttgttgttgtccatgtacatcgcctcctcacgggtttccgggcagtcattcccagaatgacccgtgccgccgcagacctcacacgtgacgtgtgagtccaaggccttgacggtgccttgtggccttttctcatggtcgtccaagcgtttcatgaggaggtccagcttggcagcaagtagctctgtctccttgacggtgtgtatgcctcgctgacgggtctggagtcgctcctcgctccaacccatattggagaccatcttctctatcagttcaacgactccttgaaccgttttagaaaa

SEQ ID NO: 46000 - DNA, 435 bp, Oryza sativa
  unsure (1)..(435): unsure at all n locations
tgtcgcantttgagccatgtatntgtgtagcccccgactcttctgttagttgggaaacaactgaacatagagtcgagaattatagcttcttgtcgtcgagtagtcattgcttgattgaagataatggctctcctgaatattggagagccacttgttgtagtaaaataacacggcatcgcatgccgagatgttgaggttcacaaagacgtcgtggttggtgaagtagcaaagcttgcgaagtagaggcaatagagtttgccggtgccgaagataataaagatgaagccgctctaccatggtgacaaagttgcatagccatgatgaagtgaacacgagtcagcagcaacagaagcaaaccggtagcgaagacgcgcaattgtgaagataaaagcaccagtcggcggcggaagacgatgatgtncatcaatagtggta

SEQ ID NO: 46001 - DNA, 452 bp, Oryza sativa
  unsure (1)..(452): unsure at all n locations
tatccctaagtgaccgagtttaaagaggatgcggcatggcagtttatctattaattaggaatagtttgttagtttccttttatctttaggaaagtgtgtttagtgtccgataaggactttatatttttccttttatctttaggttagtttctttcttgtccgacaaggacttgtatcaacccatgggtataaatatgtacacctggggtctatgtaatctatcctcacgatcaatgcaattcggcgcatcgccaccttttaccttttctactttattttatcgtccggcgggacttggcacctgacgcggggctgcatcggttgtcgatctccggcgaaagggtaagtccaatgttccgtccgcctaagcaattgtatcatatacctcggcgtcgttcaaggctgcatcagtacattcgacctcttggatngctctggtctggatgatatat

SEQ ID NO: 46002 - DNA, 455 bp, Oryza sativa
tcatgccgataaggccagcacatgccttcgatgtaatggtttgatcaatgtactgtgcatatcaaattgatcagaaattagtttgttggaggtatatccatatgctctagtttaagagtaagcagggctttccagacctcaagaaatgcgcatgctccaccaaggtcttcattaaaaagaaagcggtaagcagccaattgaccaaatgaactaactatatccctgagctgaaagacgaaaatgcagtaacttgtcagggataagagctttaataacaacatgcagagcgaagattactaggctatgccaatatactggtggatgctgctatattaccatcttagatgaaatcactctaggaattccagcgatgaaaatctgcagagttaactagtgagatatcctatgaaagctactaaaattcttataccatctaaaccatatgtattccatta

SEQ ID NO: 46003 - DNA, 432 bp, Oryza sativa
  unsure (1)..(432): unsure at all n locations
agctngatcgagccccattgtttggctatctaatgattcatacaaaagctcgtaataacgcataataatgtttacttacttcaacgaatacctacctacctacctacgggtgcaaatgtgcaataaacccatttaccagtataatcgcaacatcgagcatgacattacaaagctttcaagaactggagcaaatgaaacactttgacaaaaacatttgagatcacaacacacagaagatctaaataccaccacaccttctacgagaaaatcatcatcaaatccttgtggcaataaatataacgaacaagtctcatgttctgagcagaaatgcaatcatagtgttacatgagctggcactataattatatacagatcatgtcacaagagaggggaacgaaaccaatcactagtattagactcgcaacccttaaa

SEQ ID NO: 46004 - DNA, 420 bp, Oryza sativa
tggggttctggtttgcttcaatggattgagtttaccaaactatatggagtatcaattcaaggcaatggcatcataaatggtagaggacaacaatggtggacctattcagacatagatgacgacgaagatgatgacacagtaagatctcaccatccatctagcatatcatcatatacaaacaattcaaaagatggttcatttagtcacttaccttggatacttccagcagtacgatgtggagtttgaaaggatgccacaagttaaacctacagtaagaagatcactatatcaaatcacatttgtaattgtctgggtgcacacgaaaaccaagtcataagaactttactctgatgcaggcattgagaatctatggtagtttcaaccgtgtagtagctggtatcactattgtcaacagctcgc

SEQ ID NO: 46005 - DNA, 407 bp, Oryza sativa
ctataatcgactgcatgctgcaagctttatagcaataattattacagtgggttctattagctgacccaattctatctagactctgtttaacgggcctaaactgaattcaagtgctggaactaaggcagaataagtccaccttgactctcttaaaagtgacccgaatctaatttatgaccctaaaccgtaaaaccggatatttctaccctcgaactattgaaaccggtgtaattagactcccttgatggttttagagggcggtttcactgacgaggcgctgacgtgttatgattgacctagtgttgactgaaaacatgatgcctgtgatatatgcttaactacagtgcatgttctataactttccttatggtatgctatcgtgccagttgatgtatcctgcaattaac

SEQ ID NO: 46006 - DNA, 289 bp, Oryza sativa
caacgtaccggtgattgtgaaatacagtactgcccatgtttctaagaagcattcctgaaccatggaaaaaaataaaataaatgggtaccatatgaacaatatgagtatataagtaattcctcaatgcatgcatgggtcacattaatataatctgggcttggggagacctatgtgcccgtctatccaacagtaatgaaaactatatgtccttaagaccgcaccgtagaaaaaaaaataccaccttaattagttggtatatgtaaagaaatgaaaatatatgggtctctat

SEQ ID NO: 46007 - DNA, 426 bp, Oryza sativa
agctttacacgaataaagcacagatcactatggcagcatattctgttatgactttccaggcgagtcacagcaggccggttgagattttatgaatgagaccttacaagaaaaggcccaaagcatatactttaattccttttagcctttggcttaaatttgatacaataatctcaactaaaaagaatctgcaaattttattttccagctgagtacatttttgagttccataagaaggtagatcggtaggaaggatcatgacatttttcagaaagagagaaatgtgtcacaggctgagataagagaggaatgcaacaagtgcagagaaggaattggataagctctaacatcaatttccattgcacaaagtgggggtaaaaggcactcaaaaaggaagatgcaaagcatgctacaaacaatcaagtttct

SEQ ID NO: 46008 - DNA, 386 bp, Oryza sativa
tcagctggcttgatggataattcttgtcaacttttatcttgtagggggccagccggtcaagtgtgttctgatcgatgggtgcagctgtcaagaactcatgacgatatgggaagatcgagtggcgtgtgcaccggctgtctgaaaaattctcgattagaaaactgaaaagggaatcctctccaagatcctgtcgcggcaaccaaagcaagccgctttactgtactccgtgtattaaccaccggcctgcgtgagctttccttgtcacggtcgaggctgctgctgcaatttccctcctagagtgttgatctcgcattattcataaagcacgtctgttcatgtcatactcactatcgacctatccttaacatgcaagcatcgcctgtctt

SEQ ID NO: 46009 - DNA, 297 bp, Oryza sativa
acgaatatgtccggtgtagacaaacacgcgactcagtaatgatgaagtgtgcttgtgtcattaacattcaaagacggatatgagagccgtcttaatgttcaccactgaacaagcaagcgattatctacatgtatatgactatcatgcgcttgatctcaactctgaatgcctgtatgatttagacttaaatacatggtaagcgcctgcctaaaatacccatgctaactgatacattggtactttcaagatgaaacgcgatgctagcacgacatatgtaaactgggaatcaacactaca

SEQ ID NO: 46010 - DNA, 387 bp, Oryza sativa
  unsure (1)..(387): unsure at all n locations
tggatcttcttggaatcaatgcacganacgctcgctgaagtggaagcgaatcggcgcctggaatctcgctctcgctcgcggngattcaaagctttatgggaggaaggataaaaggcggattcaaagcgaacaaatcgggattttcggtagaggataacaaaaaaaaagagcaggacacggatatcggaggggatttgcggaaagacaacattatttgtgggtgtggctgggaagatgagacgggcgattcaatcgcatcctaatcgaatcgatccaaacaaggcaagctagaaaaagagagagagagagagagagatgattcttttgatgagagtgtaaaaagcgaacaagaagaagaagacgacgacgacgatgaagtggcaagtg

SEQ ID NO: 46011 - DNA, 420 bp, Oryza sativa
taagctgtgaagagaataaagtcttgacatttgatggacaagacctcggcataaacatggttcaaccggatggtcacaagtgttgatctcggttcaagcttgaccccaagatggatggcccaaggcaaaggtattatggaactaacaatgttttcttattcttttccccgtcttggtgtttggtgtagaccggatttgctaaataggcgtcgtactatcaagaggggtctattaatcgagcttgtggatgatcctgtgccatattatttcatatgcatgtaggtgcattttgtgggcttgtctaaccaagtgtgatgagttttctcaagtcctaaaccaagagagaagttggcatgttcaatatgagtgagtgacatcttgtgagatgtccggcggattcctttggagtggaaccattta

SEQ ID NO: 46012 - DNA, 402 bp, Oryza sativa
tgctgctgcctcttggtgcttcctcgctgctggtgttaccgattgcctagtctaagctcacgtcgtgagctgcaagagtggctagcgatggcgtctgagctgccctggcacgccgtggcgcaagtggttatgcttgctgcagccgacggccatcagcgtgttcctcccggagaaggcgaacggcgtcccggccaggtccatgagtcccgttccgttggcctctgtgcggctgccgaaggggaggggagcattcaagcagctaacgttcgggtttagcggcagaggcaaggtgtcgaccgccgccgacgctgctgcatgcgtcgacacgttgctctattgatgatcgaccgaggcaagcttggaccgacaacaagatatgccgtgcgtgcatggcccgacaat

SEQ ID NO: 46013 - DNA, 397 bp, Oryza sativa
  unsure (1)..(397): unsure at all n locations
agcttgtcacactatcctctgttctgatatctgtgaacttacgagagatgttaactttctgagcactgacaggcagggatgtggggatatatggttcgccatttatcaaacggaaacaaggatttgtgacttacattctcgcgttggccatgtgtatgctatcacagctggtcatttgatttgaccatattacagggaagatgaacagtctgggatgggtggtaaaacaccatccataatcagaatgtatctctccgcttgatggggaggaataggacacatcttgtactagcagactgttcacatcacgtctttaacttgaccagtgttcattggctgacggcactgtgagaaaaataacaatagaaatgcttncattcactgtcacgaactgatt

SEQ ID NO: 46014 - DNA, 400 bp, Oryza sativa
tgacaagtaaagtactcaatacagtcactctatgaatattggcaccagataacaatcttggaagcctgttctttcaccttgaaatgatggcctttgtcgaaattttggcatatcttcagttatattagatggaaagaatgacatttgttggtttgaggcttaagggtgtgtttgttttgttccgtaacacaactaaacaaatttgtgtaatgcttacctgagcaagaccaaaaatagtttatgtgtgtggtttgacgatgaacttctctaccgatatttggttatgtaatagccaaatcttgttggggtactacatttctcaacattattggtagcactggtccaaaactgacagtgatggcccttacgaagcggcactaatgtggtgtcctggatattg

SEQ ID NO: 46015 - DNA, 412 bp, Oryza sativa
agcttgtctaaccctagctatcataccattgattcagggactttctaagcacagaagaatcatacacacaggagtagggtattacgcttcatagcagcccgaacctgtataaacctcttttgtctcatcgtcttggaggagcctccgagatcaagatcacacacagtttcgcctcaccaaatcctcgaatctcacccactgcccccggccgaactctcaaaggggggtctcacagcctcccgctagagagggtcacccctcgacagctagcgcgccaggtagggggcgcgttcgtgatttttgaggttctgttgagcaccggcgtggtgagtgtcgcgccgccgcaacgggggaaggcgcagcattctcaggggtgtcgcgccaccccaagcagggggcaaggccccccaca

SEQ ID NO: 46016 - DNA, 416 bp, Oryza sativa
tcttgtcggccagaaatctttctttgacaattcgttcgttaagaaagaagatcgagtcgctagtttctatgattctgtctcctactgagtcctgagcagtcagttgaactgtctatgatcatgcctatttgggccctgccacacacccaatcaaaccgttgattccgatggttcgagatgcattattgcaaccatttacacaacattctatggtgccttaatagtaagccccaatgagagaacatgaccacacatagagatatacttagcggtaggtcattacaaatccacaccaatcttgagcagtacgaagaaacttgttgtattcaactagttgctcaagatttttcttcaccaataatgtgccataccgtttgagtgcgtgttctactgttcaagatttgcctgaccatgca

SEQ ID NO: 46017 - DNA, 417 bp, Oryza sativa
  unsure (1)..(417): unsure at all n locations
agctngcttaggattgttatcacaatgggacgaggcttcatatcttctacaatctgaatcgaagttaacatcaacaattatattacataatgatcaacttaatatcgtgtactaatacataatttcaacagtcaattcttgggaacatatcaagctgtgaaatatatcttcaaaatatgaataattaaaagaaatctttagcatttaaccttgcacatgggggcaaccaaaatagccccatcccaatttgtaggttccttcctatgtagcatcagcacaatagcgcctcccattgactcaccaagaaggaacttcttttttcctttgcactctcctctttctagaataaggtgtacacatagaaatatttacaatagaaatctttgttaacatccaccaatcacatatactaatata

SEQ ID NO: 46018 - DNA, 398 bp, Oryza sativa
  unsure (1)..(398): unsure at all n locations
tcgcatccnctataatacttgaagcaatcatcaatcatcttctgncaatagaaccccgctctcctaagcaaccaattcatcttatgggccgattgatgagttccacaaatttcctcatgaaattctcctgtagcaactgtagattgatattgcctaagcacttcaacaatacaccatctatattctggcgatatagctcctccacaagaaaattgcttgccgccgaatgttccgatcaacctttaagataggatctttcaaatatccaatcaaaggaattatcaaaacttcttctattttctgngtacaaacgtctgaaattacaattaattcggcctctacatccatcaagatgttgcccccagcatcctgcccagagccggtcagaccgcacatgc

SEQ ID NO: 46019 - DNA, 406 bp, Oryza sativa
agcttgatgccctggttctatgacatctacatttcttgtttgattgattacctcacttattgagatactgatactattgtctgattcgttgcttcacttgaaaatgatctcactgttcgggccaaaactactgagatgaaaataacggactttagttcatgctcctacgcaacagttttcagagatgaggtttgtctgtccgataccttacactatactcaccctcgtatgtatgcctgtatgcatgcacatgtattttacatcaatgcgcataatattatggatatgttacatccagcgtacctttcactagattcaccatgtgttctatgcatatacatatgaaccatgtttacttggatttttctatagaaatgaatccgacaaacctgcttgcttttggagt

SEQ ID NO: 46020 - DNA, 426 bp, Oryza sativa
  unsure (1)..(426): unsure at all n locations
agctntagcattcataaaacccggccgcaatccttacgaacctttgtgagctgtgacatcatgcacacaacgcttaaaatttacagttcggatttgggggacaagcccatgcctcatcaggttttttttttagtaattcttactacatctcatcagatgcagatgggctgccgctttggcattggactaataaactaatgcctcatgatccgagcttagctactactaccctcctcccctttttacatctgagagagagcgatgctttgatccaaagtcaccatcacatgcgcggctaaggaaaatggagttgctcctgcctctccttcccctccctctctgatgtgagttgctatcaccgcgacaacataagcagcacgcaacttcagattggacagacactaaagataagaggccagtggcatg

SEQ ID NO: 46021 - DNA, 356 bp, Oryza sativa
  unsure (1)..(356): unsure at all n locations
agctngcaagataagttgaaacagatggaatcatagtcacaaattttgtgcttatgaataacaggttccaaaagaaataaaagaaagttataaaattaacatgctaaatttattttattgcagcaagattaaataaaacaatattgtaaaacttttgctggtaaatgagccattagtacagtaatagttgtacagtactaataacactggaatataattttgaatgagaacaactaaaagagattatgaagtgcatgtgccattattttggtttaattaaaagagaaggggaggagaacagttctacctttccaatatttctaaagggcttctatgggtaaccatttggcataacc

SEQ ID NO: 46022 - DNA, 399 bp, Oryza sativa
ttgaacacagcttagatctactactactggtgttgcctgacatatcatttttacaggtcttcatctgttgcactcatgatttagcaccagctgaagtgacctctgagactgcgcggagacgtatcctgttgctaggataaaaatatccagatttaagcatggcggattctatggtgccaagtatctgggggcctgttacttcaacaactgagctctgcgaggaaaattatgcacactcgttatatattgcagaattctacaatactgattctaatgttccacgagttcttctggcacttgatggacttgtgaatgctcttctgcaaggttatgagaaacgattcagtgtcctcacatatccaatatgatactcgctatcggcagtatgatcttccatgc

SEQ ID NO: 46023 - DNA, 428 bp, Oryza sativa
  unsure (1)..(428): unsure at all n locations
agcttaggccctgtttagatgggactaatacttttaagtccctatcacatcggatgtttgaatattaattataaatattaaacgtagactattaataaaacccatccataatcttggactaattcgcgagacgaatctattgagcctaactaatccatgattagcctatgggatgctacagtaaacattctctaattatggattaattaggcttaaaaaatttgtctcatgaattatctttcatttatgtaattagctttgtaagtagtctatatttaatactctaaattagtgtctaaagacagggactaaagttaagtccctggatccaaacaccaccttattttccttcccttcgtcaccagacaccaacttncctctttcgctacttcagtttacatctagcgaaagtttactgacagaactga

SEQ ID NO: 46024 - DNA, 466 bp, Oryza sativa
  unsure (1)..(466): unsure at all n locations
tgtgatggactaccccggcgttgacaaggtgacggtggacattccagcgagacgggtgatggtcgccgggaagttcgacgtgcagtgcttggagttgctcctccaggtcaggtcgaagaagaaggtcaccatcatcagcgcccccgcgctggccattgccggccggtgatggcggtgagtagccgtagccgtctagccggtcggccaggacgaaggaaggagtggtgttttatatgtgtaaaaaaatgcgaatattanggaatgatctaatatcaaaataatatcaaataattagaagggatgagtcttcgaattcagatcgtctagcagaccaccctgtgaagttagctgaaagaccatgggcgtttcttgctttcatgtgtagcgtgaagtctctangagagcacgatataagaatttngacgcgcaccacntaatatgtccttccatgggcttaaatttttaa

SEQ ID NO: 46025 - DNA, 354 bp, Oryza sativa
agcttcacagacatggatgatattggcaatgtggactatggagtttggattcaaatacagattgattccatagaaatttaagatcccacggaaaaactttgaagttggaagagcaaatccgccatagaagaagtgagagaaaaccatgacctcgtgtgtatcgggggttgggaaagcttcaccaaatgctggctgccacccgatgatctcctttgctgggagaacgccgtgcgccaccatctccttcaagttctcctccgtcacgtcggacggcaaccattggctttcaaagcttttcatttctttcgccatcgatttgatccgaatgagttgatttgattctagggatggctg

SEQ ID NO: 46026 - DNA, 318 bp, Oryza sativa
  unsure (1)..(318): unsure at all n locations
tgatcatgatccttttccggtgaatacaattaattttaatgtatttaaggtgttgattcggccagagcaagccaaatctactaagggaaaggaagtggtcattggtgaaccaaggcctaagatggtggtgccaangaagccggatgttggcgtttggaacgagaatagcagtgaagcttcaacttctaaagcccctatgaagaccaaggtgacttttgatgtgcttttggagaagtatgagaagcaaggtggtgagaagattcacaacacagggaaaagaccaagatctccccctaaggagcgatttggtcattcacc

SEQ ID NO: 46027 - DNA, 422 bp, Oryza sativa
agctttagctgcttccaattctccaccagtctacccattacaatcaagttgaatgtagacatttctaaggttggtaagatattgaatgccaaaatcaaagctaccatttgaagacttcgtgttgaacacattcattatgacatcaaggcattcgagctttaacagacttcctgcgtcaaaggttaaccctgcaggattgcaatagaacttgaaaaacttggtagaatggaatccactgatgatgatcctcccttgaagggcagtatttgagtatatggtcagagatgacagagcaggcatatgtcctagcaattcgaaatcctcctgccaaattttgttgacatataggactaactcttcaaggttgatcagtgaacccacccaattcggaatcttattgatggggcaccaccggtcaatgg

SEQ ID NO: 46028 - DNA, 452 bp, Oryza sativa
  unsure (1)..(452): unsure at all n locations
taaggtggcataagtgtgcctctaatatagcttccccttataagtgaacagntcatttcgatgtccactgatcttaggacaaaatatatatgatcaagtgtcacagaccattctcatatgtcaggaaagttgaataatcatgacatgattaaggcatgcattgagttttgcattatttggcatgacatgatagctgagattgccttttgaagcagtgttattaccatatgaagtataaagtgccaaaccaattcatagctgtaaagatctaaatgcataaaatcaatgaagtaaaggactaaccctgaagaatccatgattggatgtacgtcctgctatactgttgaaatctctcaaggcacacttcattcaatcgtctttttctgagtaagaagaccaaaagtgacaacgtttgttgaacaaactaattgcacgatacaaaataccatcac

SEQ ID NO: 46029 - DNA, 416 bp, Oryza sativa
  unsure (1)..(416): unsure at all n locations
agcttggntatgctaatgcgaaaatctacatatgtgtagactagaaatgcccacgaccaatgtgctacaagtatgcaataaaccactaaatggcatgatttgttctatgcaatgaacttccatttgtattaccatgttaaaaacacttatctatataaaattagttttccagttaatatctggtagaagttatgattaaaatctcatgattgattctccagaaaagtaacttataattatctgccattcacctacttaggactgctgctttgatgtcaagctaatgcatgtgagctctgcactatatgatgacttcttttcctgttatataaagggcttatggaagtggacaagaagatagccctcactgtgatgtgcctgcgtttgaaaacactatgatgaagctactgagacat

SEQ ID NO: 46030 - DNA, 417 bp, Oryza sativa
  unsure (1)..(417): unsure at all n locations
tcgatccaagaatcgcacgaaccctaatggcgcaaagccgtctcccatgctgcgggtgttccaatcagggacgaactggctcatggcattaacaaccctaattaatcacagaagcacagcagctctgtcttgtttctacctgcaaagccaatgatcatttcagattctgcaagaatcatgcaaaaatgaattcacagagaacaaanattgtaggtttggaaaaattttaagggaaaactgaactctaacgatggatctgtttaaaaaaagtagaatgaaacagaataagagcaacaagaacaaacagagaatgaaaaaaaagcagagaagggccatcactgcaatctactacaaagtacaaaccctaccactttgatgacaaaagctgtagacctgcagaatgaaacaacctggaga

SEQ ID NO: 46031 - DNA, 410 bp, Oryza sativa
agcttagctctacatatttggtagtactatagctgtaccgtaactactacatgttctatgttactacaatttcattaggacattactgtcaaaagtgcagtaacattctatatattttacagtaacgcggtgtgttactgcacttttacggtagtgttactactggaacatagtaacatgttatgaaatttttttataacatacctactttgttctatggtggtaatgaaagatataagaatcggttatcatatttctttatcgcaaagtaagatgcaaaagaaataagtaataatccttaaaactaaacgtgccatggggtgaattggttagaagaacatgttatgaattaagagatcatgggttaaagtattgaattcactaatttatttttttattttttacgaaga

SEQ ID NO: 46032 - DNA, 420 bp, Oryza sativa
tctctacctcatcaaaatcttcaaaagtttcaccaatatcgttatttgtagaccaatattcttgcacactcttttgctaccaccctaaattagcttctctagtcattgcataaattaatatggcctagccgtgctaaactagccggctttacagagatgggtacaaatttgccattggagatactaataaaatcataactaaagagatccatccccgataagcattgaatattcccatggcgccactcaaaagtagcatcagccattgcaacctcggccgatgtatccgcttgaacaatctcaacatcatcgccgtcctattgaattaaacattgatgcaaggtagaaggcacacaacaattggcatggatccaacaacgacccacaatgacattgtagttaccttgcacatcgacgatg

SEQ ID NO: 46033 - DNA, 404 bp, Oryza sativa
agcttatctataaattagttaattggagttcttactttccgttagcgccgctaattaatcatctactactattaagactttatttaattaatccacacttcaaaacatgcgacatatttttggaataattagctttctcccaaatcattacatgtttttcctaaaatttacttcgaagttttccttctttcttgcttcaccgaacaagatttatttaaatcctggccataatgacgtttaatatgtgagtgctcttgtaattaatacaaagattactgaggtgcatgaatgatttactagccactagctgaactatcatgtattcacgaaggaaggcgattaattatattcacgaacgaaggtggttaatttatgggacagatgtattattattcttctgatca

SEQ ID NO: 46034 - DNA, 322 bp, Oryza sativa
agcttctgcagatggaaaacgacgactaatctcatgaggattctcccaggtgcgaactgcatcatcatcacccgcccactgcaccaggacctgttccaccatcttggcacctttgcggatgaaacgacgctccagcacatgaacaggttggggcggatcggctattgtcggacgaagcacaggcaggggcgcatgaacgtgttcaccaggagccaatgccttcttgagttgagagacatgtataactggatggatcaaactggtagcaagtagagccagtttgtacgccactttcgccacacgctccaacacctgaaacgga

SEQ ID NO: 46035 - DNA, 402 bp, Oryza sativa
  unsure (1)..(402): unsure at all n locations
tcttggatttggctgacaacaatcttacaggaagaataccgtcaggatcgcaacttgacaccctctatgaggagcatccatatatgtacggtggcaatagcggcctctgcgggccgcctcttcgagaaaattgttcagcaaatgatgcatcaaagctagatggacaggaaatagctgagcgtgactttgatccaatgtcctttggttttggacactgtttggggttcgtgttcggtctatgggttgtgttctgcgtcctattgttcaagaaatcttggaggctttgttatttctgcttcattgacagaatatacgatcagatatatgtctttttagttcttacatgtaaaagaatttggcagagggtgatctgttatgtanggttaaaaagcaaacattatg

SEQ ID NO: 46036 - DNA, 420 bp, Oryza sativa
agcttgcagaacagagtaaatgaataaaataacatcttcgaacaaaggcgacatatccatttgtgccaacaaacctccaagtcatcataattccggaaataatcatactgcccaggatgttgcctgcaaccaatgaccaatcgtaagttagaatatcacatagcgtgttagtacaatttagctaagggtaatgaggtacatgatgatacctttgacatatgtgacatgaatagtgttctcgggacatatgtgtgtaaagctcgttatctccataaaatgaacttctgcagaactcgcacataggatgtcctgcaaaaccactgcgctcaacctcagagccatccacctcagagtcaccagtttttacatgcctgattaactgtgtccttgtataaagcttctgttcacaaatgaacacct

SEQ ID NO: 46037 - DNA, 372 bp, Oryza sativa
agcttttccggtgtaacaattgtgcaccatatgccagtaacgcattgcttctacctagagcataacatggatactttctagcttgacgaaatatcgtgagttcttaagtatacgaaaaatcttgtagtaaatagcttacaagtaggtgtaaaatcaacaatatgaatccctgaaaacaagagcaaaagaacaagcctcagctcatacaaaaaccaacacaacagactgcagcttccactaagcccctttttttttctttgggtaagaacaaacaaatctcttagcaagacgcccgaccaaatttactgaaacgtctgagccccgctcctctcccaaaatccccaaatcatgtcacagctagcagaaacaagc

SEQ ID NO: 46038 - DNA, 339 bp, Oryza sativa
  unsure (1)..(339): unsure at all n locations
taaagctntcttttgcatgtaatgccttatggttctgtttcacaatgtatatgggcactataaaaccgtatggcctcttcttatagccacattcgggctgccctaattaatccataattagcgtatgtttactgtagcatcacataagctaattatggattaattatgctcaatagattcgtctcgcgaattagtctagggttatagaataggtttttattaatagactacgctaaaaatttataattagcgtccacacatctgatgtgatacgactaacaagttttaagtccatctaaacagggtctttgtcttccaaactctctcctctgtctgggg

SEQ ID NO: 46039 - DNA, 406 bp, Oryza sativa
  unsure (1)..(406): unsure at all n locations
agctnttcaaatcctataaaattcctatgtttatgacacattgtatgtagattttggaggaaatatagcaagagcttcaacctcttgaaaattttcctttgagtctatttctctcatccgatttctgcgtttttcatgcgctccaatcaaacgaccattcctgtgtttttcttgtgttttgcaatcctctgttttacacttcaattcctatcagaatcctgtgtttttcctattcctccattttttcaaccctacgattcaaatgagcccttaagtttgttcaagtttatagaaaaaaatagtaacatttttaaccgaagacaaatttattatgaaaatatattcaattatagaatttatgaaaactaattgagtattataaatattactatatttatttataaac

SEQ ID NO: 46040 - DNA, 438 bp, Oryza sativa
cactgattatcggcaggaatcacctccaaatttgatctggtgtaaaataacgcgtgacccgttacaccacgaagaatcatcaaccttgcatcaacgtatgtcccacaaacaatttttgatatatcaaacatttctggcggggtctgagtgcagatctcttgcagcaccctctgcgcaaaactgacatgtatatgtcgaagctgcagcgtcattgatacgtcgagttcatccatggtaatgtttactgtggggaggctagcaagcagatctttcatttttgaaacttttcttcacttaccacgaaaggatctcctagaagatcttgtagatgcaaccctactatcatcaccatcctgtcgtgaatataattcttcacgttgctatctccaaataagtaactattatgttcctcgctccagattgtcttgagcaatatat

SEQ ID NO: 46041 - DNA, 359 bp, Oryza sativa
agctcgatatatttaaatagagtgatattcttatttttagggcagatataacatgaaaaactagatggaagatattaaacaaagaaaggcaatcatatcagttaagatcagctgaaaccctgattctttccctatttgcaatcaacggtaccggctatgattctaaacacgacttagtaggtcaaactcaattgatgcagcactaagtatggaaggaagcatataatctaaacaatcaagctttttattggattttagggtggtggatatcttagctaatctaaactgactaaacgatttagccgatactagcaaaaccatacaaaaggcttggccgatgcaagtaaatcgagtcatcg

SEQ ID NO: 46042 - DNA, 291 bp, Oryza sativa
attcatttgtgaaacaataaatcagcaactcaactgaatttattagtctcacatctaatgtgcaatatatgccatcagtccacattaactcgatatatgcccttatttggccagtgaatatcatgtttgagaacagacagaaattttgatcaagcctgaagtccattcaagatagatcttaaaaataatagctgatatagattatgaaatggacttctggaacaaagtaatttataagtcttgataaataagatgatgcagtaatctgtaatctcacatatatgaaaaaac

SEQ ID NO: 46043 - DNA, 416 bp, Oryza sativa
cctgatgcatgcaagcttgagaaacaattaatttatgaaagtactaatgatactttattattagcgcataaaactttaacataatattttaataaaataaatacaataaattgaaatcttaataggacaatgcattcataaaaaacaaggagcatccataaaatattgtcgtgagcattaagtgccctatctatatatgaatgctccttattctttatgaatttttaataaataaaataaatacattttttattataaacataagttttgccataagaaatgtgttgcacagcaacctcataattgtgatagtctcatgcgataaacttttacattttcaacaatgtaatttacaagacaaggaacaatatagcaaggaataaggaggaaattgaggagattcatgaaatccattt

SEQ ID NO: 46044 - DNA, 220 bp, Oryza sativa
aaattgtacatttgtcatagcgacaaaacattatcatatgaagcacagactcaccgtatatctaccatggcattgctgctggaaacatactcttgcgtttcacatcttttcttcttttttgcgatccgcccagaactaaattgccagtgtatcttgtcctcaccaataaatactatatttttttctttaagaagcctagagcaaatacagctattggatc

SEQ ID NO: 46045 - DNA, 449 bp, Oryza sativa
  unsure (1)..(449): unsure at all n locations
ctcgtcgccgggacctctgagtcacctgcngcatgcaagcttgatcaggtttcatcacaacgactgtatagtgttcaacacagcttanaaggctctcctaaccacaaaacatcatcaccccactctgacaacccaaccaaacgtctttntttttctgaaatttcgtaccaacatacaacggaagaacctgagcagtgtcatcagcagtatgaagtagttattcccactgaaatgaaatcaatttaacatcatcgcagtatcaagtctaacatgatcacagagtctgtactaaccataacaatccatcagtggaatcctcactagaaatgtgcaaatttccagcaggagcggcccgataattgagattttccagccacagacctaagattaccaccctaaatcttctaatcgatgcgcataaggcactcgctgtaacctaaccacattcc

SEQ ID NO: 46046 - DNA, 463 bp, Oryza sativa
  unsure (1)..(463): unsure at all n locations
tctccaacagaaagtcctatntccttgcagatagttcttccctctatcataaaacctctctntgtgttgtctcctggagacacacaatgtccacctctttctgtcttaacaactctctcaactgagcttgtctggcttggttccccaaacctcttacattccaaaagagaatcttcatttttttcctctgttttttaagtccacctcttcttctattaaactcagagctcttatcttgctccttatcaatgtgttcaacctctaaaatatctgattcatctttactgaccaactctttttctccctctttagtactgatttcttccatctttttcttccaatatagctctactaacctagcatgaacaatgtcttttgctctcatagaatcaatgttagaattaacctcttctacagacctacctaactcaatattagctgcagtagcaatactattcaactc

SEQ ID NO: 46047 - DNA, 399 bp, Oryza sativa
agctgagaatgaagaacagtgcgtgattaatttcttattgtatcgtactttcgttgcttttgcttggttctgaatcttcttccctctgattattttttttctttgcttctcccagttttcagtgatgaagaagctgcatctgcaagtcagtgtcgtggctgatctcgtcgttttaacactaaccgacggcgatctgcaggtttagtctagactctagagggacgtgccatctctcgagagcgtgtgtgtgatgaaatgttgctttttggatcttgctggcttgatttgggccttaatctaatgaaaaatcatcggtttcttctctgatcgtttaatttcaggataagataatgtgtggttcttgtagctgatgataagttgcaagggcggcgtggtgtg

SEQ ID NO: 46048 - DNA, 422 bp, Oryza sativa
  unsure (1)..(422): unsure at all n locations
agtctntctcaagtgctcgatcggtgctnttctggtgttttctatataatataacacttttgagaacgtggcatatagtcggtgatcctactttcatatggcccatcctagcccgccctatgtcctgtcgtgccctggccaagatttgtcgggccggcacgacccgacctacacgtcggctcatgcagtgctggcccacgtgctccaccatgccggctcgaatgcacgagcagcccatcgtgttttttttgaaataagtctatttaccctccatctctttcggctgtgacatatatatagctaaaataagtctatgttgcgtacctactctttgggccgcgccatataatatgtctatntggtctctctattctttgtgccctgtcttacctatggtngaaaataagtctatttcacttctc

SEQ ID NO: 46049 - DNA, 380 bp, Oryza sativa
  unsure (1)..(380): unsure at all n locations
agcttaaggagaagcttgctagctatgggtctaaaagatcgatcagagataataaaagcaaatgttgcaaaatgctaatgatgaggtcgagcccacgccggaccaccggccgccacggcctcgacgactgttcttgtagccggcaccggcgaaatctagctntgctctttgcctcttgcatgtttatactccttttaattaggtttcacatgtacgtactctatatgaaatatccaagctatgtactatactagcaaaagtagcaaggcgatagagtgctatacgatcgaattgctgcttctgtttccaagtacggagtaaaagttaacctaattaaattagtgaattctttgtgcactaataatggatcgactacggac

SEQ ID NO: 46050 - DNA, 346 bp, Oryza sativa
actaagcttatttactactactagctagcttatctatctactggcattctggcaccaccaccagctcccggctcctgacaaaccgaaccatccaacacgtacacgtacacgcgcgtgcgtcgtcgctgcatgcgacaccgggcgagtgatggcaacgtccggacgtctggtcgtaacctgtgcatgccatgccaaccattctgtggatggaccggatccactgctcacgtcgacgcgacgtatcgtttccaattgaccgcggcggcgtctgtggggcgacgacgagaacgtaccatcgcgcgcgcgcgcgttgcgcgggatgaaacgagacgagatgtcgatcgct

SEQ ID NO: 46051 - DNA, 406 bp, Oryza sativa
agcttggcccggccatgcgtacatgtatgtttactcttcatgtctcaatacactcgtgcgtgcagcctgcagctagctaatcaaactcacactagctacccaaagatctggcagagttagctagctctgattgggactgcagtgagaaaggatcgatttaggtaagttgacatgaaaacattacacatttacacggcgagaaaggatcgatgagatgttataactagttatatatgccataaaaattttaaaaccttttacaacaaaaaaaaaccattgtgatcaaattagaccatcagtataattcccggcccatgagttctattaaggctgtctattttttcagtcgctagaaagtgtatatatacctataagatgatatatatgatggacaaattctcttaat

SEQ ID NO: 46052 - DNA, 455 bp, Oryza sativa
  unsure (1)..(455): unsure at all n locations
taatgcacctacatgaattaaaanatttgttcacctaccttctctctccatacaatgtcgctccactctcttccacagtttttaaatgaaaaacatagaaaatttggagtatttaaatcctttggaaaaattctctttacttcccacttctttcctctgtttagtcttttatgggtttgatcaagtttataaaaaaaatatcatatttccaacacaaaacaaacatattattaaaacatattcaatattacatttagtaaaactaatgtggtttatagatattgctaaagttgtctataaacttagtcaaaactaaacaagtttggctaatgacacggagagtattaaattttagtaagcaaaacagtactatctgctagcatggttcattcaacaaggggtagcatcatcttcgcgagttcatagtcgtcgtgagaagagtcaagtgacatgat

SEQ ID NO: 46053 - DNA, 403 bp, Oryza sativa
  unsure (1)..(403): unsure at all n locations
agcttagtgtcctgccagttgagtttttgttgttagggacctacagatagtatgctacatgatcagtgatcctgagcaaccttgtgcatcttttttcgaaatgcatgcttacttcatgaatgcaactattattaccatcctcgtggaccttcaggatatagtcctgcttttactagtattgctgttgcatggcccattatttatttgtcatggaattaaatttgcgtgttgctttgatcctgaaaagtattactcccttcatttcaaattacttgtcgttctagctttgtccttaaacatgtatatctttgaccatcaatttttaaaaactcatatnggttaacatcatatgattnttttttagattcactgacaaatactntaataaatacaactcatattt

SEQ ID NO: 46054 - DNA, 338 bp, Oryza sativa
cttaaagagaagatctaatcttaatttgtttaatctcaatattaaatcgggctatataaaatattgttaaatactttgcttaattctataattcctagatctttctgggatttatttgagctaatggagtattgttaataaatggaattgcatttcatgaataatttaaattgaaaaagggttttaaaagtcttcttttggctttgggccgaaagtcggaccaaaacctctcttctctctctccctctgcccagttctgcccagtccgccgagccgtcgctctctctctctctcccgctgacatgtgggtgccacctgtctggcctgtcttcctcctt

SEQ ID NO: 46055 - DNA, 401 bp, Oryza sativa
  unsure (1)..(401): unsure at all n locations
agctngtcatcctagatntccaccccttctcctctgtttcctcttccctccatccacctctcctgtgctccaccattctcattaggcccttctagtataagaaaaggagaagcgacagtgacaatggatgcacctgcatccttaaccccaaggtaaattatccatcgtgaagcaattggtaggtcggtttctccttggcaccaatgagctcttaataagaaaaattgagtaagataagagagtgctctaggggcaagagcaaaatactccctctgtcttatagtccaacgaattcggatatgatacatgtttgtattcattgtattatgtagcgcactattcgattttaagttgctatattatatgatggatggagtagttcttcacatggctattttaat

SEQ ID NO: 46056 - DNA, 394 bp, Oryza sativa
catctggttcctgcctaatacttgacgacgacaagaaccatctcaccgctagtactattctactgctcgtatggccctatctaacacacatgttcgcctcatgtgtttttgttaccgcgaatggacgaatcaatcccaagtgtattctactactccactcgatgatgaattcttgatactcatagaactcatcactcatcctctgtgtatactatctcatctcatccgtgtcaaataaaagttcacaaaaaaaatccattcgagaaagcaatttcatgctgtgaatggcatctgcaattcaatgaaagttactttctcattatgcataagatgatgattttcctgagcatattccctgcagtattgattgaagagggggcacgatgggtcctca

SEQ ID NO: 46057 - DNA, 400 bp, Oryza sativa
  unsure (1)..(400): unsure at all n locations
agctntgcactaaatgatctctttggactttatttagattccattggcaaccttgcccaactaatcgagtttcatatagatgggaacaactttagtgggagtataccatcaagtttatggcactggaagcatttagagaagcttgatatctctgacaattcatttttcggatatattccacctgcagtaggaaatctgagcagcatacgcgatctaatatttgcaagaaataatttctttggacatattccatctaccgtaggaaatttgagcaacctctctattctaagctttgcacagaataatctctttggacatattccagagttcgttggcaatcttgtcaaactaaccaatctttttctacatggcaacagcttcagtggaagcataccttaag

SEQ ID NO: 46058 - DNA, 465 bp, Oryza sativa
ataacttcacaatctattggcctctatcatggataatgtactcctcagctggtggataaatacccctattcaaacaggatttcatcagaacaataaagaataacaatacatatgagcaccgacattacttctatttatttcactatatgtgttcaattgaagctaaatatgatattccaaccccacatcctgtacatggtagaggacatcattcttatttcatcagatgctttcaattaaagagaagaggaaagcaaaccttgacgacttgtcccatgcatggaagagagaactggtaaaactttcacaaaagaacatagtgtttacttttacgaacataccttttgggcgcgacattagcttctacattgagagcaatttgccagtcttcaaacaagtttgggtactcgtcatgatctgccaatgattctgctgctttggggttacctataaagataatggcat

SEQ ID NO: 46059 - DNA, 392 bp, Oryza sativa
  unsure (1)..(392): unsure at all n locations
agcttgcgcagggcgctctaaccctagcttctccctcctctataaataccgncggcccccgcccccttttccccctttttttccaaagccgccgccatctccaccgtgagcagccgccgccgggagccgcgccgttatcgtcaccgtcttcctaccgcaccgcagccgctggtaaagccctgaggccgagcctcttttccttccgcgccgttttcctctctcctcaactccggtgtccgccgctcgtcattgatgggtcatctccaattcgtcccggagctcggtgctgcgccaccggattcgcctccgcctcctcttgccgacgccgctgctcgtcactgcagctgcgcgccgtcgccggagaacgccgccgacgtcgctgtgccggagtc

SEQ ID NO: 46060 - DNA, 383 bp, Oryza sativa
agcttgcaaaggctagtctaaagctactatttttagcgaggagcagctataagccccatgaggagcaaggtaataaaggtaatgtacaattggcaacttattcaaattctatgtagaaggatatgttgtagacatagtactgctgtgaaataaaacatgagtagcaacccttgatcaacaacctaagtttaatctttactagggatgagcaaaggtttagcttgggtatatcaataataaataatgttgttgtactagactagcagaattaacatggatgtagagaagatacgttaaagtgaaggagaaatgaagccgcgatgcaaggaaacacacttacggcgaatcatgtgcgagaacatggattgagtggcccacaagtc

SEQ ID NO: 46061 - DNA, 385 bp, Oryza sativa
  unsure (1)..(385): unsure at all n locations
agctnttattcgccggccgctacccttctcttatctcagnccctcatcttgaggctgccacgccactactgctggtccctcatcttgaggccgccacgttaccactggtcccttattttgagggtggcacgccgcggcatccatcacttcccatgttcgcgatggggaactaaggagagatagagagcaatattgggggattgcagatggagttcgaaagagagatgaatcanagatggagatggagagagggagggggataacactaacatctatggcctacctatgtcccacttgtcacatcagctaaaactgtggactagatttcttggatccttatgtacaccgattctcaatgtaagataccggttatatctcggatttc

SEQ ID NO: 46062 - DNA, 455 bp, Oryza sativa
cttaacatctgttcaaaaacagagtgcacataaacttgatatagttagacattaagaaataaaaaagttattctaatccaaaaggagaaaatgcaaattaaatgaaagaaatatgtggaagggactgttagtgttacataaaggtgttgcaaagctagcattaccttatagcactgaaaagaacttaagtgcattttcttttcttctctataaagcatgaagatgcatatatatctagtctattttaagtaatcgtcaatggaaaaacattgtgtgtgctcatagttaaatatatattttttatcattaagcgcaattgctatatgtggatgattcaaactaatcgtaaatggcatgaggacaaatattagaacataaacatagtatacactactcattggagctagaatttagaacaacattaatattatgcgtgattcaatggattacacata

SEQ ID NO: 46063 - DNA, 414 bp, Oryza sativa
gtgcaagctttgatggcatattggcatgataatatcatatgtatcacagtacacaacagctgataacaacctcttttcttttctagaaataggacaaattgacaatggttgcatcggataaaggaaacaatagagaaacaaactttaatgccagactcgtatgttatgacctatgatttcactggtcatgctttctgtgccttggctagtaacgcggatgaggtatttctacagaaagtatgcagaattgcagagaatcgagcatctgattataaactgtccatacgcaatgatctgctcggtcattaccatgaactgttgcttgatttcgatgaaaactggcgatattactaacatgtgctacatcatataaatgttatgccaacttcaccttggcaaatagtgctcaatcat

SEQ ID NO: 46064 - DNA, 96 bp, Oryza sativa
tgtgcttagtttctttgagctatggcattgctgggccaatttgtgctggatatgtgatgcgaactgataataagatattatcccacccttagtttc

SEQ ID NO: 46065 - DNA, 407 bp, Oryza sativa
  unsure (1)..(407): unsure at all n locations
agcttcttcatacttcactttatcaccatggtcattcatgctataactgaattctgtaagcagatttgtttcactgttcctattactaggtaaatgcttggtggcattttgcattatatgaaaagtgcatattccatgccatgcttctgtaaatacatgctcaattgcctttcccattgcaatatcttggtctgtgtatatagttctaggttgcttctgattatgtgttgccagaaaagtatcaaaaagttatttgaatgactcaaatgtctcatcatataagagggcagcaccaaaaataacagtttctctaaaattattgaatccagtgaatacaccaaatggcctatactccttgtntgttccaaaagtagtgtcaaaagttataacatcatcaaaatgagcat

SEQ ID NO: 46066 - DNA, 432 bp, Oryza sativa
gtgctgcagaagtagctacacgaagaagacgatcacacggccatgtgtggtagtgcgtttttcacagaaatgtttatgtaattgtaggatttttttttctttagattctttttgctcattcatttttcggcttgccggtatagaggaagtattgacaaaatgagaataattgaaagtttatgtggcaattgtttgcaaaaattttgtttggttatctaaaggtatgtattcccgaaatttgcatccataacaagtcaagtccaagattttacataacctttaattatcaaatcaacataagtgtggtgatgaagtcgtgctgcatgatttcacacctaatggttaaatcatgatgaccatacaaattcagtgatgtcatttaagatacacgatcgatagatgtatcactaatttcttgctctttaaacttat

SEQ ID NO: 46067 - DNA, 338 bp, Oryza sativa
agcttgacggcggcgaatcgcggcggcgtgttccttctgtgggaaaaggggaaaacggcgacgtggtcacgaggggccgattcccggcggtgagagcatctacgcggccacgggaatccgatgctagcgtcggattgggcggagctacgccgagcgaggctggcgacgagcgggtgctactgagctcgaacggcaacggcggcgagcacacggcaagtgatggcaacggtcggtgcggcgccggctagctacggggaggctactcgtgctaccgacgaaaactaaggggaggagatggagcgaggaggaagaacggagggaggcactaccgtgcgggc

SEQ ID NO: 46068 - DNA, 406 bp, Oryza sativa
  unsure (1)..(406): unsure at all n locations
atttaactcattcatgtctagcaatatatatgattatctacatctcatcaattggatagatcagtaatactcccttcctttgttaacgacgttggtcgttagttcaaagatgagtttaccaacataaaaaaaaccggagggaatattaattatatccactactagaaaaagcattttcgcagacttggttgttttccaaacagatatgaccctcggagctaaatggccgcctacgaaaatgtagaccggagtgaagctcgccgttcgcctgtgaagatcaatttttccaggcgaaccacttaagaagtccgcctagaaaactatgaattttgcatgcggaaccttatgttgtccgtttgcaaaaatcatgccacaaaanaaatatctaagtctcatccttatcatc

SEQ ID NO: 46069 - DNA, 430 bp, Oryza sativa
agtcgacctgctgcatgcaagcttatcactaatgccaccatgcgcttctgtcattcatctccagtgttcccatctctgaaaaaaaatcgaacagcattggatcaattccaaaaagaatcatgaagacaagctttatcatctagaaaatggagctttaggaaatgactatacataaagttcagaaatcaacccagtactgaaaattggtcttaaaatcaatccagtactaccaggccaagggtatagggtcccaagaaggaggaggctggtcttctccaactctaattggtggacatgcaatctacaaagcagacacaatttacattagtaaaattaaaatatttctaaagtgcaaggccctatatgtgctagtaccaataaaaattgaaataattttcaattgagatcaaaccgagaattttcaattatg

SEQ ID NO: 46070 - DNA, 391 bp, Oryza sativa
cagcttgaatcgaagtgtgaaggaccgtacctcatcaagcacatttccatgacggtgtcctttcgcctagcgacactagaaggcgaagagttcaatcgttcctggaacgctgcctctctcaagcgtttctatgtgtagaacgggtggcacccgaatcgccaacttgtaaaaatgtacatattgttatgtaagcctttcggcactatgtatgcctgtctgcacgaatatgcaaaaaaaaagaggaaaatgaaataagacaaaaaaaactggatgtagggctattatccatcccggaggcccgaaccagtataaaatctttgtgtttttcgccttactatttgtgtgattggataatttgtgggaaaagccctaaggcaaacgcctgatcagc

SEQ ID NO: 46071 - DNA, 398 bp, Oryza sativa
  unsure (1)..(398): unsure at all n locations
agcttaagcactacttacaggccttanatgtatattcccatcacagtactccttgggcgaaatactccgaggcaaggaagtcactggccagctcagcaagtgggcggcagagctatccccgttcgacttgcattttattgcacgctctgctatcaagtctcaagtgctagctgacttcgtagctgaatggacaccagtacttgcccccgaccccgagcccgatgaccagttctgggtgatgtgctctgacggttctgcaggcgttgcggcagtcctctattcgccgaatggtgtgtcgatttggtacgcggcgagattgcagttcgacacaaccaacaatgcagcagaatacgaagccgttctcctgtgcctaagaaaggcgaatgcactgggagtcc

SEQ ID NO: 46072 - DNA, 346 bp, Oryza sativa
  unsure (1)..(346): unsure at all n locations
atttgtccatgatttgcgtacgatgtcctttgccatatgatttgggactgcccctttttatgcccagattcctcatgatcgtcacgaagagaagtgccgagtcaaagtcaccttgaacaagaatagtgaagatatcccctcagtgatgttcgaagctggaggaagaaactacttccatgcatgtcatgaggtagcaaggatcgccatacgagagttccgcgatcgttacagtgatcagttggncgacactgagtatcgctaccatcctcgtcaaccacagggaagtgaccgtggcagctaccttgagactgaatgaatngagaatgatgcctccacaaggcatttg

SEQ ID NO: 46073 - DNA, 401 bp, Oryza sativa
  unsure (1)..(401): unsure at all n locations
agctnganagttagcatgcttctcanaagtaaatatgcttaacgttnttttctttttggcttttacaaattcaaagaagtttcttattattacaattttttgtccataaataatcccagaagaaactctgctttaaaaccttaatttactctagtttaaaaccattgagatgaatttctgtgtacatgttggtagattctgggttcctctgatatcttaatcctgngctcctgaagataagcttaatgaagttgcttaccaaaaactaaagatggcttttgacaagctaatttagcgtgtgttgttttctgagagtgctgatgtnggatgttgttatgtacacaactacacaagcttttgtatgatatacaccaacaccccatgatgcttataaagaattc

SEQ ID NO: 46074 - DNA, 393 bp, Oryza sativa
  unsure (1)..(393): unsure at all n locations
agatcctaacttttctctctcgataagttcgtatacttctaaccacattccctcttctatttatacccgaatcatggctgctgatagctacagatcctactaaaacttgggcttctaatcacataagaaacctaccaaaaaatgaaacaacatcctcatacaattccaaactccattcttaccaaacttttcaatccaattgactacattttccatacgcagacaacaccatgttaatgcagggtttaacttatcgatttgaccgattgtatcagaggtcaccgatagaccaaaaatttcaaaaaaattgataaaaaataggttaattttaacaaaaattaccaaaattcatgaaaaattaanaaatttgcctaaataatattgtatcggagt

SEQ ID NO: 46075 - DNA, 404 bp, Oryza sativa
  unsure (1)..(404): unsure at all n locations
agctngagtgtgtgagattngagctgcctctacctagtagntgataggagcgtgtatattcttgtgtatgtttcttgtttgctgctaaccatggcaggattgcgcaaggggaaacaagatggtcatgctcaatgtcaacatcttcaccatcaacgagatatagcgacttcttcacgcatgatacatgataatgatcttacaagggtagaatctaaattgcctagttttgatggtaagtatgattccgccgcttatgttaattgggagctagcagtagaaaaacaatttgatgagtatgatttttctaatgctcaaatgattaaggctgctagtaataagtgtaccggttctgcatctttttgatggcatactgtgggaaataagcttgaaactcgtgatgaatg

SEQ ID NO: 46076 - DNA, 469 bp, Oryza sativa
  unsure (1)..(469): unsure at all n locations
atactaagcttgcaaaccggttcttcagctatgatatgataaatcatttttatcagagngatgtangtgtagattgatggacctagaagatttagaacagtgcatatttcgaattttaggaaaatatgaatatgaacacttttcttagaatgacagtaagtgaacatattgatttgataaaatattatagttacaccgtcaccatcatgctcaaaatgaagcaacaggggttgtgccagcaacaacccttccctaagcacatatccctgtgtcatcggtgtgccgattacaactggaaaaaaacaatgagcagctgcaatgctcgcgccacttgatctaaccttttttatgcagtctactccatataagttgacgtaaaagcagggtttcataaaccacttgaatttacctataatactccccataatgaaaaacagtacccaaatgtgtccaaacaattgatgtattt

SEQ ID NO: 46077 - DNA, 400 bp, Oryza sativa
  unsure (1)..(400): unsure at all n locations
agcttcacgaatcttcgagaanacttcgtgtttctatttattatccggaaccgcaactatacgcaaacaatctaacacctacacacggaccaaaagaaagatcctatttagactaaatagtcgtgccattatatagatctcaattttacggaaatactggcagtggaacggagtcaatcagatgagcggttgagaagatatggattctctaaagattaatgaaatgtctggcccgaacttatggaaataatattctcaagaatattattgacagtcactgaccaaagaaaatgattcatgagaatttcggaataacaattgatttctgaacgagggaaaaatgatttattgaattcatagaaaagagaaatatttgtggaatattggaaaagatcttctc

SEQ ID NO: 46078 - DNA, 471 bp, Oryza sativa
  unsure (1)..(471): unsure at all n locations
acacttaaatactaacttattagacagcttactcttgtgatggttntaacacaattgttttagatagataaaactggactgaccgttcactttatgctggatatgctaccctatagtacaagtaacggaaagtggccacggaaatcaacaaatcactagcattcttgttaggatcaaggcatggagccatggaattacctattaaaatattaataccaatatgaaaaaatatacagtgagtaagagatcatatggtgctgtgattttacaccattaaaaaaacaatagtacctctgaatgtgcttgaatgtagttatccaaaacctcaccagcttgcgaaattatagtgacaatcagacatttacatttcataagtgctcttctttcctacagcagcttctgaccctctgcagtatcacctttatcacacactatggaatcatagtcctcatatatacgttgcgcgataat

SEQ ID NO: 46079 - DNA, 400 bp, Oryza sativa
  unsure (1)..(400): unsure at all n locations
agcttcctcttgcatcaatggcgcttttcttcnttttcttcttcttctctctctatcctctctatcacccaaaggctgcctgtctcttgccagtgggacccacctgccagagaagatcagaccggaatccgaggccaggatgatttgcctcgaaaattgtgctctcagtgttggacgcttttggagttctctcccgtccgtagcatagatcgagcatatgggttcggttcaacaagaagcttccttgaaatctctgcatctctctctactttatctggtctctctgcatttcccatgcaccaataaagagtgcttctactgagggcctgtntatgtggtaaaaaattntgccctttcatatcatatcacatatacagacatacattgaaagtattaaacg

SEQ ID NO: 46080 - DNA, 295 bp, Oryza sativa
  unsure (1)..(295): unsure at all n locations
ttcttgttaatgctttgattgctaaagcggagaacgtatatctgagtgctccacccaagattgtgatcattgaccatgacaagaagagaacttttgagtttatgaaagaaggacttcctgatgttggtaagatgctaatttctggattacacagcacggntgttctggtccttttgtattgcttacttttatgtgtgtgtgtgtgtgtgtgtgtgtatttgccgggtcaacaaataagccacccacaatgggccttctgtatatatatgtctcgtcagaatacttctttntatgc

SEQ ID NO: 46081 - DNA, 400 bp, Oryza sativa
  unsure (1)..(400): unsure at all n locations
agctngatactctctttttatagtccgcgttattatatnntcaagnagattaattgcacattacactatctattactctatagctagcaccaagtatcaaagaaccttatgataggacagtttcacatgactccgtctacactaattgtggagcaatttggtgcagagaacatctctcccaataggcgtcgagggaaatatccagcgaaaacccctaaaagctctctaaataaatgaaaatattacagatatagatataggcaggaaatccattaccatcaaatctccaaatcttaagtacaaacttgatttgngagtaagaaaaggataaattcaaggtgaataaatcatgatgaatacaaatagaaagatatattataagtaactcgtgcatcttcct

SEQ ID NO: 46082 - DNA, 403 bp, Oryza sativa
  unsure (1)..(403): unsure at all n locations
ctatggtaataatggtatatgtggggctggtttgctnttttattctaaatngaccntacataattttgtcaatgtcaaatatttgtaagttttggcatggctaatcttggcaaggtaaagttgtgtttggactgaaaccaaaacagtttcatttcattattgaaatggcctatatttttatgcatgccaaaatttggtttcaaaccaaatagacactaaacactattgaaattgtcaaatattggcaatgccaatttatgccacaaatcttaccagcccatggttgtttttactccctccggcatatataaaaccaacctagttccagatgtgacacatactaatacttgaatctatactacatatgccagatccgtgtttatatattgccatcaatctagat

SEQ ID NO: 46083 - DNA, 400 bp, Oryza sativa
agcttcttggtgtcagcttgcaccctcactctctccccaatgaccctgagagagacgaacatgaaagcaaccacacacaatttagtcatgattcatcaattaatcaagatgaattaatatgtaataatcaagattttttttggtcacacgtactctttgagcttgatctcgatctctgggtacttagcggcgaagcggtcgatgtagtccttcatgttggggtacccggcggcgcagaggaagcggccggcgatggacggctgatccatgcagaagacgtgcgcgtcgcagacgtcgtcgatgtgcaccagcggcacggagcccatcagcgcctgcagaaacttgatgacgttgtggcagatctcgtcgccggtgagcggcgacatgatcaccgggatgg

SEQ ID NO: 46084 - DNA, 384 bp, Oryza sativa
  unsure (1)..(384): unsure at all n locations
tcaacaaatagctggattttcgctgctatctttntcaatgcacttggcaagtgctgaaatcatgtatacttatcattttttttgttttatttggtcagaagaggcaacacaatttagctatcgccatcccaagcaatattgagttttgcaattaattaatctcaaaaagtaaaatgttaattggcactaaaccactaacccacccactgaatactactgcatttagcctctctggctacatttgaaattttttgatgattgccatgtttagatatcagctgaccatgttatcaaattggtttccttgtagcatataccgtactaaaacggttctatttacgtgcgggatgtataataaatgggcttatttgaccctgatatgct

SEQ ID NO: 46085 - DNA, 409 bp, Oryza sativa
agcttatgttgattaaactatcttacacattatttttctttgttgttatcattgcaaactcctgcagtaacgtgcggggtttcacctagtattacataatttcgtgacaaccgtcaacctgaaaaatgtccgaagcccacgtttgactatgggaaaattttttatataaaaaagcaaaactctggttttttaataatataatagggtggtgttttaggagtgctggaactagagttatcaaggctgacccagccatcaactttctggaggtctatgtcacatgtccaacagctgggtatttatttaaatattgaaataaattaatgggaggaagtgactatttatactttgcgtaaggacttattatttcactacaaatattgttggatggccagcattacccaatgaa

SEQ ID NO: 46086 - DNA, 347 bp, Oryza sativa
  unsure (1)..(347): unsure at all n locations
aagtcatcactattctntgaacatgttgttcccaatggggaaattattttgtttacaaataaattgcatgcaatgatgaacatcctacttgtgattatgccatgccttggttcttgtttaccccttatgcctttgtaaccatttacgtatgagtccctactcagttatgacaattgcttagaaatgctattctagaatcatgcatactcatatttatcaaatgctatatgcttgggcaattacctttgggaaggtaattgagatgcagcatgtggggacatgagcgccacattgccatgatgttgatgacatgtattgtgaaaggagaaatgaaattaaacaactat

SEQ ID NO: 46087 - DNA, 401 bp, Oryza sativa
  unsure (1)..(401): unsure at all n locations
agcttgcaacttctcattatatgaagctcttgttgttgcatatagttctatagatcgttagtgattgctcctactatgtaatttagttgtaaagaatcttttatttctgaactgaacatttgaatatggctcttctctacactggcaatatggtatgggagaagggattcacagaacaaagtcaaggagaaggagccatcagcgtcagttcagaaatcagaagctagcagaaactattcccctcttcagtgtagctagcagaaactattcccctctccagtgtcctttctaccaaaatttgcatcagttttgcccaagcgctcgctcgattcatgtgaatgagtttgaaatagtatactgaatctataatgtgttttnttacccatgtagtaaggcacaat

SEQ ID NO: 46088 - DNA, 438 bp, Oryza sativa
  unsure (1)..(438): unsure at all n locations
gctgattaatatgtcaagtcaaatcatccaaacaaccatcttatcaatgttatgtttaatacataacttctagtgtataactgttcattcaggccgcgtcctatatgatcaatcagtagctatcaattctcagcatgttgaaatcttcaaacttcaaacagtacaaaattaatagatgctgatgaattgagtttgacaacctcttacaaatagtaatcttacatatgagcttggactacgccctcgctcatatagtttttntagataatggaaactttatttagactcagtttattacatcaagatgatacaatcaaaccgagtcacccccgggctctgcattaaatgcacacacgcaaataagatgaaaganacaactagaacatcttccaagcacaaaaagttaacagaaacatatatcttagtggctattataat

SEQ ID NO: 46089 - DNA, 397 bp, Oryza sativa
  unsure (1)..(397): unsure at all n locations
agcttgagggtcggctcatcataacggattttgtttataatggacgtcctantgccccggccgaatccgccaagaactatgtacgtcacagcggttgggttgtgcgggataacgtgcctgtcagtacggtgtactggcgataaacaagtgcacgcggagatcatgagagctttgtcccagattcggagaaagagatgctgtggaccagaatgctcgagacattcacccttcctgcgggtacagaggacaaagtgaaaaggtggactctgaagaaaatggcagaacagtttcagagcttcaagggagatctgtaccagaagtatatactgaaggggcagacaccgaacttcgacacattcccaaagctaatggatcactgggacgagttcgttgcata

SEQ ID NO: 46090 - DNA, 397 bp, Oryza sativa
cttgtatgctgtgaataaataaaattccaaagtattgggcattcaccatgtgcacatctttttaacaaatgtgcttaagtccctaaaagacacatggtttcaccacacctgataatatacatcatatgttatgtaaaatccgagtaaataaactcataaaagatttacctactatgtggaaaatgaccaaatatataatcaaactaagccataatattggtcaataaaaatgaacatttacgtggcaaaagcaacgatatcgtattcaatcgattgtttcataaatccaaacagtcccttgactatataaaaaagtcagcggtgcagctatataaagcttcactgcttggcaccttttaaaatgcattgtaccaattcctataaagtaaataacaac

SEQ ID NO: 46091 - DNA, 405 bp, Oryza sativa
  unsure (1)..(405): unsure at all n locations
agcttggcctgctgcttgtgttcataaaataacatttaatatagatgggagagtacacaaaagatatcagaaataaatggatggtgtgtggtggctggcgcgacggagacaaggtagagagagaaggtttggtgtgcttttgtcagagttaattattctcttagataatatggnggaccatcctattataactgttattgtatttgacggctcttatgaaggtttttgatgacctggatactactgtcaccggcaattggctgtattattagacttgctcttactaatccaataattcatatttttgttggaattntgatgctacccattaaatgttttgaatataatatgtaatatgtcagttttgtttagttttattntcaatgagaataggtgaggggatca

SEQ ID NO: 46092 - DNA, 474 bp, Oryza sativa
  unsure (1)..(474): unsure at all n locations
acttgaatactggtgtggttgagtactttggatatcttgtgggctgtcacttgatgcttattactcgtggagatcatctcatagacggttaggtgtcgcccgcgagctttcaaagatcttgtggatgtctcgggaaagtttgtgaaggttttcctcacctccacaaggaaacgaggtaagtgagtaaagattcttgtgctgagatttcagaggttctcctcggtagagcaacttgcacttgtggtcttttctagaaggatttgtgagttggatctggtggtcactcaaattctagaaaatgacctangagtgttgagttgaagaccttggacttcttctgagttctttgcatangtgaggcaaggggttaatcgagacccggctctttggagcacctcaacggagagtaggatcgaaagatccgaacttcgggaaaaaatcgcctttgtcttctctgtgatgattctgtgcatg

SEQ ID NO: 46093 - DNA, 407 bp, Oryza sativa
agcttgtggccaggcgcgagaccatggactctttcttcggctgctatctctccccgattcaggtgagatgagaaagcctaactctgttcttctgtttctataaacatccatgtgagttgttgaatttcgactgtttagttctcggattggggatttagcgggggagatttgtggattgacagttgttgcgacgatattttagtactgcaattttctttaaaagtggtattgaatccccttgcgacggttgaattttggggattggagtcgatcaaatctttaggacatgaaattttcgatggatttgggcatgcatacaactgccttaaattgttgtttggatctcatcggacttgagttggtacattttgtggactcaatcataattcctatgactggtagagcat

SEQ ID NO: 46094 - DNA, 336 bp, Oryza sativa
ctctggaactgctgttaatgtagggcatggatagctgttattgcgaccattgccttcgcttttgctgcagctggccaatcaaacacatggccagccaaactggcattcattcatgccattacagtgttcgcctttcggcaaccatagtgggtgctctgtacattagacaaagctgctttctgtgaccaagcatgagagatagatcattctctcggcaacccagagaaaaacaaagtgcgtgtcaacctcgcactacaactacaaggaccagtttggcccaagcatcggagttagaaacgggaaaagaattggttgagaggggggcaacagcgttag

SEQ ID NO: 46095 - DNA, 397 bp, Oryza sativa
  unsure (1)..(397): unsure at all n locations
agctnggagttgcgcctgcagagttctatttctcttccgccactggttgtggcgcttggccaggtggttgatgctacccggcgaagtacaccggcggctatgcggctagtggcggagagggatgggtcaccacttgcggccggacttgaggtagggcatagcctaccgaatactgaaggattggagccgacgtggccttggtccgccttgtcgcctcgtatgcttgttgttgttcttgcatttggcgaagcatgtcttggagccatgtcatgttctgccgcatggcttccatgtcggcttcggcttgcgcttcggggtccaggctgatttgggcctgtacaacggtgagcgcaattggcgccgccggctgcgacggtgcggcttgaggcaccaccag

SEQ ID NO: 46096 - DNA, 324 bp, Oryza sativa
taccttttacttgattgccttcgatgtttatcggagtccttgatatgattagaccgagagggctactcatataaacaatctaacaagttgaagcatattcgttcttatatagaagaattgtctagtgctagctgcagcggtgactgctgcaaattcatgtggacacaaagtggcagctgaatggtggccatggagctggtggcagggaattcgtcttatgcaataagggtggataatatttcattttgatccgtgctctctgtccgcttttaagcttggatgtaatgtccagctgatctagttctatattaattggtgggttta

SEQ ID NO: 46097 - DNA, 404 bp, Oryza sativa
  unsure (1)..(404): unsure at all n locations
agcttgctccaaaaacataattgcatcttcatgctttactactacagntntctatgacagtttcttgtaagagcaagctgcacatgctaagttgataaccgagatgagagaactccacatgcttactgttgcaagctatgctcaaatgtataaaatggacaattggccgcaaaaacaggccgggcaaagatacaatttgcaatgctacatgcatggatttgaccttgcataaactagtgattccaaaacgtgccatgtcggcccaaaaaccgagcacttgctaaatgctaactccaggtatggctacatgagctgtatagagcttcaaatcaactgatcaacaagcaatcaaagtataatgtacagacatattcggcagattagaacagattttgatcagagct

SEQ ID NO: 46098 - DNA, 389 bp, Oryza sativa
  unsure (1)..(389): unsure at all n locations
acgtttctgctgctgtccatattgtcttttgtctcagattgttctgaatgagaagttttaagcaacaatatgacgcgtgtgttgatctgctacagtattgactttggaagggtctaagcaaaagcacagcagcatcctctatcagagattcagattccgtggtccaaagagcaaaatcacagggaaattcgcaataatgcaatctgttcctttccagcagctaacaagtcacaccacacagccccatatccttatgtcagaggatccccaattccgcgagaaatatgncgttgtattttagcgaattcccatttcgatgatggcagaatgacaatttttttctcaattccgtggtagtacacaagttatacgtctaatattcatgcgtg

SEQ ID NO: 46099 - DNA, 429 bp, Oryza sativa
  unsure (1)..(429): unsure at all n locations
ctcgacccggatccttaagtcacctgagctgcagcttgtctaacttaacctttctgtttattatgctccttgtacagtagctggaacccaattgagattcctgtgcttaaccattttcaggcttcaagattccatggctcaggacatggtagtagatctgaaggcaggtgtacttcaagcatcggccacatctgtttttagagtataacacccatgagccaacttgttgctccctgttctgaacatgcagccaagcagagctcacaagacgagagagagaagaaaaaaaacgcacacttttctcgtgtgagctaaagctntcgctggtgcaggtttcttttgtttgtgggactaggcatcatgtgatgaacaccgaacacaccgtaagtctctctctctctccccttttgagttctctgtacatgtgct

SEQ ID NO: 46100 - DNA, 463 bp, Oryza sativa
  unsure (1)..(463): unsure at all n locations
acactttatactaagcttccccaacaggcctagatgtggccatacgaganggggtttatatcctatctagattggtacacttgttgtgatgatattgcacgtgatctaatttcttatgatgtttcacatgatttacgctagataaagctgcttcttagaatcttaagcttccccaaacaggcctagatgtggccatatgagatggggaagaagtcctatctagattggtacacttgttttgttgatattgtagttgatataatttcttatgatgtttcacatgatttacgctagaaaatatggtggttctggtacctaatccgtacgcgcatatggttgtcatgatcgcattgagcttgattgtggatgatcagtgatactgattactattagcgacactacactgcatgcgatctatctctcttcatcctattagcttaagcgaaatccaacccaacatatc

SEQ ID NO: 46101 - DNA, 402 bp, Oryza sativa
  unsure (1)..(402): unsure at all n locations
agctntctccccatctctgaaggttgcaattctcttttatgcgacacctcacaccaattataggtgccgattctaaataagaatcgacacctattctataggtgctttttttataaaaactggcacctttaatatattataggtgtcggctaattaaaaatcgacacctataatatattataggtgccggtttttttaaaaaaccaacacccacataaatcgagccgagccgagccgaaccgacccccgaccacatcgatcttatccattaatctcctctcctctcctctccttatccattccctccccccctctctctcagttctctctttctacaacgaattggctctctctctctctcactcaatcaaataggtgtgcggcggtgggaggggatgctac

SEQ ID NO: 46102 - DNA, 417 bp, Oryza sativa
tgattaattaatacacttgaggcacacattacctcttgtttctcaactattccatgacttttaaattctctgccatccgctgtctcccaatatatgttagcatgatgatcataatttcctttgaaataatgtagtgcaaattcgatcttacttagaacgtcatcacgtacctcattaaaatcatgttgatcactcttcatgtctcgacgaagatgtcgatgtcgagctaggtgatctataatggtcttgcatatccctgccattgttagtataaaacaagaaacatacacaataatatgtacgttcctattaacaactatgtagtggtagctctaatatcacacacactcaaagctttcaccgatctcttacaagttcttaccaatacaagcggaattgtgacatacattgactcat

SEQ ID NO: 46103 - DNA, 348 bp, Oryza sativa
acatagccgcacaccaaagcagcaccataatcaaatctcctgcacaaaaaattaacagctaaaacctctaatccagcactataagagaaaaaacatgtccatcgcgttctatggtacatccaatgcagtccattggggcactgcgggaaggccaccttactgagcttcaatgtccctacaaggacagccatgagactacgcacgacgatatgatgaggtgaaagagaaacatccaccaaccctaccctatccaccatcccaccatggagagccgcatgcagagtgccagactccagagctgcccatgtccggaggaaaccaccacagccacgagcgtaattctgggga

SEQ ID NO: 46104 - DNA, 467 bp, Oryza sativa
  unsure (1)..(467): unsure at all n locations
tatgtacagttgtccactcaatctctacctaatgtgctttctgccgttaaatcactattgcgtgcttctaccccactttcctcgaatgatgttcttcagctagctacgttgttgccatcttcaaactgcatctctgctaaatctttggagacaattgttgatctgtctacagatgcattggatatgtttatagcgttcaaggaaaaatttgtcactcaacagggtttttttcatagaaagattgaagctgcactaaggaaaagggttagtactttccattccatattatgtgctactttcaaagtattgctctctagttagactatnngattggataatgaaaatatatatttagtgcagaattatctatttcatattgtcattataactgctcttctctgcatattcaattcttacctgatgattgagataatgaaaggatctgntatcgccgaattatcatttca

SEQ ID NO: 46105 - DNA, 368 bp, Oryza sativa
  unsure (1)..(368): unsure at all n locations
agcttaaataataaaagatncctttccttttctntatcacnccaacacgtgtcttgctcgtgcacgattactaatatataatctaaccctaagncaacaggtcaaactccaaatcctctacccatccagatctgcaccagccaccaaccaccacccgagttagtccgccggctccgggagcccgggagccacgcgcgccgcctgtcgccagttcaccgggagcccgggagccgcgcgcgccgtctttngccagccaccaccgacgccgttcaccagtttgtcagtcaccacgcgcgccgccactcactgtcttntctcgccgggatactataagctgcatccgcggtcgtcgccatggactgaagtcg

SEQ ID NO: 46106 - DNA, 396 bp, Oryza sativa
  unsure (1)..(396): unsure at all n locations
agcttatcaacccattcagatttgtacttctaaagatngcacaagctgaatgcctgaataccagacttgaaggaagtttgtgcaaaatatgacttcttcaagcagagcaccgctttttattaccttcccagaagctagctgatttgtccacaagtttcaattatgccaaaagggtcctgtgaccgaatttaagctgtggagcaattaaaagtagaagggccgagggttgaaattcttgttgaatagaaaaaaacaagagaaacagttgcttgtagctagcccagaagatctatttctaaaaggggatattgtgtacatgttcttaactatttgtaatttcgtcgtggtgtagtgtgaaacgtatgtactagtatattctntntcctatcctcacaa

SEQ ID NO: 46107 - DNA, 391 bp, Oryza sativa
tccttcaagtattgattgtctcgttcaataatcttcatggtagcataccaaaggagatcttcagaattccaaccatagtgcaaattagcttatctttcaacaatctagatgcacccctccataatgacattggcaaggcaaaacaactcacatatcttcagctgtcatcaaataatatatctggatatattcctagcactttgggtgactctgaaagtttggaagacatagagttggaccacaacgttttcagtggaagcatccctgcatctctagaaaacataaagactctaaaagttctcaacttgtcttacaacaacctgtctggatcaataccggcatcacttggtaacctacaacttgttgaaaactagacctatattcaacaatc

SEQ ID NO: 46108 - DNA, 407 bp, Oryza sativa
  unsure (1)..(407): unsure at all n locations
agctngtagaagttaggaactatagatatgtattgttatgtttatgagcacgtcaatttattcttaaaatatgtatatgtgaaatcatacatgaatataatttaaatactgtacatcacaatttttttactatacatttaaattagaaatcgcataatacttttctaagtgtctatatattttagtgttctcaaatcagattagaaaagacttgcctttatggtccagtcttgattttaaatatgattgagatttgattcaaacaaattatattcagggtgctaaacataattggcatatttgtatttcaaatttgtaaacagaaatatgtgatatagttntacaaattacaccacgtgtcctatgaacagtgttaattttaatggcacattaagggatatatttca

SEQ ID NO: 46109 - DNA, 429 bp, Oryza sativa
  unsure (1)..(429): unsure at all n locations
gcatgggatgatttgctttagaactttttgcttgctaaaggttttacaatgggaaaggttgacaaaacgctntttgttcttaagcatggtgataatcaacttttcgttcagatttatgtggatgatattatctttggttgttcgactcacgctgtggttgtagattatgctgagactatgcgcacggaatttgagatgagcatgatgggtgagttatcgtactttttggaattgcaaattaagcaaacacctcaatgtacttttgtgcatcatacgaagtatacgaagatctnttgcgacggttcaagatggagaattgcaagccaatttcaacaccaattggttctacagctgtgttggatcctgatgaatatggtgaaactgttgatcaaaatgagtatatgaatatgaatggatctttgttgatct

SEQ ID NO: 46110 - DNA, 406 bp, Oryza sativa
  unsure (1)..(406): unsure at all n locations
actgangcatgcaagctttggagaaaaatttcgctgatcagtttgctttctctaacctagntgagggggaagagaatacagcatgaaacgcccaatataagttacctgacagcactaatgtatgacggccacctgcagctacttccactatcttcactcctgtattaaatgccacaacacaaggcggtgctgaaagattttcatcactagatgattcactctcagccccgtgttacgatgaagataacctccgtcgctttgtgctatcctcagaacttctgctttcagcaggaccagatgctgtcttggtgcttgtcctagacacctttgaccttgggctcactgtaatcgagtttcctatattacctctgtaaacaacggatgtagaaaagctcatattctttat

SEQ ID NO: 46111 - DNA, 371 bp, Oryza sativa
caacatcatgagtaatcctgaacgatagctcttcttggctccttcttgaaacatcgttcaagcctgtgtgggcaacttttctcctctgcactcctatagagtatatctcgtggaattcctccagagatcgcacatgcaccttcaaccatgaaaatacgaaagtaatcacagtgcacaatcgatgatgcctaatgcattgcagcatacacaagttagaataatctatccccatcgcattacccatgccaagccctttatctgtaagttgccatcattgtcatacagcaccatgatcactctttgcttgtgctctatcaagtcatatcacccgctccatgtatacctcatagtttgagatctcaacagatcac

SEQ ID NO: 46112 - DNA, 406 bp, Oryza sativa
  unsure (1)..(406): unsure at all n locations
agcttatntacaataactaatccgntggatttctcttgtagtataagaaaatataatatgagtagtttattgtgccagttacttcattgttcatgtgtgtcaaaaatatttggaagaattatagcaagatcattggctggaaatgttattgatgacttnttttttcatatctgtataccatgtatgctgcccacttctcaaataccaatcaaatagttctgaaaatattaaaaaactntatgaatcttaatctcaaataaattacaattaaatcttagatatacttgaaaaacacagctaaattgtgttgttttcattttttacatatgtagatttaaatatcatggtgaatttttgaaaaattatcacataactgactattatatgtcggccccatgtgttctga

SEQ ID NO: 46113 - DNA, 229 bp, Oryza sativa
caaaataaaataagttatgtccagtgtcctgattatcatcactcatcgctgtgcggataaaatcatgtagcacacggacacggagtaagagaatgagcgaggggaatcccgcatctcgggtgggatgtatacgtgccaccttctttcaaccgttaagaagcaagctctgatccccggcatgatcgatcatcatcatcatactatccctccgtttgatgtgccagatctt

SEQ ID NO: 46114 - DNA, 406 bp, Oryza sativa
agcttggctattgggccaaagactgtcgtctgtctctacgtggccaggcgcacgtcgcacaggtggaggaggaagagccggctctgctcctggcacacgcaagcatcgagcttcctccagcggcaccggccgcagtggctttcctccaccttgatgagccgaaggtactcgtctccctctgcaacggctccagcaacgacaaggctgatgggtggtaccttgacaccggcgccacccatcacatgaccggccgacgggagttcttcaccgagatcaagggcgttgtctccgtcaccttcaccgccaagtccggtgagcacaggctgctcaccggagtctactacatccccgcgttgaggaattctatcatcagcgtgggacagctggatgagaacggctcacgcgt

SEQ ID NO: 46115 - DNA, 459 bp, Oryza sativa
  unsure (1)..(459): unsure at all n locations
tactcgagcttatgcacaactgaccgagttcactgtggatgcgacatgatagtctatctactgtttaggcaatatatgatagtgtcttgtatctctatgaaaatgcgtttactgtcctataaagattgtatgtggtccttttatctttaggaaaggctctttcttgtcctacnacgacaagtatctccccacgggtataaatatgtacacccggtgtcattgttcacgatctatagatcaatataactactctcagagcaccgtcaccctctttaccgatgcttttacttatcatacggctgaacttggcacctgacacgaggctgcatctggtttcgatctccggcgaatgaataaggcatatgttctggcgggcccggagaatgtatacggtacgtcactgttgatgaaggactgatcacttcgatctattggatcgctctgggtnggttgatacac

SEQ ID NO: 46116 - DNA, 408 bp, Oryza sativa
  unsure (1)..(408): unsure at all n locations
agcttacatacggttttccctttcgggattctcgaaggtaggtacaagcaagctgttcttaccttacacagcgttattacacaactccttgcttcaatatactatgcaaggtaggctaaagtcactactactaagaacggtggaatggagggtgagagcgcgcttggaagctttgctctgaatggngtcttcgttgttgttgttgtgtgtctccggagtgaaagccaacgtctccttttatagaggccagggatggcgtcgcctgtgcctcctgcttatctcttcgctactgtatcttcacgggagctggctaaagtcgaggcctttccaccgaaagttntactcttcacagtgatatgtcattcaccgcaccctatattgttcctttatgcttatagggtgtccttc

SEQ ID NO: 46117 - DNA, 370 bp, Oryza sativa
gatcctgttgtaatttctgctgtcattatctatcctcattatcaactattatttctgtgccattctagcacgtgctactctgatttgtaccactttgctaacttatctttgtgtgctgtccatgaataatttgactgatcatgtccatgtccatgtctattgcgatgaccttatttgtaacatcccggcccatggcttaatatgattaatagaatactcatatcaacaagttacaactttttttctataagccgatctctaaagaactataaggttaagcgtgcttggcttggagcaatttatggatgggtggccgatcgggatattcttcctactgcgcacgagtgatgagacgttacacaaaaacatg

SEQ ID NO: 46118 - DNA, 401 bp, Oryza sativa
agcttactgagcctaccaaggctctcatgtattgtccactgagctggttgtcattgagatacatttcccttaacgacgagaggttgccgagtgacggtgggatgatcccagtgaagttgttcttccctagtgacatgatcttgatcctcgacaatccgtcaagccaatcagggatctcacgattgagtttgttcaggtcaagttttatgctcacgaggcgagtgcagttcctcaagccatgtgtgatcccaccttggagcgaattggttgacatgtagagtgtcgataaccatggcagctgcccaattgtcgaaggcatttcaccttggagtgaattgtttgacaggtcgagatatttcattcgcgacaatcgcccaatggttggagggatttcaccgtgc

SEQ ID NO: 46119 - DNA, 196 bp, Oryza sativa
ttgagatgatatagttgaaagtttttaaattttgacttcaaaaattcaaatttcgagtttgtcggtgatatgggaccgggagtatcgtgaccagatgcttgatgcagacacaatcgtccacgtggcctgtcaccttctgtgacgtctggcccgatggtgatgtgtccgccctcctcctgatttccccgaggggggg

SEQ ID NO: 46120 - DNA, 396 bp, Oryza sativa
  unsure (1)..(396): unsure at all n locations
agcttcgctagaattggcatgcatcagttctgtattctcacctgnngngcttctttcaagcatcaagcatcccttttctccaagggttacaataataaacttgatattaggcaatcttaaaagcatggacaccaaagcaaccggtgttgatgaggctcctgtccaagcctgcattattcacattaaaaaaacgtcattaagaaatactataaagtagcaatctgagataccaagacacagtttcccgtaatatcaaactcagcctctgaacacaaaactttacatgccatcaccattcattggaaccatggtagtgacattaattgtcccttcatgttccataagaactaatgccagaatcatggggaaataaagtgaagatacaaattctcgact

SEQ ID NO: 46121 - DNA, 382 bp, Oryza sativa
  unsure (1)..(382): unsure at all n locations
taccatctgtgctgatgcaaacattgtacttaagctggggcttacagccacagcagtaaatgtgcanttgatgactgtcccttctgtcccttctgatgtaacaccaaatgactcagcatcatcctcgcatacatggagctctgtatctatgagctgttggtttatctcatgtatttcctccataagagcatgggttatctgcaggtgcaccatagacaagataaataataaaggtagccaaaaatttagaataactcccgtcaatttaactatacttcccttctctgggcccatatatgtaatggatgtcattgtggaaacaaaacaagctggaaatcatggaattgtaggttattcattatgccaccaagattcatctata

SEQ ID NO: 46122 - DNA, 406 bp, Oryza sativa
  unsure (1)..(406): unsure at all n locations
agcttcatattggttatagatatattattttctagcatatatatctattntttaattacatatataaagctaacacacattaagctgctgattcgtaatttagccacagcaacgagagctagggaacaaaactctgaacagagtgtcaaactagtcatgcatgcaaaagctagagagcaaaaagaaagtcctcaatgccatgagtatgtatattgtcggtgcaccaacatgtgggctcacatgttaatgtcaggcggcaccactcatgcattagcggtgacactttggattaattaagagatatcaataattcatcagaaattagagactagttatatagttaattctagtcaaaccatgcccaaacaaagaccttctttttagtttgaggaaatcgacgtatgtg

SEQ ID NO: 46123 - DNA, 406 bp, Oryza sativa
taacaccttctgaaagctggtaagtctctttcttgcatgttatcatcaaatgcatagcattttccgaaacacaaataccaacaatgaaaccttcagagaggctcaggacgaaggaaatgaatcccagaagcattaactctgcatatgtagacactcaattagataagacgttaaagaaataaaattttaaatgaaatagcataaattgtgtgaaatacaaatataccgtaagcagctattttgaatatttttgtttaaccaaaataagtgaaattctacaacagatgtaccatgtttatatatttgaagtccggtaacaatatcgaaaataagcaactgaagatattcctgaatgataccttcttttagtctctcgagaactgaatacaatgccttctgatcttta

SEQ ID NO: 46124 - DNA, 395 bp, Oryza sativa
agcttgtggcatttgaaagagctctgattttattgtcttctacagcggaatttcgaaaagagtgttcataaaagtaaattgtggcctctttcactgacgacaagtccacaaggtgaatatttcttcttggaatctcctctatatgcagggtaactatagttggcatttctatgacaagatactcaatttgtttgggcagatgttcaatgtcttctgcattgagaatgacgaaactcttcaatgtggttgaggaaaacatggtgacatcgatgccacagcttatcaacacaagatccttcaaaaccgggcaaccagaagaaaacttcttggcaaaacagtcatttactgtaaacttgataagcaccaacttagacaagtgcaccgagttgaaagca

SEQ ID NO: 46125 - DNA, 421 bp, Oryza sativa
gatcttaagtcacctgcggcatgcaagcttaaagggggaagaaacctgtcttattttcttggaaacgagtaccctcttcctccgtgtgaagaaaaggaagaaataaatcaatcaaattacgagaagcctcataaagcgcttccttaggggttaaacttccattggtccatatttctagaaaaagtatctcatattttgcatttccattcccacaagcaaaaatactataattcacatttcgaacaggcatggatacagcatctataggataacttccatcttgagtgttctttctgacttccgtgtgatatccgcgatctctcttgatccgtaactcaatacggaaatccgtgggttctgtcaagttagctataggttgtgccgtatcaacgatttctacggaaggcggtaagaaatatct

SEQ ID NO: 46126 - DNA, 346 bp, Oryza sativa
gagcaaaaaatgcagctcggcttggctcgtttcatagctcgagccagctcgagccatcttgtgatgcacaacatcaagtaaatacttcaacaatagtacaatcaattttcagcaagttaacagcaagtgtgcgttacagattctatttactacacataacatatggctggaattaagtatagtatattagtgtaagtataacaattttgatctatttgcctcaacctttctgtgattgaatcattgataatagcacacactgcacacatacacatcaatgtatcacgcatatacacagctactaagaaatgaatgacataaatcagataatacatcacgaacctct

SEQ ID NO: 46127 - DNA, 396 bp, Oryza sativa
  unsure (1)..(396): unsure at all n locations
agcttggggattagctataatgacgtactttgtccgtatattctggcgnatattctccttcattcgctttgatgccatgcaaattgcagaactgaaggaaaatgctgtgaaactatatgccaattcgcaacaattcaacaagttttatcatgtcttcaaaaaaacaatttcttttcatgatgttcaggctcaatctggttcttgtcatttgtgaattgtgatcgttctgccttttctgaataaacacaaggcagggttgatgatactccccacataatgggccggcccttttttacgaacgaaagcacttttggcccatcgagtccatcagaaatgttgcttacacagatccagccncactcgaacggcccggcccgcatacaagccgtaaaacaa

SEQ ID NO: 46128 - DNA, 318 bp, Oryza sativa
taatctggttgaagatcttcccacgtacgcaacactcctatattgacaaaacagaaaggagaacttcatgacggtctctttgcctcccaagaataacttggcatgaatgtggggtccagttcccttcgatgtcgactcaaagaattatgacttcatcatatagcccaagaagatcccgatcaatgcgacaattatgacgattatgaatgagaaccctccgcgcttcttgcttatctcccgtctcatcatatcctgcgatatggagaaatggcaacagtgaatcataatttctcgataaaaacataaaagttaactata

SEQ ID NO: 46129 - DNA, 389 bp, Oryza sativa
  unsure (1)..(389): unsure at all n locations
agcttggaggtctcccgacgtggctgatctccttttctgggngatccgggttagtaatgtcgtgtgggtaaagtgtaccccctctgcagaggttaataaactgttcgaacagccgtgcccacggtcatgggcggatgtgaggtgattcctagcgtagttttgtttgactaccgcttgtgaaattgctgttgagaaaatgggttcgatgtttgaaaaatcagcagctgacgggatcagctaggcctgtgtggccgtttgaaaagttgttggcccgggtggccgtttgaaaagttgttggcccttgaaaagctgttggccgggtgccaatcttgtttcanatctaaagactgatacattgcacatactccgaccggacgagacgcactgtc

SEQ ID NO: 46130 - DNA, 232 bp, Oryza sativa
  unsure (1)..(232): unsure at all n locations
tcgagacagnggttcttgttgttngatgggacaataaattatattgggtttcaagagaatgtcgaggacaactgtatntattcaaagtttaagaatgggagatttattttcctaattctgtatgtggatgacattctactggctagtagtgatgtcagtctactgcaggaaacatagaaattcttgtcctcaaactttgacatgaaagacctcggtgaggcttcatatgttt

SEQ ID NO: 46131 - DNA, 386 bp, Oryza sativa
  unsure (1)..(386): unsure at all n locations
agcttggaattgatgatttagtgcatttttttttatggattctcctgcaccacaaactttgatgagggccttggaagttttgaactacttatgggcacttgatgatgatggaaacctcacgcctttatgtgaaacaatgagtgaatttcctctagatccccagatgtcaaagatgcttgtcatcagtccaaaatacaactgttcaaatgagatcctttcaatatctgccatgctgtcaggtatgtcaaacaaaacttcatgtcgccatatggtttgtcagctaaattatatagtgcgtaataataacacccgcacaattntgcttgcatcaattgcacattgtagaaagcttacaagcttcttatcatgagaggttgcatccactt

SEQ ID NO: 46132 - DNA, 359 bp, Oryza sativa
acttatgaatcttatacagctaatctttcaacttataggctaaaactgtcatataaaactaaaaaaacttctgacttgtgacctatatctttcaaagtctctactctaattaacagatagaaacaattcgcacaaatacatctctcttgttcaaatagaccaagtcttgagatgctcactcatgcgtatgtggaattataacatgcttatcttccaatctacctacggccattcatttgtacgttcttacgatgattacaagcgtcatttctaccataacacattcgacaccatcctattcaagtgtgaccttaagatgtaaatgctacataatactgatattgtaccacctacctcat

SEQ ID NO: 46133 - DNA, 411 bp, Oryza sativa
  unsure (1)..(411): unsure at all n locations
agctntcanaatcagactgtggcctgcacattggattcattgttgacttaatcaaatgttgcaacacagaatacactgatcggtgtaacaaatgtaaaatgattaaaaagtacaactaactngtcaaggccatgcatatcttctggaaagacaataattttggtttcaactcccatctccttcaaggtccttgcatactgcatatgttgcgattatgattaggcataaaccagcatttgtaaaagtgaaaataaataaatagatacaagcagtatatagcggaacaatatgaatcatatgctttcactaatggttttcaagaaaattgactgaacttgtctacgcaaacaataacatgaatgcaacattgctactagttatcatttcacaaccctttcatcatataaaaat

SEQ ID NO: 46134 - DNA, 406 bp, Oryza sativa
  unsure (1)..(406): unsure at all n locations
agctnntgtgttttaggtactgctatctcttttcttaattattagntgctttaactttttttcttataacatttgatcattcgttttattntaaaaattaatataaatataaaaaatgataagttacactctaagtattttttgataataaagcaagtcacaaataaaataaataataattttataaattttttaatgagatgaatgatcaaaagttaccaataaaattttaaagcgacaaatattttgggacggagctaataggcggtccggtcaactcggttggcttgtcgctgcacgtcaaagaaaatcgccgaaaccgcacgtatgattggtaccgttcacctatgctacgccattatgcgtgtgcactatgcaacgctaaccttttctctttttntttttc

SEQ ID NO: 46135 - DNA, 445 bp, Oryza sativa
atactcagcttattacaacaaaactcaaatatatgaccttagtaacttattagtcaataatataaataaattatgatgaaaacaaatcaaatgaactttaaaactgagttccaaatttaaattgtggttacgattgataaacggatgaacatatagagttgaaaattgtggagaaattaaatagagataaatggttggaattaggaaggtagagaaacactgtggtactctataaattttaaatcaaagaaaatcctatgccaagacacaagtcatacggtgtcctgcaacaccagaatttgtaaggtcgtttatagtgcgcttatctggcgtgtggcattgatgcgccaccacatatatttcctgccacgtctggcctggtgcacccctgcgaataccctctgcaccaaaattggacgcgcgctctttgttagaactgagctga

SEQ ID NO: 46136 - DNA, 411 bp, Oryza sativa
  unsure (1)..(411): unsure at all n locations
ttaagtcacctgcagctgcaagctngtagagtatatggagcagggatattcttttttgattgantgngngaactccttgctatatgtaatcctttcttatctcattcccatgtactcctatatataccggtcccctaaagctcaatataagtgtgttaatattcacagtattcctcttcctatactatccaacatggtatcagagatcagagcgggcgacctagagccgcccctctcacgcttncgccgccgctgcccccggaagtaacgatctcccgggggcggccacccgtttttttttcgtcttcgcgtcagatcaatctggttcatgtcccacattggacgctgttgtgacgtcctggagagatcaatctccgtgcgttcattcgcgctgtcatgagaggatcgatc

SEQ ID NO: 46137 - DNA, 380 bp, Oryza sativa
  unsure (1)..(380): unsure at all n locations
gatctgtgtatcttggtacactcttatactgcagtcttattgctgngaagaagctggatggcatatgccaatgaaagaaatagttccgctctgatgtaacaatcattggttgtatccaccacatccatcttgtcaaactccgaggcttttgtactgagggaccacacaagcttcttgcctacgagtacatggcgaatgggtcgctggataagtggattttccattctaaagaagatgatcacctgctcgactgggatacaatgtttaacattgcgcttggaacggcaaagggattggcatacctccatcaagactgcgattcgaatattgtacactgtgacattaagcctgataatgttctacttgacgacaacttcatc

SEQ ID NO: 46138 - DNA, 389 bp, Oryza sativa
  unsure (1)..(389): unsure at all n locations
agcttntgagcacattagcatatttcattttttttcaaactctcagccttcttggaaatacccagagagaaatcccctcacctcatcccttctcccgttatctctctgatcagtgggcctaaggatcattgtgcccacctgccagccaccatccccatatccctgctctctgtctttctcccttctctccttctatttctttcaggcaattcatcgagcacctagcgtgcgagattgaggtcatcgtttccaagccgaccaagcaacctctgcccacgattctcgctggcaaagatgaggcaaagctggcgcacccctgcccgaggccctaccgctgccttcgccgcgtncctcgctggctcgcccaacccggagctcaatggcggatc

SEQ ID NO: 46139 - DNA, 250 bp, Oryza sativa
ctaacttaacttttgacaatcatgttttttccaactttttttgttggatgtatttcctaaataaaattaaaaaaacaagtcaaattcagttcaaacttgcctggaactagctagaaagttttaatgttatacctaatatttgaaaaatgtttatactcattctaattggatatatactcaatttaaaccagtgtggacgggcaccattggtctccaaaccaaactattatatgtgtgagtgtgtatgtgt

SEQ ID NO: 46140 - DNA, 388 bp, Oryza sativa
  unsure (1)..(388): unsure at all n locations
caagctttgcttcagntggattaataaaatatgatatgagtggnttaaagggtacttctgtgtgcgcaggattctggctgaggatgtcagcaggaagtatctgacactgcttgtgaatgcattaagtcgctgtgccattctcttggctgctgaatattcagtgttcaataccaaccttgtgtgtgaattctgtcgtgcaaccttgggggagtgtatgaaggcgcaaactatcgaacgcttgccggcagtatgtatcattacacaattgattaccctctcgaatttgctaaaaaacgtggctagtcaatgatgttactcatattttatggatcaggttgctcgcaagatttgttcatctgtagatgtgagatggggtgggggcactcag

SEQ ID NO: 46141 - DNA, 408 bp, Oryza sativa
tctacacataaccaacgtcttccgatagggtatgcatatgttcctcgtgactctctttctaaagacaagttgcggaatcgaaatacacaggcccatgaaccacaatagcctggtggatatgagcagctgagatcaagatgggtaatcttgtctcaagaaaggccaaaagacgtttgtttccttggtcttcacagccagaaagtacaagcgtcatgtggggctggccagtcttttgctgctacaaatggttccaagcaaacgatgatccaattgggctgaagttgtagaacggtgcaaactgagttaatgtgaacgatagaacgaaacagatgaatgtatggtgtgggatctttaccagaaatcttgctccgactatgtcgctctggtgaacggcaacatgggtggatt

SEQ ID NO: 46142 - DNA, 404 bp, Oryza sativa
agcttgatcaattatctgaaggctctaattttttctaacattgatcggcttgaggctcgcataattgaactcttagcacaacttgaagaatgtaacgctgaactggatatagagcacaaaaagctagccgatctcccaaagtctattgaagaacagaaagtaagactcaaatcggctatcaagcatgttactgatctgaccaagtctctgaaagttatccctggaaccgatgctcaggatgcccaagccatagaagaagtagagcaaattaggcaaaaggttatatcggccatccagcgatacttatctcaataatctttatgtaataggactttagaatttttgtaatcggctgagacattctgatactttactgtcttaacaatcctttgtggcgattaata

SEQ ID NO: 46143 - DNA, 443 bp, Oryza sativa
  unsure (1)..(443): unsure at all n locations
tgcaccacattgcgccacgacancgtttattgttagccgttggaancctgagcatgggggctagatcaacagtatctgtcctcacacttacaactgcttgctctggcccttttaattgacttggcccgttaaaaatctcctcatcgcatgatagccatgaagcggtgcccttctaccttttacactagcaatcccctaattaacacgcatcataccatgttgaaccccctccaacaccactatacgagcaatcaggttgtgccatcttccttgagcataagttaactgaatgaccctcatacaaaaaaagaaaaagaaaatgctagctgaatgaacctcaagcatacaaaacaaaagaaaatgtagctgaatggactgatgccattcttggcagtatgctattggatgtgctctttactaaaataatctatcttctgctaatg

SEQ ID NO: 46144 - DNA, 441 bp, Oryza sativa
tcatcaaagaagtgcttcatcccgactggctggctaaccctgtcctatttcggaagattactgggcaatggcgtatgtgtgtcgattataccaacctcaacaaatgttgccctaaagatcctgttgggttgcctcgcattgaccatgtattcgattcgaccgccggctgcgagctactcatttttttggattgctactcggggtatcatcagatccgactgaaagaatccgactgcttgaagacttcattcatcacgcccttcgtggcctactgctacatcaccatgccattcagactgaataacgcatgtgcaacttatcaacgcatgattcatagatgcttctcgacgcaaattggccgcaatgtcgaagcttacgtggatgatgtagtcgtcatgactaatctgaatgatgatttaatctcggacctataagaaacct

SEQ ID NO: 46145 - DNA, 222 bp, Oryza sativa
  unsure (1)..(222): unsure at all n locations
agctnnttgtttttgcattatcttgcgaatttatgtactgcttaattggacgaaaaatgaaaaactagtgatattagtgctccctcaagtttgtaataaattaataagtaaaatacacctctttaaacttgtcagcaggtttcatttagctctacaaacttgcaaagcatacatcgagatctctaaacttggtttattgtatcatcccagtccaaagccgcg

SEQ ID NO: 46146 - DNA, 427 bp, Oryza sativa
  unsure (1)..(427): unsure at all n locations
gacaatgaaaagacactatgcaccttttgcatgcactcaatttcttttttttttcaaaaaaaaagggaagatgcataagtatcatctagtagatatttgatattttcctcccaggagaccatgagaggtactcaccaactttgaatagattgctacactactcaaacggtaccacaagcgtttatcagcaactgaaatatcaactagttatagtcattctaacacaattgcagtttaaataggcatatattaaaaatataataactacactcagtttcttttttttaaaaaaaaaaaaacaaggccccatttcataatttatttaactccagactacagtataaaatattaaaatggttatgaatcgaagagaaattcttttacatggtattgcaantatattgggtataaaaatataaacagaaat

SEQ ID NO: 46147 - DNA, 386 bp, Oryza sativa
  unsure (1)..(386): unsure at all n locations
agcttcaccacatttctatgattcactngttgataggattgcaacttaatttataaaatcatctatttctctctgcactacaatccttgattatttaatggcaacaaaatgcaagtctaaaattcctttgtatacaatgccatgtcctccaccaccaacttcacgagttttatcaaaattgtccgttgctttttctagctcccgcaaggtcaatatcattctttcaccaatatttgtcatttgtgacatcaattgntgcaggagtagcccatgattttgcttgaaaaatatctctttcatccttatcaccttatgtagctntattttctgtactatgaaaggcgcagaaagtgccactaattaaatacgagcaatgctcacatact

SEQ ID NO: 46148 - DNA, 421 bp, Oryza sativa
  unsure (1)..(421): unsure at all n locations
tgatccgtctttgactcgcgtttgctcaatatagctctttcttctagttccttgccaaactccacttgtaagttactcttccttgatccgaacgaacattacgagaattaagtgctatctatgatgtctttttacacctatgctgcaacaagacctacattttacttgaagtgtgctcactgattgaagagctttgcttcctaaaatataatgcattcctaattggttgatccggtgaaatcccaacaccaacctggtccatttaacgactaggaatgcatgcattcatcctcatcctaatctattaatttcatgcaatttaattatgggaagtgccaacgtctntcaaaagtctctcattatggtatctaaaacatgctgagtttctaggccgcatctgatatcatcactatcgcgtgca

SEQ ID NO: 46149 - DNA, 398 bp, Oryza sativa
  unsure (1)..(398): unsure at all n locations
ncaagcttgngctttgggggtgatcagatattagctgtctaggttggagtgtgttaataattaggttttgttagtttagtagtactcagctttaaactaagttggatcttgccttaattaagtcaccaatgtagggtgaatatgtgaaattaagtgtgtgatccagatcatgagtatagtgcatttttgtgagaccatgaaagtttaagggtgtgcttgagaagaggagaaaggaagagcctaatatgtcattttttaaaattgtaaaatggactaatatgattttagaaacaacttttctataatattatactgggttaacagccgagaagcgtgcaaacggataacaagatatttcttctgcatacgaatatagcccgattgtccctcgagggatg

SEQ ID NO: 46150 - DNA, 391 bp, Oryza sativa
  unsure (1)..(391): unsure at all n locations
gttatgaatgaatagcctcgctggcaagtgggccccactcttccaacatgcaacagctgctaaagcctctgctacgcacgacttcctaacgtacgtgcgacccatatctcgccacgtatgcgcgcggatcggccctgcgccgttcgcccatggcgcacgcgtctcgcgcctatatatctagtgagccgcgacgacgccattgccattggccattgccaacggcgccacgccaccaacctccgatcgatcgatcgatcgagcatagctagtcgctgtccgatcctgcagccatggcggcgacgactgcggcggcggctgtgccngcggtggtgagggctgataggcttctgcgcggctggtgcgtggtgatggcggagactgcggacctgct

SEQ ID NO: 46151 - DNA, 405 bp, Oryza sativa
  unsure (1)..(405): unsure at all n locations
agcttcagacgcggccccatctacagcctctgtttctcaatgcttataaagatggcagcctgaaataattgaactcgttcggccgggccaacccggcagagaaaaaaagggattattgaactccaaaagtgatcaaatgcggtggagcagagctctcgtgagtctaatcccgcaacgagaacgcatatgaataatggttntgcggcgggtgcgttctgcaatgacaggccaacggtcaaagcatcccaactcccgcctcctcctcgtctaaaaccactcgcttccaaacaatccaaaccttccatgccatttggcatttttggctttgcttctcttctcttcctttggcttggctcttccncaaaatcacaagacccatgaaagaaagagagagagacaaaacaa

SEQ ID NO: 46152 - DNA, 454 bp, Oryza sativa
ttttaaatcttgacttgaaaagttttattccttgagttgaatattttcaaaatttgtgttgcatatgtaaattgtaagagaaaaatttcaaagtttgagttgaaagattttaaaatttgacttcaaagtttaaatcttaagtcaaaagttttcaaatctaatttaaaagttttcaatctattagtaaaaatatcccaacaaaaagataatcttctcctaattatgccattatccttaactaactagttagttaggttaactcactgaaacatgcgccggctgcgcgcacgcgctatctatctttcccgaacaactagtatatccagactaaaatggatcaatagtaatagtacagagttactccatccgtcgcgcgaaaaataaaatcttgaactgaacgtgatatattgtagtacaacatatttagacagatatatgtcttaattcatagtac

SEQ ID NO: 46153 - DNA, 399 bp, Oryza sativa
agcttgtgcgctggcatgccgaagaactgttagttatactatgctgaggcacccagcagattcagtacagtggaggacaatcgataggatctaccaggaattctcatatgacccaagaaacatgcgtttcgcaatgtgtacggacggcattaatcctcttggtgatttgagcagtcgtcacagtacatggccagttctgcttgttaactataaccttcctccctggttgtgtttcaaaagaaagtacattatgcgtgccatgctcattcaaggaccgagacaacctgtcaacgatatcgatgtgttccttgaaccgataatcgacgacttcgaaaggctatggaatgagggcatacgaacattggacgcttatgcacaagagtatttcaacctccatgc

SEQ ID NO: 46154 - DNA, 208 bp, Oryza sativa
gttttgtgcgcatttgtcttgcactggattctgaaaaaaaaactcaatcatgatgaaataagaactttgctaagatgctggactggcagttgttcttttgttggcattttggcaagtgatcgttaccttatctatattcatcatgtgctgggaaatacacgatgtatgaagcaagctggtcttggtgcatttttattcatactttaga

SEQ ID NO: 46155 - DNA, 403 bp, Oryza sativa
agcttcttcgcggcacctacgtgcctgcgtgccctcttctatccaacggaggggtgacttccactagcctcctcctcctggttcccctccacatccctttccacgtgcccctcctggttcccctccgcatacctctccacgttcccttcctcgttcaaatactggtttggatcctcgttcccctcttctttgttccagtactggctgcttccctctgcgattgtatcgtacaatatctgttcctcatcgcgatcagccatctgttcatacaggaaacatctgctaagtcatgagacatttatgttttaacaatcttatattaaaactcaaataatcctatatgctaagactaaacgaacagtcatgtatgctaagcgtaactgtcgtatattacaaccgtaca

SEQ ID NO: 46156 - DNA, 398 bp, Oryza sativa
ctcgtagatggaatatcgtctagatgacacatgttatgcgtgaataagtactatctctttataaattatctccatctacatcgctcatataatatcttacatgatatctgctaggcttgaactatataatatttaactgattactattaacaatgatcagttattgttcaatttctagaaaaaaaacttgtcaattaattcggatgagacatacatattgtgcaactcgcttgcctattatatgggatctatagtgttttttctaaaaaaagacctagtcaacatgagtcctacaattaaagttaatagtatcatatatgagtttttaaccaattatgtgtttatatatgcaataatacattgagaaactcataatggcatgatatatagcatatatg

SEQ ID NO: 46157 - DNA, 399 bp, Oryza sativa
  unsure (1)..(399): unsure at all n locations
agcttgagctgaattataagaggctctatgtcacattttgatttttttcattntaggatttataaattatttaataaattattaatagaaattatattaaatgttcattaatttacaagtgaagttaaatgtgggaaataaaatttcctaaatttaaagcatgaatggatttaaattttaataaattctccatgattaattatactctctgaaattttctcggatttttcagagctcaattcctaaatgatacaaagaacagttcagtaattagttaatcaattaatgagctaattataattatgttaagtgcttttctttgttaaaaatccttaaattataaattgttgttaaaaggaattattagaaatgatcttaatagcctattagagaagatct

SEQ ID NO: 46158 - DNA, 404 bp, Oryza sativa
  unsure (1)..(404): unsure at all n locations
gtgcaagctttccttttgctaaccccattcaatctccacttgcattagtgcaggngtgnatatatctatttgatattggcctcttcaaacttatatatcaagatctcacaccttcacacttgacagtacattcataagtattgttattgtgttcaaatatcatatgctagtgttgtatggattccgctaatcatagtggtttcgtccagcaaagattatatatttcttttgctcatcagaacggcataagatctggttggatatataattttcaactggagccaaaagagtgcagtgttgcagtacatgtgaggtagacctgacattacaaattgcttgatagggttaactttattttctaaagaattaactgatggatatacggtctgttatttgtacatatg

SEQ ID NO: 46159 - DNA, 310 bp, Oryza sativa
tactaaccttatgcctcgtctacctcgcctgagtcccagccatctatttcaccgacgcctttttcccactatatcaacatggccgcgctactggatggaggcaagatcaccgtctcaagaagccaatcaagaaactatgacacatggacatgccatctccactaccaccagctgttcgacacagtgaggcagctatatcttgggtgctcacaatggcggaactacatatatccatgtgggttcctatgcacccggctgaaaattatttgtaagctgtaagtatacatctttaccatgtcggcaccccgtc

SEQ ID NO: 46160 - DNA, 174 bp, Oryza sativa
aaaagtcatcaagggccatacgaccaggccgactcagagacagaagagaacggcgaagattggaccgacggggagaggcgaacgaaaatctcggcaccaaggagcgcaagaccaggaaccgagtcacaccgacgtgcaaagacgcaaggaacgaccacgccgaagaagaagcac

SEQ ID NO: 46161 - DNA, 402 bp, Oryza sativa
  unsure (1)..(402): unsure at all n locations
agctctgatccaaccatatccacctatggtttgcaccgtanaatagncaccactgtcaagataatagatgttgagcactgatttgttagccatcaatgatccttcaaccccaccaacttccaaattgtaatttccgtaaccatcaatttctattccttctgggttgaagcgagaaagggtgttcttcatgcccacaaggtgacgcatcacaccctcgcgtgacagcgtaccttcttggtcatggtttccgatcaccgcagcccaaggaaggttcatgtttatggctggggcgattgctgcatccatatacattggcgcatcgtgtgcatcaaagccatatatattatcacctgcccaatagcatcacccaacaatacatagtctttaatacaggggaaataa

SEQ ID NO: 46162 - DNA, 407 bp, Oryza sativa
  unsure (1)..(407): unsure at all n locations
atatttttctcactgtgtctatagttttatttcctttcactctgtatactgttagtaataaatntgacacaacctgatcatgttactttagattatgtgtacaagcattctctcaacaagcaaatctgctgctttcttttgttcacatgatgntcatttcctgattcactgttgcttttcttgttctatgaggaatgcaaacgcttacggcaaagcataaagtgtggattcattccaaggctgacagtggtaatgttattagttattattacacaacgctatatgtgcagtctttttggcatatgtgcacagtttctcttgttctaaactatcttaccattcatggagatgttatgagaaagcaaggttctacaatctctcaaagtcacgatgtaagcattacactg

SEQ ID NO: 46163 - DNA, 403 bp, Oryza sativa
  unsure (1)..(403): unsure at all n locations
atcttgatggagcatagaccgattgattctttatctgtcacttgtganaactattcggttacatctatgcctaagaccggaattgttagtgatcttctccctgttagtcatattgatgttgacaaaaagaaagggaaaagtgttattattggggatcctcggcccaagaatagaatcaacaatgcgaaggccgaagatcataaagttgcaaaggatgagtcatctagttcccaaaagactaaaaagccgaagctcacttttgagatgcttatggctaagtacgagaaaggattagccggtcaacgatctgataaccaaactagtgattcgaaaagaccaagatcatctcgtaggaagagatttggtcaaacatcatagcaatcggagccatcaaccataccaa

SEQ ID NO: 46164 - DNA, 457 bp, Oryza sativa
  unsure (1)..(457): unsure at all n locations
tactaagctgctctgaatttgctttggaaattcatacttctcatatatacttgccccccccctaattttgcaatgttgaaagcattgataaaattataattcggactaacggcgatatatcaaatatcggccatcattcattggcaaaacacaaccgattatgataagaaaaaaaagcactaaatgcgatataatctatatcgaccatcatatatcggcagaacacaaccgattatgataagaaaaaaaccattaagggtgatataccttatatcggccatctcatggcgatgtcaacacttatccgatcatgaattgatccaaacacttggataatatttcttcaagtattttccattatatgctcgtgcataaacttcaccatcaagtcctggtaacatataagccccttttgacacaactttgtatatntgaaacagtccttcccaattccgtg

SEQ ID NO: 46165 - DNA, 396 bp, Oryza sativa
  unsure (1)..(396): unsure at all n locations
agcttgtagaatcaactaacanatgttgtttgccatcatatatagaaggctattttttttgttcattggtgcaaacataccctaatcatttatttggtcagcatttatttgacttattacaacttcatgcatatgagtcataccatgcaatgtgcacttcaagagatttgaattacggatatggcaaaagaaagtagtatttggaagtttaaacacctatgatgcacttatattgcaatcattacttccactgagtataaacttacggttaaacttggatgtctaagctatttacctttccacagtatgcattgaagcaggagaggcaatctgcaggcaaccactacatatagtaagggatacaggcaagttccatcttaatctttaatccctctt

SEQ ID NO: 46166 - DNA, 370 bp, Oryza sativa
  unsure (1)..(370): unsure at all n locations
ctaagcttctaaatatgcaaaaccatcatacataaccaccttatctttaatatggatggnatggcataaatcacggggtcggatgttccattttaaaatgcaatgtgctatacaaacttcaatataaagtttatggatgtatatatactttttcatattacatattacatacgtatatacttattttggcctaatactttagtctcggtcttcttttatcaacacatctactcctcccgacactattttgttttgttgtgatgaaccttatcggctataattattgagtgaatagctatccttaaaatcatgaattcattgtgtgctttctttactgaaacaaaaaacacttatttaaaatgaaaaatga

SEQ ID NO: 46167 - DNA, 389 bp, Oryza sativa
agcttgttacctggatttgttcactggatatagttatatgggaccattgttactgtctttcatgattctcccaaagacctccttcgcaaatttatggatcatgcttcttggaatgatgatattaagccatgggtgtgggacttcccacatgcccttagctctcaacttcatctcagaagagtgtaccctatccaagaactctatgtatgttacatccgtgtggaataaggaggaaggcatatatctaagttgagacagcagtgtgttgacctcctgtgaacatatatacatacagaattcaaccactcaaacttgacctcattttacttgtgttataaacatctttagtgacataaaggtaatgggtggctcacctgttccatgacatc

SEQ ID NO: 46168 - DNA, 365 bp, Oryza sativa
cactttaaactatgcttaaaccccaggcagttgccgtcgtgatagatcccatctcttattgtcaaggtgaaagttgtcattgatgcatttcgccttattaaccctcataccatgatgcttggtcatgagccacgacagacaacatcatatgttgggcacctaaataagccatctattcaagtaagtgggtaataatgttggagcttctacatatgttttctatttcctattacgtatgaatgatcaaggtatctcttttttgtcaggctcttattcatgggctgaacaggcactactattcaattgcaatcaattaccggaaaaatgagcctgatgaaaagatgttactgaacttgccaaaaaga

SEQ ID NO: 46169 - DNA, 397 bp, Oryza sativa
  unsure (1)..(397): unsure at all n locations
agcttctcaaagttggtttcatcggagatgtactccatccagaatggctagccaacccagtcatggtgtggaaggccaacgggaaatggagaatgtgtgtccggttcaccgacctcaacaaggcgtgtcccaaggatcacttccctcttcctcgaatagaccaactggtggactcaacagccggttgtaagttgttgagctttctcgacgcttactccggctaccaccaaatcagcatggcgaaagatgatgaggagaagacagcattcatcacgccgtttggggtattctgctacgttaagatgccgttcggactaataaccgcaagaaacactntccagcgcacggtccaaggcgcacttagcgaccaactcggatacaatgtcgaggcctacgt

SEQ ID NO: 46170 - DNA, 373 bp, Oryza sativa
tctgctccatgatgttcttgctcacctgttcattcttctctgtttcagatagtgcaattgtcttctgcgtttctgcttacttctctgctaacttttgcttcttaatggcaatcaatgcctatggacataagatatacttacagaatatacgttctctagtcatacaatttaggagatacaagaggatattagtattttctatgtgttaaagcaagatcatgtcatttctgcaagtatgtggaatgcaattttatcctaaagatgcgtttgaactcctcaaactcactaatgtaaactgcattgctatatgtattaaatatatctgactatctgcagaaaactctatgatttaatgataacacacttatttttc

SEQ ID NO: 46171 - DNA, 399 bp, Oryza sativa
  unsure (1)..(399): unsure at all n locations
agcttagagaacatcttggcatcccagagtggcttgcaattctaaatgctcttcccttaagaanttgcgtcttacaggcctttcagtagtgaaacccattatttgtcaacatttataggtgtttggtggttcatggggaagcaccttggctctcgcgtacagcgagagtcaccctgataaggtgagtgatctatggccctttacatttacctgtgatgatgatacttgttgcaagtaggtgtgcaagggagctacattntagattcacacttatactttcctggatgtttgttaggtcactggcattgttctaagaggcattttcttgcttangaaaaaggaacttgattggttctatgagggtggtgcagcagctattttcccagatggtatgtgtgg

SEQ ID NO: 46172 - DNA, 422 bp, Oryza sativa
  unsure (1)..(422): unsure at all n locations
gaccaatctctatcaatatttagtaattattgtcacgatcttattgacaaaataaaaggcaccgtattagccttaagtgatcttggactgtatgtttattgccaaagtactatgctcctcttcagataaaaaataatgtcctcaaaaaactttttttctattgtattacttataagatttgttntaagctatttgttaagtttattttttaaaacctttaatctatccctatgatcacatggataatctgtcgtaataatatgcttaataatctaatcaaatggtacattagtctcccaattcaaagtttaaactcaaaagacgtttagttgtgcataattatgaccatagttcatttattttattgataaacctgaatgatcgagaaaatgacatataaacacacgacatatatcattacg

SEQ ID NO: 46173 - DNA, 382 bp, Oryza sativa
  unsure (1)..(382): unsure at all n locations
agcttaattataataatccgcacatctccttatatctgcattaaacttcggatgatcatatcttggtcatacgagctccgaatcgacccgntcaagtctcttaatgtttgttataacctaaagaaccctgtgctttctttttatgtattgttattgcttctttataggctcgtagctttgcttgtgtgcttcgcgtatcttctgtcgttccggaggttcccgaagcgtggttcgtggtcgtcgcctaatgttcggaaggtctgtctctctgagcaatgctattcacatcttccttgtgcatattgaatcccagtcattaaaattattttgatctaaattacagcattatcgctttgttacattcccgcgttatacctgatta

SEQ ID NO: 46174 - DNA, 350 bp, Oryza sativa
accaacaagcaatgatgaaccgagcaagcaattgattgataaatatacactccattttagatgatagccccgactgcaacttcataaaaacttgatgttgacagtcagattggaagtacaatgttagcctaacgtaaaacacgaagatgttcaatgttcaagagttgtgacgagagaccgtcttccgcttggtcgataggaacctggcgggtgactcaaataataaatggccttacctaatgagatacttggccgatccggtatttgaatttctcaaaccagtcgcgatagaaggacggatcaacatggttatgatatgtccaccttgtagatgaccgctgataaactgt

SEQ ID NO: 46175 - DNA, 425 bp, Oryza sativa
  unsure (1)..(425): unsure at all n locations
atccttatagtcacctgctgcatgcaagcttcaggaagagatgggttctaagctgttctttattactgcttatcatccgcagacagacggactaaccgaaagggtgaatcacattttggaagacatgtcgagagcttgtgctntagacttcggtggaagttgggataagaatctaccttatgcagaattttcatacaacaacagttatcaagctatgtcttcagatggctccttacgaagcactgtatggtcgaaagtgccgcactccgcttttgtgggatcaaacgggagaacgtcagggttttgggacggatatcctatgggaagcagaagataaggtgaatatcattcaagatagattgcgagtagctcagtctcgtcataagatgtatgccgacaatcgtcatagagatttgagttttgaa

SEQ ID NO: 46176 - DNA, 442 bp, Oryza sativa
tatgaaatatcctatgggcttatataaacatcgtgccttattagccggcgcgagaaagggatcgatctcttgaacatatatgcatgtgcatttgggtaatctctgattcaaaggatatagtaattaatgtaaacgtatattacaattgatttgaaggtgcaacgggatgcatggctaattaattagagagttaattactgaaattaatccaatttgggagagaggttggtcgacacacccgctgcaatgtcttgaccattagctttggatgtgaatgggctgtacatgtgactgttaatctgttaaatatacagtgcaattggaacaaactgtgtcggtctgtacatatataatcaattaatggaataaattacgtggtgatgcatattttatattttggtgcacccacaacaaatagtccaattttatgtatttctatcat

SEQ ID NO: 46177 - DNA, 398 bp, Oryza sativa
  unsure (1)..(398): unsure at all n locations
agctagcatatcatgattgtatgaagnttttgttctggtatcttgttntaaacatagcagtttgctgaacaaaatgtcagcataatacatgggaacatatacatttctgaaatatcgtttcaggtctttccaagattgtggtattttgttatgcctacaaagatgtttccaatcattagaagcatgtttaattaaaacactagaggcacacataaccttttgtttctcagacaagatatgcttttgaaattcactatcaaccgctagctcccaattaatgtaagcatgaggatcatagttgtcctcgaaataaggcagtgcagatttgatcttacctagaacatcatcacttacctcataatggtcatgttgatcactcctcatgtcttgatgaagat

SEQ ID NO: 46178 - DNA, 429 bp, Oryza sativa
tcaagcttcttactacatccacaatactccaaatgtggaagctcatagcctcgaggtgtgttgacattttaattgtgcaagtggagtagtttgtgccattaaacatgggagccttccctacatggtttacctcgttcgatatcttctctctatgcggtgaagcccaataaagagaaacctggctctgataccacttgcaggatcgagatgtcgactagagggggggtgaataagtgatttaaaactaaataacacctaatcaaatctaacctaatatgctaggcttggtgagggtgaactctaactaaacaactaagttatgtttttgcaacctaaggtgatagtggctcaattatatctgttggaaagtgaattgcacatatgttaatgcggcaatcatattatactatgagacaagttatttttcac

SEQ ID NO: 46179 - DNA, 404 bp, Oryza sativa
  unsure (1)..(404): unsure at all n locations
agcttgtccactanaaagtatttctaanaatacatatggagaaacagcaaaggttgaacacataggacatttggtagaacaacaaaattatgcaaatatatctctacgntctcttggtcaacaaacagatcgaatagagacaatccttatggaaggctacaaaacaggaagacctgaggtaaagataaatattccctctaattctcagtcttctagttctcagtctgttagtcctatgtttgtcccaacaattgatcctaacatcaaacttggaaaacaaaaggcttttggacccgcaatttctgaagaactagtcagtgagctagccttaaaactaaataatttaaaagtaaataaaaatatcaatgagatttctgataatgaanaatatgatatggtcaata

SEQ ID NO: 46180 - DNA, 403 bp, Oryza sativa
  unsure (1)..(403): unsure at all n locations
ctgctcttgttgattactagcacacatgaaagagtcatgaactagtgttctttacttctgattaaattgatgtgatatttgtgtaggtgatgacaaaagctacaattattcagtgttgtcgttctctcctgcaggtgacgtattatgcaatttactgtttgctgtagttttacagcgccactgctcacactctgcttttgaaagcaatatgtctaatggattacataaggaaaggtctattgcatccgtcagctaacatttcttacagtgttagggcccttntagttcatatataggagtggcaaagaattgtataagactcaaattccaacagatttttcttgctatgtttccctttgacttataagactatgttcctatgctttattgtcataggaaaaat

SEQ ID NO: 46181 - DNA, 374 bp, Oryza sativa
agcttgcccttcgacgactgccccagatgctacattttcgcccagatcaccctccttgacaaacaacttgcccaagaagctggacaagtcatccggcatcgctccgagatcgggcccggttgtcgcggccgaagcagtcttcctatgagccatttcggcttgagaagtggcgaagctacaaaggtgagaggggaactgggtgaatatctgtcttcctggaacgcgtgagcgcaagaagcaggaattgaggagaaaagtgctgccggaaaaaactgaggtaagcctccgggggaaagggggaggttggatttatactcctccgccctcgcgaccgttgagtgccaaaccgatggatgtgcgatgtgtggcatgca

SEQ ID NO: 46182 - DNA, 238 bp, Oryza sativa
ggtcttaccactgattgcgagcttatcacaacgttatcgatgaaaaccacatcaaacttgtccaatgatgccatgaacactctgctcattaagttcatgaagaaggcaagagcattggtcaatccgaacgacatgaccgtgatatcatacatgccatatcacgtggtgaatgcgcgcttctgaatatcttcttcacgaatacgtaaatggtgatatacggaacgaagatcaatcttgg

SEQ ID NO: 46183 - DNA, 437 bp, Oryza sativa
  unsure (1)..(437): unsure at all n locations
tgctcgagctcgacccgttgtcagcccaagttacaagctttcttttacacccaaatccataacatgactttcactgaagcaatgatatgcgcgtatcaatccgacatacaccaaagacatcacacaaagggcccgtttcgtagagcttttaacttctattaactctangagttggggtttggagcggagttgtggagcatcctaaacttagttccacatctctaaatcatgttgtgagagtgctccacccagctatattcccattntaggtggagttgaaattgttcggctaagctccagctccagaatatgtgaagctggagctgaagccgtgccaatactagcccaaaaccacaacgtcgcacaccaactttcgtgagagttttgcaggaaaatagtactaccttcgttttttaatatgcaacactattgatttg

SEQ ID NO: 46184 - DNA, 390 bp, Oryza sativa
agcttggacgtctaccccagctattactctatgcttttcactctggaagcaagaactaactatatgtgacttttacctttctgcagctatctttagctgttgcattttcgctgtcgatagaatgttctcccatctttccaaaagttactataggtaacaaggtaaatgctacgctcaatgcattacaacatttgcattttgacattgaagctaatccaggtaggtagcagatatctttaaagtctagctctagagtgttaggtatagcatcttgcaagccacaaataagagagcgcgtgagtgtctttctgcaatatgctactgtttcattttttagatggtgaaacgctgctatcttaaggccactgagcttggtgatgaggagatgct

SEQ ID NO: 46185 - DNA, 444 bp, Oryza sativa
  unsure (1)..(444): unsure at all n locations
cggaatcatgcatggtcaaagccaaactctctattnttctatcgctgacgaggtcattngtttttttttaacgccgtgccacggaacataatgtccatttttgcgtgcactgcctggtcaagattcggtaaatatttttaataaaaaatattgtttgtatgtaggataaaaacaagagaatggatgggttcttgtgagaagtagtaatacttaaattattgatgttgcgacagagtgctgaacagtttatgttaaaacgtcctgatgacctagaattgtcgtgtctagatatgatgtgatcatgcgaagattgttgcatatatgctcaacttggattgtcatttgcgagcatggacattntgcatattattgggtagtgtgttttggtttggtatttaaaagaaagcagaatcgaatatttgatcaccctcatacctctctttt

SEQ ID NO: 46186 - DNA, 341 bp, Oryza sativa
  unsure (1)..(341): unsure at all n locations
agcttcataaccgacacgtctcattattatgacatgcagcaattattattagttcgatgtgctcatcacatttttgctcctgtntcctatctccagctcacggctatagtccaaaactgacactttggagaaaatgccggaaagagatcattctatgtcagagggacgtcccgcctcggatcgccgttcctgccgcattgtattgttgcacttatttcacttcgtctgcttatttttgcctattcttgacctgctcgtttgtttaaactattcgcatctatctctcctgattttaactatggtctactcacggtctgtttttatctgctagcactcctacc

SEQ ID NO: 46187 - DNA, 466 bp, Oryza sativa
  unsure (1)..(466): unsure at all n locations
gtcaaatcaaaagtttgcctcccactttatcattgtatttctctccaatacacaagttgtcctcccactttatcccttcataactctgcaaaaacacatccatggctttagatctaaactactccctctatcccctaatataagagattttgatattttgcttgcactgtttgaccactcgtcttattcaaaaaatgtgtgcaaatacaaaaaacgaanagttctgcgtaaagtactttggagaatgaagtaagtcaaaaaaaataaataataattctaaaattttttgaataagacaaatggtcaaacagtataagtaaaatgtcaaaatcccttatattaatggacggagggagtagaaaatatgcgcaccaaacggcgcacttaatatctaacccgttggttcatatgagtgtgtacaggactcacaatccgcgcatgctaaatggagcgacatattttcttt

SEQ ID NO: 46188 - DNA, 400 bp, Oryza sativa
  unsure (1)..(400): unsure at all n locations
agcttaattccacctcttcgttttgttaatgattatacatgaccttactttngaagggcaagcttatgaatacaatttcctgtaactgcaaatcttggggtctcaaacttacccgtaactatcactgaactggaggagcaagttaaacataagaattgggaaaaggaaaggcttctcgaggatataaaaagacaagaagatctgttgaaccaagttaaggatttgttcagcaagaaaaaggaacagttcatggcttatatcactcaaccaggaatgttacaggtgaacttacaatttattctgttattttcttgactgtactaatatattaagaatttattgtcatccggagttacacgtagataatgaatagaattctctatttctatgaagtgccact

SEQ ID NO: 46189 - DNA, 306 bp, Oryza sativa
tgagtgatgaactaatacagcgacatagcgcccaaggtgttttataggaatataaaataaagagctgaaatgactactttgcccctgtcctaaacaacaaaagataatatcaaggcaaaacttaaatatcaatcaacatctttactcctccttttcttaatttctttttgagccctcactctctgtcctctctgtttgttgaattaattaattaattctccctttcaatctttgtttaagaactcttttctttttagaactcccctctcaatctctctctctctctctgtctctctctatatctgt

SEQ ID NO: 46190 - DNA, 386 bp, Oryza sativa
  unsure (1)..(386): unsure at all n locations
agcttcatgaagagatgggttcttatcttatctttagtactgcttatcatccgcagacagacggacaaaccgaaagggtgaatcaaattttggaagacatgttgagagcttgtgctttagacttcggtggaagttgggataagaatctaccttatgcagaattttcgtacaataacaattatcaagctagtcttcagatggctccttacgaagcactgtatggtcggaagtgtcgcactctgctttngtgggatcaaacgggagatcgtcaggttttcgggacggatatcctaatggaatcagaagaaaaggtaaaggtcattcaagaaagattgcgagtggctcagtctcgtcataagagttatgccgacaatcgccgcagagat

SEQ ID NO: 46191 - DNA, 410 bp, Oryza sativa
  unsure (1)..(410): unsure at all n locations
nggctccaataaagaccacaagaaaggccgatagctccccaccacttgtcaaaagccagaagcgtgaacgcggcaaggggaagttggtgccggatccaaaaatgggcaaggctacgatgtcgatgcctgtgagcaaatcggtgaatgtctggatggcgccatcccaatttgagctatgcatgccattggtggaggacaatgtattatccgtgatgggtattgcttgccgagagctacataatcaattcatggagctaatcaatgctaagcggataatgaaggagtcatccatagttggacatcacgaccaccatccgttcctatcatcgcctgcctatataactataagcttggatgacctcttcgaccttttatgatccggaagttgacactggcttctaaatgctact

SEQ ID NO: 46192 - DNA, 391 bp, Oryza sativa
agcttgcaagcaagtacattcctatatttgtctggcattggcatgcacagcacactgacctgtggagatgaagttgtccatgatctgggcatgggtggtgtcgttgatgtggatcccgccggtgttcgggctgctctccggcgccacgacgcggaggaagcttgccttgacgtccgtgcaccgggtgaacatcaggtggaactgcggcccgttctgcatcgtgatcccctgcacgctcacccgcctgcactcctcgaactgcagcgcctgcaattcaatgcaatgcaatcgcagagagaagaatcagtcacggtcgccgccggcgactgtactccggctgtcggaatggatgagcgtacgctctcgctcaccttgggagcagacaccgtgc

SEQ ID NO: 46193 - DNA, 374 bp, Oryza sativa
actttcttcttatatgtatacaaagttctattctctattatctccttgataaaggtaatgaatgttcatgcttatcgaaattagtacgcaaagatgcttcgcctctaagtttatcatgattctgaaatgtttgttgaaacactgaagataaaacagttctttgaccgaatatgataccagaaaaaatgttgcctgagacttgtacattgcattacaattgaagtgaatttgggccatgatgtggtttctatgagtgtcaaaacacattgtaaagataaatgatgaaataatttaaaattaaattggcactacactggatttcatatagatatgtaaacgatgggttgtatttttttggagatatttcctcaact

SEQ ID NO: 46194 - DNA, 349 bp, Oryza sativa
  unsure (1)..(349): unsure at all n locations
agcttgcaaccaccgcatcgctttgnttgtttatggaaaaacaaagtccaattgaaggttaaagtttttggttggcttttactcatggatagattgaatacaaagtttatgtcggatcataaacaatcctatgtcattaacaatgcattgaaactcttttgcatctattttttcaatgtccttttttggtgaactgctagaatgcttttggcactatctaggatagctcctatggataatatgatgaggcagtctaaagtttcttatcaaggcagatgttttatggagaaatttccttttaggagcctataatatntggacgcaaagaaatggtcctaattttgataat

SEQ ID NO: 46195 - DNA, 350 bp, Oryza sativa
ccagcaatgctatgtactcagatcctaaacatccccttgagcatgttgatcctattttaatctattgctcctattcatatactgcatgtataatccaaagtcattgggtggaattaacccattgttggtatcacccttttattcttgactaccttattcattgataccttgtgttatcataacatgactaagtgagctctacatgttgggtcaactagatgtattagaaattattgcttatccctgctataaacattattacactattgggatgacttatgaatcactattacttaatgatggctaattgatagtcacgatggtcatccggaattgtcaacaaataattc

SEQ ID NO: 46196 - DNA, 386 bp, Oryza sativa
  unsure (1)..(386): unsure at all n locations
agcttctcaaagctaggttcatcagagatgtactccatccaaagtggctagccaacccagtcatggtgcggaaggccaacgggaaatggagaatgtgtgtcgatttcaccgacctcaacaaggtgtgtcccaaggatcacttccctcttcttcgaatagaccaaccggtggactcaacagccggttgtgagttgttgagcttcctcgacgcttactccggctaccaccaaatcagcatggcgaaagaggacgaggagaagacaacattcatcacgcctttcggtgtattatgctacngtaagatgccgntcggactaataaccgcaggaaacactttccagcgcacgggttatggcgcacttagcgaccaactccgaaacaatgtc

SEQ ID NO: 46197 - DNA, 435 bp, Oryza sativa
atctatccattattcacccatccattcttctatactcacccatatctataagatcattgtgagtttgtgtaaactccttttccctgctcctaaaatgcctttatttattgtgatgcatgccatccagtccctcctgtcctagctgaaatgctattgtgacacaaccctcagaagtactgaccaactctatctctccttgcctccttctccccatataaccccaaataatgctgcttatacactaagccggaggaaagctgctgtctctctctctctatctctctatccaccgttggagttgtctctgtagctgcccacaaaaacacactcctagaccctttctttcttcatgactcttcacatcatgtgatatactgctgctcatggtggtagagagtatatatattgctccattcccaccattattgtttgcta

SEQ ID NO: 46198 - DNA, 347 bp, Oryza sativa
atgcattggcgcccgcccactaacatcctgtcgcattgcatcaaagcttgtagcctgtcgctgacatccatatgaacattaagatcgtgacctgctatatcacaagagacgaacacatattggtggatacctgacgaattattcgtcactgtgttcacattagtctcatcttctattacttgaccaaaccaaagcgaactagtacgagaccaatctctgggtagttattaccagctacctcaatttgtatatctaggtgcttctaacatacttaaaagtacgtgcttttgttttcttatggattttcgcttatatactcatccggagtattatatcaatacaacaat

SEQ ID NO: 46199 - DNA, 422 bp, Oryza sativa
  unsure (1)..(422): unsure at all n locations
tcacctgangcatgcaagcttggagtctcaagacagaccgcacgattgattttgcttgtattgagaaaagacagaccgactggagtcccgagacaaacaatactgatagataaagacgtaaatatataggaggatgatgcatgtaaatgtaatatttaatatattttaataatatatttattttgtgtttgaaatattactatattttttataagcttagttacacttaaaatttttttttgacttacaaatatattaaagtgacttataatatggaacggaggaagcattctattttagttacaaatatatgagtagaaaagttaggattaatacagtacttactgtatttcgcattgtaatatgttgagttgaataggtttatagtttatacatggattcatataggtgttttatatacg

SEQ ID NO: 46200 - DNA, 335 bp, Oryza sativa
taacgaacacctattgtaactcattactataaatattttttaacatgtttcatggagggagactatggttgtgcaaatgcacgacttaaaggccagtttaaactaatttttttatgaccgaaattgaatacaggaaaaacaatcgactactgtcaaccacgataccgagccagtggataatctatgatgtaaattgaaggaaggctcgtgtttacatatgaaagtgtgattgaaacaaactaagatatatcaattgacgaataatcttaaccgagagagctcttggtttgtccaatgaacgatggtccagtgtaaatgtggtaaatatcatttaa

SEQ ID NO: 46201 - DNA, 219 bp, Oryza sativa
  unsure (1)..(219): unsure at all n locations
agctntgctgaccaatgtccgaccggcgtgtttgtgtcccacatatgccttcatgtatgtcgaggaggaggtgtgtagacccccgattttggaaatcagaaatcttctgtgtttatccgtaccaatccctgtgtcggtgacatggggccgggggtatcgtgactagaggcttgggtagccgtggtcacctacgtggcctgaccccctcggtgggggggg

SEQ ID NO: 46202 - DNA, 445 bp, Oryza sativa
tcagcttatcaagatgtcggctcctgggattaatttggggtttgcagtgtatttgtcttctgagacaacgatatgtatgattagtctaatagtttggaaactatgttagtttgcatacacacttacttttgctaatcattatatttttcagtttcaaatcgatatgcaattttattatacaaccaagaaaaaaaacaatacataatacatgtggatccttatcgagatagtcacaacataatacatgtggatccttatcgagatagtctgagtgactgcttttttacatcgctagcttaaaaagtatatatggtgtggaatattgattttttaacaaaaatgtacacattatccaagttatcgcacctctatgctctttttttaagttcttgcattaaaatacatccacctcaagtttatatacgtaccatagacacaatttact

SEQ ID NO: 46203 - DNA, 391 bp, Oryza sativa
  unsure (1)..(391): unsure at all n locations
agcttggcgcacacgatataagacgagggcttcgaaagacacgcgcgccccctatctggcgcgccagatgacggagcgtggggctcctcaccgggagaccgcgcatgcccccctttgccggttcggccggnggcgctaagtgaggttcttcgccctcaatctgaggaacgtcagcgagaagaatcgcacaagacacgggcgacatagacaggtttgggccgctgagaagcgtaataccctactcctgtgttctggtggatctgtgtgtaaaggaatacagagagctcgagagcgagagagagttccagctctatcacccctcctnnctttttttctctcccttctctcttatgcctgnngcctctttntatctgatcaggggtcaccacat

SEQ ID NO: 46204 - DNA, 387 bp, Oryza sativa
  unsure (1)..(387): unsure at all n locations
agctttggccatgtagtttcttgttctctatacctnccatgccatccaccctcatgtccatctctgtatcaacttccaagttccaacaagaatttcacctattaaaaaagatacataagaattgatgatgacctgcataaatggttcaacagcatgaactggtgcattcactatggaatattatccatcccacccagccattaccatggagataagcctaagatttttctttaaataaaaactataaaaaagagtaaatttaataaaactacagctttattatcccatttcataaaactacaactttaagaggaataattataaaaaacatgtaattatgtggtctcccccattagctgattggtagacccactcatcatnctcaca

SEQ ID NO: 46205 - DNA, 431 bp, Oryza sativa
  unsure (1)..(431): unsure at all n locations
ccttcataagtcanatttcgtatagatgaaacggcgtctgctgtttatatcggcgatgtgggcagcggcgacggtcggcatcagctacagatgagatcggcaaggcgggtgttgctggcttcggtggtcctcgatgtggatcggtggtcttcggcttcagcggttgtcgttaggggcgaggcggcgacggcgtcagcgtccctgattgacacaatttagtttcttatcccaaacatctatgcattatgtaccaagcaaaaaagaaagatagtaggtcagcagatcagagaaccatagttgtaacccactgaattcctgaaacaaataagtaaaatgtacagaaattaaatcatcaagttttctcacaatctaattccaactgatgatatatcatcatgcaactaccatctgatcatgagtagcaacaacat

SEQ ID NO: 46206 - DNA, 158 bp, Oryza sativa
ctcatcaactgagtgctggcaagttcttacacgagttacttttgaccctattcatgctcgttgtacatgttgtgaattaccaaagcggatcttgcacatgtgccaggagatgatgcacgatgttcctcagaccggaggcggtgatgtggtacgacacg

SEQ ID NO: 46207 - DNA, 441 bp, Oryza sativa
  unsure (1)..(441): unsure at all n locations
gatgcggctttntccctgttatgctggattatctggaatgagctcaatgcgcgagttttcgaggtcactattaagacaaacaacgaggtagccgacaccattatgtatgaatggtggattgttgggcttggcgcaccgatcatatagacatctgtgttcgtttctccaacaagagttggaagaaatttaagatgctcgtgatgcgcttgttaaactgctaaacgtacgcttcctttgattttctaagataaaaacaaaacatatatccttggattgtcacttaaattggtgggtccaatattatacaccgttagatgaaactgatcttaaaacaaactataaaccatgggtcccacctattctctactccgtgccacatacatacgctttctaccacttttactttttcttcttttntcatatatatatataatggatata

SEQ ID NO: 46208 - DNA, 402 bp, Oryza sativa
  unsure (1)..(402): unsure at all n locations
agcttaagctcggctcgacaaagtctactttctntggaagatgctcgggctcggcttgtatgaagctcgagccgagctcgaattgagcctatgatgagtcaagctcgagcaactcgcgagccgcgagcttttttgacagccctactttcaaggtctaacgactattctctccatgtagcgcctttttacttcctagaccggcttttgttccaatagtgaagaaacaatctttaacaccggttgaaaacccccctttagtacctgttatagcaaccgtgacaagtaaatcgggactaaagatctcgatcttcttactggaccgactttggttacactagtgaaaaaatgatatttaacaccagttggaaacccctttagtaccgattgtagcaaccatgacaa

SEQ ID NO: 46209 - DNA, 279 bp, Oryza sativa
tgcacacagataacggggtgattgtgactcatgacagctgttgatgcactggtctctgcgtatccaagtgattttcacatagatgtagcgatgactgagtgacatgtaagaggttgatgtgcgggctattctctacgtaacctggttgaaaatcacttaatgatgtgctatctcgattaccttcatataaacctacatcatggataagcgacaatgtgaactatagagctgagaataatcagtagttactcattggcagatatgtagttatgggtccat

SEQ ID NO: 46210 - DNA, 403 bp, Oryza sativa
  unsure (1)..(403): unsure at all n locations
agcttcagatgtgcatccactactctcgttcttatcatggcatgtcctaaggatccttacccgctgcctcgcatagatcggattgtcgactccaccgcggggtgcgacctttcgtgccttctagatgcatactctggttaccatcagattcgcatggctagggaggatgaggaaaaaactgcgttcattacccccataggaacctattgttatacgacgatgcccttcgggttaaagaatgcaggtcctacttttcagcgtactactcgaatttctttgggtagccaaataggacgtaatgttgaggcttatgtcgatgacttggttgtaaagacgcgcaaccaagagactntactctcagatctagccgaaacttttgaaagtcttcgctccgcccgcataa

SEQ ID NO: 46211 - DNA, 455 bp, Oryza sativa
  unsure (1)..(455): unsure at all n locations
ntgataccaagttggctaatcctgctttgagttcttcatatgtgatggtcccgctgttgtctgtgtccatgtttgtgaacatttgcttcatgcccttgatctcctcctcattaaggtttgaagcaataacctgcatatacaattgcctgttagcacgatagaagaaaaggcaactaaattatcggcatgacaataataaccttcagagccatctttttcagcttgttcattgctctgaattgcttcatcctagaaagaacagcgctgtcaataggtttgtcagatgcttctccatctctgagccagggatgttctgataacatagaaaccatcatttcttttgcaatttggactaatattangagtttaatgtatggttaagactcaagaagcttacggagaacttgggccgaagtaattcttttctttggatcttgtgtcaacatctttctaac

SEQ ID NO: 46212 - DNA, 394 bp, Oryza sativa
  unsure (1)..(394): unsure at all n locations
agcttgctcgggcagctggaggatgataatgatatatatatatgggggngggactctagtcccggatggtaacaccataccatgctcaagatcaccggtgatatatcagtcaacaaaactattctaaacaacagactctaactgtgttggttcctgaacaggaaaatggatcaatgctgaacagggtgaaaccatactagaggttaaaatcaaagcatagtacgaaaattggcaaatcatattcaacccacagtacattattgtattgataaataaaagggaagtaaaatcccccacactaactaagctggatcgatgccaacaacactgatgattattcagttcactaagttggatcgatgcctacactgatatttattcatcatatctttct

SEQ ID NO: 46213 - DNA, 347 bp, Oryza sativa
  unsure (1)..(347): unsure at all n locations
agctntccatgaagtacttgcacgcacaattctgagttcacatgaagtcgntgcggccatcagaagttggcgctgccctgcagtccgaatccaccctgcgcgaatcctctcccctttggatcctctccatcgttcctgagtaaaacacgagtgcacgcgtctccggggtataaagaagaggaatatgaactcaagatagaactcacctggtaatttagttgacgtgcacgagcgcgggtaataggaccatcatgctgtacttggggggacgtggatgtatcgatggtggtgatgtcctcatcatacctgccctttaaatagacttcacttccatcaattcacacact

SEQ ID NO: 46214 - DNA, 306 bp, Oryza sativa
taaagccatgaatccgtcgcaagcaatcaagataaatattatgaaaattgtttaaaaaatacaatataacatctatagcccccgactcactagtcaacggcgaaccagttgatgtagtgaggcgaatgaaaagacaaaatatcatataaagaataaaataaatgatgacttagctttgtaatattccctcggtgacagcaaaagtagccgatgtgggaacgaagcagtccatcaatggtgacaaaaacaccagtcggcgccagtggaaccaatccagtggtgtagatgatgaagcccattaacagc

SEQ ID NO: 46215 - DNA, 392 bp, Oryza sativa
  unsure (1)..(392): unsure at all n locations
tctcgacccggatccttaagtcacctgcagctgcaactgactgaactgctcttcctcattttctcttgtgcggananataatgagagttgtggataatcgctccaactgtaacatgttcatctttatctatttgtctttataccacttgataagatgaggcttcaacttgaccaaccacatgataattcagacctccaacatgtatagtcacaatagcctcatcatgatatttatttactcctatatgaattatatatgtaccaataatttattgtcctacgataagcatcaacacttgagtactttgacagccagggaaatttttaagtaagtgtgtgtttgaatcactagagataacttctgtatcagcttgaaggtagatcattatttt

SEQ ID NO: 46216 - DNA, 396 bp, Oryza sativa
taactcaacttggttgtcaatgagagattttgtgcccttatcaattgatagcagtgtaccttaccttaatcaatatcattgacccatatgaatcatctctatcctaagcctacacatttagtcgctatactcggatgaatcattttctcaagttatatacacactttccctgtgaatcaatacccttgatatactctgaagtgatatgcatcatacggcggtatgcatgaatatgcggatccatctgtgaccgtaacatataccaacacgactatattctcattcacctggtgagactggatgttttagtctcggtctatgatcaactctctatccatctctttgcctaatattgagcccaatcgaaataaaaaaatactttagacttatgtaaac

SEQ ID NO: 46217 - DNA, 163 bp, Oryza sativa
  unsure (1)..(163): unsure at all n locations
agcttcacctagcgcanatcagatctaggatcattaacatatgcatttagcaatagttgtgcaagctagtacagatatttcagaacatattgatacttgtcactgtgtaccttattcaacgaatcaaacagcatatttctttctcctcactgccactatgctt

SEQ ID NO: 46218 - DNA, 446 bp, Oryza sativa
  unsure (1)..(446): unsure at all n locations
agcttaagtttaatcttgtagcaaagccgtttattcacatttatttattcatgcgnggtggtaattaaattgaaaatgcatggcgtacatatgatgcatcctggatggttttaactgttccgtcctgatcaaagcatgtncgtagacatcgatgtcccaaacagaaaaaaatgaagagatatactaacttattcagagatcaatttaaatctcctaattaatgcaactttaaacgatgactgatgtaaatgaatgcaaatgtaaactatgatgaaattgtaagattatgaaggtgcctttgatcgaggtgaaaaacctacacatgttaacatcatgtcaaatattttaaaatatattgatgctcatacatttttaatcttgcgtctagaatggacatgttcttgcaactagacggaataatttgtccgtgtaacaatggtaatgca

SEQ ID NO: 46219 - DNA, 456 bp, Oryza sativa
  unsure (1)..(456): unsure at all n locations
ntaccttatacatctttgattaatcgnacaagnngngtttctctgtgacgtatgatacaactggnttcttggagaagaacagagatccgttgaactctgagttaattcaactactctcatcatgtaaatctgaactcccaaaatactttgcctctgtcatggttgctgattctcagaataaatcaaccttgtcatggcactcagctgttgattcacaaaagcaaagtgtcgtgaccaaatttaaggtaccactttcaatcattcatgtattcataggatcagataattttgttcaagagtgttgctcttgtcctctatcttttaactcaatattttgtattacctccatggcaatgcttttagctcctggtccatgacagcttaatgcataatgttgtgcacatttctataaagtttgatgtacatgtaaccatcttcatgctcttatatgttatc

SEQ ID NO: 46220 - DNA, 446 bp, Oryza sativa
  unsure (1)..(446): unsure at all n locations
agcttctgccacggtattttggcgctcatttgttctatcaaatcccttagctgncacaagaggatgatgggtcagtaataagccttctaataagacaatggtaaaactatgcatactgtaaacattatgcagaagattgcaatcataaacaacgtgaccaaagaccaatgcatagctttctcttttttgttctttggagatgtcagacagcatctatttgcaacacaaaaggtacctcgtgatcatgagatacaatgctacaggggattcacttatgttatgtgcataacataacttaaactttatgcaaacaagggactataactattgattatagtacggtcttatcaagcaagtgtgatatccactaacaagtctaaacaagacagcactaaggaacaactctgcacgctggagggtctgagttgctaacatgtggtaacatc

SEQ ID NO: 46221 - DNA, 334 bp, Oryza sativa
acgaggctcatgtgttgtgcagtcgcggagtgctgtttaagtgtacatccactgaagtgtgagtaaaccaaatctattcgaatagtcgtgctcgcggttattgagcatcgggacatgtattacacttggctagtctctaaatacttaacttgtgtgggatgggttgttgcatgacgaatatttatgctgttggagccacttcctgagaagggggaaggtgggcatcctcagaaaaccatatcaactcaatggccggaagctatccttgggatcacaatggatggtggacagaaccatctgtgtttaaatacaaacactggtactaaaatatgat

SEQ ID NO: 46222 - DNA, 408 bp, Oryza sativa
  unsure (1)..(408): unsure at all n locations
tacattgncaaacttgactggtactagtactactgtaaaatcacatcatgcatgtctacacactacactgttctagaaaatttacagagcaaggacttcaaccttgactttagtttcacgagtagtagagagggttagagagtacgctggtatgttctaaaaataaattaactccaacaaactcccccttaatttatttcttgcaaactccgatgagctctctgtcgcggataaattnttctttggataaagccttggtaaatatatctgccaactgctcatcagttcggcaaaattccaatttaacttcctagcgatcaactgctttccggatataatgatacttgatagcaatatgttntgtcctgtcatgactgactgggatttcgctgatcgcaattgcagact

SEQ ID NO: 46223 - DNA, 374 bp, Oryza sativa
cactcaacatacgatatgtctgtgtgttgtttgcttgggaagaagccctctcttgaacttatactttgaaaatactgaagcagcgaaaggcctctaaatggtgcgatactgtccccgcccgacgtcaccactacatgtttgagtagtatggggatagttgggaccaaagtatatgcgagactgaggtaaaagagatggggacgaggattcttatacaggctcgagctcttaaattgcaagtaataaccctactcctgtttgtcgaaaccgggcattgctcttattcattataatcacaccagtacaatatttggggtagcctatttatctgttatcaatattgcggtctgtagtgctaacacgctatcgacaac

SEQ ID NO: 46224 - DNA, 285 bp, Oryza sativa
aaaacataaccccgttggcccccaaaaaaacccggggccaagggggccacccaacccaacagagggaagaacagggaaaaaaaaaccccccccgggaaaccaaaaaaacaaacaacccgcggggcgcaaacggacaaacgggccccacgaaaagggggccaggaagggagggcaaccacccggaaaccaagggagcggcccaaaccaaacaaacagccggaaaaccccaaaaaaaaggcccctacaaaaaggtccgcggggcacccgaagaaacgaaccaacccc

SEQ ID NO: 46225 - DNA, 162 bp, Oryza sativa
  unsure (1)..(162): unsure at all n locations
actatcaagctgagagaaccaccctgcnattgnatttttctcaaacaananttttatttagtgctaaatatgactcntccttgagccttgtaggagttctaaactttcacaaatgttgacacattgactctttacaaaaactaattatacaaatgaaccgtg

SEQ ID NO: 46226 - DNA, 407 bp, Oryza sativa
  unsure (1)..(407): unsure at all n locations
cacgcaagcttccccaaacaagacctattatttctgttaaatcagcngncgcgcgatgcaccctcactaaaagattggaaacggctgtaattggagcgttcccttgtttaatttaccaaatgattactcctctatgcttttgattaacatttncctatatggggtctcatttggtaaaaatgccctgcggtgcgtcaagggcaagactggctgggcagtccaaagttagccagacaaacatctgaatctcatagatgaaatagactaatttctagcaataaatccgcccgcttaggctaagaacaaccagcttgcaaggaatccgaccacgaaaatcgatcaatttggaaagaaaaccgacggatgaaaagtaaattctccactggtggtactaggtggacaatgtg

SEQ ID NO: 46227 - DNA, 334 bp, Oryza sativa
  unsure (1)..(334): unsure at all n locations
agctngananattttatggggatgttatttttatataggggcggatttagacgttctacaacccagaaaggaagctaaacgactaanacagttaatatcggctgaaacnccaatactatctctattagcagccaaagaagagattatatgaaatgctttagaacaatacttaatagatcgaacctaaccgatgcagcattaagtgtgaagagaagcatatgatctaatcanaccgatgaaagctcactcgagacggtggatataccgcataattcaagtcaataccgagacctaagcctatcagctggttttgatgatagaggctagtccatga

SEQ ID NO: 46228 - DNA, 330 bp, Oryza sativa
  unsure (1)..(330): unsure at all n locations
gacgacatgtggatccttcgcaccgagttaaagccgagtaatgcgcnctttcacggaatcatcccagggctatctgctaacttcactcggccagatnattctacccgttaccttcggtacccgggaaaaactattgatggagaacatctgcttcaaagcgctgatttgagacggcataccatgctatactcggacgctcggcgttagccaagtttatggccggtccgcactacacctacatgatgataaagaagcctggttctcgatgagtcttattcctacgaagcaacttaaacaagccagcacatgtgacaaggatagttgcgagat

SEQ ID NO: 46229 - DNA, 344 bp, Oryza sativa
  unsure (1)..(344): unsure at all n locations
tgaggtatgtttcacggcgggtctcattaacaacacgatatgctagatatggaaatgggcaaggtatgtagggcgaatccctatcttagaatatttcatcgccattcaattcatttgaacagattcagatatgttgaagggttaagtgccgttccctccgtctcaatttataaataagaagaaagctgcgttgttggcatttcgtctttacgaattcattttattgtgaaactgacattgggaaatgcangtatttccattaagcatgctccaggtcttctcagaggatgagctggagcgattactctgcggtgaacaagatacgtgggatgtaagcgcctttc

SEQ ID NO: 46230 - DNA, 432 bp, Oryza sativa
tagcatacaaggcaaaaccaaaggttatttggttggaatcaggaaacattcctgataagccacctctagcaataacaagaggagcattacctgcacaaccaacaaatgcttgtaggaaatcacatggtaattagcttgtgattagcaggttgaaaaaaggacatgaacaataagctagaagcaggtgccgaaaaattttaatttcaggcatgctactgcaagtacagatcgtgctcatggcctttcagacatgggacataattaacagcattcccatcaagatttcctggaaaaccaactcgctgcaataaaccacctagttcagatatcagcattcaggtccttaaaagtcctgacatgaacagagccggaatatactcctatatagatatcaactacgaagagctagatcgagcttgctattgagtgatt

SEQ ID NO: 46231 - DNA, 340 bp, Oryza sativa
  unsure (1)..(340): unsure at all n locations
tggggcgggccgagcactctgggcccatacggtttacatgtgtcttaataaagagattgaggataagacgacttatcttatcccatgtaaataaatggtaggtatccggattataaggtatacattaccatatgtagccggntacattatacaatacgttccatgtgttactcacacgctgtgctgcgccatattgatacagatccaatctacttaactagactatggtatttgttaacagcggaactttgcatcagactcggagaagaaagaacaagatcgaggtggatttagtgcggaatcgagttgaatctgaatcggacagcgcatctgctgacat

SEQ ID NO: 46232 - DNA, 110 bp, Oryza sativa
agctagataaatgctttaagaaacaaagtatttttgtttctatcaagcacagcatagatacaccagtattgtacaaattgagccttcatttgttacattcaaactcagtc

SEQ ID NO: 46233 - DNA, 257 bp, Oryza sativa
  unsure (1)..(257): unsure at all n locations
tttataattccgcatatggcaagcttttgttccaagctccaccaaaatcaagagcgcaagctctcaacatatcttncaagaattgattgactcgctccgtctgaccactcagttgcgggtgataggccgtgctgaaatttaaacgggtccncaattcttcctgcagtttctgccaaaactttgaggtgaactgactacctcggtcggatactatcttcttgggtaccccatgcatacacatgatccttgcgagatac

SEQ ID NO: 46234 - DNA, 431 bp, Oryza sativa
  unsure (1)..(431): unsure at all n locations
agcttcanagctatttaaacctctagncgtttcaatcagttcctcgggttctgcatgacataacattttactctagatcaattttgtctgcaccaggaccatcgtcgtacaccatgtcttcaacttctgtcggaactacattttcaggcccgtccccttgttcttcaccatgacgtgtccatatttcttacttctccataaatccatgagttactaagtgctccatcactttagaagcatctttccaggctacttcattcttacaatcagtatatggacaaagtatctccctcatattgttctgttcagcatgtgcctgttaacaaccaaatttggtaacatcggcatcggaaaagaagattagatcgaagcaaagttggaagcggagatcgagttcggaaacagagcaggaatccgctggagtctagatc

SEQ ID NO: 46235 - DNA, 223 bp, Oryza sativa
gctgcattctttatcttttctatttttgtaagacgtggatctgtatgtcaacaattggcgtttgtgtaccctatctgtgcctggacagggatttaatgcacattcaacttagaaattctggttcgagaatatctgggcgtgacagccgcccagcctggacttccctttcacacttccccccgagggggggcctcggggtaaaacgaccggagagcccgagggg

SEQ ID NO: 46236 - DNA, 451 bp, Oryza sativa
  unsure (1)..(451): unsure at all n locations
agcttccttaaatgggttaggagagccgtctagttctattttatctgagcttgatcgatcgttagttccaaatcagtaactcgatcaaaagcaggtacatgctgcaatcaaccttattatcaccgacaagaaccatacgcgtcggtttcgttagccaacggcctggggataatgcattttgcatttactccctccgtcccacagtattagggattntaagttttggtttgtaacgtttgaccattcgtgttattcaattttttaaaaaatattaaaaataaaaagttgtgcttaaaatactgtagataataaagtaagtcacaaataaaataaataataatttcaaaaaaacttaaataagacgagtggtcaaatgttgtaagtaaaaacttaaaatttcatatattatgggacggagggagtacgtacctaacctggccctgttcatttg

SEQ ID NO: 46237 - DNA, 408 bp, Oryza sativa
  unsure (1)..(408): unsure at all n locations
nngaatnctttgtttttataatgtcgctggactcgatttttctgtgtactatgncnggctnacaaacatcatggatataagcaaggccctggcttgccccttgtgcgatcttgagtcgcattggccaatcgagacatgaactggcatcgatgtccctgttgtgaagccaatcgaccaggctaccattctccatgtatgaatatatgaggaaccttgagttccctggatgcagtaaccccacatggcacaagatatcatgctgtgccatggagagtgcatcaacctctgcactgaattccctttccatcagacacatgtcactattgagcttcttgatggcaagcattgagccatcagatagctcacctttgtagacaagatcgtaacctccacaaccgatgatgttct

SEQ ID NO: 46238 - DNA, 313 bp, Oryza sativa
cgaagcatgcaagctagttttcgaacaaaaagaaaacatctaactagtcgtttctcgacagagggcctccctgtaaatgggcccagaaagcccactaatcccatcgcattcgccatttcgcctccactgtggcggaaatatctcctccgcttaaacccccacatcgacctagccgccgccttccccttcctacctcgccgccgccgccaccggcggcgccatggccggcgccgacgccggcatccgccgcccgctccttcgctccgtagccttctcctcctccaggtgccgctccctcctccacctcctcttc

SEQ ID NO: 46239 - DNA, 325 bp, Oryza sativa
  unsure (1)..(325): unsure at all n locations
accggcgaagactggcggccaggactntattgcgagtcttccgaatgtccgatgacccccatagctcggcccaccctcaccgtaaggtaccacagtagcgtcaacccctctgagtcccttcagatccacacgacgatcatatgaggcgacgtggggcgacgaccgggtcaaggcgaatttcttccctatggccctccagggccaagcgcaaggatcgctcatgaacctgccacccgccttgtgctacaccttggagggctcttgcagttgagctccgggagccgtcgaagcccgggacttcctgtgctggctcttctgaacggct

SEQ ID NO: 46240 - DNA, 356 bp, Oryza sativa
  unsure (1)..(356): unsure at all n locations
gcaaaagtagctggcatcggaaagaaggtttccctgcaagagctaaaggcatttgatgtcaaaaaggaccatgagttcatcatatcacagctgagaggactgaatcagcttaggggatcaataagcacttttagtctttacaatgcacggcatgaagaggctagccaagcaaggctctgtgacaaggataacctaacttgtttgcacctgtcatggctgactttatctaagaaccgtgttgcacggcgtactctttctatcctggaggatcttaaaccacattctggccttaaaaatctgcaagttgttggatacangcattctttaccatcatggcttttgcacactggccatct

SEQ ID NO: 46241 - DNA, 278 bp, Oryza sativa
  unsure (1)..(278): unsure at all n locations
atctgatcgctgggcacctcaaccgaaacggnttgttctcagtcaaatctgcctatcactgtcaatggagtcacagctttaggaagctctatccagcaccccggtgcaactggcctccctggcagcattagtatgggagacatgctttgaggctatcgatcccgagcaaaatcaaaaatttntggatggcgcgtgcttcatggatgcatttcttggcttcgtacgttggcaaacaagcatattatgtgcaaaacagaagctgaggacgtgagacatgc

SEQ ID NO: 46242 - DNA, 279 bp, Oryza sativa
  unsure (1)..(279): unsure at all n locations
gaaccactggcatctttatgttagactgttctaaaccttttattcagacatccatntctttgtcctcttcagtgaaacgagtggatccccactctgcccagactacgatcctgatgatgctgccgatgcaaaatactacatggacgggcacgttattctgggcagggaagtaactgttgtatttgcagaggagaacacaaagaagccttctgagatgagatctcgcgacagattaaaggtcggtgtcccatccttcctagcgcatatgcataaactcgc

SEQ ID NO: 46243 - DNA, 299 bp, Oryza sativa
  unsure (1)..(299): unsure at all n locations
agcttataaaaggaccattcgtctgtctctntcgcnagccccctctcccgagcttttccgtgcaccgtagcgccgtcgccgcgtcgttttagtcgccgccgccgccggccatctttcggccacgtcgcgccgccgcgtccgtcgtcgccgccgcttgccgtcgccgccgttaggtgcgccgtggtgagaggaatctcggtcgccccttccccttcgccgtcgaccaccggagctccgccgacgccgtcaagccgagccgccgcgccgcctcttctcgtcgccggccgtcatcgtgcatc

SEQ ID NO: 46244 - DNA, 448 bp, Oryza sativa
tctctgtctaatatatgtgtttatttatacaaaaatctgttttttctgattgtgacatatgtaaatggactgtatcaaaacccacatctaatagaacaaggttggaagaaaacatacatacagtataatgatgcatagctcatgccagatgaacatctatgattgttatattaccacataaagtggaatggtgattgaaacattagtatatccatggaaaggaggggtataagatatggatgaaaaaggaaaatgcctatgacttgacataacataaaagcttgaaatataacagaataacaacaggacaaatggaacatcacctgcaaagcattggtgatctcgtttgcaacagttttgtccctcgcactccttccaagggaaaggtttctaaatgatgaataaccaatcagaagcacgccaccctttattcgccactttcttagta

SEQ ID NO: 46245 - DNA, 424 bp, Oryza sativa
  unsure (1)..(424): unsure at all n locations
agctttatncaccgcagttttattttcttattaatcaaaaccgnagggtgcaacatgctaactacctatctttacttagctatggactgcctatttggctatttttccagtattttcgctagaacctttacaaaatcagtattcatgtattaaattatcacacgagatccaaaaatcctatcgatattacgcttatagaaacttcagatggacctagttatgtaatcattaatttaccatagatgcatttatagtacagaaacaaaatcagaaaatcaatctaatagaacaatctttgcgtgtaattcttgtggttcaaacattctaatattcccaacatacaagggtttatgtcacatacatgaagataatttcatagagaatatagattagcgatgctttcttccgtctaatatactcattg

SEQ ID NO: 46246 - DNA, 384 bp, Oryza sativa
  unsure (1)..(384): unsure at all n locations
tcactgagataaattcctttctatatatgatagacagcagatcactgatcaaagtttcttcagatgattaggaagagtctgttataaaaccggccccgaaatcacattataaacaaaacgcggaagaaacaccatacgagatctaaacatgaagacgacaccgaggcacgatatttgataacggagtgcagccgaggcctacatctccggtgcactgattacgggcgcttctccccgatccagcatacacagtgtattagagttacaaccactcacggccggtcgccgccagcagccgctccctctcgctatgctaagtcgacatgccgttacagcangcatgcctctctatttatgagagatcctacgatagagtctgactct

SEQ ID NO: 46247 - DNA, 338 bp, Oryza sativa
  unsure (1)..(338): unsure at all n locations
agctagcgaatgcgnnaggtgtgncctnagtattatgtgnggngnacgaagagatagctgtatccatatttttttttttgcggctaaatcagttacagtattatcaattcaatcaaaacgcgcgctggattgcagatatgaacaatgggtcatagagcagagcaagcaatcaacatctgtgacttcttaattgctagtacattgctataaacatctctaaaactgtgtagtgacctcaagtattctcactacagcaaggcctactcagtggctccacagtctccagccctcagcaagatgaacaccccaaaggataacctgattggccagcttgtgat

SEQ ID NO: 46248 - DNA, 375 bp, Oryza sativa
  unsure (1)..(375): unsure at all n locations
gacactatagatattcttgatcntcgcgacactatcagaaactcacgcttctcttactgaatgttggatatagatagagtaagaatgttgtcttctctatttctcaacaagccacaccggctgatgcatgattaatgcaacgcggtacaaaaggtaataatataagggttacagtttgcagtacacagcatttaacagtcacttacctgcccaaagctattctgtacacacgactctatagctatacatctttattaaataaggccgtggacccacacgaacctgtcttaacccaaggcctacgaagattcagaccgaactggcaacccaccttgtgtcccactctgtccaagccactcaatccaccattttcat

SEQ ID NO: 46249 - DNA, 303 bp, Oryza sativa
  unsure (1)..(303): unsure at all n locations
catatttacaacagtatctgcgaaacttgctttaatttgacttggaaactggttttcacattttctacctatnttatttgggtggtccagtttttaaggagcacctgtttctctttttgcggagcatttattttatacgtgacggtangatacacaggaagtgaaagaaggccgagtaaataaagagataaccatttctcggttggggcaagaaaaaagaattaatatgtcagttgaaaggcaggcagtatctacaaatacagtcctttaatagccggtgagaaatagaaaaaaaaaataaac

SEQ ID NO: 46250 - DNA, 377 bp, Oryza sativa
  unsure (1)..(377): unsure at all n locations
attctatatctcttgatggcttanaaaagaagaaaaaaagaggggagaaatcttcatccagtctcttataggggactgctaccgattcaataagagtttggcctaagaaccattgtttaagtcggtgttaatcatatctttttcattggaatatatcgcgtaaggctcctattgcatgattaaaaatacatcttcccactgccacaattgataatgtaaatattccattatggcttgacgaactgttaattgtgactattaatactatgcatatgttgcatgttgtcgcgtagctctctgaacttctatataacgccttctatccctttgcgacttttcaatcgcaagactgggatagaggttttccttttgctcca

SEQ ID NO: 46251 - DNA, 480 bp, Oryza sativa
  unsure (1)..(480): unsure at all n locations
cttctccaganactgtgtttaagctgaacaattctgcacttatcctttatatagcaataacattttcagtgatgttatatggcattgaactacttatgccattcatgaagtaaagcatatatgccaatgtttgtgcatgacaaacattaaacaaatctcaagctagagtcccttagcttgtaattagttatgcacttattaaataaagtacacggctagaatacaacttgatgtttagtttcagaagcaaataacttaagaattaatgcatcctcgtaaatcgcaattaacaatatatagttgtagagaaagtagaatggatgcctcaccaatgtggggagggtaatctcttatatatatataactgaattacaatgaatgctagtgctgagatacaatcaaaacaagagagttacataagaccataggtctagggagagtaactatctgtgagtgtcagggctatgagaccacagccta

SEQ ID NO: 46252 - DNA, 394 bp, Oryza sativa
  unsure (1)..(394): unsure at all n locations
atatcttgagttacatttggctggtatcaaagtataggtatatttgttaacaaaaaacaatatatgcatncttgttatcacaccaagttgcgtcacagaattattgcatgataaatcgcttctatgaaaccgtactggcatgtagaccttggctgatatgaacatctangtatggggcctgtcaatggctaccaaggactggggttctgtctttgtttttctaaaatgtgacttccaagaatttatatctatatacatgtggcggatctttgcacctttctangagagattactaattgctgattaccaagatgtaggtcaatggaaagtacaactccagctagtatgtgagcacgatattctattcccagtggttttgatgcttttggctgac

SEQ ID NO: 46253 - DNA, 443 bp, Oryza sativa
  unsure (1)..(443): unsure at all n locations
agcttgataaaagctnttaagaaatcaacttcnttgtctttatttatcaaacacagcataaatacaccagtattgtacaagttgagcctccattttctacatttacacttagtcagaatcagtcttttcatcatcagagttattactacttggctgaaggtcggtattgcggaattgatctacaacgtcacctgcaatcttgtcagccgcgttttgagcattgctgataagatcaagggcagcttcttcgcttgtcccgtctgcaaagccatcaatggcgtcaatttcaatccctgggtacaaggaattggtcatcgccaatgccatgctagctcccatactttcagctttcttgatattctagaaatatacatccggagcaactctcagcttgtcgaatattttcggcgcgtcgagtgcgcccgcaccactgtattgaggac

SEQ ID NO: 46254 - DNA, 282 bp, Oryza sativa
ttcatagtggaccgtttttcttttgtaaatgggcttaccttagtgtgtctttcgtcccgcgacggactttgcagcggatagtcgggaagactaagcgctggtgaggcttatagcggtgacatccagaaatacctgaagataatgccagagagttttcatcacaagggaaacggttctgtgtttgaaatggcgagggaagagtttacaagttgggaatgtcaggactacttaccatagtagactccatcaacctccagtacgtcaatctgcaatattataaaa

SEQ ID NO: 46255 - DNA, 262 bp, Oryza sativa
gcaaaacagaggaaacaactagtatagcacgtatacccatctggctgccatgccacccccaataccctcctcttcattcttcatctcacatacactacacatgagctacaaaaaagaaatgcagtgtcgccagcatctgaattacaagaaaaaaaaaggcccgaaagccatgaatgcaatgcagacctggaatcggatggggcctcaatcaaagaaagatcatctaaaagccatgattggaggaacataacgattggcaaat

SEQ ID NO: 46256 - DNA, 389 bp, Oryza sativa
  unsure (1)..(389): unsure at all n locations
tgggtaaaaggaagactgagccgtcgatgtggatttggacggctgggatcgtctcggcagttatggcggcgtcgtactcgtacaaggttggtgagattgcgtatgggctgatgactcttaagctaatcattttgatgaagtatagtgctagtactccgtactggttatttttcattgctatgggataatacacaagttttagataaaacaatatacactgtgnttatttagttntacgtgttgcgcgattaagaaattttttcaagaaatatcaatttaagatttctgcattgcgaaaggggttgattagtgcccgcctgccacgttaaataaaggtcctgtttggaagattagcccaggctaattttgagagctaatatttagtcatg

SEQ ID NO: 46257 - DNA, 342 bp, Oryza sativa
  unsure (1)..(342): unsure at all n locations
agcttccaattgaatgatacanaaanggatttcaaaaaattattactnacnacctgacaggccacgaccactagctcgatctatataaagagcaaaccatgcattcatcaaatcacatcagattaccacacactaatcacgagtaagcctaacaaaactcacggacatatatacacgggacaccatgttgtcgccgcaggccaaatccaaaggcaaaccgcttctcctggtggtcatcttcttcctcgccgagttgccgtggcacacgctggcaagcgggggcggcgggaagcccccttgtacggtcgacaccaagggaggcgccaccaagctctacaccat

SEQ ID NO: 46258 - DNA, 461 bp, Oryza sativa
  unsure (1)..(461): unsure at all n locations
natcttattgaatgttgtttacttctgttagcgctgtatcgttgttaacatgatattatctttgtcccaacaccaatagttcccaaacattttgtagtcattccttattgtgttgataagtcactgatcatatctagctggtgctagggaaaaccatgatatgcaatgttttacaaatcataacagaaacacaggaaggagtatgatccaattattaaacaagaccttaattntcatctattttgaaattctttntgtttcctatttggcagggcattttctgatccagcaaatcagaatgatctaatgattgtaccanaagtacctactggtgtttctggaactgcattagctgcttctcttcttcgtgatggttggagtgtatgtccaatctcctctatactgtttaatctgngcatttacgtttcaaatattacctgattaccttcactgtgtcagct

SEQ ID NO: 46259 - DNA, 388 bp, Oryza sativa
  unsure (1)..(388): unsure at all n locations
agctggctcaaggatcttgccttcaattaattttagcatttttccttttattttatncnngcgagaactgtcatttatttttgttggatatagatataataacagtagaacacacctcattgtttcgttgcactcgaagacatatcacaaaataagccaccgctactacagatttgattttcttttaaagggcatttgcaaatttgccaccggtttttttaatattgtaaggatgaaggatgccactcgaatgatagttctagtggtattcttataaatttctagtggcagcgttgcaataacgatttaaagtagtggtaaaattgcaattattcttttctttacaatgagggtctctctaagntataagtgggctggtactataccc

SEQ ID NO: 46260 - DNA, 365 bp, Oryza sativa
accgtcgaaactcttacgcgcaagagggtgaccatgcacggcgacgctttcgtgatggacaatggaactgattacctgcgctggttgctttctggtggggatgatgattcgagccaaactcattatccgtatcatctttgcatctgattgtgatggtcatggtgtcaatggctcaatgctttgtcgtaaaggggtgtgctagcccactcaccttggtagttagatggccgcggcgtctttgttgtaaggagctggtctcgaattataaagtgccacagttctagaggaagcctactagtactatatatttgtagcataaaggcgcaaattgagttgtgagttgtaagatctcaatcttactgttt

SEQ ID NO: 46261 - DNA, 450 bp, Oryza sativa
  unsure (1)..(450): unsure at all n locations
ctgctatggaaataataacagagctagatgaaaaattacttatatgaaancaaccaatgacatatgccatataatagcatatagtgggagaggtgagcaacccttagtaaccaagcagtatatagatactattcaaataaatgattcaatatattacgacatcgggcacacatatattgtacatcccattatagatatatggaatcgtattaatttgcttgttgcatatattaatttagagggagtacgtgacgaacatgaatattagataaatactagttatacatcttgtcctcgtataattacagatcaactgtaaatttggattattcattgtaaaattatgtgatgggataatncgtaccataatatgattacctaaacaatctaacatacaagcatgggtattgctaacctttatgatttatttgacagtgagaatgacataat

SEQ ID NO: 46262 - DNA, 418 bp, Oryza sativa
  unsure (1)..(418): unsure at all n locations
agcttggacagggaggantcttatacannatattttcttccanggcgaggcgtcgaaacagatcaggcattggcggcttctgccactgcggcggtggcgttctggttccggactggaatcttgcgatctctttccatcctcttctacctccagcttctctctctccttttcagaaacttctagacacttgtatcagctagctagtgtgcttctctcttttcctccaaaatactcgtgagagttgtattcaagcttgttgttactaattgggagaagaggggttctaacatatgcgtaaggctacggtcgtcgtcgcagctgcgtccgccgcatcagcgagcatgatcaggatcaacgatgacttcacggtagcgatactgtcaccaccaaccacctcggtgggccgtcgcgttggtcg

SEQ ID NO: 46263 - DNA, 437 bp, Oryza sativa
  unsure (1)..(437): unsure at all n locations
agcnttgctagattgcttattagccgtattttcgtcctaaaatctaaattttagaacttgattaaaagttagttataagaattttcagaacagattaattctttaacagtatcttttaaattgctagaaacatacatataaaagtctacttataattttttttagttaatttcatttatttttccacggtttttatcaagtacggtgcaaacaatgagtaggtagccggactgggatacatgtaagtattatattaagttataatctggacaaaactatatactagattcatcctagaatggatcaaatcttgttctagattataatattttgaaatggaggaagtatttattntagtaaagtgcacagggtgtctttaaacttatagagatatgtcatcttggttcctaaactctcanaatatatattcatttttc

SEQ ID NO: 46264 - DNA, 357 bp, Oryza sativa
  unsure (1)..(357): unsure at all n locations
atagcactactaattaagtttagccaatcaggtgngttttctttacaccggcgatgttgtgtatagtcctctaggcgggcgacacctgccggccgacaagccgtgcggccctcccatggcggcgatgatggcctncatcgccgcggcacgtggccgtggatactcccgaatcaatgtcgagacgacgacgacgacgacgacgatcgaggaagaggatgacgacgaagacgagatggaggagaaggcaacttggtcatataaaaggctaccgattcgcagctttctgacgccaaaaggcggataattaagcaaatggtagttacacagcacctcgctggggccaatctggaggacccg

SEQ ID NO: 46265 - DNA, 370 bp, Oryza sativa
  unsure (1)..(370): unsure at all n locations
agcttctcaaatagtttagtttttcgtctatattctgataagctatagntgcataatttaaaaaatgaactagaagctagaaactagaaaaccagaagctagaaactagaaaacctagttttttagattctcggaagctagctacttcctccgtttcacaatgtgagtcattctagcatttttcatattcatattgatgttaatgaatctagatagatatatatgtctagatccattaacatcaatatgaatatgagaaatgctacaaatgacttacattatgaaacggagggaataccaactaggtgctttttgtaatcctaagctatccaaacatgccctagaaatggtccaaagtgaaaaaaaaaga

SEQ ID NO: 46266 - DNA, 374 bp, Oryza sativa
  unsure (1)..(374): unsure at all n locations
agcttgaatttgaagcctgttaacagncggttgnattaattgcagaaaaggaaaagaatcgaaaactaatatggtgcgattcttcctgacgcatctctatacagggtcatttttgccacaaagaatggcagaaatgcctgaggacttctttaccaaagcttatttctccaggctatcatatcatattagaagaaataatgccgccatcttttcgttgtcagcctatggaagaagagctctcaattccttcctgtctgccccaaatgactgcaaaatcaaggttcggttagaaatggttcatcttcaaacgntcaaaatgcagctgaggtcaattcaatgagacctgggtaaaaccatacaggctcattcagtgc

SEQ ID NO: 46267 - DNA, 446 bp, Oryza sativa
  unsure (1)..(446): unsure at all n locations
actaagccttggcctcgatattttatataggaaacaaagcacacagttgtatatacttggctagtctaanaaaacgacatgcccgcaacagataagagctaagtgatatccacggtgaaattngatcatataccctcctatcccctccttttagattgaaatggagaattcaccctcctgacttacatgccagtgaaattagatgacccccaagtatgaatcaaatcctcaaattgtgaactgaaaccttgctgaatttgtgaatttgatcgaaggatcccacacaatcggattcgcccggtgcgccaacttccgggacaggatctacggcgactacgagatgacgaccaagtacagcccgatctcccagccctacctgagcaagctcaaggacatctgccccctggacggcggcgacgacaacatcagcgccatggacagccaca

SEQ ID NO: 46268 - DNA, 397 bp, Oryza sativa
  unsure (1)..(397): unsure at all n locations
atcgaagttcgcagctggaaggatatatcctantacatattttctaaggcctactttgtgatctgtccatttgcttcacgattatgaagtatgtccccgagtggaaactatgtgaccaccgtgaccgagtgaccttagaagtagtgagatagctccctgacggtaactaaaacaccatataatagcttttgaacctgaggatatcttgtcttggaatcagccaaaacctcgctaacgaaatagattggtcgttggactntttcaacatggccttcttcttcacgctcaacaactaggactgtgcttacaacctgtgaagtcgccggcacatataacaacagaggctcttgcggatgtggtgaagctcttgtggagtagtgagaaagtttttgaatct

SEQ ID NO: 46269 - DNA, 432 bp, Oryza sativa
  unsure (1)..(432): unsure at all n locations
agcttccatgaatatctcccttgttatatatttcttcgccattctcttttcatgtggagactttatcttctgtacttgcagatggcatgatgctggcacatatgatgcaaaaacaaaaactaggggtgccaatggttcatttaggcatgaggaagagtacactcatggttcaaatgctggactaaaaattgccattgatctccttggtgtgtactttgcaatatcattgaccgtgcaactacataattttctacttgtttggccttggagaagcaatcctcacttgttgtcgatcattntaagaagattaattgatgtgttactgatcttgttccttctcttgtagtagcctagtagctttgaaactcgattacggtgggctcttccctcttcactgttatcaccggaagcttttgcttctgtttactactc

SEQ ID NO: 46270 - DNA, 113 bp, Oryza sativa
tggtgttgaacagcggagcatgctagccgcgccgcaagtggaccttttgtcctgggaaccaagggaaatccttggccttggtgctgaaacaaggggagataggagatagagac

SEQ ID NO: 46271 - DNA, 368 bp, Oryza sativa
  unsure (1)..(368): unsure at all n locations
acctgcagctgcagcttccagatccctatcgaggcggttttgtctattatcctctncgccaaaaccctggacgacatgcagatccctcgcacagaattgaaaccgagtaatgcgctctttcacggagtcatttcagggctattcgctacaccactcggncagatcactcttcgggttaccttcggcactcgggagaacttccgcacagaaaacgtctgcttcaaagttgctgatttcgatacagcgtatcatgacatactcgggcgcccggcgttagccaaatttatggctgtcccgcactatacctacataatgataaagatacctggtcctcgaggagtcatatccctgcaaagcaacatcaaaca

SEQ ID NO: 46272 - DNA, 334 bp, Oryza sativa
atgcatccattaatcaatccattcatcaacagattgaggttcggcatgaagaatttggataaggacaagctttgctctatttttactagcgctgcaacactttggtttgcagtgccagtttgtgagtggtagatacacaatgttcctttcacaaatttagatgtccaccatattctattctcttctctctttgttttccatcaggtatatgctagatttcacgtgcattgaattttttttctagaacttcaatcgacattgcgagctttgctccgcagaaacctgttttatgtgaactactaggtaagaactatatccatgaatttgtccgatc

SEQ ID NO: 46273 - DNA, 437 bp, Oryza sativa
  unsure (1)..(437): unsure at all n locations
agcttcacgtcgtcaccggatcggctggtcttntctcatttttcaaattaaggcgcgctgaattcacactaaaattaaaagtttggttaaaattaaaacgatgtgacggaaaagttgaaaatttacgtgtataacaaagttttgattgatggaaaagctaaaaagttgaagaataattttgaaactaaaccagaccttaatacagggtggccttgaattattgccactactagtatttattctgaacggcattgatacccgtacgttctacttcaactggaaatagtacacgagttggtactactactaaaccatttgtatagttctcagacatcttagactgtgtctagttccatattacaattagaaatttgaaaaaaatgaaacgaagtgacggaaaagttgaaagtttatgtgtgtagaaaagttcgatgtga

SEQ ID NO: 46274 - DNA, 467 bp, Oryza sativa
gcttgatcgctaccctacctggcgcgccaactgtcgaaactttatttcggcaataataaaaggtgtgggctatcaagttaggaaagtgtatgggtttggagacaaaagatttatacaggttcaggccttcttataaaagaagtaataccctactcctgtccggggatgaatccgccgagtgtattattgattgtatgattcgggaaaaaatcagcatatgcccctagaggcgcccggaccccccttatatatgggaaggagtccggattacaaaagataatctatattcctaacggaatatgaagatacagataaaatacagtcgtaaccgactaagtctctgggtgtttccttgatacgcaagttaagaaacaaacccgagatacagataagatattctatctacattaggtatcctgtacccaggtcgaataccatcgccgcgtagatatgggatacccataatc

SEQ ID NO: 46275 - DNA, 314 bp, Oryza sativa
  unsure (1)..(314): unsure at all n locations
agctnacagctgaagagaaaaaccaatttatttttttaanacaaccaacaacgtgtatctttatcaaaatcctctatccactgtagcgcgtctggcacacgctgctcatgtcactgccgcgtgagatgtgtctcacacgcgcctagtctggccccggttgcaccttcttccgcctactatgatatgtgattccgacccaggcaaagtaaaaatcagtctatcgtacgacgtgtaagaagaaattacgatgggtgaatttgtgtgataacataatagaaatggggtaatcatacactcctgataatttatgtgca

SEQ ID NO: 46276 - DNA, 467 bp, Oryza sativa
  unsure (1)..(467): unsure at all n locations
cctcgtaaaggacacgtgtgtcatgcaatacattctattttttaataccggcagtttactattaagagctgaaaaaaanncatgtcatgtccctacacaaaaggtggtcccacatgattaaccgctttgtcagagacgcttaataataatgtgttggcatcaagtggtgctggcccacccacgcacacagagaatcatgggagggagagcagtgagcgcgagggtttctgggctcacgaatctaaataaaaaaaccaataataaatatactagtggagtagtagtacaataataaatacatgtaaatctatatttacagctaattgtatttaaatttacagctaaactctctagcaggtgatatactcatcgataaggaatggtccgttaatcttaagatatatcacgatattctagacgcgattatagacatagggtacgtgccgtatacgatatatgggtgagtg

SEQ ID NO: 46277 - DNA, 438 bp, Oryza sativa
  unsure (1)..(438): unsure at all n locations
agcttataattatcatctagcctagctggttatgcttgtgactgtattttgttatggctcaagaaagtgtccatgcgaaatgcgcaatatttgatgctaaattgactgcgatggatggatcatggatgaatgttcttgntagttaaggcacgtaatctggtgccgaaatcacgaccgccgtgtctgataagtgtcgatcaggagctagcaaaactttcttttaatttttcttttgcgtcgtgtctgtcacctgctaggccgggcaagtgcactgaaactggcacctaatagagaaaaaaaaaagttagagcttccgcgtgtttaattcaagataattcttcacacttccaaatttgtcataacattagaacttttttacacacaaacttttaattttttgtcacatcgttcaatttcatcaaacttttaatttaatat

SEQ ID NO: 46278 - DNA, 482 bp, Oryza sativa
  unsure (1)..(482): unsure at all n locations
tggcccactcagtgcttagaacacaatacatcaaactgttttacttgttntcttcgaacctaggtagtctagcctaccaccttgtggagctagccggaaagcccatgggtatttctcactattttccgtaactgaaccaataaaatgcaaaatggtttgtttttggccaactatttctatacctgaactagtaggtcttttggcagtgtttatcgtctactaattgtagcacataaccaaatcaatgcctcctgtagcatttagattacaagtattgtatagttggagggtgtttagaaaagttctgatgaaaatttgagttctcatgcgattgagcaaagttaaagataacaaaaatgaagattaattaccgaaacaagctaagaatggtcagttgaaaacaaatggatcattagagtgcacctttnttgtttgagatgctccctaagattatccacgagaattgctacatcatcccaagt

SEQ ID NO: 46279 - DNA, 361 bp, Oryza sativa
  unsure (1)..(361): unsure at all n locations
agcttggaggtctcccgacttgtcttatcttttttggctggacgaaccgggttagtaatgttatgtgggtaaaagcgaccccctttgcaaaggttaacaaactgttcgaacagccgcgcccaccgtcatgggcggatgtgaggcgattcctaccgtatgtttgtttgactactgctcgctaaaattgctggtatggataatggggttgattgtctggaanaatcatcagctgactggatcaactatgcccggttggccgttggaaagttgtggcccgggggccgttagaaagttgtnggctcggggggctgttaaaaagctgttggtcgggtgccaaccctggttcaagatctaaanactg

SEQ ID NO: 46280 - DNA, 405 bp, Oryza sativa
gttggacctatggataactatcgatttattttaactatcacggatctgttgttgtttgcatctacggatatgtgcttgggtagcgccgctgggattttgcaacttcccgtgtttgatatatggagtagcatcagacttaatattttgtggcatctctggtaccctttgtatgtgactatttgctttcttggagatgcaaccagcgtggttgatttatgcagtagcaacccgatgaaaattagagcatattgtgtatgctagattcagaggtcctttatacgttttataatatgatgctagagaactaagtttacatatatcatggtgcccattatatatttttagatgacttaaatgttagtataaaacacttcaaaaaacgtaacatcttgtgggatgctaaaa

SEQ ID NO: 46281 - DNA, 375 bp, Oryza sativa
  unsure (1)..(375): unsure at all n locations
agctnttccattncgaagtatcttgtcttttctccttgcagcgccncggagacaaagtagaccggnttctgtccggactctgtttcttggacaagtgcaccactgactgccaccggcgaagctgtcaagtataatagcaagtcactctctaggggtgggcttatcagaactggcgggctttgcaaatattgctttatcttgtcaaatgctgcttggcactctgagtgccaattaaactttcccgcgccccggagggtcttgaagaatggctaactctctcttcgccgcctctgataagaattcacttactgccccaagttgactgtcagtctttgtacttcatagtctctcgacggaggcttcctttactggaat

SEQ ID NO: 46282 - DNA, 437 bp, Oryza sativa
  unsure (1)..(437): unsure at all n locations
ggaccttaagcgacgcngctgcagctgagagggaagcgtatgtttttttatgacgaggctggnagccagccctctgtggtaagtgcttctttccagctattactatttcactgattatgattcgcttgtcatcagtgttccctgcatgactagagtctagaggcatttcgcacatcatattggagctcatgttttcatccacaatgttatgaagctgttaaaagattttttttttgctgtctcttggaagttgttacattcaaatttatgctgctttatgccacttaatattcttaggctgcaataaatttatgctgctttatgccacttaaatatttgtagaaattagtggaatccttcagaagcttgtcctaagatagtaggctttctttcattgataaatggattgtctatactgctatgactcggttgtagcc

SEQ ID NO: 46283 - DNA, 468 bp, Oryza sativa
  unsure (1)..(468): unsure at all n locations
cgcgttccaaacagactttaatctttgtatcgcatataatatttatattctngaaagtccgagaagtattccctgcatgcagcatcacttctaatcccctacatatttatttcttctcgttggaaggtctgctatgatttctgaaaatctcagtctattgctctgcaccttgatntgcatccagaggatgctagtcgccttctacaggtagctcatatgtacattctcttctcctaataaactacacctaacttcgagcttctctctcaccaccatgccttccgattcttgactccagcggctcgctggtcagctgcttcctaaccactcttttctttttccctcccagccatggcagcggaccactaccttcaattcccaacctccctctaaaaacctatatctgcccaaacctgaagtcctaacctgactatgccgccattgtaataccgaagtgaacgacactgt

SEQ ID NO: 46284 - DNA, 354 bp, Oryza sativa
  unsure (1)..(354): unsure at all n locations
cgccacnccacncatcgaggccatgtttatcaataacgccggttctagtacacttgaagctgccgaaatcttcgacaagctgagagtcgctccagatacttacttcaagaacatcaaagaagctggaagtatgggagcaagtctggcgttggcgatgaccaaatcgctttatccaagagttgatatggatgccattgattgctttgctaacgggacgagcgaagaagctgctcttgacctcattaatgatgcgcagaaagccgctgacaaaattgctgctgacgtggttgagagaattcaagatgttgaccttcggccgactgggtctgattattcatatgatgaaaaaactga

SEQ ID NO: 46285 - DNA, 464 bp, Oryza sativa
tacacatcatatttttcctaatgtcttagccgattacataattccaagtcatattacacaaagattattcagataagtatcgctggatagccgatatagctctttgcctaatctgttctacttcttctatggcttgggcatcttgagcgtcggttccaggaatgaccttcaaagaattggtcatattagcaacattcttgatagctgattttaaccttgctttttgttcttcgatagactgtgggagatcggctaacctcttgtgctctagatccagttcagcattgcattcttgaagttgtgctaagagttcgatcttgcgagcttcaagccggtcaatattggatttgatcgggcctttagataattgatcgagcttggctttttcttcatgaacaaattgccgaatggcctggattggtgcttcaatggctttgcgctcttgatgcttcgctaatctcacg

SEQ ID NO: 46286 - DNA, 302 bp, Oryza sativa
agcctaactcatcgggcactgattgaaaatttatgttctctcagccacgagctcaatatggctctaatttacacatgcgctagctagaacatactttagttaaacttaattctactagcctttagagtatggagccatgagcgaatgctcaacttaataatcagaccctgggacatatcctgcacaaccatatgggaaaacacatgttgttactagaatacaaaactgtgttgaattagcgcacaacttatatcgtacataactttggagtggttacgagcgctatttaccactcttagttc

SEQ ID NO: 46287 - DNA, 303 bp, Oryza sativa
  unsure (1)..(303): unsure at all n locations
tgtgctaaggctatatatatacctctagagccacgcaatttcgggttctcttattaaannanacgaaacaatactattgcttttacatttcaactactgttaagagaaccacgccttttgacgtggcataattttccattcgacaatagctggcgccgttctgggggatacccattaccgaagggcgaaatgggaccctttttgtcacacgccaagccctttgtcaaagtaccaataatgtacggcgtccaaggctgcatgcgaagagggttcgccacacacacgccctttgtcacagtacca

SEQ ID NO: 46288 - DNA, 167 bp, Oryza sativa
  unsure (1)..(167): unsure at all n locations
catattagcgggggtatcacgagnacttatcttgcataccttgacaacaccttcagcaatcacacctcgaataaagagatatctcacatcaatgtgctctagtctctcatggaacatctaattctttgtaaaggatattgcactttgactatcacaaaatatattat

SEQ ID NO: 46289 - DNA, 361 bp, Oryza sativa
  unsure (1)..(361): unsure at all n locations
gctgggacacatgccatcatcganttanatataatctcaacaacctacagcataggtatatatgttagcaaaaatgatattcacgctgcccaacatattttgaagttcgaataagaaatacagcataccttttcgtgaagccttcaacgaaacaagcccgattgggacataaatgactccgacatgaacgaaaactgaaatgacctgcgttagataagcacaagcatccgtcaggtgattaaacatgccatctcactcaagctaaatataactaacagcaggcactgtttntgggctagtatcagcttacccatcttggagtaagaatcggattgtagctgggagcatctgctgagtaaac

SEQ ID NO: 46290 - DNA, 275 bp, Oryza sativa
taaccctacggtgccaacgatgaattcgatgccaaaggctcacatcagcatgccaaacaaccgaaacccaacgatgaattcgaggcaggaactcatttggcctctcattcttctccaacctttctcccctgacccccttctatatataattcaaatagatgcaaatcgatcacaaagcacacacaaaaacggcaagggacttatgccacttagcagtaatccatggctgaacgggagggagccgcggtgataaatgggccccaccagggcatgaa

SEQ ID NO: 46291 - DNA, 324 bp, Oryza sativa
  unsure (1)..(324): unsure at all n locations
agctntacaattgccaatagcagnnccaaattttatatttaactaacatcctagctgtgagcttcattctgacagtatcaccagggtatcattttcctctttgggataaatctggtacccttggacctactgtgatgcccgttactggctggttcccaatgaacaccatgaagatgcatttattttcattatctactagatacactatagtaataggaattgtgtttagatgctaccacaataacttattaatcactgtacacgtgacatgaactatagcatgatgggcatcaacaattaacaatcaatgaacgaggaacatac

SEQ ID NO: 46292 - DNA, 338 bp, Oryza sativa
  unsure (1)..(338): unsure at all n locations
cgcccggcgcatattcattctccccaacacctgcgaggatccacgaagaagcaaacccagccacggagacacttgcctaaggtcatccctcgacaacggcggtcgaacaacccgaaattcatggtaattaataggacanaatttcaccacatgaccacataaattntagctagcaccccttagcaaatgttcccttntgtttgtgctgcagaattgccgcatgaacaacatacatcgatgtcgggcgggacaagtgcaagtaggtcgagtagaaatccccggtcacaaaatatatggccgaccatagtgcangttataagaagaaagtgacgctagtg

SEQ ID NO: 46293 - DNA, 353 bp, Oryza sativa
  unsure (1)..(353): unsure at all n locations
cgagagagatcgagcaatggatgaagctcaagctaggctatgtcggatgtcgctgtaaactgagttggcctcttgggcggagcgagctgcgcttagccgtgcttttaaagaagctgctgcggcgtgtgcaagtagctatcaaagatgcgagcgagcgaaagcctgncttcttcttctcttgcattgcatgtcgtttaattaattagcaactacctgcacttaacacgtctaatctaatatggtagctacccatcacacacaagcgtaattggcagctactgatactaatgctacttaattataactgaaacttggatgctgtccgtctacgccgcaactggagcattaaaaaa

SEQ ID NO: 46294 - DNA, 386 bp, Oryza sativa
  unsure (1)..(386): unsure at all n locations
gtaattatgtgatcattcactacctaaagcgaacaccaatatactataattaatactcctccatgttgatgtcaaacattaaggagagaatatgcatgcactagacagttcctctctgatcgattcacttgtagtacaatcaatgaaccaagtaaatggtcaattggtgtgcaagttactgtcaatcctgagtccttgtgaaggttgtgatgtctatcctaactttgattgtgaaatccttttttttatgctcttttgttagactctttccctcttctactttagattgttttggggctatgatcgaatgtaacacacaacatgcagttttggccccccagattagatgagaagagtntgtgtcttattcttcctttatctttttt

SEQ ID NO: 46295 - DNA, 447 bp, Oryza sativa
  unsure (1)..(447): unsure at all n locations
agctngcaatagtctgctggnncatncaagttatatcntattttacatgacancngaagggtacaggatcaaatgatgaatgccctgtcgaacaagatcatatcagaattgttaccttaatcaagtccaaacactatgcatgtttggttttgaactgcttaagctggagatacctctcagataggaaatccaatatcagaggttgtcctttgacaaatgtcaatccagaaagaaacacagtggaagtcaagaggaagcaatgaaagtagattacaagcctcgttcttattgaccatcatatattgttttaatgaacatactgcattctattatgtatctgattgttattgaaatgttgcgacggatgttatgaatgtgataccatatataaaatgatgagttggataatgtctagtagagtgacacactctgccttccaagcccact

SEQ ID NO: 46296 - DNA, 407 bp, Oryza sativa
  unsure (1)..(407): unsure at all n locations
ggaccccgaaacagggaccgccgtcaccgantggaagcaacccaagacagncactcaagaccgcagntncttaggtttggaaggatactatcggagattcatcgagaaacttctcaaaatcgctcgacccatgacacagttgttgaagaaagaagagaaatttgtgtggagcccgcaatgcgagaatgcgtttcacactctcaaggaaaagctggtttcctcgccagtgttaatcttgccggatactcgcaagacttcatggtgtattgtgacgcttcacgccaaggattgaggtgcgtgctcatgcaggacggtcatgtggtagcctatgcctcacgctcagtacgaactcatgaacgcaactaccctacacatgacttggagctagccgcggaggtccatgctct

SEQ ID NO: 46297 - DNA, 349 bp, Oryza sativa
attatttgacagagtggcaaacttaccctcttctaaagctaaaatgcggctttagtcttattgaccacatgtcagacaaaatatgacaaattaaatatactaaccacacatgcatctcaccggactctagtcatcagcagatcaaggaccgagctcactgtgtcatcgtggattagaaacgtgcatggcaccggacgcaccttaaattattgtaccccaccgattctgtttgcgacaataacacgtaaccacacgctgtgtacggtgaaaacaagctgaaattatatgctctacatattaatgtgccttgatcatctcttccagaacacaagcggttcgatcttatatt

SEQ ID NO: 46298 - DNA, 446 bp, Oryza sativa
  unsure (1)..(446): unsure at all n locations
acactataatgtactgagcacctcatnggatgcacaatggtggtgttttgcatctgctgtatcttaccttcacggcttgcatttcttcttagaaatacgccatgttttcttggttctccacagtgtgagtctttcaccctttgcaataccatgaatgtgcttagttgataaacaccaaatctgcaaccgcagatttacttagtcaatactaatactaattgatctaatttgtttgcagcttcctcctttgctgtggactgtggtagcaatagactcatatcagcctcagataatttgaggtatcaaactgatgatgccagccttggacctgcatcatattctgtcacaggagcaccaacctggggtgttagcaatgttggaaagtttgtggatgcaccaaatggaaagtacataatctacagctcgcgcgcagttcagaacaccct

SEQ ID NO: 46299 - DNA, 400 bp, Oryza sativa
  unsure (1)..(400): unsure at all n locations
gactgcgaccaacagtcaagctcacaaaggtgagttccttcaagaatgctctgcaagacaacatctttgctaattaaagccaaaagaactcattaaggcatagccaacctgccttgcagctcacgagagtatatgcatcttcactgggagagggtatatatattggcactctcctctaatttaataatggtttgttcttcccaggatctaattcacgggatctccgatcacatagactgggttaccaccatagtataactcacatgggtctcaaacccatcttcttcgatgcattgtctatcacacttcgtgatagtcccttcgtgaagggatctgccangttcctcgctgtttggatgtaatccaaccgtattaacttccgagtttcttaatttcctaa

SEQ ID NO: 46300 - DNA, 462 bp, Oryza sativa
  unsure (1)..(462): unsure at all n locations
gccgtcaagatagctcggacgattttctcaaactacaatacacatttatatgcaatcaggcgtcaagaacagaatgcaccagtcaactattggcataagaaccaagccataatttttcagcagcataacatttactccctccgggttgataatacttgttgtnttggtcttttggacaaaggcacggtctccaaaaaacaactttgaccattattttccattataatatgtataaaaatgttaacaaatatatgattttattaaagtacttcttaagactaatctatacatgtagtcaccatatttgaaagacaaatattttaaaaatgattcataatcaaagattctaaaatatgacctcatccttgtctaaaacgacaagtattatcagctggtagggagtatcattcgaagtaccctgattacatgaatattgaattgaaatcatgggaatatttggac

SEQ ID NO: 46301 - DNA, 405 bp, Oryza sativa
agcttatgatgatcttaaatttactacaggtcatttgttaatgacattcattaagctggctaagtttgaaaaggagcatgatacatgttattctcagagaaaaagagctgttgatatgagcaatttcgcaaatgctgttatcaacatgagcagatcacagacaaaactaaatgctaaaattgaaatacatctggcatgttggaaattgtaatacaaagaatgtttgcttcttatgatttctttcatgaatcataatattatttttgcttcgacagggcactatctatgaatacttggagacaatgacttctgttcgtaatgcatctactgatcgcccaaatgctttgcttcgtgagcaacatctgtcagtgagattattctctctgcttactcaggcaacataac

SEQ ID NO: 46302 - DNA, 428 bp, Oryza sativa
  unsure (1)..(428): unsure at all n locations
tatagtcatgaatccctattgtgcatatctggatctggtttctacagaacaaacatataggatgagtagtatctgatgtaaatacaatactagaggaaaattcaagcattttaaaatggttataaatatgtttttctcctcttgtcaatcttgatttccccgagcagatgactcattacgtttaaacactcttgccgactagtcataacccccaagcatcgggtgtcggcctatgcacttcccaaacatgcatatgagtgatatgagttcgtcattaatggaacaaagtttcacggatcagaatttactactcgggtacttctgcattgttaagagcaacaatanattatcttatctctattgctttgattattccgaatatacttagcaccttgcgttactcggtccatccaacgaagccccgggtg

SEQ ID NO: 46303 - DNA, 378 bp, Oryza sativa
  unsure (1)..(378): unsure at all n locations
cacattaaaaatatatatacgcgtgtatatactttgtatagatatgtaaaaactttgtattatcaatgatgagtcagaaaattcatgccacctcggattagagcttagtgccaagatccatggcgctgagttcgcggcctatntttgagtgaaagttttttgcaaggactagtttcaaaaaaagtttttgaaaatggccaattttgtaaagaaaagggtatatcatgatggtggcttaacttcaacgacagagaacattgtctgtgtaatacaactgtggtgatatggtttgctcgtcatgaaggccataagaaagaactggcacatgcgtttgtcctgtgaatatgtacgatttcatattggacactataccttact

SEQ ID NO: 46304 - DNA, 416 bp, Oryza sativa
  unsure (1)..(416): unsure at all n locations
agagatgcgctgtttttgattattaataagaaagttcgtccctctcttttatctttangaaagtgtgtttagtgtccgataaggactttatgttttccttttatctttaggttagtttctttcttgtccgacaaggacttgtatcaacccatgggtataaatatgtacacccggcgtctatgtaatttatcttcacgatcaatacaattcggcgcatcaccaccttttaccttttctactttatnttatcgtccggcgggacttggcacctgacgtggggctgcatcgatgttcgatctccggcgaaggggtaagtccaatgttccgtcggcccagcaatttctcatctacatcagcgtcgttcagggctgcaccaatacattcgacctcttggattgctccgatggatgatatat

SEQ ID NO: 46305 - DNA, 420 bp, Oryza sativa
  unsure (1)..(420): unsure at all n locations
agcttctcgnncttagcaatttattataccttggntggcnccaaccgacccgcgcccctgcgttcccaactattggcatgcgaggtttccctgaaccgactagcttcttagccagggtgtcccattccaccttgtggttgcactctgattatgtgtcgaaactagatttcggcaataataaaagggggtggctatcaagctaggaaagtgtatgggtttggagacaaaggaattatacaggttcacgccttcttataaaagaagtaataccctactcctgtccggagatgaatccgccgagtgtattattgactgtatgattcacgagaaatcaacatatgcccctaaaggcgcccggaccccccttatatatgggaaggaagccgggtacaaaagattatctatattcctaaccgaata

SEQ ID NO: 46306 - DNA, 463 bp, Oryza sativa
  unsure (1)..(463): unsure at all n locations
tggccctgctcatcttaatgcttgtcaccaccagccggttctgatcagagataaaaggaaaatgtatgatactaaagaaaatagaagtacgaacaatatcgatgggaataggagatcatgcattcatgcctatgagaaaatccaagatattaatcgagcaagttaaaaatgcagaactattttgcaactacagcaggaacataatagtgcagaacttgcaactacaggcagganatctctggaaatgttagtgccagaaaaatgccatgttaacaatccaggttgttgcaattatcaacataaaaaaatatactgaaactttgagggcacacaacatcagatgacggatcataccggtaaggactcttaccatgttctggtgccggngtgcttntattttgtgagccanattcgtccaggtcttcaggtatacatgtgttagaatgtgatgcaaaatccttca

SEQ ID NO: 46307 - DNA, 256 bp, Oryza sativa
  unsure (1)..(256): unsure at all n locations
agccttggcatgcatggagggatcctggnattttatttggtcgccngctgctaagtgaattgtgtcatgctggcatcattgcgactgaacgcgtgagatcctgatcgacagcagcaagcatcttcaactttgcacagctcgaagttgctgaatgccagagctcactccaacgagcagctccaccatgctagccagaaaagaggctcttgctgcggcctggcgttttcaatctccacgatagcgctcgctgatccgt

SEQ ID NO: 46308 - DNA, 273 bp, Oryza sativa
agctaagcaagcgtgagttctggttgtccgaagtcaaaacattttgtttttgatatctgccaaaggagttgctgtggatcccgaaacagtgaccgccgtcaccgattggaagcaacccaagacagtcactcagattcgcagtttcttgggtttggcaggatactatcggagattcatcgagaacttcttcaaaatcgctcgacccatgacacagttgttgaagaaagaagagaagtttctgtggagccctctatgttagaaggcgatccaaac

SEQ ID NO: 46309 - DNA, 400 bp, Oryza sativa
  unsure (1)..(400): unsure at all n locations
agctttggcaagataagttaaccatggattttgaagacaatgatttgtactggcagctggctgagtcatcccaccacacacatatataaattaaaatttatctgccataattttctagtattttttagttagcatgtctgaagattaagcacgtacggcaagtgatcgatggcataggggtaacagtgcaagtttcctagaatttcctgtccacaaatgcttaactgcacatatccccgaatcttctcatatactccctccgtattttaatgtatgagacaccggtgattttttaataaacgtttgacctttcgtcttattcaaaaaaattatgtaattattatttaatttattgtgatttganttatcatcaaatgttctttaagcatgacataagcat

SEQ ID NO: 46310 - DNA, 382 bp, Oryza sativa
acacataaaactcagcttcgcgttctcttcaagagagaagactttgttttctatcctagagggggtgtctgagcacttatccccaagaattcaccaatccacaggcgtgggtttcacggggaaaacaaaagggttcttcgaattttctaaatctaatatgcactctttcgcaatctagaatgtgtacctttggtttgcttaaaaacatgccatgggtagtacaattttttttcagcagtgcatacttagctagctcttctggcatatgactaaccaaaactggaaatgatcagagaagtatgctcgatctactcatatatgtttattcaggagaaaaatagagcagatctgatatgtgtgtgtgtgcgtgtgtgtttggggg

SEQ ID NO: 46311 - DNA, 310 bp, Oryza sativa
gggaacgccaaggagactcacgagcccagcgaagcagagctcggctagattgttccccccataagagggccacacaggaataaaacgagctaccgtggataatcgatccacaaccacccagatagaatcatatccaccttgggcccctcgaagtccggtgaagaaaaccatcccaatttcatcccactcccattcacgtacctggagaggccggagaagtccggccggtcggtggggctctgccttgacacgctggcacacatcacaaagggccacgaaccctgcaattcccgcctcaaccaacccacca

SEQ ID NO: 46312 - DNA, 438 bp, Oryza sativa
  unsure (1)..(438): unsure at all n locations
agcttagagcatgcagtctctgtcctctaattctttctctgtnnttttacatgtatattcattnttatcttgttttaaatattttttttctaaaatacatatcaatgtatgatctaattgcaccattgatttttttaataaatcttcataacatgatcttacatgattatattttgacagaaagatatatgtctaaaaaagcaatcgttgttcctaagttataaaattattgtttcaacccacttaataatatgtttcagacaagtgaaacattaaaaaatatatcaggttatcactacatgaaacatgaagtcccaacgagtaaaacatttaaaagtcatacgaaacatataatatattngtgaaatacttggtttcattgaaatatttttgatcacgcgtgatatatcgaatctgtaattgctgaaaaataaaaat

SEQ ID NO: 46313 - DNA, 486 bp, Oryza sativa
tgattcgtagcttactacacattcggggggccacctccacatccaaacctctcatcttacaaacgggtatcatgtgggagcatggcaagtgatggagctgagggaactgacaactacatgtgttatctctcgcaaccacgacgtagtgacgtccaccccattgaaccccagccgccgtgactccgccttgctcgctgacctcatacttcatcgaagggaaatcaaaacatgctgctctttgccccaaggttcgtctttgctgctcctccaacatgtccttaacttttgtgggccacttctttccacacaggatatctacagttgcctctctgtgtctatcgacaaaccaactattgcacttcgaaaatgtgtatgccacaatagctgtaaccggcagtttccgaatgcctctcaatacattattgaaactctcggccatattactagtcatgatgctatgacgaacgcccgtggtatcaaatgctc

SEQ ID NO: 46314 - DNA, 368 bp, Oryza sativa
agcttgagacatcgactctggaggacgagataaatctttctcacatatgagcatgaaagttgttattttgaaattccccttaattcatgctcgcttaagaaatccccagagtcctgtttgattagtaccacttccctgtttgaggaccacaaccacctttcggttctcatttctaacatgtttagaaggatggttgtggatgcttatatttatcataatactgcaaatctcgtacttgtttgtggcactaatcttgcagagcgatgttccgatggtcaagcttttgaccatatacaaagcactgtcacgagataccctgcattatcatggtaaggttccttcataataaaagctacgaaccacttctt

SEQ ID NO: 46315 - DNA, 421 bp, Oryza sativa
  unsure (1)..(421): unsure at all n locations
gacactatttgtaccttgataacaacagaccaaggagnacgacttatacgtccacccttatggtattcttctagcaccagttattattttgagtgaaacttattcgcataaggcttgcaatttaaggcgtactccatcgttcaagttgtgagtaagcgtagcttggagttccacgtggatattcaaccttaattagtctccatcgaaccgctggtccataaacagtacattggaaataggcaaatctcagtgcgattttgagattcggtgggggtagttggaattaatatatgagccttatcccatctaaagattaattctttggaaaattacaagcccacctcatctgatggcatgcataggcgtgtcaacaccaccttacgagagagagatctctatataacggaggatgctcctcttg

SEQ ID NO: 46316 - DNA, 336 bp, Oryza sativa
  unsure (1)..(336): unsure at all n locations
cactaagaatgcatatatatttaaacnnatananttaatgatcnnacgggccntaattagcaattacggcntacagncagctccaagcgaaacaatgtctcttagaaaaatctgataatttgacaatttcctgttgccaatttgctttaattgatacttgtgagctagaatagtatgtgagatcatctgagtgaacgaaagtagatcgggatgtcaaacaaacagcgtcaagttatcagagctctccgaatcttatatgtataccttgctataggcaaccagcttgggcttgccatggccataatctgatgcctctgaagacactgacgacagctt

SEQ ID NO: 46317 - DNA, 415 bp, Oryza sativa
  unsure (1)..(415): unsure at all n locations
tccaacacaagagagttttttttgttcttactctttgttgtgcttgaagattaagcaaaccacaggagacattgaaaaccattcctgcttttatgatacggtcattcttgggattcaagtttaagccagactctcggaattaagaccaattcctgtaccagcagacttcgttagattaaggagtagttcaagggcattcttctcaataacgtcaactgcagcctgataaaccgcactcattcgatttcctggcttcaatgcttctagagcagcttcatgagctntcataagagtttcatacgccttgctctgtgcaggagtagcatctattagatatgttctggccatattggagcaataattttcatatctggccccaattgcacatatgataacacttgcagagtcatagtaa

SEQ ID NO: 46318 - DNA, 397 bp, Oryza sativa
  unsure (1)..(397): unsure at all n locations
taaattctgcacggatataacctgcaaaggccaaagtgtataagaaagaagaatacaacacaaacattttgagttccaaaaagaggtgaaagggacaatgtgatcgtaccttgtcataaggggtctgcttccagatttctttctttgcttggattattgcaagcaaactccgaaatgattctactgcagacttgaactgtccacgtgaggcctgaatgtgtgcttttagcctcaaaaatcccatctgatcctctttctcagcctcatctattgcaatatttgctactgcttcggcctcttttaaattntgctgagcagataacacaagaatcagtaacttccaggcactaactaaactttccatcaccatctcaacgcattctgttgcactttcaca

SEQ ID NO: 46319 - DNA, 329 bp, Oryza sativa
tttccccaaacaaatttgtgagaattcggatttaatttgcgacctggcaagggggcgaatcgtgtatcttttttgtaatgccgggaatatataagcctatttgatccgatgaaaggaatgactgttaatgaagtactcgaataggtttattccttctagtggggcagatcaagcactacaatgcttcgcacgatcaaacacaattaagtgattgtggtactgcatgcgtaccgtgtgatacgcaaatgataagtgcatggcggtgggcagaatcaaacttatgctacactaacagaattaacacgagcatgatactaacagttactagc

SEQ ID NO: 46320 - DNA, 438 bp, Oryza sativa
  unsure (1)..(438): unsure at all n locations
agctnttcatgtgcatgcgatttgatggttggtgatgacancgggcccagcggcggttgagncttgcgtgacggtagcgatggcttgcccggaggacggaggaaaattatacgacggttatctcgctagctgctgtgcctggagctcacgcgaccgaaataagtcgcctgactcaggctaatcacgcgcggagatatgcattatgccaggcgaggggaaaacagtctcaggccagcaaccaaataggaccaaaaccgtgtcaggctagttctcctcaggatagcaaccaaacagccccttataacctgaaacggaggcagtaataattatttatatatactaattatttcattctaaaactagacatatacatgcttaatcatcattctcatatcattttcgcaatattctaactccaatcatttcattcggtcttca

SEQ ID NO: 46321 - DNA, 442 bp, Oryza sativa
tacaataataagattttatatatagtaatgctgggcattgtagacagccggggcccacatgatgaacaaaatcggacagtacttgtactgtagtttcatggtagcagcggagtacacataggggtacatggttagggacgcttgtgatgatggagaggcgacatttaattccaagctcacatgcttagcttagcctgattgatcacacttttgtttgtatcaggcggtgaatttttttctttggttatcctttgattctgcttacctagtctgtgtttagttcagtgcaaagtttagattttgattgaaattggaaatgatgtgactgaaaagttatgtgtacgacaagttgatgtgatagaaaatgactgacagttggatctaatcacagcacttaagaacggaggatatatagcagcaaaaggtgactgaacacagtatt

SEQ ID NO: 46322 - DNA, 346 bp, Oryza sativa
gctaccagctcgccctaatctttagtcaacctaagaagtgctttgctcaacaaaaacatgctacgctattacatatggtgctgcctaccatacaaaccggtgtgttgcagatctctgctacagctggctatccacctatgacctgctgcgccttagccatatcagttgtctgcttgaaaaaagaaagccgctgtatatagaaagctcttgtacgtgctgtaataggatgaataactactgactaccttagcgatgaatcatctagtcttgtatatgccccacgaacataggtacactttggctctgcagaccagttacaccagacatgtaacaagatgtggttcag

SEQ ID NO: 46323 - DNA, 382 bp, Oryza sativa
  unsure (1)..(382): unsure at all n locations
tacaagacaantatgggcctgcatggtatccgatccccacatatcacctccaccttcttcaataccctgtgattntgctctccatgtcaaccaatgcaataagctctatgaggctaccgacccaagcgtgtcaaccaatgactagcatcctcggcactgatgccactaaacctcaatttaatagtatagccaactgttggctccaaaacaactatagctaatntaatagccattcatacaatagttaactataaaaatatactataccattaatacttggtcccacctctcatacacgcataacggtcttgagatcgtgttgcagccggctatatatctgnagaccgctctacttctctccttctctattcttctcgatatg

SEQ ID NO: 46324 - DNA, 376 bp, Oryza sativa
  unsure (1)..(376): unsure at all n locations
agctctccaccagtccagcatgtccncatataatattatgcattcacgagatggcgggagtgcgatgcgcatccacatgcgtgtaatgagagaagaatggaagcgaatttttttcctcgaggggacatcccctcgttttgtgcatgtcattcaaaaaggtattaaaattcgaaacaaaaataacaacattgaccgcgaattacgcggtctattcatagctaaaatgttttatatttatttctactcgcataagttgaactttaattggcctgttgtgaagcgacatatcacatattgatctatcctactaaattttttaattttttcgatgactctttaacgaacatgccaaaatgacgggatatcctcttatgtc

SEQ ID NO: 46325 - DNA, 458 bp, Oryza sativa
  unsure (1)..(458): unsure at all n locations
cttgaaacnacgctcccggttcatttatatcaagagacgcgaccgttaattatcacgacgaacctcntcaacgtgatctgttgcttgatgaaagctactctaagcacttcaaatatgaagagccgatcgaaagtgcgcaacacgatcataattcgaacgagaaataccactcataagaatgttgcgagctttgcaattctgttcacaagcagtatttcagcagcacgattaagagcctcaggaatcacataaggatgagaaacttttcttcaaacatcataatcttcagccataatataagattgcaccctaatacaccaatgagaaaaatctctttcatcaaaaacatgaggcttagttgaacacttatcaggagtagccatggtgaaaactctagatcgaaaaaatcccaagaagaatacaaggctctgataccacttgtaagatcgtatcacaag

SEQ ID NO: 46326 - DNA, 379 bp, Oryza sativa
agcttgtactaaagttgaaaccatatcagttactactggcgtacctgcacgtatcttacgccggacaggcgcggcgtcacgcttcggtggttggtgatgatgacttggtgacgtactcgccggctgccaaagcggcggcgcgcggcggcaacgtttctactgtagattattatatagatgactgacttcacgcacgtcggatgattaagttccatatatatgcatggcagaaaattctagatgaagactgaagaacagctggtctatatacgtatagctatatatgcttgctttgtggagtactgaattaaccaaccaataattaatttcactggaaaatacgaagccccatataccgaaagctcacgactacttaaca

SEQ ID NO: 46327 - DNA, 347 bp, Oryza sativa
  unsure (1)..(347): unsure at all n locations
ggctaagaaaacaattacacttgtggaaaaacaaccagcggattctcattcttgggcacggctgatggaggttaagaactcttttctttcttgtggcgcctttcaagtaggtaatggcacacaactgagaatttgggaggattgttggagtggtgatacctctttttaagatgtatccttcgctgtataatctagtcaggaaaaaaaatgtaatggtggctgaagtgttggaaaaggtgcccctaaacgtttntttcagaagagctattgtaagggataacctagcagcttggtataacttggtctcaatagttatgtcaactcaacttacacaacacaatgatgtc

SEQ ID NO: 46328 - DNA, 417 bp, Oryza sativa
  unsure (1)..(417): unsure at all n locations
cagtacccgctccatgatattttattctcatgcactctatgcgttcatgtttcttacattgagaggaagtctggcgcgtccgggaaagagaagtctcacacgcatattaaattatgggttaagttaagttctctctcttacacactcatggcaagcctaccaatggcgacaccgatgtatggcacgcctcttggccctacctcaacggctattccattggaacgcacctggctcactcagggtgaaccatctatgcacggatacttgctccgctcgactatctaatccgcgaggtctatactcattcaaaagtacggttggtcggtggtcgttcatgcttaactttatgcttcggtcttaattgaccgnggactggcttagccctttcagataccaaccaattcctccgtccgcccc

SEQ ID NO: 46329 - DNA, 341 bp, Oryza sativa
  unsure (1)..(341): unsure at all n locations
ctacatgtctacatctaaaagtgtgtagttcattcatgctacaactaaagattggcatatcatgccatacactaatcatgctcctacagnttttgccactttctttcttctatttgcattctcactaaaatggtcaattgaaaattttcagtcgcaaaatctatttactcacaacttttgagtattgatatggtttattgatactgaaatgaatttatattttacattatatggtaatgaacttttcaagatattcttttgtttacatgtaaccttcatatattgatggggaaanaaaatcattttactgctgccttgcttattagcttgttatgtgtgaa

SEQ ID NO: 46330 - DNA, 410 bp, Oryza sativa
  unsure (1)..(410): unsure at all n locations
agctgtaaacaattaacagcaactntttatgtggagcattatcaactatatntaacaggcacatgcgactgtatgaaagttgcactcactcttcaccagccaacacaccaatttggttttggaccactggatattataattacaatgaccatgcaggaccagagatccatcaatctacttccataagggacctcaacagaaacatttcgtttattgttcttgacacacggtctatgaatattngactgtaacagctaacaacacttgaaatgaaatgctaaaataagcaaatccatgtaaataatcattatcctagcgcttagcgaaaacaatagatttatagataatataaaactaagcaaacgaaagaaaactcacagcagtgcagcgtagacttggtgaatattgga

SEQ ID NO: 46331 - DNA, 425 bp, Oryza sativa
agtaatgagcaagtttttcttgctattactttatataatagaaacattgtttatttgcttaatgaaaattaaatcttggagaagagataggatgttttcatcccaaacactccatagagatttttgcactaccatctaactttttgactgctctaccatataaattcagatatgcacattaatcaaatctcttaaaagcaaccatcaattgagtcaaacattaactacagaaagatgagttacgagcctaaaaaatatatgatacgaacacattcaacccattgagccatgaggttgcttctccagtgcagcagcttgtcgatcagctgcttgttctcggcttctgtccgtgaccacgagcagcgcctgcagattgctgccatttggttggtgtcccaaaccatatgaaggcacgcaatatgctc

SEQ ID NO: 46332 - DNA, 350 bp, Oryza sativa
  unsure (1)..(350): unsure at all n locations
agcttaggacatgtacagcggnttatatattaggtatctttattgccatgcaattaaatttgatgacatggaagaaaaagaaaggagcatggttgttatgcatgataatgctcagagtcgactcttagcatttattaaagcaaatttttgtgcatggtgatgaaagaaaggaaagaagaagtagaaaaaaatattttgatacattatgattaaagaccatatngtctctaactattgtagggtgctagtctctagataatatagagctcatatctgactttaactntgtacatgtccttagctatatatattccgattcttactaaggtttaatagattctatgtaaaaa

SEQ ID NO: 46333 - DNA, 468 bp, Oryza sativa
  unsure (1)..(468): unsure at all n locations
ataaaattgaaacaatttggaaaggtattgttattggagagtacaccaatttatctttgaaaaccatgcatattattcctagtaaaccaaagattccaacaaactcaagctaattctagtttctgctgagttgttgttattgttagacaacagaaaaaactcttcgaaactcctaggtgtagcccctcaatctacagtatccctacanaggatcttcccggccagctgcttcctcgatcaagttggccagctcgtcgtcgtcgccgcgctacagcgaagcaagaaaccgataaaagggcaccacattgcctaattaccgagaccatcgcgtcccaactcccaaccatncccccaaacatgcagtgcaatcgtcaagctgagacaaccggccgtgctgctaaagctctctcatcaaatccacaaccattaagcagcactcacagtcacagcatgcatagcctgatcatc

SEQ ID NO: 46334 - DNA, 447 bp, Oryza sativa
  unsure (1)..(447): unsure at all n locations
agcttgtcaagtctactttcatatggacccatcctcatttttanattagttctggggcggccgcaatcttcattttactaccgagtccttttctgtccacggagttgcatcacctctttgggcccaatgggcggtgtatcaagttgggtccattacggacgcgtcctaaggtgagagaacgaccccagcactcctgaggncgacctcttcctcttcttatagctttctccaccgccaagaataatcgggttttgtttagatcaaagtatagcgtcactactttgccgagttgatcccgtgatcgattaaatcgctagattgcttgttattgaaccccacttgttacttctatagattcaatccaacagtcttgaattgcacaattatttgcttggtcatcttgttctagctaggtctcgattgcttgcacgaacaaataccctcgcg

SEQ ID NO: 46335 - DNA, 367 bp, Oryza sativa
cttgcttgctcgacccatggtgttgtgccaacaatagccgttgcttaacttttcgatgcatttcgtacacgataatgattgcagctcggaatgcatgcatatttcgtttttagattggttcagactatcacgtgatgatcgatttgtttttgtgatgcgatgcaaatgcaatagagatcttgttgtgctgcgatgcaaatgcaatagagatcgcttgtgttaattaatggttttcagcttgtgaaaagatgccggtgatcagtgttggtgtgggctccggacttatatgatcggagataactccctcacagatgatattacccttcctaaatgaagtttacactaatcttctaatctggacatcttc

SEQ ID NO: 46336 - DNA, 429 bp, Oryza sativa
  unsure (1)..(429): unsure at all n locations
agcaagcttnctactcgnnngtttgatgtcttggtttaaaanctacatgaatgggagaaactattttcagttctgaggggcatcaacactagaatcaaaattttattgacaaccagaacgcaatcagtggcaactctagttgagagtgtcacaggatgtgaagatcagcaccttatgttgcatgaacttgaagaaaatggaaatctacagatcttctgccaacttgctntggctgatctgaatgaaagatcagaagattatgcggaactccaatcaatcggcgctaagattgtaaagaaacttggagggactcccgcggcaataaaaagtgctgcttatctgttacgagtaagatcattagagtcctggcgaaggtttcttcacgggtatggataatttggagcagcagtaccaaatattatggatgtc

SEQ ID NO: 46337 - DNA, 462 bp, Oryza sativa
  unsure (1)..(462): unsure at all n locations
attctcgagcatgggtgccctaataatttatattcctnttccctttaagtgttactcaaacgtgcctctcaccatgataacccttngaagagaccaagacaactccggcctatgttgacagcccctattcaactagatccatctttcgtaaatgttcagtaaaggaagaaagatactctacagacataagggtaaagacactcctagacgtaataatagctagatctttgagggaagacaccttcaaaatatgataatttgctaccgatatttgcaaatatttaattttgggtgactaagagagagaaataacacgaaaagtcaaaaccaccgtagacccacgcatattcttgctctagctctctatttttccttttctgctagagtgaacaatactngacttgggatgggcgagggctcgatntcacctgctcaccaagctacagcacctctatgcccata

SEQ ID NO: 46338 - DNA, 152 bp, Oryza sativa
agcttcgccggttttcagactctgatagactaagtctggaggagcttgtttcaactacagcttttctcaaaaactgcttctgctagaagctgccctaaatagtccacagcttctgagaatgtgtagttacagattctaaaaaatgaactaag

SEQ ID NO: 46339 - DNA, 346 bp, Oryza sativa
gtgggcgggtgaaaacccactaatatcttggtggtcactgtggagaattaagttttcttctggtcattagcatggagaggggtaggatcaatcgagatccaacttcttagcgcacctgaactgagagtaggataggtggatccatacttcagaaaaaaattgagtctcggttgagtattcattctttcacttcatgcaaaagctttttcgtacatcttactcccaagtctcaatactggacaagtttgtgccttgcacacatatcttgaggcgtggtgcaaagggaccggaatattcttattaatcaccgacgtgtccagtggcatgttctcggagacaagaacat

SEQ ID NO: 46340 - DNA, 438 bp, Oryza sativa
agcttgtcaggccgttgtttttgttgatttgccaggaggaaggcgtctcagcttgcagttttcgatcacaagctcctccaatgcaggcattgcatgcacactatttagttgttgatcccactcccactcctcccactccaccatgcctatcagattcatcctcttcagcctcgggaaggcatgagcttggcggagttggctcgatgatggtagtatagttaggaattcaaggccaacacgcttggttgcaggggcatgggtgagctgaaagtaatacagagacggaagtcggcagaggccatctgggagttggttgcagcaagcgaggtcattcatgatcaccatcgacaacctctcatatgcacctgctactcttgacatcatccaccttggtagctgctctccaaaatggccactaatctcaatgctctctatgca

SEQ ID NO: 46341 - DNA, 284 bp, Oryza sativa
  unsure (1)..(284): unsure at all n locations
ngatgcttgactttttctttcttacagacacgaagctgtttttttattctncacggcttaacaactataagaattggagggacagggaggagaattttgaacaaccgtttcgcaaagaaaagacgaagggcgaggggagacatntttcaaatagtggtttcacaaagcttgtccttatggattgaccgtntggctcaacctacagtcgagttggctcttataccactttgtcacgcccagaatattaacccaaattttcagactattttgcgtattaaatccct

SEQ ID NO: 46342 - DNA, 440 bp, Oryza sativa
  unsure (1)..(440): unsure at all n locations
agcttaactagcatcaggtttattttctttctgctnttcttccctatcctttttttttcgaaaaactgtaaacaaggtcatgcaggaatttatatcatgtcaatatatgaaaaatacacgagctagcttatggtacacaaaagattaaaaaacaatcatagagttatttgatcttggatgaaaaatacaggtgctagcttatgaaaagcactgcaatcactgataaaaagaagcttactaattaagcaagtgcctgaagaggccggccggggtccccatgcatttgcatgtgttgcttcgtctctttcgattgaagaaacactaaaagttaattcatgcatgcatgcatggntgctctcactgtgttcacttgtgcaactgaagaanaagctacttcctccgtttcgtaatgtaagacattctaccatcttctatattta

SEQ ID NO: 46343 - DNA, 345 bp, Oryza sativa
  unsure (1)..(345): unsure at all n locations
ggcactgcttcttctttatctccttgagcgaagntggtgcttgtgataatgccagngntggcaagcccatcttggcatatgtcccgacgaagatgacatcagctaagctgcccccgccgatcaagatacgccggacttcaaaaccggccatctccaccaataccaccaatgggtcctggtgtgggaaaaggactccttcagcatcctccggtccaaaagatatctgctgcgccaagtatattgtgaccccttcgcctgccgaaataatggtgtgcactgctcgaagttgcatctttttctgtcgtttcgacacttgcgagtggggataagatcttgtgaaaccta

SEQ ID NO: 46344 - DNA, 344 bp, Oryza sativa
  unsure (1)..(344): unsure at all n locations
agcttagaccggatgcaagcggtttatattttattggaaccgcacgggcgatagtcccatggcgaaggccattggctcggacactctgacttcgccagacaaggactttatcagaaagcgatgcgggtgacggcgataaggcaaaagccctggcaggagggcctgggcttctccaggtgccgaacctcaccgaatagagggccagcgggctactgtgcccacgaaggtttcactaagtagataggccgagccatntcagccaattaaggcccatacatgtaaatgacacagtgtgcccttaataacattcctatcgtgaaggtaactatgtaaatttccctgta

SEQ ID NO: 46345 - DNA, 216 bp, Oryza sativa
  unsure (1)..(216): unsure at all n locations
cgggagaggcananagaagacaaagacggtgagaagacctaattcatcaacaagccgaagggttcataccaagggaggaagatggagaatcttaggaaggcttttcaacaagtttgcgccgcgttcgagccactaagtgatgtagatggtgagagtggagatgatgataanggaaagaacatcttcgatgtccgcttcaaggcgcgccgcgtatct

SEQ ID NO: 46346 - DNA, 328 bp, Oryza sativa
  unsure (1)..(328): unsure at all n locations
caacccccccccccnttactagctgccgcanncccggaccaagcgacgcgcagcaccgcacattataagtgtagggcggaaaaaccgaaccggggcagcgacagcgaaccaaaccctcactaaaaaaagagaggaaaacccggcaatcatcccgaacgagaacaatcaaacacccaaaaaggcagacaaggagagccaaagaagcaaaagcaactcaacaagtaaaagggatacgcccccccacatccgaaagaaataactccgacaaaccgtcgacgccgcaggcaatcggctacgtcgatccgttcgaaaaaacaggaagaaaaga

SEQ ID NO: 46347 - DNA, 334 bp, Oryza sativa
agagatttttcccaaaaaggctcatgtagttcataaaatattccaagattggttgcgtgtttggcaaggaaagatcacaatactacatgataattgaaaatatcccaagatattttttatatgctactgccaagatacggttcacatgaaatattataggtcaagcttgtctatcggatgatcatatacaatgaacagatcaagttcaatatgggaattaccgaattaagatggattcgaagatgatattgtactgcagttggcaatcttgatgagctaaaagaaaatcatttttaattgaagtttacatacactatccaccttgtttagatta

SEQ ID NO: 46348 - DNA, 294 bp, Oryza sativa
ataaaactaactaacttttattttctagaaagggttgatgttttcacacactaataatctcatgatgaggcatggcatcccactatcatataggagatgtgaagaattgattgtcactatgactgtccctgcatgaatacaaacaataccatacatgtgatatgttcttataaagtgatgtcttgtacggcaggcacataaacacccctaaaaacaactgtgcaatagaaaactttactcctcgtaacctgagaatcgcaatttatctgaatataaatttatgacagcttcctg

SEQ ID NO: 46349 - DNA, 371 bp, Oryza sativa
  unsure (1)..(371): unsure at all n locations
tttcatganaccgttcttgttccggtggaggggagtctttctgcggaagaagtgtgaaagggtatcattaacatcaggccggatcacatccggccctggtgtgctaatgcctgcaatgaatgatagtcgcgtcttatcatgccaccattataaaattatcgctggtttgcggtacgctatcgccaagttatgccagaatcataaaatagcacgttgggagtcgtcagggtgcagcacgagacataaatggaaaaccagagctggttgaaaaaactcgcacgccgcctgnggcctggtcatgtncgtaatctctgctntatcgtggtattggctttttccacccttgctcacctgcgtgaagtggtggtgct

SEQ ID NO: 46350 - DNA, 431 bp, Oryza sativa
  unsure (1)..(431): unsure at all n locations
gtcccatcggagtaccatccaatttttcaccacttctttcaacgagatcatccctacaacatcctcgatgacatacaaaaagggagtaactattcattctcaatttgcaaaatttgtgaatggtactctctattgttgtctttgaactattaaaaggaagatggtgcacatgctaaaacgaatcgggtcatggccttacaagaagagcacaagcactatcaggacgcagactgtgatcaaggagttaaacatgttcgtgatgggaaagcttaagttctttctcgggattggaatcaagcaaatcaaggaagagatttcatcaagcccatcaaggtgccaaattcaaaatggcttcaagatatcaattttatcgtatgggcatctcanaaattcacaaggaaggtaactcgatgatccatagcttgttatct

SEQ ID NO: 46351 - DNA, 258 bp, Oryza sativa
caatctaaactacaatactagctgtcttattatttactactagaaactgattgtaatctgaaggactctgattttgggctgagtgcactatctcaccaaatcaacggaaaagcttattgcttcatactgtatcatccaagcatgtaccaaccaatggcggagacagcatgggggtggggtgaatgcgaattctctcagaatccagatcatcttactcactcatcatctacgtctctctaacattcctgaataatactc

SEQ ID NO: 46352 - DNA, 318 bp, Oryza sativa
  unsure (1)..(318): unsure at all n locations
agcttgncatgtttgtcacgggcttttctatgatatcaangccgcgagggcatgctgtcgttgtataaagcctagcgaacttgcgcgaggaagctttggcacactctacaaagccattttaagagatggccagcctgtggccattaataagctgacagtgtcaaacttggtcaaatcagaggacgaattcatacggcaggtaaacttcttggaaaggtgcggagcataatgtggcaccctcagaggcttctactggacttcatcactgcagcctctcatctatgactatgtgcctggcggtacttatatcacacctgc

SEQ ID NO: 46353 - DNA, 384 bp, Oryza sativa
  unsure (1)..(384): unsure at all n locations
cncgttctatatgtataacttgcgcacgagttagttatattataacgcatgangcgcatccacaaatcaagatggccaagactcttaacaagaactagttgtagccacgcacgggcccaagcacaaatattgaagtatgaacaacgacttaccttgcacattatacagcagtacctctcccaagactcccccattttctgattgcagtttacgcaggttcgaccacgcccttgtaatggtgtcatcctgtggttcaacaggatccaatcccgattccagtctttcactctctgtatatagtttcaattgtacccccagcgacccaccgcgtacttggcgaacgccgcggggtcttcactttcgagcaacccaatctgcaacaag

SEQ ID NO: 46354 - DNA, 163 bp, Oryza sativa
  unsure (1)..(163): unsure at all n locations
agcttcgtgcatggagcgagaagatcagnnttgnattcgtcgctctgcgaagatcaagtgaagttttctcggagatgacctanacccaatctttcccagaagaggagttccgttagctntctagatcgcgtgttggttgcttgcgtgtaggggcaaggtatct

SEQ ID NO: 46355 - DNA, 433 bp, Oryza sativa
  unsure (1)..(433): unsure at all n locations
agtcttgtcaatacggcaacttctttttttttaacataaagcacaagnttgaattaatataatctttttcatggacctagatactcctctaaaccaatattgttgcattacgagttggagggatatcaaaagtaaagaacacacatctccagacaaatcgagcaatataatactaaaaaaaatagtggattgtctcttttgcataacagatgcacaatatttgtccctaccccccccccccacacacacacactttcttttagccaggttatattttgtttggattactttgttacgaagaaaccacaaaaaccttgatttttaatggaacctttaaatcccatataatcctcttgcggatcctaacatagagctaacaaaaaattggccacttttatgaagcggtcatacaaagtaatcattgttatttcac

SEQ ID NO: 46356 - DNA, 311 bp, Oryza sativa
  unsure (1)..(311): unsure at all n locations
actcaactactttagaggttttatgttaagaacttttgcactgttcttgcaaaatttcttatagacatcttatcatctggcctcaaagtttccacatacttgttagcaatatagttggcagcgaatgtctttagctcccacttcctgtcgcatctgcgntcgccgatataagtcttgatcatgaaacattttgatcggctatcatgtgaagcatttaactcccataagcacggttcattacaaagagcccttattctatctttcgcattataaggcatcttgatagccactctggtctgacactggattta

SEQ ID NO: 46357 - DNA, 438 bp, Oryza sativa
atctttaccacaaagaggaattgattttatctttccttcacacaagaaaggatttgaagctcatgtaaactattgtctaaaattacccaaaactgtttatttaatcttctcagaatgcactcaaaagtaggtgatctttaataattgacaggaaactaacctgcatttcattgcattgtttctctacaaatgactttagccgcttgatgtattctccatcaacttccccattcttctgctccaactcagcaggtataattgcagttgcggtctttgttcgactaaatatatccattatattgtccctaatatcagtctcaagcttactgaggaaactaacacaatgtgaatcaaagatttctgacaggactggatgctgatcgcctttatttatttcttcctcttcaatctcttggaaatctgacatactatttgcac

SEQ ID NO: 46358 - DNA, 353 bp, Oryza sativa
  unsure (1)..(353): unsure at all n locations
ggctggtatctntccacttaactggnngntttattagtttatgtattctaacctgctaagattgccaatgctatctggtatggagccagagattctgttcctttcaagaaatagtcgctgtatactcaaaagcgtgccaatctgtgttggcaaagggcctaaaatgtgattgttagagacatcaagcaacccgagatttcccatcgtagcgattgattctggaattgccccagtgagttggttgtaaccaagatctatcagctcaaggctgcttaagttggacattntttctggaagactacctgcccacttattatgatcttgcatgaaactaattaaccgtgccgagagat

SEQ ID NO: 46359 - DNA, 114 bp, Oryza sativa
aacaaaacccggagaaaaaccacaaaacggaggacgacaaagagaacagggaccaaaagccacaaaaggccgggggggggggcaccaaaagggaacaacgaaaaaagggggggg

SEQ ID NO: 46360 - DNA, 260 bp, Oryza sativa
  unsure (1)..(260): unsure at all n locations
cataactgcccttagcacaaagaagctgcaagctctattctaatatgctccctattgctgcgcgtgaatatactttcggtaataaagagccactattatcctgccacgcggatggttgttatatattctttcacaaaagagagaagataccctactttctgatacacacacattgctaggacttaagcctacgcaaaagatgacgttctgctctttgcatatccggngataaaaatgcacaataacaggtcgctcatgat

SEQ ID NO: 46361 - DNA, 433 bp, Oryza sativa
agcttctcttactgaaggggggaaagtatgtattatgattgagtacaaccacagtactcagcaagccacaccggcagatgcacaattaatgcaaaggagtacaaggggataataatataggggttaagttttgcagtaaacagcatttataagtcacttagttgcccaaaaccattttataaagacgatcctagagctacacagtattattaatcaaggtcgtgaacccacacgaacctgccttaacccaaggcctactatgattcagaccgaactggcaacccgaccctgggtcccagcttgttccaagccaacccaggccaaccattccacattttatttgttaaacaaattttaagaattaaaacactgacttgtgtacattgctcggcttgcccataaccgatggcgcggctattacaatatattatac

SEQ ID NO: 46362 - DNA, 385 bp, Oryza sativa
cgtgggggtgtggtgacagtacgttatcaacgcaatttcgactcgtctatatatttccaattacctgaagactagagtattgctggcaactgcataaaattccaacataataattgtctatctgccactaatgaactaatgctagctaacatatacccactgagaagcacatattaattgaggagaatcgacagatagcaaacgaacgatcactcgaaagcgttcgagaatcaaactggtgaaaagatgggccgataacacaaaatacgcacgagtaaacaagcccaataatccacatcactggattgatgaatcaacaagaaggcgacctgcaaagtagtgtgatgattgggcctagtaatgactgatacagtagctatgacca

SEQ ID NO: 46363 - DNA, 410 bp, Oryza sativa
agcttcaggaagagatgggttctaagctgtataatatttctgcttatcatccgcagacagacggacaaaccgaaagggtgaatcagattttggaagacatgttgagagcttgtactttagacttcggtggaagttgggataagaatctaccttatgcggaattcttgtacaacaacagttatcaagctagtctttagatggctccttacgaagcacttgatggtcggaagtgccgcactccgcttttgtgggatcaaacgggagagcgtcaggttttcgggacggatatcctaagggaagcagaagaaaaggtgaaaatcattcaagaaagattgcgtgtggcccagtctcgtcataagagttatgccgacaatcgtcgtatagatctatagtttgaagaaggagattat

SEQ ID NO: 46364 - DNA, 392 bp, Oryza sativa
  unsure (1)..(392): unsure at all n locations
gatctgagctaccacgaccaaggagttgttattatcgtgcatantcttgagtatgagtagtcgtgtgctactaaccatcacgagattgagcacgggaataagagatcatcgacttcttcaccttagatgagaaatgacaacttctccatgaagagcatatgaggtacctgactatatagttgcatgaggtgaatctaaatatcattatgcgacgagaaggatgaattttgtgcttatattgaatggaagctggcaatatacaatgaatgtgactagatttttctgatgctcaactgattaacgctgcttataataaattgacctcttctgcattatattggcggagtaatgcgagtgagaaacctacaacttggatgaatgccaacaatgag

SEQ ID NO: 46365 - DNA, 432 bp, Oryza sativa
gcagctgcagctttggagtgttcagttagacttttttcttctttatccctcttgacggcattacctagagccaaactgtaccatacatgaatcaagaggaatgtctagaactccctccaaacctgacactgtattatctgatgcatactaaccctagccctgcaatgttgtcattagggttatagtatgtggataataacctgagattaagctgcgtgcaaaacgtatcttggtatgcacctatctgtgactctcctctggtcagcttcttcctcctcctcaattagcttatttatgttatgctgaaacatgaatcttctcttcctccccaaccccagttatattataaagatgagagggtgcaaatagcatcttgaatttgagctggtactgcaatcatgtgtgatagtgaatagctctgcactacaccac

SEQ ID NO: 46366 - DNA, 94 bp, Oryza sativa
gcggccaaccactagtacacgatcatgtgtccctcgataaacaccggcgggcagccaacacagaaaggacacatggctggaccacaccctgcac

SEQ ID NO: 46367 - DNA, 430 bp, Oryza sativa
  unsure (1)..(430): unsure at all n locations
agcttcaagattgcaatattaatcatatatttcatgtattattgaatnggncattttaaaatagtatatgtgaaatctttgttttacttgaagtatatataataaaatcttgagttaaagattactttgaaagagcagtaccaacctaactggattatgttggtcagataacttgaatccagctctagctacagtatccaagagaaattttctactccaaggatgcatagataactcaaaacacaatctctctacaaaacttatttaggccctcttttttctaagattttttgaaagttgaattgcccactgatcttcactagaagacagacgtccaaaaaataactagaatgatattttcactgttacctttacacactccaatattgtcgtcctgtgtctctgtactgcctgtgtatctacagtaatg

SEQ ID NO: 46368 - DNA, 432 bp, Oryza sativa
  unsure (1)..(432): unsure at all n locations
tggaataatagcagtagtaccgacgtgtgaaccctgatattctcatccaatttttccatgactttctatccatctagtagccggaagcttccctttagtaattttactctcgatttttttgaattgatttgaaaattttgaaatcttcaaattgagaaagagtccaaatcggaggcttccgagtntcgtcatcctcctatattcctcccctgtcgtcttccttccggggaagatgaatgaagcaatgaacgtgcaaaaaaacacgcatggcaatgaattaagctggcgacgcggcgaaatacggtcgcgcgccaccgggaagccaacttaaaatgcaaagcccctttgaattcccgatcatttcttgccattattctgaatttgaagaaagcggcggcggctgatttgcgggggggggggtgttttactact

SEQ ID NO: 46369 - DNA, 426 bp, Oryza sativa
  unsure (1)..(426): unsure at all n locations
agcttgaacaatgtcaggtctgatattttatatattgntgcaagcaaatggtaatataacttatataagttctactaacacagaagtagaaaattagaaatagattgcatccaaaggtgaaatctgatcagcatctgatgttttcattgaatcttaatgcttgtactaccagagaaattattaacccacaaaactgagttcaactaatataaattttcactcaatcatagctaggcaccagcttgtattacgaagaacacactaatcaatcaatattctcacctcatggcggtatctgattccacccttcataggtcccctaacattgtcatgttaaaccctaaacccaacatgtaagatgctaaagtcccatcatctttcggaactgtgcattcaacctgcaatcaaccacagacttggtggcac

SEQ ID NO: 46370 - DNA, 478 bp, Oryza sativa
tctaatgttgcaccacagagtgaggccaatgtatattatgttatatataagtcaaagccgaggacggctttgtttcaaggaagggaggatgatgagcccatgactcatcaagatgttcatggagacatgactagcgataattcaattattgtagctggtaattctctaatatcatctggttgtcaatttaaagctatttattttgatgagaaatatggcacaaatatggagaaatttactagcgctggtctatcatcaaatatatgttttagaggagttaattttcacaagataagggaagaaaagaagcacagaaaatatatccaaatttggtgcattcacgtcgacgtcacatgagccattttttggtgaccgaaatgctgcatgcaagtgctagtacgagggttataatgctaatgctaatggtgagatttgcatcgtggcccgatagtttaatatatgtttctatctgttgggg

SEQ ID NO: 46371 - DNA, 431 bp, Oryza sativa
  unsure (1)..(431): unsure at all n locations
agctntctcctggtcctccaatgttgtatcttcgtatacatggngttattggacgttggcatggtcttgtggataatgttgcaagtggcaacttccttggtgctaaggtaatatttgttactaactaagccccttcggcttccaagtatctggccttaatctggttcttttgcttatcttgtgaagactatgctcagggcaacttttatacttgtaactctccatgaataaaaaccacttttctcctttaaaaggcacataattatacatttttgttttcatcagcctgcctttaattgacttgttcacctcttacagacttgtttaccctgttatgtaaaacactcctcctaagataatgtatgcagaatgatgcaaattangcaataagcattggagggttttagttgagatgaccatcgacatctgga

SEQ ID NO: 46372 - DNA, 444 bp, Oryza sativa
  unsure (1)..(444): unsure at all n locations
tgcganagcggaattctttntggttgctcanacctacaagtccatgctttntttaatgttattcaccgaattatttgctcaatggttttatttagaaaatacagcttctaaaaaattccattatattacatttcctatacaacttggttcatttcttaaaatatttaatctacccatataaccagtagataatccgtaacaataaatgttcaataatctaaatcaaataggcattagattattcactgtattaattgctccatagttcaaaaattgcatttttctaaaaaaaattgtattattcaaactgcttattttaagctattttataaagtngatttaccaaaacatctacacatttaagttatgtttataattaagttgataatccacgggcaacgagatgagattgaaataataaaaaaggccgacgctagcgctcac

SEQ ID NO: 46373 - DNA, 430 bp, Oryza sativa
agctttagtcccatctaaacagggcattattttcgtttcgtgctatggtggatgggcagcaactctttgcttccacctggatcttctcttgttgcaggactaagcctagcactagcatacacgcaatcaaactgttcacaccttccatgtttcctagcttgttttccaatcagatttactcgaggatcaactaaaggaagagggctgtggttgtgcatacgattggagagtgagacacgcctatttataggtgaagcctatacagatgattatgttattttaattcacaatagttatattgatgatctgtactctgtattggttgtttagagaccaagccacttacactagtacataatagaactttccgtgcggtcaaaatacattttttccgtgcagaggacctgtccgtctacacccaggtatctac

SEQ ID NO: 46374 - DNA, 450 bp, Oryza sativa
  unsure (1)..(450): unsure at all n locations
nngatatttatccaaacctttagttggctaanatgatatatttatctacatatgactagatgttgtggcgtcttaatattgctttttaccaggacaactggttaagggaaatataaagcacctgctgcatatgaggagcaccaaaagtaatatgtagaaggccgtgtgtggaattttgctacaaacgcaagatttctgcagtggaatttggttgtgtttcttcatctactggttggatgcggaagcttatcatgcaggtaaacgtctgctgctactcagagtagaagcatctctgcaagatatttcttatccattttcatgtcaatactcataaagtgcaattgaaccatgatgcataaatatctttacaactatatctgagaaggaattgttgataatttgtntctgtttcagtagccaatatgctgaaaagtagaaacattggtattc

SEQ ID NO: 46375 - DNA, 345 bp, Oryza sativa
gaaaaaatatcacaaaatatacgacacaatagatagggcctgcctctctccttagcacttgagagagaaagcaaaaaatagagaaggaatgtaagaaaagtgatgaggagctgacttgcgtgaacatcccccaccattccctgttgacaccaccaccttcctgtcatgctcatgtatgggttgagtattgaggcgtcctttgtggctaggcttgcgtctctacttaggctagcctaagaccaacattgtaccaaccttgagcgagtatgcaacatgctttgactaaccgggtttctggttataacacagcccacacataattacaccggttcgataacacttgac

SEQ ID NO: 46376 - DNA, 379 bp, Oryza sativa
tgccgcgcgaatcacgaagtgatactatgccacgaatgctcccaacacactccaatatgagcaaaaatcatgtgtcggtgcttatagaactttctcattccgggctaaaacatcgcacccacctatggcaatattggcattaattcacaaaagttcgccgcgcgaatcacgaagtgatgttttgccacgaacgcacccaacacactccaatacgtccaaaaatcatgctttggtgcttttagaactttttcattccggtgaaaaacatcgcacccacgtgtgccaatatatggcaatattggcattaattgacaagagttcgccgcgcgaatcacgaagtgattgtttgacactaatgcgcccgatacacttccatatg

SEQ ID NO: 46377 - DNA, 425 bp, Oryza sativa
agcttccccagctgccgcagctggttcacttattctccgccgccaccgggacgaaccatggcgtgatgttctcgtcggaccatggctgcctgtacccgctgctcccggggatcccgttctgcctcgactccggctgcggcgccgccgcctgcgacgacgacaagcccgccggtttcgcgcacttgggctccgccgaggtgatcaattagccttcaatcgatctcaatttggtcatggtatgccgttctttaattacttgttgcttacaatcttggatctcgatcgatcgatcaggcggacacatcggcggcggcggcgagagtggatagcgagattgctgcagctgccaccgcaaccacttgccatgggcctaattcatggtgagtacgatgatcgatcacctcgtcctagctaacaccttgaat

SEQ ID NO: 46378 - DNA, 475 bp, Oryza sativa
  unsure (1)..(475): unsure at all n locations
gcaccaaccangataggaacctccattgccatctgtttgggaacccatctcccatacttcggtgggcaaatgtccctcgtaaggttagctgccactgcaaagccaaaaaacccatagcagagctgcaagcaatgctggggcatagcagagaagccctcaacaccaagaatcgccatgtttcggtagactagagcatatggtgctctccagaacccttctgggttgccaatgtcaaaggcactgtagaacaagaagaaagttagtggtgaaattacacaacccatgacagttccaatggcctgagcgataatcatcgatctctgtgatgttaatgttagatgtcccgtcttgaaatcatgcatcatatcagcagatatggacaccagcgatttaccataccacaggctactatgccagcaactacaccagagtctgtcccagtccangctgcaagaatgaagaggcaaacttttca

SEQ ID NO: 46379 - DNA, 417 bp, Oryza sativa
  unsure (1)..(417): unsure at all n locations
agcttattgcactntgcttaattatgaaccatcttggtacagaattagtcaaaagcttactgaagtcataagttcatcttgaccaaatctgtcaagaatccaaaaacaattggattgtcctaacatatgcatggtgatggtgatttcattaatcaaggaatgaatctctactatactgataattgacatagatggtgcatcatcttaaatattctgtcattgccagtgaaaatcgaattttaaggtttgacttctgaaatgtgtaaaatcttaaataaccagatactattgttctttggagatgtttagacatgtgcagacagttatgcgttgttcatagacatagatactttagttatcattatctaaaaacatgaattctttagataccaaaacgatgctttcgngttttttttc

SEQ ID NO: 46380 - DNA, 451 bp, Oryza sativa
  unsure (1)..(451): unsure at all n locations
tcaggcttcaactcacactcttcggagatcatcanatgctacgagattactgctatttgaacgatcaaatgcagattcttactgtgtaaacacacactcttgctctctgatgctgcagctgaaagcctgngactgccttacctcagtgcgtacctcaactcgataggaagtaacttcacacaaggtgctaactntgcaacggccgggtcgtcaatcagaaggcagaacacatctttgttcctctctggtttcagccccatttccttggacgtgcagtcctgngagtttgaacagttcatcaacagaagccagttcgtctataacaacaaaggtgacaagaaaaccaaaaaatccatttctgtcagtaattcagtaccacgttgaacccaacaatcacgttctgtttcgctccatttcttcacataggtggaatctacagggagctcctacc

SEQ ID NO: 46381 - DNA, 424 bp, Oryza sativa
  unsure (1)..(424): unsure at all n locations
agcttgaatcgcttgcacggtcgcagtctgtttcaccacatgagacgaagcttggatcgattgaacagtcgaacttggttgcgttgcttgagtcgaagcttgaatcgctagagtggttgccgcgggtatcgaagatggagtgggtcttgctaaagaggttgaccaggtttgcagggctgcttcgtatacttgatgctgctcttgcatttggcgaagcgtgtcctgcaacctcatcatgtcttgtcgcatagcttccatctctaccctttgtgccgntgacgcttcggcttttgtgcttgcttgagtcgtagcttgcgttgtagcttgagttgaggtgggaatgatcgaagttgctgcttgggttatggcgatcgtctgcatgacttcgcccncttcttgcccttccgccccttcgcctcttggt

SEQ ID NO: 46382 - DNA, 455 bp, Oryza sativa
tctcagctggagggccgtagtccctggttgttactcctcactctcgaggaggtttttccacgtaaatcaccgtgtcttgtgcgcgtgtttctattgttattccgctgttgatttgctagttgaaactatcatcaaagttcatggcaagatgaggggttgattgcgtgaaatatgtttgccggctagtgaattgtagtttgcacattgaaagtgttttggttcagccccaacagctagttgggttgaaacgcccccgccctcgctcctcgacttctccccccggactcttgcccgcagaggtggtctggtgggaatcatcacccgtccatgttccttctagggacccgacaagtgagcatggcctcattcactcggctgggccactgtggcgatgaccgatgagtaccgatgatgggcatccaggatggcccgagctccaatgacacaccgagtat

SEQ ID NO: 46383 - DNA, 432 bp, Oryza sativa
  unsure (1)..(432): unsure at all n locations
agcttgtatgaatcaaaacactcaagtttatatgtttcctcgtaacatttcatcatcgntcatcttattaattnttttaattttgttgtgacgtgttttatcataaaaaaatctataatggatctgtttggaggatatttgctgcggcgctgggccatcctagatttgaacgagagacctagctcacccgtgaagtaaatcaccgtccctacgatccaaccaattggctatgcttgtattgtactattgttgctgtagcagctgcggcgtcatattccaatcataacttatcattttacatatttaaattattcttttaataaataaaacgaacgatacaatgtgataccaaatgttagacaacatcctacatttcaccgtttcggaacggagggataataaggccttatttagtcaaaaaaaattntgtct

SEQ ID NO: 46384 - DNA, 460 bp, Oryza sativa
  unsure (1)..(460): unsure at all n locations
tctctccttttgtaatgcttcctaaacatcaagtacagatctattgccgtgttgctntgttntacttataattntaattacttaagagagaccagagtttccactcttcccaatcaggctctgcctctttgaaatggcatatttgcaagttcatggagagtttatagtgtatgattttgcagtaaacataacgtatatgccatcagatcaagcacttcagagattttaacataatttaattttcagactttgcatgtcataacaatcagttcatcatttgntcgcagaaattagaccgtcacaacaataattaagcttgcttcacatatgaccaattcaactgatactgcatcttgaaaggaagttgaaatcaaaacagagaatatctctacatgaattcagagatntactcacaatattcagaatacgtcataacagtgaagatttcgctttctctgaa

SEQ ID NO: 46385 - DNA, 434 bp, Oryza sativa
  unsure (1)..(434): unsure at all n locations
agcttgattcaaaggtcatgtttttttaatctgtcttttgaaaaagaagttcctttactatattctcaagaacagaatcacagaaaaaacacgtatagctttctgctcaaggaaaaagtataaagaagcagctcaatagcatgtatgcatcgaggtccagttaacatcaacaaccaccgtaagtgataacatatatagagatgtacttctgaagaacagntcacattaacaacttcccaatatcgaactactaacactgttcatctaagtaatgtgtgaagtgttaaaaaagtggcttcaactaactggaaagcaggataatttgtgcatgatatgatcacaaaagcgaacatactgagaagtgagaacaacagagaccaaatccatgcgcatgtttctttataagagatngagagatttaccaagaagaaagt

SEQ ID NO: 46386 - DNA, 439 bp, Oryza sativa
cttatctctcctctcctgtctcatccacctctttattcagctttcttacatccctctattatacttgctctaataagagccgccagctcgagctcgcctagcaccgagcgccatcacctgcaacatcatagcctcggtcattgtggtgacggtggccccaagtggcacggcgaccagcgggtggtgggtgtcaacaaggacaatgtcgatcttgaggtcagggaaagtaccatctttcttagaaaatcaaattaatatatgttaaaaaaaataataaatacttaattaatcataagaagatatgtcgctctgttttacgtacgtggaaggtgagtatccaatctcacctgctgatcacaaccttagtgggggagagagagtggcactagtacataaatacattttctggacaccaaccccgggagattcagaatggctg

SEQ ID NO: 46387 - DNA, 431 bp, Oryza sativa
tgcccgcttactcaccagtccaacaaaacgtttttattttctattaagagaccataataagattcaggtgcggtgagtcagttacactgttgcaatgctacttaagtagaagtgaatcatgaaaaacaaagccttgatgcttaccataatgatgacgattgcctgacagagaaagacgttgtgacagaaaccggcaagctttgatgcagagtattccgggagttggacagtcgagttagtccgaatcttaatcacacacatgtaatgttaacctcattcatgtggccatagctctcatctaagattgtggcctgattaactcatactattattcattcccctcattcatgtcagtcgctggcccatgcccatccatctgtacttatcacgatctcatgcacagcatgaaccatcctatatatatatacaca

SEQ ID NO: 46388 - DNA, 471 bp, Oryza sativa
  unsure (1)..(471): unsure at all n locations
ctgngatcttcgaaaattaagatactctangacgagatcaccttatgactcatacacgccaacatattctggtaaggaactttgcgcatgctccacactcacagtaaattgtgaatggtgcatgtgcttcgatgtgtgtatagatatatccaacaagcgagattatgttgatcattcaccctagatatatcttgctttctatgatattgattgtagctggaaggacatctcattccatttttgttatttgtactggagttccattaatcatatgatgcatgaatgtgtttttgtttatcttacagcggaatttgactctagcggaagttatctaactgttggtggttcagatacaaggtattttctcataacctgcaattctgaccttttggtgcaatgtataccgaaactattatatttgaaccttctctgtttgccttcaggtgtacaagtacaattgtaacttgaatg

SEQ ID NO: 46389 - DNA, 470 bp, Oryza sativa
  unsure (1)..(470): unsure at all n locations
tatctataatagaccgagtttaaagagaatatggcatggctaattatctattaattacgaatagtttgttagtttccttatatctttaggaaagtgtgtttagtgtcctgtaaggacattatcttttccttttatctttaggaaagtttctttcttgtccgacaaggacttgtatcaacccatagtgtaaaatatatacagccagggtttatgtaatctatcctcacgatcaatacaattcggcgcatcgtcaccttttaccttttctactttattgtatcgtccggcgggacttggcacctgacgcggggctgcatcagtgttcgatctcccgctaaggggtaagtttaatgttncgccggcccaggcaattgtatcgtctacgtctgcgtcattctatgccgcatcagtacattcgacctcttggattgctctggattggatgatatatttgcctacctaattatcat

SEQ ID NO: 46390 - DNA, 437 bp, Oryza sativa
  unsure (1)..(437): unsure at all n locations
agcttgaccttcagctttcatttctatacaggaaatgcttctggaatctgctgaaacaaaatggtatgagctagtaatacagcaacagacaaactagaagactgaatttctataaatcccactgaccagtttcttgataccagccttgtgcctcaaacaagtatagcctctcaaaatggtataatagtgacatgtagtatttcttcaacataaaagaagcatttgtcgcagtagcagggaaaataaatgatgctgttacttccctccatctattatcggacttcacctgtgaaataaatntcagttatttgcctgctattctgacaggtaacaactaataataagatcatgaaaacaacaaaaatttcaagtgccatgcctttagtttgcttttctttggcaaacttctaagcataataaaaanttgctntactata

SEQ ID NO: 46391 - DNA, 410 bp, Oryza sativa
  unsure (1)..(410): unsure at all n locations
ntaaagcccaacatctctttaatgtggcccaacatcttctatgctacccatgtttcaagccctgtttattatcatcacgttatcgtgcgaagccacggctgtggcctcatggcaacgtgttccaacggtttgatcagtgaaccgaagttactccgtttaatcggctcggttttcttttttatatagattcttcggttgcaatagaaaaccaaaatttattaaaccgttgaaaccgagctgaattaaccgagtaaaccgaacgctcacccctaccctcaacccacacatacaaacgcacacacacacatcaatgttctctgaaactgatgtgaactttctaaacaatacggttcatctcctacctccagatagtatttggcatgtcgatcatggattgcaatatcaggtca

SEQ ID NO: 46392 - DNA, 431 bp, Oryza sativa
  unsure (1)..(431): unsure at all n locations
agcttgttggaacagntggtcaggttttcatttttggagctggtgatcttctacaggttatggttggtggcactgaggatactgtttctcagccaaattcagaaaatcaaggttccaccccatctggtgagcatgtgtggattccatttgctgaggatattgtacctgatattgatatggagagtagagaaatgtggattacacctccaaaggggcttcttgagctcaacgcgcgttctgataagagatcaaagaaagaaaggcgtgctatggttaggtctgcatcatccttttcttgcatgttatgttccatgtataaagcattctttcgcacataaaagtaaagaatatgtcaggtctaaagaatttcacgtcattatagaagggggccacccctgtttcagaaaataaaaggttctaaaaaactcaaa

SEQ ID NO: 46393 - DNA, 402 bp, Oryza sativa
gacctataaaactcagcgtggaaagagagtggtgatcgaggagaatatgtattataccgttcattctagcataaggttgaaatctatggtgcatgcagcatgggtcatatagtcgttcagtatcagattatcatcacgacatagtggccggtcaagggaaaagaagggtggatagattaatagccctgctgtaaccaaaaagtttgccctgtactttaattagtttcgtaagaatgttgcatcaatcatgaccttaattaagtttgtttgaaagatgcatctgtctgacgtacgagtgaactagctggacataatgatgacggattatgtgaatatgccgaacaagtgtcaaggtgcgacaactgttccagttgggtataacatacaggcatatctggctac

SEQ ID NO: 46394 - DNA, 415 bp, Oryza sativa
  unsure (1)..(415): unsure at all n locations
naagcttgtacttttattagaatactcttctataatacatttatggtattgaaatactttccaagtatatgagtacctactttacattatgttcatgttatactgaatatatggctagcttatctgggatatgctttggtgtgggtataatgtttgcttatgcaattactctatgtcatgacgatgatattagagtagtatctggtagtttagacgtggtgtctagattacgggatatcattatttggggttatatattgcggatgagaggtgggccgctgatggtgacagctcagtacgggtattgctccgcgccagtatataatccgaagttaattcgatggggagggtattcctccgtatttagacccggttatatggtcatgacgggttgtcgtaaggaacttggcagtca

SEQ ID NO: 46395 - DNA, 474 bp, Oryza sativa
  unsure (1)..(474): unsure at all n locations
taaagctatnttaccaattttttttccggctagatgactttcatgacacatcacatgccatgagaacgtactcatgatgcagtagcccctgaattcgcaacttattcaaatgattttcttcaggtcaacccgtaaaactaaacaaggcgacgactgacgacagctaatcagaccaaagcacccgaaccagctgacgaaaatctcaagaaaagttcctcctcttcttttcacaccctgagcttttcaacccttaacccatcaccccacgcaaaaatctctcccgtgaaaccgaatctacaacataccgaagcagagaaagccaagattacctcctcgacaggagccccagagggatcagatcagaacctgttgatgtgaaaacacgaggcctgtgagattttcttaactccagtgcatgtcccaaaactgccgttgggtgcgtgagcgtgccaattgaattgatcctacaatcac

SEQ ID NO: 46396 - DNA, 427 bp, Oryza sativa
  unsure (1)..(427): unsure at all n locations
agctntgcatgttcatagttgcccatgcttgttaaggaaacttgcatacacacacatgagcgtagtcttatttaacatcataaaaatgatgttcttgctagacttcaggtgcttaaatattcataatgaaacatgttctagagtgcatgggcatcatgagaattctgattgttgtagaatagctgtctcacttccctttgaccgactgtggtcttgaggcagtagtctgcccatagattttcttctattgtggttgtcctaccataccctcgaatatgcagcatcagcataaaaagttattacgtagcatttttatttttgatcactctatacttatttctgtgaattaatcttcttgcagttccttccacttccaatgatttctggctattatgcggcaaggttctttactaagaanagcttatca

SEQ ID NO: 46397 - DNA, 469 bp, Oryza sativa
  unsure (1)..(469): unsure at all n locations
tggttagttctctttggttaatattgttaattaattacctcatgcgtacgtatggagctacatgatggatgccggccatctagttataaaaaaaacagagagaagtgaaaaaaaaaggggattataattagctaaaagctatatgtattatatttttttctataaaggaaaaaaatcaaagcttacattctctgaagtaatatacactagctagcagttatatatgacaaaatctagcacctagctaggtgtatccatggacatggacaatcacaagctagtatatagctgcacagatgtntacaagggaacagtgtacataatactatatatgtttcttcttgtagcatgctaagagtacttntgtcttgagataattagttanggagtttgttagttatccttaagcatggtcatccatacacacancagaacacacaagaagcatggccatggaaagaggacaacg

SEQ ID NO: 46398 - DNA, 426 bp, Oryza sativa
agcttgggctgcatcaagctcaactaaatcttcatcaacaaaagaaaatgccactgcatctaaactccctgatttatctgtgattgtcacggggagtttatacctaaagcattgtaaaatagtcagtggcatatatgttatttatatcatattatttttaattgttggaatgtaaggtgagaagctgacattggtttggggaatgaaaccgcacagtcacatcttggggagtcagaactattgttgtaccctttgtcacaacgatgacatcctatgtagtaccacttaattgatgacagtattgaagacacttttgcaattgcactataagtaactcctcccttaagtgaagaaaattataagagttatatgttgtctgaagaaaaatatggaattccaataagaatatagatggttgtttatgtg

SEQ ID NO: 46399 - DNA, 471 bp, Oryza sativa
  unsure (1)..(471): unsure at all n locations
tcttatttgtggagcacattgcacccctataagtaaaagcgatcatgccgagattnttcttctaaaatatggcaatttttcttattccaaatcaatgattgtacttccatctcttttacaggattcatctatattgaactcactagaggatggtttgaatgctcttctcaatattgaagtatgtgtcaatcctttttctagttaccatatgttgctgctttttattttctacgtctaattagtgctgagttctgaatagagtattaccccagagacctattttgtcgaaatgctaggttattggagtaatgaagtatgtgatgctaacttacaaatcataaatactgctgcatcctaagtaatgtgctagtggccaccagtcagtattgctacttgtaagcagcttatacgagctggtgggtctaagttccatagtccatgctngcatggttatggagtgaagcttgatgt

SEQ ID NO: 46400 - DNA, 344 bp, Oryza sativa
atactcatgctaccaacaatcaacagaccgtaggggtttgcataggagcaaagtctcatgatggggtatacaaagaagtaatcataatcatgggtctagaagggattatgaaaaatgtctggggtatataaaggatcatcttttgaaacaattgacatattgagaattgcaccccatgatgtatatgcatagatcaagtatcaccctccagatccgactgcaatgacaacttaagctcatgtttgctatagtgcatacactatcctcttaatgaatctccagttgatctacccgtgctgtaactcttgggaaaattcttcatgaacgagtttgatatctatgaa

SEQ ID NO: 46401 - DNA, 369 bp, Oryza sativa
  unsure (1)..(369): unsure at all n locations
ctgtctgatctgttagtaacgaactcttatttggctccatctcgaggctactaatgcttctctatgaggatagagactaacagactatccgaataagtaacccatgtcacgtcacgcccatatagttcaaatataaacaaagagctcatatgttaacgagcctgtatcaggcccatattagtagaaatgaactcggaagcccgcatgataaggggtctgtcctatataatcatgaagtgaaagctcgaattgtaactgccctggattacgcccatataagtaaaaatgaacttaatgagcccgtatgttaacaggcgccgcctatataattatggaaaatgactatcggccattntatcacgtatgggc

SEQ ID NO: 46402 - DNA, 421 bp, Oryza sativa
  unsure (1)..(421): unsure at all n locations
agctnttatatttntaataatgtaattcatgaatttctttggtcatccaagggtaaaatggtcatttttatagaaaatacacggtcaactaacagtcaactgacgggaggggtatgcaagggatcaaaatcaaattntggggtatacaaggaagtaagcaaaattcaggggtatagaagggattaggaaaattttcaggggtatataagggattttctcttgaaacaattggcatagtgagaattgcactccatcatgtatatgcattgctcaagtatcaccctccggatcccagggcaatgagaacttaggctcatgtttgcattcagtgcatccactagcctcttaatgaatctccgcttgatctacccgtgctctagctcttgggaaaattcttcaggaatgagtttgcatatctatg

SEQ ID NO: 46403 - DNA, 127 bp, Oryza sativa
ccagaaccactgccaagcaagcctcaccacttttatccgcaaagagcgggagcggaaataggcaaaaccaccaccagaaaaaaccgggaacaaaccgaaacaagacaaaccctaaagacaacaacaa

SEQ ID NO: 46404 - DNA, 425 bp, Oryza sativa
  unsure (1)..(425): unsure at all n locations
agcttctggtaacagntggttctttatgaagctttagtttctcagacaatatagattcttacctagattttaagaatatgtagctataaaatacagaaaatgaccatctagttgtttatcaaaatcttaaaaatttctctagtagagcctcagcttctcagaatcaagtcgtaaaaaaataaataataattatgtagatttctccggagtcacaatgtgatgtcggatttcttcggccggagctttgccgccgaggaggaagccatagtaccagcacatcgagctcatgacgtacttcgttctcgctggcgcggtgaagtcggcgctacacgggccgtatcgcatgtacaccgtagccggagagcaactcgaactcgtcgagcagcgaccacacaaagtaccccgcgttcgatccgctcctgcac

SEQ ID NO: 46405 - DNA, 422 bp, Oryza sativa
  unsure (1)..(422): unsure at all n locations
tgtcaaatntatccaacacaagcaaatgaccctgaaattgtatactacagcattacaacccccattctcaaacagatgtggaccatacttgcatgaaaatgatctgagtggatttacccccaaaaaagtatcatttcttaagttaataatttctacaaacatgcaattaggaaagagttattgtcaaagttgagtataatgactcggtgaaagcttaagaaacaacagaggaagtttcttttaccctaatgttgttaggtattgagttgggtacaagaagaaanaaaatgtaattcctaaatattacagagaaatgaccatcatgttagtactatattagggaagaactgaagatatgttgtgaacaatttgtaatgatttagttttagctagcatgtcttacgatcatttcaatccaatat

SEQ ID NO: 46406 - DNA, 438 bp, Oryza sativa
acctgcggcatgcaagcttagactatctagtactccatccgttttttattatattgatcaccgctgactttcaattaacgtttgactattcgatttattcaattttttttgcgcaaatatgaaaatatttatgtcatgcttaaagaacatttgatgacgaatctagtcacaataaaataaatgataattatatataatttttgaataagacgaatggtcaaacgtttgataaaaaatcaatggcggcgtgcattaaaatatgtagtacattattacccattgagctcctgttctgacggccggggttaaactttggaggaatcacgtggtcgaccggctaaaacccacgcacctagctaattaatccctggctgtgcccttccaacatgtacgttgctaacatgttttgttattaactttagcatcacaatggtgatg

SEQ ID NO: 46407 - DNA, 431 bp, Oryza sativa
gctactgcgacttctcatgacgaccacaccgtcttattcttctgtcttacacgtggctctgtctgatgtcgtagatcgcccttacccacgatgaaacgtattctccctcctttgcatcttcagttgactgaatctctgagctttctgaaacttcctccattcttcttacgagtctgacagtacatccccgcttatgcccaaccttgtcctgaacgttgaaaatttggaaacactttctgaatataataagcatcctcccaggttgcttcagccggagttaaactgctccacagaattagccattgagtgacagcgacattgctccttggaatcattctcctttgcagcactgctactggctctggttggatgcgaccatctgcgcccactgccggtcaatgttgcattggaacatcatgagtacgcacgtg

SEQ ID NO: 46408 - DNA, 435 bp, Oryza sativa
  unsure (1)..(435): unsure at all n locations
agcttgctgctgaanaagagtatgtgaactatctcttcattgcttcacttgntagtgagaatgtacctttcggcatattgctagggcaatgtaattaccactcgttgcatactatcatagatgatagatcttgtagtgctctcatagtacaataatgtgtatgagccccatcggttggcctaataagccaaagcaaaagcatatatttgaattttcaaacttgaatttgaagttgattttaagatattttcaacgtaatttctttttagcattggtttttaagttgctaggaacaaatatataaaagttttacctataaattaactnttattccctaataagggaatatgggcaaccaatgaggctctcatgacctctatcggcagcatgctatagcaccgttgtttatggctaccatgtacgaagtagtaatta

SEQ ID NO: 46409 - DNA, 343 bp, Oryza sativa
  unsure (1)..(343): unsure at all n locations
gagctgcagcttttgctaaaatggcctatccattattgtttntgtgtggccaggcccataaaaccctaattctacctatttccgtctcccacccaccacgcgtaggcagcgtttctccccttccactacgcgagacgcagtcgcacgaccgcatgaggactgaggcgctggctgaccgctccttctccctgggcgcctttcctcgctacactgcggccgccgctcctccctatggactgctccatcctagcggcaacgccgcggccgggctcctattacaggagcagctgtcgctcttccaggcgcggctacgctcgtcttacggtgtgcgccatactatgct

SEQ ID NO: 46410 - DNA, 430 bp, Oryza sativa
  unsure (1)..(430): unsure at all n locations
agcttgacttcatcagtgatgtcagcagatgatatggtgttccttgattcccggagcttgtttctacacaacagtaaaatcagcacacaagtagtttaagttaaatgagttgctgattatagtgacctcggttatttcaagtatgtaaacatgtgtactctagagacttgtattgcagaataatttattgtatccactaaagctacatcataagttataggtggacgcattaaaattgtagaaatttaatataaacaccatcacaatctgatgcactatagttatactaatatgatatgttagaagaaaaaacatacaattccttttccaattgcttcttgatgaattcttttgagtgagctgtaactntatctgtcttgttgcagaatatcagaacaggaaccctcttcttcactacagttgcctttgt

SEQ ID NO: 46411 - DNA, 501 bp, Oryza sativa
  unsure (1)..(501): unsure at all n locations
acggacctatgatactcagcttggccctctgttaaagccttgacattntggctgtcaagttccataacctggcaacaaacaccagaatgttaccttggtttaccaaaacacataacaaatgggtcttttgcatgaagaactgaatgtaccttggtgcaaagcttctcagcttgcttgtaatctttcagcttcagcttgcaagcagcattgttcaagttgcaggtaaccttcagttgcttggattgtttcttctcatcttcgctaaatgagctgtcatactcaatgaattttgcagcctggaataaaatagatagatcatcagtcagtaagggattatgaaaacaaagaatatcttgacgaaagattagttatttgaacaagttgtcaacaaaagaagcatgccataccttctcataacgctctgaagccctgacatatttgcccagcttgaacaatgcattcccctcttctttctttgccccagcagtctcaatcttctcg

SEQ ID NO: 46412 - DNA, 432 bp, Oryza sativa
agcttgccacgcctcacctcacctgttccttctgctagcagagaaagaaggggaaaacaatgatagaggcttacatgtgggccccatgtgcttgagaaagggatagagattgagagattacagatctaacatgtgggcccaagagcttttcagaactttcacatgacctttttttctcctctttaactgaaaattataattttaatgggtacacgtgtccaccagaaaacatctaacttttgatagtgtctcccaccaaaagtcacttccacaatatcctataactaaaaacacgaagtcaccgatatcctgtagcaaaatttgactttagatcacttcaaccgtaatagtccacaatgataattattaagctaattgaactcttttggcttacatatgggtgtagcttttcatttacatatccttgtactt

SEQ ID NO: 46413 - DNA, 451 bp, Oryza sativa
  unsure (1)..(451): unsure at all n locations
gacctatgaatactaagcttataactcaacccgcaatgtattcttcgtcatattgtctgattcggctcaataggctaaccctgtccaactcggactntgctgatcctgatcacagctgattcggacttcagccgattcttactctatttccgaaacaatcttggatttagattccgcttcaatctgatctctatctttgatactcagattaccaaatttggtcgttaacacatgcccaccaagtccagaatattggataatgtttcgaatttgccatacgtcgactccgagagaaatccgcactttgccgttttcgaccgttacacagtgctntaaatactaaccgttggccccgagatatctcacacagtttcctccattttcaccgccgaagccaatttcggtctctctctctccggcaatcccctcggtgcgcaagggcgatttctct

SEQ ID NO: 46414 - DNA, 410 bp, Oryza sativa
  unsure (1)..(410): unsure at all n locations
agcttntgnggtgcagcatttagatttgttttgggctcccccgtcaagttccagaattcctgagcaattggaggctgtagtacacagaagatgccgtgctcttgctgtgtaaatcctccattagcaacaagagatcaggaactgcaagctgtgcatttttgaagataaccagcaataagaacagccttacttatatcgaaggatgctgggatggcacagcagtcaaattataccttagtaccatacaatatactgtagatttcaggtaatgcatcctcaactcatagaatgtagatattagatactgcacgccctcggcatttttatacttggtacaaaaatattatgtatgtcgaatatcattgctcgccattcctatcaagatcaaccgcgtagtacccttttgtgct

SEQ ID NO: 46415 - DNA, 448 bp, Oryza sativa
  unsure (1)..(448): unsure at all n locations
tatacatatgtatatatatttatatacatacgtattaattcttttatatgtagaatcttttatatgtacacacttcaatatataaaaatatatatacccgtatatgaagattgtctaggtacccatacaaaatataccaattttgtatatgcatatatataaagattatatatgtgaagaaaatataatacacgtatacaaagtctatatacatacttatttaaaaaaccacacaaaagggaaagaaaaacatgggaaaaatcggaaaaaaaatcggaaaagacagaaagaaaaaacggaaggaaatggaaagaaaaaagggaaggaaaccgactctgaccgtccgccgcccttcctctctctgcacggtgggaggggcacgcagacgcccacgatatagctgtttcggtaagagaactacgatnacatgacaagtgttcaagatcta

SEQ ID NO: 46416 - DNA, 373 bp, Oryza sativa
  unsure (1)..(373): unsure at all n locations
tgaacttaaaaagcagtgacccncatcttcatcataattaaagctcacaggacatctcgtatcagtctccagccccctcctgtgaatattcctccgaagaggtaagctattgtgagccactcgtcagtcgtcacgggaaatgtttcacttttggagcacactcaattttgcacagcttctttcataactcgcatttattcaccggcacggacgaagatgactatcccctttgtctagttgcttgtctctccttataatcttctaacatatgataagccgatttcacagagaaacaccctctttcatccggatgccacgccaaacaatcttcccagcttccatgaattggaattgcaagaatgtgtatcacatc

SEQ ID NO: 46417 - DNA, 426 bp, Oryza sativa
agcttggaagctgataaacttgctgtctatttgattattgcttgtgggcatactgttgctttatctagtccagcatatgtgtcttgccaccagtcaaaatgccaaaaccagattctctgagccatatattttgtaaaaccagattattgctgataacaaattgccgtagctcagtcaatagacttggtcaggaacttgtttgaaacattcattttcagagtttccagatagcattgctggttttatacctctgttcggagctggcttcttttatgatagtcacgcataaaacttggacaacattttaacttaatacttgtaaaatgtgtttcttctttgaaaattggaacaaacacagtagaaatgtcctctctgaatgtgatgggattcgctaatgtttcatcttttctttatttacccaatata

SEQ ID NO: 46418 - DNA, 473 bp, Oryza sativa
  unsure (1)..(473): unsure at all n locations
tattacgtgacctatgaaactcagcttgacaaggacctattgctcatgttattctctagcaatacagatattatgtccttcccctgtagttgcatgggaattctgaaatattttagattgtntaacttcacctaaaatcatgacaatgagagaccacatcttgtttctccaggccagattgaactcttcactcatgtcccagttctgcgtaactttgttgaacatttgaaacgaaaaaatttcaacgtttgtgccgtgtactttcttgattcacaggtttggactcttggatcactaaccaaatatatttatccttgaaaaaagatactggccccaaacacaagtagacaagtctgacttgagttntgtttttcttggttaagtttgttagtgatgtgacaaaatacatcagtggttgcatggcttctctttctgccatgattcagctngaacttcctcatatcaacattctt

SEQ ID NO: 46419 - DNA, 428 bp, Oryza sativa
  unsure (1)..(428): unsure at all n locations
agcttaagctgtagattgacaggctgtgtctattatggatgaatggataattctacagtcttctccgtattaacatctcgtagtgtacatatgattctgattaaatcctttgtcactacaactctctgttttgtcgatcaatcctttcatagctagctagctactgtgtagttcctccactaatcaaaacatcacagttgtgtacatcggactaatgaacctgcatgcctttattatttcacatggataaataaatctcaatcaacagtaaataatcaaatatcaatcaggttccttataagcacacgtttcttctcactagctagctactgcagcaacatgcgagcatgttctgtacgaaccactagctntaattgagattatcacaccatgtgtaccctgctggtttaattgcagaacgattagta

SEQ ID NO: 46420 - DNA, 372 bp, Oryza sativa
  unsure (1)..(372): unsure at all n locations
tatngaaattctcaactgcaatgtcctcttcgtagcgattagaatcacttcttgcatatccttcagccaaccaccgtctgattacaactttctctttcagaggacgattgcttgggaatataccaagatacagcaagcagctgagagcatagccggataaactgtcatagttgtcaagaagcaccttcctgagttctgaaagctgggatggccatcctgctctttcagatgagcaccgaggttgcggcacatgtttgcacacagctctcctgtgggctcacacgaactcttcagataatcagatacactgaccagagcaagaggaaggccatcacatttgcctaataatggtactgaaccaggctccaactc

SEQ ID NO: 46421 - DNA, 402 bp, Oryza sativa
ttttactatcacaagtgtttatataaggagatgtattactactgatttgaccaaaaaaaaacaaaatcttcaaaagccatgattctctctctaaaaaaatgcatgcacatagccaaaaaaacgctatgtagctacaattcatttcgaattcaatcaatggtttgaagaactagaccaattgatagcaactttctggtgtggtactgtcatttgacttatttttgttttctggtaatcttcaaaagaagagagaaaataatcagaacaaaatcaacatatgccatgtacagtactatccattgagtccacaagctaaggtagtaacatatgtgagggatgtttcaccttttgggttattcttatccactatccagagaaaccaagagctagcatagcacaaac

SEQ ID NO: 46422 - DNA, 501 bp, Oryza sativa
  unsure (1)..(501): unsure at all n locations
gctattacggacctatgaaactcagctatctattaatatgaagtaattttccttaagtattcctgcacgttagttctagacaagtgtttatgctaaggaccctatatgagaaacctcttcggtttgttctcgtttttagcctgcatcttgcataggcgtctggagaatcggtatccgtagagaagtgttcccttcggttggaactgcctgtggagacgataaactcttagctagaacaagtgtgacttggaatatctttctaagttgcttctaaaaagacagataggtgaggcatacggtgagtaccgagtaggactntacatcatctgaaacaagcttctgaggctgtctaagtaggattcgccaccctgcatagatcctaaagttaaaatatctctcgaagtaacaatattgaacagttatttgaacagtaaactgaatagtaatcagcccgacaaacagtaaacttgataggtatcagccgaataaacaagtaactga

SEQ ID NO: 46423 - DNA, 426 bp, Oryza sativa
agcttgaatcttgattgcttatcgtgattttattcttgattatttaactaatctatcatatattaaaatgttggatacgattatttacgtatgttattggtagttgttcatccaactggatataagcataaaagtagtttattaagtgagttgtactggtcgctgaagtggtaaactcaatcagtgatttctgtgaaaaaaaaaatctttatcctatttcagtgttgacactcattcttgttcacgcaaaggatggcctgttctattttgcaatactctgtttgaacaactaataacaattctgtattccatttccagcttcaggaaatatccgccagctctactgtttgaaggggaataaaagcatctggctttcttcaacattcattcgcatgtgcttatatgctccttgaagatatgtacctt

SEQ ID NO: 46424 - DNA, 446 bp, Oryza sativa
  unsure (1)..(446): unsure at all n locations
tgttcgacgttntaatcttggcaactgcatgcattgaagataaacaatatattagtatcataaatatgtgaagctgtctagtacatagtacagggacttacatcctctgcgttaaccctgtacctcttattaaccctaaggaattcgcacgggtaatacccgcaaaggaccgttccttcgcggtgcttgtgacacttcaggacatatcatagaaaaaaatagttaaaatttgcaattagtgaaacaattggaatacattaagtgagtggagtattaccggccaataggtacgtactagtagcttctcccttgttcgggtctgttctccacccttgaacttgtagtattggtacgcactgtacggatgtcgtacgtttcacattaagaaggatatttatttataatacattcatataaaaatgcaagagtcataatcacttactact

SEQ ID NO: 46425 - DNA, 329 bp, Oryza sativa
tgctgctttcaccaattaagaatcctgatggccagttatttattatgcaccttacaaacctaaacgttctaaatataaactgaatgcttgtaatcacaggtcactgctggaaatatgttattatcaaatctcaaggatttggttgatgatagcgaactagatgtaccatggggcttgttgctaactcttatgttcatgtaagcactgttggagttaccgatgcacgtgcaaatggcggtggcaaggtgcaatctcttctccaggatatcaagcaggtatgcatcattgtaacatcctcaaattgtaatctaagattaactgcattatgt

SEQ ID NO: 46426 - DNA, 438 bp, Oryza sativa
agcttttcttgttcagcctcatggccgagcaagcttatgctcactacctctctccgagtgtgagtggcgacgacggggagccgaacccacgccgtcgagctcgtactccaccgccccctccacgccaaagtcctatgcgggagaaggcgctcgagagggccgaatgatccgcgacttcgacacccacatgaggtggagaacggcggcgagatggggagcgtcgcctcctcgtctacggcgacggcagcacgccccagggcgcgctccaagctgcgggcgcgctcctacgtcacccgcccgtcgcccatgacctggagtctccagcccaacgttggctggacgatgtggccaaattggtcatgactgcacggcagcgcctagatgctggtgggcggtcctccgccaccaaagcctctggtgctgctaccaacggcttcg

SEQ ID NO: 46427 - DNA, 404 bp, Oryza sativa
  unsure (1)..(404): unsure at all n locations
ctagacagaacaagnnngaatgtcgcctgaaaagcttgttctctgtttgagtggtacctgctatgcttagttacaaactctagggttgatctctctaaaaatcgcagattaagaatgtgtaatcttgcagaactgctattgacagatagtacaaaaggtgaaatgggtcaacagttgtcgagtcntataatatctgaatggggtactttcagctcattccaatgcagaaaccaagttcagtcaagccagatgttctcaaaagagcattacatggataacattgtcggagaagtaaaaagccattgttcatgatcacaagctcgcaagataagcaatgccggtgatgatggcgatggtacaacactagtggctgggccggaatcagtgagtatggtgcaagaact

SEQ ID NO: 46428 - DNA, 425 bp, Oryza sativa
  unsure (1)..(425): unsure at all n locations
agcttgctatactcctcctccagatctaaaatcattatattatcgnattcttgaacctctctttctaaagctgccatcttagacttgtcattactttttccaatcacaaatctgaatgccagaccagttgcttcctccaatctgtaatacagtgaacacaaaaatacaactattgtaatggcagttagccaaaatcaccattaacggaaactgaaatacagaaacagagatggtgatgatcatctctttattaagaatggttggacttttggacaacaaaagtccacttaggctgaaaccgaagcaaaacagttaatggctgctcatctactangcagcatggagctggtntcagctggcaggccgctttaatcaaagattattgaacctacgaattaaatatattccggaaccttcatgtgcat

SEQ ID NO: 46429 - DNA, 435 bp, Oryza sativa
cgggcgctagctacaatggtgagctgtattttgtctcctcttgctgcatatatggtctgattagagaaggatattttctatccggcctctatattcaatctgaatatctatgatcgtttaaatataaacttagcctataaacagagaattactcatcaataatccaatcttgaaattcggttctatagagtattgaactcacgacttacagagatactcgagatactgtaactaatatgctacatgaggaactaggcactgcgatcgcgatcacacgtttatgcgatcgatcgaccgggcacgaactgacagctccagcatgttgaatgcatgtatgtacctttacttatgccaaagggtcattgttagtttagagactatatagcttaattagggggcattgcgctcgctggggtgccactaacacctactagt

SEQ ID NO: 46430 - DNA, 432 bp, Oryza sativa
agcttcaaaaacattattggaaagcagtagatcattctgcatcctccaatggaagtgaatgaaaacctcagcgtgatctcattcatccataaacctcttcaagtaatcattcaatcctgcccaattctgatggttgattaacaagctcttgtagggataggcaatcaaccctgtaggtattgaatgtaaaataaaaatgtaagaagatatgcaagtcaatacgtaagcttgtttaactggaggcatgcaagtggtattcgtgctttaggggtgtagccattctccccgggcaaacggccacacgcttgcgcggcgcatgaacgccccctgccgtcccaatcatctactctccaaaactccattgtcctcgcggctccgcgccatcgatcgcagcccgccctggtgctatcccaccaataaactcctcgactc

SEQ ID NO: 46431 - DNA, 316 bp, Oryza sativa
ttttgttttcttgctaacaatcattcttataagtgctacacgtgctacatcacgatcaaatttacagacctttagaacaaatgtattaagcgctaaccagaacgatgagtcacaacatgatgtgtcggttgacttgcatgccttggctgattttcaacatacacctcaacgatagtagactgactttgatcgaaccttgccactggagacagagatctagctcttggagactctgcacttggggacatatgaccaagaacttgtgatctttgcatgatgagagcattttgagaaataatttggcgcactcactgag

SEQ ID NO: 46432 - DNA, 437 bp, Oryza sativa
agcttaagatagagggaatgaattgagactttatctcgtatctagctaactactcccttcatttcatattataagtcgctttgatgtttttcataataaaactttattaaatttgactaagttaaaaaaaacaacaatattttaaacaccaaactagtttcattgaatatatttatatgtctgttttatattaaagagtaaattgcatcggcggtatacaaacttgtcgggtgggtggaatctagtgtatgaacttgtaaaatgctcgttttggtatatgaacttatcttgtgcgtgcgaactaaggtcaaaaggacattacatgactaattttgttatttaggtgctgattaggatactatataaacatatatatgcatgagaagggttctacttagacatactccctccgtcgtataaaacattaacctagtatt

SEQ ID NO: 46433 - DNA, 448 bp, Oryza sativa
  unsure (1)..(448): unsure at all n locations
tcgagagtcagtgtgcgccctccgatgtgacggaagataatctgaaggagatggtggcacacggcgttcttccgacgaaggagatcatctggtggcgaccggcattcggcgaagcattcccaacccccaatacgcatgaaatcgtggtatttgctcatttcttctgtggcggtttctcccttctaacctcaagatttttccggggaattctaaatttctatggaatcaacttgcatcatctgaatccaaactccatagtgcatattgccacatttattcatgcctgcgaagcttttctgggcattangcctcattttgccttngtccgccgcatcttcttcctcaagccccagccaaacaagagcaaaccatgtgttgttgggggggctggtttccaactcatgngaaccttaagccaaaaatacttctctatgccttctcaaacctc

SEQ ID NO: 46434 - DNA, 427 bp, Oryza sativa
agcttcaactcttgtgaccattggaagttatttatggcgtcttccattctttgttcatcacaagaaaaaatgcagacaacagccttgagcccttgagtcgattacagtaaaagaatacacaagcatcaacaatcatgattagtagtagggttttcaagtgaaaaccgcacctctgggattatcaagatgcaggcacccgatggcgggctgactgtggtacagagtcggatcgtataatactgtcagcagaaactcgctcatctgtatattgctacaaaatgtcaggcttgacaacgctgttcagttacgaaatcctagaaatgtctagcctctatctgttttatgcatgtgatctgaaaccccgctagaatccgctcttgctggagaacccttgtgccttgcaatgtttctacaaaacctgcaagtg

SEQ ID NO: 46435 - DNA, 439 bp, Oryza sativa
  unsure (1)..(439): unsure at all n locations
ataagggtcagctgagtagcagtttgttgtttgccatanaagttatacaccaacatctagaacatgccatgagaagctttgatgcggaatgtcatgtgcttcgaatggctagacatcgaaacttgataaagatattgaacacttgtaccaacctagacttcagagcacttattctagagtacatgcccaatggtagcctagaggcactcctgcactctgaaggaagaatgcaattaggtttccttgagagggtggacattatgctagatgtttcaatggcaatggaatacctgcatcatgagcaccatgaagtggtcctacactgtgatttgaagcctagcaacgtgctacttgacgatgatatgactgcacatgtatcggactttggcattgcaaggttatcgttaggtgatgacagctccatgatctctgcgagtat

SEQ ID NO: 46436 - DNA, 394 bp, Oryza sativa
  unsure (1)..(394): unsure at all n locations
agcttcatgtggaagccactcgccttcacttctctcttcttaagctgngataggtactctattttcctaactctcctctctcattgtttgcgcgcacgtttttcatactactaaatggagagtgtttttcaaaaagtttatatacgaaagttgcttagaaaaatcatattgatccgctcttgaaaaaaatagttaatactcaattaatcacgtgctaatgaaccgctccgttttccgtgcataggagatgggttcccaacccccaccttcgaacacatcattaactacttaagtgcactgtgaatggtttcagtatctcatttctttgggatgagcccacaagcctagataatgttcaagttaggttgattatcaatgtcctacatttacttct

SEQ ID NO: 46437 - DNA, 178 bp, Oryza sativa
  unsure (1)..(178): unsure at all n locations
tagataaattgttctttgaggccatgagcaacctccacctaaaccttggtcatatagctcccttcaggaactcaatagttaaggtgtgacacttcgtatgtctatgttgtggtgtggcaagaggttgtgatcaggattggccgatccttggggagggggaggtgggtgttncccctct

SEQ ID NO: 46438 - DNA, 357 bp, Oryza sativa
agctttcatatagagagaattggatgtgtatatgtataggatctcctaaaagaaaacggagaggaagatggtcgtcttttttataaagatcagaaaaaataagtctaatctaatgccttgaagtgttatgcccactaattttaatcaaataattaaagggtacatgtctatttttcaggatataaaatttaaatgtcacaaatgttgaaaattcttaatcgaattcccccggttagctaatataggaaaaatgaattatacttataggggatggatataggggggacatgttcaacatttcccctcacgggagaggtggtgatcgtaccttgattttcttctcatctctctgattat

SEQ ID NO: 46439 - DNA, 462 bp, Oryza sativa
taactctgtccaaccctgaagaaaagatgggaagtttctatataagctagtgttactcagacgaaaaaatgacatcatgctcatcccagaacattgaggaaactctccgtcaagtagattgttggataagtctaggccatgtaaattctgcagttcacaaatagattgtggaacattcccggtgatacggttggataacagattcaactcagctagttgtggagatccaatatttagtggcagaggtcctgacaatgagttgtttgataaatctaatgtagtgaggtttcgcggcatgcgaggaatcagacccgctatttgggtcgatttcagatataatttttccaatgacatagtttccatatttgttggcaatccaccactgatttgattaccgggatattccaacaacttggcctttgatagggtgtagagaaccagtctgggaatgtatcatttatg

SEQ ID NO: 46440 - DNA, 432 bp, Oryza sativa
agcttaacgagggtttgttgcatagatattttacatttatttcttaagtaaatagataaaagtggtattaacctgtaccttcattatcttgtaactactatatttgtgcaactagttgcgctatgcaagtagaattcattgcagcatggctgtagcaaaatttgtccagaaagataatgcttcataacacacaaaatatatgaaggctatctatttatgaaaacacaggtaaagtgatgaaggtgagcgtgaaattgtgactggtgtcaacaacattcatgtggtgtttgaatctcctgaagatgaagatgaagatagagattaagtgttttacgcaaaacgaggtggtaataacatgtgattaattaagttttaattattacaaacttcaaaaatggactaatctgatattttagaacaactcttatatag

SEQ ID NO: 46441 - DNA, 477 bp, Oryza sativa
tgtcttcttatgaatcggactcaaccgctcattatgacatgcaaaaatatatatcacaaattaacttgtgattagtgaaaaataataattaattaattaatataatcgccgtaaccggccagatgatcggttgagaactcgacacggcagtaagcgatgctatccgaaatctcattatagatctctattagatcagccattgaatattggccgacttcagccaaatcgcagggcaagatcggacgcagaagctctccgccaacgccgagccatggtgcatatggttatccggaggcgatcagcagatctcatcagccgtcagtgcatgcacacaaacaaagcgtctcacagaagagcaatccatgattagaagaatcaatctaataacaatatattgaaacgacaaaccagttgacgtgtggagtggtcgaaattggtgagataatctcaacctgcttttggattgatccatccact

SEQ ID NO: 46442 - DNA, 414 bp, Oryza sativa
agcttgccgagttcgacgagagatttttaatttttatttgcttctgaccagagccaattggaccatgagtttacccggtagaggctgaaaaggcgcttgagtagtaatgcatcattctgcatctgaagattgttgatccccaggccaccgaattcctttgatagacagtgtacaaacgatgatggaaattatctgagccatcaatcgctttaagcgactccaagagcttatagaattttatgaaagtaatatatatcgttctaatttgaaacaatcctcttcagattaatagcctgcgtaaatcttccatgagaaggtcgtccttcttctgttatcttattttggcggtggctgggtcacactgcaagaatcaagatgctgtaaattattggtgagtgaagctgtagggacaaa

SEQ ID NO: 46443 - DNA, 458 bp, Oryza sativa
  unsure (1)..(458): unsure at all n locations
ctttccttctgatanatcagtagcacacctccatttttgctagctttacagttcgaatctgctgttctagcgctctaaatatttttcatctatggatcaagttgcttctcccaatgagctgcatgtggtcagaatcatagggtagggggcggaattattcttctatgacacctaatcacagtgtagagctgtatacatagggcttgtgtgttatactattacaagttgtgcaattgcttttgctgtgtctgctactagcagtactgtagctttaatgtggagttaagtgtctcaatgcaaagataactgagttctctttcttcagtatgtttttgagatgtaacacaatgtacgataagtgttccagtggcaaagattactgagtttatttcttcagtatgtttttgggatgcaatacaatgtacgatagatcagcttacgtacattcagtgaacatc

SEQ ID NO: 46444 - DNA, 345 bp, Oryza sativa
cgaagctcttgcagcccaagatttagtgatcgttcttgtcaattgtcataactgcaagcctgcaataaccatatagggcccggcttctgcctggggcgtttttcggtgggcttggatgtgagctactccctccggttgataacgaaacggcctcaaaagaacaaccgtaacttttatcttctactaccagataaatataaaaaatcaaagcctttatttctctatagataaataaaaaaacactagattatgatttatggatgtgagtactcttaaaacaattcaacaaacaatttacgatggcctcgatttaaaacaaatataaagtgatatttatttcaaaca

SEQ ID NO: 46445 - DNA, 469 bp, Oryza sativa
  unsure (1)..(469): unsure at all n locations
ngtacaaattacaacagtggaacgctatattatatatcatgttcaggaatttgagagagcattccgagagaagatatctgcatgctcaattgctgctaataagcatattgatacgacaactacaatactggatgtccacggtgtggtatgttcaattgtccatcgccacctaactatgtcttcttcttgctagcagttgtctaataaaatngacaaagaatatcagtcctacattaagatactttcatgctcacaataaagacatttgcctgaactaacaatttcttaatgtgtcgatacattaaagacatgaagttatgaaaccatcaattcggagattagctttcatcattggttattaaacaccaagaacatgtaaaaatatatatccttcatgatattgagttgagaatcatcgtttaaaaggatagcattgtcctattctaaattgtatgatgtttggagcact

SEQ ID NO: 46446 - DNA, 424 bp, Oryza sativa
  unsure (1)..(424): unsure at all n locations
agctntcttccggagcgtcaggacgctagtttttgctccgcagaaaactctaccgacagagaaaccagtcgtaccagcgccaccgaccttcaagactatggccagcaagactcttcgcgagttcgctgctccctctgctgacaatgtggccattgggcagcaggtcaacataggggacgtgganttcgacttgaagtccagccttatcacgatggcgcaggctagaccgttctgtggcaagcctaatgaggatgccaatgctcatctgcaacagttcctggagatttgtagcacgtataccatcaagggcgtcagtcccgatgccgtcaggctgcagctgtttccgttctccctcctcgggagagcaaagcagtggttctatgccaaccgtgcttctatcaacacctgtgacaaatgctccacg

SEQ ID NO: 46447 - DNA, 432 bp, Oryza sativa
atacaggaatcacaaatgtccagcgtgatctgtgccacttcatccaccattaatgctgtcatgtgaaaggagatttcttcgacccatagggtgccctatcggcaagtgacgaattcatgatcttcgggagtggaacactgctatgccataacgtaactataatgacgtcttttgaagtgacaatgtcaaacaatattgtaatatatatatatattctggcaacacttttgagatatgcaatatatgtagatgtctcagtaccagatgcttgataatcttccgatatatgtacataaaaatctacctgcaagaatttctattaaataatttaaaaggaatttacgggccaattatttatatatctccatattttctacctatcttcgcaggcggaagtttgttttgttgcgagcggacgatttctaatttcgc

SEQ ID NO: 46448 - DNA, 431 bp, Oryza sativa
  unsure (1)..(431): unsure at all n locations
agcttggcgatgccaccgtgcgaggatctgtatatatccctctgaaaaatatcaggaactactttaagaaactactaatcgacttatattgctgggtgaattccttatagaaagtagaaactgtccctcgacttatagtgcaggacatattttgctagcctcaccattgcatcacagaaacgtagttggagtgaggtgcagtagttagatcaaggaattggcgtgacgggattatgagataaaggacaacaataaaaatttagacctgctattctccagaatttgcagtctttactacagcttgtaagttacaaactactccaattntcaccagaagaacctctctcggtgccatgagctacatataattgttactcctatatgtgtgtggatcagaatcttacacagaaagattaaatctgctgcactta

SEQ ID NO: 46449 - DNA, 409 bp, Oryza sativa
agcttggtgtgcactcttatcccactctttttgtgttgtttgttatgctaaattgcaggttgatgagatgatggggaaatcagcatctgccatggcgctgtactcgaaggcagtatccatgctgcgctttctcctgactgaggcaccgtcactcgccctgaaccccgctctgtccctaacaagagatgatcgacgccggctgcgcacatacattgaagccgttaacgctaggctcgtcccgttgcaataccagcggcactgaccgctcacctgtacaatattctttcatcctgtacatatattcgtgggcccaaacgaaggcgtgtaagatatgtcatgtctgagaacgtgcttcgatttaggagaagtagcgaaaaatccagtgtaacttgccaaactgcctactgta

SEQ ID NO: 46450 - DNA, 479 bp, Oryza sativa
  unsure (1)..(479): unsure at all n locations
cttacttattcaccatctggaaatcaagtcaccgaacatttnatttagctattgatgtaggaacctcgctgctgctgtataacaatagatttccagatggcatcatttgcttaaagagcatcggtttgcgttttgtttcagatacgtgaagaaccaccatcatatttaacatcatgtctacagaaacgtgagtcattcgaaaaccccctcgctgggcgtggtggtcggagttttggatcccatgaggacgaagacaggatgtcagggtaccctcaatctgggaaagcactgtatgacttcacagcatgtggcgatgatgaggtatggaggctgaaattgacttggttggctataacgtaacatgctgagcttcaatgctctcttgatcagagcttgtatgcattatctgctgggaaacatagttattcattgaagcgaacctctgcttttcatttttcacaactaattttttattattc

SEQ ID NO: 46451 - DNA, 405 bp, Oryza sativa
gagcttctcaaaggcctcatagacgcgagagatcaattggttgttcacaccatcatcaacaccagacagagactcctcctgccccacgggatcggcacgcacggtctcaagggcgtaacgcgcgaggcgagcgaactcatgcaaacactccataactggtttggttccctgcggcaaggaacggaacactctactttctcgtcctacaattccccccggaacctgtgctttaatgaaactatgacgaaactctgaccaagtaacctctgccacaggtggacgggccaccatgtacgtgccccaccacaaagaaacgggaccttgtcgctggtgtgaagcaatagcgaacctctcctgctcgccgccatagcaaagattcagcttctttctcatggcatgaagcca

SEQ ID NO: 46452 - DNA, 323 bp, Oryza sativa
cactcaagctggtgcgagaacttgactgaagtcaccgtgttgacaagctttcttctattgaaaccgtcatacgcaaaaagcatcgcagcgaataagaaacgcctgcaatcgtcacgaagaacacaagaatccgtaatggcatgccaacacccaaatgatcatagcgcagaaaaaccatgccattattaccagggcagtagacatgaccccgcaagccgcctgtccacggaggactctctcagcagacggaagagctcactcgccatgaatagatggataacgacaaccatagcccatatgtatagacgtcccacgtatatcaa

SEQ ID NO: 46453 - DNA, 418 bp, Oryza sativa
agcttgtccccagccttgctgctggatatctttctttgtttttgatattcacttcttctgtacaagactttgtatgtctttcggctttcttacaaagccgggtcaatgcaagttgatttgatttcaaaaaaaaaagtgatggaaaagtcggaaattcgcgtgtgtagaaaagttatgatgcgaagaaaaagttggaagcttgaagaaaaactttagaactaaacacggtgtaaatttagtatggtaccaaatttgactattacaaaaccagctcaagctggcatcgacttcaaatttcctttttacatgcatctccttccagtctcaaacaatatagaatgttgtgtgcacgcgtggcacaagattgatgtctctagagttattcctacctctggtggtgttcttctctctcgaagat

SEQ ID NO: 46454 - DNA, 277 bp, Oryza sativa
  unsure (1)..(277): unsure at all n locations
atgagggctatactggagactatttcagactgtgtactgtttttcttcagagacccctcgcattacttacgcttgatacttgtctcgatcaatagacacgcatcaacatttgcaacttgtcttgtactatctaaaatgtgcttgttgtcatgttacgaattatcnttgtgagttctgaagagcctacccgagtcataactcataaatacaacgaagaaaaacagatgatttgggccatttggcccataactatgtcatgtggagattcctttttgga

SEQ ID NO: 46455 - DNA, 425 bp, Oryza sativa
agcttgaagcatcggctcgattcatttcctttttttattctttagtagtgttgtatacatcttgataaaatcattagtcccttataacagatttgtcatcattccgccaaaacccacttagggggctagatgcatttttacatatctcctacggattgggccactgccggcataatatgcttagtccacaccacctcttgtctgagtccagccacccccaactagcctccctgcacaacctaccagatctgctggtagatagataaggtttggacatatagacgacaacagtagtaggaggacttatctggctgagcaagtcaccatggcatctcgttcattgtgcccgacatccgccgaccatgagctgatccttgttatgttgtaagccaaaccaccgttgagctcaaggaggccaccttact

SEQ ID NO: 46456 - DNA, 444 bp, Oryza sativa
tggacttctcttcatgcacaagttgtcggttggctttgctcaaggttaacggctggggtaaggatatcggctaactcatctgggattagagcctaaatctcatgtagccgagccctgattgagccacaatcaaccaccaagctatccagtgatgatgcttctagccgatccaagatattttccagagttttccttacatcatcagataaaggggctaaggctttgcttgtggtatcttcttctccttcatcaagatactctctgatgtcaaaagagaaaagatcggctaatacctgcagcgataatttagaagcagttagaggttaaatagtcatagccgacttgaatgcttgttgagacaaagagaaacttactgtgatagcaggagcagctggttgttcttcttcctcgacgtgatgaactcccacagctgaatgagtctgg

SEQ ID NO: 46457 - DNA, 427 bp, Oryza sativa
agcttcgggccacttggtgaacttgtctatttctacgtataggtgctgatacccgcctcgagccgctttgaatggtccaaggatgtctagcccccagaccgtgaaaggccaagggagtgggatgacctgcaaggcttgggccggctggtgggcttgcttggcatgaaactggcacgccttgcaccgccggacccattcttgggcatcttgcaacgcagtcggccagtaaaaaccttgtcggaaggctttaccgactaaagtgcgtgaggccgaatggaccccgcactcaccctgatgggtgtcagctatgagctcgatgccttactcccgagaaacacacttcaagagtatcccgttggcggcacgccggtagagggtcccttctacaagcacgtaccgcttggagatgcgcgcgagcttctcaact

SEQ ID NO: 46458 - DNA, 499 bp, Oryza sativa
  unsure (1)..(499): unsure at all n locations
ttacggacctatgatactcagcttacaacaaccaccaccgatcgagcaggagccggatgattggtgganaacagtanggaggaatggaataagtacatgttagctgcctcttccagctgatgaaaaacaggaaaagcttacaatgatcgtccatatgatttgaaaaaggggactgcagttgatcattgtgtactctttgtgcgggagttatgtaatagtagtgcttttgtattaaaaacaccatgcttgcaaatagcttaaccatccaaactcatcagagggtactaaatgttctctctctttccaatcgcctacaacagactattaatgtgatgaaccttcaagttaagaaccgatattaactagatatgatgttgcttcctggccagtttgggtgtgaattatatttgctttagtctgttctgaattctgactattttcaagaatggcaaaaagaagaagatattntgggtatacttttggagttcataatcaccta

SEQ ID NO: 46459 - DNA, 270 bp, Oryza sativa
aactactagccattgctgaatacagggtctcaaactatcttactctgatcagaaacgattttatagaagaaaaggcactttttataaatattgactacgtgtaaaaaatgtgtcatattcagagagccctgtggatcatccaaacagcatatcaatccagagcatggatgagtaacctcaaaactgcctgtgctggagcacctctgcacatgcataaacacgaggggcttgcttaccaactgcatttctatggaatacatttcataagat

SEQ ID NO: 46460 - DNA, 417 bp, Oryza sativa
agcgttggcacgtggcgcgccgtcttctttttatttgaagaaagggccaacgaatttttttagagtgaattacactttgggctacattttattatttaatcttcactctggaccacccttaaacacatctgatcactttggatcaaataaatttactattgatgcgatttggatcaccacgaacgattttttttcagcacagtcaacgacattaatcacattagctctagtatacggccgaactcctctgtgtatggctcatatgtttaccgaaagggaagctatacatgacaagaaaaagttgtgcatggtagatcaaatcgcaaccatgataaacttatccagtccagagtgaaaaagatagataacatggataataaaaggtggatcaatatactatgagaaaatctacacaac

SEQ ID NO: 46461 - DNA, 488 bp, Oryza sativa
  unsure (1)..(488): unsure at all n locations
taagtgcanagatccaatataaataataggtgaacaacatgtatctagaacatgcacaataaatgtataagatttgctctccctaaatatattcatacaaagaaatatattagagaggcaagtgtatgcacaagtagagaagaaccaatggggtttatcctatacacatggagaaggtatgtagccatgataaagacaaacattaacacatacctttatcatctccatgttctttatgtaaagaacactaaataagaaaatgctcaagtaaacattagtctcgcacttatataacaataacatggaaatcatatatatgaatctatcaaaaagtatgagataagaagtgatacatatcgctgtatctccatgcatgtcatctttgtcatgattaagatccaccaccanagaatgcatatctaccacatctcatcatcggggaagaacatctcatcattttcactctcatatacaaataagacttattg

SEQ ID NO: 46462 - DNA, 391 bp, Oryza sativa
tgtctgtgatgccgcgtcggcgtcatctctttgtcttttacgaattctccctctacgtacttctgttttggcatcattgcgctgtgatatgatgcccatctgacgttttattatgctgctctctgttgttagactgctgcggagcatgacaagagaagggcataattttgtctacagagattgatatctgcattagcctgatgtggattgctttctgaagtatttttaacagtttctgacaataatacaaaagaatctagcgcgaagtgatttcacttggttgagttacattgtgtgccactagatcaaccacctatttatcaaataattaccatgttggataccgcctcatgttcagaataatagtactctaataactatacacgatgga

SEQ ID NO: 46463 - DNA, 434 bp, Oryza sativa
agctttgatagtttccatcaaattcaaatacttatttgcgttcatacaagtcgttttggtgaaactaaccaacgggtgaaatttcttgctattctaacccccgccgagttagtccgttcttactccattgtgcaaaatgaggaggcgattgtctcgtctgttcaagggatccggctcttcatcaagtcatcaagacgagtctagtgctcgttcatcagccgatagtttgatggaggatgccaacgctccgcgatgtatcctgaacgacgccgacctcgaccttgtcgacgatcgggaaaggcaagcctactacatgctgagtgatgaggacacaactagctcggatataaccatgactaccttatgtattaatcaaccaaaggtgcatatgttctacattagatttacatgttatatatttgaaccaacgttgc

SEQ ID NO: 46464 - DNA, 496 bp, Oryza sativa
  unsure (1)..(496): unsure at all n locations
ctttacggacctataaatctcagcttgctacttctctctcccttatgtgtatataatattgggtaagacttgcgagtacaatcttgtatttaacccggtgtctgcaatttcaggagaggattccggttatgagttatgcttcttgtgtggtcattgctctgccgagggcggcgagggcaatgagtgatctcttgcagcttggctcttgcccggttggtttgccctattgggggtgtggcaccaccggttttatcttttacttatgaactctatttgagacttccgctgctatatntatgtgttgtatgttgggacctcggaccctattatgtgtcatgtacctcgctgcactttaaccctattatggtacttgctatgtttattaatggcttgcgatgaaagtgtgaggctagtcgcattcctgggactagctatcatgagtaacaggtttgatcgcttgagatattgtgatagcgcttgatcgagcactgggatg

SEQ ID NO: 46465 - DNA, 431 bp, Oryza sativa
  unsure (1)..(431): unsure at all n locations
agcttcaagcatatggccggaattcaatttattattcttattatccaaacggcatccagtaatgggtggctgtacactcactgttgatcctgataatccccaatgtttatctcttcttaaccttcaaaatcttgcgatcgtaacaacttgaaaatgacctctcgaaaacgttggtaatcacaacattaatgtggttgccgtgcatccgattcttgggaccgtatggctaaccttggggaccatggtgatcactacagagacaagtatttcataaaactctcaagggagtatatgcataaacccatccaataagttgccctgtcccaatccatatgcatctctttctttctattgcttcccctcctctcttttccttttcaattatcagagtttctagagttntgtcactgacaacaaatagagtttaattt

SEQ ID NO: 46466 - DNA, 428 bp, Oryza sativa
  unsure (1)..(428): unsure at all n locations
gcaccctcaactntatcaacaaccatgacggcttctgttctttccaccgagaccaaagatgttggggctggcatggacaacgcggtgttgaaatcagaggaaaccactcaggacttgtacactaagatgatggccatgatcgacaaattgttggagacatgccgtgacaccaatgaggattataccatgagtgtggattccaatggagatgccgcagcacagtgcatcaacattgatccagtacccatcttattagaggtcagtaatgaagctaattcaactcaacttgtcaacactaacaagctttgtttggtgaaagtgaaatcaaccaacgatttgaaaaaaaggaaaaaagacaatgttgatggtgatgccggtggtatggtcacagtcgattgtgtcgcagttacaaatgttgataccaagct

SEQ ID NO: 46467 - DNA, 341 bp, Oryza sativa
  unsure (1)..(341): unsure at all n locations
agctttgcatcgtcggacccagtcctgagcgttctanatcttggttggccagtaaaagccctgcctaatggctttaccgaccaaagtgcgcaaggccgaataggccccgcattccccctcatgggcatcgccgatgatctcgatgccttgatcccgagggatgcatgtcaagaggactccattggcaccacgctggtagagggtcccttctactatcatgtaccgcttggagatgcgcgcgagcttctcgccttatgcgtgatcctcaagaagagtgcgactgccaaggtatgcccggatgtcggccatccatgcaacctgtcgtggggggtcgatgacga

SEQ ID NO: 46468 - DNA, 152 bp, Oryza sativa
cactgctaagagctgccgcaacagaccctctatttcttctctatctctatcggcaatagaacgggatctctatcgctacgatgagaaatacgaaaaatagttacaccgggacttgggaacggcagctgcgaatgagtcgaatcttaagatcg

SEQ ID NO: 46469 - DNA, 432 bp, Oryza sativa
  unsure (1)..(432): unsure at all n locations
agctttgttgtgaggtttagctagagatgtatgatcttttctaaacctttattctgacagggnttagaatctactgaaattgctttctttttttaaaaaaaatggaagaacattctctcagcctctataagctgaaataaaaattttgttcttctttgttgcaagattgtatatcttttgttgaccaatgagcatccattcatgatatggtgtgttttatcagtttcactttgtatgggcaattgatcacgttatttttaaccttttttagtcttcttttgcaacttaatttgtagcaagctcaaaacacaaaaaatctaatgacttcaatttgttcataatctgtaggcgaagcctgaagtcatcatctggacacctcggataattggcttccataactttcttagctctgaggttgggccctgtctcttg

SEQ ID NO: 46470 - DNA, 470 bp, Oryza sativa
tctcgaactataccatccatcaacaaagccaaacaattattctttattatggcttttgcaagctcaataagcaccttgtttgctgaatggtttaaaataaggcacaatatcccaattaatatcttccattcttgctcacttgatgtataagcaagactagaattgaaacaatccaatagctgcacagaaagtggttgtaaattagaaaaattctaaattctaattagggaacaaaagaaaatgcggtaccaattaaaattgcacccattttcatgaaaatgaactggaaggacaaaggaagcaactgcaagccactatgcttgatccaatatgggcaaaggaaaatggctactctaactactcttctgcattgcttttgttatatatatatcagcatttgcctagagattattttgtggacccccatgacttggactgggagtctaacttctaactatgtttatatacaa

SEQ ID NO: 46471 - DNA, 437 bp, Oryza sativa
  unsure (1)..(437): unsure at all n locations
agcttggggggggagacatctctcccgccactgattttatttgtatcacattgcatattttcctttccagttgtatgtattcttttcaattgcatcttataaactgaaaacaacataaaaatttgcaaaatagaaaataccgaaaagataggataggtttgagtaatgctaggttagacaacctaattctctttgttgaaatgatgaatcagtgctctgttttatatcccttatatataaggttcataggtaagtgctctctcaaaggattaaatataagtagccaacaattatctgggaacctgaggtaaatgagctgcacttgctaatctaagtctaagttgttgtgagatatgagatagtaaataagagttaatatgatcccgatcctagtntgactcgaattccggatgatttgtttttcacaatgattaaat

SEQ ID NO: 46472 - DNA, 492 bp, Oryza sativa
  unsure (1)..(492): unsure at all n locations
gacctatataatactcagcttacccttcgcacctttacgttcttgcttccgcctatcaatgtcttctgcaaggagagaatgaaataccaaagcgaacgtgttcaattaactttcttatgattaagttgtcgttcttaccccctttatacccccctcgggctcgttctggtgaaaagggaaactcacgctcggtccgtggtacctatgtggcgaggggcaatgccgtcgccccgagaaagctgcccagcgggtctggccaaaccggggctactgcgaccggtggtcgtggatggccgtgtgaaggccctctcgagcccccatggttcgccgcattccggggcgcgagccgcgttnaggctccctttcggcggttttcatgcgcgccaatgccacttatggttcggagtaatcgcgaatctggctttatacccggacaagccatatgatggtatgagaagtggacactacggcttctcttgacagaaaattatt

SEQ ID NO: 46473 - DNA, 428 bp, Oryza sativa
agctctgattgatagatattgaactctttattttctatagagagtaacctacagatcatatgatattaataaagattgttatagctagtttaattgccgacagagcactgtctattttctcggtctgtcccactcttttgacgacctctgcatcctactcgatcgatccatgtacatatatatgattccccagtccatgctatgcatgattatataaagcctgaatgaacgcatgaactagctagtcatgataatcaggggcggagcttcatggcaaaatccatggttaataaattcctcagacaatggacgagatatcaaaatctgctgcaaccgtgatatcaaagtggtccagttatatactatattattggctgttaggatttatctatcggctggacgatcgggcaacaatatcgatcgatcaa

SEQ ID NO: 46474 - DNA, 458 bp, Oryza sativa
ctctactgtagtagctaatcataacaacataagatctcatattaaacataccatatactatgtcgtaaaatataagaatttctactctgacataacatccgagatgttactttaacttaaagaaatctattaaaataagatgcgttagataaaatagttacatattaggatagttgtttattgataaacataataacagcaatttatcataatggaattttttattggttattaatagataacggcaaaaatatgtcagtgtgtggagtattggaaatctatatagaggttgctatactttgaaaaataaagtatataggccgatgtatatatacccgctgtaataattaatcggatggaagagcattcatcatatatggaggctgtgagtgcggagcagctgatgaatgagtggtcaatggacacattatacatgcaatctttttattatcacatta

SEQ ID NO: 46475 - DNA, 431 bp, Oryza sativa
  unsure (1)..(431): unsure at all n locations
agcttgttggtgatcactatcatctattgtctatacgctcagccctcacgtcatttacggtcatcttcatacttctaactagcctaagaatgagctcgagttgaacccaactcatagccacactagacgagcctggcctagctgatatgatctgctacgaatccatgtcagaaggaatgggccgaatcaactactcatgtgtgttggtgatgggcttatggggtggaatctcaaaattagagtgacaattgggtggtttgtgcaatttatccaggagtgatatccgatgccatgtggcatccacataggttgaggctatacatttgagatgggtttttctcacaatgcaaaatgggtttggagatggtttcaanttttaatattagcccttagatagtttatatnttagtcttattnttttcaatttatgg

SEQ ID NO: 46476 - DNA, 472 bp, Oryza sativa
  unsure (1)..(472): unsure at all n locations
ctttcccacgcagtggagcttggagagcaagtgcaccgttggaactagtgcgcacttatatagttggtaaagtgccaacaatctcagaaggaggaaattggtactttatcacatttattgatgattatacagaatgatctgggtatattttctaaaagaaaaatcagcagccctggatattcaaaaaattcaaggctatggtggaaaattagagtaatcgaaaaattaaagtattacgcaacgatcaaggaggagaatatatctcanaagaatttgagaaatattgtgaaaatgttggcattcgaagataattaacgacaggctatagtgctcaacacaatggagttgctaaaaggaaaaatcgaacaattaatggcatggcaaactctatgctccaagacanagctatgcctaaatctttctgggctgaagcagttaacactgcagtttatattttaaatagtagtcctac

SEQ ID NO: 46477 - DNA, 424 bp, Oryza sativa
agcttatgcttatgcacaattaacagttttttttggtatagacatttaactgaactcacttgcaatatccattcaaaacggagtacacagaaaaaatccatgacatatggtaaagtaatcattgacaagcttatgcttatgcatcattaacagttagattatttctttttcttgtatagaaatttaagtgaactcacttacaatatgcattcaaaatagagtacacacagaaaaagaaaatcatggcatatatggtagagtaaacaaatgataatggccaactgtagggaggaaaacagtcgattatcttacatccatgggatatgggtagtatatgcagcggcagaggtgaattgaggcgaattagtaaatctatgtatggaggaatgtgtgaaagccttatagcaccttagctgatgtcgaa

SEQ ID NO: 46478 - DNA, 476 bp, Oryza sativa
  unsure (1)..(476): unsure at all n locations
tattcaagagctatccaacccatgaacaatttattctttatacacaactnttatcagcgagaaagggctcacactccaaaggatactccaccggacaaaaccacatgaggctacccaaacctataggatgtgcccacttctctctttntatttgggacttgagaaaactcgcgaaacttgtctagacaagcccaacaaatgcacctatatgcatatgaactaatatggcacaagatcatccacatgctctcttcatagacccctcttgatagtacggcgcctatctataaaatccggtctacaccaaacaccaagaccggggaaagactacgaaaacattattagttcaattatacctttgccttgcgccatcagacttggggttaatgcttgaatcaagatcaacactcgtgaccattcgcttgaaccatgtactatgccgaggctngactatcctttgtaagacttcctttcat

SEQ ID NO: 46479 - DNA, 425 bp, Oryza sativa
agcttgtgagaaagagatgccatgtttcttgtgcaaccggtgtatcttcttgaattggccacgccagatagagagcatctggaaaggatgctttgcttgttgcggtgttgcccgatcaattggaagaaatgcttaatttgaaagaaaccgaaagagcattactacggaatccctaatataagccggttcatgggtgccaattcatttaaaacatgcttttattgaccatttcccatctccattgtgtaaaaaaaaaactgacgcctttaaacacatatagttaccggttttaaataaaaaccagtatctacatcattagcaccggcacatatcactgcgagccgagccagccgcatgggagaaaaaaaaagagagctgcttaggaatatttatctcctctctctcttatctttatcctatcccta

SEQ ID NO: 46480 - DNA, 468 bp, Oryza sativa
tccattgtgatcgatgtgagttgcggcgcaaactttctattggttgagtggatgtccctagtttcctcctagcattttatttaaattagtacagattacacggctagcattattatatatatttgttcacattatatcatactccctccatctatttttgatagtcatattttcaaatctgaaaattttatttttgataggcatatttcaatccaacaacctatcatcttaatgattttctcaaatttaatgcgtgactctccattcaaccacacataattggctatatgggctttgagaaatggaaatattaatgaatcgcttgtttacgaggaatgactagtagtatgtgtaaatggatgataagtagaattacttatccttggtctgtgtgttaagaagaaatatgactatcattaagtcgatggagggaggatattgtttcacattttataattaaaatatatt

SEQ ID NO: 46481 - DNA, 429 bp, Oryza sativa
  unsure (1)..(429): unsure at all n locations
agcttcttatgataatttgcctcgtttgtttttcttcattgcccagaggaataataatacttactatgacctacatacatttacatcggttgatgatcgaacaaagagtgtgctgcaaagagcctttttctcattgggtgcttgcatcaatgctnttgtgcattgtcgacctgttctatgcatagatggaacttttatgacaggtaaataccgaggtcatatattgacagcaattgggtgtgatgggaacaaccaggttctacctatggcttttgcatttgtagagagtgagaacactgaaagctggtactggttcctagagagagtgcacattgcagtggtgcgtatgaggcccaacgttngccttatacatgatcgtcatgcgggtatgttgcgggctattgactacttgcagaacggttgggatga

SEQ ID NO: 46482 - DNA, 475 bp, Oryza sativa
  unsure (1)..(475): unsure at all n locations
tatcaagtcaatgacacaaccaaaatttctgactagtctttctctccactcatnaaaagatcctgcagttacaaagcatgattggaccctggtggtaaagttgagattattcatgagacgcatgtacaagaaatgagacatggactgctcaacctgaactaaattaatgttccaacagatcatagagcaaaatgtacagtattacaaacagaccagaccaacataacaaatgtcagatgagtgaatgaaacctctgttatatactccggcctgtcacgaaaaaaaaaagggtctgtttttaccattggcatggccctggaaaaaaaagatcatctatntatataaaaccgattattgagatcaatatacatgttttttctttgtgaccaatctatatattcatagatattgtaccagtgaaagataatatagttactgtatgcggtctaggatgtgtcttttcattcactgaatc

SEQ ID NO: 46483 - DNA, 417 bp, Oryza sativa
cggcatgcaagcatcatcaacaaggtgatatattcattatctataccagaccaaaacttgtcctgccactcgacaacagtgcgcacgcccacaagagcgtagcgcgcgaagcggacgaactcgcgcacatactcaataactgggttgggaccttgtagaagacaacaaaactctctcatcgtttgagccatgataccctcacgaatctgtgccttattgaaactttgacagaactatgcccaagtaacctctgtcccagctggacgggtcaccaatgaaatgtcccaccaaacagaagcggcgcccttcaacaggtgaggacaaaagcaacacactcctggtcgcagcattgcacaaggctcagctacatctcaatagcatgaaaccagtcgctggcctcgaatgggctggaggcgc

SEQ ID NO: 46484 - DNA, 435 bp, Oryza sativa
  unsure (1)..(435): unsure at all n locations
ngcattaacaaaatatcctaactgcaggctatattctatgtctcatcccattcttatatacatatcttagcattcttttccccaaatgatttttccttctaaattatttatctaatctgcgatttggttacaccatcatatttcttttaatatagccgctacaacaagatcttaggaaactaaatttgatcttggacaaatatattntgatgagaaaaatcatgtgttattttatcgtatattgaaaattttttcatcactcgatcaaatatagttcaatttacaaaagggttcatagagatgcaacattcaaaatatatatgatggtgaggctagcaattagttagccacaaagtttaccacacctcactgtgccacatatgtgtcatgccacataaagtgaggctagctattatttaaccacaagtgtggcta

SEQ ID NO: 46485 - DNA, 413 bp, Oryza sativa
  unsure (1)..(413): unsure at all n locations
agcttccatgttttcaaaatgcatgactaacatatattacaatagtccgtcaaaatagcaacagaacatatgcagtcaattttgcaaatgtttatgtcaaggcttataaccagcagcctaaaaggggcacagcaagtttcaactggggtttgcaattccaagcaaccatagaaaggaaagttaaattatattactagacaagtagttccatgctgaagctcggaaacagactttggttatagacgttcataatacacagaggcggagatggtttggcgaaaggcagcaaggaccagttccagttctccccttctccctctcacgctgtgacagaaagattatgttctcgttgaagaatgaagctgtcttctagtagctnttcttttnttgtgtcttttgtgtcttcccttgtg

SEQ ID NO: 46486 - DNA, 407 bp, Oryza sativa
gtgctgctttcactatataagattagataagattagatatgactagacaagtggcgtaccttttggcgcgccgctatatgggcgcctatgtgtttaccatcaatatttcctctttccttttaaaatttcctatgatattgttttaataaaattgccctgtgaatatttgttactggtttctgtattgggagtaccgaaggagaatgagacagcagttcagattcttaaaagctctcgctttctccattttaggttatatttgagaaggatctagatatctcatatcttaacctcttctctctctggttcttgggctacacaagagagagtttctttcttttacgcccattggtgaatgcttgattatctcaatattaacaactcatgtggtcaattgatgctacttg

SEQ ID NO: 46487 - DNA, 468 bp, Oryza sativa
  unsure (1)..(468): unsure at all n locations
ctgactatgttccaccccgctcttaaaaagggttccagactggtcatccgatcagaaatagcttaccatagctttcggctcttgaacccaatgatcctccataatctcataaatatcacgctttttaacatcctcaagcaggatttcatgaacatcaacaacattgcggtggtctacttngctgagatattctatggcaactctatacccattcaatcagtaaacccctttagtgcgtaccatcagcgctatatgaggacgagtgactactagccttgcaaaatatgatggcatattgtataactttacaaactcagtggcatattatagaatatggacaaagtcaacggctcataatggattctctctaaaaaaataatctagtcaaattggttccttatctcagttaaaacaaaacattttttcaccaaacacattagtataaattcgaaagaacgtaagagaaag

SEQ ID NO: 46488 - DNA, 434 bp, Oryza sativa
  unsure (1)..(434): unsure at all n locations
agcttctcttactgaagaggggaaagattgtgtcttattgagtacaaccacagtactcagcatgccacaccggagatgcacaattaatgcaaaggagtacaaggggataatattataggggttaagttttgcagtaaaccgcatttaaaagtcacttaattgcccaaagccattttgtaaagacgatcatagaactacacagtattattaaacaaggccgtgaaccctcacgaacctgccttaacccaaggcctacgatgattcagaccgaactggcaacccgaccctgtgtcccatctcgttccaagccaacccaggccaaccattccatattttagttgttgagcaaatnttaagaattaaaacactgacttgtgtacattgctatgcttgcccatatccganggctcggctattcgaatagatatactctg

SEQ ID NO: 46489 - DNA, 479 bp, Oryza sativa
tcacttgtccacgcatccgctttcgcgaaggccctgcctcatctgtctgcctttgaggattcgcccggggaggcagttcaccattgtaaacccggttcgcccgcccagccgctggacgcgttaacagctgactatactcgacgaccgaaacatcgccgattatcctgcgggcttcggcttcggcctggtcgagggtcaacactggtaaagtagagcgtgaagctacgtcaaaagtcaaataaggcgaaataacaaagcacagcagtatatagcaaaagaacagtcttactgttcgccccctcacggagtatcaggttcggcaaaccgtcgacttcttcgccttgttcaaccgcgacttaccatgactgggagaggtggaaaatgcgaggcatacaaaatttgctcaccaaagtacggcagctaggcgggagcaacctctcgcatagaatgaccggcgctctagcgccgtcacagcgatc

SEQ ID NO: 46490 - DNA, 432 bp, Oryza sativa
  unsure (1)..(432): unsure at all n locations
agctntctcaaaatcaattatgaagagcacttcttttattttcttccgatgcagctcatgtaaagtttcatgtaaaatgacgacaccctccaagatgtttcgtcctcgcatgaaagctgtttgggtcggactcactacatggtccgccaccgagttaatcctatttgtggcgaccctattgaatagtttaaagctgaccttaagcagacaaatacgtctatattgctgtatgcgattcgcttctttgactttcgggagcaaagttatcaccccaaagttcaaactgaacaatggcaattcaccactatgttaatcatggaataaattcatcaaatcatgtttaatgacttcccagaatatctgataatattctgctggaaacccatctaggacaagagctttgttatgctccatgtcacaaacagcatctcg

SEQ ID NO: 46491 - DNA, 390 bp, Oryza sativa
atgattctacgtacgagtggatggatggatcgatggatgatatttatgtgtgcgacaacaatatgcgtacgatgacacgaccggtgagtgctataatgcagctgagttagacgctccgatcttgatcacgaatacgcatggaagggttgaatttattcacgctagggaatggatcgacattcaggcgaagagctccaagtggattttattcctaacgaagatgaaacttaaggaatgcataacatataaaccattagcacacgataaaatgagttatggtgattataaataggaaaaattaatttatctgataccttacagcgaatctggcactgaaaaattcacacacagcacccgaaatcgatatctcacttagtagaaatataaaca

SEQ ID NO: 46492 - DNA, 432 bp, Oryza sativa
agcttgccgttcgccttgtgaacgaccaccgggttctctcagccactccggatggatgacttcacggatgaatccggcctccagaagtctcgccacctcctcgcggatgaaggcttgacgttccggggcctgccgccgcactttctgccggaccggccttgcgcccggccgcacggcgagacggtgctcaatcacctccctggggaccccgggcatgtccgctggtctccatgcgaagacgtcagcgtttgcccgcaggaaggagacgagcgcgtcttcctatttgccatccagaagaccaccgatccgtgtggtcttggatgggctgtcgcccaaagcaacctccttgaccggtacctcgtcgcatgtggcgatccggtgcctcggggcggtgggggcagaggtgccaagcctctcgtaccaccctcgggc

SEQ ID NO: 46493 - DNA, 436 bp, Oryza sativa
  unsure (1)..(436): unsure at all n locations
cgcagaatttgccactgtatgaagaataaggggcgtggtatgtctattttcgtctcgattattgacggtgattatcatgaactggccgaggatgcaaagactgcttgtcgtcagctggacacttacattgagtacaaacgctgtgagggtgttgcatagattattgtatcgccatcaatgtctgaaggcttccgcaacattgttcataccatgggtctatgtaacttgaagcccaacattattgtgatgcggtaccctgagatttggcgtcgcgagaatctgatacagataccgtcaacatttgttagcataataaatgattgcattattgctaacaaagccgttgttattgtgaacggccntgatgagtggccaatgagtaccagatacagtacggcactattgacctctactggattgtgagagatggaggatt

SEQ ID NO: 46494 - DNA, 399 bp, Oryza sativa
  unsure (1)..(399): unsure at all n locations
agcttttaaccaagatagactagcttttctttttattgggctagccggaaaaccatagggcgtttctcctaagcaccagaacaattcatgactggattgaagattatngggtttttacggcggttttgatgagctcgtcgttttaggcgcctgcgcggacgaccatggaaacaaactgctggctgttggctgggggctgtgggcggtgaactgactcttgccgccccactcggcggtcttcttgtgaaggacataagattatgcagagatgcgatgacattgctgcttcttttttttctcaacctgagtctgaagtttcgaactcttaactgaacataaacctgacactaatcttaatgctgtatttatttctgcctgcacttctctgcactggagtga

SEQ ID NO: 46495 - DNA, 339 bp, Oryza sativa
  unsure (1)..(339): unsure at all n locations
gtaactagttnaggagtaccacgtgtagaatacaagtgtgtcttctaccagtacgtatacgcgatatatactcccaactgcttgaatcagatagtgttcacatccctcatgcggctacaagcaactatatataaatggcgtatacttactggtgcatgatgcactacgtagcacgacactgacaaatatacttaggtaccaaagtctgcaagtaaactctactttggaatcgggggcaggaacttatataataggcttatcttagaactcgtcatgacacgtcctaaggtattatttcaccttatcgattgaatacacatgaaagagaagttaatggac

SEQ ID NO: 46496 - DNA, 423 bp, Oryza sativa
agcttggctttcgcttagggtccttgataatgattgaacccctgaaatcgaaagaactcctgaaggtcatgacgctgttgctgcatcatattgttgatgttggtgaactgagcatcagcagattgttgccattcttgcgtttgagctatgttttccgtgaggttgtactgaatcttcaacgtctgcacatcaagggtgtccattctcctagtgatttcacccaagtcccaacgagaggaacttgagcaccattcacttggagatggaggcacaccacttgatctgggaggttgattttccccccagagaatgtcatgaggcgcatgccatcggtcctcactggcgcttgcccaggttgagactccgatgctatggcgtggagcttgggtccatccgggtgcagccccagttggtgcccaacct

SEQ ID NO: 46497 - DNA, 453 bp, Oryza sativa
  unsure (1)..(453): unsure at all n locations
ggtatgttgtgaataaagaaatntccaaagtattgggcatacgccatgcgcacactgctttaacagatgtgcttaagtccctagaagacacatggttccaccacacctggaaatatacggcatatgtggtataaaatccgagtaaataaactcataaaggatttaccaaccgcctgaaaaatgaccacaatatataatcagcctaagccataatattggtcaataaaaatgcacacttacgtggcaaaaagcaacgatattgtaaccaatcaattgctttaaaacccaaacagcaccatgactatattaaaaagtcagcgggacagctatataaagctttactgtttgacaccttttaagatgcattgtaccaactcctaanaagttgagtaactgcggtataaaaggaatttaaggtattgngcacttgatcacgcgcactttggcctaagc

SEQ ID NO: 46498 - DNA, 429 bp, Oryza sativa
agcttcatattcatgcaacaagctaaatccatatgcataatcaatacaccatatttcaaggaagaactctgggcttttttttattcaattcgtgtgtccgacaggtatacctatgttacatttccatctctacttcgagaagaacattaatgttacatgtgaaaagggaacatctcaagaggcacttagaactcctaggccataaattagccaacagcggggcatcaacacaatagcacggcaaaataagttgaaaatgttattcattacaaaggttacagaaaacactcaacacttcaactattattagtgtccctcagggcaatcaagttacagttgacaaatattaaagaagacagtttaatatcctaaaacatcaatataggtaaaccagatgaccaacgggcacacaacatatgaagtaaagta

SEQ ID NO: 46499 - DNA, 455 bp, Oryza sativa
  unsure (1)..(455): unsure at all n locations
tgccttctgacttctagtggctggctacgccagaatttctcttttctgttttctctattctgccgcatgtgtatacacacaagaaaaaaaaatgctactacaaacgagaagagaaagtacgaattgatacggtttcccatggtcagtggaaaatcaaatattntctcaaaacaagcgtgcggccactcctctgaccaaaggtgtcgacgtccagtgtctaccaaaccgattgacggcaagcagtataactctactaccacgcgaacagcgtaacgcgccggcccagaccaaacctgatgtgaccaactgaacccaacccgcaaaactgccctccttttcaccgcaaaatggcgccgcgcgcccgtgcgccaccgcgagcctaccgctaccgctcgcgctcgctgcggtaggccgggtcaaaaagcacattttcaccggcgagaccgcaccacttc

SEQ ID NO: 46500 - DNA, 428 bp, Oryza sativa
agcttttcacgatcttgaccagatattactttgttctttaatacgctaagtttggtcagagtaccatggtcttttaccctacagccatactcatggtgggtgaaaacttccccgattagcaatttatctactgcatcttccctctttataccagtaatttctcgcatagcttcattccactctaagcacgaaccaagatcattgatcataaatataggggggatgagctccgaagggttctttactatagcaacatagtccccttgtatacgagtgtacttatacatgataatgttctgtcctggcatatcttgtgctacaaagcacacccccacaactttctctgataggcacgactgcagtaagcgttaaccaatcaaaatacaggtccaataatttccctgtgaataaatgttttaagcttaatt

SEQ ID NO: 46501 - DNA, 370 bp, Oryza sativa
agaaagattatccttgatgaatggatcatgtgtctgcaatctacggtatccgactagagccaaatgttgccgggaggttaagtgcccattaacaggaactgcttggaatgaattgatatgcactactgatcacgctataagtgtgtgcaaactaaggcgcgagagcggcatattcagctgaacgcttgtagtagctactggggtatgctctataacatcatgaccttcctgtcgttgtgcaaactaaacatcgtctgctcttcttgtatgaaatcaacgtactgtactacaacagctaaagtggatatcattgcatctgatgtgcctaaatacgtaatgtatgtcctgttctatgacatattggagatgg

SEQ ID NO: 46502 - DNA, 419 bp, Oryza sativa
  unsure (1)..(419): unsure at all n locations
agcttatcctgcagntgcatataagatggtttataaaaattcagatggcgatgcaatggttagcgaaaatcaaccagagtaccagaaataattaatgaactgctggaagcaaagacactatatacatgcgctggtaatcaagtaaggtgtgaatctaacatcaaattggaaggactggcttgatcaatctagctaaaaaacagccagcgaggcgagtatcatacgcgtaagaagactatgtgagaaacagaggctagctactatataagattaggccgagtttagttctcaactnttccatcacatcaaaaatttcctacgcacataaacttccaagttttccgtcacatcatttcaatttcaaccannacttcaattttgacgtgaactaaacacacccttagggaccaaaaggaaat

SEQ ID NO: 46503 - DNA, 439 bp, Oryza sativa
  unsure (1)..(439): unsure at all n locations
ntnttccttctcttaaatagctaaaaacatgcatgaattattattattattattttctacaaatatgtcgattggctattctactaataagaaggggccgctcgcagctcatgtnattatatatatacatgctatatatngatctgacaccttataccatacctctttctttgatgatgacataaattgaattcatcttccagatattactctcccctggttgtccgcctaagcctaagctgtaggatcattcaaggtgacagcagagccagcatcatggaatatggaggcgcggcttcgctttgtctctttaaccgctcggacgccgagactagactagcaacaactgtgtgctgtgcctgttaccgcggcggccagccaatgagtagcatggcgagagagacagagacctctcggataagatgctcccgaatactta

SEQ ID NO: 46504 - DNA, 421 bp, Oryza sativa
tattgattggtggatgcttccaatcagatgagattagtcttacgatcgggttacacatgtagcgagatttgaaacatatttcatgaacttggtcgtctatttctattatctcctatagcgcgtcacacaatgcacattccactatccataaggtggtcttcctgctagctgcacatagtgttagactagacgacatatgttctaagcctcacccccttataatcatttgatattagtcattccctaatattcgcgtttttcacattccgctatccatggatttattggatcgtgccttcccttcatctcaactcactgctcttccaggtaccgactctgctatatttaattaccgcgtcttcctattcttctttgatgaatcaccatacttttggtgatgcatgagagcttatgatatact

SEQ ID NO: 46505 - DNA, 427 bp, Oryza sativa
  unsure (1)..(427): unsure at all n locations
agcttgcaaggagccaagtcatcgagagctattcgaatcaactcgactacaatctcgccggatccgacaagttcccttgttctctttgtaacctatgttttttaccatataatcccacatcaactggattagggctattacctgtcaaggggcctgaaccagtataattcttgtcttttgtttgcttgatgtcgtactacgtagatccttgtaccaacgtaccccaataccctctatatccggtctacgggtatcacccgtcgacagtattaaccgccaccaactctactactttataggcatgttacttaatttatctcgtcatgtgttntagatggtcttttctttcaatagtctttatttttatcacaaattntagttgtttataaatattattcctaattaaaataatttttttctaatttca

SEQ ID NO: 46506 - DNA, 122 bp, Oryza sativa
  unsure (1)..(122): unsure at all n locations
tgttgaaggggctactgaatactgatgctcattactntattactagaatacggaaaaccacaaaacacgaaactaattctacccccaaatattcgcttgcgtagagtgctaccagcgaaatc

SEQ ID NO: 46507 - DNA, 395 bp, Oryza sativa
agctttgacgatacaggcatcacaaatgttttttgttttctgtgccacttcatccaccgtgagtgctgtcatgtgcgaagaaaattcttcaacccaccaggtgcccgagctacaagtgacgaattcaagaacttcaggagtggaacactgctatgccataatgtaactagatggcgtattttaagtgacaatgtaaaaaaatattcgtaatatatatattgtgacaacacttttcacttatgcaatatatgtagatttctaagtaccatatgtttgataattactaataatcttcctgcctcaatttctattaaataattaaaaagtcattgtcgggcatactattattggttcaaaacttaacagtttctacctatctttgctggcggaacttt

SEQ ID NO: 46508 - DNA, 368 bp, Oryza sativa
ggcctaacatgctactatgtggcaccatcacctaacagcaattattatcttcaatattataaacaacatgcatatgtgccactatccatcattagctacagcattttaaataccaagcagacatgatatatcaactacaattgtgctgtattgtgagaactcaatacgcggccaatgtcagagcattatgaccagttgaattacacactatgtaaacacatacatatatcatatttataagatatagatgcatgcattcatataatccgcgacgaaacgcatggtgaatcaactagtataaggggaaattcaccgatctatcaatctctcaattacatgcattaacaggatggctagatgagggatgg

SEQ ID NO: 46509 - DNA, 427 bp, Oryza sativa
agcttctagacatcgtgttatagtaaaaaattttattttcttataataccgttctaaaacaacagtgtcacttcagagaagttatcttatatacttatatcgccaaatagctattagaaatcaaattatctatcatatcagttaatttcagctatatactccctctaaggaacataaatacttaaatcctaacttttcaattagagctaagtaggaaaagaaatgaccaaaatcgttcagtctaatagcaaaattatattagtgaaaggctatatgagagatattggaagaacaaaatttatcgatttatagactcatgatagacaggaaggtcgaaattagcttattttagaatggacagctatacttgacctgataacctaagagtcttagacctcgaaaaactttgctcggatccactggtctg

SEQ ID NO: 46510 - DNA, 421 bp, Oryza sativa
  unsure (1)..(421): unsure at all n locations
agcnttggcgctctcgttcatcctgttaggttttttggctgtgggaacgggtgaggctagaacatgataaccacgagccaagtctcccattttcgtcttccaactatatgtcgcatggccgtatttgccaaacgtgacgaatgctccttcttcagttagaccgagaaaaattaagctagattccataactagcatcgatcgcttatgtgagtgtgtcagctgccttgcacgagctgatcagctcgcacgcatcgcggaggattcagacaaaaatatgatcactcgcgcatatatacatgcattttagaaagcacggatgcgcctagctcgcatgcaacagcgccgtgcagtatccttacaccatgtaattacacttggaatctagttctaccatgaagattcacttggaatctatttctat

SEQ ID NO: 46511 - DNA, 495 bp, Oryza sativa
  unsure (1)..(495): unsure at all n locations
cgacactatanaatctangcttattcttcccacagatatacttatataccactaccaatgttctgttagttcacaggcaatggaccacgaaaattaacgatctgtccaagtacatcaaataagaatttattggccatagatactaatgccatcttgagaaacttgcatgaatgcaattacaggattcccaacaaaatgtatctgtaaaatgtcgttagaatacttgccttcagcttacttattgcacgcaaacaatcatctgatgttaacgatccaatatcagctttcctcttctgacataggagtttactgagatctaacaagtcaatcaaaccaccgttggccgctctgggtgctatgcataatgcaaaatctgaactcctggtgcaatacacacagatggccagcataacgtatatggtccaaatataaccgaaaatttccggatcagaacataccaagtatcttacattaagtataccaacgccattcata

SEQ ID NO: 46512 - DNA, 431 bp, Oryza sativa
  unsure (1)..(431): unsure at all n locations
agcttcaaatctgaaacttggtaatctattctttttctcatttccaaccagaagaaggggagcatgatcagagcatgcggatgacagagggtaaagattcgagcagtcaaacatcatgtcccaatcagttgtaacaaaggcgcgatcaatttttgtttgagttgggtttatgccctctcccgcccagctaaacctacgccctgtgaggtacagttctttcacctgcaatttgtcaatgaggccacgaaaacgttgcatcatccttctattatgtcggtcgctgttcttgtctgaagctttatatattangttgaaatctccaataatgagccaagcagatttcatagaggtctgcagagcttcaagttcagaaagaaaattgantttatctggctctaactgtggcctataaaccaccgtgatagaccatt

SEQ ID NO: 46513 - DNA, 427 bp, Oryza sativa
gtagctcccttatccgatgatgtgaagtaaactcttgtatatatgtctcttcggctagaggcatcatctctagacagtttggtggtagtctgcggatcaattaagacacggcttcatgaagttcaagggctgatcctggaagaactagccaacgtcctcactctagctgcttatcttgaacaacatcaattctaactggagaaggccaagctgagattatcagaacgtcgggagcgctgggatattgaagccacaatccacgccaatcggtgactcgtgcatgaagagaagtccaaacttgatcagctatctgatggcccgataaagtcaaatattgatcggcttgaagctcgtaagattgagctcttggcacaactctaagaatgcaatgccgaactggatctggaacacataaagatagccgatc

SEQ ID NO: 46514 - DNA, 419 bp, Oryza sativa
  unsure (1)..(419): unsure at all n locations
agcttgcatagacagtgtaatcaatcttttttttgacaaaatcttgttctttctcaataagtatatgtctttctccaagtcgaggcacatacctggtgagccaatgagttatgagtttcatggacattgcatggttaaattgtggttgctgagataaacttgagatgtgtctcaagataatctgtgtcttgctgtgcacactataattatactgtttttctgtgcttaaaagaaattctctttacttctgaacttaattaaaacgtgctttattatcaagatgtgtatcagtgctccaaaacagtaaaaataatatatacacaagaacacaatactaggtaagctatgtgatcatgcagcanaattangatgtaacttttttttccttgaaaacacaggtgtgttgtgcttcattgcat

SEQ ID NO: 46515 - DNA, 470 bp, Oryza sativa
  unsure (1)..(470): unsure at all n locations
tggtcggcgcgcanaaacatacgctgttattcgcacctaattaagacacgtatatgtgtagagatcgctcgatcatatcgtgtcccggtaacaaaatttaattagctttcaaaatctcatataaaatagtatagcaactttatttactgtaatttatttatcgatcacaactaattactattatcatgtcttatttaatttcacttttagccaatcagaaatatgtctcaattagctttaccctctttagttatgttcggattttgggacagaagggttacatgtttcagatcgattacttaatgaccaatcaagcttcatgtacgtaactaactgatttagctagctgcgttgatcggtcaaacgcacgcatacagctaaaataaaatgtactctgaccgacaaataggagaacaaacgccattcgcgctacagatgtaagaactaaccacagttacataataatactc

SEQ ID NO: 46516 - DNA, 418 bp, Oryza sativa
  unsure (1)..(418): unsure at all n locations
tagctntaactcaacattgtactgagttttttatttatgangctgcattccaaatggaacataacaaagcaccgggccctgatggttttcctcctgagttttaccaagctctttagaatgttgntaaaaatgatttgatcgctctttttaatgatttccataatggtactcttccgttattttcgcttaactgtggtacaattatcttgttacccaagtgtgatgaggccatgaaaattcaatagtataggcccatatgcttacttaatgttagtttcaagatttttaccaaagtccggaatatttggtaatgtttcggatttgccatatccgttcctccaagaatatcgctcattgccttttttcgaccgttaccgcaccgctataaatactaaccgtcgtccgcgagaaatttcca

SEQ ID NO: 46517 - DNA, 465 bp, Oryza sativa
gctattacgtgacactataaaactcagctgttcttggtaagatgcctgtggagtggagtcgccatatctgttccgtaatttggtatagttttttttttccgctgcgtagaatgttattctttgagaggaactatccacctctgtaataatttattatttgcgaatattaaatagttatttatttgtactctattatcaatttgttattgtgtgcctcggctgattcctggacgagggtttaacacacatgtaagcgtttggaattttggatagaaattccgggcgtgacagctaggaccttctaatttagtctgagattcaataagtaaattaaaacagagggagtatcatttttcgaagtaccctaatttactgtgttctacagcaaaacaatgcacccaattagtattgacatgcgcaacactaaaagttatgtgggcaatagtcatacagttgaactatatg

SEQ ID NO: 46518 - DNA, 432 bp, Oryza sativa
agcttactataaaccactaaaaaaaatttattatagcattatatgttgccttgggaatgcatcggcatgataactatattatctactatccccaaagtagcaaacgtattgaaggatgataccagggatacagtctggatagtttaactttctgtaataccttgattagaaaattctcaatcccactcttcatatatgtgattgacatggtggcactcactaacacacagacgtcaccatagaatatcacatcagagcattggaatggtttagaatccgtctggacctatatgacacacctaagataaatccagagacctaaaaatacattttgtgagtttaggaatctagatgatacacccgtacaagtaatctagatgacacacacgtacaagtataggaccgtcaatgtacttcactcttctactacat

SEQ ID NO: 46519 - DNA, 463 bp, Oryza sativa
  unsure (1)..(463): unsure at all n locations
tgccgctgcctccattggattcgcagctgcgaagtgaatcccggccacccctccgttgtcgccgcacatcgccggaaagtcatcgcctccgtggacagtacctcgccgcccttcgaagctcgtcgccggctatcttccgttgccgttcgtcgtcgcataaatggtggtaagggtcactttgatcccctctcgctcccggtgccctccgtttgcgttattgtgccgtggttcgccggcaaccgccgctcctatgccgttcacctgtgaggttttccctagggccttaatccgatctaacctaatctgctgtctgtctagcgtagtagtcgtctccgtgtgttgctgtcgggtaagcatcgtcatctctccctctccgatcattttggttcggtgagacttctatccgctntccctcggnttagnttttaatctcttggtttggtggacagtagcccgcgctctg

SEQ ID NO: 46520 - DNA, 434 bp, Oryza sativa
tataggtcattaataaggcgttatattcaccgattgtttgttcattctcgttcgcgtgtagtctcaaagcccgcagaccagcagtgcgaggatttccatgatcataccccagatctcgataaaggcaagccacctttgaacatcttgagcctatatttgaaattaagtatgctgcttgcataatattacgcattgttaggatcgcacttaatctgtttgtcccggctgcaatgcaaactggcggacctacctagtctggtgcatttgatcctttccttgttaattgatatatcatgttcccttgtatccatctagttgtggcttgatattcgtgcaccctgtgcgagtatcgacggtctgccttcaacttataaatcttaaaacaaccttgataaaacttgcgttttacaaaagacttggataacccgacacct

SEQ ID NO: 46521 - DNA, 352 bp, Oryza sativa
acatggtaagttgtgcatacaacgtctgcgtaagaaagaagcgcaaacggacgctaagtagtccaattcgatccctctttgtaaaatagacgccgacccattggagaaagacactgcccgtatattacaacaaatagcgttcaagatacgccgcgcacacatatggctaattgctggactcgaagtcataagtgggactaatcaagatggtgcgccactgcatgtagttggttcgaaagacgataatgaggtgcgggacgaagcgagggttactcttaaaggccacgcgtcggaaggcgcggaacgtcactgccggaagatggagtgcgaagacatcccttgctcacacata

SEQ ID NO: 46522 - DNA, 386 bp, Oryza sativa
ggacctataatactcagctttcccctcttgattaggacctaaatgattttggtaacataatgtgaagtgacaactaaatcatgagaatatgagttgataccctttgatacgctcattgtgtgtctcgagtgcatcaatttcctgctggaattccctttttctttctgccagctgatgatactcctgatcaagcttttccttcaaagcttcatgctcttgcaacaagctttctctctcttttgacaacggaccaagagactcctctaaatgctgcataattgagcaataaccgattatacacatgttgcatcatattgcataagcccaagtgtaagcatgtcattgataataaaagcacccccaacatttccgggactcgaaacaat

SEQ ID NO: 46523 - DNA, 425 bp, Oryza sativa
agctttctaaaaattactctattaatttcttttttcacaattaagttaatacatactaaattgagatgtgtacatattcatatttatcaattcttgatataaattatttaatcttcttggataatgaagagaaacttagacaagggcaaaagtatcaatgcaaatgatagtcctacttagaaatcatattataattgccaaagttcaaaaaaaaaacctatttagagtgggattagaacaacaattataatattttaagtgatatttgttataatgtcatctcccagagtgggtatccaatgttctggaataaagataaagtatgtccccttttatcccaaaatataacgatttgtagtatttaaaatttattccacaatatggcaacctctccatatactcacttatctcaactatcacaacca

SEQ ID NO: 46524 - DNA, 366 bp, Oryza sativa
tgaatgatgtgaataaagaaattgtcatagtattatgcatacgccatgcacacactgctttaataaatgtgcttaagtccctaaaagacacatggtttcaccacacccggaaatatactgcatatgtggtgttaaatcccagtaaataaactcataaaggatttaccaaccgcctgataaatgactaagatatataatcagcctaatccataatattggtcaataaagatgcacacttacgtggcaaaaagcagtggtattgtatccaatcaattgctttataaacccaaatagcacattgactatataaaatagtcagtatgacagctatgataaacttcactgctgtgcaccttttaatatgca

SEQ ID NO: 46525 - DNA, 429 bp, Oryza sativa
  unsure (1)..(429): unsure at all n locations
agctntgtaagctaatttatctgcttattctatttctgtcaacataacaatgcgactataatgaaacaaaagtgtgcaaataatctagaaattagctttacttttgatcaatcatcttacgatgcttgtttataagttcctgaaaaagaaatcagttgtacgttgtttgacatgcttccttaattttttgtatgctacaaactagtaagatgaggactaatcaagatgggttaggtcggctagttacaataagtgatgaggagataggcttactggatggagatcaaactttagttcagcaaactgaactaaatgtttcagaacgtatcagtgccttactatggatgcctcattgccagcacaaaatctcaaaagtttgggaaaatgtaagctattgctagcttctgtcatatnacctttccaaaaaaa

SEQ ID NO: 46526 - DNA, 376 bp, Oryza sativa
attacgcgacactattgatactcagcttgacattatgtaacctggattaggggtattcttcatattgactgaggcctatatgatgacactacatatacgcctaaaccacagaatcaagctatcaacattcctcatctcgttgaagccgacttatatctgccctgatagcgcctaattaacccgtgaacaacgaggtttattattctgcaagtgcctcacccacacatgacataatcgtaacgagtaaataaatttatttatctgcctataaacaaatgaaactggagctgcccgtgtcgaatcaaatgctaataactcgaatctggaacaaaattaacgccgaatacaacacatagaacgactcttattttttctc

SEQ ID NO: 46527 - DNA, 424 bp, Oryza sativa
  unsure (1)..(424): unsure at all n locations
agcttaacatgcaagtatgccacatcattactcactatcaattattatctagagnttttaatatcattcaaaaatgacattcatttataattttgtcatattttcaggactcaatatgcaagtaatatcaaatcattatccccatatcatttttatattatttaaacatgtacatctaccattcctacaaagtatggcatctgttaatccacatatcccacagcaaaacacgagatataaactagtgttttaagggtgtgtttagttcacgccaaaattggaagtttggttgaaattggaacgatgtgacgaaaaagntggaagtttgtgtgtgtaagaaagttttgatgtgatgcacatagtgaaagtctgaagaaaaaagttggaactaaactcggccctaaatgagtggaaccatttgtca

SEQ ID NO: 46528 - DNA, 453 bp, Oryza sativa
tcagaagattggtttgtccttgaccaatgtaaactctcttttggggttgaaggccttccaaaattgaaggagattgagttgaagggccacaagttccttctttcattctttgccaatgccaatcagattaccaaagtgactctttgtgataccttactgaagcaagaggacatgcatatcctcgcaaataaaccaaacatgggcagcatagtgctgttggacaagtcttacgatgaaagccagctcgcctttaacaaggatgagttcccaaagctcaaccttcttatcgttgagtgctctacaataatcaacatcagcttcgccgatggatctgctcctaagctcgagaagatcgtgtggcacttcagtaggaagggattttgtttactctccggcatcgccaacctcccagaattcaaggagctcgagttcaacggtgaatttgtccctgac

SEQ ID NO: 46529 - DNA, 341 bp, Oryza sativa
  unsure (1)..(341): unsure at all n locations
agctcgatcagctatctgaaggccggattttatctaatatngatcggctcgaagctcgcaagaatgagctcttggctcaacttcaagaatgcaatgctgaactggatctagagcacaagaagctagccgatcttcctcagtctattgaagaacaaaaagcaaagctgaaatcagctatcaagaatgtcgctgatatgactaaatctctgaaaaccatccctggaaccgatgctcaagatgctcaagccattgaagaagtanaacaaattaagcaaagagctatatcagctatccagcgttacttgtctaatgacgctttgaataactctataagctttttg

SEQ ID NO: 46530 - DNA, 448 bp, Oryza sativa
tagtggtttgtgaattcatgatcttaggatggcagggtttgccctgtgcccctgtgtattcgatggctctggcttcagcgttcagagcatccctactgggatggcctgaaggccccagccgagcagactcattttcgacatgttcgaggcgtccaccttcttcatgccgggagatggcgagtcaatactcttattggtttgaacaatggatcgacgaccgctcggtggcctccttggttcgagatctcctcttcggcgtgccccaacgcctttgaggctcacgcacagttgcttttggcctgtttggcgaacaattcctgggtttctgacatccgcggcgccctcactgtccatgtcatctcctagtttcttcttatttgggatgtggtgcttcacatacagctcttgtcgggatcggagatcgtctcgtgtggcgttggatgagtga

SEQ ID NO: 46531 - DNA, 475 bp, Oryza sativa
cggaccttaagcacctgagctgcagcttcccttgggacacccttaaagactaccgatgaatcattccttctatagacggtcacatcaacatcggtaaaaagacaattataacccatagaacataattgagaaacggacaaaagattgtagtttagagattttaccaagagaatgttggcaatggaaagatcattagaaattgcaatcttacccaatcccataacctttccctttccatcgtccccgaaaactatgttatcttgtgaagtgccatttggatcaagagttgaaaacattgattcttctctggtcatgtgatttgtgcatccactatcaattacccaacttcttccaccggagacatattcctacaagagatcaatttctaattttaggtacccatacttgcttgggtcctctcatgttagtaacaagtgccttaggcacccaaagtactctcttgatagaaatattc

SEQ ID NO: 46532 - DNA, 440 bp, Oryza sativa
  unsure (1)..(440): unsure at all n locations
tactactatactacactaggacactaggagatactacctccgtcccataaagatcacagttntgcaccagttttgtccaacgtttgaccctccgttttatttgaaatttttttattattagcatatttcttgttattagatgattaaacataaatagtactttatatgcgactaacttttaaaaatttgtttataaattgttcaaataaaactgacggtcaaacgttggacgcggaaactgacaactgcacttaaaatgggatggaggtagtactacataatcctgaactggttaaaattagtttccaacactacgtacgtgatatgaagttatcttgagccaaatctcatatgcttttataggggctgttatattaagatctatatgatgtcaaattaattggtactcatcataccacttgagattagtaggttattat

SEQ ID NO: 46533 - DNA, 336 bp, Oryza sativa
  unsure (1)..(336): unsure at all n locations
agcttgaagacatanatacgtgttatgcgtatctggatctggtatcctttttaacaaacatatacgatgactaggatatgatataaatataatacttgagaaaaattcgaggattgtaaaatattctataaatatgtatttgatntcttgtcaattttgattgccccgagcagatgactcattagcgttaaacactttgcccgactaatcataacacaccaagcaccgggagtcggactaagcacttcccaaacatgcatatgagtgacatgaggtcaccattaatggaacaaaggttcacgggtccgaatttactactcggggactttcgcgaat

SEQ ID NO: 46534 - DNA, 391 bp, Oryza sativa
ctcaagcttgaccaggtggagcaccgcttgaagagggcgatgtagagtctagagctgacgcttctatatcctagatgagcagtctgcccgacacggatactgtatactgaccgaacttaacctgaatattgcacagattgatgagtgacaaccatcctgtgagtccaaacatgaagtgatgcaagatggagcttatactacatagcaggtatagttccaatgacaacgtgcttattcagtcatacactattacaggaaagaggatctgtgtactacaagagcatgacagtcagattatagcttctaatcttttaacaatgggccgtcgatgtctagtcaaaaagcaattgcattatatctgcagttacctgaagatacttctctttatact

SEQ ID NO: 46535 - DNA, 424 bp, Oryza sativa
  unsure (1)..(424): unsure at all n locations
agcttcgtgttcttgccttaccatgaactttgtttggctccaaccgaccccgcaccggcgttcccaactattggcatgcgagaattccctgaaccgactagttacttagccagggtgtcccattccaccttgtggttgcactttgattatgctcgatgagtttcccacaggaatcggtccttatatgcgaatacgggacagcgccacgcaggcaccacccccgcatcgcgagtgttacaatttatnttatttttaaacacaccgacaccatatgtcaggttttcaaggcttctcaaacccatttcccaaatttcgacaatcaacggtgtatgtgggatatttggtatacgcactcagagagcacgaataccgaagtaccacaatggtggagcgacaagggatcacggtatgtcggcctacacga

SEQ ID NO: 46536 - DNA, 407 bp, Oryza sativa
  unsure (1)..(407): unsure at all n locations
nttcgccgctctgtttactgcatgcgcctctttcaaagacgtgcagacgccagctggcccgaggaaaaccgttttcggctgcgtgaacttcatactacggccggagcgttcagatgcttggccagtgcccgcatcgatggcgaaatgggacaggaattggatgcagaaatagttctacatcagcaacccctactccgccgaagatgctcaggcgagctggctactttttgagcgttctgccgtctccgtcaacgcgaagccaaatgtggagatcgacgggactctcgagtcccggcttattctccttcgcaaggttgcccggcggctgagcacccaggatctttgcgaggagttgtgtctccttcatattttccctctcgcccgtgtgtgggacatttccgtgaacg

SEQ ID NO: 46537 - DNA, 436 bp, Oryza sativa
  unsure (1)..(436): unsure at all n locations
agctntcacgagccgagccgagccggctctgctcggctcgtttccacccctatacaggatgtggttagtgagggaggttacgttttaggacttttttatggtctgcacctttcatggaaagctggggaccccagtgtcgcgaagccttttgttaccctgtttattgctgtctacttttgtaagattctgtaagaacctattaattttcttctgggctttttacaaagccgggtagtaatatattagcttaattagatctgtgccattaaaattttgctggtttcaaaatataccattacaatttacgcatttgtaacgatgccactgctacttgtttgtaatctcagntgtgcctctaagatacgtattttgcatgtattggacganaataccctcatcttctacctctctcttctcttatcttctacctctctct

SEQ ID NO: 46538 - DNA, 457 bp, Oryza sativa
tttgtcccaagctccaccaaaatcaagagcgtctgctcttatcatatctttcaagatttgattgacccgctcggtctggccatcagtttgcgggtgataggccgtgctgaaatttaaacgggtccccaattcttcctgcagcttctgccagaattttgaggtgaactgactccctcggtcagatacaatctttttgagtactccatgtaggcacatgattctcgaaaggtaaagctccgccaaccttttgcccgtatatgtggtatgtactggtatgaagtgagcaaccttagtgagtcgatccacgactactcagatcgaatcgtgacccgacgatgtccggggcagtcccgttataaagtccattccaatttcttcccatttccattccgggatttgaagaggttggagtaaacctgtgggtctttggtgctctgccttcactcgttggcaaaca

SEQ ID NO: 46539 - DNA, 449 bp, Oryza sativa
  unsure (1)..(449): unsure at all n locations
agcttttgatctttaacatagattctgtataagaacaagaacacgatagatgagaaatggggaagaagagaaaacaagagaggataaggtagtgcttgggaggaaaattcgcgtggagcagaaacattcgaaagtatactagacaactccactcctatgcgttttatttcaagtacatttttgcattagtatttttgatgacaggagagtttaagcgttaaattttttgggacattttctacctgataaagcgacgtcccttctgggacggagggcaagggcgaatctacagtagaaggaccggtgtcaggtgacatcgacgattctcggtaaaacctatagcaaaactggttatccatatngtataacactatgatctaaggataattagtaatttagtatactatgataccgatagatacgttatgacataatcgattttctgatcc

SEQ ID NO: 46540 - DNA, 430 bp, Oryza sativa
  unsure (1)..(430): unsure at all n locations
cacttaaaactcagctacacaggcgcaccatcatacacaagctcattttttgcatctgatcgaactcacttggacacgtcgtcctgaaactcatatactaacaccctcaatctcatctatttgtgctgcccatgagctcaccctcctgccctttctacaactcgttaatggagctcatttgctgtggtacgataaagaagaagacatggtcacgctgtgggaaagaatggtagtttgaatacaatgctaagacgagtattatagggaactttcgatactactaaagctaaaatggactttttttccctataaaactaaagtgggaatgtttggcgttgtagaaccaattattcccaagttaacaactgacatctaactattcaaatgaactatgatcaaatnttacgaaaatttacaagacacttgaccc

SEQ ID NO: 46541 - DNA, 431 bp, Oryza sativa
  unsure (1)..(431): unsure at all n locations
agctttngaaggggttggctagctgtgatttatgcataaaacgatactttggtcatgacatgtccccacttattacttgtactattgtatttcaattcatcaattgtaacatgatttactacgccaagaaaaatagattaactacctatcattagcaaataacatagcagttaggcctgtggaataggcctataaaacccaaagtccccaccgaaggtgaatactataggaaaaaaacatgtaagtatccaatctgtacaattggttttcacaagattgagttatgacactgttaaacagtttaggtgcttacagtcaaatattttacataattacatcaactaaagtttacattgaccactcttaagtcttaacccgtggacaccttncaatttcatctctgtttatgacttgaatgataggtagacaat

SEQ ID NO: 46542 - DNA, 414 bp, Oryza sativa
tacgtggagaagtgaggtagagaaaataacaagtgtcggttcttatacttgtgctagctcaacacgcgggtcaagataaatacattaaataatatataagtgaggaagagatatgagaaaaaattgatactaacctatagctaatatattatatatattagctctaagatagactaatagtagtaagagagctctgctatatattatctttgatgtaatctctaaatcctgactttgtccatgataactatacccacaggtcctacgctaagtcaatatcctagttgttagtagtaatgaaaggtcatgatgtatactttaaatagagtcagcatcgggaagattctcgtctattcactgacctaatactggtggctaatcatacggcatgcgtggcttacctaaattcattca

SEQ ID NO: 46543 - DNA, 448 bp, Oryza sativa
  unsure (1)..(448): unsure at all n locations
agcttgtaggagtataggttatgctgatttttactaagcagttgactagcacttacataatgcatgtgtgtccctgcatgtgaaaagtcaggatggaattgaagaaccacatgaagccatagctctagactctactccctacatcccaaagaaaacctaatcctaggtttgaatctagatatacactatgtccagattcaaaccgtgtatgcccagattcaaatctaggattatatttttatttttggaacggagggaatagtagtttttttaacatactgctagctctggcccttgcttctgtcctccaagggtatgaacaatggggatactcccccatgccaaacagctgtgctatgtgtgataatatactctanataccctatctctacattgtaaaacgtcgtcgataaaaacactgcgcctcttttattgttggacacaccta

SEQ ID NO: 46544 - DNA, 364 bp, Oryza sativa
tgtatgcataagatatgttcccattacatacaggcattactaagcactaaaagttgtgcacttgttaataacgagctgagtggagagctatgtgcctattccattttctaaggtgatgtataaccactcgaaagcccatttgtcaaaaggtaaagctaatgtactcaatctatagtataaagacgatgcatactggggacataatgaacaacaggtctgtttgtgtttaaagtctaatttgtcaagtgactgcactgaaggaaagccttgcctcctgtggagggttaagtttgctcttctgtgttcgcaaatctggtgagctcggaatcctcaacacggcacacagcatttttatggatcagta

SEQ ID NO: 46545 - DNA, 382 bp, Oryza sativa
cgtgcaagcatttcatttaagcgagaatttgctctatgtgtgacaaaagctgactccaggcaggcttgaccttgtctttaaatccttggactctttgtcaaaaattctcgaatttaaagtttctcgacctgcgccggcattgcgggtttgacaggatgagggggcaaaggtcaaaaagccctgtggggagggcgtgaaagacttgactggggaaggcaaagtccaaagttattgtaaaacaaccgtcaacttgacgaaggtggctcattccgctcattactccagtgaacccctattttgaagggaatctcagccgcttcacggcaaggttagcgatatctctctaataacccaccattgattagacacgcatccttatttt

SEQ ID NO: 46546 - DNA, 287 bp, Oryza sativa
gtcgataagtaactgtaattataatgcatgcatgttcttccgtaagagcaaggttaatagtatagccaactactcagctccaagttatttatagacaatctaatagctcattcatacaataattacatactacactattaatatctgatcccacctgtcatacacatactgcattttggagtccgggctataactgacaccaaatttatagtccgctgctcttctctctctataattatctccttaaaataatgtttgcagctggcttaatagctgctatatgacct

SEQ ID NO: 46547 - DNA, 413 bp, Oryza sativa
  unsure (1)..(413): unsure at all n locations
agcttatattcaaactcttatcatcaangtctttaaagacatttgccaccaacttaacggngaaatgaaagaaaatgtgacggcaagggcatggaagggatcaagttaaatatcacgggtataaaagggattgagtgatttttcaagggtatacaggaaatttactcctataaatcaaatacaatgtgtataatttatatcaattgttcatcactatgagcaattgtgtagctcgacatacatgtacaagattgtaccaaatatgatatgatgattagagtgggaataattttattttgctttttgggctttcatgtgatcctgttgcaacatacgggtatttagctagtttgtacaaatatatgcaactattagtgtttgaactttgaaatctgatatttgccatttaatac

SEQ ID NO: 46548 - DNA, 414 bp, Oryza sativa
  unsure (1)..(414): unsure at all n locations
taatgagtacaccaactacaccaattataggcatatnttttaatactagacctaacatgtataatatattagctataaaatcgtcgctaatttcggctcggctttttttctcccacgtatttaattaatatagtgtttaaattatcttgtaacatttgtaaagctatctcatataagagccaataatctatatatattataaaattggtagtggcttatactttgatcgtgtacggacctatatatattgtaaaantttcaaataagatgaactgatgtagttaggaacgaaaacacatggctgcgcttattttgagaccgaggagtatatagatagacacgatgtgacaacaccaggggctgtgaccggctgccaccctccatatnncttacattntcttgctgtacatctct

SEQ ID NO: 46549 - DNA, 361 bp, Oryza sativa
agctcctcttactgaaacgcggaaagattgttcttatttattactaccaccgaactcagcagccactccggcggaagcatgaataatgcgacgggcgcacaaagagaaataaaataggggatacagattgcagcatacagcatttaatagtcacttcatggcccaaagccatcttggaaagacgatcctagagctacgcagcaatatcattacggggcgagaaccttcacgaacctgccttaacccgaggcccaccatgatttgtaccgaactggcaacccgacctgggtcccagctcgttccaggccaacccagaccagccatactgaattttagaagctgagcacaatttaagaagtaa

SEQ ID NO: 46550 - DNA, 205 bp, Oryza sativa
  unsure (1)..(205): unsure at all n locations
agcttaaggtcaagagaaatatcttaaacattatagtattacctataggtaaaaagatgtatgcatgtgggtccaattntatgattattgtgtatctcatcattgatgatgcctttaggccgttacattgttatatttgtattaaaaaaactttaaagaatctgtgatatccctgacaattacttttattcttgagtaaattgca

SEQ ID NO: 46551 - DNA, 426 bp, Oryza sativa
  unsure (1)..(426): unsure at all n locations
actcaagctatgttaccggtaataaatcgggtactgatgtatcgcgtgttatgctcttgtatgattataatttcgcatcatgtgggtaaagtgtacaaactctgcagagttaaaactaatcgattagtcgtgctcgcggtcatgagcggcgtgtggatatgtattgagtatagacttgtgtttattctccttaatgctgaaatttaccttcaaattgtgatgagatttgagaatgatctccttgctgccatggatggcaatgaggtgaatatttatacatgattaatgcctactttgatgcccatatgctaagtactagcttgctgaaattttatttgaaagcaaatccgctttgaatgtgttatatgcacataaaacttgctgtatgctaganagaaccatactatgcctctcttgaatatatac

SEQ ID NO: 46552 - DNA, 455 bp, Oryza sativa
  unsure (1)..(455): unsure at all n locations
agcttgctntcttcagttntcgntgcagtatttactataagctgttaagttcgatcaaaatcaatcttacatttaagatccaaaccgatgtgatgttttgttaatcatccaaatcgaaatcgagacttatcgtcagctagattagaagctaagcgtggggctatacgctggcgttttcatcagttggttctgaaggttctttcagtatcaagtgtactgtctgcatcctgcagtgcagcagggaatagagttaacctctctctaattattcgtcctcctttttgcaaggatttttttctgtcttacagatgaactcgggtgaatccaaaagaaaccaaattgatcgatcgatcaagatcaagtacagtaattcagtccaactccaaccactgtgtattgccactccatttctacaattctacagatgcacaaatctctatttttctttcatttcg

SEQ ID NO: 46553 - DNA, 446 bp, Oryza sativa
atgaataaagaatggtttcattacaataaactgtaattatcttgtagaatcactgcttctatataatacaggcttctcagaaaagcaaggaaacatggcagctccagcttcttttgacatatctacagaatgggatatctgaacaatggcagaggataccttctgttattgctatttttgccgcagaagcatcattgacactacttgatagctctcatactcagtttgctacaattagtaagtatttgatgcattctgcctctgtcaaccttcaggtgcgttatgtttatttacacctattaactagctttgaataatgaacacagcgtcatacttatatactactatttgttgtgactgcagagcattccattatttccagcattgtttatgagtaatgctgtgcatttcaaatctgaccgcttgtggatgctacagttgttata

SEQ ID NO: 46554 - DNA, 422 bp, Oryza sativa
gcatgcaagctataagacaagctagcttgcctaatctacaaattctgaccagcatgggacatctcagcagatgaagcagctacatatatttcatcttaatatatctatcagcagaccatagcaacaaattcttccatacatcaataattcaatatccaatcaatcaagatgatgggtggctgctgattgtcgccttgagttaatactcgagtgcagatccttgcaattgttagatactggtaaggagacaagatagcaacacatgtgtaaaaccactgtgcgattggagaaacagaatggatatgacattctagatttgacagatgtttccgataattggtaaatatgaaagcttactgagcagtgctgaaagaaaaatatttaactcaagataaagttccatgtgcataccgtttacttta

SEQ ID NO: 46555 - DNA, 472 bp, Oryza sativa
  unsure (1)..(472): unsure at all n locations
actaagctntatagtactggttgtctggactccacatagcacgtcatcttcaaacagtgaatgcctgatatttatatttgctcctccctttcatatagacacttgctgttagatcccttcatcgcattattagctgtttggcacgatgtacaccatgagaacttttgaattttattaacccaggatgaggattacactcaactgcataaggtttcaacatcaacttcatcactattggtgtgctaatctggaaaacaaaatgaaaattggcagtacatgagaatgtgtcaaaaactctgtgctcaaatattttgggattaaccatgcgcattaaaataaatttaccaggaattaccaaggctactattgcctatgcacattctggtatttcattngcacgcacggcattgatacaacccatacaaagacgactgaattcaacanagatggcgaaaagatatagtacgttctc

SEQ ID NO: 46556 - DNA, 437 bp, Oryza sativa
  unsure (1)..(437): unsure at all n locations
agcttggaggttagagatacacacagnggtacagagtgtggtgtgtgtgtgagagagaaagacgacgacgacgacttggcttgaaagcaatgcaagctcctggcccggccgcctgagtggtgtcgtggtgagctcgcgcgcgcggtgtccgcggaagccaccgcgcgaggggtcaaaaaaaggaggaagaagacgctcgcgcgggcgccctcgtctcatcaacatatccctcgttccacggcaagtcctcactcagattccctgtaccgtggcagcgacgtacgtagacgtggtgctagtgctagccagattgagatcatctgacgtaaagttagaggacgtggttactgatacatgatcctatcggatccatatattagtgatcatgtcacggagaaattcacgtcggagaagctgctttcatgcttattttggtg

SEQ ID NO: 46557 - DNA, 380 bp, Oryza sativa
tatgacttatacgctccacccgttgggtagtctacatactgtctagtaccagataagactctgagtgaaacttgcttccacaagacttgcaattcaaggcgtagtccattgttcaagttgtgagtaagcgtagcttgaagttctaggtggatgttcaatcctaatcgggctctatcgaaccactagtatataaacagtacattggaaaatgcaaatctcactgggattttgagatttaatgggggattgttggaattaataaatgggctaaggcccattccaagattaattctttagaaaatcacaaaagcccacctcatgagatggcatgcatgtggagtttaatatcaccttatttattctaggagagggggacctcc

SEQ ID NO: 46558 - DNA, 439 bp, Oryza sativa
agcttctaccttaaaagatggttcaatggttttagttctgcataaagctaattttattgagcaagtagtaagttgaaaacatagcattgataagatagcataatctgaaatttttgggcagtaagcaagtaaatctgaaattgaatcacaaatgagcacaaccggtgctctcatcgccatccatgggctaccgttgcccaaccatggattccaaatataaatatcaccatatccatgactaaaccaagccatttaacacaagtttgatgctaacataaattgactaacacatcaagcgatcgtcctgtaactatgggcatggctattcgaatagttttattctgataaggtgtacaactttacccacacgaaataaacaaggatcaaatgcttcacacgcacacaggtgtgaccaacaagtaatacaagctcataacat

SEQ ID NO: 46559 - DNA, 398 bp, Oryza sativa
  unsure (1)..(398): unsure at all n locations
tatggactcttaatggtttggtcccacgttattattcctatcgagatgtcgggaatctctaaaacaagccacgtatcttatccagtccgaatctgatttgggttttgggccttgtaattgtgtcgtgggcttagcccaagggggtgtgcgccctatggcaaccctatgacgtccctaatcatacttaatcagtaaccgtcatcatttagagtcgggttttgcttagattaatctgtcaagaacagtttcgccgttagatcggtttgtaaattcgtgtgcttaatcattcatatgcaaattggttgcaatctatcttgttcttgcttgtgttcttcgattcgcatgtanggattagccttcttggtgaggtcaaccggatntcggcacggttgataacc

SEQ ID NO: 46560 - DNA, 453 bp, Oryza sativa
  unsure (1)..(453): unsure at all n locations
agcttctcgctacanaaacagaattttgcttgaggaatttggcgattntaaatttgccgaacccggctaagcaggggagaatcggatgtaactttttttgtagatgtccgtggatatattataagcctaatttcgagtccgtatgaaaaagatatgactgttttaaggaaggtcactcgaatcagggttctatttcctttctagtggcggcaggatacaaggcaactcacaaaagctatcggcaacagatcaaacacaaatagaaagtgatttggtgggtgactgcgacggtggtgacggtggtggcaagaactcgaaactctaatcgcctaacactaagaccagcaaattaacacaaccgatgcaatcgaaaactcaacaagccttaactaagcagtactagtataaaagcacaatggtctatatgatcacgggagaactaatctactattt

SEQ ID NO: 46561 - DNA, 468 bp, Oryza sativa
  unsure (1)..(468): unsure at all n locations
tgagctgaattatagaggctctattgnactatattgtatactataataggaagagagtcgagtagaagaagtcggaagaattccggagttgtcggtaatcttctcctatttcttttattctgtttattactctgaattcaatataatattctttttgagtaatttagatttatcttgtgagaattatctcttgttagttcctaaatagcatacgggattattgttcactataatcaacttaaatatagtgattgctttggtgagttataaacactaaagtagatattaattgcttagacatggtgtttaggtaattgttatccagtaattgctgcgtatcgcacagtacgtttgaggtagatgtagaggtggtgacagccctcgcgatcacttatgtcctccctgtccgggtacatagtagagcgacatctgtgaacagcacgttgacagtgcctgaattattgcgtt

SEQ ID NO: 46562 - DNA, 450 bp, Oryza sativa
agctttccatgaagtacttgctctctcatatcggagttcgcatgaggtcgtggcggccgtcagaagtttgtgctgtgctgcagtccgaatccatcccgtgcgattcctctccccatttgataatctccattgttcctgatagttgagttgacgtgcatgatcgcgggtaataggaccatgaagttgtacttgtggaagcgtggatgtaccgttggtgttgatgtcctcatcatcctccctttcttgcatttgaatcgtcctcgactcaagttcatcttctgcgcccaaatatggcttcaaatctgcaacgttaattgtgagactaaccccataatctgcaagcaaatcaagcttatatgcattctcattaattttggctaacactttaaatcgaccatcagctctaggcgtcaattttgattttctcaagtcacgaaaccgttcttttcg

SEQ ID NO: 46563 - DNA, 237 bp, Oryza sativa
tgctcgggcagctggaggaggaagaagacatatatatattgtgtgggactctagtcccgggtggtagcaccaaccggggctaaagatcaccgggatctttagccccggttggagcttccaaccgggactaaggtcccacccctgtaatctgtcgtcttcctcccccgctgctcgagcctgcctgagtcttcttcagcgtcccccaaacatctcggcgctatcatggtcatagccgtt

SEQ ID NO: 46564 - DNA, 455 bp, Oryza sativa
  unsure (1)..(455): unsure at all n locations
tgtgttntatccagaaatcgtgggcttgctcgaagaggatatagacgactttccttatgtggaagctcgctatgtctatggctctccaccaaagctcattatgcttgatgacaaaggcgaccagaaggagactataagggtaattggagagctgtcagaataaatttcttgttatctaagaggatgatgcagatttctctctgaacctaattaattactggctgactggcctcttcactactgttgcatagtttgcactatcattttattactgatgcaataggcaacgggttattatattgattttgcatgcatactgcttggttgggatccgaaagtagttatatggacataaatcangctagtgcactggtaggagtgctatgttgaggttgcagtatcacattgagcactagttcagtactaanaagtggctcggatcttcagcacacaca

SEQ ID NO: 46565 - DNA, 426 bp, Oryza sativa
  unsure (1)..(426): unsure at all n locations
agctntagatgttattgactcctctaagtttactgaattgnaccatatctctcagtttgccttacataactgtgtattggcacagttttgttatcatgtaccagaagactgatgaattttttttatattctgcaacatcttcataagttttgtgtcacctcaattacgtccaagaatttgcagacatgcatatatgtaaaagaaaattcaacacaagctacagatgcaaagtgtatcttaaaagagagagaaagtggatactctctccgtgatacatgctaatacnaattaattggactgtatatctagattcattgtagtagaatgtgtcacgtccactcaaaattctttatattatgagacggagggagtatattgcaacatctataacaccatctactntagagatagcctaaagcttgaatc

SEQ ID NO: 46566 - DNA, 368 bp, Oryza sativa
gactcacttgtccctatggatctccgtcatcttgttccacatctcatatgcggtctcaaggttgctcactctatcgaactcctcttggctcatagagttgaacaaggcattcatggcttgtgcattgagttggaggttgcggtgatcaatctccgtcaagggtgtgcccgtgatggcaaagcctacatacacaatactccaaatatggaagctcatagctttgaggtgagtagacattttaattttccaagtggagtagtttgtgccattaaatatgggagccttccctacatggttcacctcgttcgacatcttctctctatgcggtgaagcccaatcaagagagaccaagctctgataccacttgt

SEQ ID NO: 46567 - DNA, 444 bp, Oryza sativa
  unsure (1)..(444): unsure at all n locations
agcttgcggaagcgtgcagttgttactatcatcatatcttggaggagtattccaatctccaaattcaccagtgactccaacaaaagcctcggttaataacggcataccctcaaacacaggattccggttcatactaaaacggttttgctatatttgtgtcgccacaaaatctcatcgattatagtcgatttttcagctctctgatttgctttagattagcactggatattatgatttgcgtatgcgttgtttgagatctgcgcccgactacctgcaatctatcatcaatgtattactgatccagagcaaacacaaagtaacgtgctcaactgatcgatgtattactgcccaaggtcctatcattaacgtgttcaactgagcaaacatgcaactntattgctgaattatatatttatacaaatntacacagtatgtacaccccac

SEQ ID NO: 46568 - DNA, 314 bp, Oryza sativa
  unsure (1)..(314): unsure at all n locations
tgcgtgagcgagcaattgtttttatagttttttgaattaagnatagccgcatgaaaaatttgacaatgatctggtggaaagtttctagattgccaaacaatgcttagaatataagtattaattgagatccttgtaccattcaatgggagcctacagctcaaatttaatatcgtgtagggtttgaccataccaaagataatgtatactttaaatatatataggtagaaaacttttctaacagtgaagacactaaatattgacataagttagtgcctgcaaaattacacaactaatattcctgaaacataaatatt

SEQ ID NO: 46569 - DNA, 426 bp, Oryza sativa
  unsure (1)..(426): unsure at all n locations
agcttcagggtgttggtgatctttcacgaatagtttcgtctttttagaanaaaacgcgaatattatggaagtagctaatatcaaatactaattattagaaggggtggcttcgaacccaagtcccactaccttgtcgagctaatatcaaatgctaattattagaaggggtggggcttcgaaccaaggtcgtctagcccagtaccttctcgagctaccggaagacctcaatttcgtctttttagcatttggcacttgaagtgacataaatggcgccgcttttgtgcacttcttgctgagaagagcttcttgtctacaagtagatcatgcatanttgtagttgcatcgatatagattctttttttttagattggcactttggggggttagtactcaacggaaaccagtaatcgccggtagaaaaaaaat

SEQ ID NO: 46570 - DNA, 411 bp, Oryza sativa
gcctagcaagtgtgagatctgggtgtccgaagtcaaaatcttatttcacgtgatatctgctaaaggagttgctgtggattccgaaacagtgaccgccgtcaccgattggaagcaacccaaaacggtcactcagaatcgcagtttcttgggtttggcaggatactaccggaggttcatcgagaacttcttcaaaatcgctcgacccatgacacagttgttgaagaaagaaaagaagttgtgtggagcccgcatgcgaaaggcgtttaaactctaaggaaagctggttcttgcagtgtaatctgccaatactgaaggactcatgggtatgtacgcttccgccaagattggggcggctctgctgacggcatgtggacctttcttacgtactacactctgaagcactacctacca

SEQ ID NO: 46571 - DNA, 408 bp, Oryza sativa
agcttgccagattaccgatcgagggtggtggagttgatttgtgaaaactgaaatggcctatatttatgggaggatatgatccttctatgtggcatgaggtaatcctgggtcggcttaggaaaggctttgtcacgaacctctgacaccggccattgtctggagtaagttcgtgtcttgtgggtaaagtgtacccctctgcagaggttaactaactgttcgaacagccatgcccacggtcatgggcggatgtgaggtggttcccgttgcgtagatttgtttgcctgtgctttgtgaaaagttgttgtggattgggaatcgtcgccagaatcagcctatgtggcagatggatgacctgagtggtcagaaacgaatctgtgtgattcgggatgtctacgggcatcatagact

SEQ ID NO: 46572 - DNA, 417 bp, Oryza sativa
  unsure (1)..(417): unsure at all n locations
tcaagtgctcggaactntgtttcgacggatacacttgtgtatgcctgcggccatcgcaatggacctcttcggcgacccggccaccgtaggagtcagccccaccgagatcctcgaggaggcccgccgcgagatctcactgagcggcgctcgccacgggaagaccatgcacgtcttcgctcgctacgtcgtcgcgcacctccacgtccagcaagatgacccgggcacccactaccaggacgccatccgcttcatcgataaaggcgctggagaaggttagcgaagccgcgtggcatgccgaggtggccaaggacgccgtcgacatcgccgagaccctcctcttggacgtctgcggtcgagaagctcgtggaccaggctgctatggaggcaacctggcgctggccgtacgaggtgcccggg

SEQ ID NO: 46573 - DNA, 411 bp, Oryza sativa
  unsure (1)..(411): unsure at all n locations
tgtattgtactataagtccttatcgacaggngttagtaattaggagcataataagatgcatgtactcaactttgtgcagctgaaatgtgcaacgagggggcgtatgcgacactgtttccagagtactctgatcaattcagtgtggaattgacagtgacacggtggcaggatgcatgtcctaaatgatggcattagcttgatttttgtttttattttccgctaggccagcgacgaaacgacggccaacttcattaagacaaagaagagtttgaatatagattacgtacaacaaacaaggttgtgagactacaggcctaagaactctctaattacatcaaaccagttaaaccaactgttgaaattagctgattaatttcatgaagcagnagccctgctatttctcatgcgtgc

SEQ ID NO: 46574 - DNA, 453 bp, Oryza sativa
  unsure (1)..(453): unsure at all n locations
taaggaagctcatgacaacctcctttccactactcaacatggagctcacatagatgttggcatatcttgtgatttgcttgatgatagtgctacttgccatattgctcatgttgcatcatctagcatttatacctcttgtgatgatcttatggatatgcctagcccttgctctagttctagctcttgtgtttctatttgtgatgcctcacttgttgttgagaacaatgagcttaagtagcaagtggctaagctcaacaagagtttggagagatgcttcaagggtaagaacactcttgacaagattttgagtgagcaacggtgcatccttaacaaggagggacttggattcattccaaagaagggtaagaaaccttctcaccatgccactcgttntgtcaagagaaatggtaagtattgctccaagtgtcgtgagggtgggcatttggtgagtga

SEQ ID NO: 46575 - DNA, 462 bp, Oryza sativa
aaccaccgcggctgcagctgttagttgtacagatctgaagaatgatattttttgctattaaatgtaacagttttcctgttgcaaaaaacagatagaaaactcgcaaataccaagttgtgttttcattaaaaaaacaagttcggtgattgggagtagagaagaaaaccaaagcttataatgtgaatgtaattgcagagaatgaaattgtagtgtaagcattgaaactgcaagcaaaacactaattaactcgagtgttacctgtgttttaattccattactaataggatccccttcactgaccaaaacttatagtcaaccttgagcaggatgagctgctacagacccatggaagatgtgctgcaatatgaatgaccatcataagcaaggtagagctacttgttttttcttcaatttagcgagtcctacttataagtgtttaggaaatactgcctcccacaccat

SEQ ID NO: 46576 - DNA, 381 bp, Oryza sativa
  unsure (1)..(381): unsure at all n locations
gagagaaacacatgatactgacaaaacctgggcaatgaaagtgacgatcatgcatgtggggtcggcggcaacacttgcgacatttctggcgcttcgccatgctggcgtggacgccgtaggcactgcntcactcagccggcaacaacacgaaatggcagtccgcacagaattaactacaggggccgcggcgagcgaggagatcaagatgggagtcgcgcgcgactgcttcaacgcgtggacctcaactgaacccgcggtttcgtatctcgctgccactgagccgagcaacaacgcttcttgcatgtgccggaggcgggtgccagccgatcatcgtgccattgcaagcctgagttaatcacatggcccaatttctccgagaga

SEQ ID NO: 46577 - DNA, 447 bp, Oryza sativa
  unsure (1)..(447): unsure at all n locations
agcttcaatttgtacaatatataattatatttctcatatacaattatgtaatgcactttataaaaaaaatgatgggatttctatcctacatccaattctatgattttcgatactgttagacaaaaaagatcttatacctagtatgccgatactgataacctactcaggagaagactccactacagctgccctatgctcaatgcacatagcgagctagcaatcaatatatatattgtgctcctctatctagctacacactgctattattgaaggagtaggaatagctcattggccaacaattggcgctagatctcactaagcttagtctggggaagaagaactacgtnctgatagaacaaatntgttttctttgcaaaatagaaattctgattatatatcatgattatcattgaacatttatcatagcctaatcctgttccagtcgat

SEQ ID NO: 46578 - DNA, 372 bp, Oryza sativa
  unsure (1)..(372): unsure at all n locations
agcttcccggtttagctcgctnttatcttttccgctttatttgtaatctttcatatttttgcaagacgtggatctgtatgtcaacaattgtcgnttgtgtaccctggctggttctggacaggggtttaatacacattcagcttagaaattctggttcgtgaatttctgggcgtgacattagcttaattacaacctgctattttacttgcttttatttacgaatttaaatatgcatttatctatattcatcagttattgtattctagaacgaaaggatactaattagccatgttttgtgtcatgttctttttttcaacttactcattacattgntactgcagaatctccgtatttatagaaatacggtatcag

SEQ ID NO: 46579 - DNA, 409 bp, Oryza sativa
  unsure (1)..(409): unsure at all n locations
ggtatagatacanacgaatagacagactatcttattgtgtgcacctagcattattgccatgggtgggagctggacgaagcttgctggaagctcccgggcaccgaaacgaaaaacgatacccaaaggaaatgaaaatagaagtcaggaagcgtgccgaactgcagatagcaaaatatttaggttgtaaataaacatatttagcttgtaaaatttctatcttctttcctggttcgcacaggcatcggtttatcattcaagccgtgaggtaaaaaagccatcgaaatttggaaaccaattaatatgtacggatcatcttgtcaaaattctactcactctgtcctatacaaacaaatctaacanatctactactagatgtgacacattntagtacaacgaatgatgtgtcata

SEQ ID NO: 46580 - DNA, 259 bp, Oryza sativa
cccggatcttagagacgactgcagctgcagcttaatttcactaaaaaatcttttttgtattaggttgaacatactacaacacaacgtatagattactctcaaagttactttaataaacttaaatatttattacttatatatatataccgcacatcctataccgcacccaggtgcgtaataaataaaatgctccccctcacatactacacccacctgattggatgaactagtcctttcacaacgacattcactctcttat

SEQ ID NO: 46581 - DNA, 390 bp, Oryza sativa
  unsure (1)..(390): unsure at all n locations
acacataacactcggcttcatcangcgatgagagggaatatttttatcttctcttatgcaggaatcgaacaaagctaaccgcttcataaacctgactcttaatgttgggtactgcaacatgcgcttccatccctttattttctctatcagcttctcagatgcctgcaagaatcaatgatacgataagtcccattaggcaatcattacatatagctggcatcttgtacccactgaagagtttaacttgtatgttacatagacgcttacagaacgctgaccatcaataatctgacatgaacaagcatgactaacataacttgtctgagaagcttccataattgaacatcaagtactaagataatcaataaagagaatattctatgagagagt

SEQ ID NO: 46582 - DNA, 454 bp, Oryza sativa
  unsure (1)..(454): unsure at all n locations
agcttcgacaagtactacaacagcaagaactccgaccccaacgtcctccacggcgccctcgtcggcggccccgacgccaacgacgcctacgacgacgaccgctgcaactaccagcacgccgagcccaccctcgccggcaacgcccccatgtccggcgtcttcgcccgcctcgccgcctcgcccgccgataacacgccggagtacacgccggcgccaaatgccccctcgccatcaaatggtaattaattaaccaaatcaacaatgcaatcgaacttgtaccattgagatctcctccaagtgatcgtgcgtttctttgtcaggtgggtncgccgtggagttcgtgcacacggtgacgaacacgtggaaggaaacggcgtggactactaccggcacgtggtgacggcgaagaacacgtgcggncacgccatcacctacctgaagctgcagatcaagg

SEQ ID NO: 46583 - DNA, 434 bp, Oryza sativa
  unsure (1)..(434): unsure at all n locations
tatgtctagtcaacatctgctntcccctcgttatcaagctaccgctatcgccccctcctcccaaggctcctctctatccttctacttttctagccctctatatcctctaccatccctcattttccctaatgaggctaccatggagagacaaaggaaggcagtatagatggtttcgcgtaggagacttcttatagctaacatgtccctcaccgtcaccaagaagaaggtgaaaaagcgacactgatgtaaataaaggtgaggccgatgggagcaactagatatgcgaggatgttgcacatcacaccatggtcttcgatgttacacataatgtttacaatagtacaaacacagtctcttttgtctgaaatggtcgatgagttttaatggacagaatttttcttaacgtacatattgatttttggtacgcatgtttt

SEQ ID NO: 46584 - DNA, 447 bp, Oryza sativa
  unsure (1)..(447): unsure at all n locations
agctngctngagaggggtatcgaaccggtctccgctaaatggccggatcgatcgaagttctggtactatgctcacggaggaacgctcaacccagttgatggctccctggtcttcagcgatcagatacgcgaggctgcgcgtcgactaatggacacagtggaagcctcttctcagggcacgttccgacccgacagagagaaggacgagctgtcactcgccctgcagactctagagcatccaggacgaacacgagggaaaggggtgattccttggaagattggattcaaggaggacatccacacgtataggagtcgaatgaggagcaagagagataccgaggcgaagattgcagatcttgagtacagggtatcgagctacgagctcaccatgcaagaggaggtggcaagatagggtgatgaacgcatggccgcacatctgtcccatgat

SEQ ID NO: 46585 - DNA, 321 bp, Oryza sativa
agctgatgaagacctctgggctcctccatctctctgtattgttgatgcacaagatgggcgcacattacatagatggcgccgcgccgtgacggaccatgtttttctgggttctctggcggcacgaacgacataatgtgctctacgagatcattccggaggacgccgatcccctgctcttctctggcctcaaacattctcttgctgctcaagctcttttgcttaagaaacattgcgtcgaacaggtggcaggcgacgcgggcactatcgcgcaagtaacgaagagccgactcaccagctgcaatgcgaggttctcgcttaatc

SEQ ID NO: 46586 - DNA, 447 bp, Oryza sativa
agcttctgtttcaagtgcatcttcatgactatatccattgcctctgcctcgctgaacagtactacctagttgggaaatacaactatcttgtttgatctaaatgcttatgtctatattatttgattttcttttcttctttaacttgtgtttgtaggtgatgcatgatgcttttggagttcgcttacatgctgggaagcaagcagaggtttgtctttctcatcctgaaaggtttcagccttctgtttgaacaggatataatagaatgaaaggggtttccatggcagcttctgattgtatcttcatggactaataaacagaattcgattatctatagctggcatttaaatttttgacatgcagtgttggttgttgggctaatatgtcagctataatattcttgtccttcaacttctgtttttgggctcataaaatttgatatcttaatgg

SEQ ID NO: 46587 - DNA, 454 bp, Oryza sativa
  unsure (1)..(454): unsure at all n locations
ctaataaactagtataggaccaaaacctgttacctatcttcatgaatcctcatatcaaaagagtcaagctcaaatcttttgggtattgtgaaagttggaagatcaggtgtagcatgtgtgtctcgaacttcagttatctgtgaagtagctcttgtttctgctctagttgttcgcacagcttgcataggtatttttaccttgtaagcaccttcttgtcttacaactaatcttcttgcgcgaacaggtttcttcgcttgctttgaaactctatttgctgctcctccagttgggatacttagttcattgcaatgtgctgatccatatgatccaagaagctcattgcattcatggcagaggtattccactttcttggaataaatcctaacaatgccaagcagaagcagtcccaatactctgtatgtgggtttgtcgtgtcatcaggcanaatcttatc

SEQ ID NO: 46588 - DNA, 429 bp, Oryza sativa
  unsure (1)..(429): unsure at all n locations
agcttgtcagttagctctttatgccaaaatttacaaactttgaggggaaatggccctccaaaacttgattaaatttagaaaggtttgacttaggacgttcatctattgccttttatcaataactctcaacacatgattcctatatcttgagactcatgtgacttgatctcatttgaacatcaacaccattttcatttctggagatctacttctttcattctcaataacattgctagtccccgtgatctgattatcagtctccacttgttgaccaaccgatcgtatataaaatgatacgaataaattgatgaatattaaccgacaacacaaatattatatattcacatcaaaataatatatagaaccacattattatgtatatataaagatagagtggtgcttatagcttgatctctgtacattntatgc

SEQ ID NO: 46589 - DNA, 364 bp, Oryza sativa
  unsure (1)..(364): unsure at all n locations
tccagaattttagaataacaataaacacaacaaatattgttctacatgactgccaatattaaaacaaatatccattcaccttggatagccaattaagatcggcagtctcacccctcagaataaggaaagaaagtaaccatgagcagcaatgttcaatgaagttctttggctcatccgatttaaagccaaacatttctttcacctgtatatgatanataaaatacagcanaacatatgaatgattcanaaatatgatgaaactgaaagatttacaggcaacagcatggatcgaattactataaataacctgcttctctgacgactcttcatcaagaaaagaacgaaagcnaaacaacacaaattg

SEQ ID NO: 46590 - DNA, 443 bp, Oryza sativa
agcttcatcatgtctgttcacagagtagttattgcacttcatgaacgtaaatgatacgatggctgtcactggaagcttacgaacaccaactagcacgctattgaactgttcggccatgttggttgtcatgtaaccccaccggcggccatttctatcgtatgcacgagaccacttatctttatccaacaactcatcttcaagccatttacgaggaccttcgggaatacgctgccttagtgcctcaacatccctctcaaatatctacttctcgtcaatctgacatatccttaggagctcttttgtctgatgcttgtccgcaccggccttgtggaaattagcactgaagtgcctcatgcaccaccggtggtaaaccgatggcaatcctggaacaggagtcatcatggcattcattataccagcatgtcgatctgagataatacaaa

SEQ ID NO: 46591 - DNA, 353 bp, Oryza sativa
  unsure (1)..(353): unsure at all n locations
ttggtcccctaattgacaaatatcatatcatggagggaatctgattggttgatcttcactaactcatcactgaatctgcattttggggggtatccttatcagtatgaacaaatgagcaatcattattacctcccatgtgtaaaaaagatggctcctacgccatcccagtcaatattggccacttcaaaatgtcatttttcattcaatttgcatcgttctgcttggatgggattgaaccacagacacagtgacagtgaaggtctttgaatgaagcangccatggattttggtggtaacatttaccgnctccaatgcacatggcttactacctgctctctacgcatctatgttaa

SEQ ID NO: 46592 - DNA, 378 bp, Oryza sativa
  unsure (1)..(378): unsure at all n locations
agcttncactaaacctgcctaccggcgttacaaattcagtttgtcaagtacaaaatcttggatcaagcaacgcggccaaccaagataaggcaaaaacccgactgctcttcccaaaatatggtgatcgtgcagccactgccccgtgtagagggagcttctatcggtgacaccattgttgtcacctttcgttagcatctgcctcgcgccgccgncgtgtcgctcgtggagctcgatgacgcgatgaacgatggggacggggtggagttcggtgctgaagaagacgatgtcccccgcgcggatgttgtcgtcgccgtcgccgtcgttgcgccgctcccgtacgatgagcatgtcgccccgccggatcccttgctccatgct

SEQ ID NO: 46593 - DNA, 457 bp, Oryza sativa
  unsure (1)..(457): unsure at all n locations
ttatatagctggcccgctgattnttttatataggcatggtgctgnttgggtttntaagcaatngattggatacaatatcattgctttttgccacgtaagtgtgcatttttattgaccaatattatggcttaggctgattatatattgtggtcattttctaggcgattggtaaatcctttatgagtttatttactcggattttacaccacatatgccatatatttccaggtgtggtgaaaccatgtgtcttctagggacttaagcacatctgttaaagcagtgtgcgcatggcgtatgcccaatactttggaaatttctttattcacaatatacaagcttctntatangctatttgctatatcactcatcatattntacaaagcagntggtatatcactctgatcatgttatntggaggattcacaccgcatatgctatatatngatatcaagtcact

SEQ ID NO: 46594 - DNA, 400 bp, Oryza sativa
  unsure (1)..(400): unsure at all n locations
agctttgccgattatattaggagatcagaatttaatgcagnctatctggtgcgcttatacatattgcgctaatacagaattacattgaaaccctttatgctagaaaagcttcaactagggattaaaggtagagaagatagcaatgatcctataggcatataaaaaatacaccgtgagtttggccttatatacttctttctgtagggagatttttcgcatataaaacagggctttaccaagtccaaatactactaattaatatattatcactactattattccatgtccaaaaaccttgggacaaactgctggggtcaactangaattaaagatgttccggccacaccacacgtgaatatgtgcgggtcgtgccaaagacaagcagcagaatgtttctgcg

SEQ ID NO: 46595 - DNA, 429 bp, Oryza sativa
  unsure (1)..(429): unsure at all n locations
tgatcgggaacaattctntntctgacagttgtgccaacatctgctaaccttccttcgtggcgagacgcaggaactccgataggattagtctcggccatgtaatcgatacagaactcaatggcctcctcggtcgtgtaaccttcaatgttgctcccctctggttttgctctgttccgaacgtaggacttcagaattcccatgtacctctcgaatggccacatttctctaataagagttggccgacatatttttgtttgcttcactaggtgaacagtgagatgaaccatgatatcgaagaaagccagtggaaaatacatctccaagtgacacagggtattgacaatatcggcctgcaacccatctaggtcttctggatctataatcttctgaccgatngcattgaagaaggcacaaagctgttggatagtg

SEQ ID NO: 46596 - DNA, 369 bp, Oryza sativa
gcttgaactccagccagacagcagcggatagacgtattgcagaccaggaaaacaagcgaaaacagggtcggtgcgattcttcctgacacacctcattacaggttcattctagcaacaaagaatggcagataggcctgaggacttctcaaccaatgcgtatttctgcacgctatcatatcgcatcagaagacatgatgccgccatactctagttggcagccgagggaagagtacctctcagatccttactagctgccgcaacagaccgccaaaatagagtgcggacagaacaggttcaacctccaacgttcaaaaagcagatgaggtctattcaatgagacctgggtaaaaccatacaggctcattcagt

SEQ ID NO: 46597 - DNA, 480 bp, Oryza sativa
  unsure (1)..(480): unsure at all n locations
tgtccctgtgccggtggtggagctgctgcctctacgcgtgttactgttcacatgtgccgaacgagacgccgactcttgccgcaaccctcaccgccgccttcgcgccacccatgcatagccttgcatcatccccgccgccgatcccttctcgccgtcccccggcgccgcgccgcaccatcaccagatcgcgcccgccccccgccgatgcagccgccgcctcttaaccctagctcccgagcagcggatccgcggagccttcctccatacgcctcggatcgcccgaattcgcctcgcccgcgccggtatggacgaaacgcctctcccgcaaccgcagatcggagctcgaattcgcccgaatcgactctcaccagttgggtggtcaactgcanatatggggattctgngattgggtcagaggaggagaccccgcgtggggtttggtcttgatctgtggtggcgtggtggagaaataggagaaaa

SEQ ID NO: 46598 - DNA, 411 bp, Oryza sativa
tgcttatgtttgaataagccaacgagtactcttaagctgaagactccgacaccgcatcaaagcagtctggtcccatttggaatccaaacaagggtacgcctgctacaggaggaggtggaatgaacaaccataaggaccgcaagcgtaagtctgaggaacttgtcgcaaccgccactcactcttattgacagtgttcgtgcgtcaacacgttcaacaagatcatgaactctcaatgcctcgaccattctaactccaaccacgtgggcaaagattgtttcttctacaagcagtttgcggagcaatacaccaagactacacggaataactttgacgaatatacaaacacgtttaggaagaatgacgactgcgactcctcgtgaagatttctagaccaccgtgagggagttaacc

SEQ ID NO: 46599 - DNA, 467 bp, Oryza sativa
  unsure (1)..(467): unsure at all n locations
atccttaagcaccgcggctgcagctttgaactttctgaagacaccttattgttactttgaggtccgcgtcgctgccgggagaccggtcccgattcctgagcacttcgacaaggaagtgcagtattgatacatttgctctagataaagttacctgatatttggcacaatgttctgtcctccagctatgatgctcttgaaacccctttacatacatggatgatattgctntaaaaacttaattacttccctagtcacaacaaaaactgagcgttcggctcatcaccaccactgtcgtccccaccagcccgagcacatgtggtagtgtggtagcagccgggagtgaccgcggcatgatgtggaaacgtcagactatgtcgcggttccgcggaatggtcaagcggaatcaaataaaactcttgttcctaatgctgcttatgcagcctgtactatgctatatatgcatcact

SEQ ID NO: 46600 - DNA, 475 bp, Oryza sativa
  unsure (1)..(475): unsure at all n locations
ngaaaagatagtttggtccttcactcacatggagaagctttcatgggttcgtaagctgcagagtctcacacacctcgaactcaaggggggaacgtgcaacccgcagaatctggaaaaactgaaaagaaaagtcagtgaacacagcaatggtattactttcacgctcaaactacctgagaatcaaagtcagtgaacacaacaatggtggtattactttcacgctcaaattaccttcgatcgtcaaggataaggattgttgatgctgctcctcctgcttgggaggtatttctattacagtgcttctactatgaataaagatgaaaggaacttgggaggtatttctattacagttgcttctactatgaataaagatgaaaagatggtacagntgcttctactatgaataaagatgaaaagatggtacagttgcttctactatgaatatagatgagaagatggtatctctattacagtt

SEQ ID NO: 46601 - DNA, 455 bp, Oryza sativa
agctcgactaaaacctacacggttactattacttatcacacaatagtccagtttaaactaaggatgctcctgtcctaatcttcactctttggaggacttgttgatcatggacttgtggatgtgaggaatgacacctccaccagcgatggtacccttgatgagagtgtccagctcctcatctccacggatggcaagctgcagatggcgaggggtgatacgcttgaccttcagatccttgctagcgttcccagccagttccaaaacctcagcttgttagtactccagaatatcagcagagaaaactgcggcagtagcaccaacacgtccatttgcctgagtcctttgcttcaactggcgatggatacgggccacacggaactgaaatttgaacacgaaaaattatctgagtccaaattccacaattcactatagtggactctttaccctcacttata

SEQ ID NO: 46602 - DNA, 450 bp, Oryza sativa
  unsure (1)..(450): unsure at all n locations
agctntattaagacaaaacgatgagntttttctacagcacggaggacagctattgctagaaatgatgaaagtagagggcaatgcagggtttacactctacggtagacaagagattgagactgccacaaataacttcaacaaagcgaacatcattggggaaggagggcagggaactgtttatagggcggtattgggtggaatcgccgtcgcaattaaaatgtgcaaggagattgacgagaacaggaagatggaatttgtgcaggaactggtcatactttgccgtgtcaaccatcccaacattgtcaagttgctcggttgttgcctgcagtttgaggcacccatgcttgtgtacgagtctgtgcaaaacataacactgaaagagttgttggatctccaaggagcacgaggttccatgtcacactaagaacccgcctaagaattgctgcggaa

SEQ ID NO: 46603 - DNA, 435 bp, Oryza sativa
  unsure (1)..(435): unsure at all n locations
acgctttagctaccaattttttctattgtttccttgaccaaatacgtgtaatgaccgagattttttttactggtcgctaatatttcttgttctattagggaagattctagaaagtacgacccccacgaagagaaagattaaatcataactatccaatatattttaactagtatgtacttttaattagatcaatctcattaatatgagttgtctacaatataaattgaactaacgacataaataattgaaccatcttgaatacaaagaggtaagtaaaaactggagttgatcacgaaagctacatgatttggcaaacctattcaatggttcacctttgttagggcaataatgtgatagtttatatttggataggaaacttcatgtacncttatgacactaatatggactattttcatacaatattcatctatttta

SEQ ID NO: 46604 - DNA, 431 bp, Oryza sativa
  unsure (1)..(431): unsure at all n locations
agcttggctatatgggtgattntcagtccttataagtttttcaaatacatacttataacatacatgcatgcctaccatcataaaagtccattaaacttactataaacactctcaagccgttacatgggacttctaaaaacactcctacaaagccacgtggtacttaaaaaaccagcgggcccactatttaaattcattgaatctattatgattaaataagttttaacctccccctcagttaagttacgtatgtgccccctcctcccaatatgaatgtccaccgactcttccctcccatctcatattttctaactaatctctcttatttttcaactaacaactaaatatataaaaaaagtaataattagatagttattaatgcttataactctaaattaagtaatatattcaatttctatattgtttgatga

SEQ ID NO: 46605 - DNA, 461 bp, Oryza sativa
  unsure (1)..(461): unsure at all n locations
tgacatttgcatgtgagaaagatatgtgcttttctactaataattgccgagaaatgaagaaagcaaggaaattntactcgtaagtcgtaaagcaaatgttttggactttattatctatagtatgtcacaatttcttgtgtgcgcaaatacaatagcagcaggtgatgagtgtagttgatttttatttgctctgatgtactctgtcggntgtttcagcttgacatcatctctagcctcttcagtggaaggattgtgtgggagaaggtcagcccaccactgcagcgcgcggtgcagagtcaggtatgcagctcttcctttgagctntcataatgttcgatcgagtaagaaaccattactctcttatggctcagataataggttgcactgctagctatttcagttnttagggggttagatggttntaatgtatgaaaagaacatatttttacgtatggaaatga

SEQ ID NO: 46606 - DNA, 344 bp, Oryza sativa
agaatcgggccaatgtcacgcctagaaattcgcaagaaatttctgaactaatttgtgcattaaaaccctcggccaggaatcagccgaggaacacaaactgacaatttaatatacagattcatcaaaataacttaaacgataaatacttgcataagaggcacttagtcctcaccatgaagaaatctgcagcggaaaataaaatctagcgaagcttcagctccactcccacaggcagctcaactgggttctaagccaaaggtcttctacttctggatccttttcttcaactgaggtttgatgattattgcaagaatgagcatatgacatactcaacaagctacaca

SEQ ID NO: 46607 - DNA, 434 bp, Oryza sativa
  unsure (1)..(434): unsure at all n locations
ttctctttcttccgccatgaatgtgaactggttggttttatttggtccgagatatggctggagaggaatggggaatcggagtggtggacgcggggagaaatttcgtgaagtttttgagggtgggttggagcagattgatgaaacctagcttcgtcggcgcggttctgtactgtagcacggagtggggaatggcgagagtctcggcggngaagactaaacgacgtttggacttcggtgtttttagggtatcgggagtactaatgggcctgggcctgtacagtacttcagcccaattatgttttcagcgtggcctgttgtgatccctanggacttaggcgccttttgctttggcatatgtgctcacaatgatgcggcccgatgctgtaaaatccttttaacgcgatcaataatctttgaattaatatgatgacatg

SEQ ID NO: 46608 - DNA, 444 bp, Oryza sativa
agcttcatgagttccaacacgcatgatattttgttgtgcttcgacttgcatccatcatacaagggcatctgacaatcttccaccaacttactaaacttctcaaaatctctgttgttgtcctttgcatcttcaatgtcatgcaacattgtagatagacattgagtgtccaaatctatggcctctccacctaaaggagaaggtacgaacatgccttctcgagctacggcgccggcggtgttctctacatcctgatccaacacttcttccgctgtgacatcaggcgcctcttgctctccatgcttggtccaacagatatatttcttcatgaatccattcattatcaaatgagcatgcacttcatcgctatcttcgatcatctggtcattcttacacgtcctacatggacacaacatgtgcatgctcatactactttttctgcattat

SEQ ID NO: 46609 - DNA, 395 bp, Oryza sativa
atagacaagtctatatttaaaagaagagctttttgattttaagaggtgatattaaaagagtgagcaatttcctgtgcaagcacaatattattagagatgcgtctccccttgacaaaagcctgctgagtgtcacaaataaggttaggaagcttattctgaatgtaattagccaaggacttatcaatgattctataagaaacattacaaaggctaatgggtctaaaatcagcacgggacttatgattagaatttttaggaacaagaacaatattagtagcattcatacctgagtgaagcttacctgtttcatagaaggagcctaccatggtagtaacatcttcttttatccaattccaggcagctctataaaagcaacattgagaccatctggccct

SEQ ID NO: 46610 - DNA, 432 bp, Oryza sativa
  unsure (1)..(432): unsure at all n locations
agcttgaggcttgactngacttctgaacttgcattattctggcggnnngccctccaggtttgacaactaaaggaattggaggggcatggacgataattttgaaaaaccgnttggcaaagaaaagccgtagggcgaggggagacattttctaaatatggttttcagaaagcctgtccttatggtttgaccgtttggctcaacctacagtcgagttggctctgataccactttgtcacgcccagaaacttaacccaaatttccagactattttgcgtattaaatccctgtccaggaccagccagggtacacaaaacgacaagtaatattcagttccaaaccgtaattaagcgtacaatacttacagaagaggcctttattccttacacntgaacacaagcagctgccgcggaaaaggcgatnctagcgggcttc

SEQ ID NO: 46611 - DNA, 457 bp, Oryza sativa
ggacacttgaaactcagctttcaagtccctcttcactctacctcgacgagcactggttttaagtttgatcaaaacttcattattttcaaaaagaaaaaaactctgtagtagaacaagttctaacaaacaaccatgttatataagtatatttgtgaatagataaagttaaactagaacaataaaataaactggtggaactgtatgaaattaccgatatgatggttcacctactgctaatatcttgttctctagttgagacattcttgccagcatccacacctttgaaaataaatttaggagtttaggagttcatgaatttcaggactttacttttagcagagaataaactaattagagattacagagtttaacctccttttcggaaagttgtttagaatctttagacgagtctgaagcatgtcgtactgagataaaagttgctgccgaacagcaatta

SEQ ID NO: 46612 - DNA, 469 bp, Oryza sativa
  unsure (1)..(469): unsure at all n locations
gcttcatatataatctcaagcattgcagtatatgtattacttgttagtagtaaatgtacacggtatttgtatataccgtgtatanaaagtagagaaataccgtatgtagtaccgtacccatccttttgaaagaaggcgataggggcccgtcatacgttcgacgaggttgcattgacgtatgcggtacttggcgggccgaggttatgagtagagggcgggagaagaggccacaaaggaggaggttcaccacgtggaggatctccaatggcagcctgtacttcaccagcatgtacacctgcaaaaatcaataccaacttgtaattcttttctatcttttggatctgtttgatcgtgtgcatcgtaattatacagacattaaaatgtttatcgtaattgtatcatcttgacaacacacttcaatgaaaagcttctactccgtcagtttcatatcctttgattttttatattc

SEQ ID NO: 46613 - DNA, 332 bp, Oryza sativa
tgtggttatattcagtaaagcctctgcagcgaactatgttaaggacctcgaccaccttctctttccatgtcagcttccactcctgtttcttcttatcaaccgtatccctcatctcgcacttgtcctccccattcttgtcactttctgccatagcttgcttgtgttgtgtgctctccgacctggcagccagcaacttgtaaaaaaaaaacatggaagggttggggttctcatgtgtccaatccaacaaacaaaacaaaaaaaaacatggaaaagttgtgattcttatgtgcccaatccaacaaacaaaacatagatatgatggattgatcaat

SEQ ID NO: 46614 - DNA, 431 bp, Oryza sativa
  unsure (1)..(431): unsure at all n locations
agcttgcaagcacacattcagctttatcctttaacataacgntgcatccatctagtgagtgagaactcatatcatcgaaggggcaccattgcttcttggccttgcgagcgggctttgacatcaatgccctattctcgctgggagctgtagggtggatccacgacgtagctccaaagaccgggaacgggacggatccgacttggagaagagtgaacactgactgggtcgtatctcccaggtcaagctgatcatagaagtcgtcatcaaaaaatacgcctcttgaacccatattatctaaaccttttagcaccaagccccctacctggcatgtcatcgtagacgagctatataccctattacggtatttgtatagtatgggggacgctaccacgctggtaccaaggtatatacgagaatgtgataagtagatg

SEQ ID NO: 46615 - DNA, 406 bp, Oryza sativa
  unsure (1)..(406): unsure at all n locations
acacttgaaactcaacttcagaatttaggcccttgccttattgatcaaaatatttattccagnggaggctctaaatttgcttaaatctaatggtttcagccgtaaggccttaaagcatcatattcttatggttagagtttctatgtgccgagcttactgatgtccatgtttgaaccattttcatcatcattgnggatatattatttatttgtagcttcaccaaaagtggagtgtagctgtggactcttggatacattgaatcttgaaaaggtactacctncgtcacaaaatataagaagctttgaagttggacacggttattaagaaagtattgcaaaataaatggatggaggtgtgatttgttgaaaagtgatgtacgtggggaaattaataatggaggattgta

SEQ ID NO: 46616 - DNA, 446 bp, Oryza sativa
  unsure (1)..(446): unsure at all n locations
catgcaagcttcaatataagccttctgaacagcagtttttatcatctatatntgactacccatgaaactctnttcgcaaggaatggagtcactgcagtttggcagttctcttgctgctgcataatatgagttgccttcaagtacctggacataaaatnggagtcagaaagaggctgacaaaaagacctcgtggcttgtttggttaccaaggtctgccaaggttatgcacatcatatagacttaaggtaggtgacgacaaaatattgttaccaaggtttctcgaatctgccccgaatgaagctatagcagatgcagcagctgcactttcgaacaaaggaggcatattgccagagcccatacagttcatcatcatagaaggcaaacccgggctgagtggatacccaccgagtccatagttcaaaaaggctgaatntatatttgcaata

SEQ ID NO: 46617 - DNA, 232 bp, Oryza sativa
tctgaaagaattacaattaagtgggtatcacaagtttttatggtttatcgaaatgaacggacgcggcgcacaggataaaaaacgtggctggaactgaagtgtggatatatgatctagacctccacgagtagatgattaatacgatgttgaataccaaccacattgccttgcatgccaacgtggtacttacaacagtcgaagcttttgcttaaatgccctatatttaactctt

SEQ ID NO: 46618 - DNA, 465 bp, Oryza sativa
  unsure (1)..(465): unsure at all n locations
cctgangcatgcaagctggctctccttgnggactccttcgaatgatattggtgngttttttccttagagaagctaaagaatgggggtgggaggctgggagctacccacatcccacatatatatactagatggaacaccacaaaccccgtgacagcaacatgtttctacgagagttttgtatgataatatatagtgagaaatatcgcgaaaataattaactagacgatataaccttattcggtttgcatctttgatcgatcattagaaaaagactataaatgatttatgataacctactaatatgtatatagatgataatctaacaagcgaaactaatatgatacggaattttacgagagaagaacatggaagaagacaatttatatcgaccatcttaagataaaactattatgagaagaacataagagaactaatctggaccataagaaaaatagtaatactaca

SEQ ID NO: 46619 - DNA, 438 bp, Oryza sativa
  unsure (1)..(438): unsure at all n locations
tttagtagagcaactccctcaaccgaatatagcatgtatttttcttctgacgactngacaactctgatcagctaatctcatgacttcgaagccgatgctgactctaagccgatgactacttcgggcttaccaaatttcactgttaacagaggtatagcaaaatacacaggcgccaacttatggaataaccacccaatcattttgtgaggctatagaaaggtgtacataaacgaatcttcctgtgatgacatgacacatgaagcgagcacaaccaggttcatacctatatgtgatttatgacattccttttattatgtactggttcagtatgtcatttaaaattcgtaagttcatatcaaatattgataagtgccctcacctgttgcaactcacatgtatctttgctagtttataggataatataacgacctcctcata

SEQ ID NO: 46620 - DNA, 329 bp, Oryza sativa
agcttctattgatgcatactgccaccacatttacagttgatttactcggagcaccccgacagtaatagtgactggtgcattcccaacatgctcaatacggttatcccaggagattgtatccggaatcctgtgtctaatttctgcatacatacatgaatctggggagcccactgacctgcacccaaattacaagactccggcttataagaaaaggatgacaaataactcctgacgttatgttgctctctattttacattactcaggttacattgtcaagcatttggttcagcatcttatgctgaagctgaacataagagcttgaatcttt

SEQ ID NO: 46621 - DNA, 434 bp, Oryza sativa
ctcaagcttacttgttcttctgccctcccttaatatagaatctgtctttttatcttattgctctgccttcacaccaaaacgctccatcaatctcaatgtcatttcaacgtaaggaatggagattagttcgtcaatgatttcgatctccacattcccaagggccaaaggagcagccatcagcatggcactcaagtactgactgctgatggaaccagagagcttaacctgttgagtgtaattcagttaaatgctaattcaaaagaagacatcaagaccaaaaaggaatgcccaaatatacaaaaatatggtaccaaattcaaacaaatattgctcgcttgagcttggcacgaatatggcatattgattaagcatgaaacatttcatgttactgtgcagtgtaaggccgaatcgcatcatagaatgtgccttataaa

SEQ ID NO: 46622 - DNA, 364 bp, Oryza sativa
agcttatgggactccttcacaatggcctatttaattttcatatgggtagtaaggccctaaaggagtacctatgctatcaaaagggacaacttcaaccatgagggtcttgggtatgtttctccaccaaaaggaaaggtggacaagagtgtgatgatcaagaggccccaaggtcttagcaattttgttaaggccaaaagtatccttcctaatgattatgcctcatattgctcttttgatgtatcttatgttcttaggaagaatgctagtggtcgtgttgttgctaagtatgtaggcccaaggggcaagaatatttctatcaagagagatactttggtgcctaacgcacttgttactaacatgagag

SEQ ID NO: 46623 - DNA, 326 bp, Oryza sativa
acctatgtccacttcgctcttatttttctatgagacaattttgaatttgttatggaagtgcgttatatatgcgtcgaacattgctatggtgatgtggaagtttactctcgactttggatttgcggtgtgactgatattgatctgcagcggtgtggatccgtccatatgggacgagcaggaaatggcactgcatctggatattcttgagctatattatttgttttaccgagaatcacctcccaagttgctcggattaacctaaccacctgcagaaattgatttctacatgtggttatggcaatttggtagatgcgcaggtggctcat

SEQ ID NO: 46624 - DNA, 386 bp, Oryza sativa
  unsure (1)..(386): unsure at all n locations
agcttgcaaggattgaatataccttanctttgtatttttctggagngccaagaaaatcagtcatgagatccaattgatgcacaacattcttccctggaaagagtggcatttctgtaagcagctctgcaaatatacatcctatgctccatatatcaattgcaggggtgaactgcaaaagccaatgacaaaatatcaatcaagatatcacctaatgtgataaatgtctaagagatcattctcaaaacaccgttgctccactaatccaaacatatcatagtaatataacaatgttggaagaaaaaataatatagccatcaccattgttaaatggaaacgagctagatcaccacaaacgccctgtcaaaaatgtgcatcatatgatccat

SEQ ID NO: 46625 - DNA, 414 bp, Oryza sativa
tttcgatatcctctcattggcagaacccgcttcttgaattatacatcttcatgcactctcagcagacatggcttctagcactgggaggagttctggcgcacccgggaaggaaaaactcacacatgcattaagttataattatgcttaaattctcacatgggagtcctacctatggcgacaccactgtagacacccgccttgcggttctaccaatcgctgccccaccgtaaagcccctgcctcacacatcaagaaaccactatgcatggatactgcctccgctcagctatctactccgctaggtctataactatacgagaagtgtggttgtacggaggtcgtttcacacttaactttatggttcggtccttaatagaccagggacagtgctagtctttccggatccactcaaatc

SEQ ID NO: 46626 - DNA, 393 bp, Oryza sativa
  unsure (1)..(393): unsure at all n locations
agcttattatccttcttagcttgtatctcttctgaactccaaggaatgcgtatgttatagttcgtttgtcaaaaataatattttacttacggagttgctagaaatatggcgccatatgctacagtcgattttttttcagccacttacacagtagttacacctcatttacaccccacttacatatgtaattagtatgtaattttcgaatttacatatgtaattntagtacttacatatgtaattttgagacttacattgtaaatacactaaaattacatatgtaatttagagacttacaatgtaaatacatgccgactattttttgatggaaaatatggcgccataaatatagctacacccttttacttatgctggtactggttcatggcattg

SEQ ID NO: 46627 - DNA, 417 bp, Oryza sativa
tctggacatacgcctgacgccgacgccgaagtgttgcttctccgggcggcggatatggtggcgcgcacggcagcgcgctgcttgctgcacgattgggtgaaacggccggccatctcggaagtcgtggacgacctcaaggcggcgacagcggcgctggaagactcggctcggctcggcttcttctccctcttcctcgcgctctgctcggctatgggcggcaaggcgccgcggcggcgaggtgaagctcggcgcccggcggccggagcggcggcgacctctggcggtgcttcgctggcgacggcggcgctaggagggccagaccggcagctcgagatggcggctcggagagaagaacgagagaaagagagtggagaatgagatggagagggatggcacggcgtgggaaaaatgggcttg

SEQ ID NO: 46628 - DNA, 422 bp, Oryza sativa
agcttggcatgaaaattctcatctaaagtatattgcgtggcttaatatctctttgaaggatgtatggcttgcagtcgagatgtaagtagaataaagccgagccaatatccttggctattttgtacctaatcatagtatcgatcggatataatcaattagctagatgtatcgatagacatatgcataagcattagttcctaactgtcgcaatttaactagcatttaattactctgcactaatttatttactttaactaaaatatcctacacaatgctcattattttttttaaccattggtaaaagtagggtatcgacacagcgtttaatacacaatgcctaccttttcgaaccatatattcagaaaaaaataacaatagaagtccttttcatatatgatgaatctattggtatcggtttcata

SEQ ID NO: 46629 - DNA, 314 bp, Oryza sativa
aggggctcggaggcgactgctgaggcccacggtgttttgttacgaggaaggaaagctcgagaggagtgaatccgagacgaactcggatcctacgctttccaaagcgatttgacaaagattccaaagaggaaaaggtagaggagatcccggagaacatttcccctcaaccaattctgccggaaaaggaaggaggcggccggattggaaggaaacagcggcggcggctcggcggcggcgcgctatggtttcggcccgaggaggacgacgatcctgacaggtgggacccacctgtcagcggctgctaaggcgcgcgc

SEQ ID NO: 46630 - DNA, 408 bp, Oryza sativa
agcttatacatgtgtgtgcataatattctttggttttaggatttcaaccttgataggtgaatatatattcgtaggaaacaggcttcaatcaaattttatttttttaataagacatgctacatatctaaaaatattatttcatgttaacgagacgattaagtaaaacatagtttcctcaaaaattgataaagtagggggattctgagttttctattatgtttaatgtgtgaaatgagtaaaaaataaacaggtagtattagataaatgcccagtttgtcgagagcaaggacgtactactagtagtactccactagcttgtggccttgtgctgtcctgccagcacgctctgcatatagtctgtctatttccgggccttggctcttggcctttccggcgagccacccacaa

SEQ ID NO: 46631 - DNA, 443 bp, Oryza sativa
  unsure (1)..(443): unsure at all n locations
atactaattatgacttatttacatatttttttttttatcattacacatcctttgtgctaggatttaatatctggtgtaacacctaattatttacttagtagaatgattgtaatacccaaatgcttgatttatcatatgaaggtattattactaattaagggtatgtattgcatgcaccgtttgctcattattagtttaaacactcacatgtagtgactggtttcatgtgaccttaggaatataatgtgctctattcatgtgtgcttgacaaccattcacttattctttttctcctaaagctcaaacttgagactntaattatgagacacattgcccncctttgttttggtacttctctgattctaggcttggacctatgttacccatttcattattcttaatacaatgatatacttctgtgtattcatgaaagccttaaactc

SEQ ID NO: 46632 - DNA, 394 bp, Oryza sativa
ctcagctcaatgggccattgttctgattgaaactatattaatgctaatccgcttaggcataattcttccatgatcccttaaattctagaatgcagacttatcatatcatcaaaatttgattcactctttcagtttgccatctgttgggggtgatacgcggtgctgaaatatagtttgttctgggccttggtagcttttcaaaattggacagaaccgggatcttactgacacaatcttactgaaccccatgtaaagatactattttttgcatatgttagctacttttaaagaaaattttttaccggatgaaaggcagatttgttgccgactatatacacaaactgtattacggtggtgggaggaatcttgacaagacatactaattttcctttca

SEQ ID NO: 46633 - DNA, 324 bp, Oryza sativa
  unsure (1)..(324): unsure at all n locations
actaagcnggcgatatatgaactcgcgactagaatgtttcttttttaactattactcatacatagccgttaccactagcaggtagcatacaagctttgaatatatttcggctctgaacaaactcctctaccacatgctttataatatgccgtgatctgcaatcttgcgacttcttccttataagaaaatagaaagatcaatttctatattactaaaaaggggttttactaggttgtaaacacagtttccctatttctgttgaaaaagaccttacgagatcatatagaaaaaaaggatgctttcttctctatgtaaatttcaatg

SEQ ID NO: 46634 - DNA, 456 bp, Oryza sativa
  unsure (1)..(456): unsure at all n locations
agcttctgtcctggacataaaagaacttgtcatggagcttcattccaggcatggtcatgaaatggttcccttctccacatcttaattgttgctttctccggcatccacttgaagagttggagccgttaggctcaaatccatccgggcactggcatcttgggatgaccgacgtgaagtcacagtaaccgaatgggccacacgagccgtagggatcacaatcgccaatggctgctgggcgttgagaatagatngcccatgatgacgagttgacgttccaactcaggagcctgaaggtgcccctgtagtcaagcatgatgcgcatgtatggtgagccatcagaggtggtgtagataacatagaactcatcctgtgtgnttacatatgtttggtacatgaaagaggagctgctgccatatgcttttgccgacacccacacactgtcaagcacagtggagc

SEQ ID NO: 46635 - DNA, 321 bp, Oryza sativa
  unsure (1)..(321): unsure at all n locations
tgacacaatagggcacttgtatatcttcnggggaatttttttatttttaaattattttcttttaatatttacagaaataatccatcagcgtaaaaaattacaaaaatagaccctgccgccctccactagagcggcaagctgacgtggcaaacgagggagggacgggcggtgacgacagacgggggagggagggttnntttcacgaaaacccttgccgttctctattatggcggcaaggggccccatgcaaaaaagccagcccgggcctagtactctatttattgtgaattgattagatcgatgtgtactggatcgcgtttt

SEQ ID NO: 46636 - DNA, 373 bp, Oryza sativa
agcttctcagatcttagctatctggcggttctgttgttctatggacagcactctctccatcctatgaaatatcaatctgagaatatgacatattctaatactacgaatttagatatatgtatgtttagattcatcgcgctaaaatatgtcatattcattgtttatgggacggagagagagtacttagtactacgtacgtgacaaattattaactaaactaatcaaccaccatgtgtactatcatgcatgcaccatcctaactaacactagctagctagaatcagggatattgatcgatctctgtttcaaggtgtgtgcaacaatataattaatactgcatgatataccttactacctaatcctaattctaatc

SEQ ID NO: 46637 - DNA, 344 bp, Oryza sativa
ttctcggccggcctcacgagggcgcggtgttcgacaatatgagccacatctatcatcaacatccatgcctcttcagtcttagctcgcgaaaaaaaagatcacacactagatggataaaaaagcattgtacactagtgaaaaacaatactaagatcgctattcaaagaagccgatattacgaaacgactaattttcttgatcgggttcaatcattgcttacttataacatgtcagatgatgatgatgtatagaaacacccgatgtttatatgaagttagttgaagcctacattttcgagctctgatataggtgtcctccctatcaacatactacatttaaccgta

SEQ ID NO: 46638 - DNA, 420 bp, Oryza sativa
  unsure (1)..(420): unsure at all n locations
tgcagcttgctgcatttctacaatggcccttttttttttttttgggcnccccagacacatggtgtggctggtgacgtcacattatgcataaccggaataccttaatgtccacccaattttgagaaatggcgatcaccgcagcggtggtcatactctggcagaatgtaagcgtctaacggagccctctgctgacctcaacaatggcagttagcccgatctccgacaccagctcatctgcatcctcaagtgcgttcaatggaagcacatggagaacctggagcctctgcaagtcctcgccgtggtctggagcccctcttacgcaccgaatatagcacctggcaaacaaatcatcttcacataagcataatctcgccgttcagtcttaccaagctgagatacatccaggccttcatatatctc

SEQ ID NO: 46639 - DNA, 276 bp, Oryza sativa
gtgagcggcgagagcgaccgatcgttgatctctatttatcttttctcgccggtcaggattggccagagtaatggtcatccgtggccagtgctgtagctactctgtaattattactgtgcacaccgtgacccggattaattaaagtcggcgtacacataatacgagctcgtacgtcactaaacgcaacacttatcgatcatccgtcggagaataagtgatgcaatggtgatactgcggactgaccaagctgaactgaccaatagtaatcgggtgaac

SEQ ID NO: 46640 - DNA, 434 bp, Oryza sativa
  unsure (1)..(434): unsure at all n locations
agctngagaaatatttttcttattattattgaaccattaccataggtacacatgcaagattactgacccacagttnttctactctgtatcatacatgagttgatgtgcaagattactgacccacatattttctactctttatcatacatgagttgatgggtaatgtaagacatgaccaggaagcttgtatttggccataacaaaacagggtaactgctattgttctttacaggcttcttaatctcctagttgcaaagttcttcaagtattaatgcataacaaacaaacattttcaacaagtttatgtattatatacatttacataaaaaatgcgatataagtgaaatgtttcttacaaacaatagaatctcttgaaagaaatgcttacccgctttggtcttagcttttgataatccgtagccttttcaacttct

SEQ ID NO: 46641 - DNA, 299 bp, Oryza sativa
aataatctagcacagggcagtattggttcttcttatatcaatccacaacggaaaaaaatatagcttaacgaaacaaagtcaagactgaattgtgcactcccccaacatgggcataaactctgaatgcagctgcacacctatttacagcatgctcataagtgaaaccacctaactgaataaataaaggccctgtaatatcatacactcacaatatgtatgacaccttcaaagagcaaactactaaaagagtgcaaaacaatttatggctggaggaccgagacagactacataatcatgaa

SEQ ID NO: 46642 - DNA, 381 bp, Oryza sativa
agcttagtagctagctgaccgtgatatttatctttataatcacctatcacatgggcacagtgacttatattttgcattaacccttctcccctttacagagtaccaagccaaaaataagacatacgtatgcatttgtatttcatagaaactattccaggaaaaagaagaagaggggatacagaacgaaggagagcggcatgggtgttttttcttgcgatatatacatacgtataccatatgtatacgtacctagggggaggaggaaaggtacgtgggaccatacttgtagtgtccgatctgctttaagattaatctaatctaaccgtttataatatctgacccaccaatttaaagtaaaaacaatgtacggatggttttctt

SEQ ID NO: 46643 - DNA, 391 bp, Oryza sativa
tctcctatgaatgatagcaatatgtagtcctatcacattttcttataaccaatcaaggatgatgcagtcactataacaatgccagctatatctctccagaaacaaaatgagcagctacgcttgtggtgttcagttcgctacttatcactgttatcgaaagtttgcagcgatcatataataaattcacatattgatgtctataaacagtgagcttgctatgtttatggaggattcctattgagggtacaatgtaccgatgttaagcaccttcccttattgttaaggcaaggccttgtattcctataatataggagatatgtgtaatacagacaagttctaagaggactctcttggaagatgcggatatgtgatcatgtgtataattggttac

SEQ ID NO: 46644 - DNA, 371 bp, Oryza sativa
  unsure (1)..(371): unsure at all n locations
ggacgatgtggnnggtttgttcctttgattctcgcgcgcgcatcgttctctgttccgggagggaactcctccagcgccatccatggggagaagccggggtccctggcctggtaactcgctaacacgagttccaccgctccttgggcgaggtccctcaaggatgacttgatggtcttctcgagctcctcggggagttgttggacagcccaggccatcctcctaaggtgcggtgcgaggccttccatattggtggagcgcgaaattgtctggcctttccagaggcccgcttcccgaccggcgcgatccagccgggagactgcatcccaaagcatgccgggccctatctcacccgacaagcagagggcctcggc

SEQ ID NO: 46645 - DNA, 313 bp, Oryza sativa
tattgcctgagtgtgtggaagagtgatggatgagagcttcttatacagcctcccatagacggttatgacgactggaatggtcggaaatgctcttcaaccgtcattgggatgtaatcctatacgttcacgctaagtcctgcattcaacgacgctggtgggggatcggacgaaccatgggctggcccaatcctatacattatttgctggcagcctatttgacttcttctgtccgcagacttttgaattttggactcatttggttgtgtcatttactgaatcttggcccatctttcgataagtctaattctcgaca

SEQ ID NO: 46646 - DNA, 464 bp, Oryza sativa
  unsure (1)..(464): unsure at all n locations
aaaacangaggatccgggagactgtactgatgatggaccgggggcgagggccaccgcatgatgcattgctacatgcgcgagcccgcatggtcacatctcgcaaatcctcgcttcccctcctcctcgcccatctgttaccgacgcaatctgccaatctcgcattcgcaagagctgtaccgctcggtccacgagcagccaaccttggcatttttaccttcgaaagcgagctcgacctcctcaagaatgacagaatcgaacgccgaatatccatcagctgcgtagccatcaccgcctgcgtcgaaagagggcctcccatgcagtaccgcgtacaatatcacgtactacctgaaaagctggaacgctcaaatcttcaccgcgactagattaccgatgtgaaaaagataaacggcggacacataatgtgatggagcagctgaacttcgagatgtgtgtgacacacatcg

SEQ ID NO: 46647 - DNA, 277 bp, Oryza sativa
attaagaatactaacaagccgtcctacattcattatacgccttcgcctgctatcatctgaacctgatgcagccatgcaactacaacgcgtgaatgctgtcaccgagtacactacaaaatacagtgcatcgcgaaaagtggacctgtcatacagttctactcttatgcaaaaagaacaaaggcaccatatttcaaaatattgggaattccaactagaatactaggactactacagatcattgaataatccctccgtgaaaaatgagatatgatacagt

SEQ ID NO: 46648 - DNA, 129 bp, Oryza sativa
acacgcgcacgggaaggaggaacggtctacgtggatagtatatcccgggccaagccaccgtgtcatctcctgtcaaaatgttctcttttctctcattttcttttttcttctcacattaaactgaacaag

SEQ ID NO: 46649 - DNA, 255 bp, Oryza sativa
ccggcaccccgacacaaaccgctcagatcacaatcccacactccgccacacgccatgagagattccacggctcagatcagcgctatgcatctatcagtgcattccatgaaaggcaatgccagctccaacctcgtgccgggacgcccacgcagcgtacagaccttgacgtctaatcatgactcacagcacgaacaccagtcaacggaaaaggaccacaacatgccgtaacagatgcgaacaccaaagcactgacgc

SEQ ID NO: 46650 - DNA, 421 bp, Oryza sativa
  unsure (1)..(421): unsure at all n locations
tgcaatcctcttatgagcangaatcacctaatgtgagctctatgctatttgttcgctttgagctgccagaggaggatgacatggatcaacaggctaaagatgagctgttatcacttgtggaggcaaaacatacaggggtaacctacgtcatggggcatgtctatatcaaagctaggaagaactctagcttttataagagaattgcaattgatgttggctactctttcctccggaagaactgcagaggtccatcggccacactgcacattccacatattagtctgatagaagatggaatggcgtaccaagtgtagcgcgatgctcatcgcaggtcacgacgtcacgtggatactccgtagcaacaaatcatggtgagtactagccattaaaccatatgaacctacaattgttccaggttttg

SEQ ID NO: 46651 - DNA, 382 bp, Oryza sativa
  unsure (1)..(382): unsure at all n locations
agctncaaagnctccgtagaactcatcgttggtctttgttatcatcngctcggngcaaacaaagcaaaagatatacaaacacgctccataattatcaagaaaaccggttgatatgcgcaaacaagaagctatcagttatcccaaagcgcccacaagtttaatgcccactagttgcgtgcgtcggctcctctcctttcgctgacctcttcctctggactatggccgtgtccagaaaaactagattcgttggtgatctacattctatttcctgcttgcctcttctagatatttgccctgaactaactgaactggccttatagcagacagagctgcattctttggtgattgtacacacgattggaggttggtcttggttcttgga

SEQ ID NO: 46652 - DNA, 350 bp, Oryza sativa
acatttccatcggctgaacttgctcaacgcgcactgtctagagattttttattggtcctttagacaatataacttcgttgttttccacaataagacacacttaatcgacccaactctagtgactaaactactggcattgatcaaatacttacagcttctcattaggctctgcactggcaaatgtcagtataaattgcattaacgcagcttaactgagatagaaaaggtgaattatgttatttatcttgaaagagcatacgtccccctgttcaatttctaggatagaaaacacaatatgcgaatggcacataccaggctccttcctaaagaattaatcatccaactcctga

SEQ ID NO: 46653 - DNA, 433 bp, Oryza sativa
  unsure (1)..(433): unsure at all n locations
agactggcatcattggactcgcttgtgccctcatggatctccgccaacttgttccaattctcatatgcggtctcaaggttgctcactctatcgcactcctcttggctcaaacagttgaacaaagcattcatagcttgggcattgagttggaggttgcggtgatcaatccccgtcaagtgcgtgccggtgatagcaaagcctacatccacaatactccaaatatggaagctcatagctttgaggtgagtagacatcttaattttccaagtggagtangttgtgccattaaacatgggagccttccctacatggttcacctcgttcaacatcttcactctaggcggtgaagcccaatcaagagagaccaagctctgataccacttgttgtattgagatgtcnactagagaggggggtgaataagtgatttaaaac

SEQ ID NO: 46654 - DNA, 237 bp, Oryza sativa
acccgacttaaggaccgagctgcactcggccctttcatttctttttgggacagcacatagatatctatatcacttgcttcatgatgcaatactacgtatacaaacccaccccaaacattccttacccctgaaaatgcaaggattgtactcgctcctgcgccagtgaagacctatgggaatcgcccattgccccgcatgacaaacaaccgttggcgacccaactctgtcaacacttgc

SEQ ID NO: 46655 - DNA, 441 bp, Oryza sativa
ctataaaaaatataataacatttccaatactaaactttctttctattaaaatatattcaataaaactaatttggtgggatagatgttgcaaaatttttctataaatttagtcaaactaaaaaaaagtttaactaggaaaaagtcaaaacaatttgtaatatgaaagggagggattataaagttcagaaattgatttacaataatttttttaaaaaaatgatatatatcgaaagttgttaccacaaccatatcatttggatgacgtgtgtatgagcaactaatgtgtctgcacattgtgcacaagccgaaaatgttttttttttcaattattcagaaaagatatgtatgggtactactttcgtttcatattataagtaactttgacttcttttaagttaattgaacatatagtttcattacgtctacattgaacaacaacaa

SEQ ID NO: 46656 - DNA, 396 bp, Oryza sativa
  unsure (1)..(396): unsure at all n locations
agctnatatgctgttctcatgttctatgtttacaaatcaatattgtagcaagttgcactatcacttttcgcacccacagcatcacaagatggacagaaagcactgtatcatatgatacacaccatcacacagtggatcacgtagaacatattatcccaataccattcacggaggacgtatcgcacgaatcatagtcattctcatcgcattaagaaggataaaagaagaacaaaagaaagaatttccgatgccaccgatgggcggacctccgcgcctgcggcgactaccgccatgggccctccgagtgggcagtcgatgcgacaggcctccgcgccttcacaaccttccttcgcggcggtcgacgccgggaatacagggttgagggaaaggggagga

SEQ ID NO: 46657 - DNA, 187 bp, Oryza sativa
ttgccatgacaaggctaatgtgtatggcgcgtcatggattgcgagtaacgtgtgcatctactgcagtatgaatattatataaactatccgaatatgcgcgctcgcggatatcgggcattgggacttacaatggcatcttggctagaaactaaatagcaagctatattcaatactgttgcatctaaag

SEQ ID NO: 46658 - DNA, 374 bp, Oryza sativa
  unsure (1)..(374): unsure at all n locations
atgtgcaatgcgtcaccggttgtatggtcgtctcttagtcggntcatatcgaggctgggagagaagacgctacccttatttaagctcctcaaacgctccgggccgtttacttggacggaggaagctgaacgtgccctcactcagttgaaggcgtatctcagctctcccccagttctggtcgccccggagccaaatgaacccttgctactctacttagcggcgaccccgcangtggttaatgcggcgttggttgtggagcgcgatgaggacagtcctcattccgcgcacccccaccctgtgctggcttggcccgggagagagcaaggaggagaggcccccgagccgaacagtggcccaaggcccccgacgaccgg

SEQ ID NO: 46659 - DNA, 463 bp, Oryza sativa
  unsure (1)..(463): unsure at all n locations
tngtcaggagttcagaaacaacaacatcaggactctnntttatagtatcatgactttgtgaactctctcctggagaagaaggactgtctatatcagtatgtgctgcatccatagctccactaaggcgaccacgtatccttgatagcgtgtgccgaccatggcgatgtatgctggcagcagaacgcactgctgatataatatcttgttccatattccatggtgatacagaggacgttctcactgaaacaggattcatatgtcttggaactgatgctgcatttgtgtcatcatcactatccctttcagataaatttgagactgaggcatctccaggcacatcatcttgttccatgtcttgcttctccaccttggaatcactaagataagatatcttgcatgtgaactctatataaaccttacctagntccctcaatatcttaacatcagcaaaagccagttctga

SEQ ID NO: 46660 - DNA, 418 bp, Oryza sativa
  unsure (1)..(418): unsure at all n locations
atgcaagcttaccttccctctcttcgtccaccgtcttgtttgttttatcagaggcaagcagctgcagagaagtccatggcaagaatgccgtcctactttacgcagcgctgtacatcagcgcttttggcgatggcttcatgcgtgctagtatgccgcccctcggagcagaccagntcgaccatgaagacccctccgagtcccgccagcagtccagcttcttcaactggtacaccttcggaatctcctttgggggtttcataggattgatcctcatagttcggctggagaacagcanagggtgggatgtcgggtttggggtgtgcgcgttcctgatcctgcttgggctgcttgtggttgctgctggtctccctttgtaccgcaaccatgtacccgaaggaagtccgctaactcggatact

SEQ ID NO: 46661 - DNA, 486 bp, Oryza sativa
  unsure (1)..(486): unsure at all n locations
acactctcacaaactcaagcttcagtactagggagattgttattcctccagagccttcgtgagtccctgtttatgagtacaagccaagggaaggtagacgataaaggcaaaaaacctgtgatgcagtctcggctcagttctccggacagccatgaaaggaatcacactacgactatgggatggacccccccccccccccccggccgatgggctgggttaaagtaaatgtggatggctccttcattcagagttcggaacctgctagtgctggatttgtcattcgngaccacactggctcagtactgctcacttcctggagaattatcagccattgtggatcagcggaagaggcggaagcgactgcatgttgcgaaggggtgaatctcgcagctgagtgggtgataaaaccgttaattcttgagacagactgtgccaactcggtatctatgcttaccagctctggatttgatcgagcgcagctctgca

SEQ ID NO: 46662 - DNA, 453 bp, Oryza sativa
  unsure (1)..(453): unsure at all n locations
agcttataggctcattaagttgtcttgtttatcttctcatttccctagttgcttacaagtccatgaaagttgtacaagtcctctgaccaatcattacaaaattgacaggtttttgcgattactgtctagntttgactggaccttttcacctatgatcatagacataaacaatgacttcaacctgaaggatgagaaggagataaatgttagttctctttttagttttttctattatctcttaggctgatgccatattgagtaactgatggatgcaagtacaggaaaactttatgctgtgtagaaaatcttatgaacaaaatcctcatgatatagagcctgcaatgtttcttgctacatcgtatgataaggcatctgaagcttggacgagacattcaccaagcaagccgggaggtaatttatttntcatacagctgaaatgataattactgttct

SEQ ID NO: 46663 - DNA, 483 bp, Oryza sativa
  unsure (1)..(483): unsure at all n locations
acggacctatgaaactcagcttacaatatcctctttacggtcaatgatttcaaggcagtcttctgggtggaagcgcccgatgtcaccagaatagaaccatcgcatacctttntcgtcatccttcacaagataaatgaggtacaaaggttatgtaaattattgtggatagaaggttattactatgagccgtgaagtagtcatcgaacatattggtaacaagacaacataccttatagacttcatttgttttagcttcattcttgaaatagcctttagttacattgggaccaccaatgacaatctctcctcgaggcattggggagtcacttgataagtatccaccttctgaccagtcaatcagctggattatataattacaaaaatgtcaagcatcggtgtgatgccaacagattatagtgactagaataatatggagatcaatcagattacttgaaaaagatcagcgtgttacaaatatcaaag

SEQ ID NO: 46664 - DNA, 444 bp, Oryza sativa
  unsure (1)..(444): unsure at all n locations
agcttcctaaaatgcattggaattcctatatatttaaaaggataggaacctaacttacaaccaaagatatcagaatgttgatcataacattcctttgactgaccaaaacaaaataattcacttttgtgaaaatttatttntaggctagataacttttcaaatacatataaaatcaatttcagattctttgccagttgcaagtcatggtccaaaaagatgatagtatcatctgcatattgcaagatagacaaaccatcatcaacaagatggggaataaccccattcaaaagtcccgccttcttagccctcttaatcaatagagtaaacatgtcagctactatattaaaaagaatatgagataaagggtccccttgcctaagaccattgtaagtttgaaaacaattaccaatntgatcattaacttttataccaacatgaccacct

SEQ ID NO: 46665 - DNA, 450 bp, Oryza sativa
tcttctgtgaatgatagcattatgcagtcctatcatatctttacaaaaccaatcaaggatgcagtcactataacaatgccagctatatctctccagaatcacaatgagcagccatgtctgtggtttttagttcgctacttatcatggcgtactcgaaagtttgcagcaatcatgtaattcataaatataatcatgtctgttaacagtgagcttgctatgtttagagatgattcatgttgaggatacaatgtaccgatgataaacaccttccctttttgtttaaggcagtgccttgtattcgtgtaataagggagaaatgtgtaatacagacaagttccctaagaggattctttttgaagatgcggatatgtgatcatgtgtataatcgcttactgacacaagagacctaaggtctcgtgtcaaaggactatatactaacctcgagtaata

SEQ ID NO: 46666 - DNA, 320 bp, Oryza sativa
caagaaggaatgccgtcctactctacgcaacgctgtacatcagcgctttcggcgaaggcttcatgcgctgcttgtatgcccacctatggagcataccagttcgaccatgaataccggctctactgccgccagcagtccagcttcttcaactgagacaccttcggaatctcctttgggggtctcataggaatgatcctcatagtttggttggagacaacaaaggagggtagcccgggatggggtgggcgcagtcagaacatgcaagggatgcctctgaccatcaagggtccaaggccccacaacctgagcaggcctatgcc

SEQ ID NO: 46667 - DNA, 403 bp, Oryza sativa
agcttgaccggctggtactccatctggctttagcttgcccgatggttactccctacttctgtcagtgtccggtggcccccccttgatagtatcaaatttttctttatgagaacattgatagtatcggctgctatgcaattgtggatagtgttcactgtattgtacttctcacatttaccctattccccttacaatatactccctccatcccaaaaaaaacctaatcctaggtttgaaccacacatgggttcagggtcaaacctaggattggtttttttttgggacggagggagtacatattcggactcatccaataaaagtaaattcttaattgaatctaacataacctattatgtgactcgttgctgtgaattttattaaaattataggaaatataataatt

SEQ ID NO: 46668 - DNA, 365 bp, Oryza sativa
  unsure (1)..(365): unsure at all n locations
ttcccacaatgcaatgagtggtgggctgagcactttctgaagttgtggacggctggcgcattgctatctatgacatccagtcgtgaaagataacacggagacaacgacactgttgagagaaaggagtgggaggcattgtgctcttgcgtgacgggagagggagcacctggggagcgtccaattaagtggatcaaccatccttatttataagggtgtataacgagacaactcaggctcgtctcttttgaactcattgtcttaacgagccagctctgcttgactcggtaactttaacaagctatagtctatcgcaaatcatcttgcgagctggctgctangctagttaggcttgtgaacatatttat

SEQ ID NO: 46669 - DNA, 351 bp, Oryza sativa
  unsure (1)..(351): unsure at all n locations
agcttttcttggcgcaaggactcttattggttctaagttagcggcgnggaatcaccttctctcacgcatcgctaatattatattatctcacgaccaagatgagtttaaatggaatctaaccactgatgacagattctcggttaaatctctttatcttgcgttggggcagaccgatgttcccaatataaacaaaagaatctggaagattaaagcccnccctaaagattaagatcttcttatgatacttacgttgtggacgaatcttaacaaaagataatcttattaaaagaaattggagaggaaacaagtcttgttatttctgccacaaagatgacactattaatcatttgt

SEQ ID NO: 46670 - DNA, 435 bp, Oryza sativa
agcttcatggccttcctatattgctctctacaggctactctgctgcagccaacctcttcaatgctccatagcaacaatcctgaacactgccgactatctcagatgcttgggcatcacgtcaagctccagaagcttttctcctcttttaacagcatcctaaaatgaaatgatgcgaccatgcctgttcagggagtccgagtgaatagttgcacatatgcatgaacctaagatgccttgcataacttttgattgcgttgagccagttcgattaatcgattgagggggatcggaataggatttgtttttaatcaaaattaaatcccaacctaatcctcctcatacatccaacgggcaaccataaacacattaccatctcttcatcacattacgctatggtcccgatcgcaaccaaaacatcccaccagccaatcccac

SEQ ID NO: 46671 - DNA, 401 bp, Oryza sativa
  unsure (1)..(401): unsure at all n locations
ctaatctttctctcaccctctctcttcttcttnctaaaaaactatgggttttgcttaaaaactcggcaccacatatttggcttgattagttgatttcaataacctttttccaccatgtgattgctaactatccttttcctttgtatatagtgagtagtaaggaaaaaaactacagtgttatatttaaaaattacactgtaaatatatgaagtttatagtactataaagtatgaaatttgcaatgtaaaagtgtattgaaaaatgagtatctggtttcttaacgaaaaaatgtagctcgatatagctagtcccaacaattgaataggccgcgttcggagcaacggatagatggaaaacttacttctgctggcatgccacttctaaactattagcgatacgta

SEQ ID NO: 46672 - DNA, 356 bp, Oryza sativa
acctatgaatctcaagctgacaggttcataggtgctgtgggccttttcagcttgaatactccaagccgggttccacattgttgtatctatggaagatcaatgccactaagaccgctatctgtgcagcatatggacagaagtcatgatcaaccatgtattcaagactaccgatgccctcgggcaagtactaaatattaacatctaaaaaaatactttctgaaaaggctaaacagcagattgagcattctcttatgtcaattacccaatcttgaaattacacgtaatcacacttgttattatgacatgcaattatatattccacctgaacctactaaacgaacctctaattttaagtt

SEQ ID NO: 46673 - DNA, 283 bp, Oryza sativa
  unsure (1)..(283): unsure at all n locations
gtggggaacaattcaacaatttgatacccatgctatcggcacactgaacaaactcatcnnaccgaagatcgatccttgatcagttgtaatggtgtgaggaataacaaatcgatagattatatgctcttgaacaaattgtatagcatccgcagaatcgactgtcttcaaaggaatcgcttccacccacgttggaaaataatcggtcgccaccaatataaacttatgtgctttactcgatggtggatgaatcatgccgatcatatcaactccccaacctctaaat

SEQ ID NO: 46674 - DNA, 228 bp, Oryza sativa
  unsure (1)..(228): unsure at all n locations
tttggactttcataaacttcgatgcaatgatcactaaaaataaaattaattttgggataaatatagtgagccaaaaataaacttattacgggacggatggagtactatgtggagagggatgtgtggcctaactgctctcttggttgaatctcacttaggaatatgcttctcctgatattggcttgttggttntctagctctgcgcaggaagtattgacgaaattaatt

SEQ ID NO: 46675 - DNA, 467 bp, Oryza sativa
  unsure (1)..(467): unsure at all n locations
ctggnngtctcgctttcgctatcccaatattgtttgtgccgtagnggaaagagctcgcttcagcgcccaaaatgggctgggccttggtggatatctcatatctgtagattaaatctggagtaaattgcatcaacgatacacaacttagtggatgcagtctactaatgcataaatttgtaaaacacttatattgttgtacgaacttgtttagtgcgtacatcccaaagccaaaatggcatgacaaggctgatttttcaagttgaacattataaattattacatgacatgcgtggtgcacatatagtagaaaggttatatgtataaatttggtttctactttatcttcctttggtactatcgcttgcatcgntacttcaatttttatctttttcttcatgcaatcaatatgcattattatatgttttgctaaattgatctttatctacgtgatatttgttacatagcat

SEQ ID NO: 46676 - DNA, 223 bp, Oryza sativa
aatcatgattataactgccatcaaccagtgtttctctgatgctgatcatctaataatgacggatagcttttcccctaatgaatactccctcaggttctaaaagactattattttaactagttaaagataaattaagcaagagattaagaaattatatattatacctttcattaatatggatagaaaacaagaagggggagaaaatgagaggaggaagtactat

SEQ ID NO: 46677 - DNA, 268 bp, Oryza sativa
  unsure (1)..(268): unsure at all n locations
atatgctgtgatgctggataaaagatcacattatctagttggcagcttaaaggtgacgtacagaggcaatgaagtctgaggcgctgtgcatatgcaacgttttcatttctatgttaattttcattggtttgggtaataccatgtgatctctaatctaattagtgtgggaccaagccaaagaccaggcacactatatatgggtctaggccgattggaaacatatatacacaatcaatcgatacanaatttctgtcatatttccttttac

SEQ ID NO: 46678 - DNA, 308 bp, Oryza sativa
  unsure (1)..(308): unsure at all n locations
taatcaaattacatcctttgctcttgtgctgatagcagattgtatccagtactttatctacgtattgtccactaccaatccatgagtgtacttaatagttgcagctcaattccatctttgtgttcaactgattttgtactggaatttgccttgcttgaactggtaaattgagttgctaacaagtaactacatatatctatatttatatctatacctaattaanaaataagtaaggcttccagttgaattttttcgtcccgcattaaagggtgggcccacgtgattatgggaccacctatacatttatc

SEQ ID NO: 46679 - DNA, 336 bp, Oryza sativa
  unsure (1)..(336): unsure at all n locations
acatgtgntagcgctagcctgganattattgatgctacgccgttgacatgcggaccccacatgttaacctaaaggaccgcggtagaccgagtacacagagacggtccacgggtcgacggaagcagatcccgtgtgtcaaccgaggcgagtggtcgacaaacggactctactagacaccacacgggctgcacacgtggaaaccacgcggctaccgagcgggcacactaacacggacactacacggtcaccacccgcacacgtgaacgactaccgacaccggtacacggataccggtgtcgacaaccgcacaacgggtacggtgcgacacccaaagga

SEQ ID NO: 46680 - DNA, 367 bp, Oryza sativa
  unsure (1)..(367): unsure at all n locations
acctgattgagcttaactgatcatttagtcgagtgntctttaagctttgtcagcctggctgttttaccaacgactgtctgaaaggcaccagcttcttttgctgcaagacgctcgctctgtcggtgcttcacaatttcctgggtagctctcttctttccacctctcgctttcctgacggagaaggtctgatctggctcgttgtccactgatgagggatcctaagtatacgcagtgtcaggttcatcatgcagctcagtgatcctaaccgaagttccagacgttttggtcccaacagccagctgtcccataagttgaagttgttggcattggtgttgttccccccaccctgattcttgtgtatgttgat

SEQ ID NO: 46681 - DNA, 116 bp, Oryza sativa
  unsure (1)..(116): unsure at all n locations
ttatccaaattacgttcagtaaaattccgccaatannanaggcacatggtctttccttttgaatacgccttaagcgatggaagataacaacaaacctatgacctaagaaaagttat

SEQ ID NO: 46682 - DNA, 402 bp, Oryza sativa
ctgcactggagttaagcagatctcccattccattgtgtttctcgtcaacagctagagatattggataagctatagctatgttatggcgtgtaaaactgttgttgctgttgtcaccctctcgagtaacgttagttcgttgagaacttggaacaccatgatcctttgtcttagtagcgtaagtgaagttagcctcatctgcaaattaaatagtacgaacaagattaatcggtcgtgaattgcaaggtgaaggtttaaataataagtaaagaattaaatcacggtgtggtcacctgacattgttgtgtgaccactacaacgcgcttcaatggcgccatggtcttcttgaccaccattgtctttcgcacttggatcaattcttaagccactatcattggccatttg

SEQ ID NO: 46683 - DNA, 242 bp, Oryza sativa
  unsure (1)..(242): unsure at all n locations
gctccttgctggcccatgacttgtgctactgctnnnaaactgatttaggcacagcagcaaattgatggagatgctgtcggtcgagacaatgttcttgatgctcgcatgggaggaatcancaagcacgaactgcttcaacaactcagctaactctgcacctccaaacccaccaaatacgacgacgatctgggtgtgtgtgagcccaccctcaccggacacgacgcggctgagcacatcgctga

SEQ ID NO: 46684 - DNA, 437 bp, Oryza sativa
  unsure (1)..(437): unsure at all n locations
gcagcaattgatcccttgagacttaggttttcattatatgtctgcaaacatcaagaacataacattagaatcaagcttcataaaattaggagatataaactacgaaaaagtgctattggtggaagcagaccagacctccagggaaagatgaatgttctgacacttggcttcaacgtgatgcatattcaagctggcagcaggagcaggagatatcattgattgctcaaaatgtgcaaaggaaaggcagctngaaaacatttcagaatttctcatgtcattgaattgactgataggaacactggaattgccagcatccatttcatcactgaacaaaagaacaacagatatctcagcaatggaagcccgcaaggttttctctatcggcggggtctgtangaaatgaaaanggaaaatatgtaacaaagtgatgcaatata

SEQ ID NO: 46685 - DNA, 207 bp, Oryza sativa
  unsure (1)..(207): unsure at all n locations
aaagtaatctaaacttgcttccgcatccagctatatannannagtgctttgttgcgccattcaggcatgtgggaacctcatggtcatgtaaattctgagggcctcaccttgttgtatactaagaataccttttgcgttgcggatgcaatgcctaatcttgttgtcaagataactactgtaaaattgagatgtgtggttgccagttga

SEQ ID NO: 46686 - DNA, 376 bp, Oryza sativa
gagacaacacaacaggctacatatgttatctttattattcttgccacccaagtgacacagcagctttgacgccacttacgtactaaaccttgtggagaataagataaccatgcagattgagcagaacgcgagcaaaaacgaaatcaaaggggttaatttccgaccccttctgcatctgacaaccgctcggctgctatgtgtcttcttcttcagaaaaacgatgattgcctcgcaagcattgcatggttatttacccttcgtcggcagacaaatgttgacatttcatggaatcaaggactgcatttttcttcttaatgtcctgaagctcaattggtgatcgatcgagtagtttaccgggtgtgcatcaaagcatgca

SEQ ID NO: 46687 - DNA, 181 bp, Oryza sativa
caaacactatcctcttaggtacaccatgtaacacataattcttgccagacaaagtcctgctaacctcctccctgagtaggtagggagcaccggaatgaagagagccaacttggtgaaggcggcaatgactacccaaatagaatcatgccccgaagacgtcctgagcaaacccggaatgaaa

SEQ ID NO: 46688 - DNA, 419 bp, Oryza sativa
actgacattgttctgatcacacaaacttcttttccttcttgagtagttgtgtcattggtcgggctatcttatagaatccctcaatgaaccttcagtagtatccggccaagcctagaaaactccgaatttcagtcatagatttgggtgttttccattctgtaacagcctccactttagcaggatccactgctactccaccggctgagattacgtggcctagaaaaacgacttcttttaaccagaactcccacttgctgaattttgcatataacttatgcttccgaagtttctcgagtaccaatcgcaagtgctcagcatgctcttcctcatccttggagtagattaaaatatcatcgatgaatactaccacaaatttgtccaagtaatccatgaacactttgttcatgagattcataaag

SEQ ID NO: 46689 - DNA, 433 bp, Oryza sativa
  unsure (1)..(433): unsure at all n locations
cctcgagtgtgctaagggcgtgccagctggtttgattctgcaaccagcaaggaaacaacaagcaaagttgccgatagctgatcggctgataggccgatgacatatcgttagtgatcctagctgatatagttggaccagatcggctatggattgatgtatgaattaagcataaaccttaaatatgcctcatcggctgtagtatcatcaaatgagtttgtcaagtatgagtcggacgatactatatgaatagtcgatgaaacaatatttagaacaagatagatagataaagataatataccagctaatactctagtacaaacttatataaacaaatcaatctatataaacatatcagatcatgatcagntaataatttagataacccaaccgatactgatctaactngatatgggtatataggatgatctatcta

SEQ ID NO: 46690 - DNA, 308 bp, Oryza sativa
ttgcagaagtgcttacaaaatcatgagcgcattcatgatcatggtgatgtggtcttgaaataaatgaggaatatagcagaaaggatacaaactgacctggacaacagaaccatagaaagagttgtatcgaggcacattcgctaaatgatgaacagtgccattttcagagcctggataatggtgccacacaaacaatcacttgatccatatgcctgtctatgagtggcactgcttatacaatcaacttgatgtatcatatcaacgataagaccatgcttttcgaatttcgactagattgtctagcgcat

SEQ ID NO: 46691 - DNA, 359 bp, Oryza sativa
  unsure (1)..(359): unsure at all n locations
tcgcggnttactgacggattatggattatattattatttntttattagtatccaaacacctcatacgacatcttatataatatctgatgtgacactntaaaattttacacatccctacatgtaaacacccctttattgtggaaaaattgagtggctgccaaatgagtcatcctttgccgatgatatcttcgtcaaattaaccaccttgtggcaatggacatgttgcaaccaaactcagtacgtgcctgcgtacgaagcgacctagattttgacatggcggggcagcatgagcaaccggagatggcgccgcctccgccgcggcggcgcgtcgtgtgcgtcaccggcgccggcgggttcgt

SEQ ID NO: 46692 - DNA, 208 bp, Oryza sativa
tcttgtacccacaagggaggaaaatagattttctccccttaattgagaaaaatgggtcacgactccctactggaaaggaaggtttttctcctcttcgggtcgcgaaaccctggttaaaacggttcttagctcaatgccaatccaccatctttcggccctccaaatgccaaagtgcggtttcaagagaaatgatagggttcgaagatct

SEQ ID NO: 46693 - DNA, 469 bp, Oryza sativa
  unsure (1)..(469): unsure at all n locations
tggaattaagcaaatctccaggccattgtgtttttcgtcaacagttgtcctccgaccatgagtttgccccccactcccaaaatcgccctcggccacccactccgcgccgccgccgggagcccctngaccaacagtattggagagggcacgggagtggagaggcgaggaagacggngacgaagccgcttcgatctgccgctttgcggcctcgagcgccactaaggagccaagcactgcggcagcccacgaaggagaagagaaggggacggcgacaactgctacgagctcgatctgcattgggcgaggtcgatccggagtcacctcccttgatccgccccgccaacgtcgttccacctccgcaaagctcgatagccgctggaggggagattgccaatagaggtgatgacgtctatccatgccaccggagctccagaggacgangaggacttctattcatccacatctatat

SEQ ID NO: 46694 - DNA, 309 bp, Oryza sativa
tcactgagcctctttgactggacctgcaagattgaagagggccctggcgggattgcatattctcgctggagccctgacagtccttatatactaacaacatcagagtttcagcttcgtctgactgtttggtctcttgtaaatacagcatgcatacatgtacagtggccaaagcatgccttcacaggtgtttcttttactatagacgggaagttcgctgcaatctgtactaggcgtgactgcaaagattatgttaatttgctgtcatgccattccttggagataatgaatgcctatgctgttacactgtag

SEQ ID NO: 46695 - DNA, 278 bp, Oryza sativa
  unsure (1)..(278): unsure at all n locations
agcctttatggggagcttaagattctgagatatgagaagcggctggttgttagctagcttctaaaatctggaaaagctgggtttcctaacttctagcttttagttcattntctggattttataactacagcttctcaaaatctggaccaaaagatggactgtttgggggagcttctgattatgggagaagttgcaacagctaanagctcccccaaatagagccttaaattcattaagggtatagatgtgaacggcactttggccttctcctctagtct

SEQ ID NO: 46696 - DNA, 440 bp, Oryza sativa
  unsure (1)..(440): unsure at all n locations
cgagctcgccatgcatgaagtggagagctccacgatctttctctctccctccctttgtttcagaacagttaataactatgtcatcctcccctcttggcctcttctcaacccttcttcaccggaaaaaacaaaaagagagaacatattctataccactgaatttatcataggttaataacttaccattgactttctctctttctatattatactggcgactntatcaattgttctacaatacactattaggctgggcttatttttcaataatagcaaaaatacccttatggacatacaagtataacaattgatttatattcattagaagtttaaggaaaaaataaaacttttatgtggcctccttaggtataaaagtttgctataagttcaatntttttcatttctatctttaaatataacttatttgttatatgctatat

SEQ ID NO: 46697 - DNA, 254 bp, Oryza sativa
agagagcgcgagggaactgcaaacccagccctaaagcgtacatggactcaagtggtttatactatctcggcgcgctgaccgatctatcctaatcacttggtcaagagtacttcaaagcatagattatatattattgacatctacagccgacagagcacgtccaattatcccttctccatatactacatggccggtatgatctgtatcgcatcagcccggtataaacgacacgccatcggcaacccagccgatcg

SEQ ID NO: 46698 - DNA, 424 bp, Oryza sativa
  unsure (1)..(424): unsure at all n locations
gaaaaggatcatttcccactgcccttcattgtctaaatgttggaacggctggcaaatcattcattcttctgtttcctcgatgggtattccgggtatcatcaaattcctatccatccggaggaccagagtaatactacgttcacatgtctgtacaacacctatgcatatcgtaggatgtccttcggactgtgcaacgctcctgcatctttccaaaggtgtatgatgtctattttcttggacatgatcgaggacaatatggaagtcttcatggatgacttctctgtctatggaaagtccttcggtcattgtctacaaaatttagacaaagtcttacaatgatgcanagagaaggacttggtacttaattangaaaagtgccatttcatggtccgtgaagggatagttctttggcatcgagtgtctg

SEQ ID NO: 46699 - DNA, 228 bp, Oryza sativa
  unsure (1)..(228): unsure at all n locations
tgagataggagcatcccatactgctagtaatttgagtttcggaaatgatgttgcatggagattagatcctttccgtcataagcctttgaaagataaagctcaactaagttgtgtaaattcaagatgcaagcaaaagagtcttcattgagtttggagaagcacnaagttaattcagtaaggttaacgatgtttgaactggttgagatcaactgtgacatggattccttg

SEQ ID NO: 46700 - DNA, 439 bp, Oryza sativa
  unsure (1)..(439): unsure at all n locations
gattccttcttatttacacgcagcgtagcgcttttctatngctagntangctgatagcagcaagccctgcagcataaatctattatcatatnttgtggtgggcttatgctatcgcgcgtacgctgaatgtggtatttaatagtacgctataggttttgttgggactctgaaatcttacaagttttttagtattaactcatttcctgtgaaatttcacacaatttctgatgaaaatataagtatatgtgatataatttattttatacattaataatgatatcaaacatgtaaactagcataaccaaatcatgtatacgagactacacatgaatgtacagaacatgatggaaatgtactgatgattctaggtctggtgcattatggaaggccagcgagcaatcattgcatgcgcttncatataaaacttattagcacatcg

SEQ ID NO: 46701 - DNA, 219 bp, Oryza sativa
  unsure (1)..(219): unsure at all n locations
cccaacctaaccttgaacaaaagaatcgacccaacgcccgcctatggccggggttcccagacaggtaggttatggttgagccccacagcaacagaacatccttcgggagtggccacccggatgcccgtcctgtgccacgacatctcgactatcagatacncgctcttatagccttcattgcctcagagatatcatcnaccgacttcatcatctctatct

SEQ ID NO: 46702 - DNA, 336 bp, Oryza sativa
  unsure (1)..(336): unsure at all n locations
ctccggctcagcccaatggccgaacgggcagtggcgctcaatctctctccgagcgctagcggtgacgacggngagcagaacccgcgccgtcgagctcgtactccaccgccccctcttgccgaagtcttatgcgggaggaggcgctcaagggggtcgaaagatccgcgacttcgccgcccacgagcgatgaataaggacggcgagacggggagcgtcgcctcctcgtctacggcgatggcagcacgccccaaggcgcgctccaagctgcgggcgcgctcttgcgtcacccgccccgtcgtcctgatccagagactccagcccgacgttggctggatg

SEQ ID NO: 46703 - DNA, 228 bp, Oryza sativa
  unsure (1)..(228): unsure at all n locations
tttgtcccaaattcggagaaagagatgctgtggaccacaatgtcgagacattcacccttcctgcgggtacagaggacaaagtgaaaaggtggactctgaagaaaatggcagaacagtttcagagcttcaagggagatctgtaccagaagtatatactgaaggggcagacaccgaacttcgacacattcccaaagctaagggatcactgggacgagttcgtngcatata

SEQ ID NO: 46704 - DNA, 429 bp, Oryza sativa
  unsure (1)..(429): unsure at all n locations
aaagaaactacaggaatcggagtaaaaaaaagctctgttatggaaatgaccaaacaaaccacatgcacaaagtttatttctaatttaaccaattggactaagaactaatgcattaacttatttaagtaataagggcatgtttagatctgctgacaagttttttcaccctgtcacatcgaatgttttaacacctgtatgaaatattaaatataggcaaaaaaataactaattgcacagattgcgactaatttgcgagacaaatcttttaaacctaattgacaatgtggtgctagagtaaacatttgctaatgacggattatttaggcttaataaattcgtctcgcattttacagacggattctgtaatttgttttgtattagactancgttaatacttcacatgtgtgtcagtatatccgatctgacagg

SEQ ID NO: 46705 - DNA, 437 bp, Oryza sativa
  unsure (1)..(437): unsure at all n locations
agaagtcctggagaaattagcattggcttgctcagttgtgctagcttgatctcaatttcaggtagtactagtgcttttgttttagataatgaggtactagtacttgtgctaactttttggtatctgtttctgaaaaaaatgacaatgaagggaaaaagtactagtgcatttactttcagatatctagatttttttccgaagaaacagttatcccgaacatatcctatgcataaaaactccgagtgcacactntatacactccaactaacaaatattactaaaaaaatctagaaaaaaaatgtgtatatgttcaatagtattacacctatatgtaaaatcttaaacttaaattcattatattttaggcgtaaaaaacccccgacaatcttaaggctataaatccatcaaaaaattattattattactctctatgtatg

SEQ ID NO: 46706 - DNA, 339 bp, Oryza sativa
  unsure (1)..(339): unsure at all n locations
acaccttntaagatgcattgtactatctcctaaaaagttaagtaactgcggtataaaaggattttaaggtattgggcacttgatcacgcgcactttggcctaagcaaaaagtgcctaagtccctaaaagaacgtgacaggccacacctgaaaatatgggctgcagacatattaggcctaggccaaaacatatgccttcgacaccctttaaaggatgacgcatataacatgctcccgagtaataaatcttccgggtaatatagaccaagcgtaactcatatgaatagcttctgatctgagtggttatcccttatgggatactccaaaatagatgtaacaa

SEQ ID NO: 46707 - DNA, 434 bp, Oryza sativa
  unsure (1)..(434): unsure at all n locations
tcaacgataggctggtattntgcaattggctttgtttgttagttttcaacaatctaagtgtgtgctttccacaaccagagcgagacaagtctcggctcggtcggggagagaagtaaaccaatttatttgtaagattgcacaactcccagagttggcctcaaagctggtttcccaaaccaaatcaattttccaatcttttagagcttggttgtcaccaaacaaccagtcatttccagggtctccctgtcctgctgtctccctgacagccacttgcttttccaaacatcaggtttcccaaaccttagcatcttttcacaaagcagggtaaaacgaanactacgctaaggaatcacctcacatccgcccatgaccatgggtacggctggtcgaacagtttggtaacctctgcagagggggtacactttacccacacg

SEQ ID NO: 46708 - DNA, 361 bp, Oryza sativa
  unsure (1)..(361): unsure at all n locations
ttgctgatgcagnactaggggtctttctttagcttcacatttgtgattttcctaggtaatggtgagattttatagggtgatcaaatcctctgtgaggccatgagggggcgttcatctttctgtgtgcccctgagtgtgatatcttgatgatttcatcatccaaataggttcttttagttcaattttggggcagttttaggtgctcttttgagcttcttgggactagctgcctagccatatccaaaaggagacgcacttcttggttggttcttaacttgtctggaagctctacatccagtgaaacaaacactctttttcttcaagttacaacggtggtaatgtggtacgtgcctatttcttg

SEQ ID NO: 46709 - DNA, 257 bp, Oryza sativa
  unsure (1)..(257): unsure at all n locations
tgaccggcctcactggtctgttgcactggtctggtttttggtggcgatacagagccncaaccatcagaccgagccgacggcggtctgaccgagccgtggacgatctgaccggccactacactgcggtcagaccggccaggttgagtgggctcaatgattgccctgtaacggctagatttctagccgttacaaagtagtccggtttgaccggcctcacaacggcggtctgaccggcagagcacaaagttggggagttc

SEQ ID NO: 46710 - DNA, 431 bp, Oryza sativa
  unsure (1)..(431): unsure at all n locations
acacaaattggttgagagtggagatagagatatagaacatacagctgttgtttgtgttgtgttgatgcatggattgtttgagtcagaagcaatgtgctttgccgcctgactctaatggcatgtgtagtgaaaagttcaaaggacgagaggaggggctgaagagatcttgacattcacatcccccagcgcatgtgtcaagacctgaacttaggtactttacatgtagtactaccgtacttgttgcgttacatcacggtgcattgactatatatttgacatgcgcaactcaacatttctcgactntataagtgcagggaaggtgctgatccaggatntcaaggtttctaggcccttgtttaatccaaactttttcttcaactttcaacttttccatcacatcaaaactnttctacacacataaacttttaact

SEQ ID NO: 46711 - DNA, 168 bp, Oryza sativa
cgatgttgacagtcaagatagggaggtacaatgataaacttaagcgtagaaaccacgatatgttcaatgttccaagagttgacgacgagagtaccatcttatcgcttaagtcgataagaacctggccgggtgacttcaaagatgataaatggcccctcccatatagga

SEQ ID NO: 46712 - DNA, 364 bp, Oryza sativa
agctgtgtatcaggcttatgggcctgtaatccttgttcttgtgggcgcatccttctttgggagcagagtaatcaccgctgtgttgagattgtcgagattctgatgattcccacagtgaaatttcgtcagtgccgccagcacttcccctttgatgacttgccaacaccgttggtagaaaagcccggtgaatccatccggtcccggcgccttctcgttgggcatctcttttatcacctttcaaacttcctcttcagagaaaggcacttccagctcttgtaagttcggcgccagagggaagatatgattgaattggagctcacccgagttgggctccgacacacccaaaatttcctgaaatagtcct

SEQ ID NO: 46713 - DNA, 256 bp, Oryza sativa
  unsure (1)..(256): unsure at all n locations
ggctgccgacatattaagcctaggccaaaaaatatgccttcgacaccctttaaangtgacgcatgtgacatgctcccgagtaataaatcttccgagtaatatagaccaagcgtagctcatatgaatagcttctgatctgagtggttatcccttatgggatactccaaaatagatgtaacaattgaatcccgactggcgcangtattcagttgataacccttacggggaataataaataatccagtctttgagcata

SEQ ID NO: 46714 - DNA, 487 bp, Oryza sativa
  unsure (1)..(487): unsure at all n locations
accttaaaactcagcttccgagagattaaacttaaactttggcaggtggtttgggagaaaagcccctgcgagtgctgctgtttagaatttgatgaccacatgtagcagtttcagtctttcccttataaattatgatggctatgtgggctcataactagaaagtcttcacagaaccaaatgttgcaggagttggagaaagaatgaggcggttatgtgcttgcgaagcaactgtccagttttggacagaacagcaatcatcggttaaaactagagtctttttaagcaaactagggacaacggctaataacgaatagttagcgaacttttattagtctattacctgaaaagtattttactctggacggagtgttaagtgacgaatttgagagcagagctctatcagggtgcacgtagcacgaatgggtgtctctnttggtggcatcctgtcctggtttgagttgttttttaatggtattcgatgaatgtc

SEQ ID NO: 46715 - DNA, 241 bp, Oryza sativa
  unsure (1)..(241): unsure at all n locations
atatgtacggtactaataacactggaataaattttgaatgagaaccatgagagagattatgaaatgcatgtgccattagttnggtttaattaaaagagaaggggaggagaacaattctacttttccaatatatttagagggcttctatggataacccattggcataacctaaggtcaagggggctctgatactaacttgtcacgcgcggaatttctatcaaaattccaacgcttacatgtg

SEQ ID NO: 46716 - DNA, 475 bp, Oryza sativa
  unsure (1)..(475): unsure at all n locations
tcgcctcaccgcaagaaagagaacctgtccgccacctcgtctccattttgcttcgaagatacgcgtaaggggtgaagttgtgcccgatcgtgctgaacctgtcatcgacatcataagtgatgaggaagaagaggaagatcctgaagaaagagagccagctactccagaggaagaagatccatcgcttcgttccgacgcaaggcggaattagtcgcttagttagatcgttgccgtagttcgctgtgtttgattgcttgtttaagtttgcttgtgagtgtgtgggttttagatggtgcttacatcattggtgggatgtaacagcatgagtctagntctttcgcttgtcagagtgtaagatagttggtgagatagtgttaatgcaacttaaatgtaatcatacacagttaagagccatatagaatttaaattaaataaataacttccgtctaagggtgtctctctgtcgntctttcct

SEQ ID NO: 46717 - DNA, 194 bp, Oryza sativa
aatgatgtattcataattgtattatgtttaaacctacccgatatccatgaaagggaaaaatgttattattagatatcttcggcctgagacaattatgatcaataattctaaggcaaagatcgtaacgttgcaaaagatgagtcatctagttcccaaaagactaaaaagccgaagctcacttttgagatgcttat

SEQ ID NO: 46718 - DNA, 322 bp, Oryza sativa
tcacgttggcagcggaagccatccgataccgatgggcgatgctatttgttagataggattcaaatgggaggagattggtgtggtggttggggtgaggcacaagccggtgtaacttgtatatacagggtgcgctaggaagccgcgggacgcaacctgcaactgcaagcgccgggggtttgtcgaaatgttctgctaaaaaagctactgtaatgccgaactcgaccgagggcttacgtgtgcgccaagggggagggggggtgagccctaactcgaccgatgctgatgccgacgctgaccgccaagacgtcgacggtgggagggg

SEQ ID NO: 46719 - DNA, 243 bp, Oryza sativa
cggttatagatggtcttggaacccactctggtacaacaactgttatgggtaaacactgctctctttcaagattgggctcctggacagcgcatcagccaccagaatttcctttccagacttggattctatcacataatcaaactccattaacttcagtaacaacttgtggtgaatgtcctcacccatctttgactcatcatgaacttagactctgctgtctgtcttatgaacaaccttccccta

SEQ ID NO: 46720 - DNA, 380 bp, Oryza sativa
cgcacaccactctttttttcgtttcaactcatgtacgctgcatgaaatataacaactcctctccataacatctctcccaggtataaaagctatctgtgtgggactaacaaaccttctgagccactccagaaattttatttgtagcaattttagtaaaaattttgaaactgacattaagtaaacacataggccgatattgttgaatttttagaggctatttgcacttacgctattgttgaatatgtgggtgtcgctttaagactttgttgagttaatcctattataaaacaaatcccttggagaaaagttgtttttaaaagataacattcttgttggtcatcccaatcacgcaagacataagaattatctcctatatttat

SEQ ID NO: 46721 - DNA, 250 bp, Oryza sativa
  unsure (1)..(250): unsure at all n locations
ccgcgttgagtttacaccctcattatggttatttattttattacatgacnnntaaacattttgacacatgtttgatcattcattttattaaaaaacattatcattatttattttattgcgactcggtttatcatattataggtactttgcacaaaaagtttaaataacctaaatagtgaaacatgtgtaaaaagtcaatagcttcatctattaaaaaccgaaggtattatcatttaaacatgatctctcc

SEQ ID NO: 46722 - DNA, 359 bp, Oryza sativa
ccccatatactaataaactaaacaggtctctgtttttgttagcaaaggggacgtgccaaatactaatacaatccaatgagttaagtagcaaaagtaccagatcattacctggatgctacaccaaaccccgagctgatttagatatttctttcattcattcttccattttctcctctggcctgttacaggatttggccatacacaataagaaattattttttttacaaacagaccatgagcaggaaaacatattgtaaatttttttgcaaaagatcatttcaacatagcagcttgctgaagatttgtaattacctgatcagttcgggaccggacaaatttctagcaacatttctaagatg

SEQ ID NO: 46723 - DNA, 404 bp, Oryza sativa
tctgctcaaagatcaatgatgctggtattgctagcctatcttactgcaagaagttgatgtctctgaagctgaactccataccagatgtaacttcaagtgggcttctcttggtagctttcggttgcaaggctctatcttctctctaccttaatgattgcaagggaattgcagccagcactgagtggctggagtaccttggcagtgatggatcattggaagaactcgtcgtcaataattgcccgggaataagccagtatgactttttaaagtttggtcgaggatggatgaagcttaagaaatttgtgtttgtaaacaaggaaaccatggtgaaccacttcatcactcgccatgacccctcatacaatgctaactgtgtgtataaatatgatctgtgctgtgagaat

SEQ ID NO: 46724 - DNA, 231 bp, Oryza sativa
  unsure (1)..(231): unsure at all n locations
cttcaattggcatcggcgttggatccacgtcaccgaatctgtgtcnnnaccttcgccgccagagtgatggatgccaagctccgcctagtcgcgggcattggatccagccttctctcgagtcgtcgccgctagagtgatggatgtcgagctccgcttgggcgctggcatnggatctagccttcctgccagtcatcagcgccgcatccgacctangatggatagtattcacat

SEQ ID NO: 46725 - DNA, 476 bp, Oryza sativa
  unsure (1)..(476): unsure at all n locations
tctgttggtccatatgcaggtgttagattntgttaagaatcatgttggttcatctcctccattaatagctgggaattctgtttatgtggatttactatttttgaaggttagtaagaattgccctttagaggtgtcatatactagctgggatattgatgctttatttcttttactttgtgcaacacagtgagaaatgatacacagtgagatgagcatttttttctggggacattttctggtcatggaccaacacatctgcccattatgaattcttcactctgaacgcatgttattgcacaaatatatgctcaatatttcttgcgatactaggcataacatattgatcatttttgcaaggtttttccattntaaatatgacttataatcccttggaggatgatatttctattttatacttttctttacagaattatatgccgcagcttgcagncatcttctctcacgttattgtgatg

SEQ ID NO: 46726 - DNA, 341 bp, Oryza sativa
  unsure (1)..(341): unsure at all n locations
aagagagatcactttgtctacatgaagagattatagcaaacaaacggcggaatatattattagtatatgcatggctctgattgtacagcgtacgttcattcacatacttatacatgagaaatgagttatctaactggattagcatatacagatttgtaactctctttccatataccatcttaatgactttcatgcaaaatctatttactgtacagtggaagcatgcagcaatatatcttttggctattaactcatgtgatgaaaataccaattgcttaaatttgtcgatagttngtaagcctcacgttgttataatagaaagcaccgcgtgctatggcaag

SEQ ID NO: 46727 - DNA, 436 bp, Oryza sativa
  unsure (1)..(436): unsure at all n locations
atactntaaagtctgtaatgtctttgtctgtatgataaggagacaaatgactacttgcttaccattcgttaagatgctttcctgcaaaactcactggactagggaaattcttattttcttttctttccttttctttttttgtttttgaagagaatattcagaaacttcactttagcaagaatatactggcatcgctatactagctagttgtaaatgcccataaaccttacgcttgaccaatgaacagttcctagaacgtcagtcagatattggttggctgtggctgttagtacttcctctgtttcatattataagactttctagcattgtccacattcatatatatgttaatgaatctagacaacatatatatgaatgtgggtaatgctagaaagtcttataataagaaaccgaggaagtagtttttacaacaatg

SEQ ID NO: 46728 - DNA, 472 bp, Oryza sativa
  unsure (1)..(472): unsure at all n locations
aagagccatgatagatcctgtagatgttagattacttctgttcaccctttcatattaagagaaatttataatagttcagaaattacacaagcctggccggagctagtctccacagtgttccgtcaacatgatgcgcttggccacgcatgctgcactctgaatgtccatatcaaaaggtaaagctcatcgccttatatatttatgtctactatacaaaggcactcttaaaagcccccacatcaatcagaaaaagaactgaacgatgggcaccgtacaaacctagttaattaattnttgaagctaaattattatttttggaaagtacctcatcactgatgagtcataaacaaacaacgtctcagatgacctcagctatgatggcattggtatagtataccgtcataggtgagtcacctgtgatacgtgtcgaagtagattcatcagagataggttacctcttattggatcgtat

SEQ ID NO: 46729 - DNA, 275 bp, Oryza sativa
  unsure (1)..(275): unsure at all n locations
acatctatttagttggtgattccactcccactcctcccactccaccatgcctatcagattcatcctcttcanctcgggaaggcatgagcttggcggagttggctcgatgatggtagtatagttaggaattcagggccaacacgcttggttgcaggggcatgggtgagctgaaagtaatacagagacggaagtctgcagaggccatctgggagttggttgcagcaagcgatgtcattcatgatcaccatcgacaacctctcatatgcacctgctac

SEQ ID NO: 46730 - DNA, 397 bp, Oryza sativa
  unsure (1)..(397): unsure at all n locations
tactattataagcgccttttcatatgctgattgtgctggatcagntgatgacagaagatcaactggtggtttcgctatctttcttgggtccaatttggtttcttggagtgcacgaagcagagtacgaagcagagtataagctacagtatcctgttctagtacagaagcagagtacaaagcagtagctaatgctacagctgaggttatatggattcaaactttattgaaggaaatagatgttcaaacaccgcaagaagcatgtttgtggtgtgataatttggaagccatgtatctttcaagtaatccggtttttcatgcaaggacaaagcacattgaagttgattatcattttgttagagaaagagtggctcacaagcaatctggtattaaagttatt

SEQ ID NO: 46731 - DNA, 304 bp, Oryza sativa
  unsure (1)..(304): unsure at all n locations
tccgttatcgatagacacgtgacgtacctcttcgtatacgatcgggcgttgacttgctgggatatgaaataattcctggtactttgtgtgcatggtaaactgaattcactnnactagttattgtaagactctgatgcgtatgcgatggtttgtttcttggttcttgttatccttcttcctgtttctctagctgaatgtcaaatgctctaataattgctgcagaacacaagggagacagcgttcgctcttcgcaagctgcctttggtcaaggcgaagcggtaccttgaagatgttattgctcaca

SEQ ID NO: 46732 - DNA, 389 bp, Oryza sativa
  unsure (1)..(389): unsure at all n locations
tactaagcttcccgtatattgtgctgaagagatgcacttgatagtgtattgttttggctgtgtagnttcacccgagattccgtgttcaattttcaacacactcacatttttttcttataaaatgtttagagggggcctctcttcctccaaatctctttttttttttcaattctgtgctgaataaaaatggtggggaattggggattttaaattggtaaaatactttgataagcattaatgtttgacaaggtggggacaatccgccacgatcaagaagagatggcagaggtgagcacagattataaatcaaacagacctgatagctacactatacttgcaagctaaaccgaaattatgtctgattgtctcaagcacaactgcctgactga

SEQ ID NO: 46733 - DNA, 196 bp, Oryza sativa
  unsure (1)..(196): unsure at all n locations
attatttaattttgagagccaagtacaagtactactagtgttactgccaacacttnatcaatgttactgccaaaataaatgtttgttactgtctaagagccactgactacatgtattttccatacaaagtgggaaggcaaaaagaaaactacaatactacttggtgtcaatctacggcctaaacttctcaagaatc

SEQ ID NO: 46734 - DNA, 472 bp, Oryza sativa
  unsure (1)..(472): unsure at all n locations
tggtccacctcttgacatgctatagcaatagatatgatatgtcatatagtgtgcgatggattatatgctgattttgattagaaaggcttagatcggacaataggactagctagctaattagagagaaaatgttcatgacttttgtagcgtgcattgtagttacacacttacatgtatcgttatgctacgagcaatggcttttcttttatctctatttgctgtgttactctcgagttttagtttcacgccaatattcgtgcttccactctagaataataagacaatatttgttttgagcaaatacaattaaatggtcattttggtatacgggaaatgcacataagtacaaaccacctatgcctatttgtcattgtcaccaatatcaattcaattagaatgacaatgtagaagtgctaaattatcaaatctcagaaccatanacatatcatgatacatcgaaattgatcattta

SEQ ID NO: 46735 - DNA, 244 bp, Oryza sativa
  unsure (1)..(244): unsure at all n locations
ctactcagcaactgtgtcgaataacttcattgagatccatctcttnnnnncggcaaaggcactagttgtgtacctactcaaggtcactacggaccgacgatctcagcattaagcatcactccaagtaagcacaatatttttagttgactgcaactaggattatattggcttcctatgtggaaaaccattatcttcagattgtactcccactgtacggaatggggtaccaaaaagagaagaaagc

SEQ ID NO: 46736 - DNA, 436 bp, Oryza sativa
  unsure (1)..(436): unsure at all n locations
nttcctaacacttatgttaacccgaggaatctccaatgatccatgtatactatcttgcacgaattctttagccacatcagaaatggttatacacttttgagcatggtatntttatttacttttaattgtttaccaatgtacgtgcagtatacacgcataagaattattacaggtggtacatagccaccgacatcataaaagtacatagacatatggccacattgctggtagctgataaactatggtctatatgggaatgggagtaacaaagagacattcaacaatcttatgaagatatttagaggatgtgtatgcatcgctcctcttgttgtaaaagaagggcacagaaatagctaaattataactcgttgcaccgcanggagtagctgaggatgctcacaccgaacttcatttacggttntccattcatcttcta

SEQ ID NO: 46737 - DNA, 468 bp, Oryza sativa
  unsure (1)..(468): unsure at all n locations
caagagatcacctgcgttgtctcttatatgtaagagctagcttaacacaagctccaagatagagatagagagaggagaagaaaattaaagccaaccttataactaatataatatatgttggctttaaaatacactaatagtagaaaatgagctctaattaaatcccaactggcacgcgcattgattagtctcatgtcgatcacggcatcacgctctaattaaaacgatttgatgccgtcgcaaaaaataacatacagtactatgctggtaaacgtgtatgaatacatcctcagattgaggattaatctgaagctaaacctggatataaacacagcctataccttntacccatgcctagaagactggcgtatataaacacagcctanaccttttacccatgcctagaagactggcgttgtgaaacaataataccacaccactctagtgcgttgtggaacaatatccaca

SEQ ID NO: 46738 - DNA, 409 bp, Oryza sativa
  unsure (1)..(409): unsure at all n locations
cactcacgcttgctcatggtcatgaagtcgctttgccatactgttgtttttatcttaacaaggagaacggagtggcgaatatactataacagccgatgagtattataaccttatggccgatgaaagggaagatctggttcaatcaccgatacaagatgncgtttcatcctcttaagatggccgatatgggtatatcgcccttagttgttattgattggaatcggttgtgatttgccgatgtacaatggccggtatggttatatcgcccttagctgtgtttcatattgtaatcagatgtagtttgccaatgtgcaatggccgatattaatatatcgcccttaggcgctttataattattcaatggttggagagtgataattagggggtaatacatgaaattgatattttg

SEQ ID NO: 46739 - DNA, 214 bp, Oryza sativa
  unsure (1)..(214): unsure at all n locations
aatttccctatttcttcacaaaagaaggtaagaaattnnncncctctaagacattagaattgccataaatcgagtgattacatgcacattctttacagaaaagggacttctggttgtgggattccataatctggctacanaatcatgtaagctatatgagaatgaagcaatgaaagtgacaccaatagttttgagacatcctgtgattggcata

SEQ ID NO: 46740 - DNA, 429 bp, Oryza sativa
  unsure (1)..(429): unsure at all n locations
tgttactccatctttnttaaaatactagtaagtgtgctttggtttccacgttgctaataaaataaataaaacacataatataattgttcaagtgctaaataattttcagatttcattttttgtttcaagatcgattaacgatcagtgaggcggtcagaccctagcttcatataatcacacagaaccaaaatttgagggagtcccatctaccttttgttacagtaataacgttttcaaagagtaccacaccaaggaaattatttaacttgttgacgtagtgcctgtcttgcaagacacggattgttcctgtcaaaggaaataaaatacattctcgagccaatccaccaattatattcatcatcttgaagaacatanatatcacaatncattacaagagagaatctttntganaacagcttttggtgagct

SEQ ID NO: 46741 - DNA, 203 bp, Oryza sativa
  unsure (1)..(203): unsure at all n locations
tttaataataccatcttgggaggtccgtttgntntccagtaactgcttagcaacagtcggacaagtgggtaatgttggggtgaaccaaaaaagtttgggtagagccgggtctaagtgttggctaagtaaacgccccgtagaagaggggtagtatgaaccctgtggaccaccccatggggcggtgaagggaaagccccattgga

SEQ ID NO: 46742 - DNA, 176 bp, Oryza sativa
  unsure (1)..(176): unsure at all n locations
gttatccttgtccgcatctcacaacgtggcataatatnanncncttcttcacggactaaagattgcaatctctttggggaatcggcgtataatactctgaggagattctcaggtggttgttaatcaatgtatgaaagagtgggcctgccttgatgataacatgaccgcttaccgac

SEQ ID NO: 46743 - DNA, 421 bp, Oryza sativa
tctaagatcatgtgactatcgaactttggctataggatatagttgtaatgaagtcaggatgatacaacatgctgatattggcgtatgaattactggcagagaacgttttcaagcagcataggctgctgactatagcgttggcagtaactctttcttatcaaatcgcccttcatgctatcccccattacttaatgaagctttgtacctcatcttactattgaattgatgacacattcataagatcttattattttataataatctgcgtactatgtataaatcaactattggatggccgactagagagggacacctagagagggagtactccttccgtcccaaatataacacattgtcggacggatgtgacatatcttagtattacaaatttagacatgacgcatatccagattcgtagtac

SEQ ID NO: 46744 - DNA, 284 bp, Oryza sativa
acgctaatcgagccgtttatgttaacaagaccccgtccctgagcaaaggttactgatgtgagaaaattttccggccgtcacggatgacacacatctcaatcgggccaacactatagcccgtcacggatgactctcatctctaataggcctaagtcacggatgacacacatctcaatcgggccaacactataggcccgcacggatgactctcatctctaacagggcaacactatagcccggcacggatgactctcatctctaacgggcctatattatagcttgct

SEQ ID NO: 46745 - DNA, 464 bp, Oryza sativa
  unsure (1)..(464): unsure at all n locations
cttgtaaaaggctcatccnctcctgctgactctcaaatgttgtgcatacgctttgctcttccattatctcactcttgtcaccatgcaaaggtccagaattgtttccatgcttcttcttccattattgtcaaagtgtgagaataatgattgtggtaggatataattcactctagatcgtatccttttgttgttggaactgtttcttagaagaacagattgtttcaggctgaagacacctccagcttcaccactgtttccttccatagagatggaaaccaacacctctctttttttttttttgctgggttggccgaaaataactcctgtcaaatggctttccagaaggagttaccaatctctcggccagtcaaaccttcagcttccagggtatatactatctgctctgtagcttctatactgaatgctaagatctagatgcaatttcttcctaattgaatacacat

SEQ ID NO: 46746 - DNA, 429 bp, Oryza sativa
  unsure (1)..(429): unsure at all n locations
tgagggtcggcacatcataacagaagtgcaagattattgtcgtcctagtgccccggccgaagccgccaagaactatgtacgtcacagcggttgggttgtgcgggataacgtgcctgtcagtacggtgtactggcgaagaacaagggcacgcggagatcatgagagctttgtcccagattcggagaaagagatgctgtggaccacaatgctcgagacattcacccttcctgcgggtacagaggacaaagtgaaaaggtggactctgaagaaaatggcagaacagtttcagagcttcaagggagatctgtaccagaagtatatactgaaggggcagacaccgaacttcgacacattcccaaagctaagggatcactgngacgagttcgttgcatataagacaggtgaacaagggcatgcgatgatggaaag

SEQ ID NO: 46747 - DNA, 192 bp, Oryza sativa
  unsure (1)..(192): unsure at all n locations
ggcgagcctcatcccactccaaattaaatctttggaaaaacacaaaagcccacctcatgggatggcatgcatgtggagtttantaccatcttgcttattctaggagagggggacctccttaaaagggaggatgccctcctagcccacttgagcatgtgtggtggagagaagaggggaaacacacgcgcgcgc

SEQ ID NO: 46748 - DNA, 443 bp, Oryza sativa
  unsure (1)..(443): unsure at all n locations
tttctgtttcttcgcgcgggatcttgatgtgtgtttggtttgtgcatttgaaatattgcgtggttcttcaacagcccaagccatcggatgaattctacttggatctgggtgatcttcctaagagctatgccaatctaatgaaagatattcctcgtcgcttggaagaaattatcaaagctgaggcgccctccaccagtaaggggaagaagctcttcaagagaatctcggggaagctatatactgcccagagtggcacatttttggttcatctcacgcctgataaggatactgcagattctggaagagtgtctctgctattccgctggaaagacttgtatttcgagggattnntactccanggtacgtattaccgtatatctaatctactcgctttatcatgcattatattactaacttattaagaacactagccatactggctc

SEQ ID NO: 46749 - DNA, 266 bp, Oryza sativa
  unsure (1)..(266): unsure at all n locations
cctatcttggaagggggtcctccctcccaaactttcccttaatatcttgngggcnccgtgtctaagtcatcctgctcttcttctcttaatacactattttcgaatccagaggaatgggacccccagtatccagaaaggtgttggaaatatagtcattattcggcatatcttaatccaagagaatgaaactatgatcatcgcataagcacggtatggtgatcataacatacaccagagcatactaagcgcatcatgaatgtcagaac

SEQ ID NO: 46750 - DNA, 167 bp, Oryza sativa
tgacagcataagcaatcaagcaaagcttctttttattcttaccctaaagacggagcttgcagtgcgttctcgcattctagctagctgccatttggaacacacataggagcgtattaagcttatgctagcttgccaccacggcatccaatgagtaatttagtggtgat

SEQ ID NO: 46751 - DNA, 238 bp, Oryza sativa
  unsure (1)..(238): unsure at all n locations
tatgcactggtttagatagattttatttttatgaggcccagantttcgcgagaggttctgtttttgtaggccttcatacaatttatgcttttatccctacaactttcattaatagatgcacgtttttagacttacattatttaattgattctattcttcttcacttgtttctggcagacctcaatcctcacagacccctgctagcaaaggcacatattcacaggtggggtactcatat

SEQ ID NO: 46752 - DNA, 345 bp, Oryza sativa
aatcaacctcatgatgtaaggggcataatagattcttgtgtgaaggtccccttggagatggcaatctcttgcatcatgagagacacaatgtcgaactgacggccctgaatgattgcatcgatgacgtgcaaagccaccccccctaatgtcatcattgttgccaaggcgagggaggatggtagctctcacaatcctgttaaccacactggggatagtcctcaagccggcaaccttcccatgtgtgtaccgcactccatcttcataaaactgagagagatagtctatggagagcggattgtgagtgtgctcctcatgcaagtcatatccaaagtccaagcgaatatt

SEQ ID NO: 46753 - DNA, 257 bp, Oryza sativa
  unsure (1)..(257): unsure at all n locations
ttcacttcttcctttagtaatagttgtttaagtattggtgacnnnnatcgaatagatgggttttactagatcatgttctgttggattgtcttgtgtacaaataatcagtttcaattttttttattactttgtaggatcgtcacatctgacaccaatgtccaccactgttctgatctactttcttatgactatattgctctcttgggtggattgctgaatagcacgtatttatctttatgcagacatatgaaagagat

SEQ ID NO: 46754 - DNA, 470 bp, Oryza sativa
  unsure (1)..(470): unsure at all n locations
tagcgaaatctgagaaggcacctctacccacaaaatgctagtgcatggtttttcgcttcttcctgaaccgaaagttggtgaatagctagctatttgcaccttctatgagcgtgcgtgtattcccttcactgtagccatatatcctgatgcttgtgagaagaatgaanaaagcttcaacgcgccgattanatacatttatttctgagtgtcaagattatttctgtcgtgttttaaagagaggaccctaaggttaatcttgaagaagaaaagaagagagactcatctctacggaaacaccttttcaacgatcaaaaatttcaacttatgcaatcgacttactgggtcaaaattacaccctctgagacccaaaaatagcctaatgtttgtcatcattacacccttgaccttgagacanagacatgtatgtatatatatattcagaaaagcatgatgatgatgtatgtatatag

SEQ ID NO: 46755 - DNA, 260 bp, Oryza sativa
  unsure (1)..(260): unsure at all n locations
ttatattttatcactattaatgtccaactgcaaaatttcttgcaagggtgaattggttcaatcaggaagttaacttcacaaatttataattagaattaatgtcaacagggtaaaagactgcgatgtcatgccactattgtgaaacaatggtgtgtatctcctgcaaatgataaaacaaaggaagtaaaatgatggatacagaatggtttgacaatacaaatntagattagaggaatcatccattacagcatgtttatgtc

SEQ ID NO: 46756 - DNA, 456 bp, Oryza sativa
  unsure (1)..(456): unsure at all n locations
ntgtgctgccttttcagcatctcgacattgatgttcgccgttatgttccgccgctgtttntagttnttttaaaaaagnttggtttacagcccatgtatcatgtcagttcttgcaaaaagggagagtgcgtacggtgttggatccagtcctataaggcctaggccaacctagactattttggcccgtgtacaacttaaaagtgagtctacacctatggatctctctggctgcccatataatctatctgcaagagctcgaaaagccatcatattcacgtactatatatgaaggcctagaaatgaacatattaattagaaaaaacacttagatcgtggtgatatcaaattataatggtgtagcttaattgcaatagttgtagttttaatactacctatagaaacagaagaanatggttggtatatgaaatccaatcctatctttaatatttattggtac

SEQ ID NO: 46757 - DNA, 295 bp, Oryza sativa
tatggtctatcgtgaatgtgagtcacatatgatgcgtaatgtgcctggaaccaaaatccaaacactgccggcctccgtcccaagaaaaacccaacctttactatgatgaactaggggtgaaaacggtacggaaatttccgagaattccggctaccgcttccggtttgcaccgaccgtttcaatcggtatcggtaattgtcggcatcggaaatggaaacggtaatctctttcggaaatggtagcggaaatgatatggggttttttccgaccgtttcggcggaaccgtatttatcgg

SEQ ID NO: 46758 - DNA, 467 bp, Oryza sativa
  unsure (1)..(467): unsure at all n locations
agctgcagtattangcctgttgtgctgaaacaacttatttttctcatgaaaaccggtagctaactatattttaacgaactaaactggatcggccgatcatatatattctccttttgcagaaatctgtcctccagtggtttgagtgctgacataatatccgcttttgggaatctcaaggctcttcaatacttgtacgttctgagctcagcatgttaacaatgtttttatgcttatttgcgatactatattggtatatttggaataacctgttccatatcttggttttatgcttcttgatccacatcttgcagggatctatcaaacaacaagttgaccggctcaattcccgatgtcctctcacacttacccttccttgagagttgtgtaagtttggcaatgcaacttttgcaaaatatattatatatacctgcttgcatcattttactgaaaacacatatatgtttcgc

SEQ ID NO: 46759 - DNA, 436 bp, Oryza sativa
  unsure (1)..(436): unsure at all n locations
aagtaatgggtgattcatgggtccaaaattctttatcttcgctcacccatataagcggggagagatgaactctgttcaagagaaaagaaatgatacttcggtgggtggttatggtcaagatgttgcaccatgagccacaaaatgtgaggcaatgatccttcctcataatctccggaatagcctagtggttgccacacagtagacatctacaagcgttggaagtatagaccaattagaatttcaattgaaactcattaggaactcggaaatggtgttatgggtatattatcatgttctgtcccacatactattatgcaataggttaaccttaattcaacatgtgaatgcataaatttcttggttaatacatgcctacagatgccctggttataccccacattatggtataaagttacaattnttagacacatatatt

SEQ ID NO: 46760 - DNA, 356 bp, Oryza sativa
  unsure (1)..(356): unsure at all n locations
tctaccgaanactaatgggaagaggaggaactatgatgtttatctgtgagatgccctaccgagacgaggcggtgcgctatgacgagaggccgactgcacgggagtgatctctccggcctcgggctggggaagaggaagaagacgagcgcccggagtccccttccgcgtcctagcacgcaccggctcctccggcacacgcgacggcggcggtcggcgatagagagacagaggggacggcaatggcgcggtggagcgagggagaatgggagagggaaaggaagggagggcgccttggtttaataagagggcaatgtctgtttggaaaccgacctatggcggtcaatgagcgagctggc

SEQ ID NO: 46761 - DNA, 258 bp, Oryza sativa
  unsure (1)..(258): unsure at all n locations
agagagagcaaagctatctactaacctgtnnatnccggagtagagaaaaacgaggcaatgtattatagagctatagatacccatgtagacatactattgagatggtttactattaatctagtctattgctgagatgtacatgttttatagatagcaccttactttaccattgccggtgctcttaggctgcgttctttccacaagtttcccaacccctttctctcgttttcgcgtgcacgctatgtaactgtaaatggg

SEQ ID NO: 46762 - DNA, 314 bp, Oryza sativa
cataatctcacgtagattgacctggaagatgtgagagaacgtcataatcgacttgctaaaatgcgcacccttctgttccgtcatgagatgaaagcaaaacggataaagaagatcaagtccaggacttatcaccggatgttgaaaaaggataaactgatggcagcatctgcagactttgaggcagatccggaagctgcccaagagcatgctatgaaacacgaatttaaacgtgcagagggtagttattttctaggttatttctcattattcaagcttgtttcatatgtgttcctattagactgaccaacttattt

SEQ ID NO: 46763 - DNA, 229 bp, Oryza sativa
  unsure (1)..(229): unsure at all n locations
tccttgtttcttcggactttcccaaacacaaaatacctcttgtattcgcactctcaaatgagagtggaagaaattcgactntcatataatatcttaatagaattccatgtaatgatcaatgcattttttggattctatattattcgcatgtctagaatcctaccaagagaataccccccattnttatgtaatggaagtatgattgacaaataagatataacataatact

SEQ ID NO: 46764 - DNA, 372 bp, Oryza sativa
  unsure (1)..(372): unsure at all n locations
aaaagagcagcggatttagtagcatcagctgcaataaaggctcgttgtcattatgntaataaaaagtggttcagtggtatgttaacgaattggtcgattactacaactagactttttcaatttagaaacttaagagcagaagaaaagatgggaaaattccaccatcttccaaaaagagatgtggcaatcttgaagagaaaattatctaccttgcaaagatatctcggcgggatcaaatatatgacgaggttgcctgacattgtgatcgtcctcgatcagcacaaagagtatatagctcttcgggaatgtgccattttggggattcctactatctctttagccgatacaaatgtgaccagatctcgcgatata

SEQ ID NO: 46765 - DNA, 209 bp, Oryza sativa
  unsure (1)..(209): unsure at all n locations
cggagacttccattccctgggagtgcatgtgcgcacctgcactggacccacccacttgtcctccccatgtacacaaaagatgttttacctagtgtaattataatgtttcactatatatagatctaatattacagggaattaaaatattcttttgcaacanatcacccacattttggaaactctctattaaggaatttgggttatatttt

SEQ ID NO: 46766 - DNA, 351 bp, Oryza sativa
  unsure (1)..(351): unsure at all n locations
acactatanaacactcacgcctagcgagcacatactaccatgatgatgagagccatgattctttccggcccgagatccctcaccttgtttggtgacaccttcaccaagcccatcatcctgagagtaatagaactgtgccccaagctgcgatctctcgatgttatcaatgacgcctacctgaggatggacgaggaggatgagctgacgaacaagtggtcgaagatcaaggatttcaggctcttcaggcctcctcctaaggagtccaggtctgaaagtgatgatgaatgcattcggggctgctgctgctgcgactcacgcgattaacttcggatatctaccctagtattatta

SEQ ID NO: 46767 - DNA, 443 bp, Oryza sativa
ggcacttagcaccaaaccgcacccacattcattctacatccaatgactgaacaacagtggtaaggcgaaggtaacaaaactggtgcacattaattttgcaattggaaattaccatgatgttgttgaatgtgatgttgtgcccatgcaagcatgtaatattctgctaggtagaccatggcaatttgatagggattctatgcatcatggtaggtccaaccagtactcttttctgtaccatgataagaaaattgtgttgcatcccatgtctcctgaagatattttgcgtgatgatgttgctaaggctgccaaatccaaatgtgagagtgataaaaaagccccatctgatggcaagaaacctgagacaatcaatttgaaacccacatgcttacttactactaaatctgatattaatgagttgattgctcacccttcagtgctatgct

SEQ ID NO: 46768 - DNA, 215 bp, Oryza sativa
  unsure (1)..(215): unsure at all n locations
gcacgttccgacccgacagagagaaggagagctgtcactcgccctacaaactcccgagcatccaggacgaacacgagggaaaggcgtgattccctggaagattggattcaaggaggacatccacacgtacaggagtcggatgaggagcaagagagataccgaggcgaagatgcagatcttgagtacagggtatcgagctacgagctcancatgca

SEQ ID NO: 46769 - DNA, 369 bp, Oryza sativa
  unsure (1)..(369): unsure at all n locations
tggcacccagagttgtgaaatttcgttcgaggtatttttatgacactgntctcttcgtcgtcgtccatctcgtcttcaccgaatgccgtcgacaggtcaatgtatgagagtctggtgaggcggccgatgccggcgggtacccggccggcgaagttggtgtcggagaggtcaaggtgggtgagctcggtgagcttctcgaaccccgtggatgggagctgggacatgctgaaattgttcctggagatgtcaaggtactccagcgaggtgaggccgaacagcgcggcgtcaaggctctcggcttgcagctcccggccgcgcaagtcgagggaggtgacacggtcgtcgccgtcgcctgcgcagcggacgccc

SEQ ID NO: 46770 - DNA, 382 bp, Oryza sativa
tgctagcatgtgtacaggcggcaggagactttagcttcacgttcatgaaggacgcggggcagtccccgcaggtgtcgtactaccactacatcatcgtgggcggcggcacggccgggtgcccgctcgcggcgacgctgtcgcagcgcttccgcgtgctcctgcttgagcgcggcggctcgccgtacgacgacgagcggatcgggaacatgacacgcttcgcggacacgctgttcgacacgtacccctcgtcgcccgcgcagcggttcgtgtccgaggacggcgtgatcaactcgcgcccgcgggtgctgggcggcggcagcttgatcaacgccgggttctacacgcgcgccagcgacgaatacgtgcgtggactcgggtggga

SEQ ID NO: 46771 - DNA, 202 bp, Oryza sativa
  unsure (1)..(202): unsure at all n locations
tacgtataccttaccattgggtgaataactcacggaaagaggagaggtttgactttaatannnccaagtgacaaaagttttgacttgctactccgagaaaagcaaattcaacttcctaccggtcatacaattccatcggctgaagaaattgggcaagataaggtattgcacggtgcataattcttgtctcatactactaatg

SEQ ID NO: 46772 - DNA, 398 bp, Oryza sativa
  unsure (1)..(398): unsure at all n locations
ttcaaatntaccctatatcatgtccnctatttatttttctttcttgatgaatatagnggccagaccatacactttaagggagagaagagcgtgggctataggctcaatgggtggatgcaaggtgtacaccgggatcaaagggggagaaactatctaaggtggtagggagtgtagagttgggagacaatggacacaaatatggagttgtggctagagaaggggagagaggagaaactatgttacgtttgggatatggttgctgcagtgtttagatatgcgaatgggagtgaaaaaaaatcagagggctgatagttatactctggatcatgtttaatgctagaactccctcgttccaaatataggccaaccccctttattaagacaaaaaaatattatct

SEQ ID NO: 46773 - DNA, 222 bp, Oryza sativa
  unsure (1)..(222): unsure at all n locations
tgctacaaactagtaagatgaggactaancannaaggggaggtcggtcacgtacaataagtgatgatgagatacgcttactggatggagagcaaactttagctcagcaaactgaactagagtgttcagaacgtttcagggccttactatggatgcctcattgccatcacaaaatctcaaaagttcgggaaaatgcaagctattgctagcctctgtcatatac

SEQ ID NO: 46774 - DNA, 363 bp, Oryza sativa
tctcccgacgtggctgatccccacgggctgggtgtattctttttattaatgccgcgcgggtaaagtgttcctcctctgcagaggttatcaaactgttctaacagctgtgcccatggtcatgggcggatgtgaagagattcctaccgtatttttgtttgactactgcttgtgaaattgctgttgtggaaaggggttcgatgtttgtaaaatctgcagctgatgggatcagctaggcccgggtggccgtttgaaagttgatggcccgggtggtcgtatgaaaagctgttgtgcgggtgccaacccttgtttcttaattttaagactgatacattgcacatactccgaccggacgagactcacttg

SEQ ID NO: 46775 - DNA, 335 bp, Oryza sativa
  unsure (1)..(335): unsure at all n locations
gtatataatactacagtcaattcctaataatgcgtatcgcaacagtaatattcgatatttactaataatatttccttctaaaagtactatattattcactgaacggctggactatatatgccgctgttgtcgggcgtctacgtcttcaccnaaagctagacttcgccactgccgactggtgtcttcgcctacacggatggcttataatgccgccgttgttgggcagttacgtcttctccgaccggccacctcgtatgacaccaactggtgctatcgttttcacggctggccacgtagccaccaccagaaatatgcgttattagcctcaacgcaag

SEQ ID NO: 46776 - DNA, 388 bp, Oryza sativa
tgagggtcgacacatcataacggaagtgcaagaagatggtcgtcttattgccccggccgaagccgccaagaactatgttcgtcacagcggttgggttgtgcgggataacatgcctgtcagtactgtgtactggcgaagaacaaggttacgcggagatcatgagagctgtgtcccagattcggagaaagagatgctgtggaccacaatgctcgagacattcacccttcctgcgggtacagatgacaaagtgacaaggtggactctgaataaaatggcagaacagtttcatagcttcaagggagatctgtaccagaagtatatactgaaggggcagacaccgaacttcgacacattcccaaagttaatggatcactgggacgagttcgtt

SEQ ID NO: 46777 - DNA, 236 bp, Oryza sativa
atatcattagctaaatgatgtgaaatatcattgcagtttctccaaagggttcctgccttgatgaagactcaaattatgttggtgttgctcgtttacttaatggcggtttggcaggaattactgctgcatctgtaacttatcccttggatgttgcccgacctcgttgcaacacacgaatgctatcctttttcaaataaacattgctattgataatttaacatatcttaatatctcaa

SEQ ID NO: 46778 - DNA, 418 bp, Oryza sativa
  unsure (1)..(418): unsure at all n locations
taagcttccgccgaggatgagtnccactgatggaagagaggattctgatctatactgagggcgtggaaagaagtatagcgtaggtctttgctgcttgtttcgatcacgcgacatgaacataagagggatcaatccacagcgaacttgtctattttatttgtcaacaattgcgactacaattaatgcatcttcctctactttaagcacctttttattcttttccgcgagatcttttattcctaatgacataacaacttttagctataaatctggacacatagttgtctaagtttatagctaaaaatacttatgttttgggacggatgttgttgcatatatattacatatataccaacatagacattcgtacgtcctagcaatgaaagaaggaataaatatagtattttataataatgat

SEQ ID NO: 46779 - DNA, 188 bp, Oryza sativa
  unsure (1)..(188): unsure at all n locations
ctttcttgacggaaaacttgagtgatgtgaattatactgagaagaangtgantaagaaacaattggaggatattacatagaacagaaagcaaactgaattttcatgtcaagaaaaactcctaccagcttgtcgaaacaagatanttgtaatactataagggggtggctatcacgctggaaaagtggat

SEQ ID NO: 46780 - DNA, 456 bp, Oryza sativa
tgactacccaaacacaagcgcaccgactaggtgtttattctctataagttcaagtcctagaagaagcagtcgaaaaacccgcattactcaacttaatctaaacatacaacctgcacaaatagatatttcaacatagcaggagtcagtacattatttctattcaaaggagcgcaatatgcagttcaattttagcatatatcaagttttgtttcacaatacttatgtaaaggagtcgatgattcaattaatcaaaacatttttgtaagttcataataaatatcattatatcatcataagcatactcttgttgtcttccttgacaacaagtcatataatcatcatcacactcacacaactcaatacatttcaccccatccaaatccaagtttcataacacattttaaaacataagtctatactcatgacactttaccaagcactcatgaccgtgagcat

SEQ ID NO: 46781 - DNA, 181 bp, Oryza sativa
  unsure (1)..(181): unsure at all n locations
agagaacatcacccttggtgagttagcctctnacgcgctggggtcattgcctcatcgccacaaagaagcataaacgggttaaacttggttggtcttgggggggtcgtccgaagggcccaaagaacagatagcacttcctctggccatttgcccttcgctgccccctcgagccttttcttta

SEQ ID NO: 46782 - DNA, 252 bp, Oryza sativa
agggaccggggatagctcgcccttttctcctatattccttcctctttgtctctctctactcctcactggcgcccgatagcccctagattgaaagcatcggctctaggcatcagatttgaaggtggcctagatgtggatctaggcagcaaggggcagagtggtgcaagcaccgcttgccttgagctcgcaagaaggaagctcgagcagagaggcgctatgaaggggagaaggcaagcttctcgtagcctcgat

SEQ ID NO: 46783 - DNA, 375 bp, Oryza sativa
  unsure (1)..(375): unsure at all n locations
ccattagccccaaagaagcttgatcttggcaaggcgccaatagctcctccaaagccttcagccgaattcacattgggcatgccattggtcggagacgatgccttattcaagatgggccctgcatgcaaggagttgcacgggtactacatggagaagtccaacgcaaggaggaagaatagagagacctccatgttgggccagcatgatggtcagccgttcctcgggcctactgccttcatcgtcgtagacttcaaaggtctatgggacctctacagggtgcgagcgatcgacaccaacctncttaagtgctactccttgtaagtatatcttggtacgcgatatggtagtgacttgtcaccaattaagcttaccctg

SEQ ID NO: 46784 - DNA, 244 bp, Oryza sativa
tcggactgacatttctgttgttgctaatggatgatttgtcttcgccgacttattatttcaccttcatggttgacctactatgcaaacactgatgagcgtcttcgtcattttcatcggctgttacaccgctattgactggatcgccgacatcgtcatcttcatcaacatcctgtcaagcctcttcaacatagcctactctgctgccgttgataggcaacttcgtcatcatagccggctatctctg

SEQ ID NO: 46785 - DNA, 446 bp, Oryza sativa
  unsure (1)..(446): unsure at all n locations
ttntgcaccgttaaaaaatcaaagntactctagaacaatttatttatatttcatcatttgttactaatatttattgacaaaacaatgagtgccagcctcctaccatttaggtgattcctaaacgcattctacagctctttccggctcctctccactgaattgccccctattgtccttctaggttcccacatgcctctctttcatcgaatggcatagccaggaatatagaggccctagcaatagatgggtgcatatgtctctcctttgtttagtggcaaagcctacgcatagagcccccgactagagagggacacctagagagggagtactccttccgtcccaaatattaacaaatttggtcggatgtgacatattctagtattacaaatctagacatgacgcatattcagattcgtagtactaggaaattgtaccttccatcaaaa

SEQ ID NO: 46786 - DNA, 204 bp, Oryza sativa
  unsure (1)..(204): unsure at all n locations
caacaggctgcagcacgtcgtagctcgtacgcggccgaccgatttcctatccgcccatgcctaagaaaccattaaggccgggatcgaatcttctttcgtccaacctctagtaactagtctcacgcacattcttcagactactaaaccatatattgtntattaaaaattctatgaaaaagctgcttgaagaaacatattaatcta

SEQ ID NO: 46787 - DNA, 407 bp, Oryza sativa
  unsure (1)..(407): unsure at all n locations
tcttctcagatgaagaataagcatgcaagtatttcatgttcttatttctaaagcaggaagaatacacaattagatcctaaacgttcgttatgagatggatggttggatcattggctactgccaaagttgtagtccctatactgactgcacctgattaaattacattgtgagagagggggcggtcactatatctttgccattgtgagagagggggcattagaaagtgattaaagactaccatatatattaaagtacactatctctttcctcttccttctctctccctaagagaaccacaacaattgtattgtgattttttaaaatgtgggccncagcagcctaccttaaaattaatttcttatttatacacgtgaagaatataatatcaagaggacgtgactcccgct

SEQ ID NO: 46788 - DNA, 392 bp, Oryza sativa
  unsure (1)..(392): unsure at all n locations
ntgtattaataagattaatagagcacatatgctttaattttaatnggccataatcattgtaagcactatacagtactccagtattcttttcatgggaaaacaagcgtctcctagactccatcttcttcacgatcttgtccagtactccgtattatggttgttaatctcgacaaatactttagctctacacgcctttataaaatcgaaaagaacgtgaattgaagataaaagaaaaagttactgggattcagatcgccgtcacgttccgcaccgtaacgaaacgtaaataacggccgccgaggataaagaggacggaccagcagctaagcacccgccgcggaagaagaaaaaaggagacgacccgtcgcgccgcggtcgtcgtccggcaaacg

SEQ ID NO: 46789 - DNA, 223 bp, Oryza sativa
  unsure (1)..(223): unsure at all n locations
ctcaagcttgcgcaagtaatgcgatttcgatgtgtatctatatttctagtatacatacgtgntgattcagacttcagagcatccgagcaggtcacaatatatgcatgctgttctttctgaacatgcaagctatctaaacgatactattggatggattcgatgttcaatgatagtccatttggtgaccccgtcctgtgtaacatgacaatggacagttggactc

SEQ ID NO: 46790 - DNA, 314 bp, Oryza sativa
atagcatatgcagtcccatcacatttttctttacctatcaatgatgatgcaggcgctataacaatgccagctatacctctccagaatcagaatgagtagccatgtttgtgattttcagctcgctacttatcactgtaatcgaaagtttgcagcaatcatgtaataaataaatatattcatggttataaacagtgagctcgctatgtttatggataattcctgttgaggatacaatgtaccgatgttaagcaccttcccctttttgttaaagcaaggtctttgattcgataataaaggagaaatgtgtatacaga

SEQ ID NO: 46791 - DNA, 226 bp, Oryza sativa
  unsure (1)..(226): unsure at all n locations
catggatcctgtgtatctaaggctttagaggaagcttatcattnatnccaactctatagcacatattttctgtatttattcctctttacttacattgagcacatcttctcagttgccagggcgcactgataatgaaataaagaattactggaatactctaataaagagatgccagcgagctggcctacccatctattctaccagcgtatgcaatcaatcctcaaat

SEQ ID NO: 46792 - DNA, 343 bp, Oryza sativa
  unsure (1)..(343): unsure at all n locations
ttgcaattgatgcacttgcgattgggcggcagcttcatgagcccacggatgatcttctcgttcctctcctcctccctgcgggtccccatcccccaccgtgagagaaagaaatcaaaatccccccgaaaatttcaccccacaaatcgcagcgaaaactgagagccttcgctggctcggcccccgaaatcggtgaaccctagctcgattggggcctcgcggggctgcgattcgggcgctggttggggggggattggaggttgggtgggctanggtttactggagaggaggaggagggagtgggcaaaatgggaatggctgctgcgactgcgagtctctggagaga

SEQ ID NO: 46793 - DNA, 293 bp, Oryza sativa
tttttgagacacccagatatgcagagggacgagaggcttgaatgagatgctttttaccccacttactcctttccgccgatagaacggcctgaatcttaatatatcttcagtcagcaggagaattatagtgtaacctactaataattactttgagctgtctaacgctgtttaggtttatcgtctagataaattgctgggctcataactgcgctggtacccgttgacatgtgttttttttcaagtgatcgaaccttgtgtctctgtcattgtttgtactcaaaaaatcagccttt

SEQ ID NO: 46794 - DNA, 283 bp, Oryza sativa
  unsure (1)..(283): unsure at all n locations
catttccccgagcaaatgactctgtacgtttaaacactctgtccgactagtcatagcccccaagcatcngagtcgacctaggcatttcccaaacatgcatatgagtgatatgagttcgtcattaatggaacatagtttcacggattagaatttactactcaggtacttttgcaattattaagagcagaagataaatttatctcatctctatgcttttgatttattccgaataatacttagcaccttgcgttactcggtccatccaacgagcccccaggtgcta

SEQ ID NO: 46795 - DNA, 391 bp, Oryza sativa
  unsure (1)..(391): unsure at all n locations
agagcccaagttcataaaaacggattcaaaagcattgagttatgacccttttatgaagtgttgtcagtctgttagtggggagcggaagttccggtccaagtactctattcgacattggaaggctgacttgaagttccgatccttcttctagactgagcagttacttcgtacatgaagttcagatcttttcgaccggaagtaccgagtattcgaatctgtgagtaatggctagtttttaggaattcgggtatttaaacctctccacccccactatctgtggctgttgactctaggcaagattaggttcattcaaaaccaaagattcacttccctaatcccctaccctgtggtatatctttgtgagtgagatattggaagagatntggagaga

SEQ ID NO: 46796 - DNA, 333 bp, Oryza sativa
  unsure (1)..(333): unsure at all n locations
ctgctgcaatacactttctgtttgtctcgtntggggaggtgttaagggatttgcctgaatgatgattggctctgacacccacaagacttatttagatgtgtccgctctgggcattatacttctgcaacttgttacagcacatgaaccagaggatttgagaaagaatgtgctcagccaactatgagatattatacgatttcaaggaaagagcatggagcagcaacatgaggtcctaataagcattgtggatcctgacctgaagaaatgccagttagatgacgccgcagagatgctgttcctgggattgaaatgcagtgatccacatgagaaaca

SEQ ID NO: 46797 - DNA, 449 bp, Oryza sativa
  unsure (1)..(449): unsure at all n locations
atattntcatcagaaaaacatgtaaacttgttttattcttaacaaattgaaaacaactcgttgtacagtaatacaaattactgttaactcatcgaatcatgaactttagtgttattgcataaaaacttgcactcacagtacaaatgtagcctctaaaattggtctaagataaatcatacataaagcatatacaaacttataaaatgcatacaaaattcatttcaactcattttagagcaaacttagtttctacagatctaccaacatgttctctaaaaacaaagtaaaataaaacatatacatactttacatcaaatgcctctaaaaattatctttaaaataactaggtttgcataagctgaactttagaangttatataaaaatcatcttatatcctttttgagtaaactcaacgtctgtagatcatagagttgtcacttcaatgtat

SEQ ID NO: 46798 - DNA, 387 bp, Oryza sativa
taagataccaatgcgagttcatactcctggaggtggcattatcacaactcaccactgcccatctgtgatagttgaaattcaagggttgatttttccagccaacctcattcttctcgaatccaaggatctagatgttattctgggaatggattggctgacaaggcacagaggagtgattgattgcgctagccgcactatcaagttgaccaatgcgaaaggagaagttgtaaccttccaatctctagtgtcgcagaagccagggatcagtttaaaccagactgctggtgaagaacaagaggtagcagtggagaaaaccactaagaagttggaggatattcccatagtcagagagtatccaaagggttttccggatgatcccacaacaat

SEQ ID NO: 46799 - DNA, 267 bp, Oryza sativa
aactttccatcgcgccaagtggaggtctggttccaaaacagaagagctaggtaacaaacaaccataccatatactactaatctccctttaatttgctgtgttctccaatatctcaaccaaattaagaatgatgctagctatagctagctattctccaaactatatcatgattcatgaatcaatcatctcaacatatatgtatatatcattctcaggacgaagctgaagcagacggatgtggactgcgagcatctgaagcgctgctgc

SEQ ID NO: 46800 - DNA, 470 bp, Oryza sativa
  unsure (1)..(470): unsure at all n locations
tggcatctccactggtgtctttgttgctcctatcaatattcatacacatactgatgacttcttcatgctctcgagttcggcactaccaccggcatcattaccgatagtcttttcacggctgccactgacgtgttcggcggcatcaccggtgttaacgccatcatgaccgacaaggttggatggatgggtgggcggagtttacatcgagacgacgtcaccgacaatggcgcgtggaccgacaaggccgcgaacactgtcggcgcccacttacaccctcaccacatccgcaccttgcatgggagaacatgaagctaatatcgatgacgacgactagcacagcttaatcggaggtgtctcgcgggttcaacccgtgagagtaactaactcggtggtttccgagaccccgaanactaggaccacataatcggcaagtcagatacaccttgcctatatgctatggagcgcatttg

SEQ ID NO: 46801 - DNA, 385 bp, Oryza sativa
  unsure (1)..(385): unsure at all n locations
accacgatatcaagctgtgcagcactcttcttgatctccttgcgcttcttcgntgagacattgtgagcgatctcagcacagcatgccctggttgtatgaaatgtgcaataacaagaattaatcctaaccattaacaaggtttgtaagagtggacagcataccatagaactttagaatattcacttctcaacttcagtcactaaatagaatccgcagcatgtgttacctgttgtgcatcataagtaactccagctcatagacattgtggacgacaaacttcttgaatttgttgggaaggtaatgcctcggtttctttgtcaaaccatagccaatattaggcatcaaagtgcatctcttgaaccttcttctgacactggagtcgata

SEQ ID NO: 46802 - DNA, 406 bp, Oryza sativa
  unsure (1)..(406): unsure at all n locations
ggcattactntggtcgtatgtctatcggtgagatctaatatgtaattaaaccatttaatttccgttatgtaagaaagatcgatcataacagtaatgctactgtgacatctatatgatacgctaatgcatgatgcagaatcagcacaaataatcctgctacattcataggatcgatccaggatgaattaatacagagtttcagcggcagcttcttgtcactactcatgcccgatcaaaaggtcaattgattgccaatatgaaatggtacggtacccactgcacaataatttgtagggttaagatcacagcaattatggcatatagatgatacatcgtctatatgcgcctggagtcttgtgatgggacgactgatgcatgcgttgatatagacacgcggatattcact

SEQ ID NO: 46803 - DNA, 484 bp, Oryza sativa
ttcgtgaactctcaatactaagcttgtatgataattgcctcgtatgttatccaccattgtccagaggaataataatactgactatgacctacatacatttacatcggttgaagatagaacaaagagtgtgctgcaaagagcctttttctcattgggtgcttgcatcaatgcttttgtgcattgtcgacctgttctatgcatagatggaacttttatgacaggtaaataccgaggtcagatattgacagcaattgggtgtgatgggaacaaccaggttctacctatggcttttgcatttgtagagagtgagaacactgaaagctggtactggttcctagagagagtgcacattgcagtggtgcgtatgatgcccaacgtttgccttatacatgatcgtcatgcgggtatgttgcgggctattgactacttgtagaaccgttgtgatgagaacggacttccagctaagtggcctgatgttcggagt

SEQ ID NO: 46804 - DNA, 455 bp, Oryza sativa
agctgatacttacttcactgagccttatgtatttttctgaaacaaactacctataccattaaggtagtaattttccaatgtatcattattttctatgttaatcacgcgcaaagactgaaagtccgaaataggtggcatatgattagtccacccataaacagttagtgaacgggtacatgaaacaaccctctttgaaggaattgtattaccttcttgatgatgaaagttaaaggacagccgacgaaccttatcttgtatgccgcacacacgattatggtaaccaataaatgttatgaaattttcttcaatcgacttagacacaataagatcaagaaccatatcatgtatgcggcaagtgtagctcgatcatcataattgatttcaccacttgttcaagctcctgctattagctcgtaaaatagtttcaccactttcttaaactgatacatttcgga

SEQ ID NO: 46805 - DNA, 193 bp, Oryza sativa
  unsure (1)..(193): unsure at all n locations
ttcctgtgtgggatgaacttttaaatttgcggaagcttctnncgtgagacatagacgtgaagcatcgcaaggttgattcatacttctagagtctgctgaagtgtgctcacaacagaatagatttatttgcaacttataggaaacacatttctctatgtacaactccctgcagaaaacactaattgggatccta

SEQ ID NO: 46806 - DNA, 405 bp, Oryza sativa
  unsure (1)..(405): unsure at all n locations
tcttatcattaatatcacccattgtatatgcatcagcacccatcgtccacgcttgctggattacctcaggtagtgatgactctctctcccatacttcttcatatctcataatcttcattggtcttgccaatgttgtttcctctctttcgagaagcaaaggtgcatgatctgaacttggagtagttaaatgtgtaatgacagcctgcggaaagcgcgagctccaggcaggaaaagctactcctcgatcaagcctcactttaacattgcggccctcccttngcatattacaaaatgtccatggggcaccctggaaacctatatcatgaagatcgcattccgataagacctctctaaagtctctcatctgtgattcagatcttttcctgtgagaattatgctcagtct

SEQ ID NO: 46807 - DNA, 243 bp, Oryza sativa
  unsure (1)..(243): unsure at all n locations
aaaggggaactgggtgaatagctgtcttcctggaacncntnacgcaagaagcatgaattgaggagaaaagtgctgcggtaaaaaactgacgtaagccttcgggggaaagggggaggttggatttatactcctccgccctcgcgaccgttgagtgccacaccgatggatgtgcgatgtgtggtatgcattccttgaaccaacggctatctgcgcgaaatagcccgtgggccgcacaataaaagg

SEQ ID NO: 46808 - DNA, 303 bp, Oryza sativa
ttcctctgagtgtgagtatatcagaatggcatcgatgaaaaccacaacaaacttgtccaagtatttcatgaacactttgttcattaagttcatgaagaaagcaggagcattggtcaagccgaacgacatcaccgtgaattcatacagtccatatcgcgtggtgaatgcggtcttcggaatatcttcttcacgaatacgtcattggtgatatcccgaacgaagatcaatcttggagaatacggtggcacctttaagctgatcgaacagatcatcgatcccgggaagagggtacttcgttttgat

SEQ ID NO: 46809 - DNA, 441 bp, Oryza sativa
  unsure (1)..(441): unsure at all n locations
actctgttgtgtctccttggctgctgtgttttttacttatatttanacgtcgttgactttctaccaatcatttgttttatntaaaaaaatatacattattatcatttattctatcgtgacttgatttatcattaaatattttttaagcatgacatatatgtttttatatttatacaaaagttttgaataagatgaatggtcgaaggtggataaaaaaaatcaatggtgtcatccgttgaaatgcgtacggagtactacacaaagtcagccacttgtcgtcgtgttggcgtagaacacgccatgcttcccagaatatacagcaacgtgccaacgtgtggaccgcatcagctgatcagcatagtgcagcagaatcagatacggtgttccatcgatcacccgatgctatagtcaacagaggagtagtactacactactacatgc

SEQ ID NO: 46810 - DNA, 291 bp, Oryza sativa
  unsure (1)..(291): unsure at all n locations
tacataggaagaacaaaaggtgaagagttagttaagtccctgatatcaacataactccaaaaatggacaatgatgctaattatgcaaaatataaaaatcatcaaaggtgtaatttctttcaaaagagattattaactgtccctgcatctacaagatactatagagcttaattaattaagtctaagggtgtaataatatggaatatgcatttcagcgcanaagaatcttaatgctaactatttcatattntaatactaaaaatataaaactgataatatatttcggatgata

SEQ ID NO: 46811 - DNA, 442 bp, Oryza sativa
aagctttcgcatctattttctttttggatcgcaacattcaaatgtgctatctgctaagttatgtcttgatacaaatgttgcagcttgatgattgtgatgacagctatgcaaaattactgacaagttcatcagactttacattaaaatcatacaatatcctacggctcctgcacatgttattccatctttagttccgaaggtaaattccttcttaaacacagtcaaatcttacaagcaatatccttgccatgaatattaccgttaatatcatggtttccatttccacaatgatccacagatgaaaaaaaaagagcatctcatatacatgttgacattctatttgtttgtaaatgatcttttgctctattcaagggataaaatatcattcataaaagtacatattggccttcatatatgacatttcttaatcctaaatcatctg

SEQ ID NO: 46812 - DNA, 443 bp, Oryza sativa
  unsure (1)..(443): unsure at all n locations
gtgctccttcaacagatcacctacgaaatgcagttataatgggtaacttntatatcgacaatggagagcgcgtagcaaacaccacaatcagtaagaacataatataagtctcgatgcctcccacgtctaatgttaaagaaacaacaaatctatgcatccttggactatcagttcctacctctagttagcagcaagcccatgttgggtcatgaagggcatttttcatgtccctactattgaaggaacaacaagtctatacatccttgaactatcagttgttcctcagcccctagttagctatatgagtttcagactcagtttcagcaacaatccagcaattaatgtaggactagtggttcccagtctcccagatcctagcaatgactggtgtcaacatattgtgctttgttcactagtaaaattacatttgctgacactggtag

SEQ ID NO: 46813 - DNA, 399 bp, Oryza sativa
ggcaatctaccctcaccgaatgtatatcatgtgttatctacaacaaacaacacatataacgtgaagccgatggttacaagtaactatactcagagttccaaaagtggaggttatatgagacacttatcaaaagctgaataaatgtgtcttatttcttatggcgctaactatttcagaatttgttgttctctaaatgggccttgttcatttgtgaatagtaagagtctacataggttggtggtggacaattattaaatggtgaaattttgaatcagcaacagatggtggcataataatactaatcatatttgaaatgtattcattgcatcatagaggaaaaataattacccctataggacatgaatatacaacagttgtacggtttaaagataaacccaa

SEQ ID NO: 46814 - DNA, 264 bp, Oryza sativa
ttcagggcacgttcctacccgacagagagaaggacgagctgctctcgccctacagactcccgagcatgcaggacgaacacgatggaaaggcgtgattccctgtaagatgggattcaaggaggacatccacacgtataagagtccgatgatgagcaagaaagatacccacgcgaagattgcagatattgagtacagcgtattcgagctaccagctcaccatgcaagaggaggtggccccgaaggtggatgaatgcatgacagcac

SEQ ID NO: 46815 - DNA, 460 bp, Oryza sativa
  unsure (1)..(460): unsure at all n locations
acactatanaacactcacgcgtacctcacattggtagtactggcaccatgtatcttatgtcttctatggaagaagcgntggaggaattgcgactgtcggagcattcaatgacttcaatcccacagtcacagccttttggtccaaaataccgtcctgactgcaatgctaacaaaaatttggacgagcataagagtggtcaaaatgaatcgaagtatttgtacttctatggtttcttatcagcaatatttcttgcagaggtaacatttattgtattcggatggtttattttgcgaagggagggcacactagcaagaggaatatctgaggttggctatgaaatggtaacaaaccatttncgtaagtacacctacagagagctgatgatagccaccatatagattcacgatgagattggacgacgagcatcacgcattgtttaccatgggatcttaaaggacat

SEQ ID NO: 46816 - DNA, 374 bp, Oryza sativa
atcaagagctcagtaacaaactttctgacagtctaatctgaacttgagcacattgaatgaaaatatgttagtccatgaagaagctaattaattaaatggaaggggacgtaaatttcgagtacgaacattgcaggtatcaatttcggttttgattttttttttttgcagaaaggaccagtaccaaaaataccatttgtaatttatagtctaacaattctttacccatcaaaataattctccagaatttctgttgaatttggtaaatgttcaccatcacactcctagaaaaagcattttcccatgcaggggaaatgcgtcatcctatgcagatggtggctccgcctgcacaccaacgccgatcttcgcagtcgggt

SEQ ID NO: 46817 - DNA, 460 bp, Oryza sativa
  unsure (1)..(460): unsure at all n locations
agctngcggtggaagggaagggtgcgggtgtacctccggggaaatggaatgggccaccgcacgggcagacgcggcctatttattctcggcctgtctactttgcctgaggcccacgaaaacgtggcctgcttggtttgcttgcggcccacgagaagatggcccgttgtcttccccgcgctgcggcggcctccgcgaattcatcacactactccacgccctaattcgccgccgccgcttactcacctcctcgcctgtcgcctctcggtgcgagttctactcaccggcgccggcgacggcgacgaccctggttggcggttgaatcgtcgtcctcggcgtgtgatggtggtggccatggcgacgaaggaggaggagggtgggctctgctaccccgtgcctaccttctgggatgcgaagccctcgaatcaattcttttcggtggccgtcgacaccttccgtttat

SEQ ID NO: 46818 - DNA, 491 bp, Oryza sativa
  unsure (1)..(491): unsure at all n locations
tgcgtttcttgccaccagccatcccttgggatatgactctgtctcaaagtctggtggtgggagcaacatttcagcagaactgcgcttgccgttgattggttccaaaggctcaaacagcgccttcctcttctcagataagttagcttttggatctggatgaacatcgtcgtcagtacttactgcatttgcatcatctattntcatggcctcttcatgagcctgattgttcagttgttcatcagcagcctctttgttaagttcttgttgcaagctccggccattggctggaacatacatattgttagtcagattcaagagtcagtgcacttctctagctaaaatctaatgcatacaggtgaacattataactaccatgatatatggaagttctttaatttcagagtgtggtctgctatcatgacagcctgataacttgntagcatacatcagcttcagaccacgaacggctctcaatgattatatgcatatga

SEQ ID NO: 46819 - DNA, 459 bp, Oryza sativa
  unsure (1)..(459): unsure at all n locations
agctnttccacatatacgaaaagcaatgtcttttcttcaaaatagacatagcaaaagccttcgacacagtaaattggccatatcttttggaggttctcaagcaatatggatttggaaatcgttggctaaattggatttccaaccttttcgcctcatcttcgtcccaggtgctgctaaacggctccccaggccgacaaatcattcacactagaggactccggcagggcgacccgctaccccgatgctttttattctagctatggaaccttttcatcaaattattagagctgcggaatctgccaacgccctaaccccgcttggtataaggaatggccgcttcagatgttctctttatgcggatgacgttgctttgntcgcaattccaaccttggacgacacgacggccctttctcagattgtgaccctctttgcgaanatctctggcctacacacaaatgt

SEQ ID NO: 46820 - DNA, 415 bp, Oryza sativa
  unsure (1)..(415): unsure at all n locations
ntggtgagtggtggcgcatgccgggttgcttgggctcgtgtatgctctccaacagaatatggagggctgggcttccccgatctcgagaggatgggacttgccgagggttcgacacaattgcgacactggtagcgtggacaatctggaaggaaagaaacaactggatcttcaaccagaagagcagatcttggatggagatagctagggctatgacggcgggaagcggacctttggcggatggctagatcagccataccgaccatggtagtcccttacatgggtcgccaaatccttcggaagattaggcttttgtttttctttccccctactgtaccctgtcccacttacttttattatttccgcccgctctatacatacatatattcctcttaatacanaaatgcacgtctcgcgt

SEQ ID NO: 46821 - DNA, 478 bp, Oryza sativa
  unsure (1)..(478): unsure at all n locations
agcttgatcggcaacgccggcgacggcggacggtggagactccggcaaanaaaaaagttagatgataaaagggctttacggcccatcaacatctcactggatgcacgttccagcccactaagaaagacagataaaagggctttacggcccatttgtcatccctggatgcacgttccagcccattaagaaacacagggaaagggcatgatagtaagttgttattacggcccacgtcatctcgctggcggtattttacggccattaaaaaaagcatcacagagaatcatcccatttaaaggcatcaaggaagtttgttctgattttgcatatcttctgcattgatagggaatcagttttcgtgtctatccaattattgttggngcatcaaaaccgtcaccttgcaattggtagttttgtacctttgcttatctgcgattaaggtggtgttcggatccagggacttaactntagtctctat

SEQ ID NO: 46822 - DNA, 427 bp, Oryza sativa
gacctataaaactcaagctggaaatccaggagatgcctagtgtgcaagccgcattgcgctgcctcccgtcgctaattcggccgcgctgtgcaaccgctaaccccgctgcactgcactgtgctgtctcctgcctccttccactaacctcaccgtcaaaaccctagccgatttatggatattttgggggatttgggttgaaatgcactgatcagggcaagttatgtgcgaaggtatatatagagggggctgagtacaaaagtgttgcctacgtggcatgccacattggctgtcaaatatggtcaaaggataattggtctggggatggtacattaaaccaaattcacggatctaaacagtgtaattttaaattcacggacctaaatgacaccacccataagtttaagaaccggccatgtatttcactctt

SEQ ID NO: 46823 - DNA, 467 bp, Oryza sativa
  unsure (1)..(467): unsure at all n locations
agcttgtgctaggcgcccgcaacactgcgcgcagtatgccgaggaggccgtgtaacgtccgttgcttgtgaacttccaatcaatctggtttgattctttgtcatccaggtgtacaccccgaaccacttcccacaaggctactaggtggtcaatgaggttgactatgataggtgggtttgcttcaagggtcaaatcttgtacccaagcgtcgttgtcctttccttggggactttccttcctttttagagatcgcatagactagcgacatgaggtctttcggtctgcgcccatcaattcatgtggagtcctagaaacgcactatgtttccatcactgacagtgttgtacgttgttaatctgtatcatcgtaggttgttaatttgatagtcagtcgtgataaacctgctgttcttttcagatcaatntgtagtgtcaatcctttattacatcacagattcctaagctaca

SEQ ID NO: 46824 - DNA, 106 bp, Oryza sativa
caccaaaacatttcaccgaactacacccgtacgacaaaaccaaccacccaccaaccaaacaccggccaaaaagccaaaaacagccccagcaggggaaaaaaagcga

SEQ ID NO: 46825 - DNA, 467 bp, Oryza sativa
  unsure (1)..(467): unsure at all n locations
agctntgttctgatatatgtttataccactactttgtatcaatacatttgtttaatgaatgagagaaagaccttntagacaaagagaaaaaaatccctgcaaatacataagtggcattattgttaataactttattcaagccgaattgttcccatctttttattgcaaacatcttttagtgcaaattataatcatccttgtttccccctgtatttgtttgcttctatttctggcacgtggcttatgccttgatcacttatgcttctagagagttgctagtgcccagggaagttcatcaacatcagaatcctctgacactgctgagtctcctgaagatgggaaaaggccgctccaaaagggtacatgagctacctttctttttcatcttggtttttaactacttatcaaaaggaagtggtgtgctctacgcccncacttcaccagatcttttgtggaccgatctatgt

SEQ ID NO: 46826 - DNA, 392 bp, Oryza sativa
  unsure (1)..(392): unsure at all n locations
cctgatgcatgcaagcttagagcctttagtgcgctgttcagtgttgggcttccaccgattcaagataaggccattcaaattcttgcaagtttatgtcaggaccaaccttctctacttggtgagcatttgaacagaagacaaggatgcattgcttcccttgctagtagagttattgaatcaacaaacatggaaataagaattggcagtgccatcaccctcatatctgcaatgagacacagcagggaacactcaattgatgttattgaagcatcagggcatctgaagaatctaatatctgcatccattgatatgatgaagcaagattctgccccaacatccctagatattgaagtttggaaaccataccccgaaaacagnttgataactatgat

SEQ ID NO: 46827 - DNA, 347 bp, Oryza sativa
atgttggtgcaatgatcgcagccggtattgttctattttctaccgccgaagaaaggcgcagaaggatatggctgaagctagagtacagcttcaacgttgggacttctgagtcctctcatactgacggagtactactttccccaaatattgcgaaaccattactgtgaggcacgccattgcgggatcatgtgattgcatcttcatgcatgatggctctggcttgtttagttggatcggctgaaatagctttgttctacggtcagacagttgtattcttaggcggtaggatatctgtacctctagccgctaacagggtaatctagttgcttcccttggtgcattgatgc

SEQ ID NO: 46828 - DNA, 475 bp, Oryza sativa
  unsure (1)..(475): unsure at all n locations
agcttatacgatgaactggtacgtgctgttgccctggtaactagtaaatggcggcatcttttttgtgaacttgttgaactgtactttttttaatgtattccacaatacaaaatgggaagcactgagacatgcttggcttggttttcgcccattctttctgttacatgtagaacaagtggataccaataagtacatattttaaatataggaaaatgggaatgaatttaatctatatgaagttggttggagctttcctttgggatgtgcaggagcaggaagcatatgcgattttaaaaatgtaggaaaagtgagaattaaattgaaatcagggaaatcaatgagtatatgcattttgaacctttttttgtcatcatatctagtcattntcaggcattcaatatccatctggtttggaggctctactgtcatctttncacatgcaaaagtggctagcgccatggactacacaatgtgg

SEQ ID NO: 46829 - DNA, 423 bp, Oryza sativa
  unsure (1)..(423): unsure at all n locations
tctcccgcggctgcggcagtggcatcggcactcctgttgtcagatctagctaaggtggcggcggtagcgtttccgaaaggcagatctagtggtcctctacaacatccccctccgccccaagcttcttcagcggcggatccgacattcctagggtggcggcttctcgcgcagatccagcagcggtggcgacgttggcggctcccgcgggcagatctggcggaggggacattggcgacagtgggtggatctatgggtgcttatgttatttgtgtgtttgtgttggtgtgtttatgtgatgatgatgttgctgatgtgattgattctangggtacatttggggccgaagcgnggggaactcgcactcgatgcattggcttgattccgagccaatgcatcgagccgacccttttttcttttgcatct

SEQ ID NO: 46830 - DNA, 377 bp, Oryza sativa
ttatttggtgcgctagatgcagaacagcacttgtatttcaagaggatggctttcttgtttcatgctcatcgtctttgtcctcaaaattttacttgacatatctttggagacatggaccatcagcagatatccttccaggaaaagattttttggcatcaccacccttgaagataaaagtgatggtgtgcaatgtatcttcagtgaacaagatgatgcttggcaacttgagcaatgaaggttctgctcataattctagtttttggtctgaaaaggatggatgtgtgtacaagccagtaacttgtcagacttgctcttgcaaaaacgcctgtgtcacaacccttcgagcacaagttggtgcaactgattcgtcaaatcaa

SEQ ID NO: 46831 - DNA, 462 bp, Oryza sativa
  unsure (1)..(462): unsure at all n locations
tgcggcatgcaagctagaaatatgagacatataaagcaggtttttccttttcacaaaantcacgcaattttatatgtaactaactcagaatattaaatagattcacaatcacaaaacatcaaaagtaaacaagctataaatagcaggaatatctccagacatatatcacggaaatgaataataaaaactaagtaattttgtagcacttgtctgctattccagatgagaatggaactctatcagtggctatatacttaagaaagcagatgatatctcttcagtacaaggttggcagctagtctttttttaatgtagctctaactgtatttctctctatcttcttttttacaaaaaaatggaagggaatcacatcgttaaacaatttactctngaacagactacacagntccagcatcattatcagaaattccgagtcctgccttatctactttgatcaatact

SEQ ID NO: 46832 - DNA, 469 bp, Oryza sativa
  unsure (1)..(469): unsure at all n locations
actcaactgaactcaggtcgtggcgcttcgcagttctatatatgctttctaacgcgcggnggcgataattgggacaagaaaactatcaaatgagtgttcagcacaagaaaccttatgtggcttcatcaatcttcaactgtaagaggtgctactatctgatagaaggtcaagaatacatgaatcacgttcaacgcatcattggctcattgcattgttgaaatttcacgaaaccggcgatcattgactaacgtttgtgtcaaattgcatgcatcaatcaaatcgcctcatccattctggcagctcaaaggaagctttagagatatcgtcgtccgatcttcttgactctgcttttccaaaaggacacatgatatgatttgcaccaagataatggatggataggaatgagagggtgagatatccgaagatacggtgtggctttatagcatattctactgcacacacagggatc

SEQ ID NO: 46833 - DNA, 485 bp, Oryza sativa
  unsure (1)..(485): unsure at all n locations
gatccttaagcaccgcngctgcagcttggtgtcaagatgtaaaattgtataatatatgtcctatcaaaattaagggagataatactattatcattatccatagggaaaaggatggccctagtacgcgatcgctcgctggagggagggttaagcgataaaaaaaaactatcagcacccgcgtccctccccgcacacgtctnctctttctaccacactatcaattttaaaccatttaaaaaatataaaaagaaatctaatacacttgaaaaatatattcatgtgaataaactctatacttacaaattcgaattctaatttgaaccgggtatataaacttctaacctataaactttgggtatacaaactttagatgtgtaaacctgatgaaatttcatacatataaactttatgtatagaaatattctatataacaaaatatttgaatccacattagattgaacaggctatgctaaactttaacttat

SEQ ID NO: 46834 - DNA, 420 bp, Oryza sativa
  unsure (1)..(420): unsure at all n locations
tntctatactagcaaggcaagcatgcaggcactgtgccttcgatagtatgatgtttatctttatcccttttagcatttctaactttgagtctacatagttcatccgtaacaaatctattacgtgtaactcaagcttaagtccctggattatgataatattaaggggagagaaacttgtaattaagcagctgtatctggcacattctgctggcgatgcaaactggcttctggtgtggtgatggctacggctagacaggccagtgaagcagctgcagcctgcacattcctaatntcctactaattcctaagacaaacgagccttaattattcctagaattggtctaaatcgcaagtagccggcacgcaaagtccaagccatgtgtccatgtagccttgagggcttgaaccaaacaccaagag

SEQ ID NO: 46835 - DNA, 442 bp, Oryza sativa
  unsure (1)..(442): unsure at all n locations
agctntagcaccggttggtgacaacaacttatactaaagtgttaatctttaataccaataccggttggtaaaaccaaccggtactaaaaataatatttagtgccggttggtagtggatctgagaaatacggagtatgtgtttttaggtaccatgacgaaagatcagttctacagttattggtgaaacgggaattggggtaccctttcccgggaacttaacacatattccttgttaactaaaataacaaaccatatttaaaccaccattaagttaagtgcacgttaacgatagcgggcatgggacccactttcgagacaggccccgacgccctcgcctcatgaaggaagcccgagagctcaagttgacttgggacagggggctcccatcttaagattacaagtaggaagggaccaggagcccaacttggcctangatcctgag

SEQ ID NO: 46836 - DNA, 364 bp, Oryza sativa
  unsure (1)..(364): unsure at all n locations
cgngccccgcatcactcccgcaccggtacacccatcaccgccggcctcctgccgcgctccggccgatgctagtcgtcgctagccaccgcgccgagactcaccgtcgacgccgtcgcgttcaacatcccgagagccgtcgcgtgcgccatccgtccggtcaaatacaccgtacgggcccgcttctccccgcgcgccggtgagtaccaccattgccaccgccttctgccatggtttatgtccgccgtagaccacccatctacctctaatccttcccactttgttccctacgaagacccggagatnatacgtccattgacatctgactctcgacgctcgtcggagcagttattgccgcttcactctc

SEQ ID NO: 46837 - DNA, 421 bp, Oryza sativa
  unsure (1)..(421): unsure at all n locations
agcttgcgttggctcttggctaactatgtttacctgattattaaagntatattctgctttgtcctaatgtttgtagccaaaactagagctgatcaagtgaatcagtattcagactctttaccattcattnttcttaagttgagtttgcagctggagcaggaacatgacttatgtgaaccaacatccgatggttttggccagagcttggtgcttatttcagcataccaaatgaaaataaatatccaatgaactgcaaatatgaacttattatatttagagtagttccattgtgcaatgcaaagatcactgtctatcaagcacatatgaaagctatatacagcgtaatataattttactacccatggttcattatactaaaaaaaatgtcatganaatataatggcactcattgaccatgcta

SEQ ID NO: 46838 - DNA, 400 bp, Oryza sativa
  unsure (1)..(400): unsure at all n locations
tgctttatcggaaaaaagtgactactgaagcaaatagtgtttattntgtaagtctccttgcagccagaaggctcccattttctgcttgccataataccttgcaaaggcacttgcaaaatgcctgcattcactcctcattggacatgcattgcaattcggcttgcttttggtacaaaacacctgcatttgttatgataatttatctttactcaaacaaaagagaacaaatgcgtcggtagatgctaatgaagagaccaaactccttaatgctaatgaagtacctttccaaaagtaatcatctgataatgtaactcatacctgtgaaaaccatgaaactctgntaataattccttatagttataaattatggtatttactccttattggcctaattattcat

SEQ ID NO: 46839 - DNA, 254 bp, Oryza sativa
tgcagttgcgccatgtctaagggactactggcacatgaattctctttatctctctcaccctctccctacatcccgaagacttggatagagtggttttgcgtcggtggtcagggtccggtatgcgcataatctcggctgtgttcctttgttgacctttcgcggtcggcacgcttagctgcggtggcccagcgatgacttatcttgattttgtgtgatgctatcggtgcgtgggtgggacgtactatgttaccttt

SEQ ID NO: 46840 - DNA, 485 bp, Oryza sativa
  unsure (1)..(485): unsure at all n locations
tccaatattggcatgaactaaacacacccgtatacgtcttatataaattggctcttttcgngtatgcaattagtccaaatntacgcaccctctcatatcactnttgtctgttgaccgctaactctcaaataaaaaagatgtatttgctcttatgagtatacgacatgcctaacaactcagaatggcaaatacgtctttttacctttggagttaacggtcaacaaacgaaagtggcatgagacatgggaagagccagtttttcctggcatataaggattcttttttttttaatggagggtgcatgacgaaagcaatntggcatacaagcagaagaatactcgtaaaagacatctgatataaaaggttctctctctgtaccataatataagggattttgagtctttgcttacaatcgttgaccactcgtcctatntaanatattttgaaatattatctatattatntgtgacttactntattatcta

SEQ ID NO: 46841 - DNA, 465 bp, Oryza sativa
  unsure (1)..(465): unsure at all n locations
agctggtgcggtaagggcagagtatgctgttgttcacaatgctggcacaggggccttcttcttgagatttggtgagagattctagtctaggtgatgtgttccagctagctccagtcaccggaaaggtcataagatttctcttcaggattcatactacaatgccaatatcacacaaggtagtcccagagtgagcattcttctttgtatgatacagtcacttatactaggtgaaaccccgcacattgctgcgggaatttagtataataacaataaaaaaaatatgtaatatagctagataacatcagattaagtaaattaatgtggtttataataatttaaatagtatgtagaatggtgattcaaacgtaaaaagtaaggtggcacgactntatggaggaagaaaagtagggagataacttggaccatagattaatcatctaaaggctaaaagcaattgatgtgata

SEQ ID NO: 46842 - DNA, 404 bp, Oryza sativa
  unsure (1)..(404): unsure at all n locations
ntaagaaacgggaagagactagtaattgagaatatactatagcatgcactaaacagcacaaatctggaggggaatggatgtctgcagttggatagggtcgtcgcaataatgaaaatagtgacaaaaattcctctaatcatatcgatcgatggatgatgctggatcactgccacgtctgcactgcacgcccacatgcgtgtgtacacctccgcaccacacaactctgactnttcgtctctcttctcttccttaatttcttcctagagtatacgtatgtctagatcatgcatgtatacatatatacgtagtagaagatcgctgtacacgctatcacgctgacgctggtgagtcagatcgcgatgtatacacgtgctcatatgagtattangcgtggactatggatg

SEQ ID NO: 46843 - DNA, 474 bp, Oryza sativa
  unsure (1)..(474): unsure at all n locations
agcttccacccgcagcgatgtcgacttccgccagtccgttctcagcgccatcagccgagtatgcagaggtacgtgtccatcggctagatcttcttctttatgcaatagattggtttctccttgtctcatcttgttttcttcttctctatttttatccgaagcatctttccaatctggttgcgattcctagcctatcacatgagcatcagattggccaacccaaatctaggtcactggaaagatactttcaagtcttggccttcgcttgagaaaagttctcctgagaaaagttagcccgtatggtacaagcgtgtgttggctagcaagcaaggtcactgggatgaactcggaatcagccaagcccttgctcttactntagcaaattcagctaaggacgaacccctgatggcttctgcaacatatttctggtccaacaccctcaatgcctttctattaatcaagggccgatgaccc

SEQ ID NO: 46844 - DNA, 494 bp, Oryza sativa
  unsure (1)..(494): unsure at all n locations
cttttgcttaacgcatcagtggttntagcttgcgcacaaacattatccttcaatgagagctggttagaacagttaccgctggtgttacctccttgataatatgggcatggntggttccacccctcacctccttgtggacgatacctgttgttgttgttgccaatgtacatcgcctcctcacgggtttccgggcagtcattcccagaatgacccgtgttgccgtagacctcacatgtgatgtgagagtccaaggccttgacggtgccttgtggtcgtttcttgtggtcgtccaatcgcttcatgagaaggttcagcttggcagcaagtaactccgtctccttattggtgtgcatgcctcgctgacgggtctggagtcgttcctcacttcaacccatattggagaccatcttctctattaaatcagcggctccttgaaccgtttagagaagaagcccctcactgccgcgtcaagtgatcgtggacatccagtgagt

SEQ ID NO: 46845 - DNA, 447 bp, Oryza sativa
agctttgtttaagggctccaacaatagcatcctcattcccatccaaggacataataggcctagaaatactcggtagtgcagactctatctgcaatatataatagcaatatgtaacagaccaaatatgaaaaaaaaaagagtgtaggattgaataacatcattgaaattcataatgaagcatatcaagaaagacaagttgaagaaaaaaaaaacaagaacactatctagtataatgtatttttaactctcaccggtcttctgtcaagaatagatatcaatggatagctctccttcaaacctcgctcaatctgagaatcactatcaccagctgtcttaagattagaagcaaacagattcaatcggtcttgaatgttttttgttagggtgctagattgaggtctagtccaacgactcccgaattgcgtccgaaactgagcatcttcattc

SEQ ID NO: 46846 - DNA, 448 bp, Oryza sativa
  unsure (1)..(448): unsure at all n locations
gggaacanatgtaaaagcacaatgaaatgttaacaagtataatctgcagttataaaagtaatatatggatctctggtgtaggtatggccaaataaattacctgcacaagctcctcatcaaaagacaggtacttaggtttatctgcttttgagtagactcggatttcagccccagtccgtcttctcatttcagtaattacctttccaccttccccaagaatacaaccaactttgtttgatggtacaacaagccgtgttgtcaactggtggttctcagcaagtgtacttgctttactatggagcaaaataagcgcctcaattgttggagacactggatcatctggaatctggaaagaatatgtaggaggatataaaattgtaaagactcgtgataaaaatggcaaggcaatgccaattggaataatcatctgcatattacctnctgagat
